United States Patent Application Publication US 2018/0126003 A1 - sequence listing, part 109

SEQ ID NO: 193358 - DNA, 846 bp, Artificial Sequence
  derived and/or modified sequence
atgagcgaggaaactgttcctgaagccgctagcccccctccaccccaaggacaaccctatttcgaccggttcagcgaggacgaccctgaatatatgaggctcagaaaccgtgcagcggacttgagacaagattttaatttgatggagcagaagaaacgggttacaatgattctccagtccccatcctttagggaagagctggagggcctcattcaagagcaaatgaaaaaaggcaataacagttcgaacatctgggccctacgacagatcgctgactttatggcctcaacatcccatgcagtgttccctaccagcagtatgaacgtgtctatgatgacacccattaatgatctgcacaccgcagactccctgaacctggccaaaggagagcgtctgatgaggtgcaagatatcctccgtgtatcggttgttagacctgtatggttgggcacaactttctgacacatacgtgactctgagagtgtctaaggagcaggaccattttctaatctctcctaaaggcgtgagctgtagtgaggtgacagctagctcgctggtgagtgaggtgctcgagatgcgcaacaagatccgcgaacaaaacaggcaggatgtgaagagcgcaggccctcaatctcagctgttggctagcgtgatcgccgagaagtcccgcagcccaagtaccgagtcccagctcatgtcaaaaggcgacgaagacacaaaagatgattccgaggagaccgtgccgaacccattcagccagctgaccgaccaagagttggaggagtataaaaaggaggtggaacggaaaaagcttgaactggacgcccctgggtggttctcaagctag

SEQ ID NO: 193359 - DNA, 297 bp, Artificial Sequence
  derived and/or modified sequence
atgagcgaggagaccgtgcccgaggccgccagccccccccccccccagggccagccctacttcgacagattcagcgaggacgaccccgagtacatgagactgagaaacagagccgccgacctgagacaggacttcaacctgatggagcagaagaagagagtgaccatgatcctgcagagccccagcttcagagaggagctggagggcctgatccaggagcagatgaagaaggagtacaagaaggaggtggagagaaagaagctggagctggacgcccccggctggttcagcagctag

SEQ ID NO: 193360 - DNA, 1680 bp, Artificial Sequence
  derived and/or modified sequence
atgagcgaggagaccgtgcccgaggccgccagccccccccccccccagggccagccctacttcgacagattcagcgaggacgaccccgagtacatgagactgagaaacagagccgccgacctgagacaggacttcaacctgatggagcagaagaagagagtgaccatgatcctgcagagccccagcttcagagaggagctggagggcctgatccaggagcagatgaagaagggcaacaacagcagcaacatctgggccctgagacagatcgccgacttcatggccagcaccagccacgccgtgttccccaccagcagcatgaacgtgagcatgatgacccccatcaacgacctgcacaccgccgacagcctgaacctggccaagggcgagagactgatgagatgcaagatcagcagcgtgtacagactgctggacctgtacggctgggcccagctgagcgacacctacgtgaccctgagagtgagcaaggagcaggaccacttcctgatcagccccaagggcgtgagctgcagcgaggtgaccgccagcagcctgatcaaggtgaacatcctgggcgaggtggtggagaagggcagcagctgcttccccgtggacaccaccggcttctgcctgcacagcgccatctacgccgccagacccgacgtgagatgcatcatccacctgcacacccccgccaccgccgccgtgagcgccatgaagtggggcctgctgcccgtgagccacaacgccctgctggtgggcgacatggcctactacgacttcaacggcgagatggagcaggaggccgacagaatcaacctgcagaagtgcctgggccccacctgcaagatcctggtgctgagaaaccacggcgtggtggccctgggcgacaccgtggaggaggccttctacaagatcttccacctgcaggccgcctgcgagatccaggtgagcgccctgagcagcgccggcggcgtggagaacctgatcctgctggagcaggagaagcacagaccccacgaggtgggcagcgtgcagtgggccggcagcaccttcggccccatgcagaagagcagactgggcgagcacgagttcgaggccctgatgagaatgctggacaacctgggctacagaaccggctacacctacagacaccccttcgtgcaggagaagaccaagcacaagagcgaggtggagatccccgccaccgtgaccgccttcgtgttcgaggaggacggcgcccccgtgcccgccctgagacagcacgcccagaagcagcagaaggagaagaccagatggctgaacacccccaacacctacctgagagtgaacgtggccgacgaggtgcagagaagcatgggcagccccagacccaagaccacctggatgaaggccgacgaggtggagaagagcagcagcggcatgcccatcagaatcgagaaccccaaccagttcgtgcccctgtacaccgacccccaggaggtgctggagatgagaaacaagatcagagagcagaacagacaggacgtgaagagcgccggcccccagagccagctgctggccagcgtgatcgccgagaagagcagaagccccgtggagcagagactgcccctgaccggcggcgagacctgcctgcccagcggcagcagcgtgcccggcgccggcctgcaggacccctag

SEQ ID NO: 193361 - DNA, 681 bp, Artificial Sequence
  derived and/or modified sequence
atgagcgaggagaccgtgcccgaggccgccagccccccccccccccagggccagccctacttcgacagattcagcgaggacgaccccgagtacatgagactgagaaacagagccgccgacctgagacaggacttcaacctgatggagcagaagaagagagtgaccatgatcctgcagagccccagcttcagagaggagctggagggcctgatccaggagcagatgaagaagggcaacaacagcagcaacatctgggccctgagacagatcgccgacttcatggccagcaccagccacgccgtgttccccaccagcagcatgaacgtgagcatgatgacccccatcaacgacctgcacaccgccgacagcctgaacctggccaagggcgagagactgatgagatgcaagatcagcagcgtgtacagactgctggacctgtacggctgggcccagctgagcgacacctacgtgaccctgagagtgagcaaggagcaggaccacttcctgatcagccccaagggcgtgagctgcagcgaggtgaccgccagcagcctgatcaaggtgaacatcctgggcgaggtggtggagaagggcagcagctgcttccccgtggacaccaccggcttctgcctgcacagcgccatctacgccgccagacccgacgtgagatgcatcatctag

SEQ ID NO: 193362 - DNA, 432 bp, Artificial Sequence
  derived and/or modified sequence
atgagcgaggagaccgtgcccgaggccgccagccccccccccccccagggccagccctacttcgacagattcagcgaggacgaccccgagtacatgagactgagaaacagagccgccgacctgagacaggacttcaacctgatggagcagaagaagagagtgaccatgatcctgcagagccccagcttcagagaggagctggagggcctgatccaggagcagatgaagaagggcaacaacagcagcaacatctgggccctgagacagatcgccgacttcatggccagcaccagccacgccgtgttccccaccagcagcatgaacgtgagcatgatgacccccatcaacgacctgcacaccgccgacagcctgaacctggccaagggcgagagactgatgagatgcaagatcagcagcgtgtacagactgtag

SEQ ID NO: 193363 - DNA, 846 bp, Artificial Sequence
  derived and/or modified sequence
atgagcgaggagaccgtgcccgaggccgccagccccccccccccccagggccagccctacttcgacagattcagcgaggacgaccccgagtacatgagactgagaaacagagccgccgacctgagacaggacttcaacctgatggagcagaagaagagagtgaccatgatcctgcagagccccagcttcagagaggagctggagggcctgatccaggagcagatgaagaagggcaacaacagcagcaacatctgggccctgagacagatcgccgacttcatggccagcaccagccacgccgtgttccccaccagcagcatgaacgtgagcatgatgacccccatcaacgacctgcacaccgccgacagcctgaacctggccaagggcgagagactgatgagatgcaagatcagcagcgtgtacagactgctggacctgtacggctgggcccagctgagcgacacctacgtgaccctgagagtgagcaaggagcaggaccacttcctgatcagccccaagggcgtgagctgcagcgaggtgaccgccagcagcctggtgagcgaggtgctggagatgagaaacaagatcagagagcagaacagacaggacgtgaagagcgccggcccccagagccagctgctggccagcgtgatcgccgagaagagcagaagccccagcaccgagagccagctgatgagcaagggcgacgaggacaccaaggacgacagcgaggagaccgtgcccaaccccttcagccagctgaccgaccaggagctggaggagtacaagaaggaggtggagagaaagaagctggagctggacgcccccggctggttcagcagctag

SEQ ID NO: 193364 - protein, 17 aa, Artificial Sequence
  derived and/or modified sequence
MSEETVPEAASPPPPQG

SEQ ID NO: 193365 - protein, 643 aa, Artificial Sequence
  derived and/or modified sequence
MSEETVPEAASPPPPQGQPYFDRFSEDDPEYMRLRNRAADLRQDFNLMEQKKRVTMILQSPSFREELEGLIQEQMKKGNNSSNIWALRQIADFMASTSHAVFPTSSMNVSMMTPINDLHTADSLNLAKGERLMRCKISSVYRLLDLYGWAQLSDTYVTLRVSKEQDHFLISPKGVSCSEVTASSLIKVNILGEVVEKGSSCFPVDTTGFCLHSAIYAARPDVRCIIHLHTPATAAVSAMKWGLLPVSHNALLVGDMAYYDFNGEMEQEADRINLQKCLGPTCKILVLRNHGVVALGDTVEEAFYKIFHLQAACEIQVSALSSAGGVENLILLEQEKHRPHEVGSVQWAGSTFGPMQKSRLGEHEFEALMRMLDNLGYRTGYTYRHPFVQEKTKHKSEVEIPATVTAFVFEEDGAPVPALRQHAQKQQKEKTRWLNTPNTYLRVNVADEVQRSMGSPRPKTTWMKADEVEKSSSGMPIRIENPNQFVPLYTDPQEVLEMRNKIREQNRQDVKSAGPQSQLLASVIAEKSRSPSTESQLMSKGDEDTKDDSEETVPNPFSQLTDQELEEYKKEVERKKLELDETGQEREPGSGPAVCEFFSVALHIWSNILERKKLPQKSLAHLQSLHLLLQCRAQRRRQRQRAL

SEQ ID NO: 193366 - DNA, 1764 bp, Artificial Sequence
  derived and/or modified sequence
atgagtgaggagactgtgcctgaagccgcttcgcccccccccccacaaggtcagccctacttcgacaggttttcagaggacgacccagaatacatgaggcttaggaatagggcggctgatctccggcaagattttaatctgatggaacagaagaagagagtcacaatgatcctgcaatccccgtcatttcgcgaggagcttgaggggttgattcaggagcagatgaaaaagggcaacaacagtagtaacatttgggcccttagacaaattgcggacttcatggcttctacctcccatgcagtcttccccacctcttcaatgaatgtctccatgatgactccaatcaatgatctgcacaccgctgattctcttaacctggccaaaggcgagcgcttgatgaggtgtaaaatctcgtctgtgtatagacttcttgacctctacggctgggcccagctgagcgatacatacgtgacgctccgtgtttcgaaggagcaggaccacttcttgatttcccccaaaggagtgagctgctcagaagtcacagcctccagtctgattaaggttaacatcctaggagaagtcgtggaaaaaggatcgagctgttttccagtcgacaccacaggcttttgcctgcattctgccatctacgctgctcgcccggacgtaaggtgtattatccacctgcataccccagcaacagcggcagtgtcagctatgaagtggggcctactgcctgtgtcccacaacgcacttctcgtgggtgacatggcttactacgattttaacggcgagatggaacaggaggcagacagaatcaacctccagaaatgcctgggtccaacctgcaaaatactggtgttgagaaatcatggagtcgttgccctcggggacacagtagaggaggccttttacaagatttttcatctgcaggcagcatgtgagattcaggtttccgccctgtcttcagcagggggggtcgaaaatttgatcctcttagagcaggaaaagcaccggccacacgaagtgggctctgtgcagtgggccggctccacttttggcccaatgcagaagagccgtcttggcgagcacgagtttgaggctttgatgagaatgcttgacaatctgggctaccgaaccggctatacctataggcatccgtttgttcaggaaaaaacaaagcacaaatcagaggtggagatccccgcaaccgtcacagctttcgtatttgaggaagacggagctcccgtccctgccctaagacagcatgcgcagaagcaacagaaggagaagaccaggtggctcaataccccaaacacttacctgagggttaatgtggccgacgaggtgcagagatctatgggcagtccccgaccaaagacaacctggatgaaagccgacgaagtggagaagagcagctccggcatgccaattaggatcgaaaatcccaaccagtttgtgcctctgtacactgacccgcaggaggtgcttgagatgcggaacaagatccgggagcagaatcgccaagacgtgaaatcagccggaccacaatcccaattgttggctagcgtcattgcagaaaaaagcaggagcccatctaccgagtcccaactgatgagtaagggcgatgaagacacaaaagacgactcagaggaaactgttcccaatccctttagtcagctcacagatcaggagctggaggaatataagaaagaggtagaaagaaaaaaactcgagttggacgcaccaggctggttctctagttag

SEQ ID NO: 193367 - DNA, 1932 bp, Artificial Sequence
  derived and/or modified sequence
atgtctgaagagacagtgcccgaggccgcttctccacctccgccacaagggcagccatactttgatagattcagcgaggatgaccctgaatacatgagactgcgtaatcgagcagccgatttgcgccaggactttaaccttatggagcaaaaaaagagagtgacaatgatcctgcagtcaccctctttccgggaagagttagaaggtcttattcaggagcagatgaagaagggcaataacagttctaacatatgggctctgcggcagatagcggacttcatggcaagtacatcccacgcggtatttccaactagttccatgaacgtatcaatgatgactcccattaacgatcttcacacagcggattccctcaacctcgccaagggagagaggttgatgagatgtaagattagcagcgtctacagactcctcgatttgtacgggtgggcacagctatcagacacctacgtgactctaagagtttcaaaagaacaggaccattttttgatcagccctaaaggggtatcttgtagtgaggtcacagcatcgtcgctaattaaggtgaacatcctgggagaggttgtcgaaaagggatcctcttgctttcctgtagacaccacgggcttctgcctccactccgccatatacgcagctaggcctgatgttagatgcatcatacatctacacaccccagcaactgccgcagtaagcgccatgaaatggggtcttcttccagtttctcataatgcattgctcgtcggggacatggcatactacgactttaatggcgagatggagcaggaggccgataggatcaatctccaaaagtgtctgggacccacttgtaagattctggtactgagaaaccacggcgtcgtggctctgggggataccgtagaggaggcattctataagatctttcacctacaagctgcatgtgaaatccaggtttccgcgctgtccagtgccgggggggtggaaaacctgatcctcctggaacaggagaagcacagaccacacgaagtggggtcagtccagtgggccggcagtacattcggacctatgcagaagagccgcctgggagagcacgaatttgaagctttaatgcgcatgctggacaatttgggttaccgcactgggtacacctacagacatccttttgtgcaagaaaagacgaaacataagagtgaagtggagatcccagccactgttacggcgtttgtgttcgaggaagatggcgctcctgtacctgcgctgcgtcaacacgctcagaagcagcaaaaagaaaagacgcgctggctgaacacccccaacacttatctgagggtcaacgttgccgatgaagtccaacggtctatgggaagcccacggcccaaaacgacctggatgaaggccgacgaagttgagaaaagcagctcaggtatgccaataaggattgaaaatcccaaccagttcgtgccattatacacagaccctcaggaggtgctggagatgcggaataaaattcgcgagcagaatcgccaagatgtaaagtccgcaggaccacaatcccagctgctggcttccgttattgccgagaaatcccgaagtccatcaacagagtctcagctgatgtcaaagggagatgaggacacgaaggatgactcagaggagaccgttcctaacccgttctctcagctcaccgatcaagagcttgaggagtacaaaaaagaggtggagcggaagaagctcgagctggatgagacaggccaggaaagagagccaggatccggcccagctgtatgtgagttcttcagcgtcgctctgcatatttggtccaatatcttggaaagaaagaagctcccccagaaatctctggcccacttacagtccttacatcttttactgcagtgtcgggcgcagcggaggaggcagagacagagagcattgtag

SEQ ID NO: 193368 - DNA, 2226 bp, Artificial Sequence
  derived and/or modified sequence
atttcctcccagcctcgtgcgggaaatggctttaattctgacggcagggctgtgagggactagcgggaacccgagccttttgtcaaggaactgcggcgtcggtggccagtcatccccgccgccgcggagccgctgcactgctgggggatctcccagcagctctgacgagcgcgggctgcagcatgggcagaaaacgctgccctgcagattagctgggtggattttttaagcgcaccccaccccccaaacccataaaataacaaaaccaacccgcagtggccgaccggagatagctaagatgccgcgcaggagtttccacctggatgtttgaggttgtgtagatgtggccggcacccttgagagtggagctagggggtgcagactgagcagtgaacagaaggagccttggacagggctgggccagcctcccgagttccaggagcgaattgcaaacccaccgggaaaatgagcgaagagacggtccccgaggctgcctcgccgccgcccccgcaggggcagccttactttgaccgcttctcagaggacgaccccgagtacatgcgccttcgcaaccgggcggcggacctgcggcaggacttcaacctgatggagcagaagaagcgcgtcaccatgatcctgcagagtccctctttcagggaggagctggaaggcctcatccaggagcagatgaagaaggggaacaactcctccaacatctgggccctgcgacagatcgcggacttcatggccagcacctcccacgcagtcttcccgacatcttccatgaatgtctccatgatgacgcctatcaatgacctccacacagctgactccctgaacctggccaaaggggagcggctcatgcggtgcaagatcagcagtgtctaccgactcctggacctctatggctgggcccagctgagtgacacctatgtcacgttgagagtcagcaaggagcaggaccacttcctgatcagccctaagggagtttcttgcagtgaagtcacagcgtccagcctgatcaaggtgaacattctgggagaggtggtggagaagggcagcagctgcttcccagtggacaccacaggcttctgtctgcactcggccatctatgcagcgaggcccgacgtgcgctgcatcatccacctgcacacaccggccacagcagcggtgtcggccatgaagtggggcctcctgcctgtctcccacaatgccctgctggtgggggacatggcctattatgacttcaatggggaaatggagcaggaagccgatcggatcaacctgcagaagtgccttggacccacctgcaagatcctggtgctaagaaaccatggagtggttgctctgggtgacacggtagaggaggcattttacaagatcttccacctgcaggctgcatgtgagatacaggtgtcggctctgtccagtgccgggggagtggagaacctcatcctcctggagcaggagaagcaccggccccatgaggtgggctccgtgcagtgggccgggagcacctttgggcctatgcagaagagtcggctgggggagcatgagtttgaggccctcatgaggatgctggacaacctgggctacagaacaggttacacgtatcgccacccctttgttcaagagaaaaccaaacacaaaagtgaggtggagattccagccacggtcacagccttcgtgtttgaggaggacggtgccccggtgcccgccctgcgacagcatgcccagaagcagcagaaggagaagacccgctggctcaatacgcccaacacctacctgcgggtcaatgtggccgatgaggtccagaggagcatgggcagcccccgacccaagaccacgtggatgaaggctgacgaggtggagaaatccagcagtggcatgccgattcgcatcgaaaacccaaaccaatttgtgcctctctatactgacccccaggaagtactggagatgaggaacaagattcgagaacaaaaccgacaagatgtgaagtcagcggggcctcagtcccagctcctggcgagcgtcattgccgagaagagccgaagcccgtctacagagagccagctgatgtccaagggagacgaggataccaaagacgattcagaggagacggtgcccaaccccttcagccaactcactgaccaggagttggaggagtacaagaaagaggtggagaggaagaaactagaacttgatgctcctggctggttctcttca

SEQ ID NO: 193369 - DNA, 2654 bp, Artificial Sequence
  derived and/or modified sequence
gggaaatggctttaattctgacggcagggctgtgagggactagcgggaacccgagccttttgtcaaggaactgcggcgtcggtggccagtcatccccgccgccgcggagccgctgcactgctgggggatctcccagcagctctgacgagcgcgggctgcagcatgggcagaaaacgctgccctgcagattagctgggtggattttttaagcgcaccccaccccccaaacccataaaataacaaaaccaacccgcagtggccgaccggagatagctaagatgccgcgcaggagtttccacctggatgtttgaggttgtgtagatgtggccggcacccttgagagtggagctagggggtgcagactgagcagtgaacagaaggagccttggacagggctgggccagcctcccgagttccaggagcgaattgcaaacccaccgggaaaatgagcgaagagacggtccccgaggctgcctcgccgccgcccccgcaggggcagccttactttgaccgcttctcagaggacgaccccgagtacatgcgccttcgcaaccgggcggcggacctgcggcaggacttcaacctgatggagcagaagaagcgcgtcaccatgatcctgcagagtccctctttcagggaggagctggaaggcctcatccaggagcagatgaagaaggggaacaactcctccaacatctgggccctgcgacagatcgcggacttcatggccagcacctcccacgcagtcttcccgacatcttccatgaatgtctccatgatgacgcctatcaatgacctccacacagctgactccctgaacctggccaaaggggagcggctcatgcggtgcaagatcagcagtgtctaccgactcctggacctctatggctgggcccagctgagtgacacctatgtcacgttgagagtcagcaaggagcaggaccacttcctgatcagccctaagggagtttcttgcagtgaagtcacagcgtccagcctgatcaaggtgaacattctgggagaggtggtggagaagggcagcagctgcttcccagtggacaccacaggcttctgtctgcactcggccatctatgcagcgaggcccgacgtgcgctgcatcatccacctgcacacaccggccacagcagcggtgtcggccatgaagtggggcctcctgcctgtctcccacaatgccctgctggtgggggacatggcctattatgacttcaatggggaaatggagcaggaagccgatcggatcaacctgcagaagtgccttggacccacctgcaagatcctggtgctaagaaaccatggagtggttgctctgggtgacacggtagaggaggcattttacaagatcttccacctgcaggctgcatgtgagatacaggtgtcggctctgtccagtgccgggggagtggagaacctcatcctcctggagcaggagaagcaccggccccatgaggtgggctccgtgcagtgggccgggagcacctttgggcctatgcagaagagtcggctgggggagcatgagtttgaggccctcatgaggatgctggacaacctgggctacagaacaggttacacgtatcgccacccctttgttcaagagaaaaccaaacacaaaagtgaggtggagattccagccacggtcacagccttcgtgtttgaggaggacggtgccccggtgcccgccctgcgacagcatgcccagaagcagcagaaggagaagacccgctggctcaatacgcccaacacctacctgcgggtcaatgtggccgatgaggtccagaggagcatgggcagcccccgacccaagaccacgtggatgaaggctgacgaggtggagaaatccagcagtggcatgccgattcgcatcgaaaacccaaaccaatttgtgcctctctatactgacccccaggaagtactggagatgaggaacaagattcgagaacaaaaccgacaagatgtgaagtcagcggggcctcagtcccagctcctggcgagcgtcattgccgagaagagccgaagcccgtctacagagagccagctgatgtccaagggagacgaggataccaaagacgattcagaggagacggtgcccaaccccttcagccaactcactgaccaggagttggaggagtacaagaaagaggtggagaggaagaaactagaacttgatgagacaggacaggaacgagagccaggctctggtccggccgtgtgcgagttcttcagcgttgccctccacatctggagtaacatattggagagaaagaaactgccccagaagagcctggctcacctgcaaagtctgcacctgcttctccagtgcagagcccagcgaaggaggcagagacaaagagccctttagtctctccttccaagtctttagaggaaggtactaagaagacagaaacaagcaaagccgccaccacagagcccgaaacaacccagccggaaggggtggtggtcaacgggagggaggaggagcagacggcagaggaaatcctcagcaaaggcctgagccagatgaccaccagtgctgacacggatgttgatacctctaaggacaaaaccgagtcggtcaccagcggccccatgtccccagagggctcaccttccaagtctccctcaaagaagaaaaagaa

SEQ ID NO: 193370 - DNA, 1764 bp, Artificial Sequence
  derived and/or modified sequence
atgtctgaggagaccgtgcctgaggccgccagccccccaccaccccagggccagccctactttgaccgcttctctgaagatgatcctgagtacatgaggctgaggaacagagctgctgacctgcggcaggacttcaacctgatggagcagaagaagagggtgaccatgatcctgcagagccccagcttccgggaggagctggagggcctcatccaggagcagatgaagaagggcaacaacagcagcaacatctgggccctgcggcagattgctgacttcatggccagcaccagccatgctgtgttccccaccagctccatgaatgtgtccatgatgacccccatcaatgacctgcacacagctgacagcctgaacctggccaagggggagcggctgatgcgctgcaagatcagctctgtgtaccgcctgctggacctgtatggctgggcccagctgagtgacacctacgtgaccctgcgggtgtccaaggagcaggaccacttcctgatcagccccaagggcgtgtcctgcagcgaggtgacagccagcagcctcatcaaggtgaacatcctgggggaggtggtggagaagggcagcagctgcttccctgtggacaccaccggcttctgcctgcacagcgccatctatgctgcccggccagatgtgcgctgcatcatccacctgcacaccccagccacagctgctgtgtctgccatgaagtggggcctgctgcctgtgagccacaatgccctgctggtgggggacatggcctactatgacttcaacggggagatggagcaggaggccgaccgcatcaacctgcagaagtgcctgggccccacctgcaagatcctggtgctgaggaaccacggcgtggtggccctgggggacacagtggaggaggccttctacaagatcttccacctgcaggccgcctgtgagatccaggtgtctgccctgagcagcgctggaggagtggagaacctgatcctgctggagcaggagaagcaccggccccatgaggtgggctctgtgcagtgggccggcagcaccttcggccccatgcagaagagccggctgggggagcatgaatttgaggccctgatgaggatgctggacaacctgggctacagaacaggctacacctaccgccacccctttgtgcaggagaagaccaagcacaagtctgaggtggagatcccagccaccgtgacagcctttgtgtttgaagaagatggagcccctgtgcctgccctgcggcagcacgcccagaagcagcagaaggagaagacccgctggctgaacacccccaacacctacctgcgggtgaatgtggctgatgaggtgcagaggtccatgggcagcccccggcccaagaccacctggatgaaggcagatgaggtggagaagagcagcagcggcatgcccatcagaattgagaaccccaaccagtttgtgcccctgtacacagacccccaggaggtgctggagatgaggaacaagatccgggagcagaaccggcaggatgtgaagtctgctggcccccagagccagctgctggcctctgtgattgctgagaagagccgcagccccagcacagagagccagctgatgagcaaaggagatgaggacaccaaggatgattctgaggagaccgtgcccaaccccttcagccagctgacagaccaggagctggaggagtacaagaaggaggtggagaggaagaagctggagctggatgcccctggctggttcagcagctag

SEQ ID NO: 193371 - DNA, 1932 bp, Artificial Sequence
  derived and/or modified sequence
atgtctgaggagaccgtgcctgaggccgccagccccccaccaccccagggccagccctactttgaccgcttctctgaagatgatcctgagtacatgaggctgaggaacagagctgctgacctgcggcaggacttcaacctgatggagcagaagaagagggtgaccatgatcctgcagagccccagcttccgggaggagctggagggcctcatccaggagcagatgaagaagggcaacaacagcagcaacatctgggccctgcggcagattgctgacttcatggccagcaccagccatgctgtgttccccaccagctccatgaatgtgtccatgatgacccccatcaatgacctgcacacagctgacagcctgaacctggccaagggggagcggctgatgcgctgcaagatcagctctgtgtaccgcctgctggacctgtatggctgggcccagctgagtgacacctacgtgaccctgcgggtgtccaaggagcaggaccacttcctgatcagccccaagggcgtgtcctgcagcgaggtgacagccagcagcctcatcaaggtgaacatcctgggggaggtggtggagaagggcagcagctgcttccctgtggacaccaccggcttctgcctgcacagcgccatctatgctgcccggccagatgtgcgctgcatcatccacctgcacaccccagccacagctgctgtgtctgccatgaagtggggcctgctgcctgtgagccacaatgccctgctggtgggggacatggcctactatgacttcaacggggagatggagcaggaggccgaccgcatcaacctgcagaagtgcctgggccccacctgcaagatcctggtgctgaggaaccacggcgtggtggccctgggggacacagtggaggaggccttctacaagatcttccacctgcaggccgcctgtgagatccaggtgtctgccctgagcagcgctggaggagtggagaacctgatcctgctggagcaggagaagcaccggccccatgaggtgggctctgtgcagtgggccggcagcaccttcggccccatgcagaagagccggctgggggagcatgaatttgaggccctgatgaggatgctggacaacctgggctacagaacaggctacacctaccgccacccctttgtgcaggagaagaccaagcacaagtctgaggtggagatcccagccaccgtgacagcctttgtgtttgaagaagatggagcccctgtgcctgccctgcggcagcacgcccagaagcagcagaaggagaagacccgctggctgaacacccccaacacctacctgcgggtgaatgtggctgatgaggtgcagaggtccatgggcagcccccggcccaagaccacctggatgaaggcagatgaggtggagaagagcagcagcggcatgcccatcagaattgagaaccccaaccagtttgtgcccctgtacacagacccccaggaggtgctggagatgaggaacaagatccgggagcagaaccggcaggatgtgaagtctgctggcccccagagccagctgctggcctctgtgattgctgagaagagccgcagccccagcacagagagccagctgatgagcaaaggagatgaggacaccaaggatgattctgaggagaccgtgcccaaccccttcagccagctgacagaccaggagctggaggagtacaagaaggaggtggagaggaagaagctggagctggatgagaccggccaggagcgggagcccggcagcggccctgctgtgtgtgagttcttctctgtggccctgcacatctggagcaacatcctggagaggaagaagctgccccagaagagcctggcccacctgcagagcctgcacctgctgctgcagtgccgggcccagaggcggcggcagaggcagagggccctgtag

SEQ ID NO: 193372 - DNA, 1764 bp, Artificial Sequence
  derived and/or modified sequence
atgagcgaggagaccgtgcccgaggccgccagccccccccccccccagggccagccttattttgaccgattctccgaggacgaccccgaatatatgcgcctgaggaatagagctgcggatttgaggcaggacttcaacctcatggaacaaaaaaaacgagtcacgatgatcttacagagcccctccttccgggaggaattggagggcctgatacaggaacagatgaaaaaggggaacaacagctcaaacatttgggccctgcggcagatcgctgacttcatggcatcaacgtcccacgccgtcttccctacatccagcatgaacgtatctatgatgacgccgatcaatgatctgcacacagctgatagcctcaatctggcaaagggagagcggctgatgcggtgcaagatcagtagcgtctacagattgctcgacctttacggatgggcccagttgtcggacacctacgttaccctgagagtaagcaaggaacaggatcactttttaattagtcccaaaggggtgtcctgcagcgaagtcactgcctcttctctgataaaggtaaatatcctaggagaagtggtcgagaaaggaagctcatgttttcccgtagacacaaccggattttgtctacatagcgccatatatgcagccaggcccgacgttcggtgcattattcacctacacaccccagccacagccgctgtttctgccatgaagtggggactattacccgtgtcccataacgccctgttagttggtgatatggcgtattatgacttcaatggcgagatggaacaagaagccgaccgcattaatctacaaaagtgcttggggcctacctgcaagatcctggtgctgcgcaaccacggagtggtggctctgggcgacactgtggaggaagcgttttacaagatttttcacttgcaagccgcatgcgagattcaagttagtgcacttagctccgcaggtggagtggaaaatctgatactgctggagcaggaaaagcacagaccgcatgaagtcggctccgtacagtgggctggctcaacatttggcccgatgcaaaaaagtagactgggcgagcatgagtttgaggcgctcatgcgaatgcttgacaatctgggataccggaccgggtatacatatagacatccctttgtccaagaaaagacaaagcacaaatctgaagtagagattccagcgacagtaacggcttttgtgtttgaagaagacggcgctcctgtccccgccctgcgtcagcacgcacagaagcagcagaaagagaaaacccgttggctgaacaccccaaatacttacctcagggttaacgtggccgatgaggttcagaggtctatgggtagtccacgccccaaaaccacatggatgaaagcagacgaggtggagaaaagttcttcggggatgccaatcagaattgaaaaccctaatcagtttgtccccctctacactgaccctcaggaggtccttgagatgaggaataagatacgcgagcagaacagacaggacgtcaaatccgcaggtccccagtcccagcttctggccagcgtgatcgcagaaaaatctcgatccccgtcaacagagagccagcttatgtcaaaaggcgacgaagacacaaaggatgactccgaggaaacagtccccaatccattttcccaattaacagaccaggagcttgaggaatacaagaaagaagtggagcgcaagaaattggaactggacgccccaggatggttcagcagctag

SEQ ID NO: 193373 - DNA, 1932 bp, Artificial Sequence
  derived and/or modified sequence
atgagcgaggagaccgtgcccgaggccgccagccccccccccccccaggggcaaccttattttgatcgcttttccgaggatgacccggaatatatgcgactacggaaccgggctgcggatctgaggcaggacttcaacctcatggagcagaaaaaaagggttactatgatcttgcagagcccaagctttcgggaagagcttgagggattgattcaggagcagatgaagaaaggaaacaattcatcaaacatctgggccttacgacagattgcggactttatggcttctaccagccatgcagtttttcccacaagcagcatgaacgtgtcaatgatgacccctataaacgacctgcacactgcggactctttaaatctggcaaagggggaaagactaatgcgatgtaagataagctccgtctatcggcttttagacctttacgggtgggcccagctgtccgacacctatgtgacacttagggtgtccaaagagcaggaccattttctcatttctcctaagggggtctcctgcagtgaggtcacggcctccagtcttattaaagtgaatattctgggggaagtagtagagaagggctcgtcctgttttccggtggataccaccgggttttgcctccactccgccatctacgcagcaagaccagatgtaagatgtatcatccacctccacacacctgcaactgcagccgtctcggccatgaagtggggtctcttgcccgtttctcacaacgccttgcttgttggggacatggcttactatgactttaacggagagatggagcaggaagcggataggattaatttgcagaagtgcctcgggcccacctgtaaaatcctggtgcttcggaaccacggagtggtcgccctcggcgacactgttgaagaagccttttacaagatctttcatcttcaagccgcctgtgagattcaagtgtcagccctgagctcggctggaggagtggaaaacctaatcctgcttgagcaggaaaagcaccggcctcatgaagtggggtccgtccagtgggcaggcagcacgttcggccccatgcagaaaagcagattgggtgagcatgagttcgaggctctgatgaggatgttggataacctgggttaccggactggttatacataccgacatccgttcgtgcaggagaagaccaagcacaaaagcgaagtcgaaatccctgcaacagtgacggcctttgttttcgaggaggatggagcccccgtgcccgcgttgcgacagcacgcacagaaacagcagaaggagaaaacccgatggttgaatacacctaatacatatctgcgtgtcaatgtagctgatgaggtgcaaagatctatgggttcccccaggcctaagaccacttggatgaaggccgatgaagttgagaaatcttcttcagggatgcctatccgaattgagaatcctaaccagttcgtgccactctataccgaccctcaggaagttttggagatgcgaaataagatccgggagcagaatcgccaggacgtcaaatcggctggaccacagtctcaactgttagcttccgtgattgctgaaaagagccgatcaccatcaactgaatcacagttgatgtccaagggggatgaggataccaaagacgattccgaggaaacagtgcctaatcctttctctcagctgaccgaccaggagttggaggagtataaaaaggaggtggaacgcaagaagcttgaattggatgagacaggccaggaacgggagccagggtccggccctgccgtgtgcgaattcttttccgtcgcactgcacatttggagtaacatcctggagagaaagaaactgcctcaaaagagcctggcgcatctacagtcccttcacctgctcctgcagtgtcgtgcccagcggaggcggcagcgccaaagggccctgtag

SEQ ID NO: 193374 - DNA, 1764 bp, Artificial Sequence
  derived and/or modified sequence
atgtccgaggaaactgtccccgaagccgcttccccgcctcccccacagggccaaccttacttcgaccgtttctcagaggatgaccccgaatatatgcgacttcgtaatagggcagccgatctccgccaagattttaatctcatggaacagaagaagcgggtgacgatgattctgcagagcccctcatttagggaagaactggaaggcctcatccaggagcaaatgaaaaaaggaaataactcaagcaatatatgggcgttaagacagattgctgactttatggcctccaccagtcacgccgtgttcccaacatcttcgatgaatgtgtccatgatgacaccgattaatgacctgcatacagccgactccttaaatctggcaaaaggagagagattaatgagatgtaaaatctcttctgtgtaccgacttctggatctctatggctgggctcaactctccgatacgtacgtcacgctcagggtgagcaaagagcaggatcatttccttatatcccctaaaggcgtttcatgctccgaggtgacggcgagtagtctaataaaagtaaatattctgggtgaggtggtagagaaaggatcctcctgcttcccagttgatacaacaggattctgcctccacagcgccatttacgctgcccgacccgacgtcaggtgcattatccatctacacacaccagccacagccgcagtgagcgctatgaagtgggggctactcccagtgagccacaatgccctgttggtcggagatatggcctactatgattttaacggtgaaatggagcaagaagctgatcgaattaacctccagaagtgtctgggaccaacctgcaaaatcctggtcttgcgcaatcacggagtggtggccctgggcgacacagtggaggaagccttttacaaaatcttccatcttcaggccgcatgtgagatccaggtgtctgccctgagctcagcaggaggagtcgaaaacttgatcctgctggaacaggagaagcacagaccacatgaggtcggatccgtgcagtgggctggatctaccttcggcccaatgcaaaagagtcgattgggtgagcatgagtttgaagcattaatgcggatgctggacaaccttggctatcggaccggctacacatatcggcatccattcgttcaggaaaagaccaagcacaaatcagaggtcgaaatccccgctacagtcaccgcgttcgtgttcgaggaggatggagccccagtgcccgctttgcgacaacatgcccagaagcagcagaaagaaaagaccagatggttgaatactccaaatacataccttcgggtgaatgtggctgacgaggtccagagaagcatgggttcccctagacccaagacgacatggatgaaagccgacgaagtggaaaaatcctctagtggcatgcccatcaggatcgagaaccccaatcagtttgtacccctctatacggatcctcaggaagtgctggagatgcggaacaaaatccgtgaacagaatcgccaggatgtgaagtcagctgggcctcagtctcagctactggcctctgtgatcgcggaaaaatccagaagtccctccaccgagagccagcttatgtccaagggcgacgaggatacaaaggatgacagtgaggagactgtccccaatcccttctcacagctgaccgatcaggagcttgaggaatacaaaaaggaagtagagcgcaagaagcttgagctggatgcacccggatggttttcttcctag

SEQ ID NO: 193375 - DNA, 1932 bp, Artificial Sequence
  derived and/or modified sequence
atgagtgaggagaccgtgcctgaggccgcatctccaccccctcctcagggtcaaccatacttcgaccgctttagcgaggatgacccggaatacatgaggctgcgtaatcgcgcagcggaccttcggcaggactttaacctgatggaacagaagaagagggttactatgatcctgcagtccccctccttcagggaggaactggaaggacttatccaggaacagatgaagaaagggaacaacagctcaaacatttgggctcttagacagatcgcagactttatggctagcacttcccatgccgttttccctacatcctcgatgaacgtttcaatgatgaccccaatcaacgacctgcacacggcagatagcttaaatctggccaaaggggagaggcttatgcgctgtaagatctcttccgtataccgtcttctggacctctacgggtgggcccagctatccgatacttatgtcacactcagagtgagcaaagagcaagatcactttcttatctcccctaagggcgttagctgttctgaagtaaccgccagctcattaatcaaggtgaatatcctgggagaagtggtggaaaaaggcagttcctgctttccagtggacacaaccggattttgccttcactccgccatctacgccgcacgtccagacgtacggtgtatcattcacttgcacacaccggctacggcagcagtgagcgccatgaagtggggcctacttccggtatcccacaatgcccttttggtcggcgatatggcgtactacgacttcaacggtgaaatggagcaggaggctgaccgaattaacttacagaagtgtttgggccctacctgcaagatcctcgtgttgcgaaaccacggagtggtggccttaggtgatacagtcgaggaggccttctacaagatttttcacctgcaagctgcctgcgagattcaggttagcgccctttcctcagccggtggcgtggaaaatctcatcctgctggagcaggagaaacatcggccacacgaggtcggctctgtccagtgggccggatccacttttggtcctatgcagaagagcagattgggcgagcacgaattcgaggcgcttatgcgtatgctcgacaacctagggtaccgcacaggatacacctatagacaccctttcgtccaggagaaaaccaagcacaaatccgaggttgaaatcccagcaacagtgactgctttcgtgtttgaagaggatggtgctcccgtgcccgcactcaggcagcacgctcaaaagcagcagaaagagaaaacgcggtggctgaacacccctaacacttacttgagagtgaatgtggcagatgaggtccagcgctctatgggctcacctagacctaaaacaacctggatgaaggccgacgaggtggagaagagcagctccggcatgcctataagaatcgagaacccaaaccagtttgtgcctctgtacacagaccctcaagaggtgctggagatgcgtaacaagatccgcgaacagaacagacaagacgttaagtcggcaggtcctcagtctcagctgttagcctcagtgattgcagagaaaagcagaagcccctccacagagagccagctcatgtcaaaaggagacgaagacactaaagacgatagcgaagagaccgtacccaatcctttttcccagctgaccgaccaagaactggaggaatacaagaaggaggtggagaggaaaaagctggaactggatgagacgggccaggaaagagagccgggttctggtcccgctgtgtgcgagtttttctcagtggcactgcacatttggagcaatattctggaacgcaagaagctgcctcagaaaagcctggctcacttgcagagcctgcacctgctgttacagtgccgagcacaaaggcgccgacagcgccagagagccttgtag

SEQ ID NO: 193376 - DNA, 1764 bp, Artificial Sequence
  derived and/or modified sequence
atgagcgaggagaccgtgcccgaggccgccagccccccccccccccagggccagccctacttcgacagattcagcgaggacgaccccgagtacatgagactgagaaacagagccgccgacctgagacaggacttcaacctgatggagcagaagaagagagtgaccatgatcctgcagagccccagcttcagagaggagctggagggcctgatccaggagcagatgaagaagggcaacaacagcagcaacatctgggccctgagacagatcgccgacttcatggccagcaccagccacgccgtgttccccaccagcagcatgaacgtgagcatgatgacccccatcaacgacctgcacaccgccgacagcctgaacctggccaagggcgagagactgatgagatgcaagatcagcagcgtgtacagactgctggacctgtacggctgggcccagctgagcgacacctacgtgaccctgagagtgagcaaggagcaggaccacttcctgatcagccccaagggcgtgagctgcagcgaggtgaccgccagcagcctgatcaaggtgaacatcctgggcgaggtggtggagaagggcagcagctgcttccccgtggacaccaccggcttctgcctgcacagcgccatctacgccgccagacccgacgtgagatgcatcatccacctgcacacccccgccaccgccgccgtgagcgccatgaagtggggcctgctgcccgtgagccacaacgccctgctggtgggcgacatggcctactacgacttcaacggcgagatggagcaggaggccgacagaatcaacctgcagaagtgcctgggccccacctgcaagatcctggtgctgagaaaccacggcgtggtggccctgggcgacaccgtggaggaggccttctacaagatcttccacctgcaggccgcctgcgagatccaggtgagcgccctgagcagcgccggcggcgtggagaacctgatcctgctggagcaggagaagcacagaccccacgaggtgggcagcgtgcagtgggccggcagcaccttcggccccatgcagaagagcagactgggcgagcacgagttcgaggccctgatgagaatgctggacaacctgggctacagaaccggctacacctacagacaccccttcgtgcaggagaagaccaagcacaagagcgaggtggagatccccgccaccgtgaccgccttcgtgttcgaggaggacggcgcccccgtgcccgccctgagacagcacgcccagaagcagcagaaggagaagaccagatggctgaacacccccaacacctacctgagagtgaacgtggccgacgaggtgcagagaagcatgggcagccccagacccaagaccacctggatgaaggccgacgaggtggagaagagcagcagcggcatgcccatcagaatcgagaaccccaaccagttcgtgcccctgtacaccgacccccaggaggtgctggagatgagaaacaagatcagagagcagaacagacaggacgtgaagagcgccggcccccagagccagctgctggccagcgtgatcgccgagaagagcagaagccccagcaccgagagccagctgatgagcaagggcgacgaggacaccaaggacgacagcgaggagaccgtgcccaaccccttcagccagctgaccgaccaggagctggaggagtacaagaaggaggtggagagaaagaagctggagctggacgcccccggctggttcagcagctag

SEQ ID NO: 193377 - DNA, 1932 bp, Artificial Sequence
  derived and/or modified sequence
atgagcgaggagaccgtgcccgaggccgccagccccccccccccccagggccagccctacttcgacagattcagcgaggacgaccccgagtacatgagactgagaaacagagccgccgacctgagacaggacttcaacctgatggagcagaagaagagagtgaccatgatcctgcagagccccagcttcagagaggagctggagggcctgatccaggagcagatgaagaagggcaacaacagcagcaacatctgggccctgagacagatcgccgacttcatggccagcaccagccacgccgtgttccccaccagcagcatgaacgtgagcatgatgacccccatcaacgacctgcacaccgccgacagcctgaacctggccaagggcgagagactgatgagatgcaagatcagcagcgtgtacagactgctggacctgtacggctgggcccagctgagcgacacctacgtgaccctgagagtgagcaaggagcaggaccacttcctgatcagccccaagggcgtgagctgcagcgaggtgaccgccagcagcctgatcaaggtgaacatcctgggcgaggtggtggagaagggcagcagctgcttccccgtggacaccaccggcttctgcctgcacagcgccatctacgccgccagacccgacgtgagatgcatcatccacctgcacacccccgccaccgccgccgtgagcgccatgaagtggggcctgctgcccgtgagccacaacgccctgctggtgggcgacatggcctactacgacttcaacggcgagatggagcaggaggccgacagaatcaacctgcagaagtgcctgggccccacctgcaagatcctggtgctgagaaaccacggcgtggtggccctgggcgacaccgtggaggaggccttctacaagatcttccacctgcaggccgcctgcgagatccaggtgagcgccctgagcagcgccggcggcgtggagaacctgatcctgctggagcaggagaagcacagaccccacgaggtgggcagcgtgcagtgggccggcagcaccttcggccccatgcagaagagcagactgggcgagcacgagttcgaggccctgatgagaatgctggacaacctgggctacagaaccggctacacctacagacaccccttcgtgcaggagaagaccaagcacaagagcgaggtggagatccccgccaccgtgaccgccttcgtgttcgaggaggacggcgcccccgtgcccgccctgagacagcacgcccagaagcagcagaaggagaagaccagatggctgaacacccccaacacctacctgagagtgaacgtggccgacgaggtgcagagaagcatgggcagccccagacccaagaccacctggatgaaggccgacgaggtggagaagagcagcagcggcatgcccatcagaatcgagaaccccaaccagttcgtgcccctgtacaccgacccccaggaggtgctggagatgagaaacaagatcagagagcagaacagacaggacgtgaagagcgccggcccccagagccagctgctggccagcgtgatcgccgagaagagcagaagccccagcaccgagagccagctgatgagcaagggcgacgaggacaccaaggacgacagcgaggagaccgtgcccaaccccttcagccagctgaccgaccaggagctggaggagtacaagaaggaggtggagagaaagaagctggagctggacgagaccggccaggagagagagcccggcagcggccccgccgtgtgcgagttcttcagcgtggccctgcacatctggagcaacatcctggagagaaagaagctgccccagaagagcctggcccacctgcagagcctgcacctgctgctgcagtgcagagcccagagaagaagacagagacagagagccctgtag

SEQ ID NO: 193378 - protein, 439 aa, Artificial Sequence
  derived and/or modified sequence
MAEDVSSAAPSPRGCADGRDADPTEEQMAETERNDEEQFECQELLECQVQVGAPEEEEEEEEDAGLVAEAEAVAAGWMLDFLCLSLCRAFRDGRSEDFRRTRNSAEAIIHGLSSLTACQLRTIYICQFLTRIAAGKTLDAQFENDERITPLESALMIWGSIEKEHDKLHEEIQNLIKIQAIAVCMENGNFKEAEEVFERIFGDPNSHMPFKSKLLMIISQKDTFHSFFQHFSYNHMMEKIKSYVNYVLSEKSSTFLMKAAAKVVESKRTRTITSQDKPSGNDVEMETEANLDTRKSVSDKQSAVTESSEGTVSLLRSHKNLFLSKLQHGTQQQDLNKKERRVGTPQSTKKKKESRRATESRIPVSKSQPVTPEKHRARKRQAWLWEEDKNLRSGVRKYGEGNWSKILLHYKFNNRTSVMLKDRWRTMKKLKLISSDSED

SEQ ID NO: 193379 - DNA, 1320 bp, Artificial Sequence
  derived and/or modified sequence
atggccgaggacgtgagcagcgccgcccccagccccagaggctgcgccgacggcagagacgccgaccccaccgaggagcagatggccgagaccgagagaaacgacgaggagcagttcgagtgccaggagctgctggagtgccaggtgcaggtgggcgcccccgaggaggaggaggaggaggaggaggacgccggcctggtggccgaggccgaggccgtggccgccggctggatgctggacttcctgtgcctgagcctgtgcagagccttcagagacggcagaagcgaggacttcagaagaaccagaaacagcgccgaggccatcatccacggcctgagcagcctgaccgcctgccagctgagaaccatctacatctgccagttcctgaccagaatcgccgccggcaagaccctggacgcccagttcgagaacgacgagagaatcacccccctggagagcgccctgatgatctggggcagcatcgagaaggagcacgacaagctgcacgaggagatccagaacctgatcaagatccaggccatcgccgtgtgcatggagaacggcaacttcaaggaggccgaggaggtgttcgagagaatcttcggcgaccccaacagccacatgcccttcaagagcaagctgctgatgatcatcagccagaaggacaccttccacagcttcttccagcacttcagctacaaccacatgatggagaagatcaagagctacgtgaactacgtgctgagcgagaagagcagcaccttcctgatgaaggccgccgccaaggtggtggagagcaagagaaccagaaccatcaccagccaggacaagcccagcggcaacgacgtggagatggagaccgaggccaacctggacaccagaaagagcgtgagcgacaagcagagcgccgtgaccgagagcagcgagggcaccgtgagcctgctgagaagccacaagaacctgttcctgagcaagctgcagcacggcacccagcagcaggacctgaacaagaaggagagaagagtgggcaccccccagagcaccaagaagaagaaggagagcagaagagccaccgagagcagaatccccgtgagcaagagccagcccgtgacccccgagaagcacagagccagaaagagacaggcctggctgtgggaggaggacaagaacctgagaagcggcgtgagaaagtacggcgagggcaactggagcaagatcctgctgcactacaagttcaacaacagaaccagcgtgatgctgaaggacagatggagaaccatgaagaagctgaagctgatcagcagcgacagcgaggactag

SEQ ID NO: 193380 - DNA, 1320 bp, Artificial Sequence
  derived and/or modified sequence
atggcagaggatgtgtcgagtgcagccccctcgcctcgcggctgcgccgatggacgtgatgccgaccctacagaagagcagatggcggagactgaaagaaatgacgaagaacagttcgaatgtcaggagcttctcgaatgtcaggtgcaggtaggagccccagaggaggaagaagaggaggaagaggatgccgggcttgtcgcagaagcagaggccgtggctgccggttggatgctggattttctatgcttaagtctgtgccgcgctttccgcgacggaaggtctgaggacttccggcgcacccgcaactcggccgaagccatcatccacggcctttcctctcttacggcatgccagctgagaactatatatatttgccagttcctcacacggatagccgccgggaaaactttagatgctcagtttgaaaacgatgaaaggatcacaccgttagagagtgccctgatgatttggggttctatcgagaaggagcacgataagctacacgaggaaatccaaaacctaatcaaaatccaggcaattgctgtgtgcatggagaacgggaacttcaaggaggccgaggaggtgtttgagaggatatttggcgaccctaattctcacatgccttttaaatcaaagctcctcatgattataagtcagaaagacacatttcattctttcttccagcacttcagttacaaccacatgatggagaagataaaatcttatgtgaactacgtgctgagtgaaaagagttcgacctttctaatgaaggccgcggccaaggtcgttgaatctaagcggactaggacaatcacctcccaggacaagccatccgggaacgacgtggagatggagaccgaggctaacctggatacgagaaagtcagtttctgacaagcagtccgccgttaccgagtcctcagagggaacggtttcccttctgagaagtcacaaaaacttgttcctctcgaagctccagcacgggactcagcagcaagacctgaacaagaaagaaagacgtgtgggaaccccgcagtctactaagaagaagaaagagtcaagacgggcaacggaaagccgaatcccagtttcgaagtcacagcccgtcacaccggagaagcatcgtgcccgcaagcggcaggcttggctctgggaggaggataagaatctcaggagtggtgttcggaagtacggagagggcaactggtccaagattctgctgcactataaatttaataatcggacatccgtgatgctaaaagatcgttggcgaaccatgaagaaactgaaattaattagttcggactctgaagattag

SEQ ID NO: 193381 - DNA, 1320 bp, Artificial Sequence
  derived and/or modified sequence
atggctgaagatgtgtcctctgctgcccccagcccccggggctgtgctgatggaagagatgctgaccccacagaggagcagatggccgagacagaaagaaatgatgaggagcagtttgagtgccaggagctgctggagtgccaggtgcaggtgggcgcccctgaggaggaggaggaggaggaggaggatgctggcctggtggccgaggccgaggccgtggccgccggctggatgctggacttcctgtgcctgagcctgtgccgggccttcagagatggccgctctgaggacttccggaggaccaggaacagcgctgaggccatcatccacggcctgagcagcctgacagcctgccagctgcggaccatctacatctgccagttcctgaccagaattgctgctgggaagaccctggatgcccagtttgaaaatgatgagcgcatcacccccctggagagcgccctgatgatctggggcagcattgagaaggagcatgacaagctgcacgaggagatccagaacctgatcaagatccaggccatcgctgtgtgcatggagaatggaaacttcaaggaggccgaggaggtgtttgagcgcatctttggagaccccaacagccacatgcccttcaagagcaagctgctgatgatcatcagccagaaggacaccttccacagcttcttccagcacttctcctacaaccacatgatggagaagatcaagagctatgtgaactacgtgctgtctgagaagagcagcaccttcctgatgaaggccgccgccaaggtggtggagagcaagaggaccaggaccatcaccagccaggacaagcccagcggaaatgatgtggagatggagacagaggccaacctggacaccaggaagtctgtgtctgacaagcagagcgctgtgacagagagcagcgagggcaccgtgtccctgctgcggagccacaagaacctcttcctgagcaagctgcagcacggcacccagcagcaggacctgaacaagaaggagcggcgggtgggcaccccccagagcaccaagaagaagaaggagagcagaagagccacagagagccgcatccctgtgtccaagagccagcctgtgaccccagagaagcaccgggccaggaagaggcaggcctggctgtgggaggaggacaagaacctgcggtctggagtgaggaagtacggggagggcaactggagcaagatcctgctgcactacaagttcaacaacagaacatctgtgatgctgaaggaccgctggaggaccatgaagaagctgaagctgatcagcagtgacagcgaggactag

SEQ ID NO: 193382 - DNA, 1320 bp, Artificial Sequence
  derived and/or modified sequence
atggccgaggacgtgagcagcgccgcccccagcccccggggctgcgctgatggccgcgacgctgaccctacggaggaacagatggcggaaactgagcggaatgatgaagaacaattcgaatgtcaagaactgttggaatgccaggtacaggtgggcgcgcctgaagaggaggaggaggaggaggaggacgcaggtctggtggcagaggcagaggccgttgctgccggatggatgttagacttcctttgtctgagcctctgtagggcttttagggacggcaggtcggaggattttcggcgcacgaggaacagcgcagaggccatcatccatgggttgagcagcctgactgcctgccagctgaggacgatttatatctgtcagttcctaaccagaatagccgctgggaaaaccctcgatgcacagtttgaaaacgatgagagaatcacacctctggagtcagctcttatgatttggggtagcatagaaaaggaacatgacaagttgcatgaagaaatacaaaacttgattaaaatccaggcaattgccgtttgtatggagaatgggaacttcaaggaagcggaggaagtctttgagagaatatttggggacccaaacagccacatgccgtttaaatcaaagctgctgatgattattagtcagaaggacacttttcacagtttctttcagcacttttcatacaaccacatgatggagaagatcaagagctacgtaaactatgtcctttcagagaagtcatctacctttctcatgaaggcggcagctaaagtcgtggaaagcaaacgaacgcgtaccatcacaagccaggataaaccctccggcaacgatgttgagatggaaaccgaggccaacttggacactagaaaatcggtgagcgacaaacaaagcgccgtgaccgagagcagtgagggtaccgtgagtttattgcgatctcacaagaacctatttctgagtaagttgcaacatggtacacagcagcaggatctcaataagaaggagcgccgggttggaactcctcagtcaaccaaaaaaaagaaagagtctcgtagggctactgaatcacgtatacctgtctccaaatcccaacctgttactcctgagaaacaccgcgccagaaagcggcaggcgtggctctgggaagaagataaaaatctcagatcaggagtcagaaaatatggtgaaggcaattggtccaaaatcctccttcactacaagtttaataaccgcaccagtgtgatgcttaaagatcgatggcgaacaatgaaaaagctgaaactaataagctctgatagtgaagactag

SEQ ID NO: 193383 - DNA, 1320 bp, Artificial Sequence
  derived and/or modified sequence
atggcggaggacgttagtagtgcggctccttccccacgcggttgcgctgacggcagggacgcggacccaaccgaagagcaaatggcggagaccgaacgcaacgatgaggagcaatttgaatgtcaggagctgctggagtgccaagtccaggtgggtgctccggaagaggaggaggaggaagaggaagatgccggactggtcgcagaagctgaagcagttgctgcgggttggatgctggactttctctgcctcagcctctgccgagcctttcgagacgggcgatctgaagacttccgtaggacacgaaactctgccgaagccattatccatgggcttagcagtctaactgcatgccaactccggaccatctacatctgccagtttcttacccgaatcgccgctgggaaaactctggacgctcagtttgagaatgacgagcggataacccctctcgaatcagctctgatgatttggggatcaattgaaaaggagcacgacaagctgcacgaggaaatccagaacttgataaagatacaggcgatagcggtgtgtatggaaaatggcaactttaaggaagccgaagaggtgttcgagcgaatcttcggtgatcccaactctcatatgcccttcaaatcaaaattgcttatgatcatttcccaaaaggacacatttcactccttttttcaacattttagttataaccacatgatggaaaaaataaaatcttatgtgaactatgtgctgagtgaaaagagcagcactttcctgatgaaggccgctgccaaagttgtcgagagcaaaaggaccagaactatcacatcgcaggataagccatccggaaacgacgtggagatggaaaccgaagccaatctcgatactcgaaaatcagtgagcgataaacagagcgctgtgaccgagagctctgaaggaactgtgtcactcctcagatcccacaaaaacctctttctctctaagctccagcatggaacacagcagcaagaccttaacaagaaggaacggagggttggcaccccgcagtctaccaaaaagaaaaaagaaagcagaagggccaccgagtccaggattcccgtctctaaatcccagcccgtgactccagaaaagcatcgggctcgcaaacggcaagcttggctttgggaggaggacaaaaatctccgaagcggggtgaggaagtatggcgaaggaaattggtccaaaatcttgctacactacaaattcaacaatcgtactagtgttatgctgaaagaccgatggaggaccatgaaaaaattgaagttgatctcctcggatagcgaggattag

SEQ ID NO: 193384 - DNA, 1677 bp, Artificial Sequence
  derived and/or modified sequence
agtacccaagcgagccatttaacatggcggaggatgtttcctcagcggccccgagcccgcggggctgtgcggatggtagggatgccgaccctactgaggagcagatggcagaaacagagagaaacgacgaggagcagttcgaatgccaggaactgctcgagtgccaggtgcaggtgggggcccccgaggaggaggaggaggaggaggaggacgcgggcctggtggccgaggccgaggccgtggctgccggctggatgctcgatttcctctgcctctctctttgccgagctttccgcgacggccgctccgaggacttccgcaggacccgcaacagcgcagaggctattattcatggactatccagtctaacagcttgccagttgagaacgatatacatatgtcagtttttgacaagaattgcagcaggaaaaacccttgatgcacagtttgaaaatgatgaacgaattacacccttggaatcagccctgatgatttggggttcaattgaaaaggaacatgacaaacttcatgaagaaatacagaatttaattaaaattcaggctatagctgtttgtatggaaaatggcaactttaaagaagcagaagaagtctttgaaagaatatttggtgatccaaattctcatatgcctttcaaaagcaaattgcttatgataatctctcagaaagatacatttcattccttttttcaacacttcagctacaaccacatgatggagaaaattaagagttatgtgaattatgtgctaagtgaaaaatcatcaacctttctaatgaaggcagcggcaaaagtagtagaaagcaaaaggacaagaacaataacttctcaagataaacctagtggtaatgatgttgaaatggaaactgaagctaatttggatacaagaaaaagtgttagtgacaaacagtctgcggtaactgaatcctcagagggtacagtatccttattgaggtctcacaagaatcttttcttatctaagttgcaacatggaacccagcaacaagaccttaataagaaagaaagaagagtaggaactcctcaaagtacaaaaaagaaaaaagaaagcagaagagccactgaaagcagaatacctgtttcaaagagtcagccggtaactcctgaaaaacatcgagctagaaaaagacaggcatggctttgggaagaagacaagaatttgagatctggcgtgaggaaatatggagagggaaactggtctaaaatactgttgcattataaattcaacaaccggacaagtgtcatgttaaaagacagatggaggaccatgaagaaactaaaactgatttcctcagacagcgaagactgattgtgtttgtaaaagcttgatgaaaggacagttaagtattttgatcactgcattttgtttgaaacttgtgtcattgatgtaatttaaaacttttgtttaaagcattacagtatttttctgtgaccatcaattaatgagggtttgtgctaccagagttaaagcatatgctatcattgtattctttaagaaccttattttgataaaatgtaaatttgttgaaccctgccacatttagtatccccacccccaaatcctgttccaatgaaaaaattaaaacctgatacgaaaaaaaaaaaattccagttaacctattttgtgtctgtaggctgacctc

SEQ ID NO: 193385 - protein, 606 aa, Artificial Sequence
  derived and/or modified sequence
MPYEIKKVFASLPQVERGVSKIIGGDPKGNNFLYTNGKCVILRNIDNPALADIYTEHAHQVVVAKYAPSGFYIASGDVSGKLRIWDTTQKEHLLKYEYQPFAGKIKDIAWTEDSKRIAVVGEGREKFGAVFLWDSGSSVGEITGHNKVINSVDIKQSRPYRLATGSDDNCAAFFEGPPFKFKFTIGDHSRFVNCVRFSPDGNRFATASADGQIYIYDGKTGEKVCALGGSKAHDGGIYAISWSPDSTHLLSASGDKTSKIWDVSVNSVVSTFPMGSTVLDQQLGCLWQKDHLLSVSLSGYINYLDRNNPSKPLHVIKGHSKSIQCLTVHKNGGKSYIYSGSHDGHINYWDSETGENDSFAGKGHTNQVSRMTVDESGQLISCSMDDTVRYTSLMLRDYSGQGVVKLDVQPKCVAVGPGGYAVVVCIGQIVLLKDQRKCFSIDNPGYEPEVVAVHPGGDTVAIGGVDGNVRLYSILGTTLKDEGKLLEAKGPVTDVAYSHDGAFLAVCDASKVVTVFSVADGYSENNVFYGHHAKIVCLAWSPDNEHFASGGMDMMVYVWTLSDPETRVKIQDAHRLHHVSSLAWLDEHTLVTTSHDASVKEWTITY

SEQ ID NO: 193386 - DNA, 1821 bp, Artificial Sequence
  derived and/or modified sequence
atgccctacgagatcaagaaggtgttcgccagcctgccccaggtggagagaggcgtgagcaagatcatcggcggcgaccccaagggcaacaacttcctgtacaccaacggcaagtgcgtgatcctgagaaacatcgacaaccccgccctggccgacatctacaccgagcacgcccaccaggtggtggtggccaagtacgcccccagcggcttctacatcgccagcggcgacgtgagcggcaagctgagaatctgggacaccacccagaaggagcacctgctgaagtacgagtaccagcccttcgccggcaagatcaaggacatcgcctggaccgaggacagcaagagaatcgccgtggtgggcgagggcagagagaagttcggcgccgtgttcctgtgggacagcggcagcagcgtgggcgagatcaccggccacaacaaggtgatcaacagcgtggacatcaagcagagcagaccctacagactggccaccggcagcgacgacaactgcgccgccttcttcgagggcccccccttcaagttcaagttcaccatcggcgaccacagcagattcgtgaactgcgtgagattcagccccgacggcaacagattcgccaccgccagcgccgacggccagatctacatctacgacggcaagaccggcgagaaggtgtgcgccctgggcggcagcaaggcccacgacggcggcatctacgccatcagctggagccccgacagcacccacctgctgagcgccagcggcgacaagaccagcaagatctgggacgtgagcgtgaacagcgtggtgagcaccttccccatgggcagcaccgtgctggaccagcagctgggctgcctgtggcagaaggaccacctgctgagcgtgagcctgagcggctacatcaactacctggacagaaacaaccccagcaagcccctgcacgtgatcaagggccacagcaagagcatccagtgcctgaccgtgcacaagaacggcggcaagagctacatctacagcggcagccacgacggccacatcaactactgggacagcgagaccggcgagaacgacagcttcgccggcaagggccacaccaaccaggtgagcagaatgaccgtggacgagagcggccagctgatcagctgcagcatggacgacaccgtgagatacaccagcctgatgctgagagactacagcggccagggcgtggtgaagctggacgtgcagcccaagtgcgtggccgtgggccccggcggctacgccgtggtggtgtgcatcggccagatcgtgctgctgaaggaccagagaaagtgcttcagcatcgacaaccccggctacgagcccgaggtggtggccgtgcaccccggcggcgacaccgtggccatcggcggcgtggacggcaacgtgagactgtacagcatcctgggcaccaccctgaaggacgagggcaagctgctggaggccaagggccccgtgaccgacgtggcctacagccacgacggcgccttcctggccgtgtgcgacgccagcaaggtggtgaccgtgttcagcgtggccgacggctacagcgagaacaacgtgttctacggccaccacgccaagatcgtgtgcctggcctggagccccgacaacgagcacttcgccagcggcggcatggacatgatggtgtacgtgtggaccctgagcgaccccgagaccagagtgaagatccaggacgcccacagactgcaccacgtgagcagcctggcctggctggacgagcacaccctggtgaccaccagccacgacgccagcgtgaaggagtggaccatcacctactag

SEQ ID NO: 193387 - DNA, 1821 bp, Artificial Sequence
  derived and/or modified sequence
atgccatacgaaatcaagaaggtgttcgcttccctcccccaggtcgagaggggcgtctccaagattattggaggagatcctaagggcaataatttcctatacacaaacggcaaatgcgtaattctgcgaaatattgacaaccccgccttagctgacatctacaccgaacacgcgcaccaggtggtggtggctaagtatgcgccctcaggcttctacattgcaagcggggacgtgagtggcaagttgcgcatctgggataccacccagaaggagcacctcctgaagtatgagtaccagcctttcgccggcaaaatcaaggacatcgcatggacagaagattcaaaaagaatagccgtggttggcgaagggagggaaaagttcggtgcagtgtttctctgggattccggatccagcgtgggggagattaccggacacaacaaagtaatcaattcagtcgatatcaagcagtcaagaccctacaggctcgcaaccggctccgacgacaactgcgccgcattttttgaggggccaccttttaaattcaagttcacaataggcgaccactctcgctttgtgaactgtgtgcgattcagtccagatggcaaccgtttcgcaacagcatcggcggacggacagatctatatttatgatggtaaaaccggcgagaaggtgtgtgccctgggaggttctaaggcgcacgatggcggcatttacgcaatctcttggtcccccgattccactcatctgttaagtgctagtggagacaagacctccaagatttgggacgtctcggtgaattcagtggtgtcgacgtttccaatgggatccacagtccttgatcagcagttgggatgtctatggcaaaaagatcatctcttaagtgtgtctctgtcagggtacattaactatctggacagaaataatcctagcaagccacttcacgttatcaaaggccattccaagagcatccagtgtctgacagtgcataagaatggaggcaagagctatatctatagcggtagtcatgatggtcacatcaattactgggacagtgagacaggcgaaaatgatagctttgcaggaaaaggccacacgaatcaagtctcccgaatgacagtcgacgaatctggacagctgatcagttgtagcatggatgacacagtccgctacactagtctgatgctacgtgattattctggtcaaggagtggtgaaactcgatgtgcagccaaaatgtgttgccgtaggccctggtgggtacgctgtggtagtttgtatcgggcagatcgttctgttgaaagaccagagaaaatgtttttccatagataacccgggatacgagcccgaggttgttgctgtgcaccctggtggagatactgtcgccattggtggcgttgatggcaacgtccgattgtatagcatactgggcactacactcaaagacgaggggaaactcctcgaggccaaaggcccggtgacggatgtggcttacagtcacgatggggctttcctggccgtgtgcgacgcaagtaaggtcgttacggtgttcagcgttgctgatggatacagtgaaaacaacgttttttatggccaccacgcaaagattgtatgcctcgcctggtcaccagataatgagcatttcgccagcggaggaatggatatgatggtctacgtttggacactgtccgaccctgaaacccgcgtgaagattcaagatgcccacagactacaccatgtctccagccttgcgtggctggacgagcacactctggttaccactagccatgatgctagcgtcaaggagtggacaatcacatactag

SEQ ID NO: 193388 - DNA, 1821 bp, Artificial Sequence
  derived and/or modified sequence
atgccgtacgagattaaaaaagtgtttgccagcttgccccaggtggagagaggggtgagtaaaattattggtggagaccccaaagggaataatttcctgtatacgaacggaaagtgcgtgatactgcgcaatatcgataacccagccttggctgacatctacacagaacatgctcaccaggtggtagtcgccaaatatgctccttcgggcttttatatagcatccggagacgtgtccggcaaactcagaatttgggatacaactcagaaagagcacctgttgaagtacgagtatcagcccttcgccggcaagatcaaggacatcgcctggacagaagacagcaagagaatagcggtggttggagaaggacgtgagaagttcggggccgtgttcctttgggatagtggttctagtgttggggaaatcaccggacataacaaagtcatcaatagcgtcgatatcaagcagtcacggccttacaggctggccacagggtcagacgataattgcgccgctttcttcgaaggaccccctttcaaattcaaattcactatcggtgatcacagcagattcgtgaactgtgtacggttttctccagatggcaaccggtttgccaccgcttccgccgacggacaaatttacatatacgatggaaagaccggcgaaaaagtgtgtgctttggggggttccaaggctcatgatggcggcatttacgctatcagctggtcgccagattctacccatctactctccgcttcaggcgacaaaacaagcaagatttgggacgtgtccgtgaactccgtggtctctaccttcccgatggggagcacagtgcttgaccagcaacttggttgcttgtggcagaaagatcacctattgtccgtcagtttgtcagggtacatcaactacctggatcggaataatccatctaagcccttacatgtaatcaaagggcacagtaagtcgatacaatgcctgacagtacataaaaacggagggaagtcgtacatctactccggctcccatgatgggcacataaactactgggatagcgagacgggcgagaatgatagttttgcagggaagggtcacacaaatcaggtcagtcggatgaccgtggacgaaagcggacagctgatatcatgctcaatggacgacactgtgcgatatacttcgctaatgctgagggattattctgggcagggtgttgtaaaactggacgtccagcctaaatgcgtggcggtgggacctggggggtacgcagtggtcgtttgcataggacagatagtgctgctcaaggatcagagaaagtgtttcagcatcgataaccctgggtacgagcccgaggtagtagccgtacatcccggaggagacactgtcgccataggaggcgttgatggcaacgtgcgcctctatagcatactgggtacgaccctgaaggatgagggcaagctgctggaggctaagggaccagtaaccgatgttgcttactcccatgacggggcctttctggctgtttgtgacgcctccaaggtcgtgactgtcttcagcgtggctgatgggtactctgaaaataatgtgttctacggccaccacgctaaaattgtctgcctggcctggtctcccgataatgagcattttgccagcggcggaatggatatgatggtctatgtatggactctgagcgatcctgaaaccagagttaagattcaggatgctcacaggctgcaccacgtgtcgagtttggcgtggcttgacgaacataccctggtgacaacttctcatgatgcctcagtaaaagaatggacaatcacctattag

SEQ ID NO: 193389 - DNA, 1821 bp, Artificial Sequence
  derived and/or modified sequence
atgccctatgagatcaagaaggtgtttgccagcctgccccaggtggagcggggcgtgtccaagatcattggaggagaccccaagggcaacaacttcctgtacaccaacgggaaatgtgtgatcctgagaaatattgacaacccagccctggccgacatctacacagaacatgcccaccaggtggtggtggccaagtatgcccccagcggcttctacatcgccagcggagatgtgtctgggaagctgcgcatctgggacaccacccagaaggagcacctgctgaagtatgagtaccagccctttgctgggaagatcaaggacatcgcctggacagaggacagcaagagaattgctgtggtgggggagggccgggagaagtttggagctgtgttcctgtgggacagcggcagctctgtgggggagatcaccggccacaacaaggtgatcaacagcgtggacatcaagcagagccggccctaccgcctggccaccggcagtgatgacaactgtgccgccttctttgagggcccccccttcaagttcaagttcaccatcggggaccacagcagatttgtgaactgtgtgcgcttctccccagatggcaacagatttgccacagccagcgcagatggccagatctacatctatgatggcaagacaggagagaaggtgtgtgccctgggcggcagcaaggcccatgatggcggcatctatgccatctcctggagcccagacagcacccacctgctgagcgccagcggggacaagaccagcaagatctgggatgtgtctgtgaacagcgtggtgtccaccttccccatgggcagcacagtgctggaccagcagctgggctgcctgtggcagaaggaccacctgctgtctgtgtccctgagcggctacatcaactacctggacaggaacaaccccagcaagcccctgcacgtgatcaagggccacagcaagagcatccagtgcctgactgtgcacaagaatggaggcaagagctacatctacagcggcagccatgatggccacatcaactactgggacagcgagactggagaaaatgacagctttgctgggaagggccacaccaaccaggtgtccaggatgacagtggatgagagcggccagctgatcagctgcagcatggatgacacagtgcgctacaccagcctgatgctgcgggactacagcggccagggcgtggtgaagctggatgtgcagcccaagtgtgtggccgtgggccctgggggctatgctgtggtggtgtgcatcggccagatcgtgctgctgaaggaccagaggaagtgcttcagcattgacaaccctggctatgagcctgaggtggtggccgtgcaccctggaggagacacagtggccatcggcggcgtggatggaaatgtgcggctgtacagcatcctgggcaccaccctgaaggatgagggcaagctgctggaggccaagggccctgtgacagatgtggcctacagccatgatggagccttcctggccgtgtgtgatgccagcaaggtggtgaccgtcttctctgtggctgatggctacagcgagaacaacgtgttctacggccaccacgccaagatcgtgtgcctggcctggagcccagacaatgagcactttgccagcggcggcatggacatgatggtgtatgtgtggaccctgagtgaccctgagaccagggtgaagatccaggatgcccaccggctgcaccacgtgagcagcctggcctggctggatgagcacaccctggtgaccaccagccatgatgcctctgtgaaggagtggaccatcacctactag

SEQ ID NO: 193390 - DNA, 1821 bp, Artificial Sequence
  derived and/or modified sequence
atgccctacgagatcaagaaggtgttcgccagcctgccccaggtggagagaggggtgtctaagatcatcgggggagatcctaagggcaacaattttctgtacaccaacggcaagtgcgtgatcctgcgcaatattgacaaccccgctttagctgacatctatacggagcacgcgcaccaggtcgttgtggccaagtatgcgccgagtggcttttacatcgctagtggcgatgtctcggggaagctgcgcatatgggacacaacccagaaggaacatcttctgaaatatgaataccagcctttcgcagggaaaattaaagatattgcatggaccgaggacagcaaaaggattgccgtggtcggggaaggaagagaaaagttcggcgcagttttcctgtgggactccggaagctccgtgggcgagatcaccggtcataacaaggtcattaactcagtcgacattaaacagagtcggccgtacagattggcaaccggaagcgacgacaattgcgctgcattttttgaaggaccccctttcaagttcaagtttactattggggaccactccaggtttgttaattgcgtgcgctttagcccggatggcaacaggtttgcaacagcttctgcagatggacagatctacatctatgacggcaagactggagagaaagtctgcgctctcggtggatcaaaggcccatgatggcgggatttacgctatctcctggtcacccgattcgacccatcttctaagcgctagcggagataagacttctaagatctgggatgttagtgtgaactccgttgtgagcacattccctatggggagtactgtgttagaccagcagttggggtgtctttggcagaaggatcaccttctgtccgtaagtctgtcaggctatattaattatctcgatcgcaacaaccccagcaagccacttcacgttattaaaggacacagcaaatccattcaatgtctaacggtgcacaagaatggcggcaaaagctacatatatagtgggtcacacgacggacacatcaactactgggattccgagaccggggaaaacgacagttttgcagggaagggacatactaatcaagtctccagaatgaccgtggacgaatccggtcagctcatttcctgctctatggacgacacagtgaggtacacatctttgatgctgcgtgattattcgggccagggagttgtgaagctggacgtgcagccgaagtgcgtggccgtgggtcctggtgggtatgccgtggtggtatgcatcggacaaatcgtgcttttgaaggaccagcgaaagtgtttttcaatagacaaccctggctacgagccagaggtggtggccgtacaccccgggggcgacaccgtggctattgggggagtagatgggaatgtgcgactttattcgatcctggggacaactcttaaagacgaagggaagctcctcgaggccaagggcccagttaccgacgtggcatattctcacgacggagcgttcctggccgtgtgtgatgcctctaaagtggtgactgtgttcagcgtggcggatggctactcagagaacaatgtgttttatggacatcatgctaagatcgtatgtctcgcttggtctccggacaacgaacattttgcctccggggggatggacatgatggtgtatgtatggacattgtccgaccctgaaacaagagttaagattcaagacgcccaccgccttcaccatgttagttcattggcatggctggatgaacacacactggtgaccacatcccatgatgcgagtgtgaaagagtggacaataacatactag

SEQ ID NO: 193391 - DNA, 1821 bp, Artificial Sequence
  derived and/or modified sequence
atgccctacgagatcaagaaggtgttcgccagcctgccccaggtggaaaggggggttagtaagattatcggaggtgatcccaaaggaaacaatttcctttacaccaatggcaaatgtgtgatactgcggaacatcgataacccagctctggcggatatatacaccgagcacgcgcatcaagttgtggttgccaaatacgctccatctggcttctatatcgccagcggagacgtatctggaaaattgcgaatttgggataccactcaaaaggagcatttgttgaagtatgagtaccaaccctttgctggaaagatcaaagacattgcatggactgaggacagtaagaggattgctgtagtaggcgaagggcgcgaaaaattcggcgcggtcttcctgtgggactccggatccagcgtaggagagattaccggccacaacaaggtaatcaactccgtagatatcaagcagtctcgcccctataggttagccactggttctgacgacaactgtgccgccttttttgaagggccaccttttaaattcaagttcactataggggatcactctcgattcgtaaactgcgttagattctcgcctgatggaaaccgtttcgcaactgcctctgcagatggccagatctacatctacgatgggaagacaggggagaaggtgtgcgcactgggtggctccaaggctcatgacggagggatatacgcaatctcatggtcccccgattctacccatctgctttccgcaagtggagataaaaccagcaaaatttgggatgtctcagtaaactctgtcgtgagcacattccccatggggtctacagtactcgatcagcaactgggttgcctgtggcagaaggatcacctcctgtctgttagcctctcaggttacatcaactatttggatcggaacaacccgagtaaacccctgcatgtcattaagggtcactctaaatccatccagtgtctgaccgtccacaaaaatggcggcaagagctacatttattcggggagtcatgatggtcacatcaattactgggacagcgaaactggcgagaatgattccttcgccggaaaaggccatacaaatcaggtcagcagaatgactgtcgacgagtcaggccaattgatcagctgttcaatggacgatacagttaggtatactagcctcatgctgagggattattccggacagggcgtggtgaagctcgacgtgcagcctaagtgcgtggcagtcgggcccggaggatatgccgtggtcgtgtgcatcgggcagattgttctgctaaaggatcagcgaaagtgcttctctatcgacaacccaggctacgagccagaggtagtagctgttcaccccggtggagatacggtggctatcggcggagttgatggaaacgttcggctctacagtatcctggggaccactcttaaagacgaagggaagctgttggaagcaaagggccctgtcacagacgtggcttactctcacgacggagcgtttctggctgtgtgcgacgccagcaaggtcgtgactgtattcagcgtcgcggacggctacagtgagaataacgtcttctatggtcaccacgccaaaatagtatgtctcgcttggtctcctgacaatgaacattttgcaagtggaggcatggatatgatggtgtacgtttggacattatccgacccagaaacccgcgtcaaaattcaggacgctcaccggctacatcatgtatcttctctggcctggcttgacgagcataccttggtcacaaccagtcacgatgcctctgtgaaagagtggaccattacatactag

SEQ ID NO: 193392 - DNA, 1821 bp, Artificial Sequence
  derived and/or modified sequence
atgccctatgaaatcaagaaagtgttcgcctcactgcctcaggtagagcgcggagtctcgaaaatcattggcggtgatcctaagggcaacaatttcctgtatactaacgggaaatgtgtgatcttaagaaacatagacaatcctgcactcgccgatatttatactgagcatgcccaccaggtggtcgtcgcaaaatacgcccctagtggcttctacattgcctccggagacgtctctggaaaactgaggatctgggataccacacagaaagagcaccttctgaaatacgaataccaaccattcgctggtaaaattaaagacatcgcttggactgaggattctaaacggatagctgtggtcggagaaggtcgggagaaattcggtgctgtgttcctgtgggattctggatcctccgtgggagagatcacagggcataataaggtgatcaatagtgtggatatcaaacagagtcgaccgtatcgcctggcgacggggtctgacgataattgcgccgcttttttcgaaggacccccattcaagttcaaatttactattggagatcactcgcgatttgtaaactgtgtacgattctccccggacggcaataggttcgccaccgctagcgccgacgggcagatctatatctacgatggcaaaacgggagaaaaggtctgtgccctaggtgggtccaaagcccacgacggcggtatatacgctatttcatggtcacccgactcgactcacctgctcagcgcctccggggacaagactagcaaaatatgggacgtctctgtgaattcggtagtcagcaccttccccatgggatctacagtgctcgatcaacagctcgggtgtctgtggcagaaagatcaccttctgtccgtctcactcagcggatatattaactacttagatcggaataatcctagtaaaccgttacacgttataaagggccattccaagtctatccaatgcctaaccgtgcataagaacggcggaaagtcatacatttacagcggtagtcacgacggccacattaattactgggatagtgagaccggtgagaacgatagcttcgcaggcaaagggcacacaaatcaagtctcgaggatgacagttgacgaatcgggacagctcatttcgtgcagtatggatgacaccgtgcgctacacatctctcatgctccgcgattattccgggcagggagtggtgaagctggatgtccagccgaaatgtgttgctgtgggcccaggaggttacgcagtggtagtgtgtatcgggcagatcgtgctgctcaaagaccaaagaaaatgcttcagcatcgacaatcccggatacgagccagaagtggtggcggtccatcccggaggagataccgtggctatcggcggtgtagacggaaacgtgcgcctgtactccattctcggtaccaccctgaaggatgaaggaaaactgctggaagccaaaggtcccgtcactgatgtcgcgtactctcacgatggtgcctttctggctgtctgcgacgcgtccaaagtggtcacagtgttttcagtcgctgacgggtacagtgagaacaacgtattctacgggcatcatgccaaaatcgtgtgtctggcctggagcccggataacgagcactttgcaagtggaggaatggatatgatggtgtatgtgtggacgctgagtgatcctgaaactagggttaaaatccaggacgctcataggttgcaccatgtttcctctttggcatggctggacgagcacactctggttacaacatcacatgacgcctctgtcaaggagtggacaataacttattag

SEQ ID NO: 193393 - DNA, 1821 bp, Artificial Sequence
  derived and/or modified sequence
atgccctacgagattaaaaaagtctttgcgtcgctgccgcaagtggagcgcggagttagcaagatcatcggtggggatcctaaggggaacaacttcctgtacaccaacgggaaatgtgtaatcctccgcaacattgacaatccagccttggccgatatttacacagagcacgcacaccaggtggttgtggctaagtacgcgccttccggcttttatatcgccagcggcgatgtatccggaaaactgcgcatatgggatacaacacagaaggagcaccttctcaaatatgagtatcaaccctttgcaggcaagattaaggatatagcctggacggaagacagcaagcgcatagcagtcgtaggagagggcagggagaaatttggggcagtgtttctgtgggactccggctcctcggtcggagaaattactggacacaataaggtcattaactccgttgacattaagcagtccagaccttaccgactggccacggggtctgatgacaattgcgctgctttcttcgaaggcccaccatttaaattcaaatttacgattggggatcattcccggtttgtgaattgtgtgaggttctctcccgatggaaatagattcgctacagcttctgctgatggccagatttacatttacgacgggaagacaggcgaaaaggtgtgtgcgctgggaggctccaaggcacacgacggcggaatttacgccatatcttggtcacctgatagtacccacctgctctccgcctccggagataagaccagcaagatctgggatgttagtgtgaattcagttgtgtcaacctttcctatggggtctaccgttctcgaccagcaactggggtgtctctggcaaaaggaccacctgctttccgtgtccctgtctggttacatcaactatctggacagaaacaacccatctaaaccccttcatgtgatcaaggggcacagcaagtctattcaatgcctaacagtgcataaaaatggcggaaagagctatatctatagtggtagccacgatgggcatattaactactgggattcagagactggcgaaaatgattcattcgctggcaagggacatactaatcaggttagcagaatgaccgtagatgaatccggacaactgatctcctgttctatggacgacactgtgaggtatacatccctgatgctgcgcgattacagcgggcagggagttgtgaaactggacgttcagcccaaatgcgtggccgtgggcccaggcggttacgctgtggtggtgtgtatcggtcagatcgtgctcctgaaagaccagcgaaagtgtttctctattgataatcctgggtacgagcccgaagttgtggccgtgcacccgggtggggatacagtcgcaattgggggagtcgacgggaatgtgcgcttgtattctattcttggcacgacgctgaaagatgaaggcaagctcctggaagccaaagggcctgtgaccgatgtggcctactcccatgatggcgcttttttagccgtctgtgatgcttccaaagtggtgaccgtgttctccgtggccgacggctattctgagaacaacgttttctatgggcaccatgcgaagatcgtgtgtcttgcatggagcccagacaacgaacactttgcgagcgggggtatggatatgatggtatacgtgtggaccttgtccgaccccgagacaagggtcaagatccaggatgcacatcggctgcaccatgtcagctctttggcatggctcgatgaacatactctggtgactacatctcacgacgccagcgtgaaggagtggaccataacatattag

SEQ ID NO: 193394 - DNA, 3142 bp, Artificial Sequence
  derived and/or modified sequence
ccgcagccgccgagccgagcgcttgactatatatggtcaaagctgggggcgagccgcgcgcgggaccgcgcttccgggttcggggcgtccgcaaccacagcgcgcagggcaggcgcgagctggcctctgagccccggcctcggaccgcccactccactcccggcacgcccggtgccgccttccggctccagtccccgggctcggcctcggcgaggtgtaattcgcagcgcgggccggccccggaggctctcggcgagcgcggcgcggtaacaagtgggcgaggatgccgtacgagatcaagaaggtgttcgccagcctcccgcaggtggagaggggcgtctccaagatcatcggcggcgaccctaagggcaacaattttctgtacaccaatggaaagtgcgtcatcctaaggaacatcgacaacccagcccttgctgacatctacacagagcacgcccatcaggtggtggtggccaagtatgcgcccagcggattctacattgcctccggagatgtgtctgggaagctgaggatctgggataccacgcagaaggagcacctgttgaagtatgagtaccagcctttcgctgggaagatcaaagacattgcttggactgaagacagtaagaggatcgccgtggtcggggaaggaagggagaagtttggagcagtcttcctctgggatagtggctcttctgtgggcgagattacaggacacaacaaagtcatcaacagcgtggacatcaagcagagccggccataccggctggccacgggaagcgatgataactgcgcggcattctttgagggacccccattcaagttcaagttcacaattggcgaccacagccgctttgtcaactgtgtgcgattctctcctgatgggaacagatttgccacagccagtgctgacggccagatatacatctatgacgggaagactggggagaaggtgtgcgcgctgggcggaagcaaggcccacgacggtgggatttacgcaattagttggagtcccgacagcacccatttgctttctgcttctggggacaaaacttccaagatttgggacgtcagcgtgaactccgtggtcagcacatttcccatgggctccacggttctggaccagcagctgggctgcctatggcagaaggaccacctgctcagtgtctccctgtccgggtacatcaactatctggacagaaacaaccccagcaagcccctgcacgtcatcaagggtcacagtaaatcgatccagtgtctgacggtgcataaaaacggcggcaagtcctacatttactctgggagccacgacggacacattaattactgggattcagagacgggggagaacgactccttcgctgggaaaggccacacgaaccaggtgtccaggatgaccgtggatgagtcggggcagctcatcagctgcagcatggacgacaccgtgcggtacaccagcctcatgctgcgggactacagcggacaaggagttgtgaaactggacgttcagccaaagtgcgtagccgtcggccccgggggatacgccgtggtcgtgtgcattggacagattgtcctgctgaaggatcagaggaagtgcttcagcatcgacaaccccggctacgagcccgaagttgtggcagtgcaccccggcggggacacggtggcaattgggggtgtggacggcaacgtccgcctgtattccatcctgggcaccacgctgaaggatgagggcaagctcctagaggccaagggccccgtgaccgacgtggcctactcccacgacggcgccttcctcgcggtgtgcgacgccagcaaggtggtcacagtgttcagcgttgctgacggctactcggagaacaatgttttttatggacaccatgcaaaaatcgtctgcctggcctggtccccagacaatgaacactttgcctccggtggcatggacatgatggtgtatgtttggaccctgagtgacccggaaaccagagtcaagatccaagatgcacaccggctgcaccatgtcagcagcctggcctggctggacgagcacacgctggtcacgacctcccatgatgcctctgtcaaggagtggacaatcacctactgaggagccccacccccgcctctggatggaccgaatcagggactagagtttaactgcagcggaacatgtcatttctctatttctgtgacgcgcccccatgcccccaccccaccacaagaggcaggagggcccagtcatgaccctcgtctctgcagggtgtctgtacacgttcttctgaaagctttagacagtaacagtttgcacatgaaaaataaagcgagcacctaaacaatgtgtggagcataactaaaacccacagcccaaccaaaccttgagaatgcgaaacattccagaggcagtagcctccaaagcacacagagcccctggccccgccgcggctctcactatctgtcaggggaggttgtacaggtgaatgagccggggggctcatgttcctgcctgcagaacatttctgtactagtgagaagagggaatatgcattgcagttcagcaaagccggaattctgtgttgaacagatgtctgtctccctagtgtgtgactcacaccttgtggctgccttcagagcgccacctccagatcagatggggacacacaacccctggatatgtttcattgtcagattttgtgcttgattttaagaatggaattgtgggtatctttcctttttttttaatgtatcttaactgttgcctgtcagtgtttacaaactagtgcgttgacggcaccgtgtccaagtttttagaacccttgttagccagaccgaggtgtcctggtcaccgtttcaccatcatgctttgatgttcccctgtctttccctcttctgctctcaagagcaaaggttaatttaaggacaaagatgaagtcactgtaaactaatctgtcattgtttttaccttccttttctttttcagtgcagaaattaaaagtaagtataaagcaccgtgattgggagtgtttttgcgtgtgtcggaatcactggtaaatgttggctgagaacaatccctccccttgcacttgtgaaaacactttgagcgctttaagagattagcctgagaaataattaaatatcttttctcttc

SEQ ID NO: 193395 - DNA, 3054 bp, Artificial Sequence
  derived and/or modified sequence
cgcaaccacagcgcgcagggcaggcgcgagctggcctctgagccccggcctcggaccgcccactccactcccggcacgcccggtgccgccttccggctccagtccccgggctcggcctcggcgaggtgtaattcgcagcgcgggccggccccggaggctctcggcgagcgcggcgcggtaacaagtgggcgaggatgccgtacgagatcaagaaggtgttcgccagcctcccgcaggtggagaggggcgtctccaagatcatcggcggcgaccctaagggcaacaattttctgtacaccaatggaaagtgcgtcatcctaaggaacatcgacaacccagcccttgctgacatctacacagagcacgcccatcaggtggtggtggccaagtatgcgcccagcggattctacattgcctccggagatgtgtctgggaagctgaggatctgggataccacgcagaaggagcacctgttgaagtatgagtaccagcctttcgctgggaagatcaaagacattgcttggactgaagacagtaagaggatcgccgtggtcggggaaggaagggagaagtttggagcagtcttcctctgggatagtggctcttctgtgggcgagattacaggacacaacaaagtcatcaacagcgtggacatcaagcagagccggccataccggctggccacgggaagcgatgataactgcgcggcattctttgagggacccccattcaagttcaagttcacaattggcgaccacagccgctttgtcaactgtgtgcgattctctcctgatgggaacagatttgccacagccagtgctgacggccagatatacatctatgacgggaagactggggagaaggtgtgcgcgctgggcggaagcaaggcccacgacggtgggatttacgcaattagttggagtcccgacagcacccatttgctttctgcttctggggacaaaacttccaagatttgggacgtcagcgtgaactccgtggtcagcacatttcccatgggctccacggttctggaccagcagctgggctgcctatggcagaaggaccacctgctcagtgtctccctgtccgggtacatcaactatctggacagaaacaaccccagcaagcccctgcacgtcatcaagggtcacagtaaatcgatccagtgtctgacggtgcataaaaacggcggcaagtcctacatttactctgggagccacgacggacacattaattactgggattcagagacgggggagaacgactccttcgctgggaaaggccacacgaaccaggtgtccaggatgaccgtggatgagtcggggcagctcatcagctgcagcatggacgacaccgtgcggtacaccagcctcatgctgcgggactacagcggacaaggagttgtgaaactggacgttcagccaaagtgcgtagccgtcggccccgggggatacgccgtggtcgtgtgcattggacagattgtcctgctgaaggatcagaggaagtgcttcagcatcgacaaccccggctacgagcccgaagttgtggcagtgcaccccggcggggacacggtggcaattgggggtgtggacggcaacgtccgcctgtattccatcctgggcaccacgctgaaggatgagggcaagctcctagaggccaagggccccgtgaccgacgtggcctactcccacgacggcgccttcctcgcggtgtgcgacgccagcaaggtggtcacagtgttcagcgttgctgacggctactcggagaacaatgttttttatggacaccatgcaaaaatcgtctgcctggcctggtccccagacaatgaacactttgcctccggtggcatggacatgatggtgtatgtttggaccctgagtgacccggaaaccagagtcaagatccaagatgcacaccggctgcaccatgtcagcagcctggcctggctggacgagcacacgctggtcacgacctcccatgatgcctctgtcaaggagtggacaatcacctactgaggagccccacccccgcctctggatggaccgaatcagggactagagtttaactgcagcggaacatgtcatttctctatttctgtgacgcgcccccatgcccccaccccaccacaagaggcaggagggcccagtcatgaccctcgtctctgcagggtgtctgtacacgttcttctgaaagctttagacagtaacagtttgcacatgaaaaataaagcgagcacctaaacaatgtgtggagcataactaaaacccacagcccaaccaaaccttgagaatgcgaaacattccagaggcagtagcctccaaagcacacagagcccctggccccgccgcggctctcactatctgtcaggggaggttgtacaggtgaatgagccggggggctcatgttcctgcctgcagaacatttctgtactagtgagaagagggaatatgcattgcagttcagcaaagccggaattctgtgttgaacagatgtctgtctccctagtgtgtgactcacaccttgtggctgccttcagagcgccacctccagatcagatggggacacacaacccctggatatgtttcattgtcagattttgtgcttgattttaagaatggaattgtgggtatctttcctttttttttaatgtatcttaactgttgcctgtcagtgtttacaaactagtgcgttgacggcaccgtgtccaagtttttagaacccttgttagccagaccgaggtgtcctggtcaccgtttcaccatcatgctttgatgttcccctgtctttccctcttctgctctcaagagcaaaggttaatttaaggacaaagatgaagtcactgtaaactaatctgtcattgtttttaccttccttttctttttcagtgcagaaattaaaagtaagtataaagcaccgtgattgggagtgtttttgcgtgtgtcggaatcactggtaaatgttggctgagaacaatccctccccttgcacttgtgaaaacactttgagcgctttaagagattagcctgagaaataattaaatatcttttctcttca

SEQ ID NO: 193396 - DNA, 438 bp, Artificial Sequence
  derived and/or modified sequence
atggcctgcatccactacctgcgggagaatagagagaagtttgaggcattcatcgaggggtctttcgaggaatatctgaaaagacttgagaaccctcaggagtgggtcggccaggtggaaatttccgccctgtccctgatgtacaggaaagatttcatcatttacagagaaccaaatgtgtcaccgtcccaggtaaccgagaacaattttccagagaaagtgcttttgtgttttagcaatggtaatcattatgacatcgtatatccaatcaaatataaggagtcatcagctatgtgtcagagcctgctgtatgagttgctatatgaaaaggtgttcaagacggatgtctccaagatcgtgatggaacttgacaccctagaagtggctgacgaagacaatagcgaaattagcgacagcgaggacgactcttgcaagtag

SEQ ID NO: 193397 - DNA, 420 bp, Artificial Sequence
  derived and/or modified sequence
atggcgtgcattcattatttgcgcgagaaccgcgagaaattcgaggcttttattgagggttcattcgaagagtatctgaaacggctcgagaacccgcaggagtgggtcggccaggtcgagatctccgccctgagcctgatgtatcgcaaggacttcataatctatcgtgagcccaacgtgtctccatcacaagttaccgagaacaatttccctgagaaagtgcttctttgctttagcaacggcaatcactatgacatcgtctaccctattaaatacaaggaatctagcgctatgtgccaaagcctgttatacgaactcctgtacgagaaagtgttcaagactgatgtctccaagattgtcatggaactggacaccctggaagtggccgatgaagacaattctgagatctccgacagctag

SEQ ID NO: 193398 - DNA, 438 bp, Artificial Sequence
  derived and/or modified sequence
atggcatgcattcactatctcagagagaaccgggaaaaattcgaggctttcatagaggggtccttcgaagagtatctcaagcgactggagaacccgcaggaatgggtgggacaggttgagataagtgcactttccctgatgtaccggaaggatttcatcatctacagggagccgaatgtgtcccccagtcaagttaccgaaaacaatttccctgagaaggtgctcctctgttttagcaacgggaaccactatgacatcgtgtaccctattaaatacaaggagtcaagcgcaatgtgtcagtcgttgctttatgagctcttgtacgagaaggtcttcaagaccgatgtatctaagatcgtaatggagctggacactcttgaggtggctgatgaggataattccgagatcagtgatagcgaagatgacagttgcaagtag

SEQ ID NO: 193399 - DNA, 438 bp, Artificial Sequence
  derived and/or modified sequence
atggcctgcatccactacctgagagaaaatcgggagaagtttgaggccttcatcgagggcagctttgaggagtacctgaagaggctggagaacccccaggagtgggtgggccaggtggagatcagcgccctgagcctgatgtacaggaaggacttcatcatctaccgggagcccaacgtgagccccagccaggtgacagagaacaacttccctgagaaggtgctgctgtgcttcagcaatggaaaccactatgacatcgtgtaccccatcaagtacaaggagagcagcgccatgtgccagagcctgctgtatgagctgctgtatgagaaggtgttcaagacagatgtgtccaagatcgtgatggagctggacaccctggaggtggctgatgaggacaacagcgagatcagtgacagtgaagatgacagctgcaagtag

SEQ ID NO: 193400 - DNA, 420 bp, Artificial Sequence
  derived and/or modified sequence
atggcctgcatccactacctgagagaaaatcgggagaagtttgaggccttcatcgagggcagctttgaggagtacctgaagaggctggagaacccccaggagtgggtgggccaggtggagatcagcgccctgagcctgatgtacaggaaggacttcatcatctaccgggagcccaacgtgagccccagccaggtgacagagaacaacttccctgagaaggtgctgctgtgcttcagcaatggaaaccactatgacatcgtgtaccccatcaagtacaaggagagcagcgccatgtgccagagcctgctgtatgagctgctgtatgagaaggtgttcaagacagatgtgtccaagatcgtgatggagctggacaccctggaggtggctgatgaggacaacagcgagatcagtgacagctag

SEQ ID NO: 193401 - DNA, 438 bp, Artificial Sequence
  derived and/or modified sequence
atggcctgcatccactacctgcgggagaaccgggagaagttcgaggccttcatcgagggctccttcgaagagtacctgaagcggttggagaatccacaggaatgggttggacaggtagagatatcagctctgagcctgatgtatcgcaaggactttattatctaccgcgagcccaacgtctcaccaagtcaggtgactgaaaataactttccagaaaaggtgttactctgtttctcaaacggaaaccactacgatattgtgtatccaatcaagtataaagaatcgtctgctatgtgccagagcctgctttacgagctactatatgagaaagtatttaagaccgacgtgtctaaaatcgtgatggagctcgacacattggaggtcgctgatgaggataatagtgagatctcagactccgaagatgatagctgtaaatag

SEQ ID NO: 193402 - DNA, 420 bp, Artificial Sequence
  derived and/or modified sequence
atggcctgcatccactacctgcgggagaaccgggagaagttcgaggcttttattgaaggctcattcgaggagtatctaaagaggctggaaaatccccaagaatgggttggacaggtcgagattagcgcattaagcctaatgtataggaaagacttcataatttacagagagcccaatgtctctccatcacaggtgaccgagaacaatttccccgaaaaagtcctgctgtgctttagcaatggcaaccattatgatatagtgtaccccatcaaatataaggaaagcagtgccatgtgccagtctctgctctatgagttgctgtatgagaaggtgttcaaaactgatgtctctaaaatagttatggagctcgacaccctggaggtcgctgacgaggataatagcgagatctcagactcctag

SEQ ID NO: 193403 - DNA, 438 bp, Artificial Sequence
  derived and/or modified sequence
atggcctgcatccactacctgcgggagaaccgggagaagttcgaggcctttattgaaggatccttcgaggagtatttaaagaggttggagaatccacaggaatgggtgggccaggtggagatcagcgccctgtcactgatgtatcgtaaggactttataatttacagagaaccaaacgtgtctcctagtcaggtaacggaaaataactttcccgagaaggtcctgctttgcttcagcaatggaaaccattacgatatagtctatccgatcaagtacaaagaaagttccgctatgtgtcagagcctgctgtacgaacttttgtatgaaaaggttttcaaaaccgacgtgagcaagattgttatggagttggataccctggaggtggctgacgaagataactccgaaatttcagactcagaggatgattcttgtaaatag

SEQ ID NO: 193404 - DNA, 543 bp, Artificial Sequence
  derived and/or modified sequence
aaattaacggggtgtctctctcctgatgaagagtgttgctgtggggtatgttcacagccacccactgcctccggtccttattgttagtaggtattgcactctcagtctcgccatgttgaagtcagaatggcctgtattcactatcttcgagagaacagagagaaatttgaagcgtttatagaaggatcatttgaagaatatttaaagcgtttggaaaatccacaggaatgggtaggacaagtggaaataagtgccctttctcttatgtacaggaaagattttataatttatcgggaaccaaatgtttctccttcacaagtaacagaaaataattttcctgaaaaggtgttactgtgtttttcaaatggaaatcattatgatattgtgtatcccataaagtataaagaaagctctgctatgtgtcagtctctcctttatgaattgctgtatgagaaggtatttaaaactgatgttagtaaaattgtgatggaactagacacgttggaagtagctgatgaagataacagtgaaatatcagattca

SEQ ID NO: 193405 - DNA, 438 bp, Artificial Sequence
  derived and/or modified sequence
atggcctgtattcactacttaagggaaaaccgtgagaagttcgaggccttcatcgaaggatccttcgaagagtacctgaagaggctggagaatcctcaagaatgggtgggacaggtagaaatctctgctctctctctgatgtatcggaaagactttattatctaccgagagccgaacgtgagtccatcccaggtgaccgagaataatttcccggagaaggtgcttctgtgcttcagcaacggaaaccattatgatattgtctacccgatcaaatataaggagtcatccgccatgtgccagtccctcctatacgaattgttgtacgaaaaggtgttcaaaacagacgtctccaagatcgtaatggaactggacaccttggaggtggcagatgaggacaactccgagatttcagactctgaagatgattcttgcaaatag

SEQ ID NO: 193406 - DNA, 420 bp, Artificial Sequence
  derived and/or modified sequence
atggcgtgtatccattatctgagggaaaatcgagagaagtttgaggcctttattgagggctcatttgaagaataccttaagaggctcgagaacccccaggaatgggttggccaggtggagatcagcgccctatcattgatgtatcgtaaggatttcattatctatcgagaacctaacgtttccccatcgcaggtcaccgagaataacttccctgagaaagtcctgttgtgtttcagcaatgggaaccactatgatattgtgtacccaattaaatataaagaatcctctgctatgtgccagtctctgctctacgagcttctctatgagaaggtgtttaaaacggatgtctcaaaaattgtgatggagctcgacactctggaggtggcagacgaagataattcagagatcagcgattcttag

SEQ ID NO: 193407 - DNA, 438 bp, Artificial Sequence
  derived and/or modified sequence
atggcgtgcatacattacctgagagaaaaccgcgagaagttcgaggcatttatagaaggaagcttcgaagaataccttaagcgccttgagaatccccaggagtgggttggtcaggtggagatctccgccctttccctcatgtatcgcaaggactttattatttaccgagagcctaacgtgagccccagtcaggtgaccgagaacaactttccagagaaagtgctgctttgtttctcgaatggaaatcactacgacattgtttacccaatcaagtataaggaaagcagcgcaatgtgccagtccctcctttacgaactgctgtatgaaaaggtgtttaagacggacgtgtctaaaatcgtgatggagctggacaccctggaagtcgccgacgaggataacagtgagatttctgactcagaggacgacagctgcaaatag

SEQ ID NO: 193408 - DNA, 438 bp, Artificial Sequence
  derived and/or modified sequence
atggcctgcatccactacctgagagagaacagagagaagttcgaggccttcatcgagggcagcttcgaggagtacctgaagagactggagaacccccaggagtgggtgggccaggtggagatcagcgccctgagcctgatgtacagaaaggacttcatcatctacagagagcccaacgtgagccccagccaggtgaccgagaacaacttccccgagaaggtgctgctgtgcttcagcaacggcaaccactacgacatcgtgtaccccatcaagtacaaggagagcagcgccatgtgccagagcctgctgtacgagctgctgtacgagaaggtgttcaagaccgacgtgagcaagatcgtgatggagctggacaccctggaggtggccgacgaggacaacagcgagatcagcgacagcgaggacgacagctgcaagtag

SEQ ID NO: 193409 - DNA, 420 bp, Artificial Sequence
  derived and/or modified sequence
atggcctgcatccactacctgagagagaacagagagaagttcgaggccttcatcgagggcagcttcgaggagtacctgaagagactggagaacccccaggagtgggtgggccaggtggagatcagcgccctgagcctgatgtacagaaaggacttcatcatctacagagagcccaacgtgagccccagccaggtgaccgagaacaacttccccgagaaggtgctgctgtgcttcagcaacggcaaccactacgacatcgtgtaccccatcaagtacaaggagagcagcgccatgtgccagagcctgctgtacgagctgctgtacgagaaggtgttcaagaccgacgtgagcaagatcgtgatggagctggacaccctggaggtggccgacgaggacaacagcgagatcagcgacagctag

SEQ ID NO: 193410 - protein, 239 aa, Artificial Sequence
  derived and/or modified sequence
MLLQPAPCAPSAGFPRPLAAPGAMHGSQKDTTFTKIFVGGLPYHTTDASLRKYFEGFGDIEEAVVITDRQTGKSRGYGFVTMADRAAAERACKDPNPIIDGRKANVNLAYLGAKPRSLQTGFAIGVQQLHPTLIQRTYGLTPHYIYPPAIVQPSVVIPAAPVPSLSSPYIEYTPASPAYAQYPPATYDQYPYAASPATAASFVGYSYPAAVPQALSAAAPAGTTFVQYQAPQLQPDRMQ

SEQ ID NO: 193411 - protein, 121 aa, Artificial Sequence
  derived and/or modified sequence
MLLQPAPCAPSAGFPRPLAAPGAMHGSQKDTTFTKIFVGGLPYHTTDASLRKYFEGFGDIEEAVVITDRQTGKSRGYGFVTMADRAAAERACKDPNPIIDGRKANVNLAYLGAKPRSLQTG

SEQ ID NO: 193412 - DNA, 2382 bp, Artificial Sequence
  derived and/or modified sequence
gcagcgccggtcgggagcgcagcgcggcgcacgtcggcgcgcacggcgggacgggcgccggagtggtcgggcctggcggctggacgggcgcccctcgctgccccgcgcgctccccgccgccccccatgagcgcagccccgcgcggcccgggtccgtaggcggcggggcgccccccatgctgctgcagcccgcgccgtgcgccccgagcgcgggcttcccgcggcccctggccgcccccggcgccatgcacggctcgcagaaggacaccacgttcaccaagatcttcgtgggcggcctgccgtaccacactaccgacgcctcgctcaggaagtacttcgagggcttcggcgacatcgaggaggccgtggtcatcaccgaccgccagacgggcaagtcccgcggctacggcttcgtgaccatggccgaccgggcggcagctgagagggcttgcaaagacccgaaccccatcatcgacggccgcaaggccaacgtgaacctggcatatctgggcgccaagccgcggagcctccagacgggctttgccattggggtgcagcagctgcaccccaccttgatccagcggacttacgggctgaccccgcactacatctacccaccagccatcgtgcagcccagcgtggtgatcccagccgcccctgtcccgtcgctgtcctcgccctacattgagtacacgccggccagcccggcctacgcccagtacccaccggccacctatgaccagtacccatacgccgcctcgcctgccacggctgccagcttcgtgggctacagctaccctgccgccgtgccccaggccctctcagccgcagcacccgcgggcaccactttcgtgcagtaccaggcgccgcagctgcagcctgacaggatgcagtgaggggcgttcctgccccgaggactgtggcattgtcaccttcacagcagacagagctgccaggccatgatgggctggcgacagcccggctgagcttcagtgaggtgccaccagcacccgtgcctccgaagaccgctcgggcattccgcctgcgccctgggacagcggagagacggcttctctttaatctaggtcccattgtgtcttgagggaggactttaagaatgactgagaactatttaaagacgcaatcccaggttccttgcacaccatggcagcctctccttgcaccttctcctgcctctccacactccaggttccctcaggcttgtgtccccactgctgcatcgtggcggggtgtcacagaccctctgcagcccctggctgccctggactgtgcagagatgcctgactccagggaaacctgaaagcaagaagttaatggactgtttattgtaacttgatcctcccgagctgtgagcgcagtctgaggtgtgaggacacggcctcctgttggagtcccattttctccatcagggcacgtgggcggcttcctcaagcccggaggagctcccaggcgcacaggggccgccggtaacaggggccgccggccaaaggcccctttccagtcatagcactgaagttgcaacttttttcttgtaattgttttgctactaagataatttcagaagttcagtctattttttcagcggatactgccgccaccaagaatccaaaacctatttttgacttggagagacttgcttttgttggttccgcccgtggagacgacgatagtgtttctgtataataaagtgtctgccggctcgcgggccaggatcctctcggtgggatgggcaccacagacaggaggcccctcaggcccgtgcgggccactgtctgctgccgcctgccggggtggcagagtgagttgtctcaggaccccgtcactgcgacgttgacactcctctcccttcccttcctccccaactccccaaacactgtggaaggggagaaggaagtgatccacagcattcaggccacttggggtctagaccatggtggtgccagcctggggggggcagtggccctcagctctgcccgctggagcggttgagtgcagaagggtgcgcctcttccctctacccccgcaccacctgctgtgtgccagcctgagacggttcctgcctgtcttgggggttggtggagggtggaggcagttctgccagccgtggcagggctgctatggggcatccagggctgtgggggtctggaggaggggacatgaggtgagaggtatcctggccgagggcggggggcagcggggggtctccctccggacctacctcagggagctgagcgtgcaggcgctccagggcaggcctgggacagagtcaaggctcagagaataaaggtagctaatctcatcataatatttttattagaatgttctgatgataaaaataaaacttgttttctttaaagaaaaa

SEQ ID NO: 193413 - DNA, 720 bp, Artificial Sequence
  derived and/or modified sequence
atgctgctgcaaccagctccctgtgccccttcagcgggtttccctaggcctctcgctgcccctggcgcaatgcacggaagtcagaaagatacaacctttaccaagatttttgtagggggcttgccctaccatactacggatgcgagcctgcggaaatatttcgagggattcggcgatatcgaggaggctgtggtaattaccgacagacagacaggaaagtcccggggctacggtttcgtgactatggctgacagagcggccgcggagcgagcatgcaaagacccaaatcccatcattgatggcaggaaagcaaacgtgaacctggcatatttgggcgctaagcctcgcagtttgcagaccggtttcgcaatcggtgtgcagcagctgcatccaaccctcatacagagaacttatggactgactccacactacatatatccccccgccatcgttcagccaagtgtggtcattcccgccgcacctgtcccaagcctgtcttctccctatatcgagtatacgcctgcctctcctgcttacgcccaataccctcccgcaacatacgaccagtacccttacgcagcgtcgcccgctacagcagcgtcattcgtcggatattcgtatccagcggccgttccacaagccctttccgcagcggctccagcaggtacaacgtttgtgcagtaccaagcaccacagctgcaaccagacaggatgcagtag

SEQ ID NO: 193414 - DNA, 477 bp, Artificial Sequence
  derived and/or modified sequence
atggccgatcgagccgcagcagagcgtgcctgcaaagacccaaaccccattatcgatgggcggaaagcaaacgttaacttggcctaccttggagctaaaccgcggagtttacagaccggcttcgccatcggagtccagcaactgcatcctaccctcatccagaggacctatggcctgacccctcactatatctacccgccagccattgtgcaaccgagcgtggtgatccctgccgctccggtgccctctctgagctccccctacattgagtacaccccggctagccccgcgtacgcccagtacccccctgctacctacgaccaatacccctacgctgcctcacccgcaactgctgcgtccttcgtgggctactcgtatccagcagcagtgccccaggctctaagcgccgcagccccagccgggactactttcgttcaataccaggcgccacagttacaacctgataggatgcagtag

SEQ ID NO: 193415 - DNA, 720 bp, Artificial Sequence
  derived and/or modified sequence
atgctgctgcagcctgccccctgtgcccccagcgctggcttcccccggcccctggccgcccctggggccatgcacggcagccagaaggacaccaccttcaccaagatctttgtgggcggcctgccctaccacaccacagatgccagcctgaggaagtactttgagggctttggagacatcgaggaggccgtggtgatcacagaccggcagacaggcaagagccggggctacggctttgtgaccatggctgacagagctgctgctgagcgggcctgcaaggaccccaaccccatcattgatggcaggaaggccaacgtgaacctggcctacctgggcgccaagcccaggagcctgcagacaggctttgccatcggcgtgcagcagctgcaccccaccctcatccagaggacctacggcctgaccccccactacatctaccccccagccatcgtgcagcccagcgtggtgatcccagctgcccctgtgcccagcctgagcagcccctacatcgagtacaccccagccagccctgcctatgcccagtaccccccagccacctatgaccagtacccctatgctgccagccctgccacagctgccagctttgtgggctacagctacccagctgctgtgccccaggccctgtctgctgctgccccagctggcaccacctttgtgcagtaccaggccccccagctgcagcctgacaggatgcagtag

SEQ ID NO: 193416 - DNA, 477 bp, Artificial Sequence
  derived and/or modified sequence
atggctgacagagctgctgctgagcgggcctgcaaggaccccaaccccatcattgatggcaggaaggccaacgtgaacctggcctacctgggcgccaagcccaggagcctgcagacaggctttgccatcggcgtgcagcagctgcaccccaccctcatccagaggacctacggcctgaccccccactacatctaccccccagccatcgtgcagcccagcgtggtgatcccagctgcccctgtgcccagcctgagcagcccctacatcgagtacaccccagccagccctgcctatgcccagtaccccccagccacctatgaccagtacccctatgctgccagccctgccacagctgccagctttgtgggctacagctacccagctgctgtgccccaggccctgtctgctgctgccccagctggcaccacctttgtgcagtaccaggccccccagctgcagcctgacaggatgcagtag

SEQ ID NO: 193417 - DNA, 720 bp, Artificial Sequence
  derived and/or modified sequence
atgctgctgcagcccgccccctgcgcccccagcgccggcttccccagacccctggccgcccctggggccatgcacggatcccaaaaagacacgacgttcacaaaaatttttgtaggcggattaccataccataccactgacgcctcacttcggaaatattttgaggggttcggggatatagaagaggctgtcgtgatcacggataggcaaacaggcaagtctaggggctatggttttgtcaccatggctgaccgggccgccgccgagcgggcctgcaaggatccaaaccctatcatcgatggccgaaaggccaacgttaacctggcttacctgggagccaagccccgcagtttacagactgggttcgccataggcgttcagcagctccatcccactctcatccagcgcacctatggtctgaccccacactacatttatcctcctgcaatcgtgcagccttctgttgttatccctgcggctcccgttccctcactgtcctctccctatatcgagtacaccccagcctcccctgcctacgcccagtatcctcctgctacttacgaccagtacccatacgcagcttccccggctacagctgcttcattcgtcggatactcttacccagcggccgttccccaggcgctgtctgcagctgctcctgccggaactacattcgttcagtaccaggcacctcagctgcaacccgacagaatgcaatag

SEQ ID NO: 193418 - DNA, 477 bp, Artificial Sequence
  derived and/or modified sequence
atggccgaccgggccgccgccgagcgggcctgcaaggaccccaaccccattattgatggaaggaaagccaatgtcaacctggcttacttgggagcaaagccaagatcactgcagacgggttttgcaatcggtgtacaacaactgcatccgactctgatccagagaacctacggcctcacgcctcattacatataccctccagccattgtgcagccctctgtcgtgatacctgccgcaccagtccctagcttgagcagtccttacatcgagtacacacctgcctcacctgcgtatgcccagtacccccccgccacctacgatcagtatccctacgccgccagcccggcgacagccgcctcatttgtgggttacagttacccggctgccgtaccgcaggctttgagcgcagctgcccctgcgggcaccacgtttgtacagtatcaggcaccgcaattgcagccggaccgcatgcagtag

SEQ ID NO: 193419 - DNA, 720 bp, Artificial Sequence
  derived and/or modified sequence
atgcttcttcaacctgcaccatgtgcgccttctgccggattcccacgccctctggcagcaccaggtgcgatgcacggcagtcagaaggacacaacattcaccaagatctttgtgggcggactgccataccacaccacagacgcttcgctcaggaaatacttcgagggattcggagacatcgaggaggctgtggtgataaccgatcgacagaccggtaagtcaagaggttacgggtttgtgaccatggcggatagggccgcagctgagagagcctgtaaggaccctaatcctatcattgacggcagaaaagctaatgtgaacctggcatatctaggagctaagccccgatctttgcagacaggtttcgcaatcggggtgcaacagctgcatcccacactgattcaacgaacatacggcctgaccccacactatatttatcctcctgctatagtacagccaagtgtggtaatccccgcagctcctgtgcctagtctgtccagcccctatatcgagtatacccccgcttccccagcgtacgcacaatacccaccagcaacctatgaccagtatccatacgcagccagccctgccacagccgctagtttcgtcggctactcatatccagccgctgtccctcaggccttgtcggcagcggctcccgcagggacaacatttgtccaataccaggcaccacagctgcagcctgaccgcatgcagtag

SEQ ID NO: 193420 - DNA, 477 bp, Artificial Sequence
  derived and/or modified sequence
atggctgaccgagcagcggcagagcgggcatgcaaggatccgaacccaatcatcgatggcaggaaggcgaatgtgaatctcgcctatttgggcgcaaaacctaggagccttcagaccggatttgccataggagtacaacagctgcacccaaccctcatccagagaacctatggactcactcctcattatatttacccaccagcgatagtgcaaccctctgtggtgatccccgctgcacctgtgccgtcgttgtcctccccttatattgaatatacacccgcatcccctgcctacgctcagtaccccccagccacgtatgaccaatacccatatgccgcatctcccgctaccgccgcttcattcgttgggtattcttatcctgccgctgtaccgcaggccctcagtgctgctgccccagctggaactacattcgtgcagtatcaggccccacaactgcaacccgaccgaatgcagtag

SEQ ID NO: 193421 - DNA, 720 bp, Artificial Sequence
  derived and/or modified sequence
atgctgctgcagcccgccccctgcgcccccagcgccggcttccccagacccctggccgcccccggcgccatgcacggcagccagaaggacaccaccttcaccaagatcttcgtgggcggcctgccctaccacaccaccgacgccagcctgagaaagtacttcgagggcttcggcgacatcgaggaggccgtggtgatcaccgacagacagaccggcaagagcagaggctacggcttcgtgaccatggccgacagagccgccgccgagagagcctgcaaggaccccaaccccatcatcgacggcagaaaggccaacgtgaacctggcctacctgggcgccaagcccagaagcctgcagaccggcttcgccatcggcgtgcagcagctgcaccccaccctgatccagagaacctacggcctgaccccccactacatctacccccccgccatcgtgcagcccagcgtggtgatccccgccgcccccgtgcccagcctgagcagcccctacatcgagtacacccccgccagccccgcctacgcccagtacccccccgccacctacgaccagtacccctacgccgccagccccgccaccgccgccagcttcgtgggctacagctaccccgccgccgtgccccaggccctgagcgccgccgcccccgccggcaccaccttcgtgcagtaccaggccccccagctgcagcccgacagaatgcagtag

SEQ ID NO: 193422 - DNA, 477 bp, Artificial Sequence
  derived and/or modified sequence
atggccgacagagccgccgccgagagagcctgcaaggaccccaaccccatcatcgacggcagaaaggccaacgtgaacctggcctacctgggcgccaagcccagaagcctgcagaccggcttcgccatcggcgtgcagcagctgcaccccaccctgatccagagaacctacggcctgaccccccactacatctacccccccgccatcgtgcagcccagcgtggtgatccccgccgcccccgtgcccagcctgagcagcccctacatcgagtacacccccgccagccccgcctacgcccagtacccccccgccacctacgaccagtacccctacgccgccagccccgccaccgccgccagcttcgtgggctacagctaccccgccgccgtgccccaggccctgagcgccgccgcccccgccggcaccaccttcgtgcagtaccaggccccccagctgcagcccgacagaatgcagtag

SEQ ID NO: 193423 - protein, 311 aa, Artificial Sequence
  derived and/or modified sequence
MVWENQTFNSIFILLGIFNHSPTHTFLFSLVLGIFSLALMENISMVLLIYIEKQLHTPMYFLLSQLSLMDLMLICTTLPKMIFSYLSGKKSISLAGCGTQIFFYVSLLGAECFLLAVMAYDRYVAICHPLQYTILMNPKLCVFMTVASWTLGSLDGIIVLAAVLSFSYCSSLEIHHFFCDVAALLPLSCTETSAFERLLVICCVVMLIFPVSVIILSYSHVLRAVIHMGSGESRRKAFTTCSSHLSVVGLYYGAAMFMYMRPASKHTPDQDKMVSAFYTILTPMLNPLIYSLRNKEVFRALQKVLKKRKLI

SEQ ID NO: 193424 - DNA, 936 bp, Artificial Sequence
  derived and/or modified sequence
atggtgtgggagaaccagaccttcaacagcatcttcatcctgctgggcatcttcaaccacagccccacccacaccttcctgttcagcctggtgctgggcatcttcagcctggccctgatggagaacatcagcatggtgctgctgatctacatcgagaagcagctgcacacccccatgtacttcctgctgagccagctgagcctgatggacctgatgctgatctgcaccaccctgcccaagatgatcttcagctacctgagcggcaagaagagcatcagcctggccggctgcggcacccagatcttcttctacgtgagcctgctgggcgccgagtgcttcctgctggccgtgatggcctacgacagatacgtggccatctgccaccccctgcagtacaccatcctgatgaaccccaagctgtgcgtgttcatgaccgtggccagctggaccctgggcagcctggacggcatcatcgtgctggccgccgtgctgagcttcagctactgcagcagcctggagatccaccacttcttctgcgacgtggccgccctgctgcccctgagctgcaccgagaccagcgccttcgagagactgctggtgatctgctgcgtggtgatgctgatcttccccgtgagcgtgatcatcctgagctacagccacgtgctgagagccgtgatccacatgggcagcggcgagagcagaagaaaggccttcaccacctgcagcagccacctgagcgtggtgggcctgtactacggcgccgccatgttcatgtacatgagacccgccagcaagcacacccccgaccaggacaagatggtgagcgccttctacaccatcctgacccccatgctgaaccccctgatctacagcctgagaaacaaggaggtgttcagagccctgcagaaggtgctgaagaagagaaagctgatctag

SEQ ID NO: 193425 - DNA, 936 bp, Artificial Sequence
  derived and/or modified sequence
atggtctgggagaatcaaacctttaactcaatctttattcttctcggcatatttaatcacagcccaactcacacctttctcttcagcttggtgcttggaattttctcactcgccctgatggagaacattagtatggtccttctcatttacatcgagaagcaactacacactcccatgtacttcctgctttctcagctttcgcttatggatctgatgttgatttgcaccacacttcccaaaatgattttttcttacctgtccgggaaaaagagcatttccctggccggatgtgggacccaaatatttttttacgtgtcactcctcggcgctgagtgtttcctgcttgccgtcatggcctacgatcggtacgtagctatatgtcacccactccagtatacgatcctcatgaatcccaagctctgcgtattcatgaccgtcgccagctggactctcggtagtttggatggcatcattgtgcttgctgccgtcctgagcttctcttattgcagtagtctggagatacaccactttttttgtgatgttgccgccctgctgccactctcatgcacggagaccagcgccttcgaaagacttctcgtaatctgctgtgtggtcatgctgattttccccgtgagtgtgattatactgtcttactctcacgttctgagagcggtcattcatatgggaagcggggagtctaggcggaaggcttttactacatgttcttcccacctttctgtagttgggctttattatggcgcggccatgttcatgtatatgagaccggcaagcaaacatactcccgaccaggacaagatggtgtcagccttctacactatcttgaccccgatgctcaacccactcatatactctctgcggaacaaagaggtgtttagagcactccagaaggtgctaaaaaaaagaaaacttatctag

SEQ ID NO: 193426 - DNA, 936 bp, Artificial Sequence
  derived and/or modified sequence
atggtgtgggagaaccagaccttcaacagcatcttcatcctgctgggcatcttcaaccacagccccacccacaccttcctgttcagcctggtgctgggcatcttcagcctggccctgatggagaacatctccatggtgctgctgatctacatcgagaagcagctgcacacccccatgtacttcctgctgagccagctgagcctgatggacctgatgctgatctgcaccaccctgcccaagatgatcttctcctacctgagcggcaagaagagcatcagcctggccggctgcggcacccagatcttcttctacgtgtccctgctgggcgctgagtgcttcctgctggccgtgatggcctatgacagatatgtggccatctgccaccccctgcagtacaccatcctgatgaaccccaagctgtgtgtgttcatgacagtggcctcctggaccctgggcagcctggatggcatcatcgtgctggccgctgtgctgtccttctcctactgcagcagcctggagatccaccacttcttctgtgatgtggccgccctgctgcccctgagctgcacagagaccagcgcctttgagcggctgctggtgatctgctgcgtggtgatgctgatcttccctgtgtctgtcatcatcctgagctacagccacgtgctgcgggccgtcatccacatgggcagcggggagagcaggaggaaggccttcaccacctgcagcagccacctgtctgtggtgggcctgtactacggggccgccatgttcatgtacatgaggcctgccagcaagcacaccccagaccaggacaagatggtgtctgccttctacaccatcctgacccccatgctgaaccccctcatctacagcctgaggaacaaggaggtgttccgggccctgcagaaggtgctgaagaagaggaagctgatctag

SEQ ID NO: 193427 - DNA, 936 bp, Artificial Sequence
  derived and/or modified sequence
atggtgtgggaaaaccagaccttcaactccatcttcatcctgctgggaatcttcaatcacagtcccacccacaccttccttttttctctggtcctgggcatcttctcactggcattgatggaaaatatttccatggttctcctcatctacatagagaaacagctccacacccccatgtacttcctcctcagtcaactgtcccttatggacctcatgctcatctgcaccactctacccaagatgatcttcagctacttgtctgggaagaaatctatctctctggcaggttgtggaactcagatattcttctatgtgtccctgcttggagctgaatgtttcttgttggctgtcatggcttatgaccgctatgtggctatatgtcaccctcttcagtacaccatcctcatgaatccgaaactctgtgtcttcatgactgttgcttcctggaccttggggtctcttgatgggatcatagtgcttgcagctgtcctgtcattttcttactgcagctctctggaaattcatcactttttctgtgatgttgctgcccttttacctctatcctgcacagaaacatctgcatttgaaagactacttgtcatttgttgtgtggtaatgctaatctttccagtttcagttatcatactttcctattcccatgtccttcgagccgtcatccacatgggctctggggaaagtcgtcgcaaggccttcactacctgctcctcccacctgtctgtggtcggactctactacggtgctgctatgttcatgtacatgagaccagcttctaaacatacgccagaccaggacaagatggtgtcggccttctacactattctcacccctatgctgaaccctctcatttatagcctccgcaacaaagaagtgttcagggcactacagaaggtactgaagaaaagaaagttaatatga

SEQ ID NO: 193428 - DNA, 936 bp, Artificial Sequence
  derived and/or modified sequence
atggtgtgggagaaccagaccttcaacagcatcttcatcctgctggggatcttcaatcactccccgacacacacattcctgttttccctggttttaggcatcttctcacttgccctgatggagaatatctctatggtgttgctcatttacattgagaaacaactgcacaccccgatgtactttctgttgtcccagcttagcctgatggatcttatgctgatatgtaccactctgccaaagatgatattcagttacctttccgggaaaaagtcaatctcacttgctgggtgcggaactcagatctttttctacgtctctctgctcggtgctgaatgttttcttctagccgttatggcttatgataggtatgtggcaatctgccacccactccagtacacgattttgatgaatcccaagctgtgtgtgttcatgaccgttgcaagttggaccctgggtagtctggatggaattattgtcctggctgcagtcttatcattcagttactgcagttccctggaaatccaccacttcttttgcgatgttgctgcacttctgcccctgtcctgcacagaaacctcagctttcgaacggcttcttgtgatatgctgcgtggtcatgctcattttccccgtatctgtaattatattatcttattcccacgttctgcgcgccgtgattcacatggggtccggggaaagcaggcgtaaggctttcactacgtgtagcagtcacctctcggtggtgggtctgtactatggggcggccatgttcatgtacatgcggcctgcatcaaaacatacaccagaccaagataaaatggttagcgctttttacaccatcctgactcctatgctgaatcccctaatttacagtttacgcaacaaagaggtgttcagggcattacaaaaggttctcaagaagagaaagttaatttag

SEQ ID NO: 193429 - DNA, 936 bp, Artificial Sequence
  derived and/or modified sequence
atggtttgggaaaatcagaccttcaactctattttcattctactggggatcttcaaccactcccccacacacaccttcctattctctctcgtcctgggaattttttctttggccctcatggaaaacatatcaatggttctgctgatttacatcgagaagcagctccacacacccatgtatttcctattgagccagctctccttgatggacctgatgctgatctgcacgactctccctaaaatgatttttagctatctgtccggaaagaaatccatcagcctcgctggatgtggaactcagatttttttttacgtttcactcctgggcgctgagtgttttctgcttgcagtgatggcgtacgatagatatgtggcaatttgccaccctttgcaatatacgatcctgatgaatccaaagctttgcgtgtttatgacagtggctagctggaccctcggatcactggacggtattatagtgctggccgcagttctctccttcagttattgctcgtctctcgagatacaccactttttctgtgacgtcgcagcgctgttgccactgagttgcactgagacaagtgcatttgagcgtctactggtcatatgttgtgtggttatgctaatctttccggtgtctgtgatcattctgtcctattctcatgtgctgagagccgtgatccatatggggtccggggagagtaggcgcaaagcgtttacgacttgcagttctcatctctccgttgtggggctctactatggggctgctatgttcatgtatatgcgtcccgcaagcaagcacacccccgaccaggataaaatggttagcgccttttatacaatactgacacccatgctgaatccccttatatactcgctcaggaacaaagaggtctttcgtgccttgcagaaggttctgaaaaagcggaaattgatctag

SEQ ID NO: 193430 - DNA, 1410 bp, Artificial Sequence
  derived and/or modified sequence
atgaagtgggaggaccagaacatcggcgaccagtgccagaacgccaagagaaacctgagaagccacacctgcgagatcaaggacgacagccagtgcggcgagaccttcggccagatccccgacagcatcgtgaacaagaacacccccagagtgaacccctgcgacagcggcgagtgcggcgaggtggtgctgggccacagcagcctgaactgcaacatcagagtggacaccggccacaagagctgcgagcaccaggagtacggcgagaagccctacacccacaagcagagaggcaaggccatcagccaccagcacagcttccagacccacgagagaccccccaccggcaagaagcccttcgactgcaaggagtgcgccaagaccttcagcagcctgggcaacctgagaagacacatggccgcccaccacggcgacggcccctacaagtgcaagctgtgcggcaaggccttcgtgtggcccagcctgttccacctgcacgagagaacccacaccggcgagaagccctacgagtgcaagcagtgcagcaaggccttccccttctacagcagctacctgagacacgagagaatccacaccggcgagaaggcctacgagtgcaagcagtgcagcaaggccttccccgactacagcacctacctgagacacgagagaacccacaccggcgagaagccctacaagtgcacccagtgcggcaaggccttcagctgctactactacaccagactgcacgagagaacccacaccggcgagcagccctacgcctgcaagcagtgcggcaagaccttctaccaccacaccagcttcagaagacacatgatcagacacaccggcgacggcccccacaagtgcaagatctgcggcaagggcttcgactgccccagcagcgtgagaaaccacgagaccacccacaccggcgagaagccctacgagtgcaagcagtgcggcaaggtgctgagccacagcagcagcttcagaagccacatgatcacccacaccggcgacggcccccagaagtgcaagatctgcggcaaggccttcggctgccccagcctgttccagagacacgagagaacccacaccggcgagaagccctaccagtgcaagcagtgcggcaaggccttcagcctggccggcagcctgagaagacacgaggccacccacaccggcgtgaagccctacaagtgccagtgcggcaaggccttcagcgacctgagcagcttccagaaccacgagaccacccacaccggcgagaagccctacgagtgcaaggagtgcggcaaggccttcagctgcttcaagtacctgagccagcacaagagaacccacaccgtggagaagccctacgagtgcaagacctgcagaaaggccttcagccacttcagcaactag

SEQ ID NO: 193431 - DNA, 1410 bp, Artificial Sequence
  derived and/or modified sequence
atgaagtgggaggatcagaacatcggtgatcagtgccagaacgccaagagaaacctaaggtcccatacttgtgaaatcaaggacgactctcagtgtggggaaacttttggtcagattcctgactcgatcgtaaacaaaaacacacccagggtcaatccttgtgattccggggagtgtggagaagttgtactcggccactcgtctcttaattgtaacatcagagtggatacaggccacaagagttgtgaacaccaggagtacggcgagaaaccttacacacacaaacaaaggggtaaggccatcagccatcagcattcttttcagacccatgagagaccaccgactggcaaaaagccgtttgactgcaaagaatgtgccaagacctttagtagtctgggtaatttgaggcgccacatggctgcccaccacggagatggaccatacaaatgtaagctgtgcggcaaggcttttgtgtggccttcgcttttccatctccacgaacgcactcacaccggggagaaaccgtacgagtgcaagcagtgctctaaggctttcccattctattcttcgtacctaaggcatgagagaatccacaccggagagaaagcctatgaatgtaaacagtgcagcaaggcttttccggactacagcacgtacctgagacatgaaagaacccacacaggcgagaagccctacaagtgcacccagtgtgggaaagccttctcctgttactattacacgcgactccatgagcggactcacaccggagagcaaccctatgcctgtaaacagtgcggtaaaaccttctatcatcatacgagcttcaggagacatatgattcggcatacgggtgacgggccgcacaagtgtaaaatatgtggcaaaggctttgattgcccatcctccgtgagaaaccacgagaccacccacacaggagagaagccgtacgaatgtaagcagtgtggcaaggttctaagccactcaagctctttccgttcacacatgatcactcacacaggagatgggcctcagaaatgcaaaatatgcggaaaagcattcggctgtccatcacttttccaaagacatgagcggacacataccggagagaagccctaccagtgcaaacagtgcggtaaggcatttagcctggccggctctctgcgaaggcacgaagcgactcataccggtgtcaaaccatataagtgtcagtgcggcaaggcattcagcgatctttcttcattccagaatcatgagacaacacacacaggcgagaagccctatgagtgcaaagagtgtgggaaggcatttagctgctttaaatacctgagtcagcataagcggacacacacggtggagaaaccatatgaatgcaagacctgtcgtaaggcattcagtcatttctcaaattag

SEQ ID NO: 193432 - DNA, 1410 bp, Artificial Sequence
  derived and/or modified sequence
atgaagtgggaggaccagaacatcggggaccagtgccagaatgccaagaggaacctgcggagccacacctgtgagatcaaggatgacagccagtgtggggagaccttcggccagatcccagacagcatcgtgaacaagaacaccccccgggtgaacccctgtgacagcggggagtgtggggaggtggtgctgggccacagcagcctgaactgcaacatccgggtggacaccggccacaagagctgtgagcaccaggagtatggagagaagccctacacccacaagcagaggggcaaggccatcagccaccagcacagcttccagacccatgagcggcccccaacaggcaagaagccctttgactgcaaggaatgtgccaagaccttcagcagcctgggcaacctgcggcggcacatggccgcccaccacggagatggcccctacaagtgcaagctgtgtgggaaggcctttgtgtggcccagcctcttccacctgcacgagaggacccacactggagagaagccctatgagtgcaagcagtgcagcaaggccttccccttctacagcagctacctgcggcatgagcgcatccacactggagagaaggcctatgagtgcaagcagtgcagcaaggccttcccagactacagcacctacctgcggcatgagaggacccacactggagagaagccctacaagtgcacccagtgtgggaaggccttcagctgctactactacacccggctgcacgagaggacccacactggagagcagccctatgcctgcaagcagtgtgggaagaccttctaccaccacaccagcttccgccgccacatgatccgccacactggagatggcccccacaagtgcaagatctgtgggaaaggatttgactgccccagctctgtgaggaaccacgagaccacccacactggagagaagccctatgagtgcaagcagtgtgggaaggtgctgagccacagcagcagcttccgcagccacatgatcacccacactggagatggcccccagaagtgcaagatctgtgggaaggccttcggctgccccagcctcttccagagacatgagaggacccacactggagagaagccctaccagtgcaagcagtgtgggaaggccttcagcctggccggcagcctgcggagacatgaggccacccacactggagtgaagccctacaagtgccagtgtgggaaggccttcagtgacctgagcagcttccagaaccacgagaccacccacactggagagaagccctatgagtgcaaggaatgtgggaaggccttcagctgcttcaagtacctgagccagcacaagaggacccacacagtggagaagccctatgagtgcaagacctgcaggaaggccttcagccacttcagcaactag

SEQ ID NO: 193433 - DNA, 1410 bp, Artificial Sequence
  derived and/or modified sequence
atgaagtgggaggaccagaacatcggcgaccagtgccagaacgccaaacgtaatctgcggagccacacttgcgagatcaaagacgacagtcagtgcggggagacctttggccaaatccccgattccattgtcaacaaaaatactccacgagttaatccctgcgacagtggcgaatgcggggaggtcgtgctggggcacagcagcctgaactgtaatatccgagtcgatactgggcacaaatcctgcgaacatcaggaatatggtgaaaaaccgtatacccacaaacagcgggggaaggcaatcagtcatcaacacagctttcagacgcacgagcgaccgcccactgggaaaaagccatttgactgtaaggagtgcgcgaaaacgttctcatccctgggtaatctacgcaggcacatggccgcccaccacggggatggcccatataagtgtaagctttgtggaaaggcgtttgtctggcctagcctcttccaccttcacgaaagaacccacaccggtgaaaaaccctacgaatgcaagcagtgctcaaaggctttcccattttactcctcatatttgcggcatgagcgtatacacaccggcgagaaagcctatgaatgtaaacagtgcagcaaagcctttcccgactattctacatatctgagacatgagagaacacatacaggcgagaagccatacaaatgcacccagtgcggtaaagcctttagctgctactattacacccgccttcacgaaagaacacatacgggcgagcagccttatgcctgtaaacagtgcggcaaaaccttttaccatcatacttccttcagacggcacatgattcggcacacaggagacgggccccataaatgtaaaatatgtgggaagggattcgattgtccgagttcagtgcggaatcatgaaaccactcataccggcgaaaagccctatgagtgtaaacagtgtggtaaagtcctgagtcattcctcttcctttcgttcccacatgattactcacaccggagacgggccacagaaatgcaaaatctgtggcaaagctttcggttgccccagcctctttcagagacatgagcgcactcacaccggagagaaaccctatcagtgcaaacagtgtggtaaggcattttctctcgcagggtcactgcgccggcatgaggccacccacaccggcgtcaagccctacaagtgtcagtgcggcaaggccttcagcgacttatcttcattccagaaccatgagaccactcacacaggcgagaaaccatacgaatgcaaagagtgtggaaaagcattttcttgttttaaatacttgagccagcataagcggacccacaccgtcgagaagccctatgagtgcaagacgtgcaggaaggccttttcccatttttccaactag

SEQ ID NO: 193434 - DNA, 1410 bp, Artificial Sequence
  derived and/or modified sequence
atgaaatgggaggaccagaatattggagaccagtgccagaacgcaaagagaaatctgagatcgcacacatgtgagattaaggacgattcccaatgtggggagacatttgggcagattcccgattcaattgtgaataagaatacacctcgtgtcaacccatgcgacagcggcgagtgtggagaagtagtgctgggccattcatccctgaactgtaacattagagttgataccggccacaaatcatgcgaacatcaggaatacggcgagaagccatacacccacaaacagcgaggtaaagcgatatctcaccagcatagctttcagacacacgagcggcctcccaccggcaaaaaaccttttgactgtaaagaatgtgcaaagacttttagcagtctcggcaatctccgcaggcatatggcagctcaccatggcgatgggccttacaagtgcaaactttgcggcaaagcctttgtgtggccgagcctgttccaccttcacgagaggacccacacgggtgaaaaaccgtatgagtgtaagcaatgtagtaaggcgtttcccttctactcctcttacctgcggcatgagagaattcacaccggagagaaagcttatgagtgcaagcagtgttccaaagccttccccgattacagtacgtatctaaggcatgagcggacccacacgggtgaaaagccttacaagtgcacacagtgtggtaaggctttctcctgctattactacacccggctacacgagcgtacccacaccggagaacagccttatgcctgcaaacaatgtggaaagacattttatcaccacacaagctttcgccgacacatgattcgccatacaggcgacggcccacacaaatgcaagatttgcggtaaaggttttgactgtccatcctccgtgagaaaccatgaaaccacccacaccggcgagaaaccttatgaatgcaaacagtgcggtaaagtgctgagtcactccagcagtttccgcagccacatgattactcatacaggcgacgggcctcaaaagtgtaaaatctgcggcaaggcctttggctgcccaagcctcttccagcgtcacgaaagaacacacacaggcgagaaaccttaccagtgcaagcagtgcgggaaggcattctcgctggctgggagccttcgaagacatgaagccactcacacaggagtgaagccctacaaatgtcaatgcggcaaggcctttagcgatttatcttcctttcagaaccacgagacaactcacactggggaaaaaccgtatgagtgcaaagagtgtggaaaggcgttctcctgcttcaaatacttgtcgcaacataaaaggacacatacggtagagaagccatacgagtgcaaaacatgccgcaaagccttctcgcatttcagtaactag

SEQ ID NO: 193435 - DNA, 2361 bp, Artificial Sequence
  derived and/or modified sequence
aaagagcccgcggagtcttctccacgcccctgcgctctgagtcctggctctggcgctgagagagagacgccctggaaggtctgtatcagcgtctgtcgcgctgggacccacactggcttttaaggaggacacccggacacctggaagctgggaaatggactcagtggcctttgaagatgtggctgtgaacttcacacaagaggagtgggctttgctgggtccatcacagaagagtctctacagaaatgtcatgcaggaaaccattaggaacctggactgtatagaagtcatacatgtgaaattaaagatgacagtcaatgtggagaaacttttggccagattccagatagtattgtgaacaagaacactcctcgagtaaatccatgtgacagtggtgagtgtggagaagtcgtcttgggtcattcgtctcttaattgcaacatcagagttgacactggacacaaatcatgtgagcatcaggaatatggagagaagccatatacacataaacaacgtgggaaagccatcagtcatcagcactccttccagacacatgaaaggccccccaccggaaagaaacccttcgattgtaaagaatgtgcaaaaacctttagttctcttggaaacctccgaagacacatggcggcacaccatggagatggaccttataaatgtaagttgtgtgggaaagcctttgtttggcccagtttatttcatttgcacgaaagaacacacactggagagaaaccgtatgaatgtaagcagtgttctaaagcctttcctttttacagttcctatctaagacatgaaagaatccacacgggagagaaagcgtatgaatgtaagcagtgttccaaagcctttcctgattacagtacctatctaagacatgagagaactcacaccggagagaaaccctataaatgtacacaatgtgggaaagccttcagctgttactattacactcgactacatgaaaggactcacacgggagaacaaccctatgcatgtaagcaatgtgggaaaacgttttatcatcacacaagctttcgaagacacatgataaggcacactggagacggaccacataaatgtaagatatgtgggaaaggctttgattgtcctagttcagttcgaaatcatgaaactactcacactggagagaaaccctatgaatgtaagcagtgtgggaaagtgttatctcatagctcgagctttcgaagtcacatgataacacacacaggagatggaccccagaaatgcaagatatgtgggaaagcctttggttgtcccagtttatttcaaagacatgaaaggactcacactggagagaaaccctatcaatgtaaacaatgtggtaaagccttcagtcttgccggttcccttcgaagacatgaagcaactcacactggagtgaaaccctataaatgtcagtgtgggaaagcctttagtgatctctcttcctttcaaaatcatgagacaactcacactggagagaagccatatgagtgtaaggaatgtgggaaagcattcagttgtttcaaatacctttctcaacataaaaggacccacacagtagaaaaaccttatgagtgtaaaacatgtagaaaagccttcagtcatttcagtaacttaaaagtccatgaaaggattcactctggagagaagccatatgaatgtaaggaatgtggaaaagcattctcttggctcacttgccttctacgacatgaaagaattcacactggagagaaaccctatgaatgtctacaatgtggtaaagccttcactcgttcccgtttccttcgaggacatgaaaaaactcacactggagagaagctgtatgaatgtaaggaatgtgggaaagcattgagttctctccgttccttgcatagacataaaaggactcactggaaagatactctctaaatgtatggaatgtgggaaaacattcagtactttaatttcagaaacttgaaagaactcactttggagatagaccctatgaatgtaaacatgggataaagccttaagtagtttcaatttttttaaatacagttatcccccaatatattgcaggggattggttccagcaccctctaaatccacagatgccaagtcctttgttatatggcatatttgcatgtaacctatgcatatcttccagtatactgtgtaaatcatctctagatgacttttaatacctcatgcattgtaaaagctatgtaaatagttgtttgattgtattgtttagagaatcatgacaagaaaaatagtctctacatgttcgatgcagacacaaccattgcaggcccacctacgtggtatatgtcacccagaacattaaaatttgttttaacattc

SEQ ID NO: 193436 - protein, 801 aa, Artificial Sequence
  derived and/or modified sequence
MSSKQATSPFACAADGEDAMTQDLTSREKEEGSDQHVASHLPLHPIMHNKPHSEELPTLVSTIQQDADWDSVLSSQQRMESENNKLCSLYSFRNTSTSPHKPDEGSRDREIMTSVTFGTPERRKGSLADVVDTLKQKKLEEMTRTEQEDSSCMEKLLSKDWKEKMERLNTSELLGEIKGTPESLAEKERQLSTMITQLISLREQLLAAHDEQKKLAASQIEKQRQQMDLARQQQEQIARQQQQLLQQQHKINLLQQQIQVQGHMPPLMIPIFPHDQRTLAAAAAAQQGFLFPPGITYKPGDNYPVQFIPSTMAAAAASGLSPLQLQQLYAAQLASMQVSPGAKMPSTPQPPNTAGTVSPTGIKNEKRGTSPVTQVKDEAAAQPLNLSSRPKTAEPVKSPTSPTQNLFPASKTSPVNLPNKSSIPSPIGGSLGRGSSLGKWKSQHQEETYELDILSSLNSPALFGDQDTVMKAIQEARKMREQIQREQQQQQPHGVDGKLSSINNMGLNSCRNEKERTRFENLGPQLTGKSNEDGKLGPGVIDLTRPEDAEGSKAMNGSAAKLQQYYCWPTGGATVAEARVYRDARGRASSEPHIKRPMNAFMVWAKDERRKILQAFPDMHNSNISKILGSRWKSMSNQEKQPYYEEQARLSKIHLEKYPNYKYKPRPKRTCIVDGKKLRIGEYKQLMRSRRQEMRQFFTVGQQPQIPITTGTGVVYPGAITMATTTPSPQMTSDCSSTSASPEPSLPVIQSTYGMKTDGGSLAGNEMINGEDEMEMYDDYEDDPKSDYSSENEAPEAVSAN

SEQ ID NO: 193437 - protein, 804 aa, Artificial Sequence
  derived and/or modified sequence
MGRMSSKQATSPFACAADGEDAMTQDLTSREKEEGSDQHVASHLPLHPIMHNKPHSEELPTLVSTIQQDADWDSVLSSQQRMESENNKLCSLYSFRNTSTSPHKPDEGSRDREIMTSVTFGTPERRKGSLADVVDTLKQKKLEEMTRTEQEDSSCMEKLLSKDWKEKMERLNTSELLGEIKGTPESLAEKERQLSTMITQLISLREQLLAAHDEQKKLAASQIEKQRQQMDLARQQQEQIARQQQQLLQQQHKINLLQQQIQVQGHMPPLMIPIFPHDQRTLAAAAAAQQGFLFPPGITYKPGDNYPVQFIPSTMAAAAASGLSPLQLQQLYAAQLASMQVSPGAKMPSTPQPPNTAGTVSPTGIKNEKRGTSPVTQVKDEAAAQPLNLSSRPKTAEPVKSPTSPTQNLFPASKTSPVNLPNKSSIPSPIGGSLGRGSSLGKWKSQHQEETYELDILSSLNSPALFGDQDTVMKAIQEARKMREQIQREQQQQQPHGVDGKLSSINNMGLNSCRNEKERTRFENLGPQLTGKSNEDGKLGPGVIDLTRPEDAEGSKAMNGSAAKLQQYYCWPTGGATVAEARVYRDARGRASSEPHIKRPMNAFMVWAKDERRKILQAFPDMHNSNISKILGSRWKSMSNQEKQPYYEEQARLSKIHLEKYPNYKYKPRPKRTCIVDGKKLRIGEYKQLMRSRRQEMRQFFTVGQQPQIPITTGTGVVYPGAITMATTTPSPQMTSDCSSTSASPEPSLPVIQSTYGMKTDGGSLAGNEMINGEDEMEMYDDYEDDPKSDYSSENEAPEAVSAN

SEQ ID NO: 193438 - DNA, 2406 bp, Artificial Sequence
  derived and/or modified sequence
atgagcagcaagcaggccaccagccccttcgcctgcgccgccgacggcgaggacgccatgacccaggacctgaccagcagagagaaggaggagggcagcgaccagcacgtggccagccacctgcccctgcaccccatcatgcacaacaagccccacagcgaggagctgcccaccctggtgagcaccatccagcaggacgccgactgggacagcgtgctgagcagccagcagagaatggagagcgagaacaacaagctgtgcagcctgtacagcttcagaaacaccagcaccagcccccacaagcccgacgagggcagcagagacagagagatcatgaccagcgtgaccttcggcacccccgagagaagaaagggcagcctggccgacgtggtggacaccctgaagcagaagaagctggaggagatgaccagaaccgagcaggaggacagcagctgcatggagaagctgctgagcaaggactggaaggagaagatggagagactgaacaccagcgagctgctgggcgagatcaagggcacccccgagagcctggccgagaaggagagacagctgagcaccatgatcacccagctgatcagcctgagagagcagctgctggccgcccacgacgagcagaagaagctggccgccagccagatcgagaagcagagacagcagatggacctggccagacagcagcaggagcagatcgccagacagcagcagcagctgctgcagcagcagcacaagatcaacctgctgcagcagcagatccaggtgcagggccacatgccccccctgatgatccccatcttcccccacgaccagagaaccctggccgccgccgccgccgcccagcagggcttcctgttcccccccggcatcacctacaagcccggcgacaactaccccgtgcagttcatccccagcaccatggccgccgccgccgccagcggcctgagccccctgcagctgcagcagctgtacgccgcccagctggccagcatgcaggtgagccccggcgccaagatgcccagcaccccccagccccccaacaccgccggcaccgtgagccccaccggcatcaagaacgagaagagaggcaccagccccgtgacccaggtgaaggacgaggccgccgcccagcccctgaacctgagcagcagacccaagaccgccgagcccgtgaagagccccaccagccccacccagaacctgttccccgccagcaagaccagccccgtgaacctgcccaacaagagcagcatccccagccccatcggcggcagcctgggcagaggcagcagcctgggcaagtggaagagccagcaccaggaggagacctacgagctggacatcctgagcagcctgaacagccccgccctgttcggcgaccaggacaccgtgatgaaggccatccaggaggccagaaagatgagagagcagatccagagagagcagcagcagcagcagccccacggcgtggacggcaagctgagcagcatcaacaacatgggcctgaacagctgcagaaacgagaaggagagaaccagattcgagaacctgggcccccagctgaccggcaagagcaacgaggacggcaagctgggccccggcgtgatcgacctgaccagacccgaggacgccgagggcagcaaggccatgaacggcagcgccgccaagctgcagcagtactactgctggcccaccggcggcgccaccgtggccgaggccagagtgtacagagacgccagaggcagagccagcagcgagccccacatcaagagacccatgaacgccttcatggtgtgggccaaggacgagagaagaaagatcctgcaggccttccccgacatgcacaacagcaacatcagcaagatcctgggcagcagatggaagagcatgagcaaccaggagaagcagccctactacgaggagcaggccagactgagcaagatccacctggagaagtaccccaactacaagtacaagcccagacccaagagaacctgcatcgtggacggcaagaagctgagaatcggcgagtacaagcagctgatgagaagcagaagacaggagatgagacagttcttcaccgtgggccagcagccccagatccccatcaccaccggcaccggcgtggtgtaccccggcgccatcaccatggccaccaccacccccagcccccagatgaccagcgactgcagcagcaccagcgccagccccgagcccagcctgcccgtgatccagagcacctacggcatgaagaccgacggcggcagcctggccggcaacgagatgatcaacggcgaggacgagatggagatgtacgacgactacgaggacgaccccaagagcgactacagcagcgagaacgaggcccccgaggccgtgagcgccaactag

SEQ ID NO: 193439 - DNA, 2415 bp, Artificial Sequence
  derived and/or modified sequence
atgggcagaatgagcagcaagcaggccaccagccccttcgcctgcgccgccgacggcgaggacgccatgacccaggacctgaccagcagagagaaggaggagggcagcgaccagcacgtggccagccacctgcccctgcaccccatcatgcacaacaagccccacagcgaggagctgcccaccctggtgagcaccatccagcaggacgccgactgggacagcgtgctgagcagccagcagagaatggagagcgagaacaacaagctgtgcagcctgtacagcttcagaaacaccagcaccagcccccacaagcccgacgagggcagcagagacagagagatcatgaccagcgtgaccttcggcacccccgagagaagaaagggcagcctggccgacgtggtggacaccctgaagcagaagaagctggaggagatgaccagaaccgagcaggaggacagcagctgcatggagaagctgctgagcaaggactggaaggagaagatggagagactgaacaccagcgagctgctgggcgagatcaagggcacccccgagagcctggccgagaaggagagacagctgagcaccatgatcacccagctgatcagcctgagagagcagctgctggccgcccacgacgagcagaagaagctggccgccagccagatcgagaagcagagacagcagatggacctggccagacagcagcaggagcagatcgccagacagcagcagcagctgctgcagcagcagcacaagatcaacctgctgcagcagcagatccaggtgcagggccacatgccccccctgatgatccccatcttcccccacgaccagagaaccctggccgccgccgccgccgcccagcagggcttcctgttcccccccggcatcacctacaagcccggcgacaactaccccgtgcagttcatccccagcaccatggccgccgccgccgccagcggcctgagccccctgcagctgcagcagctgtacgccgcccagctggccagcatgcaggtgagccccggcgccaagatgcccagcaccccccagccccccaacaccgccggcaccgtgagccccaccggcatcaagaacgagaagagaggcaccagccccgtgacccaggtgaaggacgaggccgccgcccagcccctgaacctgagcagcagacccaagaccgccgagcccgtgaagagccccaccagccccacccagaacctgttccccgccagcaagaccagccccgtgaacctgcccaacaagagcagcatccccagccccatcggcggcagcctgggcagaggcagcagcctgggcaagtggaagagccagcaccaggaggagacctacgagctggacatcctgagcagcctgaacagccccgccctgttcggcgaccaggacaccgtgatgaaggccatccaggaggccagaaagatgagagagcagatccagagagagcagcagcagcagcagccccacggcgtggacggcaagctgagcagcatcaacaacatgggcctgaacagctgcagaaacgagaaggagagaaccagattcgagaacctgggcccccagctgaccggcaagagcaacgaggacggcaagctgggccccggcgtgatcgacctgaccagacccgaggacgccgagggcagcaaggccatgaacggcagcgccgccaagctgcagcagtactactgctggcccaccggcggcgccaccgtggccgaggccagagtgtacagagacgccagaggcagagccagcagcgagccccacatcaagagacccatgaacgccttcatggtgtgggccaaggacgagagaagaaagatcctgcaggccttccccgacatgcacaacagcaacatcagcaagatcctgggcagcagatggaagagcatgagcaaccaggagaagcagccctactacgaggagcaggccagactgagcaagatccacctggagaagtaccccaactacaagtacaagcccagacccaagagaacctgcatcgtggacggcaagaagctgagaatcggcgagtacaagcagctgatgagaagcagaagacaggagatgagacagttcttcaccgtgggccagcagccccagatccccatcaccaccggcaccggcgtggtgtaccccggcgccatcaccatggccaccaccacccccagcccccagatgaccagcgactgcagcagcaccagcgccagccccgagcccagcctgcccgtgatccagagcacctacggcatgaagaccgacggcggcagcctggccggcaacgagatgatcaacggcgaggacgagatggagatgtacgacgactacgaggacgaccccaagagcgactacagcagcgagaacgaggcccccgaggccgtgagcgccaactag

SEQ ID NO: 193440 - DNA, 2406 bp, Artificial Sequence
  derived and/or modified sequence
atgtccagtaaacaggctacgtcccccttcgcatgtgcagcggacggcgaagatgcaatgacgcaggacctcacatcacgcgagaaggaggaagggtccgatcagcacgtcgccagccatcttccccttcaccccatcatgcacaacaagccacattcagaagagctcccgactctagtgagcactatacagcaggatgctgactgggattccgttctaagttcccagcagagaatggagtcagagaacaacaaactgtgcagcctttactcattcagaaacaccagcacatcacctcacaagccagatgaaggcagccgtgatcgggagattatgacgagcgtgaccttcgggacccctgagcggcgtaaggggtcacttgcagatgtagtggacaccttgaagcagaagaagctcgaggaaatgacccgcaccgagcaagaggacagctcttgtatggagaagctgctgagcaaagactggaaggaaaaaatggagcgcctcaacacctccgagctgttgggcgagatcaaggggacccccgaatccctcgctgaaaaagaaagacaactgagtaccatgataacccagctcatttctttgcgggagcaactgcttgcagctcacgatgagcagaagaaactcgcagcgtcccagattgaaaagcaacgccagcaaatggatctcgcccgacagcagcaggagcaaatagccaggcaacagcagcagctgctccaacagcagcacaaaatcaacctgctccaacagcaaatacaggtgcagggccatatgccccctctcatgatcccaattttcccacatgatcagcggactttggcagccgccgccgcagctcagcagggcttcctgtttcctcccggcattacctataagccaggagacaattacccggtgcagttcataccctccacaatggccgccgcggcagcctcaggcttatcgcccctccaactccagcagctgtacgcagcccagctcgcctcaatgcaggtatcaccaggtgccaagatgccttctaccccccagcctccaaacaccgccgggaccgtatcccctaccggcatcaagaacgaaaaaagaggcacctcccctgtaacccaggtgaaggacgaggctgccgctcagccacttaatctctctagtcgcccaaagacagctgagcccgtcaagagcccgactagccctacccagaatctttttcccgcatcaaagacctctcccgtgaaccttccaaacaagtccagcataccaagccctattggaggatccttagggagagggtcaagcctagggaaatggaaatcgcagcatcaagaagaaacatacgagctcgacatcctgtccagcctaaacagtcccgcactctttggcgatcaggatacggtgatgaaggccatacaagaagcccggaaaatgagggaacagatccaaagggaacagcagcaacagcagcctcatggagtggacgggaagctgtcatcgataaacaacatgggactgaattcctgccggaacgagaaagagaggacaaggttcgaaaatcttggcccgcaactgaccggcaaaagcaatgaagatggtaagttggggcccggcgtgattgatttgacaagaccagaagacgcggagggaagcaaagctatgaatgggagcgccgctaaattgcaacagtactactgttggccgactggcggcgccacagtcgccgaagcccgtgtatacagagacgctcgcgggcgagcatcttctgagccccacatcaagagaccaatgaacgccttcatggtgtgggccaaggatgagcggcggaagatcttacaggccttccccgacatgcataactctaatatatccaaaatcctggggtccaggtggaaatccatgtcaaatcaggagaaacaaccctattatgaagagcaagctcgcctctctaaaatacacctggagaagtacccaaattataagtacaagcctagacctaagcggacatgcattgtggacggaaagaagctcaggatcggggaatacaagcaactcatgcgatcccgaaggcaggaaatgcggcaattcttcaccgttggacaacagccacaaatccctataacaactggtactggggtggtgtaccccggcgccattactatggctaccactactccaagcccgcaaatgacttccgattgttcatctacatctgcaagcccagagccctcattgcccgtgatccagagcacttatgggatgaaaacagacggaggcagcctagcagggaacgagatgatcaatggggaggacgaaatggagatgtacgatgactacgaggacgatcctaagtccgactactcatcagaaaacgaagcccctgaagctgtctcagcaaactag

SEQ ID NO: 193441 - DNA, 2415 bp, Artificial Sequence
  derived and/or modified sequence
atgggcaggatgtcctccaagcaggctacctctcccttcgcgtgcgctgccgatggcgaagacgcaatgacgcaggacctcacgtctcgtgaaaaggaagagggtagtgatcagcacgtagccagccacctccctctgcacccaataatgcataacaagccacacagtgaggagcttccaacgctcgtgtctaccattcaacaagacgcagactgggacagcgtgctgtcttctcagcagagaatggaatccgaaaataataagctgtgcagcctgtactcattcaggaacacaagcacaagcccgcacaaacccgatgaagggtccagggatcgcgaaatcatgacgtccgtgacatttggcacacctgaaagacggaagggctcactggcagacgtagttgacaccttaaagcaaaagaaattggaagagatgaccaggacagaacaagaagactcttcatgcatggagaaactgcttagtaaagactggaaggaaaagatggagcgacttaacacctccgaattgctgggtgagatcaagggtacacctgagtctttggcggagaaggagcgtcagctttcgaccatgatcacccagttgatttcattacgcgaacagttactcgcagcccacgatgagcaaaaaaaactggccgctagtcagatcgagaaacaaaggcaacagatggacctggccagacagcagcaagagcagatcgcccggcagcagcagcagctcctgcagcagcagcacaagatcaacctgctgcagcagcagatccaggtccagggtcatatgcctccccttatgatccccattttccctcatgaccaaagaaccctggcagcagcggccgcagctcagcaggggttcctgttccctccaggcattacatacaagcccggcgacaattaccccgtacagtttattccgagtacgatggctgccgcagcagcatcaggtcttagcccactgcagttacagcagctgtacgccgctcaattggcaagcatgcaggtcagccccggcgctaagatgcccagcaccccccagcctccaaataccgcgggcaccgtcagtcctaccggaattaagaacgagaagagagggacttccccagtgactcaggtgaaggatgaagccgcagcacaaccactgaacttgtcgtctcgccctaagaccgccgaaccagtgaaaagccctacctcacctacccagaatcttttccccgccagcaagacttctccagtaaacctaccaaataaaagttccattcccagccccattggcggctccttaggacgaggctcttcactcggcaagtggaagtcacagcaccaggaggagacatatgagttggacattctcagctccctcaacagcccagcactatttggagaccaggacacagttatgaaagctattcaggaggcacgaaagatgagggagcagatccagcgagaacagcagcaacagcagccccacggggtggatggtaagctctccagcatcaataatatgggcttgaattcttgccgaaatgaaaaagagcgtactcgttttgaaaatttgggcccacaactgacaggtaagagcaacgaagatggcaaactcggcccaggggtgatcgacctgacccggccggaagacgccgaagggtccaaggcaatgaacggatcagctgccaaactgcagcaatactattgttggccgacaggaggcgctaccgtggctgaagcacgagtttaccgggatgctcggggcagggctagctcagagccacacattaaacgcccaatgaatgcctttatggtttgggcaaaggatgaacgacgcaagattctgcaggcctttccagacatgcataacagcaatatctctaaaattctggggtcgaggtggaaatccatgtccaaccaggagaaacagccatactatgaggaacaggcccggctttcaaaaattcaccttgagaagtatccaaactataagtacaaaccccgcccaaagaggacgtgcatcgtggacggtaaaaaactgaggattggcgagtacaaacagctgatgcgttcaagacgccaagaaatgaggcagttcttcacggtcggccagcagcctcagatcccaataactacaggaacaggggtggtctaccccggggctatcacgatggccacgactacgccttccccccagatgacctctgattgcagttccacctccgctagccccgaaccctccctgccagttatccagtccacatacggaatgaaaacagacggggggagtctcgccggtaatgaaatgattaatggggaggacgagatggagatgtatgatgattatgaggatgatcctaagtccgactactcctcagagaacgaggccccggaggcagtctcagccaactag

SEQ ID NO: 193442 - DNA, 2406 bp, Artificial Sequence
  derived and/or modified sequence
atgagcagcaagcaggccaccagcccctttgcctgtgccgcagatggagaagatgccatgacccaggacctgaccagccgggagaaggaggagggcagtgaccagcacgtggccagccacctgcccctgcaccccatcatgcacaacaagccccacagcgaggagctgcccaccctggtgtccaccatccagcaggatgctgactgggacagcgtgctgagcagccagcagaggatggagagcgagaacaacaagctgtgcagcctgtacagcttcaggaacaccagcaccagcccccacaagccagatgagggcagccgggaccgggagatcatgacctctgtgaccttcggcaccccagagaggaggaagggcagcctggctgatgtggtggacaccctgaagcagaagaagctggaggagatgaccaggacagagcaggaggacagcagctgcatggagaagctgctgagcaaggactggaaggagaagatggagcggctgaacaccagcgagctgctgggggagatcaagggcaccccagagagcctggccgagaaggagcggcagctgagcaccatgatcacccagctgatcagcctgcgggagcagctgctggccgcccatgatgagcagaagaagctggccgccagccagatcgagaagcagaggcagcagatggacctggcccggcagcagcaggagcagatcgcccggcagcagcagcagctgctgcagcagcagcacaagatcaacctgctgcagcagcagatccaggtgcagggccacatgccacccctgatgatccccatcttcccccatgaccagaggaccctggccgctgctgctgctgcccagcagggcttcctgttccccccaggcatcacctacaagccaggggacaactaccctgtgcagttcatccccagcaccatggctgctgctgctgccagcggcctgagccccctgcagctgcagcagctgtatgctgcccagctggcctccatgcaggtgtcccctggggccaagatgcccagcaccccccagccccccaacacagctggcaccgtgagccccaccggcatcaagaatgagaagaggggcaccagccctgtgacccaggtgaaggatgaagctgctgcccagcccctgaacctgagcagccggcccaagacagctgagcctgtgaagagccccaccagccccacccagaacctcttccctgccagcaagaccagccctgtgaacctgcccaacaagagcagcatccccagccccatcggcggcagcctgggccggggcagcagcctgggcaagtggaagagccagcaccaggaggagacctatgagctggacatcctgagcagcctgaacagccctgccctgtttggagaccaggacacagtgatgaaggccatccaggaggccaggaagatgagggagcagatccagcgggagcagcagcagcagcagccccatggagtggatggcaagctgagcagcatcaacaacatgggcctgaacagctgcagaaatgagaaggagaggaccaggtttgagaacctgggcccccagctgaccgggaagagcaatgaagatggcaagctgggccctggggtgattgacctgaccaggccagaagatgctgagggcagcaaggccatgaatggcagcgctgccaagctgcagcagtactactgctggcccaccggcggggccaccgtggccgaggcccgggtgtacagagatgcccggggccgggccagcagcgagccccacatcaagaggcccatgaatgccttcatggtgtgggccaaggatgaaagaaggaagatcctgcaggccttcccagacatgcacaacagcaacatcagcaagatcctgggcagccgctggaagtccatgagcaaccaggagaagcagccctactatgaggagcaggcccggctgagcaagatccacctggagaagtaccccaactacaagtacaagccccggcccaagaggacctgcatcgtggatggcaagaagctgcgcatcggggagtacaagcagctgatgaggagccggcggcaggagatgaggcagttcttcaccgtgggccagcagccccagatccccatcaccaccggcaccggggtggtgtacccaggggccatcaccatggccaccaccacccccagcccccagatgaccagtgactgcagcagcaccagcgccagccctgagcccagcctgcctgtgatccagagcacctacggcatgaagacagatggcggcagcctggccggaaatgagatgatcaatggagaagatgagatggagatgtatgatgattatgaagatgaccccaagagtgactacagcagtgaaaatgaggcccctgaggccgtgtctgccaactag

SEQ ID NO: 193443 - DNA, 2415 bp, Artificial Sequence
  derived and/or modified sequence
atgggccgcatgagcagcaagcaggccaccagcccctttgcctgtgccgcagatggagaagatgccatgacccaggacctgaccagccgggagaaggaggagggcagtgaccagcacgtggccagccacctgcccctgcaccccatcatgcacaacaagccccacagcgaggagctgcccaccctggtgtccaccatccagcaggatgctgactgggacagcgtgctgagcagccagcagaggatggagagcgagaacaacaagctgtgcagcctgtacagcttcaggaacaccagcaccagcccccacaagccagatgagggcagccgggaccgggagatcatgacctctgtgaccttcggcaccccagagaggaggaagggcagcctggctgatgtggtggacaccctgaagcagaagaagctggaggagatgaccaggacagagcaggaggacagcagctgcatggagaagctgctgagcaaggactggaaggagaagatggagcggctgaacaccagcgagctgctgggggagatcaagggcaccccagagagcctggccgagaaggagcggcagctgagcaccatgatcacccagctgatcagcctgcgggagcagctgctggccgcccatgatgagcagaagaagctggccgccagccagatcgagaagcagaggcagcagatggacctggcccggcagcagcaggagcagatcgcccggcagcagcagcagctgctgcagcagcagcacaagatcaacctgctgcagcagcagatccaggtgcagggccacatgccacccctgatgatccccatcttcccccatgaccagaggaccctggccgctgctgctgctgcccagcagggcttcctgtttcctcctggcatcacctacaagccaggggacaactaccctgtgcagttcatccccagcaccatggctgctgctgctgccagcggcctgagccccctgcagctgcagcagctgtatgctgcccagctggcctccatgcaggtgtcccctggggccaagatgcccagcaccccccagccccccaacacagctggcaccgtgagccccaccggcatcaagaatgagaagaggggcaccagccctgtgacccaggtgaaggatgaggccgccgcccagcccctgaacctgagcagccggcccaagacagctgagcctgtgaagagccccaccagccccacccagaacctcttccctgccagcaagaccagccctgtgaacctgcccaacaagagcagcatccccagccccatcggcggcagcctgggccggggcagcagcctgggcaagtggaagagccagcaccaggaggagacctatgagctggacatcctgagcagcctgaacagccctgccctgtttggagaccaggacacagtgatgaaggccatccaggaggccaggaagatgagggagcagatccagcgggagcagcagcagcagcagccccacggcgtggatggcaagctgagcagcatcaacaacatgggcctgaacagctgcagaaatgagaaggagaggaccaggtttgagaacctgggcccccagctgaccgggaagagcaatgaagatggcaagctgggccctggggtcatcgacctgaccaggccagaagatgctgagggcagcaaggccatgaatggatctgctgccaagctgcagcagtactactgctggcccactggaggagccaccgtggccgaggcccgggtgtacagagatgcccggggccgggccagcagcgagccccacatcaagaggcccatgaatgccttcatggtgtgggccaaggatgagaggaggaagatcctgcaggccttcccagacatgcacaacagcaacatcagcaagatcctgggcagccgctggaagtccatgagcaaccaggagaagcagccctactatgaggagcaggcccggctgagcaagatccacctggagaagtaccccaactacaagtacaagccccggcccaagaggacctgcatcgtggatggcaagaagctgagaattggagagtacaagcagctgatgaggagccggcggcaggagatgaggcagttcttcaccgtgggccagcagccccagatccccatcaccactggaactggagtggtgtacccaggggccatcaccatggccaccaccacccccagcccccagatgaccagtgactgcagcagcaccagcgccagccctgagcccagcctgcccgtcatccagagcacctacggcatgaagacagatggcggcagcctggccggaaatgagatgatcaacggggaggatgagatggagatgtatgatgattatgaagatgaccccaagagtgactacagcagtgaaaatgaggcccctgaggccgtgtctgccaactag

SEQ ID NO: 193444 - DNA, 2406 bp, Artificial Sequence
  derived and/or modified sequence
atgagcagcaagcaggccaccagccccttcgcctgcgccgccgacggggaggacgccatgactcaggacctgacatctcgggagaaagaagaggggagcgaccagcacgtcgcaagccatctgcctttgcaccctatcatgcataataaaccgcactctgaagagctgccgacattggtttctactatccagcaggatgcagattgggatagtgtactctcaagtcagcagcgcatggagtccgaaaacaataagttatgcagcctgtacagcttcagaaatacctcaacgagcccccacaagccagatgagggttccagagatagggaaattatgacatccgtgacattcggcacccccgagcgtagaaagggtagcctcgcagacgtggtggatactctgaaacaaaaaaagctggaggaaatgacaaggaccgaacaggaagactccagctgtatggagaagttattgagcaaggactggaaggagaaaatggagaggcttaatacatctgagctactaggggagattaaagggacgccagaatctcttgccgagaaagagagacagctgtctacaatgataacacagctcataagcctgagggagcagctactggccgcccacgacgaacagaagaagttagcggcaagccagattgagaaacagcggcagcagatggatcttgctcgccaacagcaagagcagatcgctaggcagcaacagcagctcttgcagcagcagcacaaaatcaatctgctgcagcagcagatacaggtgcaaggccacatgccgcctcttatgatccccatcttcccccatgaccagcgtaccctggctgccgcagcggctgcacagcagggatttctgttcccccccggaatcacgtacaagcccggtgacaactacccagtgcaatttatcccttccacaatggccgccgcagccgcatcaggtttatctcccctgcagttacagcaactatacgccgcccagttggccagtatgcaggtgagccctggcgccaaaatgccttcgacacctcaacctccaaacaccgcggggacagtttctccaaccggaattaaaaatgaaaagcggggcacgagtccagtgacacaggtcaaggacgaggcagccgcccaacccttaaacctgtcctctagacctaaaaccgcagaacccgtcaagtcccccacttccccaacccaaaatctctttcccgcctctaaaacatcccccgttaacctccccaacaagtctagcattccaagccctatcgggggctctcttggcagaggttcgtcgctgggaaagtggaaatctcagcaccaggaggagacgtacgagcttgacatcctgtcttctctgaattcccctgccctcttcggggatcaggacacagtgatgaaagccatccaagaagcgaggaagatgcgtgagcagattcagagggaacagcagcaacagcagccacatggagtggatggtaaactgagctcaattaacaatatggggctgaattcatgccgaaatgagaaggaacgcacaagattcgagaatctcggtccacagctgacaggaaaaagcaacgaggacggaaagctcggaccaggcgtcatagacctcaccagacccgaggacgcagagggctcaaaggccatgaacggtagtgctgccaagcttcaacaatattactgctggcctaccggaggtgcaaccgtggcagaagcccgcgtctatagagatgcccggggcagagcttcttccgagccccatattaagcgccccatgaatgcgttcatggtatgggccaaggacgaacgccggaaaatcctgcaagcttttcctgatatgcataattccaacattagcaagatcctcggcagccgatggaaaagcatgagtaaccaggagaagcagccttactatgaggagcaggcacgtctgagtaaaatacacctcgagaaatacccgaactacaagtacaaacctcgacccaagcgaacctgtatcgtggacggtaagaagctccggattggtgagtataaacaactgatgcgatctaggcgacaagaaatgcggcagttcttcacagtgggtcaacagccgcagatacccataacaactggcacgggcgtcgtttatcctggagctattactatggccacgactactccctccccccaaatgacctcagactgcagctccacctccgcctcgcctgaacccagcctacccgtgatccagagtacctatggcatgaaaactgacggggggagcttagcaggtaatgagatgatcaacggcgaggatgagatggaaatgtacgatgattatgaagacgatcccaagtctgattacagctctgagaacgaggcccctgaagccgtttcagcaaactag

SEQ ID NO: 193445 - DNA, 2415 bp, Artificial Sequence
  derived and/or modified sequence
atgggccggatgagcagcaagcaggccaccagccccttcgcctgcgctgccgatggcgaggacgccatgacgcaggatctgacctcccgcgaaaaggaagaagggagtgatcaacacgtagcctcccatctgcccctgcatcccataatgcataataagccgcactcagaagagctacccacattggtctccacgatccagcaagacgctgattgggactccgtgttgtcatcacagcagagaatggaaagcgagaacaataaactgtgcagcctgtattcattcagaaacaccagtacaagcccacacaaacctgacgagggaagcagagacagagagataatgacctccgtgaccttcggcacgccagagagaagaaaaggatcccttgctgatgtagttgatacactgaaacagaagaagttagaggagatgacccgtaccgaacaggaagatagctcttgcatggagaaactcttgtccaaggattggaaagaaaaaatggaaaggctgaacacgtccgaattgctaggtgagattaaaggcactcctgagagcctggctgagaaagagcgacagctgtccaccatgatcacccaacttatcagccttagggaacagttacttgccgcacacgatgagcaaaagaaattggccgccagtcaaatcgagaaacaacgacaacagatggacctggctagacagcaacaagagcagatcgcacgccaacaacagcagctgttacagcaacaacataagataaatctgctgcaacaacaaattcaagtccaaggccacatgcctccgctcatgattcccatttttccccacgaccaaaggacgttggctgccgcggcggcagcccagcagggtttccttttccctcccggcatcacttataagccaggcgataactaccctgttcagtttataccgagtaccatggcagctgccgcagccagcggcctgtcccctctccaactgcagcagctgtatgccgctcagctggcgtctatgcaggtgagccccggtgcaaagatgcccagcacaccccaaccccccaacaccgcaggcactgtgtcccccactggaatcaagaatgaaaaacgtggcacttctccagtcacacaagtaaaggatgaggccgccgctcagcccctgaacctgtcttcacggccgaagactgccgagcctgtgaagagccctaccagccccactcagaatctgttccctgcaagtaaaacatccccggtgaacctgcccaacaaatccagcattccttctccaatcggaggcagtctcggacgcggctcatctctcggaaagtggaagtcgcagcatcaggaggaaacctatgagctcgacattctctctagcctcaactcgccagccctctttggggaccaggacacggtcatgaaggctattcaagaagcaagaaaaatgagggagcagatccagcgtgaacagcagcagcagcagccgcatggggtggacggcaaactttcaagcatcaataacatgggccttaactcttgcagaaacgaaaaggaaagaacacgatttgaaaacttgggcccccagttgacagggaaaagtaacgaagacgggaagcttggcccaggcgtaattgacctcacaagaccagaagacgctgagggcagcaaagccatgaatggcagtgccgccaagctgcagcagtattactgctggcccaccgggggtgctaccgtcgccgaggcgcgggtataccgtgacgccagggggcgagccagctctgagccccacatcaagcgccctatgaacgccttcatggtttgggctaaagatgaaagacgcaagattctgcaggctttccccgatatgcacaacagtaacattagcaaaatactggggagtagatggaaatccatgtccaaccaggagaagcagccatactacgaagagcaggcacgccttagcaagattcatctggagaagtatccgaactataaatacaaacctcgacccaaacgcacctgtatcgtcgacggcaaaaaactcaggatcggcgagtataaacagctgatgcgctcacgccgccaggagatgcgacagttcttcactgtgggtcaacagccacaaatcccaataactaccggcaccggcgtcgtctaccctggtgctataaccatggcaactactacaccatcaccgcagatgacgtcagactgcagctctactagcgctagtcctgaaccctccttaccggttattcagtctacctatggcatgaaaactgatgggggtagcttagcaggtaatgaaatgatcaacggcgaagacgagatggaaatgtacgacgactatgaggacgatcctaaatccgactactcttctgagaacgaggccccggaagccgttagcgccaattag

SEQ ID NO: 193446 - DNA, 2406 bp, Artificial Sequence
  derived and/or modified sequence
atgagcagcaagcaagcaacatctcccttcgcctgcgccgcagatggcgaagacgccatgacccaggatttgacaagccgtgagaaagaagagggatccgatcagcacgtagcatcacatctgccactccatcccattatgcacaacaagccccattccgaagagctgccgacattagtgtctaccattcagcaggatgcagactgggacagcgtcctgtccagccagcagcggatggaaagtgagaacaacaagctgtgcagtttatactctttccgaaataccagcacctccccgcacaagccagatgaaggtagccgcgatcgagagattatgacttctgtgaccttcggaactcctgagaggaggaagggttccctggctgatgtggttgatacattgaagcaaaagaaactggaggaaatgacacggacagaacaggaggactcctcctgtatggagaagttgttaagcaaagattggaaagaaaagatggagcggttgaatactagtgagctgctgggcgagatcaagggtacacctgagagcctggcagagaaggaaaggcagctgtcaacgatgataacccagttgatctcacttcgagaacagctccttgccgcacacgatgaacagaaaaaactcgcagcctcccagatcgagaaacagcgccagcagatggacctggcgaggcagcaacaggagcagatagctcggcagcagcagcagctgctgcagcagcaacataaaattaacctcctacagcagcaaatacaggtgcagggccacatgccgccactgatgatacctatctttcctcacgatcaacggacacttgccgcagccgcagcagcccagcagggattcttatttcctcctgggattacctacaagcccggagacaattacccggtgcagtttattcctagtactatggcagcagcggctgcttcaggattgagtcccttacagctgcagcagctttatgccgcacagctggcctcaatgcaggtgtccccgggtgccaagatgccctcaactccccagccacctaacacagcagggacggtgagtccaacgggaataaaaaatgaaaagcgcggtacatctcctgttacacaggttaaggacgaagccgcagctcaacccctaaacctctcctctagacccaaaacggccgaacctgtgaagtccccaacctcacccacgcagaatctgttcccagctagtaagaccagccctgttaatctacctaacaagagctccattccatctcccattgggggttcactggggagagggtcaagtctggggaagtggaagtcacaacaccaggaggaaacgtacgaactggatatcctttcatctctgaattcgcccgcactgttcggagatcaggacaccgtgatgaaagccattcaggaggcacggaaaatgagggaacagatccaacgcgaacagcagcagcagcagccgcacggcgtcgacggaaagctgtccagtattaacaatatgggcctgaactcttgcaggaatgagaaggaaaggacaaggttcgaaaacctcggcccacagcttacaggcaagagcaacgaggacggaaagcttgggccaggggtcattgatcttacaaggcctgaagacgccgaggggagcaaggccatgaatgggtccgcggctaagctacagcagtattattgttggccgaccggcggtgcaacagtcgctgaagcgagagtttatcgggacgcgcgtgggcgagcctcttctgagccccatattaaacgcccaatgaacgcttttatggtgtgggcaaaggatgaacggagaaaaatcctgcaggcatttccagatatgcataattcaaatatttcgaagatcctgggtagccggtggaagagtatgagcaaccaggaaaaacaaccatattacgaggagcaggctcggttgtcaaagatccacctggagaaatatccaaactacaaatataagcccaggccaaaacgaacttgtatcgtggacggtaaaaagcttcgaatcggcgagtataagcagttaatgcggtcgcgtcgtcaagaaatgcgtcaattcttcaccgtggggcagcaaccccagatccccatcaccactggcactggtgtggtgtatccgggagcgattaccatggcaaccaccaccccatcaccgcagatgaccagcgactgctcttcaacttctgcctcgccagaaccatcattacctgtgatccagtctacgtacgggatgaaaacagatggcggatccttggctggcaatgaaatgattaatggtgaggatgagatggagatgtacgacgactacgaggacgaccccaagtcagattacagctctgaaaacgaagctcccgaggctgtgtccgccaattag

SEQ ID NO: 193447 - DNA, 2415 bp, Artificial Sequence
  derived and/or modified sequence
atgggaagaatgtcttctaagcaagctacttcccccttcgcttgtgctgctgatggagaggatgcaatgacgcaagacctcactagcagagaaaaggaggagggcagtgaccaacatgtagcctcccacctccccctacatcctattatgcataataaaccgcattccgaggagctccccacactggtatccactattcagcaggatgcagactgggactctgtactaagttcacaacaacgcatggaaagcgagaataacaagttatgttccctctacagcttccgaaacacaagcaccagtccacacaagcctgatgagggtagccgggaccgggaaattatgacttccgtcacttttggtactcctgaaagacgtaaaggctcgcttgccgacgtggtggacaccctcaagcagaagaaactggaagagatgaccaggaccgaacaggaagattctagctgcatggagaagctgctgtcaaaagactggaaggaaaagatggagaggttgaacaccagcgaactgctcggcgagatcaagggaaccccggagtccttggctgaaaaggaacggcagctttccactatgatcactcagctcatttcactgcgggagcagctcttggcagctcatgacgaacaaaagaagctcgcagcttcccaaatcgaaaaacagcgccaacagatggatctggctcgtcagcagcaggaacaaatcgccaggcagcagcagcagctactgcaacaacagcacaaaatcaatctgcttcagcagcagattcaggtgcaggggcatatgccaccactcatgattccaatattccctcatgaccaaaggacactggctgcagcagcggctgcccagcagggattcctatttcctccgggaattacctacaaacctggggacaattaccctgtgcaatttattcccagcactatggcggctgcagctgcctccggcctgagtccgctgcagctgcagcagttgtatgctgcacagcttgcctcaatgcaggtgtcccccggtgccaagatgccttcgacacctcaaccacccaatacagccggaactgtttctccaactgggatcaagaacgaaaagagagggacctctccggtgacccaagtgaaagacgaagctgcagctcagccactcaatctttctagcagacccaagactgctgagcctgtgaaatcgcctacaagtcccacccagaatctcttccccgcatctaaaacaagcccggtcaaccttcccaacaagtcctccatccccagccccatcggcggatctctgggtagagggtcaagtttgggcaaatggaagtcacagcatcaggaagagacttatgagctggacatcctcagctccttgaattcccctgctcttttcggcgaccaggataccgtcatgaaggcgatccaggaggccagaaagatgagggagcaaattcagcgtgaacaacagcaacagcaaccccacggggtggacggtaaactgagcagtatcaacaacatggggctaaacagctgtcggaacgagaaggagaggacccggttcgaaaatctcggacctcagctcactggtaagtccaatgaggacggcaagttaggacctggggtcatcgatctcacaaggcctgaggacgcagaaggctcaaaggccatgaacggttctgccgcaaagctgcagcagtactattgctggccaacaggaggtgcgaccgtcgccgaagctcgggtttatcgcgacgccagaggaagggcttcaagtgagccacatatcaaacgtcccatgaacgcgttcatggtttgggccaaagacgaaagaagaaaaatcctgcaggcttttccagacatgcacaactcaaatatttcaaagattttgggctcgagatggaagtccatgtcaaatcaggaaaaacagccttattatgaggagcaggcccgtctgtctaagatccatctggagaagtatccaaactacaagtacaaaccaaggcccaagcgtacctgcattgtggacggaaaaaagctgagaattggcgagtataaacagctcatgcgtagccgccgacaggagatgaggcagttcttcacggtggggcagcagccccagatccctattaccactggcacaggagtcgtgtatcctggcgctataacaatggctactacaacgccaagccctcagatgacctcagactgttcatcaacatccgcgagcccagagccaagcttgcccgtcattcagtcaacatatggtatgaaaaccgacgggggaagcctggcgggtaacgagatgataaatggggaagatgagatggaaatgtatgacgactatgaagatgatcctaaaagtgattattcctctgaaaatgaggcccctgaagccgtcagcgccaactag

SEQ ID NO: 193448 - DNA, 2707 bp, Artificial Sequence
  derived and/or modified sequence
ccttggggttagttttagtcatatttttatctctataaaacatcaggctgggaggtggtgtgtgcctgtagtctcaactgctagggagcctgaggcaggaagactccttgagcacaggagttcaaggccagcctgtgcaacatagtgagaccctatcactctggaaaaaaaaaaaaaatctgcggagaagaatgtcttccaagcaagccacctctccatttgcctgtgcagctgatggagaggatgcaatgacccaggatttaacctcaagggaaaaggaagagggcagtgatcaacatgtggcctcccatctgcctctgcaccccataatgcacaacaaacctcactctgaggagctaccaacacttgtcagtaccattcaacaagatgctgactgggacagcgttctgtcatctcagcaaagaatggaatcagagaataataagttatgttccctatattccttccgaaatacctctacctcaccacataagcctgacgaagggagtcgggaccgtgagataatgaccagtgttacttttggaaccccagagcgccgcaaagggagtcttgccgatgtggtggacacactgaaacagaagaagcttgaggaaatgactcggactgaacaagaggattcctcctgcatggaaaaactactttcaaaagattggaaggaaaaaatggaaagactaaataccagtgaacttcttggagaaattaaaggtacacctgagagcctggcagaaaaagaacggcagctctccaccatgattacccagctgatcagtttacgggagcagctactggcagcgcatgatgaacagaaaaaactggcagcgtcacaaattgagaaacaacggcagcaaatggaccttgctcgccaacagcaagaacagattgcgagacaacagcagcaacttctgcaacagcagcacaaaattaatctcctgcagcaacagatccaggttcagggtcacatgcctccgctcatgatcccaatttttccacatgaccagcggactctggcagcagctgctgctgcccaacagggattcctcttcccccctggaataacatacaaaccaggtgataactaccccgtacagttcattccatcaacaatggcagctgctgctgcttctggactcagccctttacagctccagcagctctatgccgctcagctggccagcatgcaggtgtcacctggagcaaagatgccatcaactccacagccaccaaacacagcagggacggtctcacctactgggataaaaaatgaaaagagagggaccagccctgtaactcaagttaaggatgaagcagcagcacagcctctgaatctctcatcccgacccaagacagcagagcctgtaaagtccccaacgtctcccacccagaacctcttcccagccagcaaaaccagccctgtcaatctgccaaacaaaagcagcatccctagccccattggaggaagcctgggaagaggatcctctttaggtaaatggaaaagtcaacaccaggaagagacttacgaattagatatcctatctagtctcaactcccctgccctttttggggatcaggatacagtgatgaaagccattcaggaggcgcggaagatgcgagagcagatccagcgggagcaacagcagcaacagccacatggtgttgacgggaaactgtcctccataaataatatggggctgaacagctgcaggaatgaaaaggaaagaacgcgctttgagaatttggggccccagttaacgggaaagtcaaatgaagatggaaaactgggcccaggtgtcatcgaccttactcggccagaagatgcagagggaagtaaagcaatgaatggctctgcagctaaactacagcagtattattgttggccaacaggaggtgccactgtggctgaagcacgagtctacagggacgcccgcggccgtgccagcagcgagccacacattaagcgaccaatgaatgcattcatggtttgggcaaaggatgagaggagaaaaatccttcaggccttccccgacatgcataactccaacattagcaaaatcttaggatctcgctggaaatcaatgtccaaccaggagaagcaaccttattatgaagagcaggcccggctaagcaagatccacttagagaagtacccaaactataaatacaaaccccgaccgaaacgcacctgcattgttgatggcaaaaagcttcggattggggagtataagcaactgatgaggtctcggagacaggagatgaggcagttctttactgtggggcaacagcctcagattccaatcaccacaggaacaggtgttgtgtatcctggtgctatcactatggcaactaccacaccatcgcctcagatgacatctgactgctctagcacctcggccagcccggagcccagcctcccggtcatccagagcacttatggtatgaagacagatggcggaagcctagctggaaatgaaatgatcaatggagaggatgaaatggaaatgtatgatgactatgaagatgaccccaaatcagactatagcagtgaaaatgaagccccggaggctgtcagtgccaactgaggagtttttgtttgctgaattaaagtactctgacatttcacccccctccccaacaaagagttattaaagagcccgcatgcatttgtggctccacaattacatcagcagaa

SEQ ID NO: 193449 - DNA, 549 bp, Artificial Sequence
  derived and/or modified sequence
aaagaaagagcaagccccataatggcagcatctttatcttgcacactagtctgtctcttgtgcctgtaacaatgccaggaactttagtaactatttttttttgaattttgacaatcttggtcgacaagggtaaaaaaggacattccagaagcagaaaaacatgagcaaaagtatggagacatcaaaggtcatggcatatgttcgtttatcatggctggaatgaggggtatgaggaagatgactgagagtgtgtactttggagtcagtcagagcagagttgacttcattttatgctacctttatgattaagaatgtcttccaagcaagccacctctccatttgcctgtgcagctgatggagaggatgcaatgacccaggatttaacctcaagggaaaaggaagagggcagtgatcaacatgtggcctcccatctgcctctgcaccccataatgcacaacaaacctcactctgaggagctaccaacacttgtcagtaccattcaacaagatgctgactgggacagcgttctgtcatctcagcaaagaatgg

SEQ ID NO: 193450 - DNA, 586 bp, Artificial Sequence
  derived and/or modified sequence
gattattaatccagctagagaagaaatatgcttttacttagcaagaatgagtatccaaagagctgataatattgttaaggcagcggggtggaatggcagagcttgaagaatgtcttccaagcaagccacctctccatttgcctgtgcagctgatggagaggatgcaatgacccaggatttaacctcaagggaaaaggaagagggcagtgatcaacatgtggcctcccatctgcctctgcaccccataatgcacaacaaacctcactctgaggagctaccaacacttgtcagtaccattcaacaagatgctgactgggacagcgttctgtcatctcagcaaagaatggaatcagagaataataagttatgttccctatattccttccgaaatacctctacctcaccacataagcctgacgaagggagtcgggaccgtgagataatgaccagtgttacttttggaaccccagagcgccgcaaagggagtcttgccgatgtggtggacacactgaaacagaagaagcttgaggaaatgactcggactgaacaagaggattcctcctgcatggaaaaactactttcaaaa

SEQ ID NO: 193451 - DNA, 2699 bp, Artificial Sequence
  derived and/or modified sequence
gggataggaaagatgaaaggtcatggtgagcttcaaggacatgaaaggttgttgtctcatgtaacaatagtagattgttttttttcctaatatttctagccagcccctaagtcaggtgatggaacaaatacctacagtttagtcaggtgaaacaggagtgggtggaggaaggaaagaagaaaaatgggaagaatgtcttccaagcaagccacctctccatttgcctgtgcagctgatggagaggatgcaatgacccaggatttaacctcaagggaaaaggaagagggcagtgatcaacatgtggcctcccatctgcctctgcaccccataatgcacaacaaacctcactctgaggagctaccaacacttgtcagtaccattcaacaagatgctgactgggacagcgttctgtcatctcagcaaagaatggaatcagagaataataagttatgttccctatattccttccgaaatacctctacctcaccacataagcctgacgaagggagtcgggaccgtgagataatgaccagtgttacttttggaaccccagagcgccgcaaagggagtcttgccgatgtggtggacacactgaaacagaagaagcttgaggaaatgactcggactgaacaagaggattcctcctgcatggaaaaactactttcaaaagattggaaggaaaaaatggaaagactaaataccagtgaacttcttggagaaattaaaggtacacctgagagcctggcagaaaaagaacggcagctctccaccatgattacccagctgatcagtttacgggagcagctactggcagcgcatgatgaacagaaaaaactggcagcgtcacaaattgagaaacaacggcagcaaatggaccttgctcgccaacagcaagaacagattgcgagacaacagcagcaacttctgcaacagcagcacaaaattaatctcctgcagcaacagatccaggttcagggtcacatgcctccgctcatgatcccaatttttccacatgaccagcggactctggcagcagctgctgctgcccaacagggattcctcttcccccctggaataacatacaaaccaggtgataactaccccgtacagttcattccatcaacaatggcagctgctgctgcttctggactcagccctttacagctccagcagctctatgccgctcagctggccagcatgcaggtgtcacctggagcaaagatgccatcaactccacagccaccaaacacagcagggacggtctcacctactgggataaaaaatgaaaagagagggaccagccctgtaactcaagttaaggatgaagcagcagcacagcctctgaatctctcatcccgacccaagacagcagagcctgtaaagtccccaacgtctcccacccagaacctcttcccagccagcaaaaccagccctgtcaatctgccaaacaaaagcagcatccctagccccattggaggaagcctgggaagaggatcctctttaggtaaatggaaaagtcaacaccaggaagagacttacgaattagatatcctatctagtctcaactcccctgccctttttggggatcaggatacagtgatgaaagccattcaggaggcgcggaagatgcgagagcagatccagcgggagcaacagcagcaacagccacatggtgttgacgggaaactgtcctccataaataatatggggctgaacagctgcaggaatgaaaaggaaagaacgcgctttgagaatttggggccccagttaacgggaaagtcaaatgaagatggaaaactgggcccaggtgtcatcgaccttactcggccagaagatgcagagggaagtaaagcaatgaatggctctgcagctaaactacagcagtattattgttggccaacaggaggtgccactgtggctgaagcacgagtctacagggacgcccgcggccgtgccagcagcgagccacacattaagcgaccaatgaatgcattcatggtttgggcaaaggatgagaggagaaaaatccttcaggccttccccgacatgcataactccaacattagcaaaatcttaggatctcgctggaaatcaatgtccaaccaggagaagcaaccttattatgaagagcaggcccggctaagcaagatccacttagagaagtacccaaactataaatacaaaccccgaccgaaacgcacctgcattgttgatggcaaaaagcttcggattggggagtataagcaactgatgaggtctcggagacaggagatgaggcagttctttactgtggggcaacagcctcagattccaatcaccacaggaacaggtgttgtgtatcctggtgctatcactatggcaactaccacaccatcgcctcagatgacatctgactgctctagcacctcggccagcccggagcccagcctcccggtcatccagagcacttatggtatgaagacagatggcggaagcctagctggaaatgaaatgatcaatggagaggatgaaatggaaatgtatgatgactatgaagatgaccccaaatcagactatagcagtgaaaatgaagccccggaggctgtcagtgccaactgaggagtttttgtttgctgaattaaagtactctgacatttcacccccctccccaacaaagagttattaaagagcccgcatgcatttgtggctccacaattaca

SEQ ID NO: 193452 - protein, 256 aa, Artificial Sequence
  derived and/or modified sequence
MWLLLTLSFLLASTAAQDGDKLLEGDECAPHSQPWQVALYERGRFNCGASLISPHWVLSAAHCQSRFMRVRLGEHNLRKRDGPEQLRTTSRVIPHPRYEARSHRNDIMLLRLVQPARLNPQVRPAVLPTRCPHPGEACVVSGWGLVSHNEPGTAGSPRSQVSLPDTLHCANISIISDTSCDKSYPGRLTNTMVCAGAEGRGAESCEGDSGGPLVCGGILQGIVSWGDVPCDNTTKPGVYTKVCHYLEWIRETMKRN

SEQ ID NO: 193453 - DNA, 771 bp, Artificial Sequence
  derived and/or modified sequence
atgtggttactgcttaccctgagctttctgctggcatccacggcagcacaggatggcgataagctcctcgagggtgatgagtgcgccccgcactcacagccctggcaggtggcgctgtatgaaagagggagattcaattgtggtgcatccctcatatcaccccactgggttttaagcgccgcgcattgccagtccaggttcatgcgggttcgtttaggggagcacaatctcagaaagagagatggacccgagcagctcaggacaaccagccgggtcattcctcaccctaggtatgaagcaaggtctcataggaatgacattatgctgttacggctggttcagccggcaaggctgaatccccaggtgcggccagctgtgctccctacacggtgccctcacccaggcgaagcctgtgtggttagtggatggggtctcgtatctcataatgagcccgggaccgccgggagccccaggtcacaggtaagtctccctgacactctgcattgtgctaacatctccatcatctccgacacatcatgcgacaagagctaccccggccggctgaccaatacgatggtctgcgccggcgcggaaggccggggtgccgagtcttgcgaaggggactctggcggtcctctcgtgtgcggtggtattttgcagggaatcgtgtcatggggagacgttccttgcgataacaccacaaaacccggagtgtacaccaaagtctgccattatttagaatggattagggagactatgaaaaggaattag

SEQ ID NO: 193454 - DNA, 771 bp, Artificial Sequence
  derived and/or modified sequence
atgtggctcctcctgacattgtccttcctgttagcctccaccgccgcccaagacggtgataagctccttgaaggtgacgaatgcgcaccccattcacagccctggcaggttgccctttacgagagggggagattcaactgcggagcaagtctgatctcgccccactgggtcctgagcgcagcacattgtcagagtaggtttatgagggttcggctgggagagcacaacctcaggaaaagagatggacctgagcaactccgcaccacctcaagagttattcctcacccaaggtacgaagcacggtctcaccgcaatgatatcatgcttctccggttggtacagcctgcaaggctgaatccccaggtgagaccagcagttctgcctacccggtgtccccaccccggagaagcttgtgtggtgagcgggtggggattggtaagccataatgaacccggaaccgccggcagcccaagatcgcaggtatcccttccagataccctacactgcgccaacatctcaattatcagtgacacatcctgcgacaagtcttaccctggaaggctgaccaatactatggtctgtgccggcgccgagggaagaggagccgagagctgtgaaggcgactcagggggaccactggtgtgcggggggatcctgcagggaattgtatcttggggcgacgtaccatgtgacaatacaaccaagcctggagtgtacacaaaggtgtgccactatcttgagtggattcgcgagactatgaaaaggaattag

SEQ ID NO: 193455 - DNA, 1172 bp, Artificial Sequence
  derived and/or modified sequence
actgcagccgaaccctggtccctcctccacaatgtggcttctcctcactctctccttcctgctggcatccacagcagcccaggatggtgacaagttgctggaaggtgacgagtgtgcaccccactcccagccatggcaagtggctctctacgagcgtggacgctttaactgtggcgcttccctcatctccccacactgggtgctgtctgcggcccactgccaaagccgcttcatgagagtgcgcctgggagagcacaacctgcgcaagcgcgatggcccagagcaactacggaccacgtctcgggtcattccacacccgcgctacgaagcgcgcagccaccgcaacgacatcatgttgctgcgcctagtccagcccgcacgcctgaacccccaggtgcgccccgcggtgctacccacgcgttgcccccacccgggggaggcctgtgtggtgtctggctggggcctggtgtcccacaacgagcctgggaccgctgggagcccccggtcacaagggtgactctgggggacccctggtctgtgggggcatcctgcagggcattgtgtcctggggtgacgtcccttgtgacaacaccaccaagcctggtgtctataccaaagtctgccactacttggagtggatcagggaaaccatgaagaggaactgactattctagcctatctcctgtgcccctgactgagcagaagcccccacagctggccagcagccccgcctgacatggaacagaacggagccatcccccaagaccctgtccaaggcccagatgttagccaaggacttgtcccacctgaggacaaagctggcgctcaaggtcacctgtttaatgccaagataacaaagcgctgatccaagttgctctgtaggaatttctgtgacttttttctggggtcaaagagaaaccccgagacactgtacactgttccttttcacccaccaccccgatccctaggtgaggagaagcggcttgaagcagggctccattcattcaacacacatgaccacccgtgtgatcttgaacaagaggcccaatctcacttcgccttggtttccttatctgtaaaatgagaccatcttattgctgacttcaaagggctgttgtgaggattaaatgagatgattcgtctgaactgattaaaatcgtgtctggcactga

SEQ ID NO: 193456 - DNA, 1261 bp, Artificial Sequence
  derived and/or modified sequence
atgtggcttctcctcactctctccttcctgctggcatccacagcagcccaggatggtgacaagttgctggaaggtgacgagtgtgcaccccactcccagccatggcaagtggctctctacgagcgtggacgctttaactgtggcgcttccctcatctccccacactgggtgctgtctgcggcccactgccaaagccgcttcatgagagtgcgcctgggagagcacaacctgcgcaagcgcgatggcccagagcaactacggaccacgtctcgggtcattccacacccgcgctacgaagcgcgcagccaccgcaacgacatcatgttgctgcgcctagtccagcccgcacgcctgaacccccaggtgcgccccgcggtgctacccacgcgttgcccccacccgggggaggcctgtgtggtgtctggctggggcctggtgtcccacaacgagcctgggaccgctgggagcccccggtcacaaggtgcgtgaaaggatggagctggatgcgaggcctcaaggaatcctatgctccagggctcttgggcggaggggacaagggccggaatttatggatctgctccaagtccactgtcttccccagggtgactctgggggacccctggtctgtgggggcatcctgcagggcattgtgtcctggggtgacgtcccttgtgacaacaccaccaagcctggtgtctataccaaagtctgccactacttggagtggatcagggaaaccatgaagaggaactgactattctagcctatctcctgtgcccctgactgagcagaagcccccacagctggccagcagccccgcctgacatggaacagaacggagccatcccccaagaccctgtccaaggcccagatgttagccaaggacttgtcccacctgaggacaaagctggcgctcaaggtcacctgtttaatgccaagataacaaagcgctgatccaagttgctctgtaggaatttctgtgacttttttctggggtcaaagagaaaccccgagacactgtacactgttccttttcacccaccaccccgatccctaggtgaggagaagcggcttgaagcagggctccattcattcaacacacatgaccacccgtgtgatcttgaacaagaggcccaatctcacttcgccttggtttccttatctgtaaaatgagaccatcttattgctgacttcaaagggctgttgtgaggattaaatgagatgattcgtctgaactgattaaaatcgtgtctggcactga

SEQ ID NO: 193457 - DNA, 771 bp, Artificial Sequence
  derived and/or modified sequence
atgtggctgctgctgaccctgtccttcctgctggccagcacagctgcccaggatggagacaagctgctggagggagatgaatgtgccccccacagccagccctggcaggtggccctgtatgaaagaggccgcttcaactgtggggccagcctcatcagcccccactgggtgctgtctgctgcccactgccagagccgcttcatgagggtgcggctgggggagcacaacctgaggaagagagatggccctgagcagctgcggaccaccagcagggtcatcccccaccccaggtatgaggcccggagccacagaaatgacatcatgctgctgcggctggtgcagcctgcccggctgaacccccaggtgcggcctgctgtgctgcccacccgctgcccccaccctggagaggcctgtgtggtgtctggctggggcctggtgagccacaatgaacctggaacagctggcagccccaggagccaggtgtccctgcctgacaccctgcactgtgccaacatcagcatcatcagtgacaccagctgtgacaagagctacccaggccgcctgaccaacaccatggtgtgtgccggggctgagggccgcggggctgagagctgtgagggggacagcggcggccccctggtgtgtggcggcatcctgcagggcatcgtgtcctggggagatgtgccctgtgacaacaccaccaagccaggagtgtacaccaaggtgtgccactacctggagtggatccgggagaccatgaagagaaattag

SEQ ID NO: 193458 - DNA, 771 bp, Artificial Sequence
  derived and/or modified sequence
atgtggctgctgctgaccctgagcttcctgctggccagcaccgccgcgcaggatggtgacaagttactggaaggcgacgaatgcgccccccacagccagccttggcaagtagctctttacgagcgcggccgcttcaactgtggcgcatccctgatctcccctcactgggtgctgtccgcggcgcattgccagtctcgctttatgcgggtgcgtctgggcgagcacaacctacgcaagcgggatggccccgaacagctcaggaccacttcacgcgttataccacatccacgttatgaagcgagaagccaccgtaatgacattatgcttctgaggctggtgcaaccggcaaggctcaatccacaggtacgccccgctgtgctcccaactcgttgcccccaccccggggaggcatgtgtggtttccgggtgggggctggttagccataacgaaccaggcaccgctggctctccgagatctcaggtcagcttacctgacactttacactgcgcaaatattagtatcatctctgacacgtcctgcgacaaaagttaccctggcagactaactaacacgatggtgtgcgctggtgctgaaggaagaggagcagaatcctgcgaaggggatagcgggggcccattggtatgtgggggtatcttgcagggcatagtcagttggggggacgtcccctgtgacaacactaccaaacccggagtatatacgaaggtgtgccattatttggaatggattagggagacgatgaagaggaactag

SEQ ID NO: 193459 - DNA, 771 bp, Artificial Sequence
  derived and/or modified sequence
atgtggctgctgctgaccctgagcttcctgctggccagcaccgccgcccaggatggggataaattgctcgagggcgatgagtgtgcaccccattcccagccttggcaggtcgcactgtatgagcgtggacgctttaactgtggagcttccttaatctcgccccattgggtgctgtctgccgcacactgccagagcaggttcatgcgagtgcgcttaggagagcataatctgaggaagcgggatggccccgaacagctgagaaccacgtctcgggttatcccccatccacggtacgaggcacgatcccaccgtaacgacatcatgctgctgcggctcgtacagccggctaggctgaacccccaggtacgccccgcggtattaccaactaggtgtcctcaccccggtgaggcctgcgtagtgtctggatggggtctggtgtcccacaacgagccagggaccgctggctccccaaggtctcaggtgagtctgccggacactctgcactgtgccaatatctccatcatctcagacactagttgtgataagagttatcccggacgactgaccaacaccatggtttgtgcaggcgcagaaggcagaggcgcagagagctgcgagggcgatagcggtgggccgctggtatgtggaggcatcctgcaaggaatcgtgagttggggagacgtgccatgcgacaatacaactaaacctggcgtttatactaaagtgtgccactacctggagtggatcagagaaactatgaagagaaattag

SEQ ID NO: 193460 - DNA, 771 bp, Artificial Sequence
  derived and/or modified sequence
atgtggttgctactgaccctgtcatttctgctcgcatcaacagccgcacaggatggcgacaagctgctagaaggtgacgagtgtgctccacactcacagccatggcaggtcgccttgtacgagaggggaaggttcaattgtggcgcttctttaatctcacctcattgggtcctttctgcagctcattgccaatccagattcatgagagtgagactcggtgagcacaacttacggaaacgagatgggcctgagcaactccgaaccaccagtcgcgtgatccctcatccacggtacgaggctcgctctcaccgcaacgacatcatgctccttagattagtccaacccgctcgcctcaacccgcaggtcagacctgcggtcttacccactagatgtccacatcccggtgaagcttgcgtggtgtctggatggggcctggtcagccacaacgagccaggcaccgcaggatctccgcgaagtcaggtcagcctacccgatacccttcactgtgccaatatctctatcatcagcgacacctcttgcgataagtcctatcccggacgccttaccaacacaatggtatgcgctggagccgaaggacgcggagctgaatcctgtgagggagattctggcggacctctcgtctgcgggggaatactgcaagggatagtttcttggggcgacgtgccctgtgataacaccactaagcctggcgtttatacaaaggtgtgccattacctggagtggatacgggagaccatgaagcgcaattag

SEQ ID NO: 193461 - DNA, 771 bp, Artificial Sequence
  derived and/or modified sequence
atgtggctgcttctgacgctttcttttctgttagcatcaaccgccgctcaagatggggataagctcctggagggagatgagtgcgccccacatagccagccttggcaggtcgcgctgtacgagcgcggtagatttaattgcggagcgtctctaatcagcccgcattgggtgctgtccgcagcccactgccagtcgcgctttatgagggtgcgtttgggtgaacataacttgagaaagcgggacggccctgaacagctacggaccactagccgagtaatcccccacccacggtacgaagccagaagccataggaatgacattatgctactgaggctggttcagccggctcgcctaaacccccaggtgcggcctgctgtactgcccaccagatgccctcatcccggagaggcctgtgtcgtgtccgggtggggactagtgtctcacaatgagcccggaacagccggatctccaaggagtcaggtgagcctgccagacaccctgcattgtgcaaacattagcattattagcgacacttcttgcgacaagtcctaccctgggagactgaccaataccatggtatgcgcaggggctgaagggcgtggagcggagtcctgtgagggggacagtgggggacctcttgtgtgtggtggcatactccagggcattgtctcttggggtgatgtaccgtgcgacaataccacaaagcctggcgtctacaccaaggtgtgtcattatcttgagtggatacgggaaactatgaaacggaattag

SEQ ID NO: 193462 - DNA, 771 bp, Artificial Sequence
  derived and/or modified sequence
atgtggctgctgctgaccctgagcttcctgctggccagcaccgccgcccaggacggcgacaagctgctggagggcgacgagtgcgccccccacagccagccctggcaggtggccctgtacgagagaggcagattcaactgcggcgccagcctgatcagcccccactgggtgctgagcgccgcccactgccagagcagattcatgagagtgagactgggcgagcacaacctgagaaagagagacggccccgagcagctgagaaccaccagcagagtgatcccccaccccagatacgaggccagaagccacagaaacgacatcatgctgctgagactggtgcagcccgccagactgaacccccaggtgagacccgccgtgctgcccaccagatgcccccaccccggcgaggcctgcgtggtgagcggctggggcctggtgagccacaacgagcccggcaccgccggcagccccagaagccaggtgagcctgcccgacaccctgcactgcgccaacatcagcatcatcagcgacaccagctgcgacaagagctaccccggcagactgaccaacaccatggtgtgcgccggcgccgagggcagaggcgccgagagctgcgagggcgacagcggcggccccctggtgtgcggcggcatcctgcagggcatcgtgagctggggcgacgtgccctgcgacaacaccaccaagcccggcgtgtacaccaaggtgtgccactacctggagtggatcagagagaccatgaagagaaactag

SEQ ID NO: 193463 - protein, 235 aa, Artificial Sequence
  derived and/or modified sequence
MAVELGVLLVRPRPGTGLGRVMRTLLLVLWLATRGSALYFHIGETEKKCFIEEIPDETMVIGNYRTQLYDKQREEYQPATPGLGMFVEVKDPEDKVILARQYGSEGRFTFTSHTPGEHQICLHSNSTKFSLFAGGMLRVHLDIQVGEHANDYAEIAAKDKLSELQLRVRQLVEQVEQIQKEQNYQRWREERFRQTSESTNQRVLWWSILQTLILVAIGVWQMRHLKSFFEAKKLV

SEQ ID NO: 193464 - DNA, 708 bp, Artificial Sequence
  derived and/or modified sequence
atggccgtggagctgggcgtgctgctggtgagacccagacccggcaccggcctgggcagagtgatgagaaccctgctgctggtgctgtggctggccaccagaggcagcgccctgtacttccacatcggcgagaccgagaagaagtgcttcatcgaggagatccccgacgagaccatggtgatcggcaactacagaacccagctgtacgacaagcagagagaggagtaccagcccgccacccccggcctgggcatgttcgtggaggtgaaggaccccgaggacaaggtgatcctggccagacagtacggcagcgagggcagattcaccttcaccagccacacccccggcgagcaccagatctgcctgcacagcaacagcaccaagttcagcctgttcgccggcggcatgctgagagtgcacctggacatccaggtgggcgagcacgccaacgactacgccgagatcgccgccaaggacaagctgagcgagctgcagctgagagtgagacagctggtggagcaggtggagcagatccagaaggagcagaactaccagagatggagagaggagagattcagacagaccagcgagagcaccaaccagagagtgctgtggtggagcatcctgcagaccctgatcctggtggccatcggcgtgtggcagatgagacacctgaagagcttcttcgaggccaagaagctggtgtag

SEQ ID NO: 193465 - DNA, 708 bp, Artificial Sequence
  derived and/or modified sequence
atggccgttgagctgggcgtactcctggtcagaccacgcccaggtactggtctcggaagggtcatgcggaccctgttgctcgtcctctggctggccactcggggaagcgctttgtatttccacatcggtgaaaccgagaagaaatgtttcattgaggaaattcccgacgaaacaatggttataggcaattatagaacacagctgtatgataagcagcgggaagagtaccagcccgctaccccggggctcggcatgttcgtcgaagtgaaggacccggaagataaggtgattttagcacgccaatatgggtccgaagggcgtttcacattcaccagccatactcccggcgaacatcagatctgtttacatagtaactctacgaaatttagccttttcgctgggggcatgttacgtgtgcacctggatatccaagttggagaacatgcaaacgactatgcagaaatagctgctaaggacaagctcagtgaactccagttaagagttagacaactcgtggagcaagttgaacaaattcaaaaggaacagaattatcagaggtggcgtgaggagagattcaggcagacgtctgagagcacgaatcaaagagtgttatggtggtctatcctgcaaactctgattttagtggccattggggtctggcaaatgcggcacttaaagtccttcttcgaagccaagaagttagtctag

SEQ ID NO: 193466 - DNA, 708 bp, Artificial Sequence
  derived and/or modified sequence
atggctgtggagctgggcgtgctgctggtgcggccccggcccggcaccggcctgggccgggtgatgaggaccctgctgctggtgctgtggctggccacccggggcagcgccctgtacttccacatcggggagacagagaagaagtgcttcatcgaggagatcccagatgagaccatggtgattggcaactaccgcacccagctgtatgacaagcagcgggaggagtaccagcctgccaccccaggcctgggcatgtttgtggaggtgaaggaccctgaggacaaggtgatcctggcccggcagtatggcagcgagggccgcttcaccttcaccagccacaccccaggagagcaccagatctgcctgcacagcaacagcaccaagttcagcctgtttgctgggggcatgctgcgggtgcacctggacatccaggtgggggagcacgccaatgactatgcagaaattgctgccaaggacaagctgtctgagctgcagctgcgggtgcggcagctggtggagcaggtggagcagatccagaaggagcagaactaccagcgctggagggaggagcgcttccggcagaccagcgagagcaccaaccagagggtgctgtggtggagcatcctgcagaccctcatcctggtggccatcggcgtgtggcagatgaggcacctgaagagcttctttgaggccaagaagctggtgtag

SEQ ID NO: 193467 - DNA, 708 bp, Artificial Sequence
  derived and/or modified sequence
atggccgtggagctgggcgtgctgctggtgcggccccggcccggcaccggcctcgggcgtgttatgaggaccctgttgttggtgttgtggctggcgactcgtggaagtgccctctattttcacatcggggagacagagaaaaagtgctttattgaagagattcccgatgagacgatggtgataggaaattaccgcacccagctttatgacaaacagcgggaagagtaccagcccgccaccccagggttgggaatgttcgtcgaagtgaaagatcccgaagataaagttattcttgccagacagtacggctctgaagggcgttttaccttcacatcccacacaccaggagagcaccaaatctgccttcattcgaactcaaccaaattctccctatttgccggaggaatgctaagagttcacctggatatccaggttggcgagcatgctaatgactatgctgaaatagcggccaaggataaacttagtgagctccagctccgcgtgcgccagctggtggagcaggtcgaacagatccagaaagagcagaattaccaaaggtggcgggaggaacgatttcgacagacgtctgaatccacaaatcagcgcgttctgtggtggagcatcctgcagacacttattctggtcgcaattggcgtgtggcaaatgcggcatttaaagtcctttttcgaagcaaaaaaacttgtttag

SEQ ID NO: 193468 - DNA, 708 bp, Artificial Sequence
  derived and/or modified sequence
atggccgtggaacttggagtcctccttgtgcgacccaggcccggtaccggcctagggagggtgatgagaacattgctgctggttctgtggctggctaccaggggcagcgctctgtatttccacatcggagaaacggagaaaaaatgtttcatcgaggagattccagatgagacaatggtgatcggcaattatcgaacgcagttgtatgacaagcagagagaggagtatcagcccgctactcccggattgggtatgtttgttgaggtgaaggatccagaggataaagttattttagccagacagtacggcagcgagggtaggtttacatttacttctcacaccccgggtgaacaccagatatgcctccacagtaacagcaccaaatttagcctgtttgccggtggaatgctccgtgtccaccttgacatccaagtgggcgaacacgcaaatgactacgctgagatcgcggcaaaagacaaactttctgagctgcagttgcgagtgagacagctagtggagcaggtagagcaaatacaaaaggagcaaaactatcagcggtggagagaggagaggttcagacagacaagtgagtcgaccaaccaacgggtgctctggtggagcattctccaaacccttatcctcgttgctattggagtctggcagatgaggcacctcaaaagtttctttgaagccaagaagctggtgtag

SEQ ID NO: 193469 - DNA, 1473 bp, Artificial Sequence
  derived and/or modified sequence
gcggcggcagggcgacgtggcgcggccggctgcggctgcgcaggcaggtggagcaagatggctgtggagctgggcgtgctgctcgtccggccccggcccggaaccgggctgggtagagtgatgcggaccctcctgctggtgctgtggctggcgacgcgcggaagcgcgctctactttcacatcggagagacggagaagaagtgctttattgaggagatcccggacgagaccatggtcataggaaactaccggacgcagctgtatgacaagcagcgggaggagtaccagccggccaccccggggcttggcatgtttgtggaggtgaaggacccagaggacaaggtcatcctggcccggcagtatggctccgagggcaggttcactttcacttcccatacccctggtgagcaccagatctgtcttcactccaattccaccaagttctccctctttgctggaggcatgctgagagttcacctggacatccaggtaggtgaacatgccaatgactatgcagaaattgctgctaaagacaagttgagtgagttgcagctacgagtgcgacagctggtggaacaagtggagcagatccagaaagagcagaactaccagcggtggcgagaggagcgcttccggcagaccagtgagagcaccaaccagcgggtgctgtggtggtccattctgcagaccctcatcctcgtggccatcggtgtctggcagatgcggcacctcaagagcttctttgaagccaagaagcttgtgtagctgtcccaggcgtcacaacccatcctcccaggctgggggagaaaggacctcctggaactgacttcttctgtcaggaggactggtttccagccatacctgttctggaagggagaggggctggaggcacccacaggcacaagctgaaggcagcagcttggctaatactgagcaggtagtggggcaaattcctgccctctctctctggcctctgggccgtttggtagtaatcacccaagggctggtaaagcccctcctcttggcacctcagaatcacagtgttactgatcagggatgtgaggctgctgttgggggtggggggaggggaatgggcaggcaagccagtcttctgtcttcctttgctaacttagggttttgagcaggttggggtatggtgcctgtcatacccacctgccaccctgggaacctcactgttctctctttcagcctagacctgctgatccagggtgtgtgtgagttgagggtgggtggaggggtttgcagtgtgggaatgtggccctgcagttgacctgagctgcttcacatggttgtccattctggggcttaaagaactgggaccagaccaagtagaggccttggtgctggttggggtggggcctgcagagtcttagttactgatttcattttcaataaatgtaggtttgttacatgagtttcccaataaaaaaaaaaatgacttcttgtccagtg

SEQ ID NO: 193470 - protein, 443 aa, Artificial Sequence
  derived and/or modified sequence
MVRGRISRLSVRDVRFPTSLGGHGADAMHTDPDYSAAYVVIETDAEDGIKGCGITFTLGKGTEVVVCAVNALAHHVLNKDLKDIVGDFRGFYRQLTSDGQLRWIGPEKGVVHLATAAVLNAVWDLWAKQEGKPVWKLLVDMDPRMLVSCIDFRYITDVLTEEDALEILQKGQIGKKEREKQMLAQGYPAYTTSCAWLGYSDDTLKQLCAQALKDGWTRFKVKVGADLQDDMRRCQIIRDMIGPEKTLMMDANQRWDVPEAVEWMSKLAKFKPLWIEEPTSPDDILGHATISKALVPLGIGIATGEQCHNRVIFKQLLQAKALQFLQIDSCRLGSVNENLSVLLMAKKFEIPVCPHAGGVGLCELVQHLIIFDYISVSASLENRVCEYVDHLHEHFKYPVMIQRASYMPPKDPGYSTEMKEESVKKHQYPDGEVWKKLLPAQEN

SEQ ID NO: 193471 - DNA, 1332 bp, Artificial Sequence
  derived and/or modified sequence
atggtgcgtggaagaatcagtagactctccgtccgcgacgtccgatttcccacttccctgggcggccatggtgctgacgctatgcatacagacccggactatagcgccgcctacgttgtaatagagactgatgcagaggacgggattaagggctgtgggattaccttcacacttggcaaggggaccgaggtggtagtgtgcgccgtgaatgctctggcccatcatgtactgaataaggacctgaaagatatagttggagactttcgaggcttttaccgacagctcacttcagacgggcaattacgctggataggcccagaaaagggagtggttcacttggcgactgccgccgtgttaaatgctgtgtgggacctgtgggctaaacaggaggggaagcccgtgtggaagttgctggtagacatggaccctcggatgttggtgtcctgtatcgatttccgatacatcacggatgtcctgacagaggaggatgccttggagatcctgcagaaaggccagatcggaaaaaaagaacgtgagaagcagatgctcgctcagggctacccagcttatacaacatcttgcgcctggcttggatattctgatgatacacttaaacagctttgcgctcaggcccttaaagatggctggactagatttaaagttaaagttggcgccgacctccaggacgatatgaggagatgtcagattatcagggatatgatcggacctgagaagaccttaatgatggacgcaaaccaacgatgggacgtgccggaggcagtagagtggatgagcaagcttgccaagttcaaaccgctatggatcgaagaacctaccagcccagacgacattctcggccacgccactatctcgaaggccctggttcccctgggaatcggtattgccacaggtgagcagtgtcacaatcgtgtgatcttcaaacaactccttcaagccaaggctctgcagttcctccagatcgacagttgtaggctggggtcagttaacgagaacctgtctgtgctgctgatggctaagaagttcgagatacctgtatgtccgcacgccggcggagtgggactgtgcgaactggtgcagcatttaattattttcgattacattagcgtttccgcgtctctggaaaaccgagtttgtgagtatgtggaccacctacatgagcattttaaataccccgtgatgattcagcgtgcctcctatatgccacccaaggaccctggctacagtacagaaatgaaggaagaatccgtcaagaagcaccaatatccagatggagaggtgtggaagaagctgcttcccgcacaggagaactag

SEQ ID NO: 193472 - DNA, 1332 bp, Artificial Sequence
  derived and/or modified sequence
atggtgcggggccgcatcagccggctgtctgtgagagatgtgcgcttccccaccagcctgggcggccatggagcagatgccatgcacacagatcctgactacagcgctgcctacgtggtgattgaaacagatgctgaagatggcatcaagggctgcggcatcaccttcaccctgggcaagggcacagaggtggtggtgtgtgctgtgaatgccctggcccaccacgtgctgaacaaggacctgaaggacatcgtgggggacttccggggcttctaccggcagctgaccagtgatggccagctgcgctggattggccctgagaagggcgtggtgcacctggccacagctgctgtgctgaatgctgtgtgggacctgtgggccaagcaggagggcaagcctgtgtggaagctgctggtggacatggaccccaggatgctggtgtcctgcatcgacttccgctacatcacagatgtgctgacagaggaggatgccctggagatcctgcagaagggccagatcggcaagaaggagcgggagaagcagatgctggcccagggctacccagcctacaccaccagctgtgcctggctgggctacagtgatgacaccctgaagcagctgtgtgcccaggccctgaaggatggctggacccgcttcaaggtgaaggtgggcgctgacctgcaggatgacatgaggcgctgccagatcatccgggacatgattggccctgagaagaccctgatgatggatgccaaccagcgctgggatgtgcctgaggccgtggagtggatgagcaagctggccaagttcaagcccctgtggattgaggagcccaccagcccagatgacatcctgggccacgccaccatcagcaaggccctggtgcccctgggcattggaattgccactggagagcagtgccacaacagagtcatcttcaagcagctgctgcaggccaaggccctgcagttcctgcagattgacagctgccgcctgggctctgtgaatgaaaacctgtctgtgctgctgatggccaagaagtttgagatccctgtgtgcccccacgccggcggcgtgggcctgtgtgagctggtgcagcacctgatcatctttgactacatctctgtgtctgccagcctggagaacagagtgtgtgaatatgtggaccacctgcacgagcacttcaagtaccctgtgatgatccagagggccagctacatgccacccaaggaccccggctacagcacagagatgaaggaggagagcgtgaagaagcaccagtacccagatggagaggtgtggaagaagctgctgcctgcccaggagaactag

SEQ ID NO: 193473 - DNA, 1332 bp, Artificial Sequence
  derived and/or modified sequence
atggtgcggggccggatcagccggctgagcgtgcgggacgtgcggttccccacatcactggggggtcacggtgccgacgctatgcacactgatcccgactacagcgccgcttacgtggttatcgagacagacgcagaagatgggataaaaggttgcggcattaccttcacccttggcaaaggaaccgaggtcgtcgtctgtgctgttaatgccctggctcaccatgttctcaacaaggatctgaaggatatcgtcggtgacttccgcgggttctataggcagttaacaagcgatggccagctgaggtggataggacctgagaagggggtggtgcatctcgccacagccgcagtgctgaatgccgtgtgggatctgtgggctaagcaggaaggcaagcccgtgtggaagcttttggtcgacatggacccccggatgttggtgtcgtgtatagatttccggtacattacggatgtgctcaccgaagaggatgcactggagatactacagaagggacagattgggaaaaaagaaagggagaaacaaatgttggcccaggggtatcccgcgtataccacctcttgcgcatggctgggatatagcgatgacactctcaagcagctgtgcgctcaggcgcttaaagacggttggaccaggtttaaggtcaaagtgggcgccgacctccaggacgacatgcgacggtgccaaattatcagggacatgataggtccagagaaaaccctgatgatggatgccaaccagagatgggacgttcccgaagccgtagaatggatgagcaagctggctaagtttaaaccgctgtggattgaggagccgaccagtcctgatgatatactcggacacgctactatcagcaaagccttagtgcccctcggcattgggatcgcaacaggagagcagtgccacaatcgcgttatatttaagcagctgctccaggccaaggctcttcaattcctgcagattgacagttgtcggctgggatccgttaacgagaatctgtcagttctcctgatggcaaaaaagttcgaaattccagtgtgcccccatgcaggcggagtgggactctgtgaactcgtccaacacctgatcatctttgattacatttctgtcagtgcatccctggagaaccgagtctgtgaatatgtagaccaccttcacgaacacttcaaatatccagtgatgatccaaagggcctcttatatgccaccaaaagaccctggctattcgaccgaaatgaaggaggagagcgtgaaaaaacatcagtatcccgacggggaggtgtggaaaaaattgctgccagcacaggaaaactag

SEQ ID NO: 193474 - DNA, 1332 bp, Artificial Sequence
  derived and/or modified sequence
atggttcgcggacggatctcccggctgagcgtgcgggacgtccggttccctacctcgctgggagggcacggtgccgacgcaatgcatactgaccctgactattcagccgcttacgtggtgatcgaaactgacgcagaggatggaataaagggatgcggtattactttcaccctgggtaaggggacagaggtggtagtttgtgccgtaaatgcacttgctcaccacgtgctgaacaaagatctcaaggatatagtgggagactttagaggcttctaccgacagttgacttctgacggccagctccgatggatcggacctgaaaaaggggtggttcacttggcaacagctgcggtgctgaatgcggtctgggatctttgggccaaacaagaggggaaacccgtgtggaaactgctcgtggacatggatccccgtatgctggttagctgtattgactttcgatacatcaccgacgtgctgaccgaagaggatgcattagagatcctgcagaagggacagattggcaaaaaagaaagagaaaagcagatgctcgcccagggataccctgcctatactacttcatgtgcatggttaggctactccgatgatactctgaaacaactctgtgcccaggctctaaaggacggttggacacggtttaaggtgaaggttggtgccgatctgcaggacgacatgcgacggtgccagatcattcgcgatatgatcggccctgaaaagaccctgatgatggatgcaaaccagcgttgggacgttccagaagccgtggaatggatgtcaaagctggccaagttcaagcctttatggatcgaagaaccaaccagcccggacgatatcctggggcatgctaccatctccaaagcacttgtacctctcggaattggaatcgcgaccggcgaacaatgccacaacagggtgatcttcaaacagctgttgcaagccaaggctctgcagttcctccaaattgatagttgtcgcctcgggagcgtgaacgaaaatctttccgtgctcctgatggcaaaaaagtttgagatacccgtgtgccctcatgccggaggagtcggactgtgcgagctcgtgcaacacctgattattttcgactacatctccgtgtccgcttcccttgagaaccgtgtgtgcgagtacgtggatcatcttcacgagcactttaaataccccgttatgatacagagggcttcatacatgccaccgaaggaccccggatattccacagagatgaaagaggagtcagtcaaaaagcaccaatatcccgacggcgaggtgtggaaaaagttactgccagcccaggagaactag

SEQ ID NO: 193475 - DNA, 1332 bp, Artificial Sequence
  derived and/or modified sequence
atggtgagaggcagaatcagcagactgagcgtgagagacgtgagattccccaccagcctgggcggccacggcgccgacgccatgcacaccgaccccgactacagcgccgcctacgtggtgatcgagaccgacgccgaggacggcatcaagggctgcggcatcaccttcaccctgggcaagggcaccgaggtggtggtgtgcgccgtgaacgccctggcccaccacgtgctgaacaaggacctgaaggacatcgtgggcgacttcagaggcttctacagacagctgaccagcgacggccagctgagatggatcggccccgagaagggcgtggtgcacctggccaccgccgccgtgctgaacgccgtgtgggacctgtgggccaagcaggagggcaagcccgtgtggaagctgctggtggacatggaccccagaatgctggtgagctgcatcgacttcagatacatcaccgacgtgctgaccgaggaggacgccctggagatcctgcagaagggccagatcggcaagaaggagagagagaagcagatgctggcccagggctaccccgcctacaccaccagctgcgcctggctgggctacagcgacgacaccctgaagcagctgtgcgcccaggccctgaaggacggctggaccagattcaaggtgaaggtgggcgccgacctgcaggacgacatgagaagatgccagatcatcagagacatgatcggccccgagaagaccctgatgatggacgccaaccagagatgggacgtgcccgaggccgtggagtggatgagcaagctggccaagttcaagcccctgtggatcgaggagcccaccagccccgacgacatcctgggccacgccaccatcagcaaggccctggtgcccctgggcatcggcatcgccaccggcgagcagtgccacaacagagtgatcttcaagcagctgctgcaggccaaggccctgcagttcctgcagatcgacagctgcagactgggcagcgtgaacgagaacctgagcgtgctgctgatggccaagaagttcgagatccccgtgtgcccccacgccggcggcgtgggcctgtgcgagctggtgcagcacctgatcatcttcgactacatcagcgtgagcgccagcctggagaacagagtgtgcgagtacgtggaccacctgcacgagcacttcaagtaccccgtgatgatccagagagccagctacatgccccccaaggaccccggctacagcaccgagatgaaggaggagagcgtgaagaagcaccagtaccccgacggcgaggtgtggaagaagctgctgcccgcccaggagaactag

SEQ ID NO: 193476 - DNA, 1867 bp, Artificial Sequence
  derived and/or modified sequence
cgctcccgccctcccgccctcccgccgcgcgctcgggatcccgaccagtcctgaccgcacgggggccgcggccacggggcgcaggggccatggtgcgcggcaggatctcccggctctcggtccgggacgtgcgcttccccacgtcgcttgggggccacggcgcggacgccatgcacacggaccctgactactcggctgcctatgtcgtcatagaaactgatgcagaagatggaatcaaggggtgtggaattaccttcactctgggaaaaggcactgaagttgttgtctgtgctgtgaatgccctcgcccaccatgtgctcaacaaggacctcaaggacattgttggtgacttcagaggcttctataggcagctcacaagtgatgggcagctcagatggattggtccagaaaagggcgtggtgcacctggcgacagcggccgtcctaaacgcggtgtgggacttgtgggccaagcaggagggaaagcctgtctggaagttacttgtggacatggatcccaggatgctggtatcctgcatagatttcaggtacatcactgatgtcctgactgaggaggatgccctagaaatactgcagaaaggtcaaattggtaaaaaagaaagagagaagcaaatgctggcacaaggataccctgcttacacgacatcgtgcgcctggctggggtactcagatgacacgttgaagcagctctgtgcccaggcgctgaaggatggctggaccaggtttaaagtaaaggtgggtgctgatctccaggatgacatgcgaagatgccaaatcatccgagacatgattggaccggaaaagactttgatgatggatgccaaccagcgctgggatgtgcctgaggcggtggagtggatgtccaagctggccaagttcaagccattgtggattgaggagccaacctcccctgatgacattctggggcacgccaccatttccaaggcactggtcccattaggaattggcattgccacaggagaacagtgccacaatagagtgatatttaagcaactcctacaggcgaaggccctgcagttcctccagattgacagttgcagactgggcagtgtcaatgagaacctctcagtattgctgatggccaaaaagtttgaaattcctgtttgcccccatgctggtggagttggcctctgtgaactggtgcagcacctgattatatttgactacatatcagtttctgcaagccttgaaaatagggtgtgtgagtatgttgaccacctgcatgagcatttcaagtatcccgtgatgatccagcgggcttcctacatgcctcccaaggatcccggctactcaacagaaatgaaggaggaatctgtaaagaaacaccagtatccagatggtgaagtttggaagaaactccttcctgctcaagaaaattaagtgctcagccccaacaacttttttctttctgaagtgaaagggcttaaaatttcttggaaatagttttacaaaaatggatttaaaaaatcctaccgatcaagatgagttcagctagaagtcataccaccctcaggaatcagctaagtaattattacttgattcttttagcaaatcaatgcacgttatcctacttaatccttaaataagtttagatttaactaacccaaagtccaggaggatgttcttacaaaaatagctatatcaagggctggcacctagacattaaactgtaatttgaaaataagcaacatgttgcataacttgttggaataattccttgttctgtttaacacttgtcataaattagcagaataaaaatagtcgtgcaacaccgggggtatctggtatgcaacgaagggaaaaatatttcactgattaaccccgaa

SEQ ID NO: 193477 - protein, 1871 aa, Artificial Sequence
  derived and/or modified sequence
MPSVCLLLLLFLAVGGALGNRPFRAFVVTDTTLTHLAVHRVTGEVFVGAVNRVFKLAPNLTELRAHVTGPVEDNARCYPPPSMRVCAHRLAPVDNINKLLLIDYAARRLVACGSIWQGICQFLRLDDLFKLGEPHHRKEHYLSGAQEPDSMAGVIVEQGQGPSKLFVGTAVDGKSEYFPTLSSRKLISDEDSADMFSLVYQDEFVSSQIKIPSDTLSLYPAFDIYYIYGFVSASFVYFLTLQLDTQQTLLDTAGEKFFTSKIVRMCAGDSEFYSYVEFPIGCSWRGVEYRLVQSAHLAKPGLLLAQALGVPADEDVLFTIFSQGQKNRASPPRQTILCLFTLSNINAHIRRRIQSCYRGEGTLALPWLLNKELPCINTPMQINGNFCGLVLNQPLGGLHVIEGLPLLADSTDGMASVAAYTYRQHSVVFIGTRSGSLKKVRVDGFQDAHLYETVPVVDGSPILRDLLFSPDHRHIYLLSEKQVSQLPVETCEQYQSCAACLGSGDPHCGWCVLRHRCCREGACLGASAPHGFAEELSKCVQVRVRPNNVSVTSPGVQLTVTLHNVPDLSAGVSCAFEAAAENEAVLLPSGELLCPSPSLQELRALTRGHGATRTVRLQLLSKETGVRFAGADFVFYNCSVLQSCMSCVGSPYPCHWCKYRHTCTSRPHECSFQEGRVHSPEGCPEILPSGDLLIPVGVMQPLTLRAKNLPQPQSGQKNYECVVRVQGRQQRVPAVRFNSSSVQCQNASYSYEGDEHGDTELDFSVVWDGDFPIDKPPSFRALLYKCWAQRPSCGLCLKADPRFNCGWCISEHRCQLRTHCPAPKTNWMHLSQKGTRCSHPRITQIHPLVGPKEGGTRVTIVGDNLGLLSREVGLRVAGVRCNSIPAEYISAERIVCEMEESLVPSPPPGPVELCVGDCSADFRTQSEQVYSFVTPTFDQVSPSRGPASGGTRLTISGSSLDAGSRVTVTVRDSECQFVRRDAKAIVCISPLSTLGPSQAPITLAIDRANISSPGLIYTYTQDPTVTRLEPTWSIINGSTAITVSGTHLLTVQEPRVRAKYRGIETTNTCQVINDTAMLCKAPGIFLGRPQPRAQGEHPDEFGFLLDHVQTARSLNRSSFTYYPDPSFEPLGPSGVLDVKPGSHVVLKGKNLIPAAAGSSRLNYTVLIGGQPCSLTVSDTQLLCDSPSQTGRQPVMVLVGGLEFWLGTLHISAERALTLPAMMGLAAGGGLLLLAITAVLVAYKRKTQDADRTLKRLQLQMDNLESRVALECKEAFAELQTDINELTNHMDEVQIPFLDYRTYAVRVLFPGIEAHPVLKELDTPPNVEKALRLFGQLLHSRAFVLTFIHTLEAQSSFSMRDRGTVASLTMVALQSRLDYATGLLKQLLADLIEKNLESKNHPKLLLRRTESVAEKMLTNWFTFLLHKFLKECAGEPLFLLYCAIKQQMEKGPIDAITGEARYSLSEDKLIRQQIDYKTLTLHCVCPENEGSAQVPVKVLNCDSITQAKDKLLDTVYKGIPYSQRPKAEDMDLEWRQGRMTRIILQDEDVTTKIECDWKRLNSLAHYQVTDGSLVALVPKQVSAYNMANSFTFTRSLSRYESLLRTASSPDSLRSRAPMITPDQETGTKLWHLVKNHDHADHREGDRGSKMVSEIYLTRLLATKGTLQKFVDDLFETVFSTAHRGSALPLAIKYMFDFLDEQADQRQISDPDVRHTWKSNCLPLRFWVNVIKNPQFVFDIHKNSITDACLSVVAQTFMDSCSTSEHRLGKDSPSNKLLYAKDIPNYKSWVERYYRDIAKMASISDQDMDAYLVEQSRLHASDFSVLSALNELYFYVTKYRQEILTALDRDASCRKHKLRQKLEQIISLVSSDS

SEQ ID NO: 193478 - DNA, 5616 bp, Artificial Sequence
  derived and/or modified sequence
atgcccagcgtgtgcctgctgctgctgctgttcctggccgtgggcggcgccctgggcaacagacccttcagagccttcgtggtgaccgacaccaccctgacccacctggccgtgcacagagtgaccggcgaggtgttcgtgggcgccgtgaacagagtgttcaagctggcccccaacctgaccgagctgagagcccacgtgaccggccccgtggaggacaacgccagatgctaccccccccccagcatgagagtgtgcgcccacagactggcccccgtggacaacatcaacaagctgctgctgatcgactacgccgccagaagactggtggcctgcggcagcatctggcagggcatctgccagttcctgagactggacgacctgttcaagctgggcgagccccaccacagaaaggagcactacctgagcggcgcccaggagcccgacagcatggccggcgtgatcgtggagcagggccagggccccagcaagctgttcgtgggcaccgccgtggacggcaagagcgagtacttccccaccctgagcagcagaaagctgatcagcgacgaggacagcgccgacatgttcagcctggtgtaccaggacgagttcgtgagcagccagatcaagatccccagcgacaccctgagcctgtaccccgccttcgacatctactacatctacggcttcgtgagcgccagcttcgtgtacttcctgaccctgcagctggacacccagcagaccctgctggacaccgccggcgagaagttcttcaccagcaagatcgtgagaatgtgcgccggcgacagcgagttctacagctacgtggagttccccatcggctgcagctggagaggcgtggagtacagactggtgcagagcgcccacctggccaagcccggcctgctgctggcccaggccctgggcgtgcccgccgacgaggacgtgctgttcaccatcttcagccagggccagaagaacagagccagcccccccagacagaccatcctgtgcctgttcaccctgagcaacatcaacgcccacatcagaagaagaatccagagctgctacagaggcgagggcaccctggccctgccctggctgctgaacaaggagctgccctgcatcaacacccccatgcagatcaacggcaacttctgcggcctggtgctgaaccagcccctgggcggcctgcacgtgatcgagggcctgcccctgctggccgacagcaccgacggcatggccagcgtggccgcctacacctacagacagcacagcgtggtgttcatcggcaccagaagcggcagcctgaagaaggtgagagtggacggcttccaggacgcccacctgtacgagaccgtgcccgtggtggacggcagccccatcctgagagacctgctgttcagccccgaccacagacacatctacctgctgagcgagaagcaggtgagccagctgcccgtggagacctgcgagcagtaccagagctgcgccgcctgcctgggcagcggcgacccccactgcggctggtgcgtgctgagacacagatgctgcagagagggcgcctgcctgggcgccagcgccccccacggcttcgccgaggagctgagcaagtgcgtgcaggtgagagtgagacccaacaacgtgagcgtgaccagccccggcgtgcagctgaccgtgaccctgcacaacgtgcccgacctgagcgccggcgtgagctgcgccttcgaggccgccgccgagaacgaggccgtgctgctgcccagcggcgagctgctgtgccccagccccagcctgcaggagctgagagccctgaccagaggccacggcgccaccagaaccgtgagactgcagctgctgagcaaggagaccggcgtgagattcgccggcgccgacttcgtgttctacaactgcagcgtgctgcagagctgcatgagctgcgtgggcagcccctacccctgccactggtgcaagtacagacacacctgcaccagcagaccccacgagtgcagcttccaggagggcagagtgcacagccccgagggctgccccgagatcctgcccagcggcgacctgctgatccccgtgggcgtgatgcagcccctgaccctgagagccaagaacctgccccagccccagagcggccagaagaactacgagtgcgtggtgagagtgcagggcagacagcagagagtgcccgccgtgagattcaacagcagcagcgtgcagtgccagaacgccagctacagctacgagggcgacgagcacggcgacaccgagctggacttcagcgtggtgtgggacggcgacttccccatcgacaagccccccagcttcagagccctgctgtacaagtgctgggcccagagacccagctgcggcctgtgcctgaaggccgaccccagattcaactgcggctggtgcatcagcgagcacagatgccagctgagaacccactgccccgcccccaagaccaactggatgcacctgagccagaagggcaccagatgcagccaccccagaatcacccagatccaccccctggtgggccccaaggagggcggcaccagagtgaccatcgtgggcgacaacctgggcctgctgagcagagaggtgggcctgagagtggccggcgtgagatgcaacagcatccccgccgagtacatcagcgccgagagaatcgtgtgcgagatggaggagagcctggtgcccagccccccccccggccccgtggagctgtgcgtgggcgactgcagcgccgacttcagaacccagagcgagcaggtgtacagcttcgtgacccccaccttcgaccaggtgagccccagcagaggccccgccagcggcggcaccagactgaccatcagcggcagcagcctggacgccggcagcagagtgaccgtgaccgtgagagacagcgagtgccagttcgtgagaagagacgccaaggccatcgtgtgcatcagccccctgagcaccctgggccccagccaggcccccatcaccctggccatcgacagagccaacatcagcagccccggcctgatctacacctacacccaggaccccaccgtgaccagactggagcccacctggagcatcatcaacggcagcaccgccatcaccgtgagcggcacccacctgctgaccgtgcaggagcccagagtgagagccaagtacagaggcatcgagaccaccaacacctgccaggtgatcaacgacaccgccatgctgtgcaaggcccccggcatcttcctgggcagaccccagcccagagcccagggcgagcaccccgacgagttcggcttcctgctggaccacgtgcagaccgccagaagcctgaacagaagcagcttcacctactaccccgaccccagcttcgagcccctgggccccagcggcgtgctggacgtgaagcccggcagccacgtggtgctgaagggcaagaacctgatccccgccgccgccggcagcagcagactgaactacaccgtgctgatcggcggccagccctgcagcctgaccgtgagcgacacccagctgctgtgcgacagccccagccagaccggcagacagcccgtgatggtgctggtgggcggcctggagttctggctgggcaccctgcacatcagcgccgagagagccctgaccctgcccgccatgatgggcctggccgccggcggcggcctgctgctgctggccatcaccgccgtgctggtggcctacaagagaaagacccaggacgccgacagaaccctgaagagactgcagctgcagatggacaacctggagagcagagtggccctggagtgcaaggaggccttcgccgagctgcagaccgacatcaacgagctgaccaaccacatggacgaggtgcagatccccttcctggactacagaacctacgccgtgagagtgctgttccccggcatcgaggcccaccccgtgctgaaggagctggacaccccccccaacgtggagaaggccctgagactgttcggccagctgctgcacagcagagccttcgtgctgaccttcatccacaccctggaggcccagagcagcttcagcatgagagacagaggcaccgtggccagcctgaccatggtggccctgcagagcagactggactacgccaccggcctgctgaagcagctgctggccgacctgatcgagaagaacctggagagcaagaaccaccccaagctgctgctgagaagaaccgagagcgtggccgagaagatgctgaccaactggttcaccttcctgctgcacaagttcctgaaggagtgcgccggcgagcccctgttcctgctgtactgcgccatcaagcagcagatggagaagggccccatcgacgccatcaccggcgaggccagatacagcctgagcgaggacaagctgatcagacagcagatcgactacaagaccctgaccctgcactgcgtgtgccccgagaacgagggcagcgcccaggtgcccgtgaaggtgctgaactgcgacagcatcacccaggccaaggacaagctgctggacaccgtgtacaagggcatcccctacagccagagacccaaggccgaggacatggacctggagtggagacagggcagaatgaccagaatcatcctgcaggacgaggacgtgaccaccaagatcgagtgcgactggaagagactgaacagcctggcccactaccaggtgaccgacggcagcctggtggccctggtgcccaagcaggtgagcgcctacaacatggccaacagcttcaccttcaccagaagcctgagcagatacgagagcctgctgagaaccgccagcagccccgacagcctgagaagcagagcccccatgatcacccccgaccaggagaccggcaccaagctgtggcacctggtgaagaaccacgaccacgccgaccacagagagggcgacagaggcagcaagatggtgagcgagatctacctgaccagactgctggccaccaagggcaccctgcagaagttcgtggacgacctgttcgagaccgtgttcagcaccgcccacagaggcagcgccctgcccctggccatcaagtacatgttcgacttcctggacgagcaggccgaccagagacagatcagcgaccccgacgtgagacacacctggaagagcaactgcctgcccctgagattctgggtgaacgtgatcaagaacccccagttcgtgttcgacatccacaagaacagcatcaccgacgcctgcctgagcgtggtggcccagaccttcatggacagctgcagcaccagcgagcacagactgggcaaggacagccccagcaacaagctgctgtacgccaaggacatccccaactacaagagctgggtggagagatactacagagacatcgccaagatggccagcatcagcgaccaggacatggacgcctacctggtggagcagagcagactgcacgccagcgacttcagcgtgctgagcgccctgaacgagctgtacttctacgtgaccaagtacagacaggagatcctgaccgccctggacagagacgccagctgcagaaagcacaagctgagacagaagctggagcagatcatcagcctggtgagcagcgacagctag

SEQ ID NO: 193479 - DNA, 5616 bp, Artificial Sequence
  derived and/or modified sequence
atgccttctgtgtgcctgctgctgctgctctttctagcagttgggggagctctcggaaataggcccttccgggcctttgtcgtgaccgacacgacccttacccatttggcagtgcacagagtgaccggggaagtgttcgtgggagcagtgaatagagtgttcaagctcgcgcctaatctgaccgagctcagagcccatgttaccggacctgtcgaagacaacgctcgttgttaccctcctccgagtatgcgggtttgcgcccatagactggcccctgttgacaatatcaacaagttactgctgatcgactacgccgccaggcgattggtggcgtgcggctctatttggcagggcatctgccaattcttgagattagatgacctcttcaagttgggcgagcctcaccatcgaaaagaacactatctgtccggcgcccaagaaccagacagcatggctggggtgattgtggaacaaggacagggaccttctaagctgtttgtgggcactgctgtggacggcaaatctgaatactttcccactttgtcatcaagaaaacttattagcgacgaggattctgccgatatgttcagcctggtgtaccaggacgagtttgtgagttcccaaatcaaaataccctccgataccttgtcactgtaccccgccttcgacatatactacatatacggatttgtctctgcctcattcgtatatttccttaccctacagttagatacgcagcagacactccttgacactgccggggagaaattttttacgtcgaaaatagtgcgcatgtgtgctggtgatagtgaattttattcatacgtggaattccccatagggtgtagctggcgcggagtagaataccgactggtccagagcgctcacctggcgaagcctggcctgctgctcgctcaggccctaggcgtacctgcagatgaggatgtcctgtttaccattttctctcaaggtcagaagaatcgggcatctccaccacggcagactatcctgtgcctgttcactttatccaatatcaacgctcacattcgcagacgcatccagtcttgttataggggtgagggcaccctcgctcttccttggcttctgaacaaggaactgccttgcatcaatacacctatgcaaataaacgggaatttctgtggactcgtgcttaatcaacctctcggcggactgcatgtaatcgaagggctgccactcctcgccgactcgactgacgggatggcgagcgttgccgcctacacatacagacagcattccgtggtgttcataggtacgcgctctggttccctcaaaaaagtgagggtggacggatttcaggacgcgcatttgtacgagaccgtccccgtggtagatggctcacctattctacgtgatctcttgtttagccccgaccacagacacatctacctcttatcagagaagcaggtctcccagctgcccgtagaaacttgcgaacagtatcagtcttgcgccgcatgtctgggatctggggaccctcattgtggctggtgcgtactccggcacaggtgctgtagggagggggcctgcctaggagcttctgctccccacggatttgcagaggaattatcaaagtgtgtacaagtccgggtccgtccaaacaacgtttctgtgaccagccccggggtgcagcttacagtaacgctgcataacgttcctgatctttctgcaggggtaagttgcgccttcgaagcagccgccgagaacgaggccgttctgttgccgagcggggagttactgtgtccctctccaagccttcaggagctccgggccctgacacgaggtcacggagcgactcgaactgtgaggctgcaactgttgtccaaggagactggagtccggtttgccggtgccgactttgtgttttacaattgtagtgtcctgcaatcatgtatgtcctgtgtgggttctccctacccttgccattggtgcaagtataggcatacttgcacgtcacgcccacatgagtgcagcttccaagagggacgtgttcacagtcccgaaggctgccccgaaatactgccaagtggtgacctccttatcccagtcggtgtgatgcagcccttgaccctgagagctaaaaacctcccacagcctcagagcggtcaaaaaaactatgagtgtgtcgtgcgcgtccaaggcagacagcaacgggtgcctgctgttagattcaactctagctccgtacagtgccagaacgcatcatacagttacgaaggggacgagcatggcgacaccgagctggatttctctgtagtgtgggacggggactttcccatcgacaagcccccatcgtttagagcgttgctgtataaatgctgggctcaaagaccttcctgcggactgtgcctgaaagcggacccacgctttaactgcgggtggtgcatctctgagcatcgatgtcagctaagaacccactgccctgcacctaaaaccaattggatgcacctgtcccagaaagggacaaggtgctcccaccctcgcatcactcaaattcaccctttggtcggaccaaaggaaggaggcactcgcgtaactatcgtgggcgacaatctcggcctccttagcagggaggtggggctcagagtggccggcgtgcgatgcaatagcattcctgctgagtacatctccgctgaaagaatcgtatgcgagatggaggaatctcttgtgccctcgcccccaccaggaccagttgagctctgtgtgggggactgcagcgcagacttccggacacagagtgaacaggtttacagtttcgtaaccccaacgttcgatcaggtgagcccttccaggggaccggcctcaggtggaaccagactaaccatatcgggttcttctctggacgctggatctcgggttaccgttactgtcagggattccgagtgccagtttgtgagacgggacgctaaagccattgtctgcatttctccactgagtaccttgggtccctctcaggcccctattactcttgccatcgacagagccaatatatctagtcccgggttgatttatacgtacacccaagacccaacggtcacacggctggagcctacgtggtccataattaatgggtctacagccatcacggtgtctggaacacatctgctgacagtccaggaaccacgggtcagagcaaaatatagaggtatcgagactactaacacttgtcaggtcattaatgatactgctatgttatgtaaggctcctggcatatttctcgggcgaccccagccacgtgcccagggcgaacaccccgatgagttcggattcctacttgaccatgtgcagaccgcacggagcctgaatagatcatcattcacttattacccagatccttcttttgagccattaggcccatccggggtattggacgtgaagcccgggtcacacgtggttctgaaaggcaagaacctcatcccggctgccgctggctcgtctagactcaactataccgtgctgattggtgggcagccatgctcacttactgtctcagacacgcagctgctctgcgactcccctagccagactggccggcagcctgtgatggttttagtgggcggtttagagttttggctggggacgctccacatatctgccgagagagcactgacgctgcccgcaatgatggggctagccgccggcggagggctgctgctcttggcaattactgcggtactggtcgcatacaagagaaagactcaggatgcagaccgaactctgaaacgactgcagctgcaaatggacaatctcgaatcacgagtggccctagagtgcaaagaagccttcgccgaactacagaccgatatcaatgaattaacaaaccatatggatgaggttcaaatcccattcctagattatcgcacctacgccgtacgggttttattcccaggtatagaggcccatcccgtgttgaaggaactggacacacccccaaacgtggagaaagctctgagacttttcggacagttattgcattcaagagcttttgtcctgacttttatccatactctggaggctcagagctccttcagcatgagggatagggggactgtcgcaagcctgaccatggtggccctccagagtcggctggattacgctacaggattacttaaacagctgctcgccgacttaatcgagaagaacctagagtctaagaaccaccccaaacttctgttgcggagaaccgagtccgtagcagaaaagatgctgaccaattggttcacttttctactgcacaaattcttgaaagaatgcgccggcgagccgctgtttctgctgtactgcgcaattaagcagcagatggagaaaggaccgatagatgctatcacgggcgaagctcgatacagcttgtcagaggataaattgataaggcagcaaatcgactacaagacccttaccttgcactgcgtgtgccccgagaatgaggggtcagcccaagtgccagtgaaagtcctaaactgtgattctattacgcaagccaaggacaaactgttggatacagtttataaaggtattccttattcccaaaggcccaaggccgaggatatggacctcgagtggcgacaggggcgaatgactcgtattatcctacaagatgaggatgtaacaacaaaaatcgaatgtgattggaagcgactcaatagtctcgcacattaccaggttacggatgggtccttagttgcccttgtcccaaagcaggtgagcgcgtacaatatggccaacagcttcacatttacccggtccctttctcgttatgaatctctactgagaactgcctcttcgcctgactctctgcgctctcgcgccccaatgatcactccagaccaggagaccgggactaagttgtggcatttggtgaaaaatcatgatcatgccgaccatcgggagggcgaccgcggcagtaagatggtgagcgagatctatctcacaagactcctcgcaacgaaaggtaccttgcagaagtttgtggacgaccttttcgaaacagtattctccacggctcaccggggatcagcgttacccctagccatcaaatatatgtttgactttttggacgagcaagcagatcagcgccagatctcagatcccgatgttagacacacatggaagagtaactgtctgccactacgcttttgggtaaacgtcatcaagaaccctcagttcgttttcgatatccataaaaattcaataacagacgcttgcttgtcggtggtcgcccagacttttatggacagctgtagcacttcagaacatcgccttggaaaggactccccctccaacaagctgctttatgccaaagacattcccaactacaagtcttgggtcgagaggtactatcgcgacatcgctaaaatggcctctatttctgatcaggatatggacgcctatttagtcgagcagtcaaggcttcacgccagcgacttttcggtgctatcagcgctgaacgaattatatttttatgtcactaaatacaggcaggagattctgaccgcgctggatcgggatgccagttgcagaaagcacaagctgagacagaagctggagcagattatctcccttgtctccagtgactcctag

SEQ ID NO: 193480 - DNA, 5616 bp, Artificial Sequence
  derived and/or modified sequence
atgcccagcgtgtgcctgctgctgctgctcttcctggccgtgggcggggccctgggcaaccggcccttccgggcctttgtggtgacagacaccaccctgacccacctggccgtgcaccgggtgactggagaggtgtttgtgggcgctgtgaacagagtcttcaagctggcccccaacctgacagagctgcgggcccacgtgacaggccctgtggaggacaatgcccgctgctaccccccacccagcatgagggtgtgtgcccaccggctggcccctgtggacaacatcaacaagctgctgctgattgattatgctgcccggcggctggtggcctgtggcagcatctggcagggcatctgccagttcctgcggctggatgacctcttcaagctgggggagccccaccacaggaaggagcactacctgagcggggcccaggagccagacagcatggccggcgtgattgtggagcagggccagggccccagcaagctgtttgtgggcacagctgtggatggcaagtctgagtacttccccaccctgagcagcaggaagctgatcagtgatgaggacagcgctgacatgttcagcctggtgtaccaggatgaatttgtgagcagccagatcaagatccccagcgacaccctgagcctgtacccagcctttgacatctactacatctacggctttgtgtctgccagctttgtgtacttcctgaccctgcagctggacacccagcagaccctgctggacacagctggggagaagttcttcaccagcaagatcgtgaggatgtgtgccggggacagcgagttctacagctatgtggagttccccatcggctgctcctggaggggcgtggagtaccgcctggtgcagagcgcccacctggccaagccaggcctgctgctggcccaggccctgggcgtgcctgcagatgaagatgtgctcttcaccatcttcagccagggccagaagaacagagccagccccccccggcagaccatcctgtgcctcttcaccctgagcaacatcaatgcccacatcagaagacgcatccagagctgctacagaggagagggcaccctggccctgccctggctgctgaacaaggagctgccctgcatcaacacccccatgcagatcaatggaaacttctgtggcctggtgctgaaccagcccctgggcggcctgcacgtgattgagggcctgcccctgctggccgacagcacagatggcatggcctctgtggccgcctacacctaccggcagcacagcgtggtgttcatcggcaccaggagcggcagcctgaagaaggtgcgggtggatggcttccaggatgcccacctgtatgaaacagtgcctgtggtggatggcagccccatcctgcgggacctgctcttctccccagaccaccgccacatctacctgctgtctgagaagcaggtgtcccagctgcctgtggagacctgtgagcagtaccagagctgtgccgcctgcctgggcagcggggacccccactgcggctggtgtgtgctgcggcaccgctgctgccgggagggcgcctgcctgggcgccagcgccccccacggctttgctgaggagctgagcaaatgtgtgcaggtgcgggtgcggcccaacaacgtgtctgtgaccagccctggggtgcagctgactgtgaccctgcacaacgtgcctgacctgtctgctggggtgtcctgtgcctttgaggccgctgctgaaaatgaggccgtgctgctgcccagcggggagctgctgtgccccagccccagcctgcaggagctgcgggccctgacccggggccatggagccaccaggacagtgcggctgcagctgctgagcaaggagaccggggtgcgctttgctggagctgactttgtgttctacaactgcagcgtgctgcagagctgcatgagctgtgtgggcagcccctacccctgccactggtgcaagtaccgccacacctgcaccagccggccccatgaatgttccttccaggagggccgggtgcacagccctgagggctgcccagagatcctgcccagcggggacctgctgatccctgtgggcgtgatgcagcccctgaccctgcgggccaagaacctgccccagccccagagcggccagaagaactatgaatgtgtggtgcgggtgcagggccggcagcagagggtgcctgctgtgcgcttcaacagcagctctgtgcagtgccagaatgccagctacagctatgaaggagatgagcacggggacacagagctggacttctctgtggtgtgggatggagacttccccatcgacaagccacccagcttccgggccctgctgtacaagtgctgggcccagaggcccagctgtggcctgtgcctgaaggctgacccccgcttcaactgtggctggtgcatcagcgagcaccgctgccagctgcggacccactgcccagcccccaagaccaactggatgcacctgagccagaagggcacccgctgcagccacccccgcatcacccagatccaccccctggtgggccccaaggagggcggcaccagggtgaccatcgtgggggacaacctgggcctgctgagccgggaggtgggcctgcgggtggccggcgtgcgctgcaacagcatcccagctgagtacatctctgctgagcgcatcgtgtgtgagatggaggagagcctggtgcccagccccccacctggccctgtggagctgtgtgtgggggactgcagcgctgacttccgcacccagagcgagcaggtgtacagctttgtgacccccacctttgaccaggtgagccccagccggggccctgccagcggcggcacccggctgaccatcagcggcagcagcctggatgctggcagccgggtgacagtgacagtgcgggacagcgagtgccagtttgtgagaagagatgccaaggccatcgtgtgcatcagccccctgagcaccctgggccccagccaggcccccatcaccctggccatcgaccgggccaacatcagcagccctggcctcatctacacctacacccaggaccccaccgtgacccggctggagcccacctggagcatcatcaatggcagcacagccatcaccgtgtctggcacccacctgctgactgtgcaggagccccgggtgcgggccaagtaccggggcatcgagaccaccaacacctgccaggtgatcaatgacacagccatgctgtgcaaggcccctggcatcttcctgggccggccccagccccgggcccagggcgagcacccagatgaatttggcttcctgctggaccacgtgcagacagcccggagcctgaacagaagcagcttcacctactacccagaccccagctttgagcccctgggccccagcggcgtgctggatgtgaagccaggcagccacgtggtgctgaagggcaagaacctgatcccagctgctgctggcagcagccggctgaactacacagtgctgattggaggccagccctgcagcctgactgtgtctgacacccagctgctgtgtgacagccccagccagacaggccggcagcctgtgatggtgctggtgggcggcctggagttctggctgggcaccctgcacatctctgctgagcgggccctgaccctgcctgccatgatgggcctggccgccggcggcggcctgctgctgctggccatcacagctgtgctggtggcctacaagaggaagacccaggatgctgacaggaccctgaagaggctgcagctgcagatggacaacctggagagccgggtggccctggagtgcaaggaggcctttgctgagctgcagacagacatcaatgagctgaccaaccacatggatgaggtgcagatccccttcctggactaccgcacctatgctgtgcgggtgctcttccctggcatcgaggcccaccctgtgctgaaggagctggacaccccaccaaatgtggagaaggccctgcggctgtttggccagctgctgcacagccgggcctttgtgctgaccttcatccacaccctggaggcccagagcagcttctccatgagggaccggggcaccgtggccagcctgaccatggtggccctgcagagccggctggactatgccaccggcctgctgaagcagctgctggccgacctgattgagaagaacctggagagcaagaaccaccccaagctgctgctgcggaggacagagagcgtggccgagaagatgctgaccaactggttcaccttcctgctgcacaagttcctgaaggaatgtgccggggagcccctcttcctgctgtactgtgccatcaagcagcagatggagaagggccccattgatgccatcaccggggaggcccgctacagcctgtctgaggacaagctgatccggcagcagattgactacaagaccctgaccctgcactgtgtgtgcccagaaaatgaaggcagcgcccaggtgcctgtgaaggtgctgaactgtgacagcatcacccaggccaaggacaagctgctggacacagtgtacaagggcatcccctacagccagaggcccaaggccgaggacatggacctggagtggaggcagggccgcatgacccgcatcatcctgcaggatgaagatgtgaccaccaagattgaatgtgactggaagaggctgaacagcctggcccactaccaggtgacagatggcagcctggtggccctggtgcccaagcaggtgtctgcctacaacatggccaacagcttcaccttcaccaggagcctgagccgctatgagagcctgctgaggacagccagcagcccagacagcctgcggagccgggcccccatgatcaccccagaccaggagaccggcaccaagctgtggcacctggtgaagaaccacgaccacgccgaccaccgggagggggaccggggcagcaagatggtgtctgagatctacctgacccggctgctggccaccaagggcaccctgcagaagtttgtggatgacctgtttgaaacagtgttcagcacagcccaccggggcagcgccctgcccctggccatcaagtacatgtttgacttcctggatgagcaggccgaccagaggcagatcagtgaccctgatgtgcgccacacctggaagagcaactgcctgcccctgcgcttctgggtgaatgtcatcaagaacccccagtttgtgtttgacatccacaagaacagcatcacagatgcctgcctgtctgtggtggcccagaccttcatggacagctgcagcaccagcgagcaccggctgggcaaggacagccccagcaacaagctgctgtatgccaaggacatccccaactacaagtcctgggtggagcgctactacagagacatcgccaagatggccagcatcagtgaccaggacatggatgcctacctggtggagcagagccggctgcacgccagtgacttctctgtgctgagcgccctgaatgagctgtacttctacgtgaccaagtaccggcaggagatcctgacagccctggacagagatgccagctgcaggaagcacaagctgcggcagaagctggagcagatcatcagcctggtgtccagtgacagctag

SEQ ID NO: 193481 - DNA, 5616 bp, Artificial Sequence
  derived and/or modified sequence
atgcccagcgtgtgcctgctgctgctgctgttcctggccgtgggcggtgctctcggtaatcgcccatttagggcattcgttgtcaccgacactaccctcacccatctggccgtgcatagagtaacaggggaagtatttgtgggcgctgtaaacagggtatttaaattggctcccaatctgaccgaactgagagcccacgtgaccggacctgttgaagacaatgcacgctgctaccctcctccttcaatgagggtttgtgcacatcggctggccccagtagataacattaataaactgttgttaatagactatgcggcgcgccgactcgtggcctgcgggagtatctggcaggggatttgccagtttctccggttagatgatctgttcaagctgggcgagccacatcacagaaaagagcactatctctccggcgcgcaggagcccgactcaatggctggggtcatcgtcgagcagggccagggcccatcaaaactgttcgtcggtaccgcagtggacggcaaaagcgagtattttccaaccttgtcctcacgcaagctgatctccgatgaggactcagcggatatgttctcattggtgtatcaggacgagttcgtgtcttcacagatcaaaattcctagtgatacccttagcctttatcctgcatttgatatctattacatatacggctttgttagcgccagcttcgtttactttctgaccctccaactggacacccagcaaacactgctcgacaccgctggggagaaatttttcactagcaaaatcgtgcgtatgtgtgcgggagactcagagttctacagttatgttgaatttcctataggctgcagctggcggggcgtggaataccggttagtccaatccgctcacctggccaagcccggactgttgctggctcaggctctcggagtacccgcagacgaggatgtgttgttcacaatattttctcagggacagaaaaacagggcgagccctccccggcagaccattctctgcctctttactctgagcaacatcaatgcgcacattaggaggaggatccagtcttgctatagaggggagggcactcttgcgttgccatggctgctgaataaggagctgccttgtatcaatacccccatgcagattaacggcaacttctgtggcctggtcttgaaccaacccctcggcggccttcatgttattgaaggcctgccactgctggcggattctacagatggaatggcatcagtggcagcttacacctatagacagcactcagtggtgtttattggcactaggtctggctctcttaaaaaggtgcgagtagatggcttccaggacgcccacctgtatgaaacagtgcctgtagttgatggttcccctattctgcgggatctgctgttttcacccgaccaccggcacatttacctgctgagcgagaaacaggtctcgcagctccctgttgaaacctgtgagcagtaccagagctgtgcagcgtgccttggttccggagatcctcattgtggctggtgcgtgcttagacatcgctgctgtagggagggggcttgtcttggagctagcgcacctcacgggtttgctgaagagttgtctaagtgcgtgcaggtcagagtgagacctaacaatgtgtccgtaacgtccccgggtgtccaactcaccgtgactctgcacaacgtcccagacctttctgccggagtgtcctgcgcattcgaagccgcagccgagaatgaagcagtgctgcttccgagcggggagctgctgtgtccctctccaagccttcaggagctgcgtgccctgacaagaggacacggagcgactcgaacggtgaggctgcagttactgtccaaagaaaccggagtacgcttcgcaggggctgactttgtgttttataactgttctgtgttacaatcttgcatgtcctgtgtcgggagtccgtacccctgtcactggtgtaagtataggcacacctgcacaagtagaccccacgagtgttcatttcaagagggaagagtccattccccggaggggtgcccggaaattctaccatccggagacctgttaatccccgtgggggtgatgcagcctctcactctgagggcaaaaaatttgccccagcctcaatccggacaaaaaaactatgaatgcgtggttcgggtccagggccgacaacaaagagtgcctgctgttcggttcaattccagctctgtgcagtgccagaatgcctcctactcttacgaaggggacgagcacggagataccgaactggacttctccgtagtttgggatggcgactttcctattgacaagcctccctctttccgcgcgctgctttataagtgttgggcacagaggccatcatgcggactatgcctgaaagcagaccctcgttttaactgtggctggtgcattagcgaacacagatgtcaactcagaacgcactgccctgccccgaaaactaactggatgcacctctcccagaaaggtacgaggtgcagccacccaaggatcacacaaatccacccactggtgggcccgaaagaaggggggacacgcgtgaccatagtgggagataacctcggacttcttagccgggaggtggggcttcgcgttgccggcgtgcgatgtaatagcatccctgccgagtacatcagcgccgagaggatagtctgtgaaatggaagagtctctggttccaagtccccctcctgggcccgtggaactgtgcgtaggcgactgctctgccgactttcggacccagagcgagcaagtctactcttttgtgactccgactttcgaccaggtgtccccatcccggggtcctgcttctggcggaacccggcttactatctctggctcctctcttgacgcaggcagccgtgtgacagtcactgtccgtgactctgaatgccagtttgtgcgccgtgacgccaaggctattgtttgcatttccccattgagcacgctgggcccaagccaagccccgattaccctggccatcgacagggcaaatatctccagcccggggctgatctacacatacacgcaagatccaacagtgacccggttggagcctacctggtccatcattaacggctccacggccataacagtatccgggacccatctgctcaccgttcaggaacctcgggtgagagccaagtataggggaatcgaaactaccaatacatgtcaggtcattaacgataccgcgatgctgtgtaaggctccaggtatcttcttagggaggccccagccaagggcccagggcgagcatcccgatgaattcggcttcctgctggatcacgtgcagactgcgagatctttgaaccgtagctccttcacttactatccagacccaagctttgaacctttgggaccttcaggtgtgctcgacgtcaagcctggctcccacgtggtccttaaggggaagaacctcatcccggcagccgctgggtcctcacgcctgaactacaccgtgttgattggcggtcagccgtgttcccttactgtgagcgatacacagctactttgcgacagtcctagccaaaccggtcgccagcccgtgatggttctggttggcggactggagttctggctgggtacgctgcacatttctgccgagagggcactgaccctccctgccatgatgggactggccgctgggggcggcctgttgttgctggccattacagctgtgttggtggcgtataaacgtaagactcaggacgccgacagaacactgaaacgcctgcaactgcagatggataacctagaaagcagggttgccctggaatgtaaggaggctttcgcagagctccagaccgacatcaacgagctgaccaatcacatggacgaggtccagatacccttcctggattacaggacatatgcagtgagggtgctgtttccaggcattgaagcccacccagtcttgaaggaattggacactcccccgaatgtggagaaggcccttcgcttattcgggcagcttttgcattctagggcctttgtgctgaccttcatacacaccctggaagcgcaaagctccttcagcatgagagacagggggactgtcgcctccttaacaatggtcgccctgcaatctaggctggactacgctaccgggctcttaaaacagctactcgcggacttgattgagaaaaacctcgagtccaagaaccaccctaagttgctgctcaggcgcaccgaatccgtggcagagaagatgttgactaactggttcactttccttctccacaagttcctgaaggaatgtgcgggcgaaccgctgttcctgttgtactgcgccataaaacagcagatggaaaaaggtccaatcgacgctatcacaggcgaagctcgttatagtctgagtgaagataagctgatacgccagcagattgattacaaaactctcactctccattgcgtgtgccccgagaacgagggctccgcacaggtccccgttaaagtcctgaactgtgattcaattacacaggcgaaagacaagctactggatacggtgtacaagggcatcccttacagccaaaggcccaaggccgaggatatggacctggagtggagacagggcaggatgacccgcatcatcctacaggatgaggatgtcacaacaaagattgaatgcgactggaagcgactgaattcacttgcacactaccaggtgactgacgggtctctagttgcattggtgccgaagcaggtgtctgcctataacatggcaaacagcttcacgtttacacggagtctgtccagatacgagagcctcttacggaccgcaagtagtcctgacagccttaggagcagagcccctatgataacccctgaccaagaaacaggcaccaagctgtggcacctggtgaagaatcatgaccacgctgatcaccgagaaggcgaccgcgggagcaagatggtcagtgaaatctacctgacgcgactgttggctaccaagggaacgttgcagaaattcgtggatgacttgttcgagactgttttttctaccgcacatagaggatctgctctcccgttagctatcaaatacatgttcgactttcttgatgagcaggccgatcagaggcaaatctctgatcccgatgtgcggcatacgtggaaaagcaactgcctacctctcaggttctgggttaatgtcatcaaaaaccctcagttcgtgtttgatatccataagaattccataactgatgcttgtctcagcgttgtggcccagaccttcatggacagctgttcaacatctgaacatcggcttggcaaggattccccatctaataagctgctgtacgctaaggatataccaaactataagagttgggtggagcgctattatagggatatagctaagatggcctctatttcggaccaggacatggatgcctacttagtcgaacaaagtaggctgcacgcatcagatttttcggtgcttagtgctctcaatgaactgtacttttatgtgacaaaatacaggcaagagatcctcaccgctctggatcgcgatgccagttgtaggaagcataaactccggcagaagctcgagcagatcattagccttgtttccagtgactcatag

SEQ ID NO: 193482 - DNA, 6752 bp, Artificial Sequence
  derived and/or modified sequence
agtgtgtgggcggcggcggcggcggctgcgcgcttggggcccggggcgcggggcgaggccgtggggacgtgcgagcggggccgcggtggggctcgggggcgcgtccacgtggccagagggcggccacccggagccagcggagggacaggcctgtccccaggcgcggctgccggccatgccctctgtctgcctcctcctgctgctcttccttgccgtggggggggccctgggcaacaggcccttccgtgccttcgtggtgacagacaccacgcttacccacctggctgtgcaccgggtgactggggaggtgttcgtgggcgcagtgaaccgagtctttaagctggcccccaacctgactgagctgcgggcccatgtcacggggcccgtcgaggacaacgctcgctgctacccgccccccagcatgcgcgtgtgtgcccaccgcctggcccccgtggacaacatcaacaagctgctgctcatagactatgcggcccgccgcctggtggcctgcggcagcatctggcagggcatctgccagttcctgcgtctggacgacctcttcaagctgggtgagccgcaccaccgcaaggagcactacctgtcgggggcccaggagcccgactccatggctggtgtcattgtggagcagggccaggggcccagcaagctgtttgtgggcactgctgtcgacggcaagtcggagtacttccccaccttgagctcccgcaagctcatcagtgatgaagacagcgcggacatgttcagtctcgtgtaccaggatgagtttgtgtcctcccagatcaagatcccctcagacacgctgtccttgtaccctgcctttgacatctactacatctacggcttcgtcagcgcctccttcgtgtacttcctgacgctgcagctggacacccagcagacgctgttggacacagcgggcgagaaatttttcacgtccaagatcgtgcgcatgtgcgcgggagactcagagttctactcatacgtggaattccccatcggctgctcctggcgcggcgtggagtaccgcttggtgcagagcgcccacctggccaagcctggcctgctgctggcccaggccctgggcgtgccggctgatgaggacgtcctcttcaccatcttctctcagggccagaagaaccgggccagcccaccccggcagaccatcctctgcctcttcaccctcagcaacatcaatgcccacatccggcgccgcatccagtcctgctatcgtggggagggcactctggctctgccctggctgctgaacaaggagctgccctgcatcaacacccccatgcagatcaacggcaacttctgtgggctggtgttgaaccagcctctgggaggcctgcatgtgatcgaggggctgcccctgctggccgacagcaccgacggcatggccagcgtggccgcctacacctaccgccagcactctgtggtcttcattggcacgcgcagcggcagcttgaagaaggtgcgggtcgatggcttccaggatgcccacctgtatgagacagtccccgtggtggatggcagccccatcctccgagacctgctcttcagcccggaccaccggcacatctatctcctgagtgagaagcaggtgagccagctcccggtggagacctgtgagcagtaccagagctgcgcagcctgcctgggctccggggacccgcactgtggttggtgtgtgctgcgacacaggtgctgccgcgaaggggcctgtctgggcgcctctgccccacacggctttgctgaggagctgagcaagtgtgtccaggtgcgggtccggcccaacaatgtgtcagtgacgtcacctggggtgcagctgaccgtcaccctgcacaacgtgccagacctcagtgcgggcgtgagctgcgccttcgaggcggcggcggagaacgaggcggtcctgctgccctccggtgaactgctctgcccctcaccctccctccaggagctccgagctcttaccagggggcatggggccacccgcactgtgcggctgcagcttctctccaaggagacaggcgtgaggtttgccggtgctgactttgtcttctacaactgcagcgtcctccagtcgtgcatgtcctgtgttggcagcccttacccctgccactggtgtaagtaccgccacacgtgtaccagccgcccccacgagtgctccttccaggagggcagggtccacagccctgagggctgccctgagatcctgcccagtggggacctcctgatccccgttggggtcatgcagcctcttaccttgcgggctaagaacctacctcagccgcagtcgggccagaagaactatgagtgcgtggtgcgggtgcaggggcggcagcagcgggtgcctgccgtgcgcttcaacagcagcagtgtgcagtgccagaacgcctcgtactcctatgaaggtgatgagcatggtgacaccgagctggacttctccgtggtctgggatggagacttccccatagacaagcctcccagcttccgagccctcctgtacaagtgctgggcgcagcggcccagctgtggcctctgcctcaaggctgatccccgcttcaactgtggctggtgcatctcagagcacaggtgccagctgcggacccactgcccggccccgaagaccaactggatgcacctgagccagaagggcacccggtgcagccacccccgcatcacgcagatccaccctctcgtggggcccaaggaaggaggcacccgggtcaccatcgtgggtgacaacctgggcctcttgtcccgagaggtgggcctgcgggtggctggcgtgcgttgcaactccattccggccgagtacatcagtgctgagaggatcgtgtgtgagatggaggagtcgctggtgcccagcccgccgccggggcccgtggagctgtgtgtgggtgactgttcagccgacttccgcacgcagtcggagcaggtctacagctttgtgaccccaacgtttgaccaagtgagtcccagccgtggcccggcgtccgggggcacacggcttaccatctcaggcagctctctggatgctggcagcagggtcacagtgactgtgagggacagcgagtgccagtttgtaaggagagatgccaaggcgatcgtgtgcatctcacctctctccaccctgggccccagccaggcccccatcacacttgccattgaccgggctaacatctccagccccgggctcatctacacctacactcaggaccccaccgtcacccgccttgagcccacctggagcatcatcaatggaagcactgccatcactgtgagtgggacccacctgctgacggtccaggagccccgggtccgtgccaagtaccgcggcattgagaccaccaatacatgccaagtgatcaacgacactgccatgctgtgtaaggcccccggcatctttcttgggcggccccagcctcgggcgcaaggcgagcaccctgatgagtttggcttcctgctggaccacgtgcaaacggcccgctccctcaaccgctcctcctttacctactaccctgatcccagctttgagccgctggggccctctggcgtgctggacgtcaaaccgggctcccacgtggtgctgaagggcaagaacctgattcccgcggcagccggcagctcccgcctcaactacactgtgctgataggaggccagccgtgttcgctcactgtctcggacacacaactcctgtgcgactcacccagccagactggccggcagcctgtcatggtgctggtgggtggcctggagttctggctgggcaccctgcacatctcggcagagcgggcgctgaccctaccggccatgatggggctggcggcggggggtgggctcctgctgctggccatcacagccgtgctggtggcgtacaagcgcaagactcaggacgcggaccgtaccctcaagcgtctgcagctgcagatggacaacctggagtcccgtgtggccctggagtgcaaggaagcttttgcagagctgcagacggacatcaatgagctgactaaccacatggacgaggtgcagatccccttcctggactaccggacttacgccgtgcgcgtgctcttcccgggcatcgaggcccacccggtgctcaaggagctggatacgccacccaacgtggagaaggccctgcgcctcttcgggcagctgctgcacagccgcgcgttcgtgcttaccttcatccacacgctggaggcccagagcagcttctccatgcgcgaccgcggcaccgtggcctcgctcaccatggtggccctgcagagccggctcgactatgccacggggctgctcaagcaactgctggccgacctcatcgagaagaacctcgagagcaagaaccaccccaagctgctgctacgcaggacagagtcagtggctgagaagatgcttaccaactggttcacgttcctgctgcataagtttctgaaggagtgtgctggggagcctctcttcctgctttactgtgccatcaagcagcagatggagaagggccccattgatgccatcacgggcgaggcacgatactccctgagcgaggacaagctcatccgtcagcagatcgactacaagacactgacccttcactgcgtgtgtccggagaacgagggcagcgcccaggtcccagtgaaggttctcaactgtgacagcatcacccaggccaaagataagctgctggacactgtgtacaagggcattccgtactcccagcgtcccaaagctgaggacatggacctggagtggcgccagggccgcatgactcgcatcatcctccaggatgaggatgtcaccaccaagatcgagtgtgactggaagaggctcaactcactggcccactaccaggtgacagacggttccttggtggcattggtgcccaaacaagtgtctgcctataacatggccaactccttcaccttcacccgctccctcagccgctacgagagcttgctccgcacggccagcagccctgatagcctccgctcacgggcacccatgattacgcctgaccaggagacaggcaccaaattgtggcacctggtgaaaaaccacgaccatgccgaccatcgcgagggggaccgtggcagcaagatggtctccgagatctacctgacacggctgctggccaccaagggcacactgcagaagttcgtggatgacctctttgagacagtgttcagcacagcccaccggggctcggccctgcccctggccatcaagtacatgttcgacttcctggatgagcaggcggaccagcgccagatcagcgaccccgatgtgcgccacacctggaagagcaactgcctgccgctgcgcttctgggtgaatgtgatcaagaacccgcagttcgtgttcgacatccacaagaacagcatcacggatgcctgcctgtcggtggtagcccagaccttcatggactcctgctctacatccgagcaccgcctggggaaggactcgccctccaacaaactgctctacgccaaggacatccccaactacaagagctgggtggagaggtattatcgagacattgcaaagatggcatccatcagcgaccaggacatggatgcctacctggtggagcagtcccgcctccacgccagcgacttcagcgtcctgagtgcgctcaacgagctgtatttctatgtcaccaagtaccgccaggagattctcacggctctggaccgagatgcctcttgtcggaagcataagttgcggcagaaactggaacagatcatcagcctcgtgtccagcgacagctaaggtggtggaatcggtgaggagggggcttctcagtcctgtgccgtcctcccatccaggggagtggctggctcaagcctgggtccccgggctgagccctggattgggtatcgtggggcaggtcaccctggccacgatgcccccggcacacccaggcccccttcattagtgccttgctttgggccctgcagggggaggggtgacagggcgagcccccaccccagcagcagcaatacccccaccctcctgccctgtgcccaggtgttgggacagtcccaccctccctgctatttatatccctctgcctatttattgaatcgaacttcgcctctgtctccatctgtaaatatgtgtccccccaccggatgtcgccaccctcactcacctgcctcttcttgagctgtcctgggccctgccacccgtctgggctcctttgtgtagcattatcagcctcggtctggcctctggcacctcacccttgccatggctgaccccacccattccaaggcggggtcacggtaccagcagcacttggggtgaggcctccaaagcttcctcagaattgtggctgtgccacgctggaccacagggtccccctcaagcatctcggggccctattctctctgagcacctggagggctggactcaggcttgtgccagggcctgacttgggcctgggggccctagaacactcctcctcctgagcctactgccaaacgtcctcagtgttgtctgcacctgctccgactccttcagccgccccattcagcgcccgctccgtccagtgcccgccctgtggggccaaggcggccgtgccttactactctgtgtcttctgcctcctctgaggaatctggccctgtctgacagtcccagaccccccgttctctcctctttagttgcatgagtttttctttgttcatggaatgttttttcctgattaaatgttggggaaatgccatcca

SEQ ID NO: 193483 - DNA, 5615 bp, Artificial Sequence
  derived and/or modified sequence
atgcccagtgtgtgcctgcttcttttgctctttcttgccgtcggaggagcacttggaaaccggcctttcagggcattcgtggtgaccgacacaactctcacccacctcgccgttcatagggtgaccggagaggtttttgtgggtgctgtaaacagggtgtttaagttggccccaaatctgactgaattacgtgcccacgtcacaggtccagtagaagataacgcacggtgttatccgcctcccagtatgagagtatgcgcacataggctcgcaccagtcgataacattaataagctgctccttatcgattatgctgctcgacgcctcgtggcgtgcggctccatctggcagggcatttgtcagttcctgagattggacgacctgtttaaattgggcgaacctcatcatagaaaggaacactaccttagcggcgcacaggaacccgatagcatggccggtgttatagttgagcaggggcaggggccatcgaagctgttcgtgggtacagccgtcgacggcaaaagtgaatatttccccacccttagttcaaggaaactgatttcagacgaagactctgccgatatgttcagcctggtttaccaggacgagtttgtatccagtcagatcaagattcctagcgataccctgagcctgtaccctgcttttgacatttattacatatacgggttcgtcagtgccagcttcgtctatttcctgacacttcaactcgacacccagcagacattgctcgacaccgccggagagaagttcttcactagcaaaatcgtgcgcatgtgtgctggcgacagtgagttctactcatacgtggaatttccgatcggctgctcctggcggggtgtagaataccggctcgtgcaatccgctcacctggcaaagcctggtcttttgctcgctcaagccctcggggtgcccgctgacgaggacgttctctttaccatcttttcacaggggcagaagaaccgggcaagccctcccaggcagactatattgtgccttttcacgctgtccaatattaacgctcacattcgaaggcgcattcaaagctgttatcggggagaaggaacactcgccctgccatggctactgaacaaagaattaccttgcatcaatacgcctatgcagatcaacggaaatttctgcgggctcgtgctgaatcagcccctcggtgggttgcatgtaatcgagggcttaccacttctggcggactccaccgatgggatggcctctgttgccgcttatacctatcgacagcattccgtagtgtttattggaactagaagcggctccctcaaaaaggtacgagtagacggattccaagacgcacatctgtatgaaaccgtccctgtggtggacggcagccccatccttcgcgatctgctattctcccccgatcatcgtcatatctacctgctgtctgaaaagcaggtcagccagctcccagtggagacttgtgagcagtaccagtcctgcgctgcctgcttggggtctggggacccgcattgtggatggtgcgtactgcgtcacaggtgctgcagagaaggcgcttgtcttggtgctagcgccccacacggtttcgcggaagagctatccaaatgtgtacaagttcgagttaggcctaataatgtttctgtaacctcccctggggtccaactcacggtcacactacataacgtgcccgacctgtctgcaggcgtctcatgcgcttttgaagccgctgctgagaacgaggccgtcctgcttccaagtggcgagctgctttgtcctagtccatcgctgcaggagctacgagccctcactagggggcatggagcgactagaaccgtgagattgcagctgctgagcaaagagaccggggttcgatttgcaggagctgatttcgtgttttataattgtagtgtactacagtcttgtatgtcatgtgtggggtccccatacccctgccattggtgcaaataccggcacacctgcacatctaggcctcacgagtgttcctttcaggaaggccgtgtgcattcccccgaaggttgtcccgaaatcctgccctcaggggatctcctcattccggttggcgtaatgcagcctttgacgctccgggctaaaaatctcccccagccccagagcggacagaagaattatgagtgtgtggtgagggtacagggcagacaacagcgggtgccagcagttcggttcaatagtagctccgttcagtgtcagaatgcttcctactcttacgaaggggacgagcacggtgacacggagctagattttagcgtcgtctgggatggggatttccccatcgacaaacctcctagcttccgtgcactgctatataaatgttgggcccagcgaccgtcatgtggcctgtgcctcaaagctgatccaaggttcaattgtgggtggtgtatttccgagcacaggtgccagttgcgcacccactgccctgcccctaaaaccaattggatgcacttgtctcaaaaggggacaagatgttctcaccctcggataacccaaattcatcctctggtgggcccaaaagagggtggcacgcgtgtgaccatagtcggtgataatctgggactgctgtctagggaggtgggactgcgggtggcgggtgtcagatgcaactctatcccagccgaatacatttctgccgaaagaattgtttgtgaaatggaggaatcactggtcccctcccccccacctggccctgtcgaactgtgcgtcggagactgtagcgctgactttcggacacaaagtgaacaggtgtacagtttcgtgacccccacatttgaccaggtcagtccttctcgtggtcctgctagcggcggtacaaggctgaccatctcagggagtagtttagacgccggaagtcgcgtaactgtaacggtgagagatagtgagtgccaatttgtgagacgtgacgcgaaggctattgtgtgcatatcgcctttatcgaccctgggaccgagccaggctccaatcacactggcgattgaccgcgcaaatatttcttccccaggactcatatatacctacacacaggaccccactgtaacccgtttggaacctacatggtctatcattaatggctcgactgctattacagtatcaggaacacacctgctgactgttcaggagcctcgggttagagccaagtatcggggaatcgaaaccacaaatacatgtcaagttatcaacgacacggccatgctctgcaaagctcccggtatattcctggggaggccgcagccacgggctcagggggagcatcctgacgaattcgggtttttgctggaccacgtgcagacagcacgaagtctgaaccgctcttctttcacctattacccagaccctagcttcgaacctctcggacccagtggtgtcctcgatgtgaaaccaggctcacacgtggttctcaagggcaaaaatcttataccagctgctgctgggtcgtccagactgaactataccgtcttgatcgggggacaaccctgcagccttaccgtgtccgacacccaacttctgtgtgattcacccagccagacaggcaggcagcccgttatggttcttgtaggaggtctggagttctggctgggcacactgcacatttctgccgagcgcgctctcaccttacccgcaatgatggggctggccgcagggggtgggctgctcctgctggccatcactgcagtccttgtagcatacaagcgtaagactcaggacgcagatcgcacactgaagcggttgcagctccaaatggacaacctcgaatctagagtggctctagagtgtaaggaagccttcgccgagcttcagacagatatcaacgagcttactaatcatatggacgaggtgcagataccatttctcgactatcggacatacgccgtccgcgtcctttttcccggtatagaggctcaccctgtgcttaaggagctcgacacaccacctaacgtcgaaaaggccctgagactgtttgggcagctgctccactcacgtgccttcgtacttacatttattcatacgttggaggcccagtcatccttctccatgagagatcggggtactgtcgcgtctttaactatggtggccctccagtccagactcgattacgccaccggcttacttaaacaacttctggccgatctgatcgaaaaaaacctggagagcaaaaaccacccaaaattactactgcgccgaactgaatccgtcgccgagaagatgttgaccaattggtttacatttctgctgcataaatttctgaaggagtgtgcaggggaacccttatttttgctgtattgtgcgatcaagcagcaaatggagaaaggtcccatcgatgcgataacgggcgaagcacggtactccctgtcagaggacaaattgattcggcagcaaatagattacaagaccctcactcttcattgtgtgtgccctgaaaacgaggggagcgcccaagtgcccgtgaaggtgttgaattgcgactccatcacgcaggctaaggacaagctgttggataccgtctacaaaggaataccctactcacagcgtccaaaggctgaagatatggacttagaatggcggcagggcagaatgacccgtatcatactccaggatgaagacgtgacaaccaaaatcgagtgcgactggaagcgcctcaattctctggcacactaccaggtgacagacgggagcctcgtggccctggtgccaaagcaggtcagcgcctataacatggccaattcctttacgtttactcgcagccttagccgttatgaaagccttctacggactgcttcaagccccgattcactaagaagtagggcaccgatgattacccccgaccaagagactggcaccaagctgtggcatctcgtaaaaaaccacgatcacgccgaccatagggaaggggatcggggtagcaagatggtttccgagatttatcttactcggctactcgccaccaaaggaactctacagaagttcgttgacgatctgtttgagaccgttttttccaccgctcaccgcggatccgcgctccctctggcaataaaatacatgttcgatttcctcgatgagcaggccgaccagcgacagatatccgatcccgacgtacgtcacacctggaagtctaactgcctccctttgagattttgggttaatgtaatcaagaaccctcagtttgtgttcgatattcataaaaacagtatcaccgacgcctgtctgagcgtggttgcccaaacatttatggattcctgttccacctctgagcataggctcggtaaagactctccttctaacaaattattgtacgccaaggacattccaaactataaaagttgggttgaacgatactacagggacatcgcgaagatggcctccatctccgaccaggacatggacgcttatctcgtcgagcaatcgagactgcatgccagtgacttcagcgttctaagcgcccttaatgaactctatttttatgtcacgaagtatcggcaggaaattttgaccgccttagaccgggacgccagctgcagaaaacacaagctgcggcaaaagcttgaacaaatcattagcctggtgtctagtgacagcta

SEQ ID NO: 193484 - protein, 374 aa, Artificial Sequence
  derived and/or modified sequence
MEADSPAGPGAPEPLAEGAAAEFSSLLRRIKGKLFTWNILKTIALGQMLSLCICGTAITSQYLAERYKVNTPMLQSFINYCLLFLIYTVMLAFRSGSDNLLVILKRKWWKYILLGLADVEANYVIVRAYQYTTLTSVQLLDCFGIPVLMALSWFILHARYRVIHFIAVAVCLLGVGTMVGADILAGREDNSGSDVLIGDILVLLGASLYAISNVCEEYIVKKLSRQEFLGMVGLFGTIISGIQLLIVEYKDIASIHWDWKIALLFVAFALCMFCLYSFMPLVIKVTSATSVNLGILTADLYSLFVGLFLFGYKFSGLYILSFTVIMVGFILYCSTPTRTAEPAESSVPPVTSIGIDNLGLKLEENLQETHSAVL

SEQ ID NO: 193485 - protein, 357 aa, Artificial Sequence
  derived and/or modified sequence
MEADSPAGPGAPEPLAEGAAAEFSSLLRRIKGKLFTWNILKTIALGQMLSLCICGTAITSQYLAERYKVNTPMLQSFINYCLLFLIYTVMLAFRSGSDNLLVILKRKWWKYILLGLADVEANYVIVRAYQYTTLTSVQLLDCFGIPVLMALSWFILHARYRVIHFIAVAVCLLGVGTMVGADILAGREDNSGSDVLIGDILVLLGASLYAISNVCEEYIVKKLSRQEFLGMVGLFGTIISGIQLLIVEYKDIASIHWDWKIALLFVAFALCMFCLYSFMPLVIKVTSATSVNLGILTADLYSLFVGLFLFGYKDSTSCPSLSSWWGLSCTAPPLLARPSRLKAACLQSPALGLTTWG

SEQ ID NO: 193486 - DNA, 1125 bp, Artificial Sequence
  derived and/or modified sequence
atggaggccgacagccccgccggccccggcgcccccgagcccctggccgagggcgccgccgccgagttcagcagcctgctgagaagaatcaagggcaagctgttcacctggaacatcctgaagaccatcgccctgggccagatgctgagcctgtgcatctgcggcaccgccatcaccagccagtacctggccgagagatacaaggtgaacacccccatgctgcagagcttcatcaactactgcctgctgttcctgatctacaccgtgatgctggccttcagaagcggcagcgacaacctgctggtgatcctgaagagaaagtggtggaagtacatcctgctgggcctggccgacgtggaggccaactacgtgatcgtgagagcctaccagtacaccaccctgaccagcgtgcagctgctggactgcttcggcatccccgtgctgatggccctgagctggttcatcctgcacgccagatacagagtgatccacttcatcgccgtggccgtgtgcctgctgggcgtgggcaccatggtgggcgccgacatcctggccggcagagaggacaacagcggcagcgacgtgctgatcggcgacatcctggtgctgctgggcgccagcctgtacgccatcagcaacgtgtgcgaggagtacatcgtgaagaagctgagcagacaggagttcctgggcatggtgggcctgttcggcaccatcatcagcggcatccagctgctgatcgtggagtacaaggacatcgccagcatccactgggactggaagatcgccctgctgttcgtggccttcgccctgtgcatgttctgcctgtacagcttcatgcccctggtgatcaaggtgaccagcgccaccagcgtgaacctgggcatcctgaccgccgacctgtacagcctgttcgtgggcctgttcctgttcggctacaagttcagcggcctgtacatcctgagcttcaccgtgatcatggtgggcttcatcctgtactgcagcacccccaccagaaccgccgagcccgccgagagcagcgtgccccccgtgaccagcatcggcatcgacaacctgggcctgaagctggaggagaacctgcaggagacccacagcgccgtgctgtag

SEQ ID NO: 193487 - DNA, 1074 bp, Artificial Sequence
  derived and/or modified sequence
atggaggccgacagccccgccggccccggcgcccccgagcccctggccgagggcgccgccgccgagttcagcagcctgctgagaagaatcaagggcaagctgttcacctggaacatcctgaagaccatcgccctgggccagatgctgagcctgtgcatctgcggcaccgccatcaccagccagtacctggccgagagatacaaggtgaacacccccatgctgcagagcttcatcaactactgcctgctgttcctgatctacaccgtgatgctggccttcagaagcggcagcgacaacctgctggtgatcctgaagagaaagtggtggaagtacatcctgctgggcctggccgacgtggaggccaactacgtgatcgtgagagcctaccagtacaccaccctgaccagcgtgcagctgctggactgcttcggcatccccgtgctgatggccctgagctggttcatcctgcacgccagatacagagtgatccacttcatcgccgtggccgtgtgcctgctgggcgtgggcaccatggtgggcgccgacatcctggccggcagagaggacaacagcggcagcgacgtgctgatcggcgacatcctggtgctgctgggcgccagcctgtacgccatcagcaacgtgtgcgaggagtacatcgtgaagaagctgagcagacaggagttcctgggcatggtgggcctgttcggcaccatcatcagcggcatccagctgctgatcgtggagtacaaggacatcgccagcatccactgggactggaagatcgccctgctgttcgtggccttcgccctgtgcatgttctgcctgtacagcttcatgcccctggtgatcaaggtgaccagcgccaccagcgtgaacctgggcatcctgaccgccgacctgtacagcctgttcgtgggcctgttcctgttcggctacaaggacagcaccagctgccccagcctgagcagctggtggggcctgagctgcaccgccccccccctgctggccagacccagcagactgaaggccgcctgcctgcagagccccgccctgggcctgaccacctggggctag

SEQ ID NO: 193488 - DNA, 1125 bp, Artificial Sequence
  derived and/or modified sequence
atggaggccgattcacccgccggcccaggagcccccgagccacttgccgagggggccgccgcggagttttcttcgcttctgagacgcattaagggcaaactgttcacttggaacatactgaaaaccattgccctgggtcaaatgctgtccctgtgcatctgtgggacagctattacgtcacagtatctggctgagaggtacaaagtgaacacccccatgctgcaaagttttatcaattactgcttattgtttttaatttacaccgtgatgctggccttccgatctgggtcagacaacctcctggttattttgaagagaaagtggtggaagtatattctcctgggactcgccgacgttgaggctaattatgtaatcgtgagagcctaccagtataccacactcactagcgtgcagctgctcgattgtttcggaattccagttctcatggctcttagctggtttatcctgcacgcccgttacagagtaatacactttatcgcagtcgccgtctgcttactgggtgtcggaaccatggtcggagcggatatcctggctggtagggaggacaacagtgggtccgacgtcttgattggcgacattctggttctcctgggcgcctctctgtacgctatctcaaacgtttgcgaggaatatatcgtaaaaaaactgagcaggcaggagttcctcggaatggtcggcctttttggcaccattatttcagggatccaactgctgatcgttgaatataaggatatagcgtcaatacactgggactggaaaattgctctgttgttcgtggccttcgcgttatgtatgttctgtctttactcattcatgcccctggtgattaaagtgacaagcgccacctctgtcaatctgggaattctgaccgctgacctgtactctctctttgtgggtctgttcttgtttggttataaattctctggtttatatatcctgtcattcacggtgatcatggtgggtttcatcctttattgcagcactccaacccggacggcagaacctgctgaaagcagtgtcccacccgtcacctccataggaatcgataacctcggcctgaaactggaagagaatctccaggaaacacacagcgccgtgctgtag

SEQ ID NO: 193489 - DNA, 1074 bp, Artificial Sequence
  derived and/or modified sequence
atggaggccgattccccagcaggcccaggtgccccagagcctttagcggagggggccgccgccgagttcagcagcctgctacggcgtataaagggcaaactgttcacttggaacattctgaagaccatcgccctgggccaaatgcttagcttatgcatttgcggcacggccattaccagccaatatctcgctgagaggtacaaggtgaacactcccatgctgcaatcgttcattaattattgtctgctttttctgatctatacagtgatgctggcttttcgcagcggatcagacaatctattagtgatccttaaaagaaagtggtggaagtatatcttactcgggctggctgacgtagaggcaaactacgttatcgtgcgtgcatatcagtacacaactctgacatcggttcagctgttagattgctttggcatcccggtcctcatggccctctcgtggtttattctacatgcaagatatagggttatccatttcatagccgtggctgtatgtctgttgggcgtggggaccatggtcggcgcagatatactggcaggacgcgaagataattccggctcagatgttttgattggagatatattagtgcttttgggggcgagcttgtacgctattagcaatgtttgcgaagaatatatcgtgaaaaaattatcgagacaggaatttcttggaatggtcggcctgttcgggactattatcagtggcattcagttactcatcgtggaatacaaggacatagctagtattcattgggactggaagattgctctgctgttcgtcgctttcgcactgtgcatgttctgcctgtattcgttcatgcccctggtcatcaaggtcacgagcgctacaagtgtaaaccttggtatactcaccgcagacttgtatagtctgttcgtcggcctctttctgttcggttacaaagattcaacatcgtgtccgtctttatcctcatggtggggattatcgtgcactgcgcccccactcctggcgcgcccctcacgcctcaaggcagcatgtctccaatctcctgccctcggactgacaacatggggctag

SEQ ID NO: 193490 - DNA, 1125 bp, Artificial Sequence
  derived and/or modified sequence
atggaggcagactctccagcagggccaggtgcccctgagcccctcgctgagggagccgctgccgagttcagctcacttttgcggaggattaaggggaaattgtttacatggaacatactgaaaaccatagctcttggccagatgcttagcctgtgcatctgcgggaccgcgatcacatctcagtatctcgccgaacggtacaaggtgaatacgcctatgctgcagtcttttataaactattgcctgctgtttttgatatacaccgtgatgttagccttcagatccgggtcagacaatctcctggtcattctgaagaggaaatggtggaaatatattctccttgggctcgccgacgtggaagccaactacgtcatagtgcgggcatatcagtatacaacacttacctctgtacagcttctcgattgctttggaatacccgtgcttatggccctgtcgtggttcatccttcatgccagataccgcgtcatccacttcattgctgtggccgtctgtctgctcggtgttggcacaatggtgggagccgacattttggctggacgcgaggataattcaggcagtgatgtactcatcggtgacatcctggtactgctgggcgcaagcttgtacgccatcagcaatgtatgtgaagaatacattgtgaaaaaactgtccaggcaggaattcctcgggatggtggggcttttcggaaccatcatctctggcatccaactgctgattgtggagtataaggacatagcctcgatacattgggactggaaaatcgctctgctgtttgtcgcctttgccctgtgtatgttttgtctctactcctttatgcccctggtcattaaagttaccagtgccacttcagtgaatttgggcatcctcactgccgatttatattcattgttcgtggggctgtttctcttcggatacaagttttctggcctctatattctgagctttacagtcatcatggtcggctttattctgtattgttccacccccacaaggaccgccgagcccgctgaatcatccgttccccctgtgacttccatcggaatagacaaccttggacttaagctagaggagaacctgcaagagacacacagcgccgtgctctag

SEQ ID NO: 193491 - DNA, 1125 bp, Artificial Sequence
  derived and/or modified sequence
atggaggccgacagccctgctggccctggggcccctgagcccctggccgagggcgctgctgctgagttcagcagcctgctgcggcgcatcaagggcaagctgttcacctggaacatcctgaagaccatcgccctgggccagatgctgagcctgtgcatctgtggcacagccatcaccagccagtacctggccgagcgctacaaggtgaacacccccatgctgcagagcttcatcaactactgcctgctcttcctgatctacacagtgatgctggccttccgcagcggcagtgacaacctgctggtgatcctgaagaggaagtggtggaagtacatcctgctgggcctggctgatgtggaggccaactacgtgattgtgcgggcctaccagtacaccaccctgacctctgtgcagctgctggactgcttcggcatccctgtgctgatggccctgtcctggttcatcctgcacgcccgctacagagtcatccacttcatcgctgtggccgtgtgcctgctgggcgtgggcaccatggtgggcgctgacatcctggccggccgggaggacaacagcggcagtgatgtgctgattggagacatcctggtgctgctgggcgccagcctgtatgccatcagcaatgtgtgtgaggagtacatcgtgaagaagctgagccggcaggagttcctgggcatggtgggcctgtttggcaccatcatcagcggcatccagctgctgattgtggagtacaaggacatcgccagcatccactgggactggaagatcgccctgctgtttgtggcctttgccctgtgcatgttctgcctgtacagcttcatgcccctggtgatcaaggtgaccagcgccacctctgtgaacctgggcatcctgacagctgacctgtacagcctgtttgtgggcctcttcctgtttggctacaagttcagcggcctgtacatcctgtccttcaccgtcatcatggtgggcttcatcctgtactgcagcacccccaccaggacagctgagcctgctgagagctctgtgccccctgtgaccagcattggaattgacaacctgggcctgaagctggaggagaacctgcaggagacccacagcgctgtgctgtag

SEQ ID NO: 193492 - DNA, 1074 bp, Artificial Sequence
  derived and/or modified sequence
atggaggccgacagccctgctggccctggggcccctgagcccctggccgagggcgctgctgctgagttcagcagcctgctgcggcgcatcaagggcaagctgttcacctggaacatcctgaagaccatcgccctgggccagatgctgagcctgtgcatctgtggcacagccatcaccagccagtacctggccgagcgctacaaggtgaacacccccatgctgcagagcttcatcaactactgcctgctcttcctgatctacacagtgatgctggccttccgcagcggcagtgacaacctgctggtgatcctgaagaggaagtggtggaagtacatcctgctgggcctggctgatgtggaggccaactacgtgattgtgcgggcctaccagtacaccaccctgacctctgtgcagctgctggactgcttcggcatccctgtgctgatggccctgtcctggttcatcctgcacgcccgctacagagtcatccacttcatcgctgtggccgtgtgcctgctgggcgtgggcaccatggtgggcgctgacatcctggccggccgggaggacaacagcggcagtgatgtgctgattggagacatcctggtgctgctgggcgccagcctgtatgccatcagcaatgtgtgtgaggagtacatcgtgaagaagctgagccggcaggagttcctgggcatggtgggcctgtttggcaccatcatcagcggcatccagctgctgattgtggagtacaaggacatcgccagcatccactgggactggaagatcgccctgctgtttgtggcctttgccctgtgcatgttctgcctgtacagcttcatgcccctggtgatcaaggtgaccagcgccacctctgtgaacctgggcatcctgacagctgacctgtacagcctgtttgtgggcctcttcctgtttggctacaaggacagcaccagctgccccagcctgagctcctggtggggcctgagctgcacagccccacccctgctggcccggcccagccggctgaaggccgcctgcctgcagagccctgccctgggcctgaccacctggggctag

SEQ ID NO: 193493 - DNA, 1125 bp, Artificial Sequence
  derived and/or modified sequence
atggaggccgacagccccgccggccccggcgcccccgagcccctggctgaaggggccgcggctgagttttcctctctgttgagacgcatcaagggcaaactgttcacatggaatattctcaaaactatcgccctggggcagatgctctcactatgcatttgtgggaccgcgataactagtcaatacctggcggaaagatacaaggttaacactccaatgctgcagtccttcattaactattgcctcctcttcctgatttacacagtgatgctggcatttcgctccggcagcgacaacctgctggtgatacttaagagaaagtggtggaagtacatactcctgggacttgccgatgtggaggcaaattacgttattgtgagagcttaccagtataccaccctcaccagcgtgcagctcctggattgttttggaataccagtgctgatggctctcagctggttcattcttcatgctaggtaccgagtcattcacttcatagctgtagccgtttgtcttctgggcgttggtaccatggtaggagctgacattcttgctggccgagaggataattctggatccgacgtcttgattggcgacattctcgttcttctgggcgcttcgttgtacgcaatctccaacgtctgtgaggaatatatcgtaaaaaaactttccaggcaagagtttcttgggatggtgggcctgtttgggactataattagcgggatccagctcctcatagtggaatacaaggacatcgcatccatccactgggattggaaaattgctttactgtttgttgctttcgcactctgtatgttttgcctgtactcgttcatgcctttggtgataaaggtgacttccgctacctcagtcaatcttggtatcttgaccgctgatctatactccctcttcgtcggattgtttctcttcggatataagtttagcggactatacattctgtccttcacggtgataatggtgggatttatcctgtactgttcaacccctacccgaactgctgaacccgctgagagcagcgtcccccccgtgaccagcatcgggattgacaatctgggactgaaactggaggaaaacttgcaagagactcactctgccgttctgtag

SEQ ID NO: 193494 - DNA, 1074 bp, Artificial Sequence
  derived and/or modified sequence
atggaggccgacagccccgccggccccggcgcccccgagcccctggcggagggtgcagctgctgagttctcctctctgctgaggcgtattaaaggaaagctgtttacttggaatatccttaaaaccattgctctcggccaaatgttatccctttgcatctgcgggaccgccattacctcacagtacttggcggaaagatacaaggtgaatacccccatgctccaatcatttatcaactactgcctgctgtttctgatttatacagtaatgctcgctttccggagcggatctgacaatctattagtcattctgaagaggaagtggtggaaatacatattgctgggcctcgcagacgtggaggcaaactacgtgatagtccgagcctatcagtacaccaccttaaccagcgttcagctcctggactgcttcgggatccccgtactgatggctctttcctggtttatcctccatgctagatatcgtgtcattcacttcatagcggtagctgtgtgcctgctcggggtaggcacaatggtgggggcagacatcctcgcggggcgggaagacaactccggcagtgatgtgctgattggcgacattttggtgctcctcggtgcaagtttatatgcgatctctaacgtttgcgaggagtacatagtcaagaaactgtctcgtcaggagtttctagggatggtgggacttttcggaacgattatcagtggtatacagttgctgattgtcgagtataaagacatagcctcaattcattgggattggaagattgctctcttattcgttgcctttgccctatgcatgttctgcctctattcctttatgcccctggtcataaaagtgacaagcgccaccagtgtgaatcttggaattctgaccgccgatctgtacagtctcttcgtgggtttgtttctgtttggatacaaggactccacctcctgcccatctctgtcctcctggtggggcctgagttgtaccgctcctcctttacttgcccgtcccagtagactcaaggcagcttgtttgcagtctccagccttgggacttacaacctggggctag

SEQ ID NO: 193495 - DNA, 1125 bp, Artificial Sequence
  derived and/or modified sequence
atggaggccgacagccccgccggccccggcgcccccgagcccctggccgaaggcgccgccgctgagttctcatccttgcttaggcgtattaagggaaaactgtttacgtggaacatccttaagacaatcgcccttggacagatgttatccctttgtatctgcggcaccgcaataacctctcaatatctggcagaaaggtataaagtgaatacaccaatgctgcaatcatttatcaactattgcctattattcctgatttacactgttatgttggctttcagaagcggatccgataatctcttagtgatactcaaaaggaagtggtggaagtatatactgctcggactcgcggatgtcgaggccaactatgtaattgtaagagcctatcagtataccactttgacgtctgtgcaactactggattgtttcggaatccctgttttaatggccctcagttggttcatcctacacgccaggtaccgtgtgatccattttattgcggtggctgtgtgtcttctgggcgtgggtacaatggtgggcgcggatatccttgccggacgggaggacaattccggatccgatgtgctgattggtgatattctagtcctgctcggggcctccttgtatgccatttccaatgtctgtgaagaatacatcgtcaagaagcttagcagacaagaattcctcggcatggtcggcctgttcggaactattatcagcggcatccaactcctaatcgttgagtataaagatatcgccagtatccactgggattggaagatcgccttgctgttcgtggcttttgccctgtgcatgttctgcctttacagcttcatgcctttagtgatcaaagtaacttctgccacgtcggtcaatctcggaattctcaccgctgatctctactccctctttgtggggctgtttttgtttgggtataagttcagcggattgtacatcctaagctttactgtcataatggtgggcttcatactctactgtagcacccccactagaacagcagaaccagccgagagtagcgtcccgcctgtcactagcatcggaatagataacttaggcttaaagttggaggagaacctccaagaaacgcattcggccgtgttatag

SEQ ID NO: 193496 - DNA, 1125 bp, Artificial Sequence
  derived and/or modified sequence
atggaggccgatagtcccgcaggcccaggtgctccagaacctctggccgagggcgcagcagcagaattttcatcactgctccggcgaatcaaaggaaagctcttcacttggaatattctgaaaacaattgccttgggtcagatgcttagtttatgtatatgcggaacagcgattacttcccaatacctggccgagcgctacaaggttaacaccccaatgctgcagagtttcatcaattattgcctgctgttcctgatttacactgtgatgttagcattcaggagtggaagcgacaatctgttagtcatcttgaaacgcaagtggtggaaatacatactgttgggtttggcagatgtggaagccaattacgtgatcgtgcgtgcttatcagtacactaccctgacatctgtccagctcctcgactgcttcggcatccctgtcttgatggccttgtcctggttcattctccatgcccgataccgcgtaatacactttattgccgtggccgtctgcctgttaggcgttggcaccatggtcggagccgacatcctcgctggtcgcgaagacaactctggtagcgacgtgcttatcggtgacatcctggtgttactcggggcttccctctacgctatctctaatgtttgtgaggagtatattgttaagaaactgtcacgccaggagttcctgggtatggtgggcctattcggcaccattattagcgggatacaattactgatcgtcgagtacaaagacatagcctctatacattgggactggaagatcgcgctgctcttcgttgctttcgcactgtgcatgttctgcttgtattcatttatgcccttggtaataaaggtgacatcagcaacatcagtgaatcttggcatccttacagctgatctttactcactgttcgtgggactttttctatttggttataaattctctggactctacattctgagctttaccgtcatcatggtcggttttatcctgtactgcagtacgccaacaagaacggctgagcccgcagagtcttcagtgccccctgtaacgagtatcggtatcgataacctgggactgaagttggaagagaaccttcaggagacccattccgctgtcctgtag

SEQ ID NO: 193497 - DNA, 1074 bp, Artificial Sequence
  derived and/or modified sequence
atggaagcagattctccagccggtccaggtgctcctgagccacttgcagagggggctgctgcggaatttagctcactgctgcgtaggattaaaggcaagctgttcacctggaatatactcaagactatcgctttaggccagatgctgtcgctttgtatatgtggaacagccatcactagtcaatacctcgccgagcggtataaagtgaacacaccaatgctgcagagttttattaattactgcctcctgtttctgatttataccgtgatgctggcgttcagatcaggtagcgacaatctgctcgtaattctgaagcggaagtggtggaaatatattctgctaggcttagccgacgtggaagccaactacgttattgttagagcctatcagtatacaaccctgacctctgtgcagctgctggattgctttggcatccccgtcctgatggctctttcatggttcatccttcatgcacggtatcgggtcatccactttatcgcggttgcagtgtgcttgctgggcgtaggaactatggtgggtgcggatatactggccggtcgagaagacaactcaggttccgacgtgctcataggcgacatcctagtgctgttaggcgcttctctttatgcaataagcaacgtctgtgaggaatatatcgtaaagaaactttccaggcaggagttcctcggcatggttggtctttttgggacaattattagcggaatccagctgctgatcgtggaatataaagatattgctagcatacattgggattggaaaatcgccttactttttgttgcgtttgcgctgtgtatgttctgtctctactccttcatgcctcttgtcataaaggtcacctcagctacctccgtcaacctgggcattctaactgccgacctgtatagcctgttcgtcggtctgtttctattcgggtataaggattccacatcatgtccttctctgtcgtcctggtggggtctgtcgtgtacagccccacccctgctagcacggccttcaagactcaaggcagcctgcctgcaatccccggcactggggttgacgacctggggatag

SEQ ID NO: 193498 - DNA, 1125 bp, Artificial Sequence
  derived and/or modified sequence
atggaggccgattcccctgctgggccaggcgctccagaaccgttagcagagggcgctgccgctgaattttcttctctgctacgacggataaagggcaagctctttacctggaatatcctcaagaccatagcactaggtcaaatgttaagtctgtgcatctgtggcacagcgatcacatcccaatacctggccgaacgctataaggtaaacacgcctatgcttcagtcattcatcaattactgtctcttgttcctgatttacactgtgatgcttgctttccggtcaggttccgacaatcttctcgtaatcctgaaacggaaatggtggaaatatatcctgctgggcctcgctgacgtcgaggccaattacgttatcgtcagggcctaccagtatacaaccctgacctctgtccagctgctagattgtttcggaatccccgtactcatggcactgagctggttcattcttcacgcacgttacagagtgatccattttattgcggtggcagtgtgtctcctgggagtcggcaccatggtgggcgctgatatattggccggacgggaggataattctgggtcagatgtcctcattggcgacatcttggtgctgttgggggcaagtctgtacgcaattagtaatgtatgcgaagaatatatcgtaaaaaagctcagtcggcaggaattcttaggaatggttgggctctttggcactattataagtggtatccaattgctgatcgtggaatacaaagatatcgcctccattcactgggactggaaaattgccttacttttcgtggcattcgccttgtgcatgttttgcttgtacagcttcatgcccctggtcatcaaagtaactagcgcaactagtgtgaacctgggcatccttacagctgatctgtacagtctgttcgtgggcctctttttattcgggtacaagttttcaggactgtacattttatccttcactgtcatcatggttggctttatcctctattgttcaacacccacccgtaccgcagagccagcagagtcttctgtgccccctgttacttctattggcatcgacaacttgggacttaagctggaagagaatctgcaggagacccacagtgctgttctgtag

SEQ ID NO: 193499 - DNA, 1076 bp, Artificial Sequence
  derived and/or modified sequence
agcagggaggcagaggtggcggccgcacggacttcggttcggggctcaacacgcacaccaggaatattttgaaaacaattgccctgggtcagatgttgtccttgtgtatatgtgggacagccatcaccagccagtatttggcagaaagatacaaagtgaacacccccatgcttcagagctttatcaattattgcttgctgttcctaatttatacagtgatgctggcatttcgatcaggcagtgataaccttttagtaatcttgaaaagaaaatggtggaagtacatcctgctgggactagcagatgtggaagctaattatgtgatcgtcagagcctaccagtacacaactctaaccagtgtccagcttttggattgctttgggattcctgtgttgatggctctgtcatggtttattcttcatgcaagatacagagtgatccacttcatcgccgtggctgtctgtctgttgggtgtaggaaccatggttggtgcagacatactagcagggagggaagacaattcagggagtgatgtattgattggtgacatcttggtccttcttggggcttccctctatgccatttcaaatgtttgtgaggaatacatcgtgaagaagctgagcagacaggagtttttaggaatggtgggcctgtttggaacaattatcagtggtatacagctattgattgtggaatataaggatattgccagcattcattgggactggaaaattgccctgctgttcgtggcatttgccctgtgtatgttttgcctgtacagcttcatgccattggtgattaaagtcactagtgccacttccgtcaacctgggcatcctgacagcggacctctacagcctttttgttggactctttctgtttggctataagttttcaggactctacatcctgtccttcactgtcatcatggtggggtttatcctgtactgctccacccctactcgcacggccgagccggctgaaagcagcgtgcctccagtcaccagcattgggattgacaacctggggctgaagctggaggagaacctccaggagacccactctgctgtcttgtag

SEQ ID NO: 193500 - DNA, 1714 bp, Artificial Sequence
  derived and/or modified sequence
aaatcactctccctcaacgctcactgggcgccggcaggaaagtgggcgtggcgggaagacgtgacagcagcaacaaccaaggaaaatgaagcaaggtctcaactccgggagggtcagccaatgaaaactcactgataaccttgttgagccggtcgtaatcctcctcgatgcccacgctgtccaagatcttcttgatgtccttggcgctgggggaggagttacccccgagggcagccagcagcccgtggaagcctcggaaggcgtggccagggcagggcatccaagccgagcgccgggggttggcaccgtctctctccctggcacggcggagacaactgaatactgaaagacaaaaccaacacaccgcgaggaatgagccacgcctccatccacgccacaaagggcttgacagttaatgattggtcgctgaaggagccgagcggaggagcgagagggacgcgagcaagcgagcgagggagggagcgcagggccagagcggagccccagccggccgcacaggcaccgcctcccgtcttccgggacccggcacttcgggggttttgggcgccggagacgcgcaagggcgccgatggaggcagactcgccagcgggccccggcgccccagagcccctcgcggagggagcggcggccgagttctccagcctgctgcgcaggataaaaggcaaactcttcacctggaatattttgaaaacaattgccctgggtcagatgttgtccttgtgtatatgtgggacagccatcaccagccagtatttggcagaaagatacaaagtgaacacccccatgcttcagagctttatcaattattgcttgctgttcctaatttatacagtgatgctggcatttcgatcaggcagtgataaccttttagtaatcttgaaaagaaaatggtggaagtacatcctgctgggactagcagatgtggaagctaattatgtgatcgtcagagcctaccagtacacaactctaaccagtgtccagcttttggattgctttgggattcctgtgttgatggctctgtcatggtttattcttcatgcaagatacagagtgatccacttcatcgccgtggctgtctgtctgttgggtgtaggaaccatggttggtgcagacatactagcagggagggaagacaattcagggagtgatgtattgattggtgacatcttggtccttcttggggcttccctctatgccatttcaaatgtttgtgaggaatacatcgtgaagaagctgagcagacaggagtttttaggaatggtgggcctgtttggaacaattatcagtggtatacagctattgattgtggaatataaggatattgccagcattcattgggactggaaaattgccctgctgttcgtggcatttgccctgtgtatgttttgcctgtacagcttcatgccattggtgattaaagtcactagtgccacttccgtcaacctgggcatcctgacagcggacctctacagcctttttgttggactctttctgtttggctataagttttcaggactctacatcctgtccttcactgtcatcatggtggggtttatcctgtactgctccacccctactcgcacggccgagccggctgaaagcagcgtgcctccagtcaccagcattgggattgacaacctggggctgaagctggaggagaacctccaggagacccactctgctgtcttgtag

SEQ ID NO: 193501 - DNA, 3331 bp, Artificial Sequence
  derived and/or modified sequence
aaatcactctccctcaacgctcactgggcgccggcaggaaagtgggcgtggcgggaagacgtgacagcagcaacaaccaaggaaaatgaagcaaggtctcaactccgggagggtcagccaatgaaaactcactgataaccttgttgagccggtcgtaatcctcctcgatgcccacgctgtccaagatcttcttgatgtccttggcgctgggggaggagttacccccgagggcagccagcagcccgtggaagcctcggaaggcgtggccagggcagggcatccaagccgagcgccgggggttggcaccgtctctctccctggcacggcggagacaactgaatactgaaagacaaaaccaacacaccgcgaggaatgagccacgcctccatccacgccacaaagggcttgacagttaatgattggtcgctgaaggagccgagcggaggagcgagagggacgcgagcaagcgagcgagggagggagcgcagggccagagcggagccccagccggccgcacaggcaccgcctcccgtcttccgggacccggcacttcgggggttttgggcgccggagacgcgcaagggcgccgatggaggcagactcgccagcgggccccggcgccccagagcccctcgcggagggagcggcggccgagttctccagcctgctgcgcaggataaaaggcaaactcttcacctggaatattttgaaaacaattgccctgggtcagatgttgtccttgtgtatatgtgggacagccatcaccagccagtatttggcagaaagatacaaagtgaacacccccatgcttcagagctttatcaattattgcttgctgttcctaatttatacagtgatgctggcatttcgatcaggcagtgataaccttttagtaatcttgaaaagaaaatggtggaagtacatcctgctgggactagcagatgtggaagctaattatgtgatcgtcagagcctaccagtacacaactctaaccagtgtccagcttttggattgctttgggattcctgtgttgatggctctgtcatggtttattcttcatgcaagatacagagtgatccacttcatcgccgtggctgtctgtctgttgggtgtaggaaccatggttggtgcagacatactagcagggagggaagacaattcagggagtgatgtattgattggtgacatcttggtccttcttggggcttccctctatgccatttcaaatgtttgtgaggaatacatcgtgaagaagctgagcagacaggagtttttaggaatggtgggcctgtttggaacaattatcagtggtatacagctattgattgtggaatataaggatattgccagcattcattgggactggaaaattgccctgctgttcgtggcatttgccctgtgtatgttttgcctgtacagcttcatgccattggtgattaaagtcactagtgccacttccgtcaacctgggcatcctgacagcggacctctacagcctttttgttggactctttctgtttggctataaggactctacatcctgtccttcactgtcatcatggtggggtttatcctgtactgctccacccctactcgcacggccgagccggctgaaagcagcgtgcctccagtcaccagcattgggattgacaacctggggctgaagctggaggagaacctccaggagacccactctgctgtcttgtagctggagaagatggcgcacccatcccccaccaggataaagcagagcctgctgcctgctgaggggacacttggggaaatagcagactcagaatggacactctacaaccctgggttggatccagtggttaggttttagaaaggaacactgaacaaagttcaaaagtagaaataccaaaatagagcagaaaccaagctaagagtgtgtttctgtgtttgaggaccaatatctgttcgtgttgaggagatgaggtgcagactccacactggggtcttagaggcaccagtgggaaagcaggactggggagagatccaggactgagccagcctcaggccagggcgggaaagcaggctgtccaggctgggcttggtggtcaggaacaggggcagctcacggtggctctggagtacgtttcctctgtcagatgcttcaaggtttttttttttttttttttttgctgaggcagttattgtccacaggcctttgggtacagatgaggccttggggctgactgcatgtggcagaaaacgggtgggtcagcccttgaaaagtcttgagatataagtgtgagtactatacaagcattaaactggagtgcagtaaacctaggaaccttcccacaattgtttttttgtttgtttgagatgcagagtctagagtgcagtggtgcaagctcagcttactgtaacctctgcctcctggattcaagtgttagtagctgggattacaaaagcatgtggccccacgcccagctaagttttgtatttttagtagacatggggtttcaccatgttgcccaggctggtcttgacctcccgacctcaagtgatctgcctgccccgacctcccaaagtgctgggattacaggcttgagccaccgtgccaggcctgttttgtttgtttttgtagagagatggggtttcgccatgttgcccaggctaatctcaaattcctgagctaaagcgatctgcccacctcggcctccgaaagtgctaggattacagatgtgaaccactgtgcctggcctgtttgtttgtttgtttaaaacatttctccatcactcattccaggtcccagagcaaactctctctgctctcggagcctgtgacactggctatgtgctccacagtttcagtcccaggtcatactctccaacagttttcagagctccatatatatgtagatgccatcctttctaaaaacttctcacgacctcctggaatattcctattgatctcattttatttagcatcagctcaagaaactaagtcttagtgcacagtatcacaacaaagaaaaagctttgtttttataactggtaaaaacaagaaaagattctcatcaaaatgaaaatataaaattaatcatttctcaccaaagagtatgcctgggagcctccagctgttaaaagacaatgctattactacttcttatcaaaaatctgtaatgccctgtgatttttatgatacttcttcaatacaaagtgttaatatgtgtcatcagtataataacaaccaacaaaatgccactttcagaaaactgtatgtaaattttttgtaacaatgtaaaaaagaaatggggagtaagtgttcacatcattaaaaggctttgaattcatggaaataca

SEQ ID NO: 193502 - DNA, 3170 bp, Artificial Sequence
  derived and/or modified sequence
actgcttctaactcactgctcactcaccgcttcttagcttaggaatcacctacaataacctcgtgtcactgtatcttgtgatttcaaacaaggaaccctaaaaacctgaaggcacactgggtgccgctcaacaataaggctcggctgccaagacgaaaaaaaaattgccctttctcctcctgccaccctggaggtgccaggttgtaatctgcaaatgtattgtctggcccttagggcttgacagttaatgattggtcgctgaaggagccgagcggaggagcgagagggacgcgagcaagcgagcgagggagggagcgcagggccagagcggagccccagccggccgcacaggcaccgcctcccgtcttccgggacccggcacttcgggggttttgggcgccggagacgcgcaagggcgccgatggaggcagactcgccagcgggccccggcgccccagagcccctcgcggagggagcggcggccgagttctccagcctgctgcgcaggataaaaggcaaactcttcacctggaatattttgaaaacaattgccctgggtcagatgttgtccttgtgtatatgtgggacagccatcaccagccagtatttggcagaaagatacaaagtgaacacccccatgcttcagagctttatcaattattgcttgctgttcctaatttatacagtgatgctggcatttcgatcaggcagtgataaccttttagtaatcttgaaaagaaaatggtggaagtacatcctgctgggactagcagatgtggaagctaattatgtgatcgtcagagcctaccagtacacaactctaaccagtgtccagcttttggattgctttgggattcctgtgttgatggctctgtcatggtttattcttcatgcaagatacagagtgatccacttcatcgccgtggctgtctgtctgttgggtgtaggaaccatggttggtgcagacatactagcagggagggaagacaattcagggagtgatgtattgattggtgacatcttggtccttcttggggcttccctctatgccatttcaaatgtttgtgaggaatacatcgtgaagaagctgagcagacaggagtttttaggaatggtgggcctgtttggaacaattatcagtggtatacagctattgattgtggaatataaggatattgccagcattcattgggactggaaaattgccctgctgttcgtggcatttgccctgtgtatgttttgcctgtacagcttcatgccattggtgattaaagtcactagtgccacttccgtcaacctgggcatcctgacagcggacctctacagcctttttgttggactctttctgtttggctataagttttcaggactctacatcctgtccttcactgtcatcatggtggggtttatcctgtactgctccacccctactcgcacggccgagccggctgaaagcagcgtgcctccagtcaccagcattgggattgacaacctggggctgaagctggaggagaacctccaggagacccactctgctgtcttgtagctggagaagatggcgcacccatcccccaccaggataaagcagagcctgctgcctgctgaggggacacttggggaaatagcagactcagaatggacactctacaaccctgggttggatccagtggttaggttttagaaaggaacactgaacaaagttcaaaagtagaaataccaaaatagagcagaaaccaagctaagagtgtgtttctgtgtttgaggaccaatatctgttcgtgttgaggagatgaggtgcagactccacactggggtcttagaggcaccagtgggaaagcaggactggggagagatccaggactgagccagcctcaggccagggcgggaaagcaggctgtccaggctgggcttggtggtcaggaacaggggcagctcacggtggctctggagtacgtttcctctgtcagatgcttcaaggtttttttttttttttttttttgctgaggcagttattgtccacaggcctttgggtacagatgaggccttggggctgactgcatgtggcagaaaacgggtgggtcagcccttgaaaagtcttgagatataagtgtgagtactatacaagcattaaactggagtgcagtaaacctaggaaccttcccacaattgtttttttgtttgtttgagatgcagagtctagagtgcagtggtgcaagctcagcttactgtaacctctgcctcctggattcaagtgttagtagctgggattacaaaagcatgtggccccacgcccagctaagttttgtatttttagtagacatggggtttcaccatgttgcccaggctggtcttgacctcccgacctcaagtgatctgcctgccccgacctcccaaagtgctgggattacaggcttgagccaccgtgccaggcctgttttgtttgtttttgtagagagatggggtttcgccatgttgcccaggctaatctcaaattcctgagctaaagcgatctgcccacctcggcctccgaaagtgctaggattacagatgtgaaccactgtgcctggcctgtttgtttgtttgtttaaaacatttctccatcactcattccaggtcccagagcaaactctctctgctctcggagcctgtgacactggctatgtgctccacagtttcagtcccaggtcatactctccaacagttttcagagctccatatatatgtagatgccatcctttctaaaaacttctcacgacctcctggaatattcctattgatctcattttatttagcatcagctcaagaaactaagtcttagtgcacagtatcacaacaaagaaaaagctttgtttttataactggtaaaaacaagaaaagattctcatcaaaatgaaaatataaaattaatcatttctcaccaaagagtatgcctgggagcctccagctgttaaaagacaatgctattactacttcttatcaaaaatctgtaatgccctgtgatttttatgatacttcttcaatacaaagtgttaatatgtgtcatcagtataataacaaccaacaaaatgccactttcagaaaactgtatgtaaattttttgtaacaatgtaaaaaagaaatggggagtaagtgttcacatcattaaaaggctttgaattcatggaaataca

SEQ ID NO: 193503 - protein, 217 aa, Artificial Sequence
  derived and/or modified sequence
METIWIYQFRLIVIGDSTVGKSCLLHRFTQGRFPGLRSPACDPTVGVDFFSRLLEIEPGKRIKLQLWDTAGQERFRSITRSYYRNSVGGFLVFDITNRRSFEHVKDWLEEAKMYVQPFRIVFLLVGHKCDLASQRQVTREEAEKLSADCGMKYIETSAKDATNVEESFTILTRDIYELIKKGEICIQDGWEGVKSGFVPNTVHSSEEAVKPRKECFC

SEQ ID NO: 193504 - DNA, 654 bp, Artificial Sequence
  derived and/or modified sequence
atggagaccatctggatctaccagttcagactgatcgtgatcggcgacagcaccgtgggcaagagctgcctgctgcacagattcacccagggcagattccccggcctgagaagccccgcctgcgaccccaccgtgggcgtggacttcttcagcagactgctggagatcgagcccggcaagagaatcaagctgcagctgtgggacaccgccggccaggagagattcagaagcatcaccagaagctactacagaaacagcgtgggcggcttcctggtgttcgacatcaccaacagaagaagcttcgagcacgtgaaggactggctggaggaggccaagatgtacgtgcagcccttcagaatcgtgttcctgctggtgggccacaagtgcgacctggccagccagagacaggtgaccagagaggaggccgagaagctgagcgccgactgcggcatgaagtacatcgagaccagcgccaaggacgccaccaacgtggaggagagcttcaccatcctgaccagagacatctacgagctgatcaagaagggcgagatctgcatccaggacggctgggagggcgtgaagagcggcttcgtgcccaacaccgtgcacagcagcgaggaggccgtgaagcccagaaaggagtgcttctgctag

SEQ ID NO: 193505 - DNA, 654 bp, Artificial Sequence
  derived and/or modified sequence
atggagactatttggatctaccagtttcgactgatcgtgattggtgattccaccgtaggcaagagctgcttgctgcacagattcacgcagggccggtttccaggattgcgaagcccagcgtgcgatccaaccgtcggggtagactttttcagtcggctcctggaaattgaacccggaaagcgcattaaactgcaactgtgggatacagcagggcaggaacggtttcgcagcataaccagaagctactatagaaactccgtcgggggattcttggtgttcgacatcacaaatcgacgttcgtttgagcacgtaaaggattggttggaggaagctaaaatgtatgtgcagccgtttaggattgtattcctgctcgtggggcacaaatgcgatctcgcctcacagcgccaggtgactcgggaagaagcagagaagctgtctgcggactgcggcatgaagtacattgagacaagcgccaaggatgctaccaatgtcgaggagtcttttacaattctcaccagagatatctacgagttaattaagaagggggagatctgcattcaagacggttgggagggagtgaaatccggtttcgtgcccaacaccgtgcattcctcggaagaggctgtgaagcccaggaaagaatgcttctgctag

SEQ ID NO: 193506 - DNA, 654 bp, Artificial Sequence
  derived and/or modified sequence
atggagaccatctggatctaccagttccgcctcatcgtcatcggggacagcacagtgggcaagagctgcctgctgcaccgcttcacccagggccgcttccctggcctgcggagccctgcctgtgaccccaccgtgggcgtggacttcttcagccggctgctggagattgagcccgggaagaggatcaagctgcagctgtgggacacagctggccaggagcgcttccgcagcatcaccaggagctactacagaaacagcgtgggcggcttcctggtgtttgacatcaccaacagaagaagctttgaacatgtgaaggactggctggaggaggccaagatgtatgtgcagcccttccgcatcgtgttcctgctggtgggccacaagtgtgacctggccagccagaggcaggtgacccgggaggaggccgagaagctgtctgctgactgtggcatgaagtacatcgagaccagcgccaaggatgccaccaacgtggaggagagcttcaccatcctgacccgggacatctatgagctgatcaagaagggggagatctgcatccaggacggctgggagggcgtgaagagcggctttgtgcccaacacagtgcacagcagcgaggaggccgtgaagcccaggaaggagtgcttctgctag

SEQ ID NO: 193507 - DNA, 654 bp, Artificial Sequence
  derived and/or modified sequence
atggagaccatctggatctaccagttccggctgatcgtgatcggcgactcaactgtgggtaagtcgtgcctgctgcaccggtttactcaaggcaggtttccgggcctgaggtcccccgcctgcgaccccacagttggggtcgattttttctctaggttgctggagatcgagcccggcaagcgcataaagttgcagctgtgggacacagccggccaggagagatttagaagcatcacccgttcttattatcgaaattcagttgggggcttcctcgtttttgacattactaatagacgttcctttgagcacgtcaaggattggcttgaggaagctaaaatgtatgtgcaacctttcaggatagtgttcctgttagtagggcacaagtgtgatctcgccagtcagcgtcaggtgacaagagaggaagctgaaaaactgagcgccgactgcgggatgaagtatatcgaaacgagtgcaaaggatgccactaatgtggaggagagcttcacaatccttacgcgtgacatttacgaactaatcaaaaaaggagagatctgtatccaggatggctgggagggggtcaaatctggcttcgtgcccaatacagtccactcctcagaggaggcggtaaagccccgtaaggagtgtttttgctag

SEQ ID NO: 193508 - DNA, 654 bp, Artificial Sequence
  derived and/or modified sequence
atggagacaatttggatttaccaattcagacttatcgttatcggggacagtacggtgggaaagtcctgtctgttacaccgtttcactcagggcaggttccccggactgaggagtcccgcttgcgatcccaccgtgggagtggacttcttttcaagactccttgaaattgagccgggtaaacggataaagctgcagctctgggataccgccggtcaagaacggtttcggtccattacccgatcatactaccggaattctgtgggcggattccttgttttcgacatcacaaaccggcgaagctttgagcacgttaaggattggctcgaagaagccaagatgtatgttcagccatttcggatcgttttcctcctggttggtcataaatgcgacctggcctcgcagagacaagtcacacgggaggaagctgaaaaactaagcgcggactgtggtatgaagtatatcgagacgtccgctaaagacgccaccaacgttgaggagtccttcaccatcctgacgcgggacatttacgagctgattaaaaaaggcgagatctgcatccaagacggctgggagggagttaagagtgggttcgtccccaacacagtgcattccagcgaagaggcagttaagccccgtaaggaatgcttctgttag

SEQ ID NO: 193509 - DNA, 1830 bp, Artificial Sequence
  derived and/or modified sequence
acagttcccgccgccgaacttagcccgcgggtggggcggcccgggagccagcggggcacgtgagcgatggagaccatctggatctaccagttccgcctcatcgtgatcggggactccaccgtgggcaagtcctgcctcctgcaccgcttcacccagggccgcttccccgggctgcgctcccccgcctgcgaccccaccgtcggcgtggacttcttctcccgcctgctggagatcgagccgggcaagaggatcaagctacagctctgggacacggcgggacaggagcggttcagatcaataacccgatcttattaccgcaactcagttggtggatttttagtatttgacattactaaccgacgatcttttgaacatgtgaaagattggctagaagaagcaaaaatgtatgtacagccatttcggattgtatttctgctagtgggacataaatgtgatttagcttcacaacgtcaagttacaagggaagaagctgaaaaactgtcagcagactgtggaatgaagtatatagaaacctcagcaaaggatgctacaaatgttgaagaatccttcacaatcttgacgagagacatatatgaacttattaaaaagggagaaatttgtattcaggatggctgggaaggggttaaaagtggttttgttccaaatactgtgcattcttctgaggaagcagtaaagcccaggaaagaatgcttctgctgacttcaaacatgctgaagaactaacaggaacagattgggtgtcagttcaggataaataccaacattaacagcagaatgatgcaatgaaagaatttaaaaaggttacaaacccacaccaatactattttataaggtatttgattcagagcatgatgcttacttgttacactactagattgggtattttgctaaattaccaagcaaagcagacaatctttttcttgaaattacctccattcttactttgttagcatacgctgaccttagtgtccagatatgtcactattactcatttttcttgacagttcaaatggatttttgtgcatatatagtcaattgaaaagattttatcaggaattacattctcttgagttaattaatattgaatagcaaaatgcatttaaatatgcactgttcacctgcagagtaaacaatctcagaagtatcgactaggacgtaaatagcagttccttatataaagtaccaggttttttccccattctctggaaatgtttgtcctcccttaattttgcctcaacacaagaaaataagttttatgtccatttttgttccctaatttattgcttctaaaaatgcattatgttttacaaagatatctaaggatccaagcaaactactttaagcaaatatttgtaaaattaaaaacggaggaccgctcaccaaatgtttgaaatgttgctttttttttttgagacagggtcttgttttgtcacccaggctggagtgcagtggggcaatcttggctccctgcaacctctgcttcctgggttcaggtgattgtcagtaccttacctcagcctcctgagtagctggaactgcagatgtgcgccaccatgcccggctaatttttgtattataagtagacacagggtttcataatgttccccaggctggtctccaactcctcgcctcaagcaattcgcccccctcggcctccaaagtgctggaattataggcatgagctgccgtgcctggactatcagcagcacatgttttgctgttacggtgtactgttcgtatttagacaagaagaacaaaatttatttatgtattgacattttcaaagaaagtaaatgcaatttactttgaa

SEQ ID NO: 193510 - protein, 2236 aa, Artificial Sequence
  derived and/or modified sequence
MAHNAGAAAAAGTHSAKSGGSEAALKEGGSAAALSSSSSSSAAAAAASSSSSSGPGSAMETGLLPNHKLKTVGEAPAAPPHQQHHHHHHAHHHHHHAHHLHHHHALQQQLNQFQQQQQQQQQQQQQQQQQQHPISNNNSLGGAGGGAPQPGPDMEQPQHGGAKDSAAGGQADPPGPPLLSKPGDEDDAPPKMGEPAGGRYEHPGLGALGTQQPPVAVPGGGGGPAAVPEFNNYYGSAAPASGGPGGRAGPCFDQHGGQQSPGMGMMHSASAAAAGAPGSMDPLQNSHEGYPNSQCNHYPGYSRPGAGGGGGGGGGGGGGSGGGGGGGGAGAGGAGAGAVAAAAAAAAAAAGGGGGGGYGGSSAGYGVLSSPRQQGGGMMMGPGGGGAASLSKAAAGSAAGGFQRFAGQNQHPSGATPTLNQLLTSPSPMMRSYGGSYPEYSSPSAPPPPPSQPQSQAAAAGAAAGGQQAAAGMGLGKDMGAQYAAASPAWAAAQQRSHPAMSPGTPGPTMGRSQGSPMDPMVMKRPQLYGMGSNPHSQPQQSSPYPGGSYGPPGPQRYPIGIQGRTPGAMAGMQYPQQQMPPQYGQQGVSGYCQQGQQPYYSQQPQPPHLPPQAQYLPSQSQQRYQPQQDMSQEGYGTRSQPPLAPGKPNHEDLNLIQQERPSSLPDLSGSIDDLPTGTEATLSSAVSASGSTSSQGDQSNPAQSPFSPHASPHLSSIPGGPSPSPVGSPVGSNQSRSGPISPASIPGSQMPPQPPGSQSESSSHPALSQSPMPQERGFMAGTQRNPQMAQYGPQQTGPSMSPHPSPGGQMHAGISSFQQSNSSGTYGPQMSQYGPQGNYSRPPAYSGVPSASYSGPGPGMGISANNQMHGQGPSQPCGAVPLGRMPSAGMQNRPFPGNMSSMTPSSPGMSQQGGPGMGPPMPTVNRKAQEAAAAVMQAAANSAQSRQGSFPGMNQSGLMASSSPYSQPMNNSSSLMNTQAPPYSMAPAMVNSSAASVGLADMMSPGESKLPLPLKADGKEEGTPQPESKSKKSSSSTTTGEKITKVYELGNEPERKLWVDRYLTFMEERGSPVSSLPAVGKKPLDLFRLYVCVKEIGGLAQVNKNKKWRELATNLNVGTSSSAASSLKKQYIQYLFAFECKIERGEEPPPEVFSTGDTKKQPKLQPPSPANSGSLQGPQTPQSTGSNSMAEVPGDLKPPTPASTPHGQMTPMQGGRSSTISVHDPFSDVSDSSFPKRNSMTPNAPYQQGMSMPDVMGRMPYEPNKDPFGGMRKVPGSSEPFMTQGQMPNSSMQDMYNQSPSGAMSNLGMGQRQQFPYGASYDRRHEPYGQQYPGQGPPSGQPPYGGHQPGLYPQQPNYKRHMDGMYGPPAKRHEGDMYNMQYSSQQQEMYNQYGGSYSGPDRRPIQGQYPYPYSRERMQGPGQIQTHGIPPQMMGGPLQSSSSEGPQQNMWAARNDMPYPYQNRQGPGGPTQAPPYPGMNRTDDMMVPDQRINHESQWPSHVSQRQPYMSSSASMQPITRPPQPSYQTPPSLPNHISRAPSPASFQRSLENRMSPSKSPFLPSMKMQKVMPTVPTSQVTGPPPQPPPIRREITFPPGSVEASQPVLKQRRKITSKDIVTPEAWRVMMSLKSGLLAESTWALDTINILLYDDSTVATFNLSQLSGFLELLVEYFRKCLIDIFGILMEYEVGDPSQKALDHNAARKDDSQSLADDSGKEEEDAECIDDDEEDEEDEEEDSEKTESDEKSSIALTAPDAAADPKEKPKQASKFDKLPIKIVKKNNLFVVDRSDKLGRVQEFNSGLLHWQLGGGDTTEHIQTHFESKMEIPPRRRPPPPLSSAGRKKEQEGKGDSEEQQEKSIIATIDDVLSARPGALPEDANPGPQTESSKFPFGIQQAKSHRNIKLLEDEPRSRDETPLCTIAHWQDSLAKRCICVSNIVRSLSFVPGNDAEMSKHPGLVLILGKLILLHHEHPERKRAPQTYEKEEDEDKGVACSKDEWWWDCLEVLRDNTLVTLANISGQLDLSAYTESICLPILDGLLHWMVCPSAEAQDPFPTVGPNSVLSPQRLVLETLCKLSIQDNNVDLILATPPFSRQEKFYATLVRYVGDRKNPVCREMSMALLSNLAQGDALAARAIAVQKGSIGNLISFLEDGVTMAQYQQSQHNLMHMQPPPLEPPSVDMMCRAAKALLAMARVDENRSEFLLHEGRLLDISISAVLNSLVASVICDVLFQIGQL

SEQ ID NO: 193511 - protein, 273 aa, Artificial Sequence
  derived and/or modified sequence
AAVMQAAANSAQSRQGSFPGMNQSGLMASSSPYSQPMNNSSSLMNTQAPPYSMAPAMVNSSAASVGLADMMSPGESKLPLPLKADGKEEGTPQPESKSKKSSSSTTTGEKITKVYELGNEPERKLWVDRYLTFMEERGSPVSSLPAVGKKPLDLFRLYVCVKEIGGLAQVNKNKKWRELATNLNVGTSSSAASSLKKQYIQYLFAFECKIERGEEPPPEVFSTGDTKKQPKLQPPSPGKWRRCSHWPRKAQAPGLGGSGKVVSQSGQQGTWDF

SEQ ID NO: 193512 - DNA, 6711 bp, Artificial Sequence
  derived and/or modified sequence
atggcccataacgctggagctgccgccgctgcgggaacccactccgctaagtcgggaggcagtgaagctgccctaaaagagggaggctcagcagctgccctctccagcagctcctcgtcgagtgccgctgccgctgccgcttcatctagttccagcagcggccccgggagtgccatggaaacaggtctcctcccaaaccataagctgaaaaccgtgggggaggccccagctgccccaccccaccagcaacatcatcaccaccatcacgcccaccaccatcaccaccacgcccatcatctgcaccaccatcacgccctgcagcagcagctcaaccagttccagcaacagcagcagcagcagcaacaacagcagcagcagcagcagcaacagcaacacccgatcagcaacaacaactctctgggaggcgccggcgggggggccccacagcccggccccgacatggaacaaccacaacacggaggagccaaggactccgcggcggggggccaagccgatccacctgggccaccgttactcagtaagcctggtgacgaggacgatgcgcctcccaagatgggggagcctgcaggaggcagatatgaacaccctggattaggagcactgggaacccaacagccccctgtggctgttccgggagggggcggcgggcctgcagctgtgccagaatttaacaattattatggatctgccgcgcccgcctcaggcgggcccggagggcgtgcaggaccttgttttgaccagcatggcggacagcagtctccggggatgggcatgatgcatagtgcaagcgccgccgctgcaggcgctcccggttccatggatccactccagaactcccacgaggggtatcctaactctcaatgcaatcattacccaggttactcgagacccggagctggcggaggaggcggagggggaggcggcgggggtggaggcagcggaggaggaggcgggggggggggagcaggggcgggaggggccggggcaggagcagtcgccgcggccgctgctgccgcagcggccgcagctgggggagggggaggcgggggctacggaggttccagcgccggctatggcgtgctttcatcccctcggcaacagggtggcgggatgatgatgggccccggcggagggggcgccgcaagcctgagtaaggccgctgccggctcagcagcaggtggatttcagcggtttgctggtcagaatcagcatccctctggcgctacacctacccttaaccaattgttgacttccccaagccccatgatgagatcctacggcgggtcatatcctgagtactccagcccatcagctccacccccccctccttcccagccgcaaagccaggcggcagccgccggtgctgccgctggtggacaacaggctgccgcaggcatgggtctggggaaggacatgggcgcccagtacgccgccgccagccccgcatgggctgcagcgcagcagcggtcccaccccgcgatgagccctggtactccgggtcccacaatgggccgttctcagggttccccgatggaccccatggtgatgaaaaggcctcagttgtatggtatggggagcaacccccattcacaaccgcagcagagtagtccctacccaggcgggagctatggaccgccaggaccccaacgctaccccatcggcattcaaggtaggaccccgggggccatggccggaatgcagtaccctcagcagcaaatgcctccacagtatggccagcaaggcgtttctggatattgtcagcaaggccagcagccgtattactcacaacagccccaacctcctcatttacctcctcaggcccaatacctcccctctcagtcacagcagcgataccagcctcagcaggacatgagccaggaaggctacggcaccagatcacaacctcccctcgcacctggtaagccaaaccacgaggacctcaatcttatccagcaagagcgaccatcttcgctgcccgacctcagcggatccatcgatgaccttcctacaggcacagaagccacccttagctcagctgtgtccgcttctggatccacaagcagtcagggcgaccagtctaaccccgcccagtcgcctttctcccctcatgccagccctcacttgtcttcgattcccggagggccatcgcccagtccagtaggctcgcccgtgggaagcaaccagagtcggtcaggccctatttcaccagcctccataccaggttctcagatgcctcctcagcccccaggctctcagagcgaatcatctagccacccggccttgagccagtcacccatgccccaggagcggggcttcatggccggtactcaacggaatcctcagatggcacagtatggccctcaacagacaggcccgagcatgtcaccacatccgtcccctggtggccagatgcacgctggcatctcttcatttcagcagtcaaactccagcggcacttatgggcctcagatgtcccaatatggtcctcaggggaactatagccgcccaccagcatactcaggggtgcctagcgcctcctactcaggcccagggcccggcatgggaatctccgccaataatcagatgcatggacagggtccaagccagccctgtggtgccgtccctcttggacgaatgcctagcgccggcatgcagaacagaccattcccaggcaatatgtcctcaatgaccccttcatccccaggaatgtcccagcaggggggccctggcatgggccctccgatgccaacagtcaatcggaaagcccaggaagcggccgctgcagtcatgcaagctgctgctaactctgcccagagccgacagggcagttttcctggaatgaatcagtcaggattaatggcgagctcgagcccttactctcagcctatgaacaacagttcctccttaatgaatacccaggctcctccatactccatggccccagctatggtgaatagctctgcagcgtccgtgggcctggctgacatgatgtcacctggggaatctaagctccccctgcccctcaaagcggacggtaaggaagaaggtactccgcagcctgagtccaagtctaaaaagtctagctcctcgaccactactggcgagaaaatcacaaaggtgtacgaattgggtaatgaaccagagcgaaaactgtgggtagatcgctacctcacatttatggaagagcgcggcagtccagtttcctctctacccgccgtcggcaagaagcctttggacctttttaggctgtatgtttgcgtcaaggagattggagggcttgcgcaggttaacaagaataagaaatggcgtgaactcgcaaccaatctgaacgtcggaacctccagctctgctgccagctccttaaaaaagcagtacatccaatacctattcgcctttgagtgcaagattgaacggggcgaagagccacccccagaagtgttttcaacaggtgataccaaaaagcagcccaaattgcaacctccttctcccgctaactccggaagtcttcaggggccccaaactcctcagtcaactggctcaaactcaatggccgaggttcccggtgatttgaagccacctacccccgcaagcaccccccatggccagatgaccccaatgcaagggggcaggagttccacaatcagtgttcacgatccattttccgacgtttctgattctagctttcccaagcggaatagtatgacgcctaacgctccataccaacagggcatgtcaatgccggacgttatggggcggatgccctacgagcctaacaaagaccccttcggcggaatgcgtaaggtgcccggctcctcagaacccttcatgacccaaggccagatgcctaactcatccatgcaggacatgtacaaccagtcaccttcaggggccatgagtaacctaggcatgggtcaacgccagcaattcccatacggagcttcctatgaccgtagacacgaaccatatggacagcagtatccagggcagggtccgccttccgggcaaccaccctatgggggtcaccagcccggcctgtacccccaacagcctaactacaagaggcacatggatggcatgtacgggccgcccgcgaaacgccatgagggtgacatgtataatatgcagtactcctcacaacagcaagagatgtacaaccagtacggcggttcgtatagtggccctgaccgccgacccattcaggggcagtacccgtatccctacagcagggaaagaatgcaaggccctgggcagatacagactcacggaatccccccgcagatgatgggtggcccactgcagagttcttcatctgagggcccgcagcagaatatgtgggctgcacgcaacgacatgccctacccttatcagaacaggcagggcccaggtggccctactcaagctcctccgtatccaggtatgaatagaacagatgatatgatggtacccgaccagcggatcaaccatgaaagccagtggccaagccacgtctctcagcgccaaccatatatgtccagtagtgcctcaatgcaacccattactaggccaccacagcctagttaccagaccccaccgtccctccccaaccatatcagccgcgctccgagtcctgctagctttcaaagatctctggagaatagaatgtcccccagcaagtcccctttcctgccgtccatgaagatgcagaaagttatgccaactgtgcccaccagtcaggtgactggtccccctcctcagccgcctcccatccggcgtgagattacgttcccgccaggctccgtcgaagcaagtcagccagtgttaaaacagagacgcaagataactagcaaagatatcgtgactccggaagcctggagagtcatgatgtcactgaagagcggtctcctggctgagagtacatgggcactagacactatcaatattctactctacgatgatagcacagtggctacattcaacctaagtcaattatcgggtttcctagaactcctcgtcgagtattttcggaaatgtctgatagacatctttggaatactgatggaatacgaagtgggtgaccccagccagaaagctctcgatcataatgctgcccggaaagatgacagccaatccttggcggatgacagcggaaaggaggaagaagacgcagaatgcattgacgatgacgaggaggacgaagaggacgaggaggaagactcagagaaaacagagtctgatgagaagagttcaatcgccctcacggctcccgacgcagcagccgacccaaaggagaaacctaaacaggcttccaaattcgacaagttacccattaagattgtgaaaaaaaataatttatttgtcgtggatcggtccgataaacttggcagggtccaagagttcaattcagggttactgcactggcaactgggcggaggagatacgaccgaacatatacagactcatttcgagtcaaaaatggaaattcccccccgtaggcgcccgccaccgcccttgtcatccgcaggcagaaagaaagagcaggaaggaaaaggcgatagcgaggagcagcaggagaaaagtattattgcaaccattgacgatgtgctgagcgctcgcccaggcgccctcccagaagatgctaatcccggtccacagacggagtcatccaagttcccctttggtatacagcaagcgaagtcccataggaatatcaaactattggaagatgaaccacgttcaagggacgaaacccctctgtgcactatcgcccactggcaggactctctggccaagagatgcatttgcgtgtctaacattgtgcggagcttaagcttcgtgccaggaaatgacgcagagatgagcaaacatcctggactggtgctgatcctcggcaagctgatcctgctgcaccatgagcaccctgagcgtaagcgtgcccctcaaacctacgagaaagaagaggacgaggataagggggtcgcgtgcagcaaggatgagtggtggtgggactgtcttgaggtgctaagagataatacccttgtgacccttgcgaatatcagcgggcagctggatctctccgcgtacactgaaagcatttgtctgcctattctggacggactgctccattggatggtatgcccatcagcagaggcacaggatccgttcccaacagtgggtcccaattccgtgctgtcaccccagaggttggttctcgagactctctgcaaattatctattcaggataataacgttgacctgattctggccacacccccgttcagccgccaggagaagttctacgccaccctggtgcgctacgtgggggaccgcaaaaatccagtgtgccgggaaatgagcatggccctcttgtcaaatctcgcgcagggcgacgcacttgccgcccgcgccattgcagtccagaagggcagtataggtaacctcatcagctttttagaggacggggtgacgatggcccagtatcagcagagccagcataacttaatgcatatgcaacctcctccattagagccacccagtgtagatatgatgtgtcgcgctgccaaggctctgcttgcgatggccagggtggacgagaaccggtcagaattcctcctccacgagggcaggttactggacatcagtattagtgccgtgctgaactcattggtcgctagtgtgatatgtgatgtgcttttccagatcggccagctctag

SEQ ID NO: 193513 - DNA, 822 bp, Artificial Sequence
  derived and/or modified sequence
gccgccgttatgcaggctgctgctaattcagcacaatctaggcaagggagcttccctggcatgaaccagagcggcctgatggcatccagtagtccatacagccagccgatgaataattctagttccctgatgaacacccaggctccaccatattctatggcccccgcgatggttaactcatccgcagcgagcgtgggactggccgacatgatgtcccccggcgagagtaagctgccattgcccttgaaggctgacggtaaagaggagggaaccccacagcccgagagcaagtctaagaaatcatcatcctctacaacaaccggagagaagataacaaaggtctacgagctgggaaatgaacctgagcgcaagctgtgggttgaccgatatctcacgtttatggaggaacgtggctccccggtgagctctttgccagctgtgggtaagaaaccgctggatctgttccggctgtacgtctgcgtcaaggaaatcggcggactggcccaggtgaacaaaaataaaaagtggcgtgagctggcaacaaatctcaatgttggcacatcatcatccgctgcatcatcattgaagaaacagtacatacagtacttatttgcatttgagtgcaagatcgagcgcggggaagagccaccacctgaagtgttcagcacaggggacacaaaaaagcagcccaagttgcaaccacccagccctggcaagtggcggaggtgctcccattggcctaggaaggcacaggctccagggttaggtggatccggcaaggtggtctctcagagcggacagcaggggacttgggacttctag

SEQ ID NO: 193514 - DNA, 6711 bp, Artificial Sequence
  derived and/or modified sequence
atggcccacaatgctggagctgctgctgctgctggcacccacagcgccaagagcggcggcagcgaggccgccctgaaggagggcggcagcgctgctgccctgagcagcagcagcagcagcagcgctgctgctgctgctgccagcagcagcagcagcagcggccctggcagcgccatggagaccggcctgctgcccaaccacaagctgaagacagtgggggaggccccagctgccccaccccaccagcagcaccaccaccaccaccacgcccaccaccaccaccaccacgcccaccacctgcaccaccaccacgccctgcagcagcagctgaaccagttccagcagcagcagcagcagcagcagcagcagcagcagcagcagcagcagcagcagcaccccatcagcaacaacaacagcctgggcggggccggcggcggggccccccagcccggccctgacatggagcagccccagcacggcggggccaaggacagcgctgctgggggccaggccgaccccccaggcccccccctgctgagcaagccaggagatgaagatgatgccccacccaagatgggagagcctgctgggggccgctatgagcaccctggcctgggcgccctgggcacccagcagccccctgtggccgtgcctgggggcggcggcggccctgctgctgtgcctgagttcaacaactactacggcagcgctgccccagccagcggcggccctgggggccgggccggcccctgctttgaccagcacggcggccagcagagccctggcatgggcatgatgcacagcgccagcgctgctgctgctggggcccctggctccatggaccccctgcagaacagccatgagggctaccccaacagccagtgcaaccactacccaggctacagcaggcctggggccggcggcggcggcggcggcggcggcggcggcggcggcggcagcggcggcggcggcggcggcggcggggccggggccggcggggccggggccggggctgtggccgctgctgctgctgctgctgctgctgctgctgggggcggcggcggcggcggctacggcggcagcagcgctggctatggagtgctgagcagcccccggcagcagggcggcggcatgatgatgggccctgggggcggcggggccgccagcctgagcaaggctgctgctggcagcgctgctgggggcttccagagatttgctggccagaaccagcaccccagcggggccacccccaccctgaaccagctgctgaccagccccagccccatgatgaggagctatggaggcagctacccagagtacagcagccccagcgcccctcctcctccacccagccagccccagagccaggccgctgctgctggagctgctgctgggggccagcaggccgctgctggcatgggcctgggcaaggacatgggcgcccagtatgctgctgccagccctgcctgggccgccgcccagcagaggagccacccagccatgagccctggcaccccaggccccaccatgggccgcagccagggcagccccatggaccccatggtgatgaagaggccccagctgtatggcatgggcagcaacccccacagccagccccagcagagcagcccctacccaggcggcagctatggccccccaggcccccagcgctaccccatcggcatccagggccgcacccctggggccatggccggcatgcagtacccccagcagcagatgccaccccagtatggccagcagggcgtgtctggctactgccagcagggccagcagccctactacagccagcagccccagcccccccacctgcccccccaggcccagtacctgcccagccagagccagcagcgctaccagccccagcaggacatgagccaggagggctacggcaccaggagccagccccccctggcccctgggaagcccaaccacgaggacctgaacctgatccagcaggagcggcccagcagcctgcctgacctgagcggcagcattgatgacctgcccactggaacagaggccaccctgagcagcgctgtgtctgccagcggcagcaccagcagccagggcgaccagagcaacccagcccagagccccttcagcccccacgccagcccccacctgagcagcatccctgggggccccagccccagccctgtgggcagccctgtgggcagcaaccagagccgcagcggccccatcagccctgccagcatccctggcagccagatgccaccccagcccccaggcagccagagcgagagcagcagccacccagccctgagccagagccccatgccccaggagcggggcttcatggccggcacccagaggaacccccagatggcccagtatggcccccagcagacaggccccagcatgagcccccaccccagccctgggggccagatgcatgctggcatcagcagcttccagcagagcaacagcagcggcacctacggcccccagatgagccagtatggcccccagggcaactacagccggcccccagcctacagcggcgtgcccagcgccagctacagcggccctggccctggcatgggcatcagcgccaacaaccagatgcacggccagggccccagccagccctgtggggctgtgcccctgggccgcatgcccagcgctggcatgcagaaccggcccttccctggcaacatgagctccatgacccccagcagccctggcatgagccagcagggcggccctggcatgggcccccccatgcccaccgtgaacaggaaggcccaggaggccgctgctgctgtgatgcaggccgccgccaacagcgcccagagccggcagggcagcttccctggcatgaaccagagcggcctgatggccagcagcagcccctacagccagcccatgaacaacagcagcagcctgatgaacacccaggccccaccctacagcatggccccagccatggtgaacagcagcgctgcctctgtgggcctggccgacatgatgagccctggagagagcaagctgcccctgcccctgaaggcagatggcaaggaggagggcaccccccagcctgagagcaagagcaagaagagcagcagcagcaccaccaccggggagaagatcaccaaggtgtatgagctgggcaatgaacctgagaggaagctgtgggtggaccgctacctgaccttcatggaggagcggggcagccctgtgagcagcctgcctgctgtgggcaagaagcccctggacctcttccggctgtatgtgtgtgtgaaggagattggaggcctggcccaggtgaacaagaacaagaagtggagggagctggccaccaacctgaatgtgggcaccagcagcagcgctgccagcagcctgaagaagcagtacatccagtacctgtttgcctttgagtgcaagattgagcggggggaggagcccccacctgaggtgttcagcactggagacaccaagaagcagcccaagctgcagccccccagccctgccaacagcggcagcctgcagggcccccagaccccccagagcacaggcagcaacagcatggccgaggtgcctggggacctgaagccacccaccccagccagcacccctcatggccagatgacccccatgcagggcggccgcagcagcaccatctctgtgcatgaccccttcagtgatgtgtctgacagcagcttccccaagaggaacagcatgaccccaaatgccccctaccagcagggcatgtccatgccagatgtgatgggccgcatgccctatgagcccaacaaggacccctttggaggcatgaggaaggtgcccggcagcagcgagcccttcatgacccagggccagatgcccaacagctccatgcaggacatgtacaaccagagccccagcggggccatgagcaacctgggcatgggccagaggcagcagttcccctacggggccagctatgacagaagacatgagccctacggccagcagtacccaggccagggcccccccagcggccagcccccctatggaggccaccagcccggcctgtacccccagcagcccaactacaagaggcacatggatggcatgtatggccccccagccaagagacatgaaggagacatgtacaacatgcagtacagcagccagcagcaggagatgtacaaccagtatggaggcagctacagcggccctgacagaagacccatccagggccagtacccctacccctacagccgggagaggatgcagggccctggccagatccagacccacggcatccccccccagatgatgggcggccccctgcagagcagcagcagcgagggcccccagcagaacatgtgggccgccagaaatgacatgccctacccctaccagaaccggcagggccctgggggccccacccaggccccaccctacccaggcatgaacagaacagatgacatgatggtgcctgaccagaggatcaaccacgagagccagtggcccagccacgtgtcccagaggcagccctacatgagcagcagcgcctccatgcagcccatcacccggcccccccagcccagctaccagaccccacccagcctgcccaaccacatcagccgggcccccagccctgccagcttccagaggagcctggagaacaggatgagccccagcaagagccccttcctgcccagcatgaagatgcagaaggtgatgcccaccgtgcccaccagccaggtgacaggccccccaccccagcccccacccatccggcgggagatcaccttccccccaggctctgtggaggccagccagcctgtgctgaagcagaggaggaagatcaccagcaaggacatcgtgaccccagaggcctggagggtgatgatgagcctgaagagcggcctgctggccgagagcacctgggccctggacaccatcaacatcctgctgtatgatgacagcacagtggccaccttcaacctgagccagctgagcggcttcctggagctgctggtggagtacttcaggaagtgcctgattgacatcttcggcatcctgatggagtatgaggtgggggaccccagccagaaggccctggaccacaatgctgccaggaaggatgacagccagagcctggctgatgattctgggaaggaggaggaggatgctgaatgtattgatgatgatgaggaggatgaagaagatgaggaggaggacagcgagaagacagaaagtgatgagaagagcagcatcgccctgacagccccagatgctgctgctgaccccaaggagaagcccaagcaggccagcaagtttgacaagctgcccatcaagatcgtgaagaagaacaacctgtttgtggtggacagaagtgacaagctgggccgggtgcaggagttcaacagcggcctgctgcactggcagctgggcggcggggacaccacagagcacatccagacccactttgagagcaagatggagatcccccccaggagaagacctcctccacccctgagcagcgctggcaggaagaaggagcaggagggcaaaggagacagcgaggagcagcaggagaagagcatcatcgccaccattgatgatgtgctgagcgcccggcctggggccctgcctgaagatgccaaccctggcccccagacagagagcagcaagttccccttcggcatccagcaggccaagagccacaggaacatcaagctgctggaggatgagcccaggagcagagatgagacccccctgtgcaccatcgcccactggcaggacagcctggccaagcgctgcatctgtgtgagcaacatcgtgcgcagcctgagctttgtgcctggaaatgatgctgagatgagcaagcaccctggcctggtgctgatcctgggcaagctgatcctgctgcaccacgagcaccctgagaggaagagggccccccagacctatgagaaggaggaggatgaggacaagggcgtggcctgcagcaaggatgagtggtggtgggactgcctggaggtgctgcgggacaacaccctggtgaccctggccaacatcagcggccagctggacctgagcgcctacacagagagcatctgcctgcccatcctggatggcctgctgcactggatggtgtgccccagcgctgaggcccaggaccccttccccaccgtgggccccaacagcgtgctgagcccccagaggctggtgctggagaccctgtgcaagctgagcatccaggacaacaacgtggacctgatcctggccaccccacccttcagccggcaggagaagttctacgccaccctggtgcgctacgtgggggacaggaagaaccctgtgtgccgggagatgtccatggccctgctgagcaacctggcccagggagatgccctggccgcccgggccatcgctgtgcagaagggcagcatcggcaacctgatctccttcctggaggatggagtgaccatggcccagtaccagcagagccagcacaacctgatgcacatgcagcccccacccctggagccccccagcgtggacatgatgtgcagagctgccaaggccctgctggccatggcccgggtggatgaaaatagaagtgagttcctgctgcacgagggccgcctgctggacatcagcatctctgctgtgctgaacagcctggtggccagcgtcatctgtgatgtgctcttccagatcggccagctgtag

SEQ ID NO: 193515 - DNA, 822 bp, Artificial Sequence
  derived and/or modified sequence
gctgctgtgatgcaggccgccgccaacagcgcccagagccggcagggcagcttccctggcatgaaccagagcggcctgatggccagcagcagcccctacagccagcccatgaacaacagcagcagcctgatgaacacccaggccccaccctacagcatggccccagccatggtgaacagcagcgctgcctctgtgggcctggccgacatgatgagccctggagagagcaagctgcccctgcccctgaaggcagatggcaaggaggagggcaccccccagcctgagagcaagagcaagaagagcagcagcagcaccaccactggagagaagatcaccaaggtgtatgagctgggcaatgaacctgagaggaagctgtgggtggaccgctacctgaccttcatggaggagcggggcagccctgtgagcagcctgcctgctgtgggcaagaagcccctggacctcttccggctgtatgtgtgtgtgaaggagatcggcggcctggcccaggtgaacaagaacaagaagtggagggagctggccaccaacctgaatgtgggcaccagcagcagcgctgccagcagcctgaagaagcagtacatccagtacctgtttgcctttgagtgcaagattgaaagaggagaggagcccccacctgaggtgttcagcactggagacaccaagaagcagcccaagctgcagccccccagccctgggaagtggaggcgctgcagccactggcccaggaaggcccaggcccctggcctgggcggcagcggcaaggtggtgtcccagagcggccagcagggcacctgggacttctag

SEQ ID NO: 193516 - DNA, 6711 bp, Artificial Sequence
  derived and/or modified sequence
atggcccacaacgccggcgccgccgccgccgccggcacccacagcgcaaagtcgggtggctctgaagccgcccttaaagaaggtggcagcgccgccgccctgagcagtagcagcagttcctccgctgctgccgcggcggcaagcagctcgagcagctctggacctgggagcgccatggagaccggtctcctgccaaaccataaactgaaaaccgttggagaggcccccgctgctcccccgcaccaacagcatcaccatcaccaccacgcccatcatcaccaccatcatgcccaccacctgcaccaccatcacgctcttcagcaacagctcaaccagttccagcagcagcaacaacaacagcagcagcagcaacagcagcagcagcagcagcagcaccccatctccaataataatagcctaggcggcgcgggaggtggagcaccacagcctggccccgacatggagcagccccagcatggcggggcgaaggacagtgcagccgggggacaggctgacccccccggcccaccacttctttctaagccaggggacgaagacgatgcccccccaaagatgggagaacccgctggggggcggtacgaacaccctggactgggagccctgggtacccagcagccaccagtggccgtgccaggaggcggaggcgggccagctgcggtccccgaatttaacaactactatggctcggccgctccggcaagcgggggacctgggggcagagcggggccttgtttcgaccagcacggcggccagcagtccccaggcatgggcatgatgcactcggcatcagcagctgccgctggggctcccggatccatggaccccttgcaaaacagtcacgagggatacccaaatagtcagtgcaatcattatcccggttacagcaggccaggcgccgggggcggtgggggcggcggtggcggcgggggtggaggttccggcggaggtggtggaggggggggggctggggctgggggagccggagctggggctgtggccgccgccgctgccgcggccgctgctgctgctgggggcgggggaggaggtggctacggcggatccagcgctgggtacggcgttctctcctctccgcggcagcaaggaggcggtatgatgatggggcctggtggcggaggcgccgcaagcttgtcgaaagccgcagcagggtctgctgctggcggtttccaacgcttcgccggccaaaatcagcacccatccggggctactcccaccctgaaccagttgctgacctccccaagtccgatgatgcgatcttatggaggatcatatcctgaatactcaagcccatccgcccctccaccacccccttcccagccccagtcacaggcagcagccgccggagctgccgcgggcgggcaacaagctgcggcggggatggggctagggaaggacatgggggctcagtacgctgccgcatctcccgcttgggctgcagcccaacaacggagccacccagccatgagccccggcactcccggcccaaccatgggtcggagtcaaggctcgccgatggatccaatggtgatgaaacgccctcaactgtatgggatggggtccaatccacactcccaaccccagcagtctagcccgtatcctggcggtagctatgggcctcccggcccgcagagatatccaatcggtatacagggaagaacacctggggccatggccgggatgcaatatccacagcagcagatgcccccccagtacggccaacagggtgtcagtggatactgccagcagggccagcagccctactacagtcagcagccacagccaccccatctgcctccccaggcacagtacctcccttctcagagccagcagagatatcagccgcagcaagacatgtcccaagaagggtatggcaccaggtcacagccgccgctcgctcccggaaagcccaaccacgaggacttgaatctgatccaacaggagagaccttcttccctccccgatcttagcggctctattgacgacctccccactggcactgaggcaaccctgtctagcgcagttagtgcctcaggttctaccagtagccagggggatcagtctaaccccgctcagtcgcctttttctccccatgcatcacctcacctgtccagtatccccggagggccgtccccctccccggtgggttctccagttggttccaaccagtcccggtccggacccatcagccctgccagtattcccggctcccagatgccccctcagccccctggcagccagagcgagagtagctcccatcccgccctgtcacagagccctatgcctcaggagcgagggtttatggcaggcacacagcggaacccacagatggcccagtacgggccccagcagacaggccccagtatgagccctcatccttcccccggcgggcagatgcacgcagggatctcatccttccagcagtccaactcttctgggacctatggaccccagatgtcacagtacggtcctcagggcaattattcgcgtccccctgcctattctggggtgcccagtgcctcatacagtggtcccggccccggtatgggcatttctgcaaataatcagatgcacggccagggaccctcacagccatgcggagctgtcccccttggccgaatgcccagtgccggaatgcagaatcgccccttccccggaaatatgtcatccatgaccccctctagtcctggtatgagtcagcagggcgggcccggtatgggccctcccatgcctacagttaaccgaaaggcgcaggaagccgcggctgctgtgatgcaggcggcggcgaacagcgcgcagtccaggcaggggagctttcctggcatgaatcagagcggactgatggcatcaagctcaccttactctcaacccatgaataacagtagttcactgatgaacacacaggcccctccgtactccatggctcctgcaatggtgaattcatccgctgcttccgtggggctggcagacatgatgtccccgggcgagtccaaacttccgttgcctctgaaagccgacggcaaggaggaggggacacctcagccagaatcaaagagcaagaagagcagtagctcaactacaacaggagaaaaaataacaaaagtttacgagcttggcaacgagcctgaacggaagctctgggttgataggtacttaactttcatggaagaaaggggcagtccggtatcaagtctgcccgctgtggggaagaagcctctggacctctttcgcttgtatgtctgtgtcaaagagattgggggactggcccaagtgaataaaaataaaaagtggagggagctggctacaaacctcaatgtgggcacctcatcctctgccgcctcttcacttaagaagcaatatattcaatatctgttcgcatttgagtgtaagatcgagagaggggaagagccacctcccgaggttttttccactggtgataccaagaagcagccaaagctgcagcccccatcacctgcaaattccggctcactgcagggccctcaaactcctcagagcactggctccaacagtatggccgaggtccccggcgacttaaagccgcccaccccagcaagcacacctcacggtcagatgacccctatgcaagggggccggtcaagcactataagtgtgcacgaccccttctcagatgtctctgatagcagctttccaaaacggaattcaatgactcccaatgccccttatcagcagggaatgagcatgcctgacgtgatgggacggatgccttacgagccaaacaaggacccttttggagggatgagaaaggtgcccggctcctcagagcccttcatgacacagggccaaatgcccaatagttctatgcaagacatgtacaaccagtctccgtcaggagccatgagtaaccttgggatgggccagcggcagcagttcccgtatggcgccagctatgatagaaggcacgagccgtatggtcaacaataccctggccagggcccaccatcaggtcagcctccttacggcggtcaccagccggggctatatccccagcagcctaactataaaagacacatggacggaatgtacggacctcctgctaaacgccacgaaggcgacatgtataatatgcagtattcttcccaacaacaggagatgtacaatcaatacggcggcagctactcgggacccgataggagacctatccaggggcagtacccgtatccttatagccgcgagcggatgcaaggcccaggtcagattcagacccacggcataccacctcagatgatggggggccctctccagtcatcctcttccgaggggccccagcagaatatgtgggccgcgaggaacgacatgccgtatccttaccagaacagacaaggacctggaggtcctactcaggctccgccatacccaggaatgaatagaaccgacgatatgatggtgcccgatcagcggattaatcacgagtcacaatggccttcccacgtttcccaaaggcagccttacatgtcatcaagcgccagcatgcagccaatcacacgtcccccccaaccaagctatcagaccccaccatccctgcccaaccatatctctagagctccctctccggcatctttccagcgtagtctcgagaatcggatgtcccctagtaagtccccgttcttaccatcgatgaagatgcagaaggttatgcctactgtcccgacttcccaggtcactggccctccacctcagcccccgcctatccgccgggaaatcacttttccacccggctccgtggaggcatctcagccagtgttaaagcagagaagaaaaattacgtcaaaagacattgtgacacctgaggcctggcgggtgatgatgtcgttgaaatctgggctcttagcagaaagtacatgggccctagacacaatcaacattctgctctacgatgactccactgtagctacgtttaacttatcccagttgtcaggcttccttgagctgctcgtggagtatttcagaaagtgtctgatcgacatattcgggatcctcatggaatacgaagtcggggacccctcccagaaagccctggatcataatgctgccaggaaggacgattcccagagccttgctgacgactcgggtaaagaggaggaagatgccgaatgtattgatgatgacgaggaggacgaggaagatgaggaggaggactctgaaaagactgaatctgacgagaagtccagtatcgcgcttactgcccctgatgcagcagccgaccctaaagaaaaaccaaagcaggcttccaagttcgacaagctgcccatcaagattgtgaaaaagaataacttgttcgtagttgaccgcagtgataagctgggtcgagtgcaggaatttaactctggcctgcttcattggcagctgggaggaggcgatacaacagaacatatccaaacacacttcgaaagcaaaatggagatccccccccgacggagacctccgcccccactcagtagtgccggtagaaaaaaggaacaagaaggaaaaggagattctgaggagcaacaggagaaaagtattattgcaacgattgacgatgtgctcagcgcccggccgggagccttgcccgaggatgctaaccccggaccgcagacagagagcagtaagttccctttcggtattcaacaagctaagtcacataggaacatcaaactgttagaagatgagccacgctctagagatgagactccgctctgcaccatcgcccattggcaggatagtctggccaaacggtgtatctgcgtgagcaatattgtgcggagcctctccttcgtgcctggtaacgatgctgagatgtccaagcaccctggactggtcttaatcctcggcaagttgatactcttgcatcatgaacatcccgagcgcaaaagggccccccagacttacgagaaagaggaggatgaggataagggggttgcttgctcaaaggatgaatggtggtgggactgcctcgaggttcttcgcgacaatacactcgtgacccttgctaatatctccggacaactggatctgagcgcttatacagagtctatatgtctccctatcttagacggtcttctccactggatggtttgtccttcagcagaagcccaggacccattccccactgtcggcccgaactccgtcctgagcccccagcgcctcgtgctggaaacactgtgtaaactaagcatacaggacaataacgtagacctgattctcgccaccccaccattttcacggcaggaaaagttctacgctaccctggtgaggtatgttggagacaggaagaatcccgtctgtcgggaaatgtcaatggcgttgctgagcaacctggcgcagggtgacgcattggctgccagagctatagcagtgcagaaggggagtattgggaacctgattagctttctggaagacggtgtaaccatggcgcaataccagcagtcacagcataaccttatgcatatgcagcctccccccctggagcctccaagcgtcgacatgatgtgcagagctgccaaggccttgctggccatggcccgcgtggacgagaaccgctcagaattcttactccacgagggcagactgctggatatctctatcagtgccgttcttaactccttggtcgctagtgtaatctgcgacgtactttttcaaataggacaactgtag

SEQ ID NO: 193517 - DNA, 822 bp, Artificial Sequence
  derived and/or modified sequence
gccgccgtgatgcaggccgccgccaacagcgcccagagccggcagggatcctttcccggtatgaatcagagcgggttaatggcgagctcatcaccttattcccaacccatgaataatagctcaagcttaatgaacacccaagcccctccctactctatggcacctgctatggtgaattcaagtgctgcttccgtcggcctggccgacatgatgtccccaggcgaatcaaaactgccgctgcccctcaaggctgatggcaaggaggaggggacacctcagcccgagtccaagtcgaaaaaatcatcctcttctacaaccactggcgaaaaaataaccaaggtttacgagcttggaaatgaacccgagcggaagctgtgggttgatcgatacctgaccttcatggaggaacgcggctctccagtgtcttcactgcctgcagtggggaagaaaccccttgatctgttcaggctgtacgtttgcgtgaaggagataggcggcctggcacaggttaataagaataagaagtggagggagctcgcaacaaacctgaacgtcggtacttcatcatctgctgctagctctctgaaaaaacagtacattcaatacttattcgcctttgagtgtaagatagagcggggcgaagagcctccaccggaggtgtttagcaccggggacacaaagaaacagccaaagcttcagcctccctctccaggcaagtggcgcaggtgctctcactggccgagaaaggcacaagcccctgggctcggtggctccggcaaagtagtctcccaatcggggcagcaggggacatgggatttctag

SEQ ID NO: 193518 - DNA, 7971 bp, Artificial Sequence
  derived and/or modified sequence
catggcccataacgcgggcgccgcggccgccgccggcacccacagcgccaagagcggcggctccgaggcggctctcaaggagggtggaagcgccgccgcgctgtcctcctcctcctcctcctccgcggcggcagcggcggcatcctcttcctcctcgtcgggcccgggctcggccatggagacggggctgctccccaaccacaaactgaaaaccgttggcgaagcccccgccgcgccgccccaccagcagcaccaccaccaccaccatgcccaccaccaccaccaccatgcccaccacctccaccaccaccacgcactacagcagcagctaaaccagttccagcagcagcagcagcagcagcaacagcagcagcagcagcagcagcaacagcaacatcccatttccaacaacaacagcttgggcggcgcgggcggcggcgcgcctcagcccggccccgacatggagcagccgcaacatggaggcgccaaggacagtgctgcgggcggccaggccgaccccccgggcccgccgctgctgagcaagccgggcgacgaggacgacgcgccgcccaagatgggggagccggcgggcggccgctacgagcacccgggcttgggcgccctgggcacgcagcagccgccggtcgccgtgcccgggggcggcggcggcccggcggccgtcccggagtttaataattactatggcagcgctgcccctgcgagcggcggccccggcggccgcgctgggccttgctttgatcaacatggcggacaacaaagccccgggatggggatgatgcactccgcctccgccgccgccgccggggcccccggcagcatggaccccctgcagaactcccacgaagggtaccccaacagccagtgcaaccattatccgggctacagccggcccggcgcgggcggcggcggcggcggcggcggcggaggaggaggaggcagcggaggaggaggaggaggaggaggagcaggagcaggaggagcaggagcgggagctgtggcggcggcggccgcggcggcggcggcagcagcaggaggcggcggcggcggcggctatgggggctcgtccgcggggtacggggtgctgagctccccccggcagcagggcggcggcatgatgatgggccccgggggcggcggggccgcgagcctcagcaaggcggccgccggctcggcggcggggggcttccagcgcttcgccggccagaaccagcacccgtcgggggccaccccgaccctcaatcagctgctcacctcgcccagccccatgatgcggagctacggcggcagctaccccgagtacagcagccccagcgcgccgccgccgccgccgtcgcagccccagtcccaggcggcggcggcgggggcggcggcgggcggccagcaggcggccgcgggcatgggcttgggcaaggacatgggcgcccagtacgccgctgccagcccggcctgggcggccgcgcaacaaaggagtcacccggcgatgagccccggcacccccggaccgaccatgggcagatcccagggcagcccaatggatccaatggtgatgaagagacctcagttgtatggcatgggcagtaaccctcattctcagcctcagcagagcagtccgtacccaggaggttcctatggccctccaggcccacagcggtatccaattggcatccagggtcggactcccggggccatggccggaatgcagtaccctcagcagcagatgccacctcagtatggacagcaaggtgtgagtggttactgccagcagggccaacagccatattacagccagcagccgcagcccccgcacctcccaccccaggcgcagtatctgccgtcccagtcccagcagaggtaccagccgcagcaggacatgtctcaggaaggctatggaactagatctcaacctcctctggcccccggaaaacctaaccatgaagacttgaacttaatacagcaagaaagaccatcaagtttaccagatctgtctggctccattgatgacctccccacgggaacggaagcaactttgagctcagcagtcagtgcatccgggtccacgagcagccaaggggatcagagcaacccggcgcagtcgcctttctccccacatgcgtcccctcatctctccagcatcccggggggcccatctccctctcctgttggctctcctgtaggaagcaaccagtctcgatctggcccaatctctcctgcaagtatcccaggtagtcagatgcctccgcagccacccgggagccagtcagaatccagttcccatcccgccttgagccagtcaccaatgccacaggaaagaggttttatggcaggcacacaaagaaaccctcagatggctcagtatggacctcaacagacaggaccatccatgtcgcctcatccttctcctgggggccagatgcatgctggaatcagtagctttcagcagagtaactcaagtgggacttacggtccacagatgagccagtatggaccacaaggtaactactccagacccccagcgtatagtggggtgcccagtgcaagctacagcggcccagggcccggtatgggtatcagtgccaacaaccagatgcatggacaagggccaagccagccatgtggtgctgtgcccctgggacgaatgccatcagctgggatgcagaacagaccatttcctggaaatatgagcagcatgacccccagttctcctggcatgtctcagcagggagggccaggaatggggccgccaatgccaactgtgaaccgtaaggcacaggaggcagccgcagcagtgatgcaggctgctgcgaactcagcacaaagcaggcaaggcagtttccccggcatgaaccagagtggacttatggcttccagctctccctacagccagcccatgaacaacagctctagcctgatgaacacgcaggcgccgccctacagcatggcgcccgccatggtgaacagctcggcagcatctgtgggtcttgcagatatgatgtctcctggtgaatccaaactgcccctgcctctcaaagcagacggcaaagaagaaggcactccacagcccgagagcaagtcaaagaagtccagctcctccaccactactggggagaagatcacgaaggtgtacgagctggggaatgagccagagagaaagctctgggtcgaccgatacctcaccttcatggaagagagaggctctcctgtctcaagtctgcctgccgtgggcaagaagcccctggacctgttccgactctacgtctgcgtcaaagagatcgggggtttggcccaggttaataaaaacaagaagtggcgtgagctggcaaccaacctaaacgttggcacctcaagcagtgcagcgagctccctgaaaaagcagtatattcagtacctgtttgcctttgagtgcaagatcgaacgtggggaggagcccccgccggaagtcttcagcaccggggacaccaaaaagcagcccaagctccagccgccatctcctgctaactcgggatccttgcaaggcccacagaccccccagtcaactggcagcaattccatggcagaggttccaggtgacctgaagccacctaccccagcctccacccctcacggccagatgactccaatgcaaggtggaagaagcagtacaatcagtgtgcacgacccattctcagatgtgagtgattcatccttcccgaaacggaactccatgactccaaacgccccctaccagcagggcatgagcatgcccgatgtgatgggcaggatgccctatgagcccaacaaggacccctttgggggaatgagaaaagtgcctggaagcagcgagccctttatgacgcaaggacagatgcccaacagcagcatgcaggacatgtacaaccaaagtccctccggagcaatgtctaacctgggcatggggcagcgccagcagtttccctatggagccagttacgaccgaaggcatgaaccttatgggcagcagtatccaggccaaggccctccctcgggacagccgccgtatggagggcaccagcccggcctgtacccacagcagccgaattacaaacgccatatggacggcatgtacgggcccccagccaagcgccacgagggcgacatgtacaacatgcagtacagcagccagcagcaggagatgtacaaccagtatggaggctcctactcgggcccggaccgcaggcccatccagggccagtacccgtatccctacagcagggagaggatgcagggcccggggcagatccagacacacggaatcccgcctcagatgatgggcggcccgctgcagtcgtcctccagtgaggggcctcagcagaatatgtgggcagcacgcaatgatatgccttatccctaccagaacaggcagggccctggcggccctacacaggcgcccccttacccaggcatgaaccgcacagacgatatgatggtacccgatcagaggataaatcatgagagccagtggccttctcacgtcagccagcgtcagccttatatgtcgtcctcagcctccatgcagcccatcacacgcccaccacagccgtcctaccagacgccaccgtcactgccaaatcacatctccagggcgcccagcccagcgtccttccagcgctccctggagaaccgcatgtctccaagcaagtctccttttctgccgtctatgaagatgcagaaggtcatgcccacggtccccacatcccaggtcaccgggccaccaccccaaccacccccaatcagaagggagatcacctttcctcctggctcagtagaagcatcacaaccagtcttgaaacaaaggcgaaagattacctccaaagatatcgttactcctgaggcgtggcgtgtgatgatgtcccttaaatcaggtcttttggctgagagtacgtgggctttggacactattaatattcttctgtatgatgacagcactgttgctactttcaatctctcccagttgtctggatttctcgaacttttagtcgagtactttagaaaatgcctgattgacatttttggaattcttatggaatatgaagtgggagaccccagccaaaaagcacttgatcacaacgcagcaaggaaggatgacagccagtccttggcagacgattctgggaaagaggaggaagatgctgaatgtattgatgacgacgaggaagacgaggaggatgaggaggaagacagcgagaagacagaaagcgatgaaaagagcagcatcgctctgactgccccggacgccgctgcagacccaaaggagaagcccaagcaagccagtaagttcgacaagctgccaataaagatagtcaaaaagaacaacctgtttgttgttgaccgatctgacaagttggggcgtgtgcaggagttcaatagtggccttctgcactggcagctcggcgggggtgacaccaccgagcacattcagactcactttgagagcaagatggaaattcctcctcgcaggcgcccacctccccccttaagctccgcaggtagaaagaaagagcaagaaggcaaaggcgactctgaagagcagcaagagaaaagcatcatagcaaccatcgatgacgtcctctctgctcggccaggggcattgcctgaagacgcaaaccctgggccccagaccgaaagcagtaagtttccctttggtatccagcaagccaaaagtcaccggaacatcaagctgctggaggacgagcccaggagccgagacgagactcctctgtgtaccatcgcgcactggcaggactcgctggctaagcgatgcatctgtgtgtccaatattgtccgtagcttgtcattcgtgcctggcaatgatgccgaaatgtccaaacatccaggcctggtgctgatcctggggaagctgattcttcttcaccacgagcatccagagagaaagcgagcaccgcagacctatgagaaagaggaggatgaggacaagggggtggcctgcagcaaagatgagtggtggtgggactgcctcgaggtcttgagggataacacgttggtcacgttggccaacatttccgggcagctagacttgtctgcttacacggaaagcatctgcttgccaattttggatggcttgctgcactggatggtgtgcccgtctgcagaggcacaagatccctttccaactgtgggacccaactcggtcctgtcgcctcagagacttgtgctggagaccctctgtaaactcagtatccaggacaataatgtggacctgatcttggccactcctccatttagtcgtcaggagaaattctatgctacattagttaggtacgttggggatcgcaaaaacccagtctgtcgagaaatgtccatggcgcttttatcgaaccttgcccaaggggacgcactagcagcaagggccatagctgtgcagaaaggaagcattggaaacttgataagcttcctagaggatggggtcacgatggcccagtaccagcagagccagcacaacctcatgcacatgcagcccccgcccctggaaccacctagcgtagacatgatgtgcagggcggccaaggctttgctagccatggccagagtggacgaaaaccgctcggaattccttttgcacgagggccggttgctggatatctcgatatcagctgtcctgaactctctggttgcatctgtcatctgtgatgtactgtttcagattgggcagttatgacataagtgagaaggcaagcatgtgtgagtgaagattagagggtcacatataactggctgttttctgttcttgtttatccagcgtaggaagaaggaaaagaaaatctttgctcctctgccccattcactatttaccaattgggaattaaagaaataattaatttgaacagttatgaaattaatatttgctgtctgtgtgtataagtacatcctttggggttttttttttctcttttttttaaccaaagttgctgtctagtgcattcaaaggtcactttttgttcttcacagatctttttaatgttctttcccatgttgtattgcatttttgggggaagcaaattgactttaaagaaaaaagttgtggcaaaagatgctaagatgcgaaaatttcaccacactgagtcaaaaaggtgaaaaattatccatttcctatgcgttttactcctcagagaatgaaaaaaactgcatcccatcacccaaagttctgtgcaatagaaatttctacagatacaggtataggggctcaaggaggtatgtcggtcagtagtcaaaactatgaaatgatactggtttctccacaggaatatggttccattaggctgggagcaaaaacaatgttttttaagattgagaatacatacctgacaacgatccggaaactgctcctcaccactcccgtcatgcctgctgtcggcgtttgaccttccacgtgacagttcttcacaattcctttcatcattttttaaatattttttttactgcctatgggctgtgatgtatatagaagttgtacattaaacataccctcatttttttcttttcttttttttttttttttttagtacaaagttttagtttctttttcatgatgtggtaactacgaagtgatggtagatttaaataattttttatttttattttatatattttttcattagggccatatctccaaaaaaagaaagaaaaaatacaaaaaacaaaaacaaaaaaaaaagagggtaatgtacaagtttctgtatgtataaagtcatgctcgatttcaggagagcagctgatcacaatttgcttcatgaatcaaggtgtggaaatggttatatatggattgatttagaaaatggttaccagtacagtcaaaaaagagaaaatgaaaaaaatacaactaaaaggaagaaacacaacttcaaagatttttcagtgatgagaatccacatttgtatttcaagataatgtagtttaaaaaaaaaaaaaagaaaaaaa

SEQ ID NO: 193519 - DNA, 2887 bp, Artificial Sequence
  derived and/or modified sequence
gcagcagtgatgcaggctgctgcgaactcagcacaaagcaggcaaggcagtttccccggcatgaaccagagtggacttatggcttccagctctccctacagccagcccatgaacaacagctctagcctgatgaacacgcaggcgccgccctacagcatggcgcccgccatggtgaacagctcggcagcatctgtgggtcttgcagatatgatgtctcctggtgaatccaaactgcccctgcctctcaaagcagacggcaaagaagaaggcactccacagcccgagagcaagtcaaagaagtccagctcctccaccactactggggagaagatcacgaaggtgtacgagctggggaatgagccagagagaaagctctgggtcgaccgatacctcaccttcatggaagagagaggctctcctgtctcaagtctgcctgccgtgggcaagaagcccctggacctgttccgactctacgtctgcgtcaaagagatcgggggtttggcccaggttaataaaaacaagaagtggcgtgagctggcaaccaacctaaacgttggcacctcaagcagtgcagcgagctccctgaaaaagcagtatattcagtacctgtttgcctttgagtgcaagatcgaacgtggggaggagcccccgccggaagtcttcagcaccggggacaccaaaaagcagcccaagctccagccgccatctcctggtaagtggcggcgctgcagtcactggcccaggaaagcccaggcgcctggcctgggaggttccgggaaggtggtttcacagtcaggccaacagggaacttgggacttttgagaggtggggggttcctgtgtcgttttgtttatttaattggacgcccactggcagtgttaagggatgagagaattaaatctgggatatggccatttctggttgacacttggaaggcaccccttcttttgctttaccttaatcaaaacaggctttcgaattctaagccatatacgtttattgcttatacaagtattcaaaaagattccatctacctctacacaaaataaagatcccccagtggccagtttgaatacatgtgcacttctaggaaatgccaccctacaggttcgacagctcgagctcccccgccctctttcggaaatcctcagatttgaactttagtaaaatgaagcctgggcttcgtttctaatgtcccctacccagcaagttctcacttctagggaatttaacaagctgtcgtggtaaggatccacacggccttgttttggaaacaggtggtcttttgcagccttgttctggaagtcaggggtcttaggaatgggtgcagcgctggccaccaacacgctcgcaggccgagccacatcagtgacgcctgctggctcccttccctctcctccccactgacagagaccctcccattcctttcagctcccctgccagccttcgttctaccgtttggctttcagatttgaaatgacaaaatcatatattctgataaatgcaatagtagagaggggaagaaattggcaccttagtgctgggtggtgaccttactccagtagatccgaccattctcttatctgtgtctgcctcgcagtcagcgaccttcagcacattagcctcactgttcctggtccctgtctatgagatgtggctgcacccaccgctcctgtacacagcttgttctgagcgtggctggcagcccatgtttcctgagcacttccagtgtgctgggcccttttctaagtgctatcatttcattttcacatcagccctgtgacattgatactattttaaaatccatgagaaaatgaaggtctcgtggaatctaagtacttgcccaaagccaactagctggggagtagaaggtcttatctggggcatctggtgctacagtatacacgatacccaccagacacctctggctgtattgaaaatacctttgtaatatgtgaaatgtttacacatagaagccagagaaagaggtcatttcatttttaatgatttcctctagctgctgtctggatggcaaagctgatatccaaggttgctaatcaagggatctcacataaatacgttttaggcccaaagtgcacttgtagtgaatatacctagaattacatctgtaggctctaaaaacaagtagaaatcctcgctaacctcatccttaaagattcaaaggctttaccaactcaggtgtcccttaaaaactgggaaatctaattttaaaaatctcacaacattacatccagttcacagagtaaaacaagctgcctgtgaacagctctgaaactatttttccaaaataaaaacccagtggggcgtagggaccaaagtggtgatgtctgtaaagatctaagggtacattttatttgccaggaaagaactcgtgtcactgaatgggctgcacttgtgtatggagaatagctctcccagtgtgcatcagcttcaggacgggggccctgctgaggcgtatagatccttcagaaagtggagggcctgttctcttaacagccagccgttcccttttccccttttttaaactgtcatttttatggcaacattatcattttaactacacaaaagagcttggattgcaaatggactcctggtatacattcttctcagtagtccagatggagccgagggcctgtgacacaggaggcagtggaaggaaagcctcctggtctcgtccagccccgagagcgcgtgcagggggctccaggcacacacaggcgtctgggggtcgcaggcagaggcaccctggtcttcagaagcctctcgattcactgccacccacacagcaggtggcctctccgattccagtcccatcattagggaaagtgtctggaaacatttttgttgttaaaggaaaataaaatta

SEQ ID NO: 193520 - DNA, 2921 bp, Artificial Sequence
  derived and/or modified sequence
cggccgccgccggcacccacagcgccaagagcggcggctccgaggcggctctcaaggagggtggaagcgccgccgcgctgtcctcctcctcctcctcctccgcggcggcagcggcggcatcctcttcctcctcgtcgggcccgggctcggccatggagacggggctgctccccaaccacaaactgaaaaccgttggcgaagcccccgccgcgccgccccaccagcagcaccaccaccaccaccatgcccaccaccaccaccaccatgcccaccacctccaccaccaccacgcactacagcagcagctaaaccagttccagcagcagcagcagcagcagcaacagcagcagcagcagcagcagcaacagcaacatcccatttccaacaacaacagcttgggcggcgcgggcggcggcgcgcctcagcccggccccgacatggagcagccgcaacatggaggcgccaaggacagtgctgcgggcggccaggccgaccccccgggcccgccgctgctgagcaagccgggcgacgaggacgacgcgccgcccaagatgggggagccggcgggcggccgctacgagcacccgggcttgggcgccctgggcacgcagcagccgccggtcgccgtgcccgggggcggcggcggcccggcggccgtcccggagtttaataattactatggcagcgctgcccctgcgagcggcggccccggcggccgcgctgggccttgctttgatcaacatggcggacaacaaagccccgggatggggatgatgcactccgcctccgccgccgccgccggggcccccggcagcatggaccccctgcagaactcccacgaagggtaccccaacagccagtgcaaccattatccgggctacagccggcccggcgcgggcggcggcggcggcggcggcggcggaggaggaggaggcagcggaggaggaggaggaggaggaggagcaggagcaggaggagcaggagcgggagctgtggcggcggcggccgcggcggcggcggcagcagcaggaggcggcggcggcggcggctatgggggctcgtccgcggggtacggggtgctgagctccccccggcagcagggcggcggcatgatgatgggccccgggggcggcggggccgcgagcctcagcaaggcggccgccggctcggcggcggggggcttccagcgcttcgccggccagaaccagcacccgtcgggggccaccccgaccctcaatcagctgctcacctcgcccagccccatgatgcggagctacggcggcagctaccccgagtacagcagccccagcgcgccgccgccgccgccgtcgcagccccagtcccaggcggcggcggcgggggcggcggcgggcggccagcaggcggccgcgggcatgggcttgggcaaggacatgggcgcccagtacgccgctgccagcccggcctgggcggccgcgcaacaaaggagtcacccggcgatgagccccggcacccccggaccgaccatgggcagatcccagggcagcccaatggatccaatggtgatgaagagacctcagttgtatggcatgggcagtaaccctcattctcagcctcagcagagcagtccgtacccaggaggttcctatggccctccaggcccacagcggtatccaattggcatccagggtcggactcccggggccatggccggaatgcagtaccctcagcagcagatgccacctcagtatggacagcaaggtgtgagtggttactgccagcagggccaacagccatattacagccagcagccgcagcccccgcacctcccaccccaggcgcagtatctgccgtcccagtcccagcagaggtaccagccgcagcaggacatgtctcaggaaggctatggaactagatctcaacctcctctggcccccggaaaacctaaccatgaagacttgaacttaatacagcaagaaagaccatcaagtttaccagttgaagtcttggcctcggaggatgcagcctttggactcaaggatctgtctggctccattgatgacctccccacgggaacggaagcaactttgagctcagcagtcagtgcatccgggtccacgagcagccaaggggatcagagcaacccggcgcagtcgcctttctccccacatgcgtcccctcatctctccagcatcccggggggcccatctccctctcctgttggctctcctgtaggaagcaaccagtctcgatctggcccaatctctcctgcaagtatcccaggtagtcagatgcctccgcagccacccgggagccagtcagaatccagttcccatcccgccttgagccagtcaccaatgccacaggaaagaggttttatggcaggcacacaaagaaaccctcagatggctcagtatggacctcaacagacaggaccatccatgtcgcctcatccttctcctgggggccagatgcatgctggaatcagtagctttcagcagagtaactcaagtgggacttacggtccacagatgagccagtatggaccacaaggtaactactccagacccccagcgtatagtggggtgcccagtgcaagctacagcggcccagggcccggtatgggtatcagtgccaacaaccagatgcatggacaagggccaagccagccatgtggtgctgtgcccctgggacgaatgccatcagctgggatgcagaacagaccatttcctggaaatatgagcagcatgacccccagttctcctggcatgtctcagcagggagggccaggaatggggccgccaatgccaactgtgaaccgtaaggcacaggaggcagccgcagcagtgatgcaggctgctgcgaactcagcacaaagcaggtacgccacccaggagcacgccccgggcaggtacgctgtgtgtctacccgtgaccacgtga

SEQ ID NO: 193521 - DNA, 6710 bp, Artificial Sequence
  derived and/or modified sequence
atggctcataatgcaggggcagcggctgctgcaggcactcatagcgccaaaagcggcggtagcgaggccgctctgaaagaaggcggaagtgcggcagccctctcatcgagctcttcatcctcagccgcagctgcggcagcatcctctagttccagttccggcccagggtctgctatggaaaccggtctgttaccaaaccacaaacttaagacagtaggagaggcccctgctgcacctccccaccaacagcatcaccatcatcaccatgctcatcatcatcatcatcacgcccatcatttacaccatcatcacgcgctgcagcagcagctaaatcagtttcaacagcagcagcaacagcagcaacaacagcagcagcagcagcagcagcagcagcaccctatttcgaacaacaattccctgggcggagcgggaggaggtgccccacagccgggaccagacatggaacagccacaacacggcggagcgaaggactcggccgctggtgggcaggcggatcccccaggccctcctctcctcagcaagccaggggatgaggatgacgcccctccaaaaatgggagaacccgctggaggcaggtatgaacatcccggtttgggggcactgggtacgcagcagccgcctgtcgccgtcccgggtggaggcggtggtcccgcagccgtgcccgagtttaacaattattatggatcagctgcaccggcatcggggggaccgggtggccgtgctggcccatgcttcgatcaacacggaggtcaacagagcccaggcatggggatgatgcacagcgcctccgccgctgcagcaggcgcacccggttcaatggaccccctgcagaattcccatgaagggtacccaaactcacagtgtaaccactatcctgggtacagcaggcccggagcaggaggcggaggaggtggcggaggaggcggtggtggagggagcggtggaggcggtggcggaggcggtgccggagcaggtggtgcaggtgccggtgctgtcgccgctgctgccgctgctgcagctgccgctgccggtgggggtggtggcggaggctacggtggatcaagcgccggatacggtgtcctgtcttctcctcgacagcaggggggaggcatgatgatggggcctggtggtggtggagcagcatctctgagtaaggcagccgcaggatcagcagccggaggcttccaaagatttgccggacagaaccagcatccttcgggagccactcctactctcaatcagctcctcacctcgccgagccctatgatgaggtcttacggtgggtcttatcctgaatattcctctccttccgctccgccaccacccccaagtcagccacagagtcaggctgccgcagctggagctgcggctggcggtcagcaagccgcagctggtatgggtctagggaaggacatgggtgcacagtacgccgctgcatctccagcatgggccgcagctcaacagcggagccatcctgctatgtctcccggtacacctgggcctactatggggcgatcacaaggatcgcccatggatccaatggttatgaaacgcccacagctttacggaatggggagtaacccccacagccagccgcagcagagttccccgtaccccggaggaagctatgggcctcctgggccacagaggtatcctattgggatccagggaagaaccccaggggctatggccggtatgcagtatccccagcaacagatgccaccgcagtatggccagcaaggagtaagtggctactgccagcagggtcagcagccgtattatagtcagcagcctcagcccccacacctcccccctcaggcccaatacctccctagccaatctcagcagcgctaccagccccaacaggacatgagccaggaagggtatggaaccaggagccagcccccactcgctccaggcaagcctaatcacgaagacctgaatctgatccagcaggaaagaccttctagtctgcctgacctttccggcagcattgatgatctgcccacaggaacggaggctactcttagcagcgctgtgtctgcctcaggcagcacctcctctcagggcgaccagagcaatccagctcaatcaccattctctccccacgcatctccccacttatctagtatccccggtggcccaagtccaagccccgtgggatctcctgtggggtctaaccaatctcgcagcggacctatttctccggcttctatcccaggaagccagatgccacctcagcctcctggtagtcaatccgagagctcctcccatccagccctgtcccagagcccaatgcctcaagagcgtggatttatggccggaacccagcggaatccacagatggcgcagtacgggcctcaacagaccggtccgtccatgtcccctcaccctagtccagggggacagatgcatgccggtatctcctcgttccagcaatcaaactcctccggtacatacggtccccagatgagtcagtacggcccacaggggaattatagccggcctcctgcctatagtggcgtgccctccgcctcttattctggtcccggaccagggatgggtataagtgctaataaccagatgcacggacaaggcccttcccagccctgtggagccgtgcccctgggcagaatgcccagcgcgggaatgcaaaatcgtcccttccccggaaacatgagcagcatgactccatcctcccctggaatgtcacagcagggtggccctggcatgggtccaccgatgcccactgtaaacaggaaagcccaagaagctgcagccgcagtgatgcaggctgccgctaactctgcgcaaagtaggcagggcagtttccccggaatgaaccagagcggcctgatggcttcatcatctccctacagccagcctatgaacaacagctcgtcactgatgaatactcaagccccaccctactccatggcaccggcaatggtaaactcttccgcagctagcgtcggactcgcagacatgatgtcccctggagagtcgaaactacccttacccctgaaagcggacgggaaggaggaaggcactcctcaaccagagtctaaatcaaagaagtcatcatcttcaactaccaccggcgagaagattactaaagtttatgagttgggaaatgaaccggaacgcaagctgtgggtcgacagatatctgacattcatggaagaaagaggatctcccgtgtccagtctccctgccgtcggtaagaaaccactggatttgtttcggctctacgtctgtgtgaaagaaatcggtgggctggcccaggtgaataagaacaaaaagtggagggaactagctactaaccttaatgtgggtacgagcagttcagcagcatcgtccttaaaaaaacagtatattcaatatttatttgccttcgaatgcaaaatagagaggggggaggaacccccaccagaggtcttctctaccggcgatacaaaaaagcagccaaaactgcagcctcccagcccagctaactctgggagtcttcagggtccacagacacctcagtcaaccggcagtaattccatggctgaggtgcctggggatctgaagcccccaacccctgcctccacaccccacgggcagatgacccccatgcagggcggtaggtcctctacaatctctgttcatgatccgtttagcgacgtgtccgactcttccttccccaagcggaattctatgacgcctaacgccccataccagcaggggatgtcaatgccagacgtcatgggcaggatgccttacgagccaaacaaggacccttttggcggaatgcggaaagtgccaggctcctctgaaccattcatgacccagggccagatgcccaacagttcaatgcaggacatgtataaccaatctccaagtggcgctatgagcaacctcgggatgggtcagcgacagcagttcccctatggcgcatcttacgatcgacgccacgagccctacggtcagcagtatcctggccagggccctcccagcgggcagcctccatacggcggacatcagcctggcttatatccccagcagccgaactataaaaggcatatggatggaatgtacggtcctcccgcaaagcggcacgaaggcgatatgtacaatatgcagtactctagtcaacaacaggagatgtataaccaatatggcggatcctatagcggtccagacaggcgtcccattcaaggtcagtacccttatccttattcaagggagcgcatgcaaggcccaggccagattcagactcatggcatcccccctcaaatgatgggcggtcctctccagagctctagttctgagggcccacagcagaatatgtgggcagccaggaatgacatgccctacccatatcagaatcggcaagggcctggcggtccaacacaagcacccccataccctgggatgaacaggactgacgacatgatggttcctgaccagcgaatcaatcatgaaagccagtggccctcccatgtgagccagcgacagccctacatgagcagttccgcctcaatgcagccaatcacaagaccccctcaacccagctatcagaccccgccatcccttccaaatcatatcagccgggctccttccccagcctcgtttcagcggtctctggagaataggatgagccccagtaagagcccatttctgccatcaatgaagatgcaaaaggtcatgccaacagtccccaccagtcaggtaacaggaccacctccccagcctcccccaattagacgtgagataacatttcccccagggtccgttgaggctagtcagccagtgctgaaacagagacgcaagattacgagtaaagatattgtaacccctgaagcatggcgcgtaatgatgtcgctgaagtccggtctcctggctgaaagtacttgggcccttgacacaattaacatcctcctgtacgacgactcaacagtcgccacattcaaccttagtcagctgtcaggcttcctcgaactgcttgtggagtacttccgcaagtgtctgatagatattttcggaattctgatggaatatgaagttggggatccatctcagaaggcgttggaccacaacgccgctaggaaggacgattctcagagcctggcggacgattctggtaaggaagaggaggatgctgagtgtatcgacgacgatgaagaggatgaagaggacgaggaagaggattcagagaaaaccgagtctgatgagaaaagctcaattgccctcacggctccagacgcagctgcagatcctaaagagaagcctaagcaggcatctaagtttgacaaactacctattaagattgtgaagaagaataacctcttcgtggtggatcggagcgacaagctaggcagggtccaagagttcaactccggactgctgcattggcaactgggcggaggtgacacaacagagcatattcagactcactttgagtccaagatggagatcccgccaagacggaggccgccacctccccttagctccgccggtaggaaaaaagaacaggaaggcaagggagactctgaagagcagcaagagaagagcatcatcgcgacgatcgatgatgtattgtctgccagacccggagcgctccccgaggatgccaatccagggccacagacagagtcatctaagttcccttttggtattcaacaagccaagtcccatagaaacatcaagctgttagaagacgagcccagaagtcgggacgagactccactttgcactatagcccactggcaggacagtctggccaaaaggtgcatctgcgtctcaaatatcgtgagatctctctcatttgtgccaggaaacgacgccgaaatgtctaagcaccccggactggtccttatcctgggaaagttaattttgcttcatcatgagcaccctgaaaggaaaagggccccacagacttatgaaaaagaggaggatgaagacaagggggtggcttgtagcaaagatgaatggtggtgggattgtctggaggtcctgagagacaataccctagtcactctcgcgaacatctctggtcagctggatctctcggcatacacggagtcaatctgtctgccaatcttagacgggcttcttcattggatggtgtgtccatctgctgaagctcaggacccctttcctactgtcggtccaaattccgtactttccccacagaggcttgtgttggaaactctgtgcaaactctccattcaggacaataacgttgaccttattctggcaacaccaccgttcagccggcaagaaaagttttacgctaccctggtgagatatgtcggcgataggaaaaaccctgtgtgcagggaaatgtcaatggcactgttaagtaacctggcccaaggggacgcactcgcagcaagagctatagcagtccaaaaaggcagcataggcaacctgatctcttttctggaagacggtgttaccatggctcagtaccaacaatctcagcacaatctgatgcacatgcaaccgccaccgttagagcccccatcagtcgacatgatgtgcagagccgcaaaggcactcctggccatggcgagggtggacgaaaatcgcagcgagtttctcctgcacgaggggaggttgctcgacatcagcatctcagcggtgctaaatagcctcgttgcaagtgtaatttgcgacgtgctgtttcagatcggacagctcta

SEQ ID NO: 193522 - DNA, 822 bp, Artificial Sequence
  derived and/or modified sequence
gccgctgttatgcaggcggcagcgaactcagcacagtcccgccaggggagttttcccggaatgaatcaatcagggctgatggccagttctagcccgtacagccagcccatgaataatagctcatcattgatgaacacccaagcaccgccatactctatggcccctgcgatggttaatagtagcgccgcttccgtgggcctcgccgatatgatgtcccctggggaatcgaaattaccactgcctcttaaagctgatgggaaggaggagggtacccctcagccagaatcaaagtccaaaaagagcagttccagcaccacaacgggtgagaagatcacgaaggtctacgagttggggaatgaaccggagcgcaagctgtgggttgatcgctaccttaccttcatggaggaacggggaagcccagttagctctctccctgccgttggcaagaagcctctagaccttttccgtctgtatgtatgcgtgaaagagatcggaggtctcgcccaggtgaataaaaacaaaaagtggagggaactcgccacaaacctgaatgtcgggacttcctcatctgctgcctcctccttgaagaaacaatacatccagtatctcttcgcattcgagtgcaagatagagcgcggtgaagagccaccccctgaagttttctccacaggcgacaccaaaaagcaacctaagttgcaacctccttccccagggaaatggagacgctgcagtcactggccgagaaaagctcaggctccagggcttggaggctcgggaaaggtggtgtcgcaaagcggtcagcagggaacctgggacttttag

SEQ ID NO: 193523 - DNA, 6711 bp, Artificial Sequence
  derived and/or modified sequence
atggcccacaacgccggcgccgccgccgccgccggcacccacagcgccaagagcggcggcagcgaggccgccctgaaggagggcggcagcgccgccgccctgagcagcagcagcagcagcagcgccgccgccgccgccgccagcagcagcagcagcagcggccccggcagcgccatggagaccggcctgctgcccaaccacaagctgaagaccgtgggcgaggcccccgccgcccccccccaccagcagcaccaccaccaccaccacgcccaccaccaccaccaccacgcccaccacctgcaccaccaccacgccctgcagcagcagctgaaccagttccagcagcagcagcagcagcagcagcagcagcagcagcagcagcagcagcagcagcaccccatcagcaacaacaacagcctgggcggcgccggcggcggcgccccccagcccggccccgacatggagcagccccagcacggcggcgccaaggacagcgccgccggcggccaggccgacccccccggcccccccctgctgagcaagcccggcgacgaggacgacgccccccccaagatgggcgagcccgccggcggcagatacgagcaccccggcctgggcgccctgggcacccagcagccccccgtggccgtgcccggcggcggcggcggccccgccgccgtgcccgagttcaacaactactacggcagcgccgcccccgccagcggcggccccggcggcagagccggcccctgcttcgaccagcacggcggccagcagagccccggcatgggcatgatgcacagcgccagcgccgccgccgccggcgcccccggcagcatggaccccctgcagaacagccacgagggctaccccaacagccagtgcaaccactaccccggctacagcagacccggcgccggcggcggcggcggcggcggcggcggcggcggcggcggcagcggcggcggcggcggcggcggcggcgccggcgccggcggcgccggcgccggcgccgtggccgccgccgccgccgccgccgccgccgccgccggcggcggcggcggcggcggctacggcggcagcagcgccggctacggcgtgctgagcagccccagacagcagggcggcggcatgatgatgggccccggcggcggcggcgccgccagcctgagcaaggccgccgccggcagcgccgccggcggcttccagagattcgccggccagaaccagcaccccagcggcgccacccccaccctgaaccagctgctgaccagccccagccccatgatgagaagctacggcggcagctaccccgagtacagcagccccagcgcccccccccccccccccagccagccccagagccaggccgccgccgccggcgccgccgccggcggccagcaggccgccgccggcatgggcctgggcaaggacatgggcgcccagtacgccgccgccagccccgcctgggccgccgcccagcagagaagccaccccgccatgagccccggcacccccggccccaccatgggcagaagccagggcagccccatggaccccatggtgatgaagagaccccagctgtacggcatgggcagcaacccccacagccagccccagcagagcagcccctaccccggcggcagctacggcccccccggcccccagagataccccatcggcatccagggcagaacccccggcgccatggccggcatgcagtacccccagcagcagatgcccccccagtacggccagcagggcgtgagcggctactgccagcagggccagcagccctactacagccagcagccccagcccccccacctgcccccccaggcccagtacctgcccagccagagccagcagagataccagccccagcaggacatgagccaggagggctacggcaccagaagccagccccccctggcccccggcaagcccaaccacgaggacctgaacctgatccagcaggagagacccagcagcctgcccgacctgagcggcagcatcgacgacctgcccaccggcaccgaggccaccctgagcagcgccgtgagcgccagcggcagcaccagcagccagggcgaccagagcaaccccgcccagagccccttcagcccccacgccagcccccacctgagcagcatccccggcggccccagccccagccccgtgggcagccccgtgggcagcaaccagagcagaagcggccccatcagccccgccagcatccccggcagccagatgcccccccagccccccggcagccagagcgagagcagcagccaccccgccctgagccagagccccatgccccaggagagaggcttcatggccggcacccagagaaacccccagatggcccagtacggcccccagcagaccggccccagcatgagcccccaccccagccccggcggccagatgcacgccggcatcagcagcttccagcagagcaacagcagcggcacctacggcccccagatgagccagtacggcccccagggcaactacagcagaccccccgcctacagcggcgtgcccagcgccagctacagcggccccggccccggcatgggcatcagcgccaacaaccagatgcacggccagggccccagccagccctgcggcgccgtgcccctgggcagaatgcccagcgccggcatgcagaacagacccttccccggcaacatgagcagcatgacccccagcagccccggcatgagccagcagggcggccccggcatgggcccccccatgcccaccgtgaacagaaaggcccaggaggccgccgccgccgtgatgcaggccgccgccaacagcgcccagagcagacagggcagcttccccggcatgaaccagagcggcctgatggccagcagcagcccctacagccagcccatgaacaacagcagcagcctgatgaacacccaggcccccccctacagcatggcccccgccatggtgaacagcagcgccgccagcgtgggcctggccgacatgatgagccccggcgagagcaagctgcccctgcccctgaaggccgacggcaaggaggagggcaccccccagcccgagagcaagagcaagaagagcagcagcagcaccaccaccggcgagaagatcaccaaggtgtacgagctgggcaacgagcccgagagaaagctgtgggtggacagatacctgaccttcatggaggagagaggcagccccgtgagcagcctgcccgccgtgggcaagaagcccctggacctgttcagactgtacgtgtgcgtgaaggagatcggcggcctggcccaggtgaacaagaacaagaagtggagagagctggccaccaacctgaacgtgggcaccagcagcagcgccgccagcagcctgaagaagcagtacatccagtacctgttcgccttcgagtgcaagatcgagagaggcgaggagcccccccccgaggtgttcagcaccggcgacaccaagaagcagcccaagctgcagccccccagccccgccaacagcggcagcctgcagggcccccagaccccccagagcaccggcagcaacagcatggccgaggtgcccggcgacctgaagccccccacccccgccagcaccccccacggccagatgacccccatgcagggcggcagaagcagcaccatcagcgtgcacgaccccttcagcgacgtgagcgacagcagcttccccaagagaaacagcatgacccccaacgccccctaccagcagggcatgagcatgcccgacgtgatgggcagaatgccctacgagcccaacaaggaccccttcggcggcatgagaaaggtgcccggcagcagcgagcccttcatgacccagggccagatgcccaacagcagcatgcaggacatgtacaaccagagccccagcggcgccatgagcaacctgggcatgggccagagacagcagttcccctacggcgccagctacgacagaagacacgagccctacggccagcagtaccccggccagggcccccccagcggccagcccccctacggcggccaccagcccggcctgtacccccagcagcccaactacaagagacacatggacggcatgtacggcccccccgccaagagacacgagggcgacatgtacaacatgcagtacagcagccagcagcaggagatgtacaaccagtacggcggcagctacagcggccccgacagaagacccatccagggccagtacccctacccctacagcagagagagaatgcagggccccggccagatccagacccacggcatccccccccagatgatgggcggccccctgcagagcagcagcagcgagggcccccagcagaacatgtgggccgccagaaacgacatgccctacccctaccagaacagacagggccccggcggccccacccaggcccccccctaccccggcatgaacagaaccgacgacatgatggtgcccgaccagagaatcaaccacgagagccagtggcccagccacgtgagccagagacagccctacatgagcagcagcgccagcatgcagcccatcaccagacccccccagcccagctaccagaccccccccagcctgcccaaccacatcagcagagcccccagccccgccagcttccagagaagcctggagaacagaatgagccccagcaagagccccttcctgcccagcatgaagatgcagaaggtgatgcccaccgtgcccaccagccaggtgaccggcccccccccccagcccccccccatcagaagagagatcaccttcccccccggcagcgtggaggccagccagcccgtgctgaagcagagaagaaagatcaccagcaaggacatcgtgacccccgaggcctggagagtgatgatgagcctgaagagcggcctgctggccgagagcacctgggccctggacaccatcaacatcctgctgtacgacgacagcaccgtggccaccttcaacctgagccagctgagcggcttcctggagctgctggtggagtacttcagaaagtgcctgatcgacatcttcggcatcctgatggagtacgaggtgggcgaccccagccagaaggccctggaccacaacgccgccagaaaggacgacagccagagcctggccgacgacagcggcaaggaggaggaggacgccgagtgcatcgacgacgacgaggaggacgaggaggacgaggaggaggacagcgagaagaccgagagcgacgagaagagcagcatcgccctgaccgcccccgacgccgccgccgaccccaaggagaagcccaagcaggccagcaagttcgacaagctgcccatcaagatcgtgaagaagaacaacctgttcgtggtggacagaagcgacaagctgggcagagtgcaggagttcaacagcggcctgctgcactggcagctgggcggcggcgacaccaccgagcacatccagacccacttcgagagcaagatggagatcccccccagaagaagaccccccccccccctgagcagcgccggcagaaagaaggagcaggagggcaagggcgacagcgaggagcagcaggagaagagcatcatcgccaccatcgacgacgtgctgagcgccagacccggcgccctgcccgaggacgccaaccccggcccccagaccgagagcagcaagttccccttcggcatccagcaggccaagagccacagaaacatcaagctgctggaggacgagcccagaagcagagacgagacccccctgtgcaccatcgcccactggcaggacagcctggccaagagatgcatctgcgtgagcaacatcgtgagaagcctgagcttcgtgcccggcaacgacgccgagatgagcaagcaccccggcctggtgctgatcctgggcaagctgatcctgctgcaccacgagcaccccgagagaaagagagccccccagacctacgagaaggaggaggacgaggacaagggcgtggcctgcagcaaggacgagtggtggtgggactgcctggaggtgctgagagacaacaccctggtgaccctggccaacatcagcggccagctggacctgagcgcctacaccgagagcatctgcctgcccatcctggacggcctgctgcactggatggtgtgccccagcgccgaggcccaggaccccttccccaccgtgggccccaacagcgtgctgagcccccagagactggtgctggagaccctgtgcaagctgagcatccaggacaacaacgtggacctgatcctggccaccccccccttcagcagacaggagaagttctacgccaccctggtgagatacgtgggcgacagaaagaaccccgtgtgcagagagatgagcatggccctgctgagcaacctggcccagggcgacgccctggccgccagagccatcgccgtgcagaagggcagcatcggcaacctgatcagcttcctggaggacggcgtgaccatggcccagtaccagcagagccagcacaacctgatgcacatgcagcccccccccctggagccccccagcgtggacatgatgtgcagagccgccaaggccctgctggccatggccagagtggacgagaacagaagcgagttcctgctgcacgagggcagactgctggacatcagcatcagcgccgtgctgaacagcctggtggccagcgtgatctgcgacgtgctgttccagatcggccagctgtag

SEQ ID NO: 193524 - DNA, 822 bp, Artificial Sequence
  derived and/or modified sequence
gccgccgtgatgcaggccgccgccaacagcgcccagagcagacagggcagcttccccggcatgaaccagagcggcctgatggccagcagcagcccctacagccagcccatgaacaacagcagcagcctgatgaacacccaggcccccccctacagcatggcccccgccatggtgaacagcagcgccgccagcgtgggcctggccgacatgatgagccccggcgagagcaagctgcccctgcccctgaaggccgacggcaaggaggagggcaccccccagcccgagagcaagagcaagaagagcagcagcagcaccaccaccggcgagaagatcaccaaggtgtacgagctgggcaacgagcccgagagaaagctgtgggtggacagatacctgaccttcatggaggagagaggcagccccgtgagcagcctgcccgccgtgggcaagaagcccctggacctgttcagactgtacgtgtgcgtgaaggagatcggcggcctggcccaggtgaacaagaacaagaagtggagagagctggccaccaacctgaacgtgggcaccagcagcagcgccgccagcagcctgaagaagcagtacatccagtacctgttcgccttcgagtgcaagatcgagagaggcgaggagcccccccccgaggtgttcagcaccggcgacaccaagaagcagcccaagctgcagccccccagccccggcaagtggagaagatgcagccactggcccagaaaggcccaggcccccggcctgggcggcagcggcaaggtggtgagccagagcggccagcagggcacctgggacttctag

SEQ ID NO: 193525 - protein, 860 aa, Artificial Sequence
  derived and/or modified sequence
MEQVAEGARVTAVPVSAADSTEELAEVEEGVGVVGEDNDAAARGAEAFGDSEEDGEDVFEVEKILDMKTEGGKVLYKVRWKGYTSDDDTWEPEIHLEDCKEVLLEFRKKIAENKAKAVRKDIQRLSLNNDIFEANSDSDQQSETKEDTSPKKKKKKLRQREEKSPDDLKKKKAKAGKLKDKSKPDLESSLESLVFDLRTKKRISEAKEELKESKKPKKDEVKETKELKKVKKGEIRDLKTKTREDPKENRKTKKEKFVESQVESESSVLNDSPFPEDDSEGLHSDSREEKQNTKSARERAGQDMGLEHGFEKPLDSAMSAEEDTDVRGRRKKKTPRKAEDTRENRKLENKNAFLEKKTVPKKQRNQDRSKSAAELEKLMPVSAQTPKGRRLSGEERGLWSTDSAEEDKETKRNESKEKYQKRHDSDKEEKGRKEPKGLKTLKEIRNAFDLFKLTPEEKNDVSENNRKREEIPLDFKTIDDHKTKENKQSLKERRNTRDETDTWAYIAAEGDQEVLDSVCQADENSDGRQQILSLGMDLQLEWMKLEDFQKHLDGKDENFAATDAIPSNVLRDAVKNGDYITVKVALNSNEEYNLDQEDSSGMTLVMLAAAGGQDDLLRLLITKGAKVNGRQKNGTTALIHAAEKNFLTTVAILLEAGAFVNVQQSNGETALMKACKRGNSDIVRLVIECGADCNILSKHQNSALHFAKQSNNVLVYDLLKNHLETLSRVAEETIKDYFEARLALLEPVFPIACHRLCEGPDFSTDFNYKPPQNIPEGSGILLFIFHANFLGKEVIARLCGPCSVQAVVLNDKFQLPVFLDSHFVYSFSPVAGPNKLFIRLTEAPSAKVKLLIGAYRVQLQ

SEQ ID NO: 193526 - DNA, 2583 bp, Artificial Sequence
  derived and/or modified sequence
atggagcaggtggcagagggggctagggtcaccgcagtcccagttagtgctgccgactccaccgaagagctcgccgaagtcgaagagggggtgggcgtggttggcgaagataacgatgccgcagctcggggcgcagaggcctttggcgatagcgaagaagacggagaagacgtgttcgaggtggaaaaaatcctcgacatgaaaactgagggcggtaaggtgctgtataaagtgcggtggaagggctacacctctgatgatgacacctgggaacccgagattcacctggaagactgtaaggaggtgctgttggagtttcgcaaaaagatagcggaaaataaggccaaggcagtgcggaaggatatccagcggcttagcctgaacaatgatatctttgaggccaacagcgacagtgaccagcagtctgagaccaaggaagatacgtctccaaaaaaaaagaagaagaagttgcgtcaacgggaggagaagtcccccgacgacctcaaaaagaagaaagctaaagctgggaagctgaaggacaaatccaagccggacctggaatctagtcttgaatccctcgtgttcgacctgcgcacgaaaaaaaggatctcggaggctaaggaggaactgaaggaaagcaagaagcccaaaaaggatgaggtgaaggagactaaagagctgaagaaggtgaaaaaaggagagatccgggacctcaaaacaaaaacccgggaggaccccaaggaaaaccgaaaaactaagaaagaaaagtttgtcgaaagtcaggtggaaagtgaaagtagtgtgctaaacgattcaccctttcccgaggacgacagcgagggactgcattcagattccagggaggagaagcagaatactaagtcggccagagagagagcaggacaagacatggggctcgagcacgggtttgaaaagcctctcgattccgcaatgtctgctgaagaggacactgacgtgagggggcgccggaagaagaagacccctcgaaaagcagaggacacccgcgagaatagaaagttagaaaacaagaacgcctttctcgaaaaaaagacggtcccgaagaagcaacgcaaccaggatcgaagcaaatctgccgcagagctggaaaagctgatgccagtgagcgcacagacacccaaaggcagacgtctctcaggggaagaacgcgggctctggagtactgactctgcagaagaggacaaagagaccaagcgcaatgagtctaaggagaaatatcagaagaggcacgattccgataaggaagaaaagggtcggaaagaaccgaaaggcctgaagacactcaaggagatccgaaatgcgtttgatttgtttaaactgacaccagaggagaagaacgatgtgtcagagaacaatagaaaacgagaggaaattcccttggattttaaaactatcgatgatcacaagaccaaggaaaacaagcagtcgctaaaggaacgacgaaatacccgtgacgagaccgatacatgggcctacatcgccgccgaaggggaccaggaggttctggactccgtgtgccaggcagacgagaacagtgatggccgacaacagatcctctcactgggtatggatctacaactggaatggatgaaattggaggacttccagaaacatttggatggaaaggatgagaatttcgctgcaaccgatgccatccccagcaacgtactccgcgacgctgtaaaaaatggagattacattacggtaaaggtggctttgaacagcaatgaggagtacaatttagaccaggaagactccagtggtatgaccctggtaatgctggccgctgcaggaggacaggacgacttgttgaggctgctgattaccaaaggcgcaaaggtcaatggcagacagaaaaatggaacaacagcacttatccacgcagccgagaaaaattttctgactaccgttgcgatacttcttgaggcaggcgcattcgtgaatgttcagcagagtaatggcgaaaccgcccttatgaaggcctgcaagcgtggaaactcagacattgtaaggctagttatagagtgtggagccgattgcaacattcttagcaagcaccaaaatagcgcccttcatttcgccaagcagagtaataatgtgctcgtatatgacctgctgaagaaccatttggagactctgtcacgagtagctgaggagactataaaggattactttgaagcgagactggctctgctggaacccgtcttccctatagcctgccaccgtctctgcgagggcccagacttttcgaccgattttaattataagcccccccagaacattccggaggggtccggcattctgctcttcatctttcatgctaatttcctcggcaaggaagtcattgctcgtctatgtggcccctgtagcgtgcaggccgtggtgctgaacgataagtttcaactgcctgtgttcctagattctcactttgtgtacagcttctcaccagttgccggtcctaataaattgtttatccgcctgaccgaagccccatcagctaaggtgaaattactgataggtgcttacagggttcaactgcagtag

SEQ ID NO: 193527 - DNA, 1812 bp, Artificial Sequence
  derived and/or modified sequence
atggaacaggtggctgaaggggccagggtgacagctgtaccagtgtctgctgctgacagcaccgaagagctcgcagaagtggaggagggagttggtgtggttggcgaagataacgatgcagcggctcggggggcagaggcattcggggactctgaggaagatggggaggacgttttcgaggtcgagaaaattctggatatgaaaacggagggtgggaaggttctttacaaggtgaggtggaagggctatacctctgatgatgacacatgggagcccgagatccatttagaagactgtaaggaggttttgttggaatttcggaaaaaaatagccgagaataaggctaaagccgtgagaaaagatattcagaggttgtccctcaacaatgacatcttcgaagctaacagcgattctgaccagcaatcagagacaaaggaggacacttcacctaaaaagaaaaagaagaaattacgacaaagagaagaaaaaagccccgacgacctgaagaagaagaaagccaaagcaggtaagctgaaggacaaaagtaaaccggatctggagagtagcttagagagtctcgtgtttgacctccgaaccaaaaagagaatctctgaggccaaggaggagctgaaggagtcaaagaagcctaagaaggatgaggttaaagaaacaaaagaattaaagaaggtcaaaaagggagagattagagacctgaagaccaaaacacgggaagaccccaaggagaatcgaaaaaccaagaaggagaagtttgttgaatctcaagtggagagtgagagctccgtactgaacgacagccctttccctgaggacgactctgagggactgcactcagatagcagggaagagaaacaaaatacaaaaagcgccagggagcgtgcagggcaagacatggggctggaacacggctttgagaaaccactggacagtgccatgtctgctgaggaagataccgatgtcaggggacgccggaaaaagaagactcctcgcaaggccgaggacacccgggagaaccgaaagctcgagaataaaaacgccttcctcgagaagaagaccgttcctaagaaacagcgtaatcaggataggagcaaatcagccgctgagctcgaaaaactgatgcctgtgagcgcccagactcccaagggcaggcgcctatctggggaggaacgtggcctgtggtcaaccgattcagctgaggaggacaaggagactaaacgaaacgagtcaaaagaaaagtatcaaaagaggcacgactctgacaaagaggagaaggggcggaaagagcccaaaggattgaaaacattgaaggagattcggaatgctttcgacttgttcaagctgactccagaggaaaagaatgacgtgtcggagaacaaccggaaaagggaggaaatccctctggactttaagacaattgacgaccataagaccaaggagaacaaacagagcttgaaagaaagacggaatacaagagatgagactgacacgtgggcttatattgctgcggagggtgaccaagaagtgctcgactctgtgtgccaagctgacgaaaattcagacgggagacagcagatcctgtcccttggcatggatctacagttagagtggatgaaactcgaggatttccagaagcacctggacggcaaggacgagaacttcgccgcaacggatgcaattccctctaatgtgctccgcgatgccgttaagaagaaaaaaaagaagaaattccttgggacctacaccttcttcttatttttcttcttcgaaaaacctgacctcgttcctttattctag

SEQ ID NO: 193528 - DNA, 2583 bp, Artificial Sequence
  derived and/or modified sequence
atggagcaggtggccgagggcgcccgggtgacagctgtgcctgtgtctgctgctgacagcacagaggagctggccgaggtggaggagggcgtgggcgtggtgggggaggacaatgatgctgctgcccggggagctgaggccttcggggacagtgaagaagatggagaagatgtgtttgaggtggagaagatcctggacatgaagacagaaggaggcaaggtgctgtacaaggtgcgctggaagggctacaccagtgatgatgacacctgggagcctgagatccacctggaggactgcaaggaggtgctgctggagttcaggaagaagattgctgagaacaaggccaaggctgtgaggaaggacatccagaggctgagcctgaacaatgacatctttgaggccaacagcgacagcgaccagcagagcgagaccaaggaggacaccagccccaagaagaagaagaagaagctgcggcagcgggaggagaagagcccagatgacctgaagaagaagaaggccaaggccggcaagctgaaggacaagagcaagccagacctggagagcagcctggagagcctggtgtttgacctgcggaccaagaagaggatcagcgaggccaaggaggagctgaaggagagcaagaagcccaagaaggatgaggtgaaggagaccaaggagctgaagaaggtgaagaagggggagatccgggacctgaagaccaagacccgggaggaccccaaggagaacaggaagaccaagaaggagaagtttgtggagagccaggtggagagcgagagctctgtgctgaatgacagccccttcccagaagatgattctgagggcctgcacagcgacagccgggaggagaagcagaacaccaagagcgcccgggagcgggccggccaggacatgggcctggagcacggctttgagaagcccctggacagcgccatgtctgctgaggaggacacagatgtgcggggccgcaggaagaagaagacccccaggaaggccgaggacaccagagaaaataggaagctggagaacaagaatgccttcctggagaagaagacagtgcccaagaagcagaggaaccaggacaggagcaagtctgctgctgagctggagaagctgatgcctgtgtctgcccagacccccaagggccgccgcctgagcggggaggagcggggcctgtggagcacagattctgctgaggaggacaaggagaccaagagaaatgaaagcaaggagaagtaccagaagagacatgacagcgacaaggaggagaagggcaggaaggagcccaagggcctgaagaccctgaaggagatcagaaatgcctttgacctcttcaagctgaccccagaggagaagaatgatgtgtctgagaacaacaggaagcgggaggagatccccctggacttcaagaccattgatgaccacaagaccaaggagaacaagcagagcctgaaggagaggaggaacaccagagatgaaacagacacctgggcctacatcgctgctgagggggaccaggaggtgctggacagcgtgtgccaggctgatgaaaattctgatggccggcagcagatcctgagcctgggcatggacctgcagctggagtggatgaagctggaggacttccagaagcacctggatggcaaggatgaaaattttgctgccacagatgccatccccagcaatgtgctgagagatgctgtgaagaatggagactacatcaccgtgaaggtggccctgaacagcaatgaggagtacaacctggaccaggaggacagcagcggcatgaccctggtgatgctggccgccgccggcggccaggatgacctgctgcggctgctgatcaccaagggggccaaggtgaatggccggcagaagaatggcaccacagccctgattcatgctgctgagaagaacttcctgaccaccgtggccatcctgctggaggccggggcctttgtgaatgtgcagcagagcaatggagaaacagccctgatgaaggcctgcaagaggggcaacagcgacatcgtgcggctggtgattgaatgtggggctgactgcaacatcctgagcaagcaccagaacagcgccctgcactttgccaagcagagcaacaacgtgctggtgtatgacctgctgaagaaccacctggagaccctgagccgggtggccgaggagaccatcaaggactactttgaggcccggctggccctgctggagcctgtgttccccatcgcctgccaccggctgtgtgagggccctgacttcagcacagacttcaactacaagccaccccagaacatccctgagggcagcggcatcctgctcttcatcttccacgccaacttcctgggcaaggaggtgattgcccggctgtgtggcccctgcagcgtgcaggccgtggtgctgaatgacaagttccagctgcccgtcttcctggacagccactttgtgtacagcttcagccctgtggccggccccaacaagctgttcatccggctgacagaggcccccagcgccaaggtgaagctgctgattggagcctacagagtgcagctgcagtag

SEQ ID NO: 193529 - DNA, 1812 bp, Artificial Sequence
  derived and/or modified sequence
atggagcaggtggccgagggcgcccgggtgacagctgtgcctgtgtctgctgctgacagcacagaggagctggccgaggtggaggagggcgtgggcgtggtgggggaggacaatgatgctgctgcccggggagctgaggccttcggggacagtgaagaagatggagaagatgtgtttgaggtggagaagatcctggacatgaagacagaaggaggcaaggtgctgtacaaggtgcgctggaagggctacaccagtgatgatgacacctgggagcctgagatccacctggaggactgcaaggaggtgctgctggagttcaggaagaagattgctgagaacaaggccaaggctgtgaggaaggacatccagaggctgagcctgaacaatgacatctttgaggccaacagcgacagcgaccagcagagcgagaccaaggaggacaccagccccaagaagaagaagaagaagctgcggcagcgggaggagaagagcccagatgacctgaagaagaagaaggccaaggccggcaagctgaaggacaagagcaagccagacctggagagcagcctggagagcctggtgtttgacctgcggaccaagaagaggatcagcgaggccaaggaggagctgaaggagagcaagaagcccaagaaggatgaggtgaaggagaccaaggagctgaagaaggtgaagaagggggagatccgggacctgaagaccaagacccgggaggaccccaaggagaacaggaagaccaagaaggagaagtttgtggagagccaggtggagagcgagagctctgtgctgaatgacagccccttcccagaagatgattctgagggcctgcacagcgacagccgggaggagaagcagaacaccaagagcgcccgggagcgggccggccaggacatgggcctggagcacggctttgagaagcccctggacagcgccatgtctgctgaggaggacacagatgtgcggggccgcaggaagaagaagacccccaggaaggccgaggacaccagagaaaataggaagctggagaacaagaatgccttcctggagaagaagacagtgcccaagaagcagaggaaccaggacaggagcaagtctgctgctgagctggagaagctgatgcctgtgtctgcccagacccccaagggccgccgcctgagcggggaggagcggggcctgtggagcacagattctgctgaggaggacaaggagaccaagagaaatgaaagcaaggagaagtaccagaagagacatgacagcgacaaggaggagaagggcaggaaggagcccaagggcctgaagaccctgaaggagatcagaaatgcctttgacctcttcaagctgaccccagaggagaagaatgatgtgtctgagaacaacaggaagcgggaggagatccccctggacttcaagaccattgatgaccacaagaccaaggagaacaagcagagcctgaaggagaggaggaacaccagagatgaaacagacacctgggcctacatcgctgctgagggggaccaggaggtgctggacagcgtgtgccaggctgatgaaaattctgatggccggcagcagatcctgagcctgggcatggacctgcagctggagtggatgaagctggaggacttccagaagcacctggatggcaaggatgaaaattttgctgccacagatgccatccccagcaatgtgctgagagatgctgtgaagaagaagaagaagaagaagttcctgggcacctacaccttcttcctgttcttcttctttgagaagccagacctggtgcccctcttctag

SEQ ID NO: 193530 - DNA, 4217 bp, Artificial Sequence
  derived and/or modified sequence
ggaacgcgaggggctgctggggtgtttgtcgcagcgggttttcctcggcggtttgcggagctgctaggatggagcaggttgcggagggagcaagggtgaccgcagtccctgtgtcagctgccgacagcactgaggagttggccgaagtcgaagaaggagttggagtagtgggcgaagataatgacgcagccgcgagaggagcggaggcctttggcgacagtgaggaggacggagaggatgtgttcgaggtggagaagatcctggacatgaagaccgaggggggtaaagttctttacaaagttcgctggaaaggctatacatcggatgatgatacctgggagcccgagattcacctggaggactgtaaagaagtgcttcttgaatttaggaagaaaattgcagagaacaaagccaaagcagtcaggaaggatattcagagactatccttaaataacgacatatttgaggcgaactctgatagcgatcagcaaagtgagacaaaagaagatacttccccaaagaagaaaaagaaaaaattgaggcagagagaagagaaaagcccagatgatctgaaaaagaaaaaagcaaaggccgggaagctaaaagacaagtccaaaccagacctggagagctccttggaaagtttagtttttgatttaaggacaaagaaaagaatttctgaagccaaagaagaactaaaggagtccaaaaagcccaaaaaagatgaagtaaaagaaacaaaagaattaaagaaagttaaaaagggtgaaataagagatttaaagacgaaaacaagagaagatcccaaagaaaatagaaaaacaaaaaaagaaaaatttgtcgaatcccaggtggaatctgaatcaagtgtacttaatgattctccctttccagaggatgacagtgaagggctacattccgacagcagagaagagaaacaaaacactaaaagtgcaagagagagagcagggcaggacatggggctggagcatggctttgagaagcccctagacagtgccatgagtgctgaggaggataccgatgtcagaggcaggaggaaaaagaagaccccgagaaaggctgaggacactagagagaacaggaagctagagaacaagaacgctttcttagagaagaaaactgtgcctaaaaagcagaggaatcaagacagaagcaaaagtgctgcagagttagagaagctgatgcctgtatctgcccaaacgccaaagggccggaggttgagcggggaagagagaggcctctggtccacggactcagccgaggaggacaaagaaaccaaaagaaatgaatccaaagaaaaatatcagaaaaggcatgattctgacaaggaagaaaaaggcagaaaagagccaaaaggattaaagacacttaaggaaatcagaaatgcatttgatttatttaaattaactccagaagaaaaaaatgatgtttctgagaataatcggaaaagggaagaaataccactggattttaaaaccatagacgatcacaaaaccaaggaaaacaaacagtcacttaaagaaaggagaaacaccagagacgaaacggatacttgggcatacattgctgcagaaggtgatcaggaggttttagacagcgtgtgccaagcagatgagaattcagatggcaggcagcagattctgagtttgggcatggacctgcagttggaatggatgaagttggaagatttccaaaagcaccttgatgggaaagatgagaattttgctgcaacagatgcaattccaagtaatgtgttaagggatgctgtgaaaaatggggattatattactgtaaaagttgcacttaattcaaatgaagaatataacctggaccaagaggattccagtggaatgacactggtgatgcttgccgccgccggagggcaggacgacctcctgcgactcctcatcacaaaaggcgcgaaagtgaacggtcggcagaagaacgggaccaccgccctcattcatgctgcagagaagaactttttaacaacagtggctattcttttggaagcaggagcttttgtaaatgtccagcaaagcaatggtgagactgcactgatgaaggcctgtaaaagaggaaattcagacatcgtacgactcgtaattgaatgtggagctgactgcaatattttgtcaaagcaccagaatagtgccctgcactttgcgaagcagtctaacaatgtgcttgtgtacgacttgctgaagaaccatttagagacactttcaagagtagcagaagagacaataaaggattactttgaagctcgccttgctctgctagaaccagtttttccaatcgcatgtcatcgactctgtgagggtccagatttttcaacagatttcaattacaaacccccacagaacataccagaaggctctggcatcctgctgtttatcttccatgcaaactttttgggtaaagaagttattgctcggctctgtggaccgtgtagtgtacaagctgtagttctgaatgataaatttcagcttcctgtttttctggacagtcattttgtttactcattcagccctgttgcaggtcccaataaactcttcataaggttgacagaagcaccctctgccaaggttaagttgctaataggtgcatacagagtgcagctgcagtgaccaaacagaagggactgggcggagttctcttcagaccgattcctatactctctttgacagcagtttggaattcttctagcacatctatgtaaagttttgtctgtaaacctcttgcagttaagcctgttgtctgttgtagtctgtaagatgcgacatagctgtgtctgtgccagtatgccggaatctcagtgcagtgtccagactgcgtatttcagtttttccacaatgtggatagtacatatgaggattatttaagaaaattaaagacttcactttcttttttctggagacggagtttcgctcttgttgcccaggctggagtgcaatggtgcgatctcggctcactgcaagctctgcctcctgggttcaagtgattctcctgcctcagcctcctgagtagctgggattacagacacccgccatggcacccagctaattttgtatttttagtagagatggggtttatccatgttggtcaggctggtcttgaactcctgacctcaggtgatccgcccgcctcggcctcccaaagtgcttggattacaggcatgagccaccgcacccagcaagagttattttcttaacttgaaattttctactagccctggtgaacttctgtgcttaaaaaaaaaaaaaaaaaaaggaaaaattcagctctaaaacatttgcttacagcaagggagccatgttatattcaagttacccaagcaccaaataaagtgtgggtttgctgcccttgaaagggttgggaggcctgatctttttctagtagacagttgccacacattccccaagcacaaaaggtggagatggcagtcactttgtaaatatgctgtagtcacttatcatcttttcaaagggtaacaagagaatctaagatgtagtaagaatgtaaaccagtacactatgagacctaaaagagagtattaaatgtgaacttttagcagagcgtggtggctcacacctataatcccagcgctttggaggctgaggttggaggattgcttaagtccaggagttcaagaccagcctgggtaacatggggtggaacaagcctgtagtcccagatactcaggaggctgaggtgaaaggattgcttgagccagggaggtcaaggctgcagtgagccgtgaaaggccactgcactccagcctgagtgacagaatgagaccttgtctcaaaaaaaaaaaaaagtttcttggaacctatacggtttttttttgttttttttttttgaaaagccagaccttgtgcccttgttttgaacaccgactgggaagatggggcttaggtaacagccaaacctggctgtcagctgtgtgggagccaccaccctctctgggaagagttcctgcttctgtatggcaagcataaatcaagctcagtctgggttatggagaagttgaaaattgttttgttcctcattagtttataattgtatgaaatacgattttaatgaaaacttttcagaattcacgtttgtgtagatatttcagagaaccatttttactttacatcctaaaactgccttttcctatggttttgtcaataaaacactatgatgtt

SEQ ID NO: 193531 - DNA, 2175 bp, Artificial Sequence
  derived and/or modified sequence
gaggggctgctggggtgtttgtcgcagcgggttttcctcggcggtttgcggagctgctaggatggagcaggttgcggagggagcaagggtgaccgcagtccctgtgtcagctgccgacagcactgaggagttggccgaagtcgaagaaggagttggagtagtgggcgaagataatgacgcagccgcgagaggagcggaggcctttggcgacagtgaggaggacggagaggatgtgttcgaggtggagaagatcctggacatgaagaccgaggggggtaaagttctttacaaagttcgctggaaaggctatacatcggatgatgatacctgggagcccgagattcacctggaggactgtaaagaagtgcttcttgaatttaggaagaaaattgcagagaacaaagccaaagcagtcaggaaggatattcagagactatccttaaataacgacatatttgaggcgaactctgatagcgatcagcaaagtgagacaaaagaagatacttccccaaagaagaaaaagaaaaaattgaggcagagagaagagaaaagcccagatgatctgaaaaagaaaaaagcaaaggccgggaagctaaaagacaagtccaaaccagacctggagagctccttggaaagtttagtttttgatttaaggacaaagaaaagaatttctgaagccaaagaagaactaaaggagtccaaaaagcccaaaaaagatgaagtaaaagaaacaaaagaattaaagaaagttaaaaagggtgaaataagagatttaaagacgaaaacaagagaagatcccaaagaaaatagaaaaacaaaaaaagaaaaatttgtcgaatcccaggtggaatctgaatcaagtgtacttaatgattctccctttccagaggatgacagtgaagggctacattccgacagcagagaagagaaacaaaacactaaaagtgcaagagagagagcagggcaggacatggggctggagcatggctttgagaagcccctagacagtgccatgagtgctgaggaggataccgatgtcagaggcaggaggaaaaagaagaccccgagaaaggctgaggacactagagagaacaggaagctagagaacaagaacgctttcttagagaagaaaactgtgcctaaaaagcagaggaatcaagacagaagcaaaagtgctgcagagttagagaagctgatgcctgtatctgcccaaacgccaaagggccggaggttgagcggggaagagagaggcctctggtccacggactcagccgaggaggacaaagaaaccaaaagaaatgaatccaaagaaaaatatcagaaaaggcatgattctgacaaggaagaaaaaggcagaaaagagccaaaaggattaaagacacttaaggaaatcagaaatgcatttgatttatttaaattaactccagaagaaaaaaatgatgtttctgagaataatcggaaaagggaagaaataccactggattttaaaaccatagacgatcacaaaaccaaggaaaacaaacagtcacttaaagaaaggagaaacaccagagacgaaacggatacttgggcatacattgctgcagaaggtgatcaggaggttttagacagcgtgtgccaagcagatgagaattcagatggcaggcagcagattctgagtttgggcatggacctgcagttggaatggatgaagttggaagatttccaaaagcaccttgatgggaaagatgagaattttgctgcaacagatgcaattccaagtaatgtgttaagggatgctgtgaaaaaaaaaaaaaaaaaaaagtttcttggaacctatacgttttttttgttttttttttttgaaaagccagaccttgtgcccttgttttgaacaccgactgggaagatggggcttaggtaacagccaaacctggctgtcagctgtgtgggagccaccaccctctctgggaagagttcctgcttctgtatggcaagcataaatcaagctcagtctgggttatggagaagttgaaaattgttttgttcctcattagtttataattgtatgaaatacgattttaatgaaaacttttcagaattcacgtttgtgtagatatttcagagaaccatttttactttacatcctaaaactgccttttcctatggttttgtcaataaaacactatgatgttg

SEQ ID NO: 193532 - DNA, 2583 bp, Artificial Sequence
  derived and/or modified sequence
atggagcaggtggccgagggcgcccgggtgaccgccgtgcccgtgagcgccgcggatagtactgaggagctggccgaggttgaggaaggggtgggggttgtgggggaggataacgatgcggccgctcgcggagccgaagccttcggagatagcgaggaggatggtgaagatgtattcgaggtggagaaaatcctagatatgaaaacagagggaggcaaggtgctttacaaggtgcgttggaagggctacactagcgacgacgacacctgggagcccgaaatccatctagaggattgcaaggaggtgttgcttgagttcagaaagaagatcgccgagaataaagccaaagccgtcagaaaagatattcagagactcagcctcaacaacgacatcttcgaggcgaactctgattcagatcagcagagcgagacaaaagaggacacctctccaaaaaaaaagaagaagaaactgcggcagagagaggagaaatccccggatgatcttaaaaagaagaaagctaaagccggcaagttaaaggacaaatctaagccagatctggagtcgtccttggagtctctagtcttcgatttacggacgaaaaaacgcatttccgaggccaaggaggagcttaaggagagcaagaaaccaaagaaagacgaggtgaaggaaaccaaagagttgaaaaaggtaaagaagggcgaaattcgggatctgaaaaccaagactcgggaagaccctaaagaaaatagaaaaactaagaaagagaagtttgttgagtcgcaggttgagtctgagtccagcgtgctcaacgattctccctttccagaggatgactccgagggactgcattctgacagcagggaggagaagcagaataccaagtccgcccgggaaagggccgggcaggatatggggcttgagcacggatttgaaaaaccacttgacagtgccatgagcgccgaagaagataccgatgtacgaggaaggaggaaaaagaaaacaccaagaaaagccgaggatacccgagaaaatcgaaaactcgagaataaaaatgcatttttagagaagaaaaccgtgccaaaaaagcaacgcaaccaagaccggagcaagagtgctgcggaattggaaaagctaatgcccgtctccgcccagacccccaaaggccgcagactctcgggtgaagagagagggctctggtccactgattccgccgaagaagacaaagaaaccaagcggaacgagtcaaaagagaagtaccagaaaagacacgacagcgataaggaagagaaggggagaaaagaaccaaaagggctcaaaactttaaaggagataaggaacgcctttgacttgtttaagcttacacccgaagagaagaacgatgtctctgagaacaacagaaaacgcgaagaaattcccctggattttaaaacgatcgatgaccacaaaacaaaagagaataagcaatctctgaaggagcgaagaaatacaagagatgaaaccgatacttgggcctatatcgccgcggaaggggaccaggaggtgctggatagtgtttgccaggccgatgaaaattcagacgggaggcagcaaattctgtctctgggaatggatctgcagctggaatggatgaaactcgaagacttccaaaagcatctcgatggcaaagatgagaatttcgccgccaccgacgccatcccaagtaatgttctccgggatgcagtgaagaatggcgactatataacagttaaagtcgccctcaattccaacgaggagtataatctcgatcaagaagacagctcaggtatgaccctggtaatgctagcggctgcgggagggcaggacgatctactgcgcctcctcattactaaaggagctaaggttaacggtcgccaaaagaacggaacaaccgccttaatccatgcagcagaaaagaatttcctaactactgtagctatcttgttggaggcaggagccttcgtcaacgtccagcagagtaatggtgagacagcactgatgaaagcttgtaagcgagggaatagtgatatagttcggctggtgatcgagtgcggcgctgattgcaatatactctccaagcaccagaattccgccttgcacttcgccaaacagtctaacaacgtcctggtgtatgatcttcttaagaatcacctggagacgctttcgagagtcgcagaagagacgattaaagattacttcgaagcgcgcttggcacttctggagccggtcttcccaatcgcttgtcatcgactctgtgaaggtcccgatttcagcactgacttcaattataaacctccacagaacatccccgaaggatccggtattctgctttttattttccatgccaacttcttaggtaaggaggtaattgcccgcctgtgcggaccatgcagcgtgcaggctgtggttctaaacgataaatttcagctccccgtttttctggatagtcactttgtgtacagcttctcgccagtagctgggccaaacaagctgttcatcagattaaccgaggccccttctgctaaggttaagctgctgatcggagcctaccgagtccagttgcagtag

SEQ ID NO: 193533 - DNA, 1812 bp, Artificial Sequence
  derived and/or modified sequence
atggagcaggtggccgagggcgcccgggtgaccgccgtgcccgtgagcgctgccgattccactgaggaattggctgaggttgaagagggcgttggcgtggtgggagaagataatgacgccgctgccagaggggccgaagcttttggggactctgaggaggacggagaagacgtgttcgaggtggagaagatcctggacatgaagaccgaaggcggaaaagtgttgtataaggtgcggtggaagggctatacatccgacgatgacacctgggagccagagattcatctcgaagactgcaaagaggtgctgctcgagttccgtaagaagatcgccgaaaacaaggccaaggcagtgaggaaggatattcagcgactatcactgaataatgacatttttgaggccaactcggactctgatcagcagtccgaaaccaaggaagacacttcccccaagaaaaaaaagaagaagctcagacagagagaggaaaagtctccagacgacctaaaaaagaagaaggcaaaggcaggcaagctgaaggataagtccaaacccgacctggagagttccctggaatctttagtttttgacttacgaaccaagaagcgcatttcagaggcaaaggaagaacttaaagagtcgaagaaaccgaaaaaggacgaggtgaaagagactaaggagttgaaaaaggttaagaaaggcgaaatcagggatctgaaaaccaagactcgcgaggacccaaaggagaatagaaagacaaaaaaggagaaattcgttgaatcccaagtagagagcgaatcctctgtcctgaacgacagcccctttccagaagacgacagcgaaggccttcatagcgattcacgggaggagaaacagaacaccaagtccgctcgcgagcgggccgggcaggacatgggcctggagcatggcttcgagaagcccttggattccgccatgagtgccgaagaagacacagatgtgcgaggcaggcgaaaaaagaagacacctcgtaaggcagaggacactcgcgagaacagaaagcttgaaaataaaaacgcgtttctggaaaagaaaacagttcccaagaagcagcgcaatcaggacagatccaaatctgcagctgaactcgagaagctgatgcctgtgtccgctcaaacccctaaggggagaaggctctcgggcgaagaaaggggactttggtctactgacagcgcagaggaggataaggaaactaaaaggaatgaatctaaagagaagtaccagaaacgccacgattcggataaagaggagaaggggcgaaaagagccaaagggactgaagacattgaaagagatccgcaatgcattcgatctctttaaactgaccccggaggagaagaatgacgtgagtgaaaacaatcggaagcgcgaagagatcccactcgactttaagaccatcgacgaccacaaaaccaaggagaataagcaaagtttaaaggaacgtcgcaatacaagggacgaaaccgatacttgggcttacatcgcagctgagggcgaccaagaggtgctcgattccgtctgccaggcagatgagaactccgacgggcggcagcaaattttaagcctcggcatggatctccagctggaatggatgaagttggaagacttccagaagcatttagatggtaaggacgagaactttgctgctacggacgccatccccagtaacgttctccgcgacgcggtgaagaagaaaaaaaagaagaagtttctagggacatatacgttctttttattctttttctttgagaaaccggacttagttcctctgttctag

SEQ ID NO: 193534 - DNA, 2583 bp, Artificial Sequence
  derived and/or modified sequence
atggaacaagtggccgaaggagcccgagtgactgctgtgcctgtatcagcggctgactcaaccgaggaactagccgaagtggaagagggcgtgggcgtggtgggcgaagataacgatgcagctgctcgtggcgctgaggcatttggggactcagaggaagacggtgaggatgtgtttgaggtcgagaaaatcctcgacatgaaaacagaggggggaaaggtgttgtataaggtgagatggaaaggttataccagtgatgacgacacctgggagcccgaaatacacttggaggattgcaaagaggttctgctcgagttccggaaaaagatcgccgaaaacaaagcaaaggctgtccggaaagatattcaaagactcagcctgaataatgatatttttgaggctaattcggatagtgaccagcagtctgagactaaagaggatactagcccaaagaaaaaaaagaaaaaacttcgccagcgcgaagagaaatcacctgatgaccttaaaaaaaaaaaagcaaaagccggaaagttgaaggacaagtcgaagcctgatctggaaagttctctcgagtcactggttttcgacctcagaactaagaaacggatctccgaggccaaggaggaactgaaggagtccaaaaaaccgaaaaaggacgaagtgaaagagactaaggagcttaaaaaggtaaaaaaaggagaaattagggatttaaaaaccaaaacacgggaggaccccaaggagaacagaaaaaccaagaaagaaaagttcgtggaatcgcaggttgaatcagaaagctccgtgctgaacgacagcccatttcctgaagacgactctgaagggcttcactccgactcccgcgaagaaaaacagaacactaagagcgccagagaacgcgctggacaagacatgggcttggagcacgggttcgaaaagccacttgactccgccatgtccgctgaagaggacacagatgtgcgcggtagaagaaagaaaaaaactccgagaaaggctgaagacacgcgggagaaccggaaactggaaaacaaaaatgccttcctcgaaaaaaagaccgtgcccaagaaacaaagaaaccaggaccgctccaaaagtgctgccgaactcgaaaagctaatgcctgtttctgctcaaacacccaaagggaggaggttgagcggggaggaacgaggattatggtctaccgacagcgccgaagaagacaaggaaacgaagcggaatgaaagcaaggaaaagtaccaaaaacggcacgactcagacaaagaagagaagggcaggaaggaacccaaaggcctgaaaacattaaaagaaatacggaacgcatttgacctgtttaaactgacacccgaagagaagaacgatgtcagcgaaaataacaggaagcgcgaagaaatccctctggactttaagaccatcgatgatcacaaaactaaagaaaacaagcagtccctaaaggagcgacgcaacacaagagatgagactgacacttgggcatatattgcggcagagggggaccaggaggtgctggacagtgtgtgccaagctgacgaaaacagcgatggacggcaacagattctgtctttgggcatggacctgcagctggaatggatgaagttggaggacttccaaaagcacttagacggtaaagacgagaatttcgcagccacggacgcgattccgtctaatgtgctgagagatgcagtgaagaatggggattacatcacggtgaaggtagcattgaactcaaacgaagaatataacctcgaccaggaggacagcagcggcatgacattagtgatgcttgcagctgcgggtggccaggatgacttattacggctgctcattaccaagggagccaaggtcaatggcaggcagaagaacgggactacagctctaatccatgcagctgagaaaaatttcctgactactgtcgcaatcctgctggaggccggagcctttgtaaacgtgcagcaatcaaatggcgaaaccgcactgatgaaagcctgcaagagaggaaatagtgatatcgtgcggttggtgatagagtgcggcgctgactgtaacattctgtccaagcaccagaactcagcactccacttcgctaagcagtctaataatgtactggtgtatgatctactcaaaaaccaccttgagactctgtctcgggtagcggaagaaactatcaaagactatttcgaggctcgcctggctctgctggaacccgtcttccccatagcgtgtcaccgcctctgcgagggtccagatttctctaccgacttcaattacaaaccaccgcaaaatatcccagagggttcagggatccttcttttcatctttcatgccaacttcctgggtaaagaggtcatcgcccgactctgcgggccttgtagcgttcaggctgtcgtactcaatgataaattccagctccccgtgttcctggactctcactttgtgtactccttcagtcccgtggcaggccctaacaagctatttattcggctgaccgaagctccttctgccaaagtcaaactgcttatcggtgcatatcgcgttcagctccagtag

SEQ ID NO: 193535 - DNA, 1812 bp, Artificial Sequence
  derived and/or modified sequence
atggagcaggtggccgagggggctagggtgaccgctgtccctgtcagtgccgctgatagcaccgaagagttggctgaggtcgaagagggagtaggcgtagtcggagaagacaatgacgccgctgcgagaggagcagaagccttcggagattcggaggaagatggggaggacgttttcgaggtagaaaagatcctggacatgaagactgagggcggtaaagttctctataaagtccgatggaaagggtacacgagcgacgacgatacatgggaacccgagattcatttggaggactgtaaggaggtgctgttagaatttcgtaagaagatcgctgagaacaaagccaaagcggtcaggaaggacatccaacggctttcgctgaacaacgacattttcgaggccaatagtgattccgatcagcagtctgagaccaaggaggatacctctcccaagaagaaaaagaagaagttgcgccagagggaagaaaagagcccagacgacctaaagaagaaaaaagctaaggccggtaagctgaaagacaaatccaagccagatctggaaagtagtctggaaagcctggtgtttgacttgagaaccaagaagaggatcagtgaggctaaggaggagctgaaggaatctaaaaaacccaaaaaagatgaggtgaaggaaactaaggagctgaagaaggttaaaaaaggagaaattagagacctcaaaaccaagaccagagaagatcccaaagaaaatcgaaaaacaaagaaagaaaagtttgtggagagccaagtggagagcgagtcttctgtgctcaacgactcgccgttcccagaagacgactcagagggcttacactctgatagccgagaggagaagcagaacacaaaatctgcccgtgaaagggcgggacaagacatggggctcgaacacggatttgaaaaaccgcttgatagtgcaatgtcagctgaggaagacaccgacgttcgaggccgacggaaaaagaagacccctcgtaaggctgaggataccagggaaaacagaaaactcgagaacaaaaacgcttttttagaaaagaagaccgttcccaagaagcaaaggaatcaagatcgaagcaagtccgctgccgagctcgaaaagctcatgcccgttagcgcccagacgcctaaggggcgacggctgagtggggaagaaagaggcctgtggtctaccgatagcgccgaggaggacaaggaaacaaaacggaacgaatctaaggagaaataccagaagcggcatgactccgataaggaggaaaaaggtcgcaaagagccgaaaggcttgaaaaccttgaaggaaattcggaatgccttcgacctctttaagcttacccccgaggagaagaatgacgtgtctgagaacaatagaaagcgcgaagaaatccctctggattttaaaaccatcgacgaccacaagacgaaggaaaacaaacagtccttgaaggagcggagaaatactcgagatgaaaccgatacatgggcctacatcgccgcagagggggatcaagaggtcttagactccgtgtgccaagctgatgaaaattccgacggacgacaacagatcctctccctgggaatggatttacagctggaatggatgaagttagaggacttccagaagcatctggatggaaaagacgagaacttcgcagcgacagatgccatacctagcaacgtactccgagatgccgtgaaaaaaaaaaagaagaaaaaatttctcggcacgtacaccttttttttatttttctttttcgaaaagccggacttagtgccgttattttag

SEQ ID NO: 193536 - DNA, 2583 bp, Artificial Sequence
  derived and/or modified sequence
atggagcaggtggccgagggcgccagagtgaccgccgtgcccgtgagcgccgccgacagcaccgaggagctggccgaggtggaggagggcgtgggcgtggtgggcgaggacaacgacgccgccgccagaggcgccgaggccttcggcgacagcgaggaggacggcgaggacgtgttcgaggtggagaagatcctggacatgaagaccgagggcggcaaggtgctgtacaaggtgagatggaagggctacaccagcgacgacgacacctgggagcccgagatccacctggaggactgcaaggaggtgctgctggagttcagaaagaagatcgccgagaacaaggccaaggccgtgagaaaggacatccagagactgagcctgaacaacgacatcttcgaggccaacagcgacagcgaccagcagagcgagaccaaggaggacaccagccccaagaagaagaagaagaagctgagacagagagaggagaagagccccgacgacctgaagaagaagaaggccaaggccggcaagctgaaggacaagagcaagcccgacctggagagcagcctggagagcctggtgttcgacctgagaaccaagaagagaatcagcgaggccaaggaggagctgaaggagagcaagaagcccaagaaggacgaggtgaaggagaccaaggagctgaagaaggtgaagaagggcgagatcagagacctgaagaccaagaccagagaggaccccaaggagaacagaaagaccaagaaggagaagttcgtggagagccaggtggagagcgagagcagcgtgctgaacgacagccccttccccgaggacgacagcgagggcctgcacagcgacagcagagaggagaagcagaacaccaagagcgccagagagagagccggccaggacatgggcctggagcacggcttcgagaagcccctggacagcgccatgagcgccgaggaggacaccgacgtgagaggcagaagaaagaagaagacccccagaaaggccgaggacaccagagagaacagaaagctggagaacaagaacgccttcctggagaagaagaccgtgcccaagaagcagagaaaccaggacagaagcaagagcgccgccgagctggagaagctgatgcccgtgagcgcccagacccccaagggcagaagactgagcggcgaggagagaggcctgtggagcaccgacagcgccgaggaggacaaggagaccaagagaaacgagagcaaggagaagtaccagaagagacacgacagcgacaaggaggagaagggcagaaaggagcccaagggcctgaagaccctgaaggagatcagaaacgccttcgacctgttcaagctgacccccgaggagaagaacgacgtgagcgagaacaacagaaagagagaggagatccccctggacttcaagaccatcgacgaccacaagaccaaggagaacaagcagagcctgaaggagagaagaaacaccagagacgagaccgacacctgggcctacatcgccgccgagggcgaccaggaggtgctggacagcgtgtgccaggccgacgagaacagcgacggcagacagcagatcctgagcctgggcatggacctgcagctggagtggatgaagctggaggacttccagaagcacctggacggcaaggacgagaacttcgccgccaccgacgccatccccagcaacgtgctgagagacgccgtgaagaacggcgactacatcaccgtgaaggtggccctgaacagcaacgaggagtacaacctggaccaggaggacagcagcggcatgaccctggtgatgctggccgccgccggcggccaggacgacctgctgagactgctgatcaccaagggcgccaaggtgaacggcagacagaagaacggcaccaccgccctgatccacgccgccgagaagaacttcctgaccaccgtggccatcctgctggaggccggcgccttcgtgaacgtgcagcagagcaacggcgagaccgccctgatgaaggcctgcaagagaggcaacagcgacatcgtgagactggtgatcgagtgcggcgccgactgcaacatcctgagcaagcaccagaacagcgccctgcacttcgccaagcagagcaacaacgtgctggtgtacgacctgctgaagaaccacctggagaccctgagcagagtggccgaggagaccatcaaggactacttcgaggccagactggccctgctggagcccgtgttccccatcgcctgccacagactgtgcgagggccccgacttcagcaccgacttcaactacaagcccccccagaacatccccgagggcagcggcatcctgctgttcatcttccacgccaacttcctgggcaaggaggtgatcgccagactgtgcggcccctgcagcgtgcaggccgtggtgctgaacgacaagttccagctgcccgtgttcctggacagccacttcgtgtacagcttcagccccgtggccggccccaacaagctgttcatcagactgaccgaggcccccagcgccaaggtgaagctgctgatcggcgcctacagagtgcagctgcagtag

SEQ ID NO: 193537 - DNA, 1812 bp, Artificial Sequence
  derived and/or modified sequence
atggagcaggtggccgagggcgccagagtgaccgccgtgcccgtgagcgccgccgacagcaccgaggagctggccgaggtggaggagggcgtgggcgtggtgggcgaggacaacgacgccgccgccagaggcgccgaggccttcggcgacagcgaggaggacggcgaggacgtgttcgaggtggagaagatcctggacatgaagaccgagggcggcaaggtgctgtacaaggtgagatggaagggctacaccagcgacgacgacacctgggagcccgagatccacctggaggactgcaaggaggtgctgctggagttcagaaagaagatcgccgagaacaaggccaaggccgtgagaaaggacatccagagactgagcctgaacaacgacatcttcgaggccaacagcgacagcgaccagcagagcgagaccaaggaggacaccagccccaagaagaagaagaagaagctgagacagagagaggagaagagccccgacgacctgaagaagaagaaggccaaggccggcaagctgaaggacaagagcaagcccgacctggagagcagcctggagagcctggtgttcgacctgagaaccaagaagagaatcagcgaggccaaggaggagctgaaggagagcaagaagcccaagaaggacgaggtgaaggagaccaaggagctgaagaaggtgaagaagggcgagatcagagacctgaagaccaagaccagagaggaccccaaggagaacagaaagaccaagaaggagaagttcgtggagagccaggtggagagcgagagcagcgtgctgaacgacagccccttccccgaggacgacagcgagggcctgcacagcgacagcagagaggagaagcagaacaccaagagcgccagagagagagccggccaggacatgggcctggagcacggcttcgagaagcccctggacagcgccatgagcgccgaggaggacaccgacgtgagaggcagaagaaagaagaagacccccagaaaggccgaggacaccagagagaacagaaagctggagaacaagaacgccttcctggagaagaagaccgtgcccaagaagcagagaaaccaggacagaagcaagagcgccgccgagctggagaagctgatgcccgtgagcgcccagacccccaagggcagaagactgagcggcgaggagagaggcctgtggagcaccgacagcgccgaggaggacaaggagaccaagagaaacgagagcaaggagaagtaccagaagagacacgacagcgacaaggaggagaagggcagaaaggagcccaagggcctgaagaccctgaaggagatcagaaacgccttcgacctgttcaagctgacccccgaggagaagaacgacgtgagcgagaacaacagaaagagagaggagatccccctggacttcaagaccatcgacgaccacaagaccaaggagaacaagcagagcctgaaggagagaagaaacaccagagacgagaccgacacctgggcctacatcgccgccgagggcgaccaggaggtgctggacagcgtgtgccaggccgacgagaacagcgacggcagacagcagatcctgagcctgggcatggacctgcagctggagtggatgaagctggaggacttccagaagcacctggacggcaaggacgagaacttcgccgccaccgacgccatccccagcaacgtgctgagagacgccgtgaagaagaagaagaagaagaagttcctgggcacctacaccttcttcctgttcttcttcttcgagaagcccgacctggtgcccctgttctag

SEQ ID NO: 193538 - protein, 238 aa, Artificial Sequence
  derived and/or modified sequence
MRQSGASQPLLINMYLPDPVGDGLFKDGKNPSWGPLSPAVQKGSGQIQLWQFLLELLADRANAGCIAWEGGHGEFKLTDPDEVARRWGERKSKPNMNYDKLSRALRYYYDKNIMSKVHGKRYAYRFDFQGLAQACQPPPAHAHAAAAAAAAAAAAQDGALYKLPAGLAPLPFPGLSKLNLMAASAGVAPAGFSYWPGPGPAATAAAATAALYPSPSLQPPPGPFGAVAAASHLGGHYH

SEQ ID NO: 193539 - DNA, 1901 bp, Artificial Sequence
  derived and/or modified sequence
gcggcgagtggagcgggagccgactggaagaagggctctagggagggggctgtggctgctggggtccgaggtggggccgggtacaccagccccatcactgtttgcagagagtcagggaggcggaaaagacacgcgctctaggctcccatcagggcacatggcccgggcccatcccccgcgcgtctccccggctgcggggcgcggggggctgccgggtgcgcttggctgtggcgcggcgcgttggagactttattgcgatgggacgataagaggggcgggggcggggtcctgggggccgaggcggcagcgctttaattaaaacggaaattgcggccccgggccgcgcgggggccggagggttccaagcggccccttagctggaagcgtttctccaggacccccccgcaacccccgccacgcccgggctgccccctcccgccaggccctgccggacccggcgccgtcttctcctccttgtcacccgcggtcgcttcgggcggggatcggtgccaccgagcgcaaagcctgcctcgccccccttccccgtcccccccatctcccaccgcccagtccccggcggcgatgagacagagcggcgcctcccagcccctgctgatcaacatgtacctgccagatcccgtcggagacggtctcttcaaggacgggaagaacccgagctgggggccgctgagccccgcggttcagaaaggcagcggacagatccagctgtggcagtttctgctggagctgctggctgaccgcgcgaacgccggctgcatcgcgtgggagggcggtcacggcgagttcaagctcacggacccggacgaggtggcgcggcggtggggcgagcgcaagagcaagcccaacatgaactacgacaagctgagccgcgccctgcgctactactacgacaagaacatcatgagcaaggtgcatggcaagcgctacgcctaccgcttcgacttccagggcctggcgcaggcctgccagccgccgcccgcgcacgctcatgccgccgccgcagctgctgccgccgccgcggccgcccaggacggcgcgctctacaagctgcccgccggcctcgccccgctgcccttccccggcctctccaaactcaacctcatggccgcctcggccggggtcgcgcccgccggcttctcctactggccgggcccgggccccgccgccaccgctgccgccgccaccgccgcgctctaccccagtcccagcttgcagcccccgcccgggcccttcggggccgtggccgcagcctcgcacttggggggccattaccactagacggggcggtcgggtgcctgcggcctcgcccgcacgcctagagtctcgcccgatcccatcggcatcccggggagggcccgggagcctccgtcaaccgtcctctaatccagagtttactccacctgccgcacttagcagggggacgggaccgaagctccctcaatccttgtctggtactagatttgctcctgtcccaccccgcagtcccctgaggagggcgatgtgcgccctctttcactttttttcttctaggtctccaggtcccggaggggatttgtggacctctcttgtctccccaccactccagtgcatttccgcctggctcctagaagccccattcaatatcactactctttaacgagtgccaaatcttttcccacttttgctcttccccaaggaactgctcccacctcagcacgtggaggcctctcacggtcctccttcctgggacctgagcaggtttggtgaaagccaccgtcctccgtgacacacggcccccttcctcctgtccccacactcccaggagaaactcccggtgtgtttctgaccctttcagccccattaaagctcctgagctctcaaaaaaaaaaaaaaaaaaaaaa

SEQ ID NO: 193540 - DNA, 1173 bp, Artificial Sequence
  derived and/or modified sequence
aggacacgtggaaacgcaaccgccaggaggaaaggcgggacacagcgggaagggaggtttgcctcccctctcttcctgtggtgacccccacctcacttacaaaaatcaccaccgacgtttgggaaccgtgcacgccgactgaaagcaaagctcagctgacctgcgaggagtccccggggagctgccgcggtggtcgccgttgagtccgtccgtgccgctggggccgaggcagctggagatgtggtcaacgggctgatgggcacggctgtgggaccccatcattcccctgccccgcatgactctgctctcccagctcgactgctcacttcagacttcccttatggaaggagttgccagatagagcaagtaaaatacagtgtgccagacacaggtttatttcaacactgggaaggctccattcctacttaaacccagcagggaacagggagcggtgtgcagaggaggtggcctgcccgggaagccggccttggtgctgggactgcagggagagggctgtgaggaagagcacaggcttcatgcacattgcacagaggaggagattcatggggacagcaggcactggttaggcacagcgggaaggttatcgaagacaaaacacatttctacccaagtttaaatgacctgctatgcccacagagcttgatccagaagtgcacaggtaagtatttagcaggctggccgatgttgatttgaacaatctcaagaatgtgctctttagtgcattaaacatatgtgacgagagctgagcacgtttaaaatctcagtaactttggggtttgtaagtgttgtagctcatagtgtcggttaaggttagacatctcagtcacatgctgtcttggcaccagctgtggactgtgctgtgaaagagatctgtgaccttgcaccctgagatctcaggctcaattaagagacaaaacaggcaatgcagtatcagtgcagatgggaaagagaaagcagaaagtatgaagagggaaaggaggagcacaaaggagttagcattagtctctactgagcaattcctattccaaccacgtcctaaatgatgagttggatcctagcagaaagggaacacatgttatttttaactgattttaacttgatttattgtaacctatcaggagctcttaataaatatggctctttatgttgtta

SEQ ID NO: 193541 - DNA, 1879 bp, Artificial Sequence
  derived and/or modified sequence
gcggcgagtggagcgggagccgactggaagaagggctctagggagggggctgtggctgctggggtccgaggtggggccgggtacaccagccccatcactgtttgcagagagtcagggaggcggaaaagacacgcgctctaggctcccatcagggcacatggcccgggcccatcccccgcgcgtctccccggctgcggggcgcggggggctgccgggtgcgcttggctgtggcgcggcgcgttggagactttattgcgatgggacgataagaggggcgggggcggggtcctgggggccgaggcggcagcgctttaattaaaacggaaattgcggccccgggccgcgcgggggccggagggttccaagcggccccttagctggaagcgtttctccaggacccccccgcaacccccgccacgcccgggctgccccctcccgccaggccctgccggacccggcgccgtcttctcctccttgtcacccgcggtcgcttcgggcggggatcggtgccaccgagcgcaaagcctgcctcgccccccttccccgtcccccccatctcccaccgcccagtccccggcggcgatgagacagagcggcgcctcccagcccctgctgatcaacatgtacctgccagatcccgtcggagacggtctcttcaaggacgggaagaacccgagctgggggccgctgagccccgcggttcagaaaggcagcggacagatccagctgtggcagtttctgctggagctgctggctgaccgcgcgaacgccggctgcatcgcgtgggagggcggtcacggcgagttcaagctcacggacccggacgaggtggcgcggcggtggggcgagcgcaagagcaagcccaacatgaactacgacaagctgagccgcgccctgcgctactactacgacaagaacatcatgagcaaggtgcatggcaagcgctacgcctaccgcttcgacttccagggcctggcgcaggcctgccagccgccgcccgcgcacgctcatgccgccgccgcagctgctgccgccgccgcggccgcccaggacggcgcgctctacaagctgcccgccggcctcgccccgctgcccttccccggcctctccaaactcaacctcatggccgcctcggccggggtcgcgcccgccggcttctcctactggccgggcccgggccccgccgccaccgctgccgccgccaccgccgcgctctaccccagtcccagcttgcagcccccgcccgggcccttcggggccgtggccgcagcctcgcacttggggggccattaccactagacggggcggtcgggtgcctgcggcctcgcccgcacgcctagagtctcgcccgatcccatcggcatcccggggagggcccgggagcctccgtcaaccgtcctctaatccagagtttactccacctgccgcacttagcagggggacgggaccgaagctccctcaatccttgtctggtactagatttgctcctgtcccaccccgcagtcccctgaggagggcgatgtgcgccctctttcactttttttcttctaggtctccaggtcccggaggggatttgtggacctctcttgtctccccaccactccagtgcatttccgcctggctcctagaagccccattcaatatcactactctttaacgagtgccaaatcttttcccacttttgctcttccccaaggaactgctcccacctcagcacgtggaggcctctcacggtcctccttcctgggacctgagcaggtttggtgaaagccaccgtcctccgtgacacacggcccccttcctcctgtccccacactcccaggagaaactcccggtgtgtttctgaccctttcagccccattaaagctcctgagctctc

SEQ ID NO: 193542 - DNA, 717 bp, Artificial Sequence
  derived and/or modified sequence
atgaggcaatcgggagctagtcagccactgctgatcaacatgtaccttcccgaccccgtgggagatggactctttaaggacggtaagaacccctcttggggcccactgtcccccgccgttcaaaagggatccggacagattcagctctggcagtttctgctggaactgttggcagatcgcgccaacgctgggtgtatagcttgggaaggaggacacggtgagttcaagttaaccgacccagacgaggtggccaggcgctggggggagcggaagtccaagcccaacatgaattatgataagttgagtcgcgccttacgatactattatgacaagaatattatgtccaaggtccacggcaagaggtatgcctaccggtttgatttccagggactggcccaagcatgtcagccccctccagcccacgcacatgccgcagcagccgcagcagcggcggccgctgccgctcaggatggcgccctttacaagctgcccgcaggactggcccccttgccttttcccggcctctcaaagcttaacctaatggctgcaagcgctggagtggcccccgcaggtttctcttattggcctggcccaggtcccgccgccaccgccgctgcagccacagccgctctctacccctctccaagtttacaaccccctcctgggccgttcggcgcagtggctgccgcaagtcatcttggcggtcactaccactag

SEQ ID NO: 193543 - DNA, 717 bp, Artificial Sequence
  derived and/or modified sequence
atgaggcagagcggggccagccagcccctgctgatcaacatgtacctgcctgaccctgtgggagatggcctcttcaaggatggcaagaaccccagctggggccccctgagccctgctgtgcagaagggcagcggccagatccagctgtggcagttcctgctggagctgctggccgaccgggccaatgccggctgcatcgcctgggagggcggccacggggagttcaagctgacagatcctgatgaggtggcccggcgctggggcgagaggaagagcaagcccaacatgaactatgacaagctgagccgggccctgcgctactactatgacaagaacatcatgagcaaggtgcacggcaagagatatgcctacagatttgacttccagggcctggcccaggcctgccagcccccaccagcccacgcccacgccgctgctgctgctgctgctgctgctgctgctgcccaggatggagccctgtacaagctgcctgctggcctggcccccctgcccttccctggcctgagcaagctgaacctgatggccgccagcgctggggtggccccagctggcttctcctactggccaggccctggccctgctgccacagctgctgctgccacagctgccctgtaccccagccccagcctgcagcccccacctggcccctttggagctgtggccgccgccagccacctgggcggccactaccactag

SEQ ID NO: 193544 - DNA, 717 bp, Artificial Sequence
  derived and/or modified sequence
atgcggcagagcggcgccagccagcccctgctgatcaacatgtaccttcccgaccctgttggggacggcttgtttaaggatggaaaaaatcccagttggggccctctttctccagccgtgcagaagggcagcgggcagatccagctgtggcaatttttgcttgagctgctggccgaccgggctaatgccggttgcatcgcatgggaaggcggacatggcgagttcaagctaaccgatcctgacgaggtggcaagacgctggggggagagaaagtcaaaaccgaacatgaattatgataagctgagtagagccctccggtactactacgacaaaaacataatgtccaaggtccacggcaagcgctacgcgtataggtttgatttccagggactggcgcaggcttgccaacctccaccggcccatgcccacgccgccgctgctgcagcagccgccgctgcagccgcccaggacggagctttgtataagctgcctgctggcctcgccccattgccctttccgggcctctctaagttgaacctgatggcagcctcagccggagtagctcctgccgggttctcctactggccaggacccggccccgcggctacagcggccgccgccacagccgcgttgtaccccagcccgtcacttcagcccccccccggaccatttggggctgtggcggcggcaagccaccttggaggacactatcactag

SEQ ID NO: 193545 - DNA, 717 bp, Artificial Sequence
  derived and/or modified sequence
atgaggcagtcaggcgcaagccaacctttattgatcaacatgtatctgccagacccagtgggcgacggcctcttcaaagacggtaagaatccatcctggggacccctctcgcccgcagttcagaaaggctcagggcaaatccagttatggcagtttctccttgaattactagctgaccgagcaaacgccggttgcattgcctgggagggtggtcacggtgagttcaaactgaccgatcccgatgaggtcgcgagacgctggggagaacgcaaatcaaaaccaaatatgaattatgacaaactctcaagagcgttgcggtattactacgataagaacatcatgtcaaaggttcatggaaagaggtatgcctaccggtttgactttcaaggcttggcacaggcctgccagccccctccagcacatgctcacgctgccgctgctgccgctgccgcagcggcagccgcacaagacggcgctctttacaaactccctgcaggcctcgccccactgcccttccccggactgtccaagctgaatctgatggctgcctccgctggagtggctccggctggattctcttactggcctggcccaggcccagccgctaccgctgctgccgcaactgcggcactgtacccttctccttcccttcaaccacccccaggcccatttggagctgtggctgccgcatcccatctgggcggacattaccactag

SEQ ID NO: 193546 - DNA, 717 bp, Artificial Sequence
  derived and/or modified sequence
atgagacagagcggcgccagccagcccctgctgatcaacatgtacctgcccgaccccgtgggcgacggcctgttcaaggacggcaagaaccccagctggggccccctgagccccgccgtgcagaagggcagcggccagatccagctgtggcagttcctgctggagctgctggccgacagagccaacgccggctgcatcgcctgggagggcggccacggcgagttcaagctgaccgaccccgacgaggtggccagaagatggggcgagagaaagagcaagcccaacatgaactacgacaagctgagcagagccctgagatactactacgacaagaacatcatgagcaaggtgcacggcaagagatacgcctacagattcgacttccagggcctggcccaggcctgccagcccccccccgcccacgcccacgccgccgccgccgccgccgccgccgccgccgccgcccaggacggcgccctgtacaagctgcccgccggcctggcccccctgcccttccccggcctgagcaagctgaacctgatggccgccagcgccggcgtggcccccgccggcttcagctactggcccggccccggccccgccgccaccgccgccgccgccaccgccgccctgtaccccagccccagcctgcagcccccccccggccccttcggcgccgtggccgccgccagccacctgggcggccactaccactag

SEQ ID NO: 193547 - protein, 301 aa, Artificial Sequence
  derived and/or modified sequence
MEGDFSVCRNCKRHVVSANFTLHEAYCLRFLVLCPECEEPVPKETMEEHCKLEHQQVGCTMCQQSMQKSSLEFHKANECQERPVECKFCKLDMQLSKLELHESYCGSRTELCQGCGQFIMHRMLAQHRDVCRSEQAQLGKGERISAPEREIYCHYCNQMIPENKYFHHMGKCCPDSEFKKHFPVGNPEILPSSLPSQAAENQTSTMEKDVRPKTRSINRFPLHSESSSKKAPRSKNKTLDPLLMSEPKPRTSSPRGDKAAYDILRRCSQCGILLPLPILNQHQEKCRWLASSKGKQVRNFS

SEQ ID NO: 193548 - protein, 164 aa, Artificial Sequence
  derived and/or modified sequence
MEGDFSVCRNCKRHVVSANFTLHEAYCLRFLVLCPECEEPVPKETMEEHCKLEHQQVGCTMCQQSMQKSSLEFHKANECQERPVECKFCKLDMQLSKLELHESYCGSRTELCQGCGQFIMHRMLAQHRDVCRSEQAQLGKETSPDPGKCLSITVAAALSAHLWP

SEQ ID NO: 193549 - protein, 301 aa, Artificial Sequence
  derived and/or modified sequence
MEGDFSVCRNCKRHVVSANFTLHEAYCLRFLVLCPECEEPVPKETMEEHCKLEHQQVSEMGSGRGKCSILPARKKANECQERPVECKFCKLDMQLSKLELHESYCGSRTELCQGCGQFIMHRMLAQHRDVCRSEQAQLGKGERISAPEREIYCHYCNQMIPENKYFHHMGKCCPDSEFKKHFPVGNPEILPSSLPSQAAENQTSTMEKDVRPKTRSINRFPLHSESSSKKAPRSKNKTLDPLLMSEPKPRTSSPRGDKAAYDILRRCSQCGILLPLPILNQHQEKCRWLASSKGKQVRNFS

SEQ ID NO: 193550 - DNA, 906 bp, Artificial Sequence
  derived and/or modified sequence
atggagggcgacttcagcgtgtgcagaaactgcaagagacacgtggtgagcgccaacttcaccctgcacgaggcctactgcctgagattcctggtgctgtgccccgagtgcgaggagcccgtgcccaaggagaccatggaggagcactgcaagctggagcaccagcaggtgggctgcaccatgtgccagcagagcatgcagaagagcagcctggagttccacaaggccaacgagtgccaggagagacccgtggagtgcaagttctgcaagctggacatgcagctgagcaagctggagctgcacgagagctactgcggcagcagaaccgagctgtgccagggctgcggccagttcatcatgcacagaatgctggcccagcacagagacgtgtgcagaagcgagcaggcccagctgggcaagggcgagagaatcagcgcccccgagagagagatctactgccactactgcaaccagatgatccccgagaacaagtacttccaccacatgggcaagtgctgccccgacagcgagttcaagaagcacttccccgtgggcaaccccgagatcctgcccagcagcctgcccagccaggccgccgagaaccagaccagcaccatggagaaggacgtgagacccaagaccagaagcatcaacagattccccctgcacagcgagagcagcagcaagaaggcccccagaagcaagaacaagaccctggaccccctgctgatgagcgagcccaagcccagaaccagcagccccagaggcgacaaggccgcctacgacatcctgagaagatgcagccagtgcggcatcctgctgcccctgcccatcctgaaccagcaccaggagaagtgcagatggctggccagcagcaagggcaagcaggtgagaaacttcagctag

SEQ ID NO: 193551 - DNA, 495 bp, Artificial Sequence
  derived and/or modified sequence
atggagggcgacttcagcgtgtgcagaaactgcaagagacacgtggtgagcgccaacttcaccctgcacgaggcctactgcctgagattcctggtgctgtgccccgagtgcgaggagcccgtgcccaaggagaccatggaggagcactgcaagctggagcaccagcaggtgggctgcaccatgtgccagcagagcatgcagaagagcagcctggagttccacaaggccaacgagtgccaggagagacccgtggagtgcaagttctgcaagctggacatgcagctgagcaagctggagctgcacgagagctactgcggcagcagaaccgagctgtgccagggctgcggccagttcatcatgcacagaatgctggcccagcacagagacgtgtgcagaagcgagcaggcccagctgggcaaggagaccagccccgaccccggcaagtgcctgagcatcaccgtggccgccgccctgagcgcccacctgtggccctag

SEQ ID NO: 193552 - DNA, 906 bp, Artificial Sequence
  derived and/or modified sequence
atggagggcgacttcagcgtgtgcagaaactgcaagagacacgtggtgagcgccaacttcaccctgcacgaggcctactgcctgagattcctggtgctgtgccccgagtgcgaggagcccgtgcccaaggagaccatggaggagcactgcaagctggagcaccagcaggtgagcgagatgggcagcggcagaggcaagtgcagcatcctgcccgccagaaagaaggccaacgagtgccaggagagacccgtggagtgcaagttctgcaagctggacatgcagctgagcaagctggagctgcacgagagctactgcggcagcagaaccgagctgtgccagggctgcggccagttcatcatgcacagaatgctggcccagcacagagacgtgtgcagaagcgagcaggcccagctgggcaagggcgagagaatcagcgcccccgagagagagatctactgccactactgcaaccagatgatccccgagaacaagtacttccaccacatgggcaagtgctgccccgacagcgagttcaagaagcacttccccgtgggcaaccccgagatcctgcccagcagcctgcccagccaggccgccgagaaccagaccagcaccatggagaaggacgtgagacccaagaccagaagcatcaacagattccccctgcacagcgagagcagcagcaagaaggcccccagaagcaagaacaagaccctggaccccctgctgatgagcgagcccaagcccagaaccagcagccccagaggcgacaaggccgcctacgacatcctgagaagatgcagccagtgcggcatcctgctgcccctgcccatcctgaaccagcaccaggagaagtgcagatggctggccagcagcaagggcaagcaggtgagaaacttcagctag

SEQ ID NO: 193553 - DNA, 906 bp, Artificial Sequence
  derived and/or modified sequence
atggagggggacttttcggtgtgtagaaattgcaaacggcatgttgtttccgcaaactttacgctgcacgaggcttattgcctgaggtttctggtgctctgcccagagtgtgaggaacccgtacccaaggagaccatggaagaacactgtaagcttgagcaccaacaggtgggttgtactatgtgtcaacagtctatgcagaaaagttccctggagtttcataaagccaacgagtgccaggagaggcctgtggagtgcaagttctgcaagctagatatgcagttatccaagctggagctccacgagtcttattgtggatcccggaccgaattgtgtcagggctgtgggcagtttataatgcatcggatgttggcccagcatagagatgtctgccggtctgaacaggcacagctaggaaaaggcgaacgaatcagtgcccccgagagggaaatctactgccattactgcaaccagatgatccccgagaacaagtatttccatcacatgggaaaatgttgtccggatagtgagtttaagaagcacttcccagttggcaacccagagatcctgcccagctctctcccctcccaggcagccgagaaccagacttcaaccatggaaaaggatgtcagaccgaaaacccgctccatcaataggtttcctctacactctgagtcgagtagcaagaaggcaccccgcagcaaaaataagactctggatccgctacttatgtcggaacctaagcctcgtacatcatctccacggggggataaggctgcctatgacattctgcgcaggtgctcccaatgtggaatcctcctccctctgccgatcctgaaccaacaccaggaaaaatgtcggtggctggcaagcagcaaaggcaagcaggtgcgtaactttagctag

SEQ ID NO: 193554 - DNA, 495 bp, Artificial Sequence
  derived and/or modified sequence
atggaaggggacttttccgtgtgtaggaattgcaagcgccatgttgtttcagcgaattttacattgcatgaagcatattgtctgcgtttcctggtcctatgccccgaatgtgaagagcctgtgcctaaggagacgatggaggaacactgtaagctcgagcatcagcaggtcggatgtacaatgtgtcagcagagtatgcaaaagagctccttggaatttcataaagccaatgagtgccaggaacggccagttgagtgtaaattctgcaaacttgacatgcaactgagcaagctggaactgcatgaatcatattgcggctcccggactgaactgtgccagggatgcggacagtttatcatgcacaggatgttagcacagcatagagacgtgtgtagaagtgaacaggctcagttgggaaaagagacctcacctgacccaggtaagtgcctctccattactgtggctgccgccttaagcgctcatctgtggccctag

SEQ ID NO: 193555 - DNA, 906 bp, Artificial Sequence
  derived and/or modified sequence
atggagggggatttttccgtctgcaggaactgtaagcggcatgtagtgagcgcaaatttcaccttgcatgaagcttattgcctgcggtttctggtgctatgtccggagtgtgaagagccagtcccgaaagagacaatggaggaacactgcaaacttgagcaccagcaggtgtctgagatgggatcaggccgagggaagtgctcaattctccctgcccggaaaaaggccaacgaatgccaggaaagaccagttgagtgtaagttctgcaaactcgatatgcaattgtcgaagcttgaactgcatgaaagctattgcgggagccgaaccgaactgtgtcaaggctgtggacagtttattatgcataggatgctggcgcagcacagagatgtgtgcaggagtgaacaggcacagcttggaaaaggcgaaagaattagtgcaccagagagggagatttattgccactattgtaatcaaatgattcctgaaaataaatattttcaccacatgggcaagtgttgtccggattccgaatttaagaagcattttcccgtaggtaatcccgagatactgccttcttctctcccatcccaggctgctgagaatcaaacctccactatggagaaggatgtgaggcccaagacacggtctattaatagattcccccttcactccgagagttcatctaaaaaagcaccacgtagtaagaacaagaccctggaccctctactcatgtctgagcccaagccgagaaccagttccccgagaggggacaaggcagcatacgacatactccggcgatgtagccagtgcggtattcttcttccgctccccatcctcaaccagcatcaagaaaaatgccgatggcttgcttccagcaaggggaaacaggttaggaatttcagttag

SEQ ID NO: 193556 - DNA, 906 bp, Artificial Sequence
  derived and/or modified sequence
atggagggggacttctctgtgtgcaggaactgcaagagacatgtggtgtctgccaacttcaccctgcacgaggcctactgcctgcgcttcctggtgctgtgcccagaatgtgaggagcctgtgcccaaggagaccatggaggagcactgcaagctggagcaccagcaggtgggctgcaccatgtgccagcagagcatgcagaagagcagcctggagttccacaaggccaatgaatgccaggagaggcctgtggagtgcaagttctgcaagctggacatgcagctgagcaagctggagctgcacgagagctactgcggcagcaggacagagctgtgccagggctgcggccagttcatcatgcacaggatgctggcccagcacagagatgtgtgccgctctgagcaggcccagctgggcaagggggagcgcatcagcgcccctgagcgggagatctactgccactactgcaaccagatgatccctgagaacaagtacttccaccacatgggcaagtgctgcccagacagcgagttcaagaagcacttccctgtgggcaaccctgagatcctgcccagcagcctgcccagccaggccgctgagaaccagaccagcaccatggagaaggatgtgcggcccaagaccaggagcatcaaccgcttccccctgcacagcgagagcagcagcaagaaggcccccaggagcaagaacaagaccctggaccccctgctgatgtctgagcccaagcccaggaccagcagccccaggggggacaaggccgcctatgacatcctgcggcgctgcagccagtgtggcatcctgctgcccctgcccatcctgaaccagcaccaggagaagtgccgctggctggccagcagcaagggcaagcaggtgaggaacttctcctag

SEQ ID NO: 193557 - DNA, 495 bp, Artificial Sequence
  derived and/or modified sequence
atggagggggacttctctgtgtgcaggaactgcaagagacatgtggtgtctgccaacttcaccctgcacgaggcctactgcctgcgcttcctggtgctgtgcccagaatgtgaggagcctgtgcccaaggagaccatggaggagcactgcaagctggagcaccagcaggtgggctgcaccatgtgccagcagagcatgcagaagagcagcctggagttccacaaggccaatgaatgccaggagaggcctgtggagtgcaagttctgcaagctggacatgcagctgagcaagctggagctgcacgagagctactgcggcagcaggacagagctgtgccagggctgcggccagttcatcatgcacaggatgctggcccagcacagagatgtgtgccgctctgagcaggcccagctgggcaaggagaccagcccagaccccgggaagtgcctgagcatcaccgtggccgccgccctgagcgcccacctgtggccctag

SEQ ID NO: 193558 - DNA, 906 bp, Artificial Sequence
  derived and/or modified sequence
atggagggggacttctctgtgtgcaggaactgcaagagacatgtggtgtctgccaacttcaccctgcacgaggcctactgcctgcgcttcctggtgctgtgcccagaatgtgaggagcctgtgcccaaggagaccatggaggagcactgcaagctggagcaccagcaggtgtctgagatgggcagcggccggggcaagtgcagcatcctgcctgccaggaagaaggccaatgaatgccaggagaggcctgtggagtgcaagttctgcaagctggacatgcagctgagcaagctggagctgcacgagagctactgcggcagcaggacagagctgtgccagggctgcggccagttcatcatgcacaggatgctggcccagcacagagatgtgtgccgctctgagcaggcccagctgggcaagggggagcgcatcagcgcccctgagcgggagatctactgccactactgcaaccagatgatccctgagaacaagtacttccaccacatgggcaagtgctgcccagacagcgagttcaagaagcacttccctgtgggcaaccctgagatcctgcccagcagcctgcccagccaggccgctgagaaccagaccagcaccatggagaaggatgtgcggcccaagaccaggagcatcaaccgcttccccctgcacagcgagagcagcagcaagaaggcccccaggagcaagaacaagaccctggaccccctgctgatgtctgagcccaagcccaggaccagcagccccaggggggacaaggccgcctatgacatcctgcggcgctgcagccagtgtggcatcctgctgcccctgcccatcctgaaccagcaccaggagaagtgccgctggctggccagcagcaagggcaagcaggtgaggaacttctcctag

SEQ ID NO: 193559 - DNA, 906 bp, Artificial Sequence
  derived and/or modified sequence
atggagggcgacttcagcgtgtgccggaactgcaagcggcacgtggtgtcagcgaacttcacattgcatgaggcctattgcctgcgattcctcgttttgtgtcctgaatgcgaggagcctgtacccaaagaaactatggaggagcactgtaagcttgagcaccaacaagtaggatgcaccatgtgccagcagagtatgcagaaatcttccttggaatttcacaaagccaacgagtgtcaggaacgccccgtcgagtgtaagttttgtaaactggacatgcagctgtcgaaactcgagctgcacgaaagctattgtgggtctcgaacggaattatgccaaggatgcggacagtttatcatgcatcggatgttagcccaacatcgggacgtgtgcaggtctgagcaggcacaattggggaagggagagcggatttcggctcctgaacgggaaatctattgtcactactgcaaccagatgatcccggaaaacaaatacttccaccacatgggtaaatgttgccccgactccgagtttaagaaacatttcccagtgggtaatccggagatattgcccagctccttgccatcccaggccgcagagaatcaaacttctactatggaaaaagatgtccggccaaaaacccggtccattaatagatttcctctccattctgaaagttcctctaaaaaggcaccccggagtaaaaataagaccctcgacccgctgctaatgtcggagccaaagccccggacaagttccccacgcggcgacaaagctgcttatgacatcctgcggcgatgctcccagtgtggcattctgctaccactgcccattctgaaccagcaccaggaaaagtgtagatggctggccagcagcaagggaaaacaggtccggaacttcagctag

SEQ ID NO: 193560 - DNA, 495 bp, Artificial Sequence
  derived and/or modified sequence
atggagggcgacttcagcgtgtgccggaactgcaagcggcacgtggtcagtgccaatttcaccctgcacgaagcctattgtcttcggttcttagtgctgtgcccagaatgcgaggagccagtgccaaaggagacaatggaggagcactgtaaactggaacaccagcaggtaggatgtacaatgtgtcaacagtcaatgcagaagtccagcctcgaattccacaaggccaacgagtgccaagagcggcctgtagagtgcaaattctgcaagttagacatgcagctgtcgaaactggaacttcacgagagctattgcgggtctaggacggaactgtgccaagggtgcggccaattcattatgcaccgaatgctcgcacagcatagggacgtgtgtagatctgaacaggctcagctgggaaaggaaacgagcccagacccggggaagtgtctgtcaattacagtcgccgccgctctgtctgctcacctgtggccttag

SEQ ID NO: 193561 - DNA, 906 bp, Artificial Sequence
  derived and/or modified sequence
atggagggcgacttcagcgtgtgccggaactgcaagcggcacgtggtgagcgcaaacttcacactccatgaagcttactgtctccggttccttgttttgtgcccagaatgtgaagaacccgtccccaaggagacaatggaggaacattgcaagctcgaacaccagcaggtgtccgagatggggtctggtcgtggcaaatgcagcattttgccagcacgcaaaaaagccaatgaatgccaggaacgtccagtcgagtgcaagttctgcaagctggacatgcaattgagcaagctggagctacacgagtcgtactgtggatctaggacggaactatgccaaggctgcggacagtttatcatgcaccgaatgctcgcgcagcatcgcgatgtgtgccgctctgagcaagcgcaattggggaagggtgaacggatttccgcgccagagcgagaaatctattgccactattgtaaccagatgattcctgagaacaaatacttccaccacatgggtaagtgctgtcccgatagcgaatttaagaagcatttccccgtcggaaacccagagatccttccttcctcactgccctctcaggctgccgagaaccagacctccacaatggagaaggacgtgcgccccaaaacacgctctattaaccgattccctctgcacagtgagtcgagttctaaaaaggccccgagatccaagaataaaaccctggatcccctcctcatgtccgagccaaagcctcgcacaagttccccacggggtgacaaagctgcgtacgatattctgcgacgctgtagtcagtgcggcatcctactgccgctccctattctcaaccaacaccaggagaaatgccgctggctggcatcttcaaaaggaaagcaggtcagaaatttttcttag

SEQ ID NO: 193562 - DNA, 906 bp, Artificial Sequence
  derived and/or modified sequence
atggaaggagacttctccgtctgccggaattgtaaaagacacgtggtgtcagccaactttaccctgcacgaagcctattgtctgaggttcctcgttttatgtcctgagtgcgaggaacccgtaccaaaggagactatggaggagcattgtaaactggagcatcagcaagtgggttgtacaatgtgtcagcagagtatgcaaaagtcctccctggaatttcataaggctaatgaatgtcaggagcgtccggttgagtgtaagttctgcaagctcgacatgcaattgtcgaagctggagctgcacgaaagctactgtggaagtcggaccgagctctgccaggggtgcggacagttcatcatgcaccgcatgctggcacagcaccgcgacgtttgtcgctccgagcaggcccagctaggcaaaggagaaagaatatctgcacctgagagagagatatactgccattattgcaaccagatgattccggagaataagtactttcaccatatggggaagtgctgtcccgatagcgagttcaagaagcatttcccagtcggcaatccagaaattctaccctcctcactgccaagccaggccgcagaaaaccagacctctaccatggagaaggacgtccgcccaaagactcggtccatcaaccggttccctttgcatagcgagtctagcagcaaaaaggcccctcggagtaagaataaaactctggatccgctgctgatgagcgagcccaagcccaggacctccagccccagaggggacaaggccgcttatgatatcctgcgccgatgctcacaatgtggcatcctcctcccattacctatactgaatcagcaccaggagaagtgccgttggctggcaagcagcaagggtaagcaggtgagaaacttttcctag

SEQ ID NO: 193563 - DNA, 495 bp, Artificial Sequence
  derived and/or modified sequence
atggaaggcgacttctccgtctgtcggaattgtaagcggcatgtggtgtctgccaatttcacgctgcatgaggcttactgtctgagattcctcgtcctctgtccagaatgtgaagagcctgttcctaaggagacaatggaagagcattgcaagctggagcatcaacaggtgggctgtactatgtgccagcaatctatgcagaaatcaagtctcgaattccataaagccaacgaatgtcaggaaaggccagtcgagtgcaaattttgcaagttggatatgcagctgagcaagctcgagttgcacgaatcatattgtggttcccgtaccgagctctgccaagggtgcgggcagtttataatgcatagaatgctggcacagcatcgggatgtctgtcggtcagaacaggctcaactggggaaggagaccagccccgatcctggaaagtgcctgtccattaccgtagcagccgctttaagcgcacacttgtggccatag

SEQ ID NO: 193564 - DNA, 906 bp, Artificial Sequence
  derived and/or modified sequence
atggaaggagatttttcagtttgccgcaactgcaaacgtcatgtcgtctccgctaacttcaccctgcatgaggcatattgtctcagattcctcgtgctctgtcctgagtgtgaagaacccgttcctaaagagacaatggaggagcattgcaagcttgagcatcaacaggtgtccgagatgggatctggcagggggaaatgctccattttgcctgcccgtaaaaaggcgaatgagtgtcaggaacgccctgtggagtgtaagttttgcaagctggatatgcaactgtcaaaactggaattgcatgaatcatactgtggctcacgaacagaactgtgccagggctgcgggcagtttatcatgcataggatgctagctcaacaccgggacgtgtgtaggtcggaacaagcgcagctcggaaagggcgagcgcatctcagccccagaacgcgagatctactgccactattgtaatcaaatgatccccgagaacaagtatttccaccacatgggcaaatgctgccccgattccgaatttaaaaagcattttcccgtagggaaccccgagatactaccatctagcctgcctagccaagcagccgagaaccagacctctaccatggagaaggatgtgaggcccaagactcgcagcatcaatcgcttcccactgcactcagaaagtagcagcaaaaaagcacccaggagcaagaataagacgctggatcccctgcttatgagcgagcctaagccacgcacatcttcccccagaggcgacaaagctgcctacgacattctgcgaaggtgtagtcaatgcggcatactcctgcctctccctattctgaaccagcaccaggagaaatgtcgatggttggcatccagtaagggcaagcaggtacgcaattttagttag

SEQ ID NO: 193565 - DNA, 3622 bp, Artificial Sequence
  derived and/or modified sequence
ggtagatgcggctgtgacagcagcaaagaatgacggccaagggcgacagcaggggctggccatgctgtaaaggggcttcttgggagggtccagcctcaggaatcaaggggaactcctgagccgagaattctgaagatctcctccctccctgaagctgtgggctgggccatcggaaaactttcagttttgtttccttgcctgcaagaaacgaaactcaaccgaaagcctgcagagagcagaacatggaaggagacttctcggtgtgcaggaactgtaaaagacatgtagtctctgccaacttcaccctccatgaggcttactgcctgcggttcctggtcctgtgtccggagtgtgaggagcctgtccccaaggaaaccatggaggagcactgcaagcttgagcaccagcaggttgggtgtacgatgtgtcagcagagcatgcagaagtcctcgctggagtttcataaggccaatgagtgccaggagcgccctgttgagtgtaagttctgcaaactggacatgcagctcagcaagctggagctccacgagtcctactgtggcagccggacagagctctgccaaggctgtggccagttcatcatgcaccgcatgctcgcccagcacagagatgtctgtcgcagtgaacaggcccagctcgggaaaggggaaagaatttcagctcctgaaagggaaatctactgtcattattgcaaccaaatgattccagaaaataagtatttccaccatatgggtaaatgttgtccagactcagagtttaagaaacactttcctgttggaaatccagaaattcttccttcatctcttccaagtcaagctgctgaaaatcaaacttccacgatggagaaagatgttcgtccaaagacaagaagtataaacagatttcctcttcattctgaaagttcatcaaagaaagcaccaagaagcaaaaacaaaaccttggatccacttttgatgtcagagcccaagcccaggaccagctcccctagaggagataaagcagcctatgacattctgaggagatgttctcagtgtggcatcctgcttcccctgccgatcctaaatcaacatcaggagaaatgccggtggttagcttcatcaaaaggaaaacaagtgagaaatttcagctagatttggaaaaggaaaggtactacaaattcaaaagatttcacttttaacactggcattcctgcctacttgctgtggtggtcttgtgaaaggtgatgggttttattcgttgggctttaaaagaaaaggtttggcagaactaaaaacaaaactcacgtatcatctcaatagatacagaaaaggcttttgataaaattcaacttgacttcatgttaaaaaccctcaacaaaccaggcgtcgaaggaacatacctcaaaataataagagccatctatgacaaaaccacagccaacatcatactgaatgagcaaaagctggagcattactcttgagaagtagaacaaggcacttcagtcctattcaacatagtactggaagtcctcgccacagcaatcaggcaagagaaagaaataaaaggcaaccaaaaagaaaggaagtcgaagtatctctgtttgcagacgatatgattctatatctagaaaaccccatgatcttggcccaaaagctcctagatctgataaacaacttcagctaactttcaggagacaaaatcaatatacaaaatatggtagcatttttatacaccaacgacatccaagctgagagccaaatcaagaatgcaatcctattcacaattgccacaaaaagaataaaatacctaggaatacagctaaccagggagatgaaagatctctacaacaaaaattacaaaacactgctgaaagaaatcagagatgacacaaatggaaaaacattccatacttatggataggaagaatcaatattgttaaaatggccatactacccaaagcaatttatagattcaatgctattcctatcaaactaccaataacattcttcacagaatcagaaaaaaaaagcattaaaatttatttgaaaccaaaaaagagcccaaaaagccaaagcaatcctaagcaaaaagaacaaagctggaggcatcgcattacccaacttcaaactatactacagggctacagtaaccaaaactgcatgatactggtacaaaagcatggtgctggtacaaaagcagacacatagatcaatggaacagaatagagggcccagaaataaagctacacacctacaaccatctaatctttgacaaagttgacaaaaatacgcaatggggaaagaattccccattcagtaagtggtactgggataactagctagccatatgcagaggattgaaactgaaccacttccttacaccatatgcaaaaatcaactcaagatggattaaagacttaaatgtaaaaccccaaactataaaaactctggaagataacctaggcaataccattctggacataggaacggaaaaagatttcatgacaaagatcccaaaaataattgtaacgaaagcaaaaattgacaaatgggacatgattaaacagaattaccatttgactcagcaatcccattattggttatatacccaaaggaatctaaatcattctgtcataaagacatatatacacaaatgttcacggcagcactatacacaatcgcaaagtcagggaatcaaactaaatgtccatcagtggtagaaaggataaagaaaatgtggtggcagggagtggtggctcatgtctgtaatcccagcactttgggaggctgaggcgggtggttcacctgaggtcaggagtttgagaccagcctggccaacatggagaaactccgtctccgctaaaaatacgaaaattagccaggcgtggtggcgagcacctgtcatcccagctacttgggaggcctaggcgtgagaatcgcttgaacctggaaggtggtggttgcagtgagccgagatcctgccactgcactccagcctgggcaaccaagcgagactctgccttaaaaaaaaaaaaaagaaaatgtggcacatatacaccatggaatactatgcagccataaaaaagaatgggatcatgtcctgtgcagcaacgtggatggagctggaagccattatcctaaatgaactcactcagaaacagaaaaccaaataccacatgttctcacttataagtagaagctaaacattgagtacacatggatacaaagaagggaaccgcagacactggggcctacctgaggtcggagcatggaaggagggtgaggatcaaaaaactacctatctggtactatgctttttatctggatgatgaaataatctgtacaacaaaccctggtgacatgcaatttacctatatagcaagcctacacatgtgcccctgaacctaaaaaaaaagttaaaagaaaaacgtttggattattttccctctttcgaacaaagacattggtttgcccaaggactacaaataaaccaacgggaaaaaagaaaggttccagttttgtctgaaaattctgattaagcctctgggccctacagcctggagaacctggagaatcctacacccacagaacccggctttgtccccaaagaataaaaacacctctct

SEQ ID NO: 193566 - DNA, 737 bp, Artificial Sequence
  derived and/or modified sequence
ggtagatgcggctgtgacagcagcaaagaatgacggccaagggcgacagcaggggctggccatgctgtaaaggggcttcttgggagggtccagcctcaggaatcaaggggaactcctgagccgagaattctgaagatctcctccctccctgaagctgtgggctgggccatcggaaaactttcagttttgtttccttgcctgcaagaaacgaaactcaaccgaaagcctgcagagagcagaacatggaaggagacttctcggtgtgcaggaactgtaaaagacatgtagtctctgccaacttcaccctccatgaggcttactgcctgcggttcctggtcctgtgtccggagtgtgaggagcctgtccccaaggaaaccatggaggagcactgcaagcttgagcaccagcaggttgggtgtacgatgtgtcagcagagcatgcagaagtcctcgctggagtttcataaggccaatgagtgccaggagcgccctgttgagtgtaagttctgcaaactggacatgcagctcagcaagctggagctccacgagtcctactgtggcagccggacagagctctgccaaggctgtggccagttcatcatgcaccgcatgctcgcccagcacagagatgtctgtcgcagtgaacaggcccagctcgggaaagaaaccagtcctgatccaggaaaatgtctctccattacggttgctgctgccctgagtgcacatctgtggccataa

SEQ ID NO: 193567 - DNA, 3622 bp, Artificial Sequence
  derived and/or modified sequence
ggtagatgcggctgtgacagcagcaaagaatgacggccaagggcgacagcaggggctggccatgctgtaaaggggcttcttgggagggtccagcctcaggaatcaaggggaactcctgagccgagaattctgaagatctcctccctccctgaagctgtgggctgggccatcggaaaactttcagttttgtttccttgcctgcaagaaacgaaactcaaccgaaagcctgcagagagcagaacatggaaggagacttctcggtgtgcaggaactgtaaaagacatgtagtctctgccaacttcaccctccatgaggcttactgcctgcggttcctggtcctgtgtccggagtgtgaggagcctgtccccaaggaaaccatggaggagcactgcaagcttgagcaccagcaggtgagtgagatggggtctgggaggggcaagtgttccatcctccctgcaagaaagaaggccaatgagtgccaggagcgccctgttgagtgtaagttctgcaaactggacatgcagctcagcaagctggagctccacgagtcctactgtggcagccggacagagctctgccaaggctgtggccagttcatcatgcaccgcatgctcgcccagcacagagatgtctgtcgcagtgaacaggcccagctcgggaaaggggaaagaatttcagctcctgaaagggaaatctactgtcattattgcaaccaaatgattccagaaaataagtatttccaccatatgggtaaatgttgtccagactcagagtttaagaaacactttcctgttggaaatccagaaattcttccttcatctcttccaagtcaagctgctgaaaatcaaacttccacgatggagaaagatgttcgtccaaagacaagaagtataaacagatttcctcttcattctgaaagttcatcaaagaaagcaccaagaagcaaaaacaaaaccttggatccacttttgatgtcagagcccaagcccaggaccagctcccctagaggagataaagcagcctatgacattctgaggagatgttctcagtgtggcatcctgcttcccctgccgatcctaaatcaacatcaggagaaatgccggtggttagcttcatcaaaaggaaaacaagtgagaaatttcagctagatttggaaaaggaaaggtactacaaattcaaaagatttcacttttaacactggcattcctgcctacttgctgtggtggtcttgtgaaaggtgatgggttttattcgttgggctttaaaagaaaaggtttggcagaactaaaaacaaaactcacgtatcatctcaatagatacagaaaaggcttttgataaaattcaacttgacttcatgttaaaaaccctcaacaaaccaggcgtcgaaggaacatacctcaaaataataagagccatctatgacaaaaccacagccaacatcatactgaatgagcaaaagctggagcattactcttgagaagtagaacaaggcacttcagtcctattcaacatagtactggaagtcctcgccacagcaatcaggcaagagaaagaaataaaaggcaaccaaaaagaaaggaagtcgaagtatctctgtttgcagacgatatgattctatatctagaaaaccccatgatcttggcccaaaagctcctagatctgataaacaacttcagctaactttcaggagacaaaatcaatatacaaaatatggtagcatttttatacaccaacgacatccaagctgagagccaaatcaagaatgcaatcctattcacaattgccacaaaaagaataaaatacctaggaatacagctaaccagggagatgaaagatctctacaacaaaaattacaaaacactgctgaaagaaatcagagatgacacaaatggaaaaacattccatacttatggataggaagaatcaatattgttaaaatggccatactacccaaagcaatttatagattcaatgctattcctatcaaactaccaataacattcttcacagaatcagaaaaaaaaagcattaaaatttatttgaaaccaaaaaagagcccaaaaagccaaagcaatcctaagcaaaaagaacaaagctggaggcatcgcattacccaacttcaaactatactacagggctacagtaaccaaaactgcatgatactggtacaaaagcatggtgctggtacaaaagcagacacatagatcaatggaacagaatagagggcccagaaataaagctacacacctacaaccatctaatctttgacaaagttgacaaaaatacgcaatggggaaagaattccccattcagtaagtggtactgggataactagctagccatatgcagaggattgaaactgaaccacttccttacaccatatgcaaaaatcaactcaagatggattaaagacttaaatgtaaaaccccaaactataaaaactctggaagataacctaggcaataccattctggacataggaacggaaaaagatttcatgacaaagatcccaaaaataattgtaacgaaagcaaaaattgacaaatgggacatgattaaacagaattaccatttgactcagcaatcccattattggttatatacccaaaggaatctaaatcattctgtcataaagacatatatacacaaatgttcacggcagcactatacacaatcgcaaagtcagggaatcaaactaaatgtccatcagtggtagaaaggataaagaaaatgtggtggcagggagtggtggctcatgtctgtaatcccagcactttgggaggctgaggcgggtggttcacctgaggtcaggagtttgagaccagcctggccaacatggagaaactccgtctccgctaaaaatacgaaaattagccaggcgtggtggcgagcacctgtcatcccagctacttgggaggcctaggcgtgagaatcgcttgaacctggaaggtggtggttgcagtgagccgagatcctgccactgcactccagcctgggcaaccaagcgagactctgccttaaaaaaaaaaaaaagaaaatgtggcacatatacaccatggaatactatgcagccataaaaaagaatgggatcatgtcctgtgcagcaacgtggatggagctggaagccattatcctaaatgaactcactcagaaacagaaaaccaaataccacatgttctcacttataagtagaagctaaacattgagtacacatggatacaaagaagggaaccgcagacactggggcctacctgaggtcggagcatggaaggagggtgaggatcaaaaaactacctatctggtactatgctttttatctggatgatgaaataatctgtacaacaaaccctggtgacatgcaatttacctatatagcaagcctacacatgtgcccctgaacctaaaaaaaaagttaaaagaaaaacgtttggattattttccctctttcgaacaaagacattggtttgcccaaggactacaaataaaccaacgggaaaaaagaaaggttccagttttgtctgaaaattctgattaagcctctgggccctacagcctggagaacctggagaatcctacacccacagaacccggctttgtccccaaagaataaaaacacctctct

SEQ ID NO: 193568 - protein, 1551 aa, Artificial Sequence
  derived and/or modified sequence
MERRLRALEQLARGEAGGCPGLDGLLDLLLALHHELSSGPLRRERSVAQFLSWASPFVSKVKELRLQRDDFEILKVIGRGAFGEVTVVRQRDTGQIFAMKMLHKWEMLKRAETACFREERDVLVKGDSRWVTTLHYAFQDEEYLYLVMDYYAGGDLLTLLSRFEDRLPPELAQFYLAEMVLAIHSLHQLGYVHRDVKPDNVLLDVNGHIRLADFGSCLRLNTNGMVDSSVAVGTPDYISPEILQAMEEGKGHYGPQCDWWSLGVCAYELLFGETPFYAESLVETYGKIMNHEDHLQFPPDVPDVPASAQDLIRQLLCRQEERLGRGGLDDFRNHPFFEGVDWERLASSTAPYIPELRGPMDTSNFDVDDDTLNHPGTLPPPSHGAFSGHHLPFVGFTYTSGSHSPESSSEAWAALERKLQCLEQEKVELSRKHQEALHAPTDHRELEQLRKEVQTLRDRLPEMLRDKASLSQTDGPPAGSPGQDSDLRQELDRLHRELAEGRAGLQAQEQELCRAQGQQEELLQRLQEAQEREAATASQTRALSSQLEEARAAQRELEAQVSSLSRQVTQLQGQWEQRLEESSQAKTIHTASETNGMGPPEGGPQEAQLRKEVAALREQLEQAHSHRPSGKEEALCQLQEENRRLSREQERLEAELAQEQESKQRLEGERRETESNWEAQLADILSWVNDEKVSRGYLQALATKMAEELESLRNVGTQTLPARPLDHQWKARRLQKMEASARLELQSALEAEIRAKQGLQERLTQVQEAQLQAERRLQEAEKQSQALQQELAMLREELRARGPVDTKPSNSLIPFLSFRSSEKDSAKDPGISGEATRHGGEPDLRPEGRRSLRMGAVFPRAPTANTASTEGLPAKPGSHTLRPRSFPSPTKCLRCTSLMLGLGRQGLGCDACGYFCHTTCAPQAPPCPVPPDLLRTALGVHPETGTGTAYEGFLSVPRPSGVRRGWQRVFAALSDSRLLLFDAPDLRLSPPSGALLQVLDLRDPQFSATPVLASDVIHAQSRDLPRIFRVTTSQLAVPPTTCTVLLLAESEGERERWLQVLGELQRLLLDARPRPRPVYTLKEAYDNGLPLLPHTLCAAILDQDRLALGTEEGLFVIHLRSNDIFQVGECRRVQQLTLSPSAGLLVVLCGRGPSVRLFALAELENIEVAGAKIPESRGCQVLAAGSILQARTPVLCVAVKRQVLCYQLGPGPGPWQRRIRELQAPATVQSLGLLGDRLCVGAAGGFALYPLLNEAAPLALGAGLVPEELPPSRGGLGEALGAVELSLSEFLLLFTTAGIYVDGAGRKSRGHELLWPAAPMGWGYAAPYLTVFSENSIDVFDVRRAEWVQTVPLKKVRPLNPEGSLFLYGTEKVRLTYLRNQLAEKDEFDIPDLTDNSRRQLFRTKSKRRFFFRVSEEQQKQQRREMLKDPFVRSKLISPPTNFNHLVHVGPANGRPGARDKSPAPEEKGRVARGSGPQRPHSFSEALRRPASMGSEGLGGDADPMKRKPWTSLSSESVSCPQGSLSPATSLMQVSERPRSLPLSPELESSP

SEQ ID NO: 193569 - DNA, 4656 bp, Artificial Sequence
  derived and/or modified sequence
atggagcggcgcctaagggccctcgagcagctagcccgtggagaagcaggaggctgtccagggttagacgggcttctcgatctccttctggctctgcatcacgagctcagctccggcccactccggagggagcgttccgtggctcaatttctctcttgggcttcccccttcgtttctaaggtaaaggaactacgtctgcaaagggatgatttcgaaattctgaaggtgatcgggcggggtgcgtttggcgaggttacggtcgtccgacaaagagacacaggccagatattcgcaatgaagatgttgcataaatgggaaatgctgaaacgcgctgagaccgcatgttttcgagaggagcgagacgtgttggtgaaaggtgattcaagatgggtcacgactttgcattatgcattccaagacgaggaatacctctacctggttatggattactacgccggaggcgatcttctaaccctgttgagtagattcgaagatagactgccaccagaactggcccagttctacctagccgagatggtactcgccatccacagcctccaccagctgggctacgtgcatagggatgtaaagccggataatgtgctcctcgatgtaaacggacacattcggctcgcagatttcggtagctgcctccggttgaacacgaatggcatggtagattcttctgtcgccgtcgggactccagattatattagccccgaaatccttcaggccatggaagaggggaaggggcattatggacctcagtgtgattggtggagccttggcgtatgtgcctacgagttactgttcggagaaaccccattctacgccgagagcctggtggaaacttatgggaaaatcatgaatcacgaggaccacttacagttcccccctgatgtgcccgatgtgccagcttctgcccaggacctgatcagacagctgttgtgccgacaggaggagaggctgggaagaggagggcttgatgacttccgaaaccaccctttttttgagggcgtggattgggaaaggttagcatcctctaccgccccttatatacccgaactgcgcggccccatggacaccagcaatttcgacgtcgatgatgacaccctgaaccacccagggacactgccaccaccatcacacggcgctttttcagggcaccacctgccttttgtgggcttcacctacacaagtgggtcccacagcccggagtcatcctctgaggcctgggccgccttagaacgaaaactccaatgcttggagcaggagaaggttgagctgtcgcgaaagcatcaggaagccctgcacgcgcctactgaccaccgcgaactggagcagcttagaaaggaggtccagacgctccgggaccggctgcctgaaatgctgcgcgacaaagcatctctcagtcagactgatgggccccctgcagggtcgcccggtcaagactccgacctacggcaggagttggatcgacttcaccgggaactagccgaagggcgagcaggcttacaagcgcaagaacaggagttgtgcagggcccagggccaacaggaagaacttctgcagcggctgcaggaggcacaggaacgcgaggctgctacagcaagccaaaccagggctctgtccagccagttggaggaggctagagcagcccagagagagctcgaggctcaggttagctccttaagcagacaggtgacacagctgcaagggcagtgggaacagcgcctggaggagtcttcccaggccaaaacaattcacacagcctccgaaaccaacggtatgggcccacccgaaggcggcccgcaggaagcacagcttagaaaagaggtggcagctctgagggagcagctggagcaggcccattcacaccgccctagcggcaaagaagaggctttatgccagttgcaggaggaaaaccgacgactgtcacgggagcaagagagactggaggccgaactggcccaggagcaggagtctaaacagcgactcgagggggagcgaagagaaactgaatcaaattgggaagcacaactcgctgacattttgtcttgggtgaatgatgagaaggtgtctcggggttacctgcaggctttggccaccaaaatggcagaagaattagagtctttgcgcaatgttggtacacagacactccccgccagaccactagatcaccagtggaaagcacggcgtctgcagaagatggaggcgtccgcccggcttgagctgcagtccgcacttgaagcagaaattcgggccaagcagggtctgcaagaacggttaactcaggtgcaggaagcccagctgcaggccgagcgccgtcttcaggaggccgaaaagcaaagccaggcgctgcagcaagaactagcgatgctgcgcgaggaactccgtgctcgcggccctgtcgacaccaagccatctaacagtctgattcccttcctatcgttccgctcctctgaaaaggactctgctaaggaccctggcatcagtggtgaggccactcggcatggtggggagcctgacttgcgaccagaggggcgtaggtccctcagaatgggcgcagtgttccccagggcccccaccgcaaataccgcgtccacagagggtctacctgcaaaacccggctcccacaccctccggccaaggtcctttccttctcccaccaaatgcttacggtgtacctctctaatgctcggactgggccgacagggcctggggtgtgatgcatgcggctacttttgtcatacgacctgtgcgccacaggcacccccatgccctgttccccccgaccttctccgaactgcactgggggtccatccggagaccggaaccgggacggcttacgaagggttcctctccgtcccccggccatctggagtgcgtagaggttggcaacgggttttcgctgcactctctgatagtcggctgcttctgtttgatgctccggatttacggctcagtcctccctctggcgcactcctgcaggtgctggacctgagagacccccaatttagtgccaccccagtgttggcttcagacgtcatccacgcgcagtcaagggatcttcctagaatctttcgggtgaccactagccagctggcagtgcctccaaccacatgcacggtgctgcttctagcggaatccgagggggagcgtgagaggtggctgcaagtgcttggggaactgcaacgtctgcttctcgacgcgcggccccgtcctaggccagtttacactctcaaggaggcctacgacaacggcttaccactgttgcctcacaccctctgtgcagcaatacttgaccaggatcgcctggccctcggaactgaggagggcctgttcgtcatccacctgagaagtaacgatatcttccaagtgggcgaatgccgcagagtccagcagctgacactgtcacctagcgctggcctgctggtcgttctgtgtggacgagggccttctgtaaggctgttcgccctggccgaacttgagaacatagaagtggcgggagcaaagatcccggagtctagaggatgtcaggtccttgcggctggctctatcctacaggcccggaccccggtgctctgcgtggccgttaaaaggcaggtactgtgttaccagcttgggccaggccctgggccttggcaaagacgtattagagagctccaggcccctgcaaccgtgcaatcactggggctcctgggggatcgactgtgtgtcggagcagctggcggttttgccctgtacccgctcctgaacgaggccgcgcccctggctctaggtgctggtctagtacccgaggagctgcctccttcgcgcgggggacttggggaggcattgggagccgtcgagctgagcctgagtgagttcctgctgctgtttaccactgccggcatctacgtggatggggcagggaggaaatcacggggacatgagttactttggcctgccgcccctatggggtggggctacgcagctccctatctgaccgtgtttagtgaaaatagcattgatgtcttcgacgtacggcgggctgaatgggtgcagacagtgccgctcaagaaggtaaggccactgaatccagaaggcagcttgttcctatatggaacagagaaagttagactcacgtatctgagaaaccagttggccgaaaaagacgaatttgatatcccagacctgaccgacaatagccggcggcagttgttccgcacaaaatcaaaacgacggtttttttttagggtgtccgaagagcagcagaaacagcagcggagggaaatgctgaaggatccattcgttaggtctaaattgattagtcctcccacgaattttaaccatttggttcacgtaggccccgccaacggaagaccgggagcccgggacaaaagtcccgctcctgaagaaaagggacgagttgccagggggtcagggccacagagaccgcatagcttttccgaagccctgcgccgtcctgcttctatgggctcagagggcctggggggcgatgccgatcccatgaagagaaagccttggacctctctcagcagtgagtcggtttcttgtccccagggcagcctgagtcccgcgacaagtctcatgcaggtctcggagcgccctcgcagcttacccctaagccctgaactggagagctccccttag

SEQ ID NO: 193570 - DNA, 4656 bp, Artificial Sequence
  derived and/or modified sequence
atggagcggcggctgcgggccctggagcagctggcccggggggaggccggcggctgccccggcctggatggcctgctggacctgctgctggccctgcaccacgagctgagcagcggccccctgcggcgggagaggtctgtggcccagttcctgtcctgggccagcccctttgtgtccaaggtgaaggagctgcggctgcagagagatgactttgagatcctgaaggtgattggccgcggggccttcggggaggtgacagtggtgcggcagagggacaccggccagatctttgccatgaagatgctgcacaagtgggagatgctgaagagagctgagacagcctgcttccgggaggagagagatgtgctggtgaagggggacagccgctgggtgaccaccctgcactacgccttccaggatgaggagtacctgtacctggtgatggactactatgctggaggagacctgctgaccctgctgagcagatttgaggaccggctgcccccagagctggcccagttctacctggccgagatggtgctggccatccacagcctgcaccagctgggctacgtgcacagagatgtgaagccagacaacgtgctgctggatgtgaatggccacatccggctggccgactttggcagctgcctgcggctgaacaccaacggcatggtggacagctctgtggccgtgggcaccccagactacatcagccctgagatcctgcaggccatggaggagggcaagggccactacggcccccagtgtgactggtggagcctgggcgtgtgtgcctatgagctgctgtttggagagacccccttctacgccgagagcctggtggagacctacggcaagatcatgaaccacgaggaccacctgcagttccccccagatgtgcctgatgtgcctgccagcgcccaggacctgatccggcagctgctgtgccggcaggaggagcggctgggccggggcggcctggatgacttcaggaaccaccccttctttgaaggagtggactgggagcggctggccagcagcacagccccctacatccctgagctgcggggccccatggacaccagcaactttgatgtggatgatgacaccctgaaccaccctggcaccctgcccccacccagccatggagccttcagcggccaccacctgccctttgtgggcttcacctacaccagcggcagccacagccctgagagcagcagcgaggcctgggccgccctggagaggaagctgcagtgcctggagcaggagaaggtggagctgagcaggaagcaccaggaggccctgcacgcccccacagaccaccgggagctggagcagctgaggaaggaggtgcagaccctgcgggaccggctgcctgagatgctgcgggacaaggccagcctgagccagacagatggccccccagctggcagccctggccaggacagcgacctgcggcaggagctggaccggctgcaccgggagctggccgagggccgggccggcctgcaggcccaggagcaggagctgtgccgggcccagggccagcaggaggagctgctgcagaggctgcaggaggcccaggagcgggaggccgccacagccagccagacccgggccctgagcagccagctggaggaggcccgggccgcccagcgggagctggaggcccaggtgagcagcctgagccggcaggtgacccagctgcagggccagtgggagcagaggctggaggagagcagccaggccaagaccatccacacagccagcgagaccaacggcatgggccccccagagggcggcccccaggaggcccagctgaggaaggaggtggccgccctgcgggagcagctggagcaggcccacagccaccggcccagcggcaaggaggaggccctgtgccagctgcaggaggagaacagaaggctgagccgggagcaggagcggctggaggccgagctggcccaggagcaggagagcaagcagaggctggagggggagcggcgggagacagagagcaactgggaggcccagctggccgacatcctgtcctgggtgaatgatgagaaggtgtcccggggctacctgcaggccctggccaccaagatggccgaggagctggagagcctgagaaatgtgggcacccagaccctgcctgcccggcccctggaccaccagtggaaggcccggcggctgcagaagatggaggccagcgcccggctggagctgcagagcgccctggaggccgagatccgggccaagcagggcctgcaggagcggctgacccaggtgcaggaggcccagctgcaggccgagcggcggctgcaggaggccgagaagcagagccaggccctgcagcaggagctggccatgctgcgggaggagctgcgggcccggggccctgtggacaccaagcccagcaacagcctcatccccttcctgtccttccgcagcagcgagaaggacagcgccaaggaccccggcatcagcggggaggccaccaggcatggaggagagccagacctgcggcctgagggcagaagaagcctgaggatgggcgctgtgttcccccgggcccccacagccaacacagccagcacagagggcctgcctgccaagccaggcagccacaccctgcggcccaggagcttccccagccccaccaagtgcctgcgctgcaccagcctgatgctgggcctgggccggcagggcctgggctgtgatgcctgtggctacttctgccacaccacctgtgccccccaggccccaccctgccctgtgcccccagacctgctgaggacagccctgggcgtgcaccctgagaccggcaccggcacagcctatgagggcttcctgtctgtgccccggcccagcggcgtgagaagaggctggcagagggtgtttgctgccctgagtgacagccggctgctgctgtttgatgccccagacctgcggctgagcccccccagcggggccctgctgcaggtgctggacctgcgggacccccagttcagcgccacccctgtgctggccagtgatgtgatccacgcccagagccgggacctgccccgcatcttccgggtgaccaccagccagctggccgtgccccccaccacctgcaccgtgctgctgctggccgagagcgagggggagcgggagcgctggctgcaggtgctgggggagctgcagaggctgctgctggatgcccggccccggcccaggcctgtgtacaccctgaaggaggcctatgacaatggcctgcccctgctgccccacaccctgtgtgccgccatcctggaccaggaccggctggccctgggcacagaggagggcctgtttgtgatccacctgcggagcaatgacatcttccaggtgggagaatgtagaagagtgcagcagctgaccctgagccccagcgctggcctgctggtggtgctgtgtggccggggccccagcgtgcggctgtttgccctggccgagctggagaacatcgaggtggccggggccaagatccctgagagccggggctgccaggtgctggccgccggcagcatcctgcaggcccggacccctgtgctgtgtgtggccgtgaagaggcaggtgctgtgctaccagctgggccctggccctggcccctggcagaggcgcatccgggagctgcaggccccagccaccgtgcagagcctgggcctgctgggggaccggctgtgtgtgggcgctgctgggggctttgccctgtaccccctgctgaatgaagctgcccccctggccctgggcgccggcctggtgcctgaggagctgccccccagccggggcggcctgggggaggccctgggcgctgtggagctgagcctgtctgagttcctgctgctcttcaccacagctggcatctacgtggatggagctggcaggaagagccggggccacgagctgctgtggccagctgcccccatgggctggggctatgctgccccctacctgaccgtcttcagcgagaacagcattgatgtgtttgatgtgagaagagctgagtgggtgcagacagtgcccctgaagaaggtgcggcccctgaaccctgagggcagcctcttcctgtatggaacagagaaggtgcggctgacctacctgaggaaccagctggccgagaaggatgaatttgacatcccagacctgacagacaacagccggcggcagctgttccgcaccaagagcaagaggcgcttcttcttccgggtgtctgaggagcagcagaagcagcagaggcgggagatgctgaaggacccctttgtgcgcagcaagctgatcagcccccccaccaacttcaaccacctggtgcacgtgggccctgccaacggccggcctggggcccgggacaagagccctgcccctgaggagaagggccgggtggcccggggcagcggcccccagaggccccacagcttcagcgaggccctgcggcggcctgcctccatgggcagcgagggcctgggcggagatgctgaccccatgaagaggaagccctggaccagcctgagcagcgagagcgtgtcctgcccccagggcagcctgagccctgccaccagcctgatgcaggtgtctgagcggcccaggagcctgcccctgagccctgagctggagagcagcccctag

SEQ ID NO: 193571 - DNA, 4656 bp, Artificial Sequence
  derived and/or modified sequence
atggagcggcggctgcgggccctggagcagctggcccggggcgaggctggaggctgccctggattggacggcctgctagacctgctactcgcactgcaccacgagttgagtagtgggccactcagaagggagaggagtgtggcccagttcttaagctgggcctctccatttgtctccaaggtgaaggaactgcggcttcagcgggatgacttcgagatcctgaaggtgataggtaggggcgccttcggagaagtcactgtggtgagacaacgcgatacaggtcagatattcgccatgaagatgcttcacaagtgggagatgctcaagcgggccgagacagcatgtttcagagaagagcgcgatgtattagtcaagggagactccagatgggttaccaccctgcattatgcatttcaggatgaggaatacctgtatctggtgatggactattatgccgggggtgatttactgacgctgctaagccgtttcgaagataggctccctcccgagctcgcgcagttctatctggcggaaatggtcttggccattcattcccttcatcaactaggctatgttcatagggacgttaaacctgataatgtattgctggacgtcaacggccatatcaggctcgctgactttggcagctgcctccggcttaacactaacggcatggtggatagtagcgtcgcagtcggaacccccgattatattagccctgaaatcctccaggctatggaagaagggaagggtcattatggaccccagtgcgattggtggagcctgggcgtttgtgcctatgaactcttgttcggcgagactcccttctacgcagagagccttgtcgagacctacggaaagatcatgaaccacgaagatcacttgcaatttccccccgatgtcccagatgttccagcttccgcccaagaccttattcgacagctcctgtgtcgccaggaagagaggcttgggaggggcggcttagacgatttcaggaatcaccctttctttgagggggtcgactgggaaagattggcctctagtactgctccgtatatcccagagcttcgtggtccaatggacacatccaatttcgacgtcgacgacgatacactgaaccaccctgggactctgccccccccctcacatggcgcgttttctggccaccacctaccatttgtgggctttacctacacaagtggctcccactcgccagaaagtagcagcgaagcatgggccgccctggagcggaagttgcaatgccttgaacaggaaaaggtggaactcagtcggaaacatcaggaagccctgcacgcgccaaccgaccatcgcgagttggaacagttaaggaaagaggtccagaccctgcgagatcgtctcccagagatgctgagggacaaagcctccctttcgcagacagacggacctccagccggaagccctggccaggactccgatctaagacaggagctcgaccgcttgcaccgggagctcgctgagggaagggctggcctccaggcacaggaacaagagttgtgtcgggcacagggccagcaagaggagctactacaaaggctgcaggaagctcaagaacgggaggctgcgaccgccagtcagaccagggctttatcgtcccaactcgaggaagcccgtgctgcccagagggaactggaggcgcaggtatctagcttgtctcggcaagtgacccaactccaaggacagtgggagcaacggctggaggaaagcagccaagccaagacaatccatacggcgagcgaaaccaatggaatgggcccccccgaaggcggacctcaagaagcgcagctgaggaaagaagtggccgctttgcgtgaacagctcgagcaggcccactcccacagaccttctggaaaagaggaagctctctgtcagctgcaggaggagaaccgacggctgagcagagaacaggagcgcttggaagccgagttagcgcaggagcaggagtcgaagcagcggcttgagggcgagcgcagagaaaccgagtccaactgggaagcgcagctggcagatatcctgtcctgggtcaacgatgaaaaggtgagtagagggtacttgcaggcacttgcaacaaagatggccgaagaactggagagcttacggaacgttggcactcagaccttacctgcccgtccgctggatcaccaatggaaggcacgccgattacagaaaatggaagcttctgctagactagaactgcaatctgcacttgaagctgagatacgagccaaacaggggttgcaggagaggcttacacaagtgcaggaagcccagcttcaggcggagagaaggctacaggaagctgagaaacagtcacaagccctacaacaggagcttgccatgctacgggaggagctacgcgccaggggccccgtcgacaccaaacccagtaactcgcttatcccattcctgagctttcggtcaagtgagaaggattccgccaaagaccccggtatcagcggcgaggccacgcgccatggcggtgagccagatttgcggcctgagggtcgcaggtctctcaggatgggggccgtgttccccagagcccccaccgcaaacacggcctctaccgagggtctacccgctaaacctggaagccataccctgcgacccaggagcttcccgagccccaccaagtgtcttcgatgtacttcgcttatgctgggactgggcagacaaggcctggggtgcgacgcgtgtggttatttttgccacactacttgcgctccccaggcaccaccttgtccagtccccccggacctgctgcggactgccctgggggtacaccccgaaaccggaaccggaaccgcttacgagggtttcctgtctgtgcccagaccatctggagtccgtcgtgggtggcagagagtctttgccgccctatctgattcacgcctcctcctgttcgacgctcctgacctgcgactttcgcccccatctggcgcgttactccaagtgttagacttacgagatcctcagttctcagccacaccagtcctggcaagtgatgtgatccacgcccagtcacgcgacctgcctcgtatatttcgggtgaccacgagtcagctggcggtgccacctactacatgcactgttctgctcttggccgagagcgaaggtgagagggagcgttggctacaggtgctcggcgagctgcagcgactactactggatgcaaggcctagacctagacctgtatacactctgaaagaggcttacgataatgggctgcctctgctccctcatactctgtgcgcagctattctcgatcaggatcgcctcgctctgggaacggaggaaggcctattcgtgatacacctcagatctaacgatatcttccaggttggcgagtgtagacgggtgcagcagttgacactctcccccagcgctggccttctggttgtcctgtgtggacgcgggccatccgtacgactgttcgctcttgctgagctggaaaacattgaagtggcgggcgctaagattcctgaatcccgggggtgtcaggttttagccgccggcagtatactgcaggcaagaacgccggtcttgtgtgtggcagtcaaacggcaggtcctatgctaccagctgggacctggacccggaccatggcagcgacgcatccgagaactgcaagcaccagctacagtgcagtctttaggcttgttaggcgatcgtctctgcgtgggcgctgcgggcggcttcgctctctacccgctgctgaacgaagccgctccgttggctttgggggccggccttgtgcctgaggaacttccgcccagcaggggtgggctcggagaagccctgggcgctgtcgagctctccctcagtgaatttctacttctcttcaccacagcaggaatttatgtggatggggcaggtcgcaaatccagaggccacgagctgctgtggcccgctgcaccgatgggctggggctacgccgccccctatctgaccgtgttcagcgagaactctattgacgttttcgacgtacgcagggctgaatgggtgcagaccgtccccctgaagaaggttcgcccacttaatcctgaaggcagtctatttctttacggcacagagaaagtgcgactcacatatcttcggaaccagctggcagagaaggatgaatttgatatccctgacttaacagacaactcacgcaggcagctgttccggacgaaatccaaacgccggttttttttcagggtttctgaagagcagcagaagcaacaaagaagagagatgttgaaggatcccttcgtgcggtccaaactgatatccccgcccacgaatttcaatcatctggtgcacgtggggccagccaacggccggcccggagcacgtgacaaatcccctgcccccgaggaaaagggacgcgtcgcacgtggtagtgggccccaaaggcctcattcattttcggaagcccttcgtcgtcccgccagcatggggtcagaaggcctcggtggcgatgccgacccaatgaaaagaaaaccttggacatccctatcaagtgagtcggttagttgccctcagggcagcctgtcacctgctacatcattaatgcaggtatccgagcggcctcgcagtttaccgctctcacccgagctggagagttcaccttag

SEQ ID NO: 193572 - DNA, 4656 bp, Artificial Sequence
  derived and/or modified sequence
atggagcgccgtctgcgggcactggagcagctcgctcgcggagaggctggagggtgcccgggactagatggcctattggacctgctgttggccctgcaccacgaattgtctagcggacctcttcggagagagagatcggtggcccagttcctcagttgggcctctcctttcgtgagcaaggtcaaagagctgcgcctgcagcgtgacgatttcgagattttgaaggtgattggaagaggggcttttggcgaggttaccgtggttaggcagcgggacaccggacagattttcgccatgaagatgctgcacaaatgggaaatgcttaaaagggccgaaacggcctgcttcagggaggagcgggacgtgctggtaaaaggagatagccgatgggtcactaccctgcattacgcctttcaggatgaggaatatctttaccttgtgatggactattatgccggaggagatttattgactctcttgtcaagatttgaggacagactgcctcctgaactagcgcaattttacttggcggaaatggtgctcgctatacactctctccaccagctgggctacgtccatagagacgttaagcccgacaatgtgctccttgatgtgaatggtcacattagactggctgacttcggttcctgtctgcgactgaatactaacggaatggtcgattcaagtgtggccgtgggtacccccgattatatctctcctgaaatactacaggctatggaggagggaaaaggacattatggaccgcagtgcgattggtggagcctgggcgtgtgtgcttatgaactcctgttcggcgaaaccccattctacgcagaaagcctggtggaaacatatggtaaaattatgaaccatgaggatcacttgcaatttccccctgatgtccctgacgtacctgcttccgcgcaggacttgatcagacagctactgtgtaggcaagaggagcgactggggagaggtggactggacgacttccgcaaccaccccttttttgaaggtgtggactgggagcgccttgcctcatctaccgctccatacattccagagctccgaggacctatggacacttccaactttgatgtcgacgatgacaccttaaatcatcctgggactctaccccctccgtctcacggggcattttcgggtcatcatctgccattcgtggggttcacctacacgtcagggagccattcccccgagtcttcatctgaagcttgggccgcactcgagcgaaagctgcaatgtcttgaacaggaaaaagtcgagttaagcaggaaacaccaggaagccctgcacgcccctaccgatcatagggagcttgagcaattgaggaaagaggtccagacgctccgtgaccggcttccagagatgttacgcgacaaggccagcttatctcagaccgacggtcctcctgccggttctcccggacaggactccgatctgcggcaggaactggacagactgcatagggagcttgcagagggccgtgcaggcctgcaagcacaggaacaggagctgtgtcgggctcagggccagcaagaggaattacttcagcgactgcaagaagcccaggagcgggaggccgcaacagccagccagacccgtgccctttcaagtcagctggaagaggcaagagccgctcagagagaattggaagcccaggttagttcactgtctcggcaggtgacccagctccagggtcaatgggaacagaggctggaggagtccagtcaggcaaaaaccattcacaccgcaagcgagactaatggaatgggtccgccagagggagggccacaggaagcgcagctccgaaaggaagtggccgctctccgggagcaattagagcaagctcattcccatcggccatccggcaaagaagaggccttgtgtcagctccaggaagaaaaccggaggttgtcacgcgagcaagagaggttagaggctgagctagcccaggagcaggagtctaaacagagactcgagggggagcgaagggaaacagagagtaattgggaggcccagctggctgacattttgtcttgggtcaacgacgagaaggtttcacggggttacctgcaagcattggccaccaaaatggccgaggaactggagagcttacggaatgtgggtacccaaacactgcccgcacgcccacttgatcaccagtggaaagctcgaagactgcaaaagatggaggcaagtgccaggctggaactgcaatccgctctcgaggctgagatcagggctaagcagggcctgcaagagaggttgacacaagtgcaagaagcccagctgcaggctgaacgcaggttgcaggaagcggagaagcagtcccaggctctccaacaggaactggctatgctccgcgaagagctgagagccagaggacccgtcgacactaagccttcaaatagccttattccctttttgtcttttagatcctcagagaaggacagtgccaaagaccctgggattagcggcgaagctacgagacacggtggcgagcctgacctgaggcccgaggggagacggagcctccggatgggcgctgtgttccctagggctccgaccgccaatactgccagtacggagggcctgcctgctaagccgggaagccatacacttcgaccacggtctttcccaagccccactaaatgccttagatgtactagtttgatgctcggcctaggacgccagggcctgggctgtgatgcctgcggctacttttgtcacacgacttgcgcgcctcaagcaccaccgtgcccagtcccccctgatctgctcagaacggcattaggtgtacacccagaaacaggcacggggacagcgtacgagggctttttgtccgtcccacgaccatctggagtccgcagaggatggcagcgagtgtttgcagcactgtctgactctcgtctcctgctgttcgacgcccctgatctgcgactgtcaccgccatctggcgcattgctgcaagtgctggatctgcgagaccctcagttttccgccacgcccgtactggcgtccgacgtgatccacgcacaaagcagggacctacccagaatcttccgggtgacaacgagccaactggcagtgcctcctacaacttgcacagttctcctgctggcagaatctgaaggcgagcgcgaaaggtggctgcaggtcctaggcgagctacaacgcttactgctggatgccaggccacggccacgtccagtgtatactctgaaagaagcgtatgacaatggcctccccctacttccccacaccctgtgtgccgctatcctcgaccaggaccgtctggccctagggacagaggaggggctctttgtaatccatctgcgatccaacgacattttccaagtcggagagtgtcggagggtccagcagttgaccttaagcccttctgctggccttctggtggtactttgcggacgaggtccgagcgtgaggctctttgctctcgcagaattggagaacattgaagtcgcaggagcaaaaatccctgagagtcgcggatgtcaggtgctcgccgctggatccatcctgcaagctaggacccccgttctatgtgtcgccgtgaagagacaggtgctgtgttatcaactagggcctggcccagggccatggcaacgccgtatccgcgaacttcaggctcctgctaccgtccagtccctgggactgctgggcgatcgactctgcgtgggcgctgccggtggattcgccctctatccccttctgaatgaagccgctcctcttgcgctcggtgccggtcttgtccccgaagagctgcctccctcccgaggagggttaggggaggctctaggagctgtggaattgtctctcagcgaatttctgctgttgttcacaaccgctggcatctatgtcgacggcgctggtcgcaaatccaggggtcacgagcttctctggcctgccgctcccatgggatggggatacgctgcaccgtacttgaccgtattctcggaaaatagcatcgatgtttttgacgtgagaagggccgaatgggtgcagaccgtgccgcttaagaaggttagacccctcaatccagaaggctccttatttctctacggaactgagaaggtcagactgacctacctgcgaaaccagctggcggagaaggacgaatttgatatccccgatcttactgacaacagccgtagacagctctttcgaacaaagtccaaacggcgattcttctttcgcgtgtccgaggagcagcaaaaacagcagcgcagagaaatgctcaaggacccattcgtgaggtcaaaacttatttcccctcctaccaacttcaaccatctcgtccacgtgggccctgcaaacggccgtcctggcgcaagggataagtcaccggctccagaggagaaggggcgtgtcgcaagggggtcgggtcctcagcgtccacattcctttagcgaagccctccgacgccctgcatccatggggagtgaggggctgggaggggacgctgatccaatgaagcgcaagccatggaccagtctgagcagcgagagcgtgtcttgcccccagggtagtcttagccctgccacatccttaatgcaggtgagtgagaggcctcgctctttacctctctctcctgagctagagtctagcccatag

SEQ ID NO: 193573 - DNA, 5742 bp, Artificial Sequence
  derived and/or modified sequence
atggagcggcggctgcgcgcgctggagcagctggcgcggggcgaggccggcggctgcccggggctcgacggcctcctagatctgctgctggcgctgcaccacgagctcagcagcggccccctacggcgggagcgcagcgtggcgcagttcctgagctgggccagccccttcgtatcaaaggtgaaagaactgcgtctgcagagagatgactttgagatcttgaaggtgatcggccgaggagcctttggggaggtcaccgtggtgaggcagagggacactgggcagatttttgccatgaaaatgctgcacaagtgggagatgctgaagagggctgagacagcctgtttccgggaggagcgggatgtgctcgtgaaaggggacagccgttgggtgaccactctgcactatgccttccaagacgaggagtacctgtaccttgtgatggactactatgctggtggggacctcctgacgctgctgagccgcttcgaggaccgtctcccgcccgagctggcccagttctacctggctgagatggtgctggccatccactcgctgcaccagctgggttatgtccacagggatgtcaagccagacaacgtcctgctggatgtgaacgggcacattcgcctggctgacttcggctcctgcctgcgtctcaacaccaacggcatggtggattcatcagtggcagtagggacgccggactatatctcccctgagatcctgcaggccatggaggagggcaagggccactacggcccacagtgtgactggtggtcgcttggagtctgcgcctatgagctgctctttggggagacgcccttctatgctgagtccttggtggaaacctacggcaagatcatgaaccacgaggaccacctgcagttccccccggacgtgcctgacgtgccagccagcgcccaagacctgatccgccagctgctgtgtcgccaggaagagcggctaggccgtggtgggctggatgacttccggaaccatcctttcttcgaaggcgtggactgggagcggctggcgagcagcacggccccctatattcctgagctgcgggggcccatggacacctccaactttgatgtggatgacgacaccctcaaccatccagggaccctgccaccgccctcccacggggccttctccggccatcacctgccattcgtgggcttcacctacacctcaggcagtcacagtcctgagagcagctctgaggcttgggctgccctggagcggaagctccagtgtctggagcaggagaaggtggagctgagcaggaagcaccaagaggccctgcacgcccccacagaccatcgggagctggagcagctacggaaggaagtgcagactctgcgggacaggctgccagagatgctgagggacaaggcctcattgtcccagacggatgggcccccagctggtagcccaggtcaggacagtgacctacggcaggagcttgaccgacttcaccgggagctggccgagggtcgggcagggctgcaggctcaggagcaggagctctgcagggcccaggggcagcaggaggagctgcttcagaggctacaggaggcccaggagagagaggcggccacagctagccagacccgggccctgagctcccagctggaggaagcccgggctgcccagagggagctggaggcccaggtgtcctccctgagccggcaggtgacgcagctgcagggacagtgggagcaacgccttgaggagtcgtcccaggccaagaccatccacacagcctctgagaccaacgggatgggaccccctgagggtgggcctcaggaggcccaactgaggaaggaggtggccgccctgcgagagcagctggagcaggcccacagccacaggccgagtggtaaggaggaggctctgtgccagctgcaggaggaaaaccggaggctgagccgggagcaggagcggctagaagcagagctggcccaggagcaggagagcaagcagcggctggagggtgagcggcgggagacggagagcaactgggaggcccagctcgccgacatcctcagctgggtgaatgatgagaaggtctcaagaggctacctgcaggccctggccaccaagatggcagaggagctggagtccttgaggaacgtaggcacccagacgctccctgcccggccactggaccaccagtggaaggcgcggcgactgcagaagatggaggcctcggccaggctggagctgcagtcagcgctggaggccgagatccgcgccaagcagggcctgcaggagcggctgacacaggtgcaggaggcccagctgcaggctgagcgccgtctgcaggaggccgagaagcagagccaggccctgcaacaggagctcgccatgctgcgggaggagctgcgggcccgagggccagtggacaccaagccctcaaactccctgattcccttcctgtccttccggagctcagagaaggattctgccaaggaccctggcatctcaggagaggccacaaggcatggaggagagccagatctgaggccggagggccgacgcagcctgcgcatgggggctgtgttccccagagcacccactgccaacacagcctctacagaaggtcttcctgctaagcccggctcacacacgctgcgcccccggagcttcccatccccgaccaagtgtctccgctgcacctcgctgatgctgggcctgggccgccagggcctgggttgtgatgcctgcggctacttttgtcacacaacctgtgccccacaggccccaccctgccccgtgccccctgacctcctccgcacagccctgggagtacaccccgaaacaggcacaggcactgcctatgagggctttctgtcggtgccgcggccctcaggtgtccggcggggctggcagcgcgtgtttgctgccctgagtgactcacgcctgctgctgtttgacgcccctgacctgaggctcagcccgcccagtggggccctcctgcaggtcctagatctgagggacccccagttctcggctacccctgtcctggcctctgatgttatccatgcccaatccagggacctgccacgcatctttagggtgacaacctcccagctggcagtgccgcccaccacgtgcactgtgctgctgctggcagagagcgagggggagcgggaacgctggctgcaggtgctgggtgagctgcagcggctgctgctggacgcgcggccaagaccccggcccgtgtacacactcaaggaggcttacgacaacgggctgccgctgctgcctcacacgctctgcgctgccatcctcgaccaggatcgacttgcgcttggcaccgaggaggggctctttgtcatccatctgcgcagcaacgacatcttccaggtgggggagtgccggcgcgtgcagcagctgaccttgagccccagtgcaggcctgctggtcgtgctgtgtggccgcggccccagcgtgcgtctctttgccctggcggagctggagaacatagaggtagcaggtgccaagatccccgagtctcgaggctgccaggtgctggcagctggaagcatcctgcaggcccgcaccccggtgctctgtgtagccgtcaagcgccaggtgctctgctaccagctgggcccgggccctgggccctggcagcgccgcatccgtgagctgcaggcacctgccactgtgcagagcctggggctgctgggcgaccggctatgtgtgggcgccgccggtggctttgcactctacccgctgctcaacgaggctgcgccgttggcgctgggggccggtttggtgcctgaggagctgccaccatcccgcgggggcctgggtgaggcactgggtgccgtggagcttagcctcagcgagttcctgctactcttcaccactgctggcatctacgtggatggcgcaggccgcaagtctcgtggccacgagctgttgtggccagcagcgcccatgggctgggggtatgcggccccctacctgacagtgttcagcgagaactccatcgatgtgtttgacgtgaggagggcagaatgggtgcagaccgtgccgctcaagaaggtgcggcccctcaatccagagggctccctgttcctctacggcaccgagaaggtccgcctgacctacctcaggaaccagctggcagagaaggacgagttcgacatcccggacctcaccgacaacagccggcgccagctgttccgcaccaagagcaagcgccgcttctttttccgcgtgtcggaggagcagcagaagcagcagcgcagggagatgctgaaggacccttttgtgcgctccaagctcatctcgccgcctaccaacttcaaccacctagtacacgtgggccctgccaacgggcggcccggcgccagggacaagtccccggctcccgaagagaagggccgagttgcccgcggctccggcccacagcggccccacagcttctccgaggcgttgcggcgcccagcctccatgggcagcgaaggcctcggtggagacgcagaccccatgaagaggaaaccctggacatccctgtccagcgagtctgtgtcctgcccccagggatcgctgagccctgcaacctccctaatgcaggtctcagaacggccccgaagcctccccctatcccctgaattggagagctctccttgatgccctctgttagggcccaccccaatcccagggcagaaggacatgagggagcaaagagcttgaggaatgccatactccggctggtccgggacatggaaattcggactcagggaggacccgggctgggcaatgactgggagacttgcctgggttcccaggacttgggggtcctgactcccagccctcatcctgccttacccctctgttcccagccccagcctttctaagccattgggaatagaatggccccttttgttctggtgtccaggggtgattgtgccaaagctcttatttccagtgccaagcccccagaggcttgtaagagttgggatgagggatggagagggactgggtctctgggaacaggttggaggtcttatctgtggactgtctgactcccagctgaggccaagatggggcatgtccccgtctctgcttagcgtctgggtgagaaaaacaggctgtgatccagaagaagggaagatagagaaggagggaaaggatgtaggcgaaggaggtgagagacaggataggaggaaggaagtggaggaggaggtgataggaattggaaggaggtagaagccgtgcagaggaagaggggagagggacgaaggaggagcgatgaagaagaggagggagacaaaaagagggatggaggagagagggagtctggagaacaaagggtcctttctctggggaggggtgcagtgggcggggctgacactgtcagccaatcctcccatcggggaagagaatcctggacagggacaggatggggagggtatttataagggctttttggtgggagatgggtacccagtgggggccactggagggtctccgggcacactctggcccttcccagaaagggggtcgtttttctcgaatcttcaaccagttgtgtattggaaactagggcgcattttactattgatcacagtcattatattgttattatattactatttttattaaacctccccccactgaagtgtggggggcaaaataagtatttatctcctcaaatgccacattcccaggagggacagaccctgatgctctgtgaggcgcaagaaaccaataaag

SEQ ID NO: 193574 - DNA, 4656 bp, Artificial Sequence
  derived and/or modified sequence
atggagagaagactgagagccctggagcagctggccagaggcgaggccggcggctgccccggcctggacggcctgctggacctgctgctggccctgcaccacgagctgagcagcggccccctgagaagagagagaagcgtggcccagttcctgagctgggccagccccttcgtgagcaaggtgaaggagctgagactgcagagagacgacttcgagatcctgaaggtgatcggcagaggcgccttcggcgaggtgaccgtggtgagacagagagacaccggccagatcttcgccatgaagatgctgcacaagtgggagatgctgaagagagccgagaccgcctgcttcagagaggagagagacgtgctggtgaagggcgacagcagatgggtgaccaccctgcactacgccttccaggacgaggagtacctgtacctggtgatggactactacgccggcggcgacctgctgaccctgctgagcagattcgaggacagactgccccccgagctggcccagttctacctggccgagatggtgctggccatccacagcctgcaccagctgggctacgtgcacagagacgtgaagcccgacaacgtgctgctggacgtgaacggccacatcagactggccgacttcggcagctgcctgagactgaacaccaacggcatggtggacagcagcgtggccgtgggcacccccgactacatcagccccgagatcctgcaggccatggaggagggcaagggccactacggcccccagtgcgactggtggagcctgggcgtgtgcgcctacgagctgctgttcggcgagacccccttctacgccgagagcctggtggagacctacggcaagatcatgaaccacgaggaccacctgcagttcccccccgacgtgcccgacgtgcccgccagcgcccaggacctgatcagacagctgctgtgcagacaggaggagagactgggcagaggcggcctggacgacttcagaaaccaccccttcttcgagggcgtggactgggagagactggccagcagcaccgccccctacatccccgagctgagaggccccatggacaccagcaacttcgacgtggacgacgacaccctgaaccaccccggcaccctgcccccccccagccacggcgccttcagcggccaccacctgcccttcgtgggcttcacctacaccagcggcagccacagccccgagagcagcagcgaggcctgggccgccctggagagaaagctgcagtgcctggagcaggagaaggtggagctgagcagaaagcaccaggaggccctgcacgcccccaccgaccacagagagctggagcagctgagaaaggaggtgcagaccctgagagacagactgcccgagatgctgagagacaaggccagcctgagccagaccgacggcccccccgccggcagccccggccaggacagcgacctgagacaggagctggacagactgcacagagagctggccgagggcagagccggcctgcaggcccaggagcaggagctgtgcagagcccagggccagcaggaggagctgctgcagagactgcaggaggcccaggagagagaggccgccaccgccagccagaccagagccctgagcagccagctggaggaggccagagccgcccagagagagctggaggcccaggtgagcagcctgagcagacaggtgacccagctgcagggccagtgggagcagagactggaggagagcagccaggccaagaccatccacaccgccagcgagaccaacggcatgggcccccccgagggcggcccccaggaggcccagctgagaaaggaggtggccgccctgagagagcagctggagcaggcccacagccacagacccagcggcaaggaggaggccctgtgccagctgcaggaggagaacagaagactgagcagagagcaggagagactggaggccgagctggcccaggagcaggagagcaagcagagactggagggcgagagaagagagaccgagagcaactgggaggcccagctggccgacatcctgagctgggtgaacgacgagaaggtgagcagaggctacctgcaggccctggccaccaagatggccgaggagctggagagcctgagaaacgtgggcacccagaccctgcccgccagacccctggaccaccagtggaaggccagaagactgcagaagatggaggccagcgccagactggagctgcagagcgccctggaggccgagatcagagccaagcagggcctgcaggagagactgacccaggtgcaggaggcccagctgcaggccgagagaagactgcaggaggccgagaagcagagccaggccctgcagcaggagctggccatgctgagagaggagctgagagccagaggccccgtggacaccaagcccagcaacagcctgatccccttcctgagcttcagaagcagcgagaaggacagcgccaaggaccccggcatcagcggcgaggccaccagacacggcggcgagcccgacctgagacccgagggcagaagaagcctgagaatgggcgccgtgttccccagagcccccaccgccaacaccgccagcaccgagggcctgcccgccaagcccggcagccacaccctgagacccagaagcttccccagccccaccaagtgcctgagatgcaccagcctgatgctgggcctgggcagacagggcctgggctgcgacgcctgcggctacttctgccacaccacctgcgccccccaggcccccccctgccccgtgccccccgacctgctgagaaccgccctgggcgtgcaccccgagaccggcaccggcaccgcctacgagggcttcctgagcgtgcccagacccagcggcgtgagaagaggctggcagagagtgttcgccgccctgagcgacagcagactgctgctgttcgacgcccccgacctgagactgagcccccccagcggcgccctgctgcaggtgctggacctgagagacccccagttcagcgccacccccgtgctggccagcgacgtgatccacgcccagagcagagacctgcccagaatcttcagagtgaccaccagccagctggccgtgccccccaccacctgcaccgtgctgctgctggccgagagcgagggcgagagagagagatggctgcaggtgctgggcgagctgcagagactgctgctggacgccagacccagacccagacccgtgtacaccctgaaggaggcctacgacaacggcctgcccctgctgccccacaccctgtgcgccgccatcctggaccaggacagactggccctgggcaccgaggagggcctgttcgtgatccacctgagaagcaacgacatcttccaggtgggcgagtgcagaagagtgcagcagctgaccctgagccccagcgccggcctgctggtggtgctgtgcggcagaggccccagcgtgagactgttcgccctggccgagctggagaacatcgaggtggccggcgccaagatccccgagagcagaggctgccaggtgctggccgccggcagcatcctgcaggccagaacccccgtgctgtgcgtggccgtgaagagacaggtgctgtgctaccagctgggccccggccccggcccctggcagagaagaatcagagagctgcaggcccccgccaccgtgcagagcctgggcctgctgggcgacagactgtgcgtgggcgccgccggcggcttcgccctgtaccccctgctgaacgaggccgcccccctggccctgggcgccggcctggtgcccgaggagctgccccccagcagaggcggcctgggcgaggccctgggcgccgtggagctgagcctgagcgagttcctgctgctgttcaccaccgccggcatctacgtggacggcgccggcagaaagagcagaggccacgagctgctgtggcccgccgcccccatgggctggggctacgccgccccctacctgaccgtgttcagcgagaacagcatcgacgtgttcgacgtgagaagagccgagtgggtgcagaccgtgcccctgaagaaggtgagacccctgaaccccgagggcagcctgttcctgtacggcaccgagaaggtgagactgacctacctgagaaaccagctggccgagaaggacgagttcgacatccccgacctgaccgacaacagcagaagacagctgttcagaaccaagagcaagagaagattcttcttcagagtgagcgaggagcagcagaagcagcagagaagagagatgctgaaggaccccttcgtgagaagcaagctgatcagcccccccaccaacttcaaccacctggtgcacgtgggccccgccaacggcagacccggcgccagagacaagagccccgcccccgaggagaagggcagagtggccagaggcagcggcccccagagaccccacagcttcagcgaggccctgagaagacccgccagcatgggcagcgagggcctgggcggcgacgccgaccccatgaagagaaagccctggaccagcctgagcagcgagagcgtgagctgcccccagggcagcctgagccccgccaccagcctgatgcaggtgagcgagagacccagaagcctgcccctgagccccgagctggagagcagcccctag

SEQ ID NO: 193575 - protein, 165 aa, Artificial Sequence
  derived and/or modified sequence
MALLALLLVVALPRVWTDANLTARQRDPEDSQRTDEGDNRVWCHVCERENTFECQNPRRCKWTEPYCVIAAVKIFPRFFMVAKQCSAGCAAMERPKPEEKRFLLEEPMPFFYLKCCKIRYCNLEGPPINSSVFKEYAGSMGESCGGLWLAILLLLASIAAGLSLS

SEQ ID NO: 193576 - protein, 223 aa, Artificial Sequence
  derived and/or modified sequence
MRLQRPRQAPAGGRRAPRGGRGSPYRPDPGRGARRLRRFQKGGEGAPRADPPWAPLGTMALLALLLVVALPRVWTDANLTARQRDPEDSQRTDEGDNRVWCHVCERENTFECQNPRRCKWTEPYCVIAAVKIFPRFFMVAKQCSAGCAAMERPKPEEKRFLLEEPMPFFYLKCCKIRYCNLEGPPINSSVFKEYAGSMGESCGGLWLAILLLLASIAAGLSLS

SEQ ID NO: 193577 - DNA, 672 bp, Artificial Sequence
  derived and/or modified sequence
atgcggctgcagcggccccggcaggcccccgccggcggccggcgggcccctagaggcgggcggggtagcccctacagacctgaccccgggaggggagccagacgcctccgtcggttccagaaaggtggggaaggagcaccacgggcggacccaccttgggcccccctgggtacgatggcgctacttgcattgcttctcgtggttgctttacccagagtgtggaccgatgcaaatctgaccgcacggcagcgcgacccagaagacagccagaggactgacgagggtgacaacagggtgtggtgccatgtgtgcgagagagaaaacaccttcgagtgccaaaacccgcggcggtgcaagtggaccgagccctactgtgtgattgccgctgtgaagatcttccccagattcttcatggtcgctaagcagtgctccgccgggtgtgcagccatggagcggccaaaaccagaagagaaacgctttctgctcgaagagccaatgcccttcttttaccttaagtgctgtaaaatcagatattgcaacctggaaggcccaccgattaatagctctgtcttcaaggagtacgccggctccatgggtgagtcctgtggcgggctgtggctagccatcctcctgctcctagcttctatcgctgcaggactctccctgtcttag

SEQ ID NO: 193578 - DNA, 498 bp, Artificial Sequence
  derived and/or modified sequence
atggccctgctggccctgcttttggtcgtagccctcccgagagtgtggacagatgctaatctcaccgcgaggcagcgcgatccagaagactctcagaggaccgacgaaggtgataatcgggtatggtgtcatgtgtgcgaacgggaaaataccttcgagtgtcagaatccgaggcgatgtaaatggacggaaccttactgtgttatcgccgctgttaagatttttccgaggttttttatggtcgccaagcaatgctccgccggatgtgcagccatggaacgacctaagcctgaggagaaacggtttttactggaggaaccgatgccttttttctacctcaagtgttgtaagatccgttactgtaacttggaagggccacccatcaattcctcggtcttcaaggagtacgctggaagcatgggagaatcatgtggcggactgtggcttgccattctactgttgctggcttccattgcggctggcctcagcttgagctag

SEQ ID NO: 193579 - DNA, 672 bp, Artificial Sequence
  derived and/or modified sequence
atgcggttacaacgtcctcggcaggctcctgcaggcggaaggagagcgccaagagggggaagagggtctccttaccgacccgatcctggcaggggcgctaggcggctgcgacgttttcagaaggggggagagggtgccccacgtgccgatccgccatgggcgcctctgggtacaatggctctcttggcccttcttctggtcgttgctctgccgagagtgtggaccgatgcgaatctgaccgccaggcaacgggatccagaagacagccagcggaccgacgaaggcgacaacagggtgtggtgtcacgtgtgtgaacgggaaaacaccttcgagtgtcaaaatccaagacgctgtaagtggaccgagccgtattgcgtgatagctgcagtcaagatctttccacgcttctttatggtggccaaacagtgctcagccggatgcgccgcaatggaacgccctaagcccgaagagaaacgcttcttgttagaggagcccatgccttttttctacctcaagtgctgtaagatccgctactgcaatctcgagggtccacctattaacagctctgtgtttaaagagtatgcgggttctatgggggagtcttgtggtggcctatggcttgctatccttttactgctggccagtatcgccgctggtctgagtctatcttag

SEQ ID NO: 193580 - DNA, 498 bp, Artificial Sequence
  derived and/or modified sequence
atggccctgttagccttactgctggttgtagctctgcccagagtgtggacagatgccaacctcacggcaagacaaagggacccagaggattctcagcgtacagacgaaggagacaatagagtgtggtgtcacgtgtgcgagagagaaaacacctttgagtgtcaaaatcccaggcgatgcaagtggacagagccttattgcgtcatcgctgcggtgaaaattttccctcgattctttatggtcgcaaaacagtgttctgctggttgtgccgccatggagcggcccaagcccgaagagaagaggttccttttggaagaacccatgccatttttctacttgaagtgctgtaagatcaggtactgcaatctggagggcccccccatcaacagctcagtgttcaaggagtacgctgggtcaatgggtgaatcatgcggaggactttggctagccatcttactcctgcttgcttctatagccgctggactgagcttgtcctag

SEQ ID NO: 193581 - DNA, 672 bp, Artificial Sequence
  derived and/or modified sequence
atgcgactgcaaaggccccgacaagcacccgccggcggacgaagggctccacggggtggcaggggttcaccctataggccggatcctggtagaggtgcgcgtcgcttacgtaggtttcagaaaggcggggaaggtgcgccaagggccgaccccccatgggctccactcggaacaatggctttgttagcccttctgctggtcgtggccctgccacgtgtttggactgacgcaaatttaaccgcacggcagcgtgatcccgaagattcccagcgaacagacgagggcgacaatagggtgtggtgtcatgtgtgcgaacgagagaatacattcgaatgtcagaatccaaggaggtgcaagtggacagagccttactgcgtgatcgctgcagtcaaaatttttcctcgcttttttatggtggccaagcagtgctctgctggctgtgcggccatggagcgtccgaaacccgaggaaaagaggttcctgcttgaggagcctatgccatttttctacctcaagtgttgtaaaattcgttactgcaacttagaaggccctcccatcaactcatcagtgtttaaggaatacgccggtagcatgggggagagttgtgggggcttgtggctggctatactattgcttctcgctagtattgctgctggactctccttgtcctag

SEQ ID NO: 193582 - DNA, 498 bp, Artificial Sequence
  derived and/or modified sequence
atggccctcctggcactgctgctggtggtggctttgcctcgcgtctggactgatgcaaatttgaccgcccgtcagcgggaccctgaagacagccaacggacggacgaaggggacaatcgcgtgtggtgccatgtttgtgagcgggaaaatacgtttgagtgccaaaacccccgtagatgtaaatggacagaaccttactgtgtgatcgctgctgtgaaaatttttccgagattttttatggttgctaaacagtgctctgctgggtgtgctgctatggaacgccctaagcctgaagaaaagagattcctcctcgaagagcccatgccttttttttacttgaagtgctgcaagatcaggtactgcaacctggagggcccccctattaattcatccgtgttcaaagagtatgccgggagtatgggagagtcatgcggtggattatggcttgctattttgctgcttctcgccagcattgcagccggcctatcactcagttag

SEQ ID NO: 193583 - DNA, 672 bp, Artificial Sequence
  derived and/or modified sequence
atgcgcctgcaaagacctagacaggctccagcaggaggtaggagggcgcccagagggggacgcggatcaccttaccgacctgaccccggaagaggtgctagacgcctgcggcgctttcagaagggcggtgaaggagccccaagagctgatcccccctgggcaccactgggaaccatggctttactcgcattactgttagtggttgccttgccaagagtatggaccgacgctaacctgacagcccgccagcgcgatcctgaagattcccaaagaacggacgagggcgacaatagggtgtggtgccacgtttgcgagagagaaaataccttcgaatgtcaaaatccaagaagatgcaaatggacagaaccctactgtgtcatagctgccgtcaaaatttttcctagatttttcatggttgccaaacaatgttctgctgggtgcgccgctatggaacgaccaaaaccagaggaaaagcgtttcttgcttgaggagcctatgcctttcttctacttgaagtgctgtaaaattaggtactgcaacctggaaggcccacccatcaacagttccgtttttaaagagtacgcaggctccatgggggaaagctgtggtgggctgtggttggccatacttctgttgctcgcttctattgccgctggactttcactctcttag

SEQ ID NO: 193584 - DNA, 1708 bp, Artificial Sequence
  derived and/or modified sequence
gagttatcagaggtgagcccgtgctcttcagcggagaagatcccctacctggccgccggccactttctgtgggccgtggggtcctcaaggagacggcccttgggctcaggggctgcgtttccacacgcgcctttcccagggctcccgcgcccgttcctgcctggccgccggccgctccaacagcagcacaaggcgggactcagaaccggcgttcagggccgccagcggccgcgaggccctgagatgaggctccaaagaccccgacaggccccggcgggtgggaggcgcgcgccccggggcgggcggggctccccctaccggccagacccggggagaggcgcgcggaggctgcgaaggttccagaagggcggggagggggcgccgcgcgctgaccctccctgggcaccgctggggacgatggcgctgctcgccttgctgctggtcgtggccctaccgcgggtgtggacagacgccaacctgactgcgagacaacgagatccagaggactcccagcgaacggacgagggtgacaatagagtgtggtgtcatgtttgtgagagagaaaacactttcgagtgccagaacccaaggaggtgcaaatggacagagccatactgcgttatagcggccgtgaaaatatttccacgttttttcatggttgcgaagcagtgctccgctggttgtgcagcgatggagagacccaagccagaggagaagcggtttctcctggaagagcccatgcccttcttttacctcaagtgttgtaaaattcgctactgcaatttagaggggccacctatcaactcatcagtgttcaaagaatatgctgggagcatgggtgagagctgtggtgggctgtggctggccatcctcctgctgctggcctccattgcagccggcctcagcctgtcttgagccacgggactgccacagactgagccttccggagcatggactcgctccagaccgttgtcacctgttgcattaaacttgttttctgttgattacctcttggtttgacttcccagggtcttgggatgggagagtggggatcaggtgcagttggctcttaaccctcaagggttctttaactcacattcagaggaagtccagatctcctgagtagtgattttggtgacaagtttttctctttgaaatcaaaccttgtaactcatttattgctgatggccactcttttccttgactcccctctgcctctgagggcttcagtattgatggggagggaggcctaagtaccactcatggagagtatgtgctgagatgcttccgacctttcaggtgacgcaggaacactgggggagtctgaatgattggggtgaagacatccctggagtgaaggactcctcagcatggggggcagtggggcacacgttagggctgcccccattccagtggtggaggcgctgtggatggctgcttttcctcaacctttcctaccagattccaggaggcagaagataactaattgtgttgaagaaacttagacttcacccaccagctggcacaggtgcacagattcataaattcccacacgtgtgtgttcaacatctgaaacttaggccaagtagagagcatcagggtaaatggcgttcatttctctgttaagatgcagccatccatggggagctgagaaatcagactcaaagttccaccaaaaacaaatacaaggggacttcaaaagttcacg

SEQ ID NO: 193585 - DNA, 2671 bp, Artificial Sequence
  derived and/or modified sequence
gagttatcagaggtgagcccgtgctcttcagcggagaagatcccctacctggccgccggccactttctgtgggccgtggggtcctcaaggagacggcccttgggctcaggggctgcgtttccacacgcgcctttcccagggctcccgcgcccgttcctgcctggccgccggccgctccaacagcagcacaaggcgggactcagaaccggcgttcagggccgccagcggccgcgaggccctgagatgaggctccaaagaccccgacaggccccggcgggtgggaggcgcgcgccccggggcgggcggggctccccctaccggccagacccggggagaggcgcgcggaggctgcgaaggttccagaagggcggggagggggcgccgcgcgctgaccctccctgggcaccgctggggacgatggcgctgctcgccttgctgctggtcgtggccctaccgcgggtgtggacagacgccaacctgactgcgagacaacgagatccagaggactcccagcgaacggacgagggtgacaatagagtgtggtgtcatgtttgtgagagagaaaacactttcgagtgccagaacccaaggaggtgcaaatggacagagccatactgcgttatagcggccgtgaaaatatttccacgttttttcatggttgcgaagcagtgctccgctggttgtgcagcgatggagagacccaagccagaggagaagcggtttctcctggaagagcccatgcccttcttttacctcaagtgttgtaaaattcgctactgcaatttagaggggccacctatcaactcatcagtgttcaaagaatatgctgggagcatgggtgagagctgtggtgggctgtggctggccatcctcctgctgctggcctccattgcagccggcctcagcctgtcttgagccacgggactgccacagactgagccttccggagcatggactcgctccagaccgttgtcacctgttgcattaaacttgttttctgttgattacctcttggtttgacttcccagggtcttgggatgggagagtggggatcaggtgcagttggctcttaaccctcaagggttctttaactcacattcagaggaagtccagatctcctgagtagtgattttggtgacaagtttttctctttgaaatcaaaccttgtaactcatttattgctgatggccactcttttccttgactcccctctgcctctgagggcttcagtattgatggggagggaggcctaagtaccactcatggagagtatgtgctgagatgcttccgacctttcaggtgacgcaggaacactgggggagtctgaatgattggggtgaagacatccctggagtgaaggactcctcagcatggggggcagtggggcacacgttagggctgcccccattccagtggtggaggcgctgtggatggctgcttttcctcaacctttcctaccagattccaggaggcagaagataactaattgtgttgaagaaacttagacttcacccaccagctggcacaggtgcacagattcataaattcccacacgtgtgtgttcaacatctgaaacttaggccaagtagagagcatcagggtaaatggcgttcatttctctgttaagatgcagccatccatggggagctgagaaatcagactcaaagttccaccaaaaacaaatacaaggggacttcaaaagttcacgaaaaaattgaattaaaagataaaaattaaaaaatgttttatttctcagcatgagctccatcaaggtcgagacgcttctgcaagtaatggtaccagccattcagttcatccctaaagaattgggcaccctgggaatttaaccatgccacttcagtctttgtgacgttattaactgaagaaaagtgggtgccctttaaagattttttaaaattataaaacagaagtaaccaaatcaggcctggaaggtgtatgcctagtgatttcccattgaaactctcacaaaactggccttgtttgatgagaggaatgagcaggagcattgtcatggtggagaagggctctctggtgaagctttccggggtgacgatttcctgggtgttttcctgctaaatcgttggctgactttctctatacactctcataataagatgttactgttctttggccctccagaaagtcaataagcaagatgccttgagcattcacaaaacggttgccacgacctttgcccttgacatgtctgcttttactctgatgggaccacgcccacctctaggtagtcattgctttgcttgtgctttgccttcaggagtgtactggttaagccacatttcatctccggctataattatatgaagaaatgcttcaggatcttgattccacttgtttaaaatggccatagaacgcttttctcttatctgcagctgagctgggagaaagttttggcacccaccgagtggacagtttactcaactttaatttcagtcagaattgtgtaagctgaacaccttgggatacctacagcgttggctattgtttctgctgctattaatcagtcctcttaaattagggcacaaacaagatgaattgtttcctcacagactgatgtggctggcctgctgctgtggacttcctctccaacatcatctcttctcttcttccaatgagttatccacttacttaa

SEQ ID NO: 193586 - DNA, 498 bp, Artificial Sequence
  derived and/or modified sequence
atggccctgctggccctgctgctggtggtggccctgcccagagtgtggaccgacgccaacctgaccgccagacagagagaccccgaggacagccagagaaccgacgagggcgacaacagagtgtggtgccacgtgtgcgagagagagaacaccttcgagtgccagaaccccagaagatgcaagtggaccgagccctactgcgtgatcgccgccgtgaagatcttccccagattcttcatggtggccaagcagtgcagcgccggctgcgccgccatggagagacccaagcccgaggagaagagattcctgctggaggagcccatgcccttcttctacctgaagtgctgcaagatcagatactgcaacctggagggcccccccatcaacagcagcgtgttcaaggagtacgccggcagcatgggcgagagctgcggcggcctgtggctggccatcctgctgctgctggccagcatcgccgccggcctgagcctgagctag

SEQ ID NO: 193587 - DNA, 672 bp, Artificial Sequence
  derived and/or modified sequence
atgagactgcagagacccagacaggcccccgccggcggcagaagagcccccagaggcggcagaggcagcccctacagacccgaccccggcagaggcgccagaagactgagaagattccagaagggcggcgagggcgcccccagagccgaccccccctgggcccccctgggcaccatggccctgctggccctgctgctggtggtggccctgcccagagtgtggaccgacgccaacctgaccgccagacagagagaccccgaggacagccagagaaccgacgagggcgacaacagagtgtggtgccacgtgtgcgagagagagaacaccttcgagtgccagaaccccagaagatgcaagtggaccgagccctactgcgtgatcgccgccgtgaagatcttccccagattcttcatggtggccaagcagtgcagcgccggctgcgccgccatggagagacccaagcccgaggagaagagattcctgctggaggagcccatgcccttcttctacctgaagtgctgcaagatcagatactgcaacctggagggcccccccatcaacagcagcgtgttcaaggagtacgccggcagcatgggcgagagctgcggcggcctgtggctggccatcctgctgctgctggccagcatcgccgccggcctgagcctgagctag

SEQ ID NO: 193588 - DNA, 498 bp, Artificial Sequence
  derived and/or modified sequence
atggctttgctcgcgctgctactcgtcgtggcgctgccaagggtgtggaccgatgccaacctgacagcaagacagagagacccagaagattcccagcgcacagatgaaggtgataatcgcgtgtggtgtcatgtctgcgaaagggagaatacattcgaatgtcagaatcccagaagatgtaagtggaccgagccctactgtgtcatcgccgcagtgaaaatcttcccccggttttttatggtggccaaacagtgctcggccggatgcgctgctatggagagaccaaaacctgaggagaagaggtttttgctggaggaacccatgccctttttttatctcaaatgttgcaaaattcgttattgtaaccttgagggccctccaattaactctagcgtcttcaaggagtatgctggtagtatgggagaaagttgcggaggcctgtggttggctatcttgctcctgcttgccagcattgctgctggtctgagcctttcatag

SEQ ID NO: 193589 - DNA, 672 bp, Artificial Sequence
  derived and/or modified sequence
atgcgcctgcagagacctcggcaggccccagcaggtgggagacgggcacctcgcgggggaagggggagtccctaccggccagacccaggccgtggcgcgaggcggcttcgcaggttccagaaaggcggggaaggagctccacgtgccgaccctccttgggccccacttggcacaatggcactgctggctcttctccttgtggtagccttacctagagtttggacagatgccaatctcacggcgcggcaacgcgatcctgaagacagccaaagaacggatgaaggcgataatcgggtttggtgccacgtatgtgagagagagaatactttcgagtgtcaaaatccacgaaggtgcaagtggaccgaaccctattgcgtgatcgccgctgtgaagatttttccaagattttttatggtggccaaacagtgctccgctggctgtgcggccatggagcgtccaaaacccgaggagaagcggttcctcctcgaggaaccaatgcccttcttctatctgaaatgttgcaagattcgttattgtaatctggaggggcctcctatcaattcctccgtatttaaagagtatgcaggcagtatgggtgagtcctgcgggggcctgtggctggccatactgttgctgctggctagtattgccgctggcttaagtcttagctag

SEQ ID NO: 193590 - DNA, 498 bp, Artificial Sequence
  derived and/or modified sequence
atggccctgctggccctgctgctggtggtggccctgccccgggtgtggacagatgccaacctgacagcccggcagagggaccctgaggacagccagaggacagatgaaggagacaacagagtgtggtgccacgtgtgtgaaagagagaacacctttgagtgccagaacccccggcgctgcaagtggacagagccctactgtgtgattgctgctgtgaagatcttcccccgcttcttcatggtggccaagcagtgcagcgctggctgtgccgccatggagcggcccaagccagaggagaagcgcttcctgctggaggagcccatgcccttcttctacctgaagtgctgcaagatccgctactgcaacctggagggcccccccatcaacagctctgtgttcaaggagtatgccggctccatgggagagagctgtggcggcctgtggctggccatcctgctgctgctggccagcattgctgctggcctgagcctgtcctag

SEQ ID NO: 193591 - DNA, 672 bp, Artificial Sequence
  derived and/or modified sequence
atgaggctgcagaggccccggcaggccccagctgggggccggcgggccccccggggcggccggggcagcccctacagaccagaccccggccgcggggcccggcggctgcggcgcttccagaagggcggggagggcgcccccagggctgaccccccctgggcccccctgggcaccatggccctgctggccctgctgctggtggtggccctgccccgggtgtggacagatgccaacctgacagcccggcagagggaccctgaggacagccagaggacagatgaaggagacaacagagtgtggtgccacgtgtgtgaaagagagaacacctttgagtgccagaacccccggcgctgcaagtggacagagccctactgtgtgattgctgctgtgaagatcttcccccgcttcttcatggtggccaagcagtgcagcgctggctgtgccgccatggagcggcccaagccagaggagaagcgcttcctgctggaggagcccatgcccttcttctacctgaagtgctgcaagatccgctactgcaacctggagggcccccccatcaacagctctgtgttcaaggagtatgccggctccatgggagagagctgtggcggcctgtggctggccatcctgctgctgctggccagcattgctgctggcctgagcctgtcctag

SEQ ID NO: 193592 - DNA, 498 bp, Artificial Sequence
  derived and/or modified sequence
atggccctgctggccctgctgctggtggtggccctgccccgggtgtggacggatgccaacctcacagctcggcaacgagaccctgaggattctcagcggacagatgagggggataaccgcgtgtggtgccatgtctgtgagcgggaaaacacctttgagtgtcaaaatcctcgtcgctgtaagtggactgaaccatattgcgtcatagcagccgttaagattttcccccgtttcttcatggtcgcgaaacagtgcagtgctggctgcgccgctatggagcgaccaaagcccgaagaaaaacgattcctccttgaggagcctatgccatttttttacctgaaatgttgcaaaatccggtactgtaacttggaggggccaccaatcaacagctcagtattcaaggaatatgccgggagcatgggcgaatcttgcgggggtctatggctggcaattcttctcctgctcgcaagcatcgccgctgggctgtcgctttcgtag

SEQ ID NO: 193593 - DNA, 498 bp, Artificial Sequence
  derived and/or modified sequence
atggcactcctggctctgctcctagtggtcgctctgccacgggtctggactgatgctaatctcaccgcaaggcagcgagaccctgaagacagtcaacggacggatgagggtgacaatcgcgtgtggtgtcacgtttgcgagagggaaaacacctttgagtgtcagaatcctaggcgctgcaaatggacagaaccctactgtgtgattgccgccgtgaagattttcccacggtttttcatggtcgctaaacaatgctctgccggatgcgccgcaatggagcgtcccaaaccggaagagaagagattcttactggaagaaccaatgcccttcttttatcttaaatgctgcaagatcagatattgtaatctggaaggcccgccaatcaatagctccgtattcaaggaatacgctggaagtatgggcgaaagttgtggaggactctggctggctatcctgctgctgctcgcttctattgctgctggtctctcgctttcgtag

SEQ ID NO: 193594 - DNA, 498 bp, Artificial Sequence
  derived and/or modified sequence
atggccctgctggccctgctgctggtggtggccctgccccgggtgtggactgacgctaatctaacagccagacagcgcgacccagaagatagccagaggaccgatgagggcgataacagggtctggtgtcacgtgtgtgaaagggagaatacgttcgaatgtcagaatccacgcaggtgcaagtggactgaaccgtattgcgtcatcgcggctgtgaagatttttccacgcttcttcatggtcgctaaacagtgttcagccggctgtgccgccatggaaagacctaagccagaagaaaaacggtttctactggaggagcctatgccctttttctacctgaagtgctgtaaaatcagatattgtaaccttgaggggcctcccatcaatagttccgtattcaaggaatacgccggttctatgggagagtcctgcggcggactctggctggcgatcctgcttctcctggcttccattgcagcagggctcagccttagctag

SEQ ID NO: 193595 - DNA, 498 bp, Artificial Sequence
  derived and/or modified sequence
atggccctcctggctctcctgctcgttgtggcactgccaagagtgtggactgacgcgaacctaactgcacggcagcgggatcccgaggactcacaaagaacggatgagggggataatagagtttggtgccacgtgtgcgagcgagagaacacattcgaatgtcagaatcccaggagatgcaagtggacagaaccctattgtgtgattgccgctgtcaagatcttcccacgtttctttatggtggccaagcagtgctccgccggttgtgccgcaatggagagaccaaagccagaggagaaacgttttctgctggaggagccaatgccatttttttatttaaagtgttgcaaaattcgttactgtaacctggagggaccacctataaattcgtctgtctttaaagagtacgccggatcaatgggcgagtcttgtgggggtctctggctcgcaattctgttactactggccagcattgccgctggactttccctgtcttag

SEQ ID NO: 193596 - RNA, 498 nt, Artificial Sequence
  derived and/or modified sequence
auggcccuguuagccuuacugcugguuguagcucugcccagaguguggacagaugccaaccucacggcaagacaaagggacccagaggauucucagcguacagacgaaggagacaauagaguguggugucacgugugcgagagagaaaacaccuuugagugucaaaaucccaggcgaugcaaguggacagagccuuauugcgucaucgcugcggugaaaauuuucccucgauucuuuauggucgcaaaacaguguucugcugguugugccgccauggagcggcccaagcccgaagagaagagguuccuuuuggaagaacccaugccauuuuucuacuugaagugcuguaagaucagguacugcaaucuggagggcccccccaucaacagcucaguguucaaggaguacgcugggucaaugggugaaucaugcggaggacuuuggcuagccaucuuacuccugcuugcuucuauagccgcuggacugagcuuguccuag

SEQ ID NO: 193597 - RNA, 672 nt, Artificial Sequence
  derived and/or modified sequence
augcgacugcaaaggccccgacaagcacccgccggcggacgaagggcuccacgggguggcagggguucacccuauaggccggauccugguagaggugcgcgucgcuuacguagguuucagaaaggcggggaaggugcgccaagggccgaccccccaugggcuccacucggaacaauggcuuuguuagcccuucugcuggucguggcccugccacguguuuggacugacgcaaauuuaaccgcacggcagcgugaucccgaagauucccagcgaacagacgagggcgacaauaggguguggugucaugugugcgaacgagagaauacauucgaaugucagaauccaaggaggugcaaguggacagagccuuacugcgugaucgcugcagucaaaauuuuuccucgcuuuuuuaugguggccaagcagugcucugcuggcugugcggccauggagcguccgaaacccgaggaaaagagguuccugcuugaggagccuaugccauuuuucuaccucaaguguuguaaaauucguuacugcaacuuagaaggcccucccaucaacucaucaguguuuaaggaauacgccgguagcaugggggagaguugugggggcuuguggcuggcuauacuauugcuucucgcuaguauugcugcuggacucuccuuguccuag

SEQ ID NO: 193598 - RNA, 498 nt, Artificial Sequence
  derived and/or modified sequence
auggcccuccuggcacugcugcuggugguggcuuugccucgcgucuggacugaugcaaauuugaccgcccgucagcgggacccugaagacagccaacggacggacgaaggggacaaucgcguguggugccauguuugugagcgggaaaauacguuugagugccaaaacccccguagauguaaauggacagaaccuuacugugugaucgcugcugugaaaauuuuuccgagauuuuuuaugguugcuaaacagugcucugcugggugugcugcuauggaacgcccuaagccugaagaaaagagauuccuccucgaagagcccaugccuuuuuuuuacuugaagugcugcaagaucagguacugcaaccuggagggccccccuauuaauucauccguguucaaagaguaugccgggaguaugggagagucaugcgguggauuauggcuugcuauuuugcugcuucucgccagcauugcagccggccuaucacucaguuag

SEQ ID NO: 193599 - RNA, 672 nt, Artificial Sequence
  derived and/or modified sequence
augcgccugcaaagaccuagacaggcuccagcaggagguaggagggcgcccagagggggacgcggaucaccuuaccgaccugaccccggaagaggugcuagacgccugcggcgcuuucagaagggcggugaaggagccccaagagcugauccccccugggcaccacugggaaccauggcuuuacucgcauuacuguuagugguugccuugccaagaguauggaccgacgcuaaccugacagcccgccagcgcgauccugaagauucccaaagaacggacgagggcgacaauaggguguggugccacguuugcgagagagaaaauaccuucgaaugucaaaauccaagaagaugcaaauggacagaacccuacugugucauagcugccgucaaaauuuuuccuagauuuuucaugguugccaaacaauguucugcugggugcgccgcuauggaacgaccaaaaccagaggaaaagcguuucuugcuugaggagccuaugccuuucuucuacuugaagugcuguaaaauuagguacugcaaccuggaaggcccacccaucaacaguuccguuuuuaaagaguacgcaggcuccaugggggaaagcuguggugggcugugguuggccauacuucuguugcucgcuucuauugccgcuggacuuucacucucuuag

SEQ ID NO: 193600 - protein, 281 aa, Artificial Sequence
  derived and/or modified sequence
MASRGRRPEHGGPPELFYDETEARKYVRNSRMIDIQTRMAGRALELLYLPENKPCYLLDIGCGTGLSGSYLSDEGHYWVGLDISPAMLDEAVDREIEGDLLLGDMGQGIPFKPGTFDGCISISAVQWLCNANKKSENPAKRLYCFFASLFSVLVRGSRAVLQLYPENSEQLELITTQATKAGFSGGMVVDYPNSAKAKKFYLCLFSGPSTFIPEGLSENQDEVEPRESVFTNERFPLRMSRRGMVRKSRAWVLEKKERHRRQGREVRPDTQYTGRKRKPRF

SEQ ID NO: 193601 - DNA, 846 bp, Artificial Sequence
  derived and/or modified sequence
atggccagcagaggcagaagacccgagcacggcggcccccccgagctgttctacgacgagaccgaggccagaaagtacgtgagaaacagcagaatgatcgacatccagaccagaatggccggcagagccctggagctgctgtacctgcccgagaacaagccctgctacctgctggacatcggctgcggcaccggcctgagcggcagctacctgagcgacgagggccactactgggtgggcctggacatcagccccgccatgctggacgaggccgtggacagagagatcgagggcgacctgctgctgggcgacatgggccagggcatccccttcaagcccggcaccttcgacggctgcatcagcatcagcgccgtgcagtggctgtgcaacgccaacaagaagagcgagaaccccgccaagagactgtactgcttcttcgccagcctgttcagcgtgctggtgagaggcagcagagccgtgctgcagctgtaccccgagaacagcgagcagctggagctgatcaccacccaggccaccaaggccggcttcagcggcggcatggtggtggactaccccaacagcgccaaggccaagaagttctacctgtgcctgttcagcggccccagcaccttcatccccgagggcctgagcgagaaccaggacgaggtggagcccagagagagcgtgttcaccaacgagagattccccctgagaatgagcagaagaggcatggtgagaaagagcagagcctgggtgctggagaagaaggagagacacagaagacagggcagagaggtgagacccgacacccagtacaccggcagaaagagaaagcccagattctag

SEQ ID NO: 193602 - DNA, 846 bp, Artificial Sequence
  derived and/or modified sequence
atggcaagccgtgggcgccggcctgaacacggcggcccacccgagctgttctacgacgagactgaggcacggaaatacgtgagaaattcgaggatgatcgacatccagactaggatggcagggcgggctcttgagctgctctacttgccagagaataagccctgttatctacttgacatcggctgtggtaccggcctgtcagggagctacctgtcagacgagggtcattattgggtcgggctggatattagcccagccatgcttgacgaggccgtcgatagggagatagaaggggatctattgttaggcgatatgggccaaggtatccccttcaagccgggcactttcgatggatgtatctccatttcagctgtccagtggctctgcaacgcaaacaagaaatccgaaaatcccgctaaacggctgtactgctttttcgcgtctctgttcagcgtcctcgtgaggggcagtcgcgctgtgctccagctctacccggaaaactccgaacaactggagttgatcactactcaggctacaaaggccggctttagcggcggtatggtggtcgactacccaaactcagcgaaagctaaaaaattctacctctgcctgttctcagggccatctaccttcattccagaggggttatctgaaaatcaggacgaggtcgagccccgggagagcgtgtttaccaacgagcggttccccctgaggatgtcccgcaggggcatggtgaggaaaagtagagcctgggtattagagaagaaggaacgtcaccgtagacaggggcgcgaggttcggccggatacacaatacacgggcaggaagcgaaagccccgattttag

SEQ ID NO: 193603 - DNA, 846 bp, Artificial Sequence
  derived and/or modified sequence
atggccagccggggccggcggcctgagcacggcggccccccagagctgttctatgatgaaacagaggccaggaaatatgtgaggaacagcaggatgattgacatccagaccaggatggccggccgggccctggagctgctgtacctgcctgagaacaagccctgctacctgctggacatcggctgcggcaccggcctgagcggcagctacctgagtgatgagggccactactgggtgggcctggacatcagccctgccatgctggatgaagctgtggaccgggagattgaaggagacctgctgctgggggacatgggccagggcatccccttcaagccaggcacctttgatggctgcatcagcatctctgctgtgcagtggctgtgcaatgccaacaagaagtctgagaacccagccaagaggctgtactgcttctttgccagcctcttctctgtgctggtgcggggcagcagagctgtgctgcagctgtacccagagaacagcgagcagctggagctgatcaccacccaggccaccaaggccggcttcagcggcggcatggtggtggactaccccaacagcgccaaggccaagaagttctacctgtgcctcttcagcggccccagcaccttcatccctgagggcctgtctgagaaccaggatgaggtggagccccgggagagcgtcttcaccaatgaacgcttccccctgaggatgagcagaagaggcatggtgaggaagagccgggcctgggtgctggagaagaaggagcggcaccggcggcagggccgggaggtgcggccagacacccagtacacaggcaggaagaggaagccccgcttctag

SEQ ID NO: 193604 - DNA, 846 bp, Artificial Sequence
  derived and/or modified sequence
atggccagccggggccggcggcccgagcacggcggcccccccgagctcttttacgatgagacagaagcgaggaaatatgtccgaaactctcgtatgatcgacatccaaacacgaatggcagggcgagccctggagctgttatacttgcctgagaacaagccttgttatctgctcgacataggatgcggcactggactgagtggctcctacctgtcagacgagggccactactgggtagggctcgatattagccccgcaatgctggatgaggctgttgacagagagatcgagggcgatcttcttctgggggatatgggccagggtataccctttaaacccggaactttcgatggatgcatctctataagcgccgtccagtggctctgtaacgcgaataagaagagtgagaaccctgctaaaaggctctattgcttttttgcttctctttttagcgtgttagtgagggggtctcgcgccgtcctccagctttatcccgagaattctgaacagttggaactaataacaacacaggccacgaaggctggcttctccggtggaatggtggtggactacccaaactcggccaaggcaaagaagttctatttgtgcctcttctctgggcctagtacgttcataccagaggggttgagcgagaatcaagacgaggtcgaaccccgggagtcagtgttcactaatgagcggtttcccctcagaatgtcccggagaggtatggtgcgaaaatcacgcgcttgggtgctcgaaaagaaagagcggcacaggcgccagggaagggaggtacgaccagacacccaatatacagggcgaaaacgtaagcccagattttag

SEQ ID NO: 193605 - DNA, 846 bp, Artificial Sequence
  derived and/or modified sequence
atggcgtctaggggacggcgtccggagcacgggggtccacctgaactgttctatgacgagaccgaggccaggaagtacgttcgcaactcccggatgattgacatacagactcgaatggcaggccgagcgttggaactcttatacctccctgagaacaaaccctgctacctcctagatatcggatgtggcacgggtctctccggatcctatctcagcgacgagggacattattgggtgggtctggatatctctcccgctatgctcgatgaggcggtggatagagaaattgagggtgacctgcttctgggtgacatgggccagggcataccattcaagccaggcacgttcgacggctgtatcagtattagcgccgtacagtggctgtgcaacgctaataaaaagtctgaaaaccctgccaagcgattatactgtttctttgcatctcttttttcagtcctcgtgcgtggttcacgggctgtgctgcagctttaccctgagaattccgagcagctggagttaattaccacccaagccaccaaggccggattctctggcggtatggtagtcgattatcctaactccgctaaggctaagaagttctatctctgcctattctctggaccgagcactttcatcccagaaggactgagtgaaaaccaggatgaggtggagcccagggagtctgtcttcacaaatgaacggttccccctgcggatgtccaggaggggcatggtcaggaaatctcgggcttgggtactcgaaaagaaggaaaggcaccgacgtcagggaagggaggttcgacccgatacccagtacaccggaaggaagcgtaagcccaggttttag

SEQ ID NO: 193606 - DNA, 1230 bp, Artificial Sequence
  derived and/or modified sequence
gacataaaaaccgggtgccggcaggcgccagtcgcaggtgtgctgctgaggcgtgagaatggcgtcccgcggccggcgtccggagcatggcggacccccagagctgttttatgacgagacagaagcccggaaatacgttcgcaactcacggatgattgatatccagaccaggatggctgggcgagcattggagcttctttatctgccagagaataagccctgttacctgctggatattggctgtggcactgggctgagtggaagttatctgtcagatgaagggcactattgggtgggcctggatatcagccctgccatgctggatgaggctgtggaccgagagatagagggagacctgctgctgggggatatgggccagggcatcccattcaagccaggcacatttgatggttgcatcagcatttctgctgtgcagtggctctgtaatgctaacaagaagtctgaaaaccctgccaagcgcctgtactgcttttttgcttctcttttttctgttctcgtccggggatcccgagctgtcctgcagctgtaccctgagaactcagagcagttggagctgatcacaacccaggccacaaaggcaggcttctccggtggcatggtggtagactaccctaacagtgccaaagcaaagaaattctacctctgcttgttttctgggccttcgacctttataccagaggggctgagtgaaaatcaggatgaagttgaacccagggagtctgtgttcaccaatgagaggttcccattaaggatgtcgaggcggggaatggtgaggaagagtcgggcatgggtgctggagaagaaggagcggcacaggcgccagggcagggaagtcagacctgacacccagtacaccggccgcaagcgcaagccccgcttctaagtcaccacgcggttctggaaaggcacttgcctctgcacttttctatattgttcagctgacaaagtagtattttagaaaagttctaaagttataaaaatgttttctgcagtaaaaaaaaagttctctgggccgggcgtggtggctcacacctgtaatcccagcaccttgggaggctgaggtgggaggatcatttgaggccaggagtttgagacctgcctgggcaacataatgaaacttcctttccagggaggaaaaaaaaaaaaaaaaaaagctctgagagcatcttattttgtttaaaggcaagaaataaaatttccttttgtgga

SEQ ID NO: 193607 - protein, 1939 aa, Artificial Sequence
  derived and/or modified sequence
MSSDSEMAIFGEAAPFLRKSEKERIEAQNKPFDAKTSVFVVDPKESYVKAIVQSREGGKVTAKTEAGATVTVKEDQVFSMNPPKYDKIEDMAMMTHLHEPAVLYNLKERYAAWMIYTYSGLFCVTVNPYKWLPVYNPEVVTAYRGKKRQEAPPHIFSISDNAYQFMLTDRENQSILITGESGAGKTVNTKRVIQYFATIAVTGEKKKEEPASGKMQGTLEDQIISANPLLEAFGNAKTVRNDNSSRFGKFIRIHFGATGKLASADIETYLLEKSRVTFQLKAERSYHIFYQILSNKKPELIEMLLITTNPYDFAFVSQGEITVPSIDDQEELMATDSAVDILGFTADEKVAIYKLTGAVMHYGNMKFKQKQREEQAEPDGTEVADKAAYLTSLNSADLLKSLCYPRVKVGNEFVTKGQTVQQVYNAVGALAKAIYEKMFLWMVTRINQQLDTKQPRQYFIGVLDIAGFEIFDFNSLEQLCINFTNEKLQQFFNHHMFVLEQEEYKKEGIEWEFIDFGMDLAACIELIEKPMGIFSILEEECMFPKATDTSFKNKLYEQHLGKSNNFQKPKPAKGKPEAHFSLVHYAGTVDYNIAGWLDKNKDPLNETVVGLYQKSAMKTLAFLFSGAQTAEAEGGGGKKGGKKKGSSFQTVSALFRENLNKLMTNLRSTHPHFVRCIIPNETKTPGAMEHELVLHQLRCNGVLEGIRICRKGFPSRILYADFKQRYKVLNASAIPEGQFIDSKKASEKLLGSIEIDHTQYKFGHTKVFFKAGLLGTLEEMRDEKLAQLITRTQAICRGFLMRVEFRKMMERRESIFCIQYNIRAFMNVKHWPWMKLYFKIKPLLKSAETEKEMANMKEEFEKTKEELAKTEAKRKELEEKMVTLMQEKNDLQLQVQAEADALADAEERCDQLIKTKIQLEAKIKEVTERAEDEEEINAELTAKKRKLEDECSELKKDIDDLELTLAKVEKEKHATENKVKNLTEEMAGLDETIAKLTKEKKALQEAHQQTLDDLQMEEDKVNTLTKAKTKLEQQVDDLEGSLEQEKKLCMDLERAKRKLEGDLKLAQESTMDTENDKQQLNEKLKKKEFEMSNLQGKIEDEQALAIQLQKKIKELQARIEELEEEIEAERASRAKAEKQRSDLSRELEEISERLEEAGGATSAQIEMNKKREAEFQKMRRDLEESTLQHEATAAALRKKHADSVAELGEQIDSLQRVKQKLEKEKSELKMEINDLASNMETVSKAKANFEKMCRTLEDQLSEIKTKEEEQQRLINELSAQKARLHTESGEFSRQLDEKDAMVSQLSRGKQAFTQQIEELKRQLEEETKAKSTLAHALQSARHDCDLLREQYEEEQEAKAELQRGMSKANSEVAQWRTKYETDAIQRTEELEEAKKKLAQRLQDAEEHVEAVNSKCASLEKTKQRLQNEVEDLMIDVERSNAACIALDKKQRNFDKVLAEWKQKYEETQAELEASQKESRSLSTELFKVKNAYEESLDHLETLKRENKNLQQEISDLTEQIAEGGKHIHELEKVKKQLDHEKSELQTSLEEAEASLEHEEGKILRIQLELNQVKSEIDRKIAEKDEELDQLKRNHLRVVESMQSTLDAEIRSRNDALRIKKKMEGDLNEMEIQLNHANRQAAEALRNLRNTQGILKDTQLHLDDAIRGQDDLKEQLAMVERRANLMQAEVEELRASLERTERGRKMAEQELLDASERVQLLHTQNTSLINTKKKLETDISQIQGEMEDIVQEARNAEEKAKKAITDAAMMAEELKKEQDTSAHLERMKKNMEQTVKDLQLRLDEAEQLALKGGKKQIQKLEARVRELESEVESEQKHNVEAVKGLRKHERRVKELTYQTEEDRKNILRLQDLVDKLQTKVKAYKRQAEEAEEQSNVNLAKFRKLQHELEEAKERADIAESQVNKLRVKSREVHTKVISEE

SEQ ID NO: 193608 - DNA, 5820 bp, Artificial Sequence
  derived and/or modified sequence
atgtcctctgatagcgagatggctatttttggtgaagccgctcctttccttaggaagtcagagaaggagcgaatcgaagcacaaaacaagccttttgacgccaagacgtccgtgttcgtagtggaccctaaagaatcctatgttaaagcaatagtgcagtctcgggaggggggaaaagtcaccgccaagaccgaggcaggagccacagtcactgtgaaggaggatcaggtcttcagcatgaatcccccaaaatacgacaagatcgaggacatggccatgatgacccacctgcatgaaccggcagtcttgtacaatctgaaggaaagatacgcagcctggatgatatatacatacagcggtttattttgtgtcaccgttaatccttacaagtggctcccagtgtataatccagaagtggttaccgcgtataggggcaagaagagacaggaggcacccccccacatattcagcataagcgataacgcgtaccagttcatgttaaccgacagagagaaccaaagtatattgattaccggtgaatcgggtgctggtaagaccgtgaataccaaacgtgtcatccagtactttgctacgatcgccgtgaccggagaaaaaaagaaagaggagccagcctccggcaaaatgcagggcactctggaagaccaaattatttctgccaatcctctcctcgaagcatttgggaacgccaagaccgtgcggaatgataatagcagtcggttcggcaagtttatccggatacattttggagctacagggaagcttgcctcggctgacattgagacatatctgctcgagaaaagccgcgtgacttttcagttgaaggcagagaggagctaccacatcttctaccaaatactgtcaaataagaagcctgagctgatcgagatgttactgatcaccaccaacccttatgattttgccttcgtgtcccaaggagagattacggtgccctctattgatgatcaggaagagctcatggcgacagattcagctgtggacatcctggggtttacggccgacgaaaaggtggctatctacaagttgactggtgcagtgatgcactatggaaacatgaagtttaaacagaagcagagagaggagcaggccgagccagatggaaccgaggtggcagataaagccgcatacctcacttccttaaactctgcagatctgttgaagtcactctgctacccaagagttaaggtgggaaacgagtttgtgacgaagggtcagaccgtccagcaggtatataatgctgtgggggccctcgccaaagctatctacgaaaagatgttcctgtggatggtcactcggattaaccagcagttagatactaagcagcccaggcagtactttatcggggtcttagatatcgccgggttcgaaattttcgatttcaacagcctggaacagctgtgcattaattttactaatgaaaagctccagcagttttttaatcaccatatgttcgtgctggagcaggaagaatacaagaaggagggcattgaatgggagttcatcgacttcggtatggacctcgctgcttgcatcgagttgatcgaaaaaccgatgggtattttttctattttagaagaggagtgcatgttccccaaggcgaccgacacgtcattcaagaacaagctgtacgagcagcatttggggaagtccaataatttccagaagcctaagcctgccaaagggaaacctgaagcgcactttagcttagtgcactacgccgggaccgtggattacaatattgcgggatggctggacaaaaataaagatcccctgaatgaaaccgtggtaggtttgtatcagaagagtgcgatgaagaccttggcgttcctcttcagcggggctcagactgcagaagcggagggcggtggaggaaagaagggcggaaaaaagaagggaagctcgtttcagactgtgagcgcgctcttcagagagaatctgaacaaactaatgactaatttgcgctccacccatccacacttcgtgcggtgtatcattcccaacgagaccaagacccctggtgccatggagcacgaactggtgctgcaccaattgcgctgtaacggcgtactggagggtattcgtatctgtcgaaagggattcccttcacggatcctttacgcggatttcaaacagcgatacaaagtgctcaacgcctctgctataccagaggggcagttcatcgactccaaaaaagccagtgaaaagttgctcggaagcatcgaaatcgatcacactcaatacaagttcgggcatacaaaagtattcttcaaagcaggtctccttggcactctagaggaaatgcgcgacgaaaagctcgcccagctcatcactcggacccaggccatttgtagagggtttttaatgagggtggagtttcgcaaaatgatggagaggcgagagagcatattttgcattcaatataacatccgagcctttatgaatgtcaaacactggccctggatgaaactgtattttaaaattaaaccgcttctcaagagcgccgaaactgagaaggagatggcgaacatgaaggaggaattcgagaaaaccaaggaagagttggctaagactgaagctaagcgcaaagaacttgaagagaagatggtcactctgatgcaggagaaaaacgatctgcagctgcaggtgcaggccgaagctgatgctctggcagacgcggaggaaagatgtgaccaactcataaaaactaaaatccagctggaggcgaagataaaggaggtcaccgaaagagccgaagatgaggaggaaattaacgctgagttgacagccaaaaagaggaagctagaggatgagtgttcagagctgaaaaaggacattgatgacctggagttgactttggccaaagtggagaaggagaagcacgccacggaaaacaaagtaaagaatcttacagaggaaatggccggcttggatgaaaccatcgcaaagttgacgaaggagaaaaaggctctacaggaagcacaccagcagacattggacgacctccaaatggaggaggataaggtcaataccctgaccaaggcaaaaactaaactcgagcagcaggttgacgacctggaaggaagcctcgaacaggagaagaagctgtgtatggatttagaaagggccaaacgaaagctggaaggggatctgaagctggcacaagagagcacaatggacactgagaacgacaagcagcagctgaacgaaaagttaaagaaaaaagagtttgagatgagtaacctccaaggaaagattgaggacgaacaggctctagctatacaactacaaaaaaagatcaaggagctgcaagccagaattgaggagttagaggaggagattgaagcagaacgagctagtcgggctaaggcagagaagcaaaggagcgaccttagccgggaacttgaggagataagtgagagactggaggaggcagggggcgccacaagcgcacagatcgaaatgaataagaaaagagaggctgagttccagaaaatgcggcgggatttagaagagtccactctccagcacgaggccaccgcagcagcccttagaaagaagcacgcggattccgtggccgaactgggggaacagatcgatagcctgcagagagtgaagcagaagcttgagaaggagaagagtgagctgaaaatggagattaacgacctggcgtccaatatggagaccgtatctaaggctaaagctaacttcgagaagatgtgccggacacttgaagatcagctgtctgagattaagacaaaggaggaggagcagcaacgacttatcaatgaactgtccgcccaaaaagcccgactccacacggagagtggagagtttagccgtcagctggacgagaaggacgccatggtgtctcaactgagccgggggaaacaggccttcactcagcagattgaagagcttaagaggcaattggaggaggaaactaaggccaaatccaccctcgcccatgccctgcagtcagcccgccatgattgtgacctgctcagggagcaatacgaagaagagcaggaggcaaaggcggaattacagaggggtatgagcaaagcaaatagcgaggtggcccagtggcgaactaaatatgaaacagatgccattcagaggacggaagaactggaagaggcaaaaaaaaagctggcacagaggctccaggacgcagaggaacatgtcgaagccgtgaatagcaagtgtgctagcctcgagaagaccaagcaacggctgcagaacgaggtcgaggatcttatgattgacgtcgagagatctaacgctgcttgcattgccctggacaaaaagcagcgtaactttgacaaggtgctggccgagtggaaacagaagtatgaagagactcaggctgagctggaggcatcacagaaggagagtcgcagtcttagcactgagttattcaaggttaagaatgcttacgaggagtctttggaccacctcgagactctgaaacgcgaaaacaagaacctgcagcaagagatttcagacctaaccgaacagatcgcagagggaggaaaacacatccatgagctggagaaggtgaagaagcagctggatcacgaaaagtcagaactgcagacatctcttgaggaggccgaagctagcctcgagcacgaagagggtaaaatcctgagaatccagctggaactgaatcaggtgaaatctgagattgaccgcaaaattgccgagaaagatgaggaacttgaccagctgaagcgcaaccacttacgagtcgtggaatccatgcagagcacactggatgcagagatccgctctcgcaatgacgctctgcggataaaaaaaaagatggaaggcgatctaaatgagatggagatacagctcaatcacgccaaccggcaggctgctgaggctctgagaaatctccgaaacacacagggaattttgaaagacacccagttgcatttggacgacgccattcgtggtcaggacgatctgaaggagcagctggctatggtagagaggcgcgcaaacctaatgcaggctgaggtagaggagctccgagccagcctggaaaggaccgaaagaggcaggaagatggccgagcaagaactgctcgatgctagcgaacgggtgcagcttttgcacacacagaacacaagtttaatcaatacgaagaagaaacttgagaccgacatcagccaaatccaaggtgaaatggaagacatagtccaggaagcaaggaacgcagaggaaaaagcaaagaaggctatcactgatgccgctatgatggcggaagagctcaagaaggagcaggacacctcagcacaccttgaaagaatgaagaagaacatggaacagacggtgaaagacctgcagctcaggctggatgaggctgagcaactcgcacttaaaggcggtaagaagcagattcagaagctggaggctcgggtgagagaactggaatcagaagtagagagcgaacagaaacataatgtggaggcggtgaagggactgcgaaaacacgagcggagagtaaaggaactgacctaccaaactgaagaggaccgcaaaaatatcttgaggcttcaggacctggtggataagcttcagacaaaagtaaaagcctataagcggcaggctgaagaggccgaagagcagagcaatgtgaacctggccaaattcagaaagttgcaacatgagctcgaagaggccaaagagagagcagacattgcagaaagccaggtgaacaagctcagagtgaaaagccgcgaagtgcatacaaaagtcatatcagaagaatag

SEQ ID NO: 193609 - DNA, 5820 bp, Artificial Sequence
  derived and/or modified sequence
atgagcagtgacagcgagatggccatctttggagaggccgcccccttcctgaggaagtctgagaaggagagaattgaggcccagaacaagccctttgatgccaagacctctgtgtttgtggtggaccccaaggagagctatgtgaaggccatcgtgcagagccgggagggcggcaaggtgacagccaagacagaggccggggccaccgtgacagtgaaggaggaccaggtgttctccatgaacccccccaagtatgacaagattgaggacatggccatgatgacccacctgcacgagcctgctgtgctgtacaacctgaaggagagatatgctgcctggatgatctacacctacagcggcctcttctgtgtgacagtgaacccctacaagtggctgcctgtgtacaaccctgaggtggtgacagcctaccggggcaagaagaggcaggaggccccaccccacatcttcagcatcagtgacaatgcctaccagttcatgctgacagaccgggagaaccagagcatcctgatcaccggggagagcggggccggcaagacagtgaacaccaagagggtcatccagtactttgccaccatcgctgtgactggagagaagaagaaggaggagcccgccagcggcaagatgcagggcaccctggaggaccagatcatcagcgccaaccccctgctggaggcctttggaaatgccaagacagtgagaaatgacaacagcagcagatttgggaagttcatccgcatccactttggagccaccgggaagctggccagcgctgacatcgagacctacctgctggagaagagccgggtgaccttccagctgaaggccgagaggagctaccacatcttctaccagatcctgagcaacaagaagccagagctgattgagatgctgctgatcaccaccaacccctatgactttgcctttgtgtcccagggcgagatcaccgtgcccagcattgatgaccaggaggagctgatggccacagattctgctgtggacatcctgggcttcaccgcagatgagaaggtggccatctacaagctgaccggggctgtgatgcactacggcaacatgaagttcaagcagaagcagcgggaggagcaggccgagccagatggaacagaggtggccgacaaggccgcctacctgaccagcctgaacagcgctgacctgctgaagagcctgtgctacccccgggtgaaggtgggcaatgaatttgtgaccaagggccagacagtgcagcaggtgtacaatgctgtgggcgccctggccaaggccatctatgagaagatgttcctgtggatggtgacccgcatcaaccagcagctggacaccaagcagccccggcagtacttcatcggcgtgctggacattgctggctttgagatctttgacttcaacagcctggagcagctgtgcatcaacttcaccaatgagaagctgcagcagttcttcaaccaccacatgtttgtgctggagcaggaggagtacaagaaggagggcatcgagtgggagttcatcgactttggcatggacctggccgcctgcatcgagctgattgagaagcccatgggcatcttcagcatcctggaggaggagtgcatgttccccaaggccacagacaccagcttcaagaacaagctgtatgagcagcacctgggcaagagcaacaacttccagaagcccaagccagccaagggcaagccagaggcccacttcagcctggtgcactacgccggcaccgtggactacaacattgctggctggctggacaagaacaaggaccccctgaatgaaacagtggtgggcctgtaccagaagagcgccatgaagaccctggccttcctgttcagcggggcccagacagctgaggccgagggcggcggcggcaagaagggcggcaagaagaagggcagcagcttccagacagtgtctgccctcttccgggagaacctgaacaagctgatgaccaacctgcggagcacccacccccactttgtgcgctgcatcatccccaatgagaccaagacccctggggccatggagcacgagctggtgctgcaccagctgcgctgcaatggagtgctggagggcatccgcatctgcaggaagggcttccccagccgcatcctgtatgctgacttcaagcagcgctacaaggtgctgaatgccagcgccatccctgagggccagttcatcgacagcaagaaggccagcgagaagctgctgggcagcattgaaattgaccacacccagtacaagtttggccacaccaaggtgttcttcaaggccggcctgctgggcaccctggaggagatgagagatgagaagctggcccagctgatcaccaggacccaggccatctgccggggcttcctgatgagggtggagttcaggaagatgatggagcggcgggagagcatcttctgcatccagtacaacatccgggccttcatgaatgtgaagcactggccctggatgaagctgtacttcaagatcaagcccctgctgaagtctgctgagacagagaaggagatggccaacatgaaggaggagtttgagaagaccaaggaggagctggccaagacagaggccaagaggaaggagctggaggagaagatggtgaccctgatgcaggagaagaatgacctgcagctgcaggtgcaggccgaggctgatgccctggctgatgctgaggagcgctgtgaccagctgatcaagaccaagatccagctggaggccaagatcaaggaggtgacagagcgggcagaagatgaggaggagatcaatgctgagctgacagccaagaagaggaagctggaggatgagtgcagcgagctgaagaaggacattgatgacctggagctgaccctggccaaggtggagaaggagaagcacgccacagagaacaaggtgaagaacctgacagaggagatggccggcctggatgagaccatcgccaagctgaccaaggagaagaaggccctgcaggaggcccaccagcagaccctggatgacctgcagatggaggaggacaaggtgaacaccctgaccaaggccaagaccaagctggagcagcaggtggatgacctggagggcagcctggagcaggagaagaagctgtgcatggacctggagcgggccaagaggaagctggagggggacctgaagctggcccaggagagcaccatggacacagaaaatgacaagcagcagctgaatgagaagctgaagaagaaggagtttgagatgagcaacctgcagggcaagattgaagatgagcaggccctggccatccagctgcagaagaagatcaaggagctgcaggccagaattgaggagctggaggaggagattgaggccgagcgggccagccgggccaaggccgagaagcagaggagtgacctgagccgggagctggaggagatcagcgagcggctggaggaggccggcggggccaccagcgcccagatcgagatgaacaagaagcgggaggccgagttccagaagatgagaagagacctggaggagagcaccctgcagcacgaggccacagctgctgccctgaggaagaagcatgctgacagcgtggccgagctgggggagcagattgacagcctgcagagggtgaagcagaagctggagaaggagaagtctgagctgaagatggagatcaatgacctggccagcaacatggagaccgtgtccaaggccaaggccaactttgagaagatgtgcaggaccctggaggaccagctgtctgagatcaagaccaaggaggaggagcagcagaggctcatcaatgagctgagcgcccagaaggcccggctgcacacagagagcggggagttcagccggcagctggatgagaaggatgccatggtgtcccagctgagccggggcaagcaggccttcacccagcagatcgaggagctgaagaggcagctggaggaggagaccaaggccaagagcaccctggcccacgccctgcagagcgcccggcatgactgtgacctgctgcgggagcagtatgaggaggagcaggaggccaaggccgagctgcagaggggcatgagcaaggccaacagcgaggtggcccagtggaggaccaagtatgaaacagatgccatccagaggacagaggagctggaggaggccaagaagaagctggcccagaggctgcaggatgctgaggagcacgtggaggccgtgaacagcaaatgtgccagcctggagaagaccaagcagaggctgcagaatgaggtggaggacctgatgattgatgtggagaggagcaatgctgcctgcatcgccctggacaagaagcagaggaactttgacaaggtgctggccgagtggaagcagaagtatgaggagacccaggccgagctggaggccagccagaaggagagccgcagcctgagcacagagctgttcaaggtgaagaatgcctatgaggagagcctggaccacctggagaccctgaagcgggagaacaagaacctgcagcaggagatcagtgacctgacagagcagattgctgagggcggcaagcacatccacgagctggagaaggtgaagaagcagctggaccacgagaagtctgagctgcagaccagcctggaggaggccgaggccagcctggagcacgaggagggcaagatcctgcgcatccagctggagctgaaccaggtgaagtcagaaattgacaggaagattgctgagaaggatgaggagctggaccagctgaagaggaaccacctgcgggtggtggagagcatgcagagcaccctggatgctgagatccgcagcagaaatgatgccctgcgcatcaagaagaagatggagggggacctgaatgagatggagatccagctgaaccacgccaaccggcaggccgctgaggccctgaggaacctgaggaacacccagggcatcctgaaggacacccagctgcacctggatgatgccatccggggccaggatgacctgaaggagcagctggccatggtggagcggcgggccaacctgatgcaggccgaggtggaggagctgcgggccagcctggagaggacagagcggggcaggaagatggccgagcaggagctgctggatgccagcgagcgggtgcagctgctgcacacccagaacaccagcctcatcaacaccaagaagaagctggagacagacatcagccagatccagggcgagatggaggacatcgtgcaggaggccagaaatgctgaggagaaggccaagaaggccatcacagatgctgccatgatggccgaggagctgaagaaggagcaggacaccagcgcccacctggagaggatgaagaagaacatggagcagacagtgaaggacctgcagctgcggctggatgaggccgagcagctggccctgaagggcggcaagaagcagatccagaagctggaggcccgggtgcgggagctggagagcgaggtggagagcgagcagaagcacaacgtggaggccgtgaagggcctgaggaagcatgaaagaagagtgaaggagctgacctaccagacagaggaggacaggaagaacatcctgcggctgcaggacctggtggacaagctgcagaccaaggtgaaggcctacaagaggcaggccgaggaggccgaggagcagagcaatgtgaacctggccaagttcaggaagctgcagcacgagctggaggaggccaaggagagagctgacattgctgagagccaggtgaacaagctgcgggtgaagagccgggaggtgcacaccaaggtgatcagcgaggagtag

SEQ ID NO: 193610 - DNA, 6016 bp, Artificial Sequence
  derived and/or modified sequence
atccttcctcaaaattcttgaagtagttgtctgctttgagcctgccaccttcttcatctgataatacaagaggtatacctagtccagtactgccatcaataacctgcagccatgagttctgactctgagatggccatttttggggaggctgctcctttcctccgaaagtctgaaaaggagcgaattgaagctcagaacaagccttttgatgccaagacatcagtctttgtggtggaccctaaggagtcctacgtgaaagcaatagtgcagagcagggaaggggggaaggtgacagccaagaccgaagctggagctactgtaactgtgaaagaagaccaagtcttctccatgaaccctcccaaatatgacaagatcgaggacatggccatgatgactcacctgcatgagcctgctgtgctgtataacctcaaagagcgttacgcagcctggatgatctacacctactcgggcctcttctgtgtcaccgtcaacccctacaagtggctgccggtgtacaaccctgaggtggtgacagcctaccgaggcaaaaagcgccaggaggccccaccccatatcttctccatctctgacaatgcctatcagttcatgctaactgatcgtgaaaaccagtcaatcttgattactggagaatctggtgcagggaagactgtgaacacgaagcgtgtcatccagtactttgcaacaattgcagttactggagagaagaaaaaagaggaacctgcctctggcaaaatgcaggggacccttgaagatcaaatcatcagtgctaaccccctactggaagccttcggcaatgccaagaccgtgaggaatgacaactcctctcgctttggtaaattcatcaggatccattttggtgccacaggcaaactggcttctgcagatattgaaacatatctgctagagaagtcccgagttacttttcagctaaaggctgaaagaagctaccacatattttatcaaatcctgtccaataagaaaccagagctcattgaaatgcttctgatcaccaccaacccatatgacttcgcatttgtcagccaaggggaaattactgtgcccagcattgatgaccaggaagagctgatggccacagatagtgctgtggacatcctgggtttcactgctgatgaaaaggtggccatttacaagctcactggagccgtgatgcattatgggaacatgaaattcaagcaaaagcaaagggaagagcaggcagagccagatggcacggaagttgctgacaaagctgcttatctgacaagtctgaactctgctgacctgctcaaatctctctgctatcccagagtcaaggtcggcaatgagttcgtaaccaaaggccagactgtgcagcaggtgtacaatgcagtgggtgctctggccaaagccatctacgagaagatgttcctgtggatggtcacccgcatcaaccagcagctggacaccaagcagcccaggcagtacttcatcggggtcttggacattgctggctttgagatctttgatttcaacagcctggagcagctgtgcatcaacttcaccaacgagaaactgcaacagtttttcaaccaccacatgttcgtgctggagcaggaagagtacaagaaggaaggcatcgagtgggagttcattgacttcgggatggacctggctgcctgcatcgagctcatcgagaagcctatgggcatcttctccatcctagaagaggagtgcatgttccccaaggcaacagacacctccttcaagaacaagctgtatgaacaacatcttggaaaatccaacaacttccagaagcccaagcctgccaaaggcaagcctgaggctcacttctcactggtgcactatgccggcaccgtggactacaacatcgccggctggctggacaaaaacaaggaccccctgaatgagactgtggtggggctgtaccagaagtctgcaatgaagactctggctttcctcttctctggggcacaaactgctgaagcagagggtggtggtggaaagaaaggtggcaaaaagaagggttcttctttccagacagtgtcagctcttttcagggagaatttgaataagctgatgaccaacttgaggagcactcacccccactttgtgcggtgcatcatccccaatgaaactaaaactcctggtgccatggagcatgagcttgtcctgcatcagctgaggtgtaacggtgtgctggaaggcatccgcatctgcaggaaaggcttcccaagcagaatcctttatgcagacttcaaacagagatacaaggttctaaatgcgagtgctatcccagagggtcagttcattgacagcaagaaggcttctgagaaacttctagggtctattgaaattgaccacacccagtacaaattcggtcataccaaggttttcttcaaagctggcctgctgggaactctagaggaaatgcgagatgaaaagctagctcaactcatcacgcgcactcaagccatatgcagagggttcctgatgagagtggagttcagaaagatgatggagaggagagagtccatcttctgcattcagtacaacatccgtgctttcatgaatgtgaagcactggccctggatgaagctgtatttcaagatcaagcccctcctcaagagtgcagagacagagaaggagatggccaacatgaaggaagaatttgagaaaaccaaagaagagctggctaagacagaggcaaaaaggaaagaactagaagaaaagatggtgacgctaatgcaagagaaaaatgacttacaactccaagttcaagctgaagcagatgccttggctgatgcagaggaaagatgtgatcagttgattaaaaccaaaatccaacttgaggccaaaatcaaagaggtaactgaaagagctgaggatgaggaagagatcaatgctgagctgacagccaagaagaggaaactggaggatgaatgttcagagctcaagaaagacattgatgaccttgagctgacactggccaaggttgagaaggagaaacatgccacagagaacaaggtgaaaaacctcacagaagagatggcaggtctggatgaaaccattgctaagctgaccaaggagaagaaggctctccaggaggcccaccagcagaccctggatgacctgcagatggaggaggacaaagtcaacaccctgaccaaagctaaaaccaagctagaacagcaagtggacgatcttgaaggatctctggaacaagaaaagaaactttgcatggacttagaaagagccaagagaaaactggagggtgacctaaaattggcccaagaatccacaatggatacagaaaatgacaaacagcaacttaatgagaaactcaaaaagaaagagtttgaaatgagcaatctgcaaggcaagattgaagatgaacaagcccttgcaatacagctacaaaagaagatcaaagaattacaggcccgcattgaggagctggaggaggaaatcgaggcagagcgggcctcccgggccaaagcagagaagcagcgctctgacctctcccgggagctggaggagatcagtgagaggctggaagaagccggtggggccacttcagcccagattgagatgaacaagaagcgggaggctgagttccagaaaatgcgcagggacctggaagagtccaccctgcagcacgaagccacggcagctgctcttcggaagaagcacgcagatagtgtggctgagcttggggagcagattgacagccttcagcgggtcaagcagaagctggagaaggaaaagagtgagctgaagatggagatcaatgaccttgctagtaacatggagactgtctccaaagccaaggcaaactttgagaaaatgtgccgcaccctagaggaccagcttagtgaaataaaaacaaaggaagaagagcaacaacgcttaataaatgagttgtcagcccagaaggcacgtttacacacagaatcaggtgagttttcacgacagctagatgaaaaagatgctatggtttctcagctatcccgaggcaaacaagcatttacacaacagattgaagaattaaagaggcagctagaagaggagactaaggccaagagcactctggcccatgccctgcagtcagcccgccatgactgtgacctgctgcgggaacagtatgaggaggagcaggaagccaaggctgagctgcagaggggaatgtccaaggccaacagtgaggttgcccagtggaggaccaagtacgagacggacgccatccagcgcacagaggagctggaggaggccaagaagaagctagcccagcgtctgcaggatgcagaagaacatgtagaagctgtgaattccaaatgtgcttctcttgaaaagacaaagcagaggctacagaatgaagtagaggacctcatgattgatgtggaacgatctaatgctgcctgcatagctctcgataagaagcaaagaaactttgacaaggttctggcagaatggaaacagaagtatgaggaaactcaggctgaacttgaggcctcccagaaggagtcgcgttctctcagcactgagctgttcaaggtgaagaatgcctacgaggaatccctggatcatcttgaaactctaaagcgagagaataagaacttacaacaggagatttctgacctgacagagcaaattgcagagggtggaaagcatatccatgaactggagaaagtaaagaaacaacttgatcatgagaagagtgaactacagacttccctagaggaagcagaggcatctcttgagcatgaagaaggcaaaattcttcgcattcaacttgagctaaatcaggtgaaatctgagattgaccgaaaaattgctgaaaaagatgaagaactcgatcagctaaagaggaaccatctcagagttgtggagtcaatgcagagtacactggatgctgagatcaggagcagaaatgatgctctgaggatcaagaagaagatggagggagatcttaatgaaatggaaatccagctgaaccatgccaaccgccaggctgctgaggcactaaggaatcttagaaacacacaaggaatactgaaggacactcagctacatttggatgatgccatcagaggccaagatgaccttaaggaacaactggcaatggttgagcgcagagctaacctgatgcaggctgaagttgaagagctcagggcatccctggaacggactgagagaggcaggaaaatggcagagcaagagcttctggatgccagtgaacgtgtgcaacttctgcacactcagaacaccagcctgatcaacaccaagaagaagctggaaacagacatttcccaaatccagggagagatggaggacatcgtccaggaagcccgcaatgcagaggagaaggccaagaaggccatcactgatgctgccatgatggctgaggagctgaagaaggaacaggacaccagcgcccacctggagcggatgaagaagaacatggagcagaccgtgaaggatctgcagctccgtctggatgaggctgagcagctggcgctgaagggtgggaagaagcagatccagaaactggaggccagggtgagagagcttgaaagtgaggtggaaagtgaacagaagcacaatgttgaggctgtcaagggtcttcgcaaacatgagagaagagtgaaggaactcacttaccagactgaggaggaccgcaagaatattctcaggctgcaggacttggtggacaaattgcaaaccaaagtcaaagcttacaagagacaagctgaagaggctgaggaacaatccaatgtcaaccttgccaagttccgcaagctccagcacgagctggaggaggccaaggaacgggctgacattgctgagtcccaagtcaacaagctgagagtgaagagtcgggaggttcacacaaaagtcataagtgaagagtaattcattctaatgaaagaaaatgtgaccaaagaaatgcacgaaatgtgaagttctttgtcactgtcctgtatatcaaggaaataaa

SEQ ID NO: 193611 - DNA, 5820 bp, Artificial Sequence
  derived and/or modified sequence
atgagcagcgacagcgagatggccatcttcggcgaggccgccccctttctgaggaagtccgaaaaggagcgaattgaggctcagaacaagccctttgatgcgaaaactagtgtgttcgtggttgaccccaaggaatcatacgtcaaggcgatcgtgcagtcgcgggagggtggtaaggtgacggccaaaactgaagctggagccacagtcaccgtgaaagaggatcaagtcttcagtatgaacccccccaagtacgacaaaattgaggacatggccatgatgacccacttacacgaacccgccgtcttatacaatctgaaggagagatatgctgcgtggatgatctacacctacagtggactattctgtgtcacagtgaatccttataaatggctgccagtgtacaatcctgaagtggtcactgcgtatcgtggcaagaagcgacaggaagcccctccccatatcttttcaataagcgataacgcatatcaattcatgctgacggatcgggaaaatcaatcaattctcattacaggtgagtctggagcaggcaaaacagtgaacacaaaacgcgtgatacagtatttcgctactattgccgtcactggcgagaagaagaaggaagaacccgcgagtggaaagatgcagggtacgctggaagatcagataatctccgcaaatcctcttctcgaagcgttcggaaacgccaagacggttagaaatgacaactcaagtaggtttgggaagttcattcgaatccactttggtgcaacaggcaagcttgcatccgccgatattgaaacttatttgctggagaagtctagggtcaccttccagcttaaggcagagcgctcctaccacatattttaccagattctttcgaacaagaagccagagctgatcgaaatgctccttattacaactaacccatacgacttcgcgtttgtaagccagggcgagattacggttcccagtattgatgatcaggaggagctgatggctaccgactcagcggtggacatactaggttttacagctgacgaaaaggttgcaatctacaagttgactggcgccgtgatgcactatggcaatatgaagtttaagcagaagcagagagaggagcaggccgaaccagatggtactgaggtggctgataaggccgcctatcttacctccttgaattcagccgatctattgaaaagtctctgctatccccgagtcaaagttggtaatgaatttgtcaccaaaggacaaaccgttcagcaggtatataatgctgtcggcgccctggctaaggccatttatgagaagatgttcctgtggatggtgacccgaatcaatcagcaactggatacaaaacaaccccggcagtattttatcggggttctggacatcgctgggtttgagattttcgacttcaattcattagagcagctttgcatcaacttcaccaatgagaaactccaacagttctttaaccaccacatgtttgttctggaacaggaagagtataagaaagagggcatagaatgggagttcatcgacttcggtatggacctcgccgcctgcatcgaacttatcgagaaacctatggggatttttagcatcctggaagaggagtgtatgtttccaaaagcaactgacacgagctttaaaaataaactgtacgagcagcacctggggaaaagtaataattttcaaaaaccaaagccagccaaagggaagcccgaggcacactttagcctggtccactacgcgggtaccgtggattacaacatagcgggctggttagataagaacaaagatcctctaaacgagactgtagtcgggctgtaccagaaatccgctatgaaaacactggcgtttctgttttcgggtgcacagaccgcagaggcagaaggaggtggggggaaaaaaggggggaaaaaaaagggttctagctttcagaccgtgagcgcactctttcgagagaacctgaataaactgatgactaatttacgctctacacatccccactttgttaggtgtattattcctaatgaaacaaagacccctggtgctatggaacatgagctggtgcttcaccaattgagatgcaatggagtgcttgagggcatcaggatttgtcgcaaagggttcccatcgcggatcctgtacgcagatttcaaacagcgatataaagtgctcaacgcgtccgctatccccgaagggcagtttattgactctaagaaagctagcgaaaaactgctgggatccatcgaaatcgaccacacccagtataagttcggacatacaaaggtgttttttaaagccggtctactcgggaccctggaggagatgagggatgagaagttggcacagctgatcaccagaacccaagctatttgtcgcggttttctcatgagagtggagttccgcaaaatgatggagcgccgggaatctatcttctgcatacagtacaacattagagcctttatgaatgtcaagcattggccctggatgaaactgtactttaaaatcaagcctctcctaaagagcgccgaaaccgaaaaagagatggctaacatgaaagaggaattcgagaaaaccaaagaagagctggcaaaaacagaggccaagcgaaaagaactggaggagaagatggttacattaatgcaggaaaagaacgacttgcagctgcaggttcaagccgaggctgacgccttggcagacgcagaagagagatgcgaccaacttatcaagaccaaaatacaacttgaggctaagatcaaagaagtgaccgaacgggcagaagatgaagaagagatcaatgctgaactgactgcaaagaaacgcaaactggaagacgaatgctctgagctgaagaaggatattgatgacctggagctaacacttgccaaagtggagaaagagaagcacgctactgagaacaaggtgaagaatttgacagaagagatggcgggcctagacgaaactattgcgaagctgacaaaggaaaagaaagctctccaggaggcccaccagcaaacccttgatgacttgcaaatggaggaagacaaggtaaataccctgactaaagctaagacaaagcttgagcagcaggtggatgatctggagggcagtctcgaacaagagaagaagctctgtatggatctcgaaagggctaaaagaaaattggagggcgacttaaagttggcccaggagtccaccatggacactgagaatgacaagcaacagctgaatgaaaaactgaagaaaaaggagtttgagatgagcaatcttcagggaaaaattgaggacgaacaagccttggccatccaactccagaagaaaatcaaggaactccaggctcgcattgaagagctcgaggaagagatagaggcagagagagccagtagggctaaggcagagaaacagcggtctgacctgtctcgagagcttgaggaaatctcagagaggctcgaggaggcagggggagcgacctcggctcaaatcgagatgaacaaaaagcgggaggccgaattccaaaagatgagaagagacctcgaggagagcactctccaacacgaggcaactgcagccgccctgagaaaaaagcatgccgactccgtggcagagctgggggaacagatagattccctgcaacgcgtcaaacagaaactcgaaaaagagaagtcagaactcaagatggagattaatgacctggctagtaatatggagacggtcagcaaagccaaggccaactttgagaaaatgtgccgtactttagaagaccagctcagcgagatcaaaaccaaggaagaagaacagcaacgcctcattaacgagctgagtgcacagaaggcgagactgcataccgagtccggggagttttccagacagctggatgaaaaggacgcaatggtctcccaactcagccgtggcaaacaggccttcacccaacaaattgaagagctgaaaagacaacttgaggaagaaacaaaggctaagtccacactggctcacgctcttcagtctgcaagacacgactgcgacctgctccgagaacagtatgaggaagaacaggaggcgaaggccgagctccagagaggcatgtccaaggctaatagtgaggttgctcagtggcgaacaaagtatgaaaccgacgcaatacagcggaccgaggagctggaggaggcaaaaaagaagcttgcacagcgtctgcaagacgcagaagagcacgtggaggccgttaatagtaagtgtgcaagtctcgagaaaactaaacaacgactgcagaatgaagtggaagacctgatgatcgacgtggagcgcagcaacgcagcctgcatcgcattggacaaaaagcagaggaacttcgataaagttttggcggaatggaaacagaaatacgaggaaacccaggccgaactggaggcctcccagaaagagagtcggagtctatcaacagagctgtttaaagtgaagaatgcatatgaagagtccttagaccacctggaaaccttaaaaagggagaataagaaccttcagcaggagatcagtgatcttacagagcagatcgcagaaggtgggaagcatattcacgagctggagaaggtaaaaaagcagctagaccatgaaaaaagcgagctgcagacgtcgctcgaggaggcagaagcatccctcgaacacgaggagggcaagatcctgagaatacagttagaattgaatcaggtgaaatccgagatcgacagaaagattgccgagaaggatgaagagctggatcagctcaaacggaaccacttacgggtcgtggagtctatgcagtcaaccctagatgcagagatccgcagcaggaacgatgctttgagaatcaaaaagaagatggagggcgacttgaacgaaatggaaatacagttaaatcacgccaaccggcaggccgcggaagctttgagaaatctccgcaacactcaggggatcctaaaggacacccagttgcaccttgatgatgctatcagggggcaagacgacttaaaagaacagctggcaatggtcgaacgaagggcaaatttaatgcaggcagaggtcgaagagttgagagccagcctcgagcgcactgaacggggaaggaaaatggcagagcaagaacttctcgatgcttcagagcgcgttcagttactgcatactcagaacacttcactcatcaacaccaagaagaaattggagaccgacattagtcaaatccagggggaaatggaagacatcgtgcaggaggcacgaaacgccgaggaaaaggcaaaaaaagcaattactgacgccgccatgatggcggaggagctgaaaaaggaacaggacaccagtgcccatcttgagcgcatgaaaaaaaacatggagcagaccgtcaaggacctgcagctcagactggacgaagccgagcagctagctctgaaggggggaaaaaagcaaattcagaagctggaggccagagtgagggagctagagagtgaggttgagtctgaacagaaacacaatgtcgaggcagtgaagggtctacgaaagcacgagaggcgcgtgaaagagctgacctatcagaccgaggaagatagaaagaatatcctgaggctgcaggatctcgtggacaagctccagacaaaagttaaagcctataagagacaggcagaggaggcggaggaacaaagtaatgtaaacctggccaaattccggaagcttcaacatgagttagaggaggcgaaggaacgcgcagatattgcagagtctcaggtcaataaacttcgcgtgaaatcacgcgaggttcataccaaggtcatcagtgaagagtag

SEQ ID NO: 193612 - DNA, 5820 bp, Artificial Sequence
  derived and/or modified sequence
atgtcttctgacagtgagatggcaatttttggggaagcggcaccgttcctgaggaaatcggaaaaggaacgcattgaagctcaaaacaaaccgtttgatgctaaaaccagtgtcttcgtagtagatccaaaggaatcctacgtgaaagctatagtccagtctcgggaggggggtaaggtcacagccaagacagaggcaggggcaacagtgaccgtgaaagaagatcaagtgttctcaatgaatccacccaagtacgataaaattgaagacatggcaatgatgactcacttgcatgaaccagcagtgctctataacctgaaagagagatacgcagcttggatgatttatacatattcggggctgttttgtgttacagtcaatccatataaatggctgcctgtttataacccagaagtggtcactgcataccgtgggaaaaagaggcaggaggcgcctccccatatttttagcatctcagataatgcctaccagtttatgctgacagacagagagaaccagagcatcctcattacaggggaatctggcgctgggaaaacggttaacaccaagcgggtgatacagtatttcgcgaccatcgccgttaccggcgaaaagaagaaagaggagccagcgtccggaaagatgcaggggacactcgaggaccaaattatcagcgccaaccctttattagaggctttcggtaacgccaaaacagtgcggaacgataatagtagcaggttcggcaaatttattagaatccactttggggctaccggaaaactcgcctccgcggacatagaaacatatctcctagagaaaagtagagtgacgttccagctgaaggcagaaaggtcataccatatcttttaccagatccttagcaacaaaaagcctgagctcattgaaatgctgctgatcacaaccaatccctacgacttcgcctttgtgtctcagggagaaattactgtgccatctatcgatgatcaagaggagctgatggctacggactctgctgtggacatacttgggttcaccgccgatgagaaggtggcaatttacaagcttacaggggcagtaatgcattatggtaacatgaaattcaagcagaagcagcgggaggaacaggcggagcccgatggaacagaggtggccgacaaagctgcatacctcacctccctaaacagtgctgatcttctgaaaagcctttgctaccctagagttaaggtcggaaacgagtttgtcaccaaagggcagacagtccaacaggtgtacaacgctgtaggagccctggctaaagcaatttacgagaaaatgttcctgtggatggtgacccgaatcaaccaacagctggacacgaaacagcctcgtcagtatttcatcggagtgctcgacatcgcaggcttcgagatcttcgacttcaatagtctcgagcagctgtgtatcaactttaccaacgagaaactgcagcagttctttaatcaccacatgttcgtgctggagcaggaggaatacaagaaggaaggtatagagtgggagttcatcgattttggaatggatctcgcagcatgtattgaactgatcgaaaagcccatgggtatcttctccattctggaggaggagtgtatgtttccaaaagctaccgatacatctttcaaaaacaaactgtacgaacagcatctgggtaagtcaaacaattttcaaaagcctaagccagcgaaagggaagccagaagcccacttctcgctggtccattacgccggtacggttgactacaacattgccggatggctcgacaagaataaggaccctctaaacgagactgtggtggggttgtatcagaaatccgctatgaagacccttgccttcctgtttagtggcgcacagacagccgaagcggaagggggtgggggaaagaaggggggaaagaaaaagggcagctctttccaaactgtcagtgctctgtttcgggaaaacctgaacaagctgatgaccaatttgcgctcaactcatccccactttgtaagatgcataataccaaatgaaaccaagactccaggggctatggagcatgagctggtcctgcaccagctgcgatgtaacggggtgcttgaaggcatacgaatctgcagaaaaggcttcccaagccgcatcctctatgcagatttcaagcaaagatacaaagtactgaatgcctcggcaatcccagaaggtcaattcatcgacagcaaaaaggccagcgagaagctcttagggtctatcgaaatcgatcatacccagtataaatttggccacacaaaagtgttcttcaaggcaggtctgctggggaccctcgaggaaatgcgcgacgaaaagctggcccaactcatcaccagaacgcaggccatctgtcggggtttcttaatgagggtggaatttcgcaagatgatggaacgccgtgagagcatcttctgtatccagtataacatacgagcctttatgaacgtaaagcactggccttggatgaagctgtatttcaagattaaacccctcctgaaaagcgccgagactgagaaagaaatggcgaacatgaaggaggagttcgagaaaacaaaagaggaactggcaaaaacagaagccaaaaggaaggagcttgaggagaaaatggttacccttatgcaggagaagaacgatctgcagctgcaggtacaggccgaggctgacgcactggctgatgccgaagagcgatgtgaccagctgatcaaaacaaagattcagctcgaagcaaagataaaagaggtgaccgagcgcgctgaggatgaagaagagattaatgcggaacttacagcaaaaaaaagaaagctcgaggacgaatgttctgaactcaaaaaggatatcgatgacctcgagttgacgttagcgaaggtcgaaaaggagaagcatgctactgagaacaaggttaagaatctgacagaggagatggcaggactcgacgagacaatagccaaacttaccaaggagaaaaaggctctccaagaagcccaccagcagacgctcgacgacctgcagatggaagaagataaggttaatactcttacgaaggctaagacaaagctcgaacaacaagtggacgacttggagggctcactggagcaggaaaagaaactgtgtatggaccttgagagagctaagaggaagctggaaggagatttgaagctggcccaggagtccacgatggatacggagaatgacaagcagcagctcaacgaaaaactcaagaagaaggagttcgagatgagcaatctccagggcaaaatcgaggacgaacaggcgttggccatccaacttcagaaaaaaatcaaagaactgcaggcccgtattgaagagctggaggaagaaatcgaggcagaacgagcatcacgagcaaaggccgagaaacagaggagcgacctaagcagagagctcgaggaaatttctgagcgacttgaggaagcaggaggcgcaacttccgctcagattgaaatgaacaaaaagcgagaagcagaatttcagaaaatgagaagagacttggaggaatctaccctgcaacacgaggccactgcggcagctctcaggaaaaagcatgcggacagtgtggccgagttaggcgaacaaatcgactcactgcagagggtgaagcagaagctcgagaaagaaaagtctgaattgaaaatggagataaatgacctggcctcgaacatggaaactgtgtcaaaagccaaggcaaacttcgagaagatgtgtcgtacgcttgaggatcagctaagcgaaattaaaaccaaggaagaggaacagcagcggctgatcaacgagttgtccgcgcaaaaggccagactccacaccgagtccggcgaattttcaagacagctggatgaaaaggatgctatggtgtcccagttgtctaggggaaaacaggcgtttacacagcagattgaggagcttaaacgtcagctggaggaggaaaccaaggcaaaatcgaccttggcacacgccctgcagtccgccagacatgactgcgatttgctcagagagcaatacgaggaggagcaggaggccaaagcagaactccaaagggggatgtcaaaggccaattcagaagttgcacaatggcgaacgaagtatgagacagatgcaattcagcggaccgaggaactggaggaggcaaaaaaaaagctggcccagcgtttacaagatgccgaggagcatgtggaggccgtcaatagcaaatgcgcttcattagaaaaaacaaaacaaaggttgcagaacgaggtggaggacctgatgatcgacgtcgagagatcgaatgcagcttgcatcgctctggacaagaaacagaggaattttgacaaggtgctggcagaatggaagcaaaagtacgaggagacgcaggctgaacttgaagcctcgcagaaggagtctcgtagcctgagcaccgaactctttaaagtgaaaaacgcctacgaggagtctctcgatcacttggagaccctcaaaagagagaataaaaatctgcagcaggagatttcagacctcaccgagcagattgccgaggggggtaagcatatccacgagttagaaaaagttaagaaacagctagatcatgagaagagcgaactgcagacgtcactggaggaagcagaggcgtccctggagcacgaggagggcaaaattctgcgaatccagttagaactcaaccaggttaaatctgaaattgacagaaagattgccgagaaagatgaagagcttgaccaactcaagaggaaccacttaagggttgtggaatcaatgcagtccactctcgacgctgagattaggtccagaaacgatgccctgaggatcaaaaaaaaaatggagggtgatttgaacgagatggaaattcagctcaatcacgccaacagacaggccgctgaggcattgagaaacctgagaaacacccagggtattcttaaggatacccagctccacttggacgatgccatccggggtcaagatgatttaaaagagcaactggctatggtggagcggagagcaaacctcatgcaggcggaggtggaggaattgcgagcatctttggaaagaactgagcgtggccgaaaaatggccgagcaagagctcctcgacgccagtgaacgagttcagttactacatacacagaatacctccctgattaatacgaagaagaaactcgaaaccgacatatcgcaaatccaaggagaaatggaggacattgtgcaggaggccaggaatgccgaagaaaaggcaaagaaggcgattacagacgctgcaatgatggcggaggagctgaagaaggagcaggatacctctgctcatctggaacgtatgaagaagaacatggagcagacagtgaaagatctgcagcttcggttggacgaagcagaacagctagccttgaaaggcggaaagaaacagatccaaaagcttgaggctcgcgtccgggaactggagtcagaggtggagtcagagcagaagcacaatgtcgaggctgtcaaaggcctgcgcaagcatgagaggcgggtaaaggagctgacttaccagacagaggaagatcgtaagaatatcttaagactccaggacctcgttgacaagttacaaacgaaagtgaaggcgtataagcgccaggcagaggaagctgaagaacagagcaacgtgaatttagccaaatttcggaaactccagcatgagctggaggaggccaaggaacgtgccgacatcgccgaaagtcaggtaaataagcttagagtcaaatctagagaggtacataccaaagttatttcagaggaatac

SEQ ID NO: 193613 - DNA, 5820 bp, Artificial Sequence
  derived and/or modified sequence
atgagcagcgacagcgagatggccatcttcggcgaggccgcccccttcctgagaaagagcgagaaggagagaatcgaggcccagaacaagcccttcgacgccaagaccagcgtgttcgtggtggaccccaaggagagctacgtgaaggccatcgtgcagagcagagagggcggcaaggtgaccgccaagaccgaggccggcgccaccgtgaccgtgaaggaggaccaggtgttcagcatgaacccccccaagtacgacaagatcgaggacatggccatgatgacccacctgcacgagcccgccgtgctgtacaacctgaaggagagatacgccgcctggatgatctacacctacagcggcctgttctgcgtgaccgtgaacccctacaagtggctgcccgtgtacaaccccgaggtggtgaccgcctacagaggcaagaagagacaggaggcccccccccacatcttcagcatcagcgacaacgcctaccagttcatgctgaccgacagagagaaccagagcatcctgatcaccggcgagagcggcgccggcaagaccgtgaacaccaagagagtgatccagtacttcgccaccatcgccgtgaccggcgagaagaagaaggaggagcccgccagcggcaagatgcagggcaccctggaggaccagatcatcagcgccaaccccctgctggaggccttcggcaacgccaagaccgtgagaaacgacaacagcagcagattcggcaagttcatcagaatccacttcggcgccaccggcaagctggccagcgccgacatcgagacctacctgctggagaagagcagagtgaccttccagctgaaggccgagagaagctaccacatcttctaccagatcctgagcaacaagaagcccgagctgatcgagatgctgctgatcaccaccaacccctacgacttcgccttcgtgagccagggcgagatcaccgtgcccagcatcgacgaccaggaggagctgatggccaccgacagcgccgtggacatcctgggcttcaccgccgacgagaaggtggccatctacaagctgaccggcgccgtgatgcactacggcaacatgaagttcaagcagaagcagagagaggagcaggccgagcccgacggcaccgaggtggccgacaaggccgcctacctgaccagcctgaacagcgccgacctgctgaagagcctgtgctaccccagagtgaaggtgggcaacgagttcgtgaccaagggccagaccgtgcagcaggtgtacaacgccgtgggcgccctggccaaggccatctacgagaagatgttcctgtggatggtgaccagaatcaaccagcagctggacaccaagcagcccagacagtacttcatcggcgtgctggacatcgccggcttcgagatcttcgacttcaacagcctggagcagctgtgcatcaacttcaccaacgagaagctgcagcagttcttcaaccaccacatgttcgtgctggagcaggaggagtacaagaaggagggcatcgagtgggagttcatcgacttcggcatggacctggccgcctgcatcgagctgatcgagaagcccatgggcatcttcagcatcctggaggaggagtgcatgttccccaaggccaccgacaccagcttcaagaacaagctgtacgagcagcacctgggcaagagcaacaacttccagaagcccaagcccgccaagggcaagcccgaggcccacttcagcctggtgcactacgccggcaccgtggactacaacatcgccggctggctggacaagaacaaggaccccctgaacgagaccgtggtgggcctgtaccagaagagcgccatgaagaccctggccttcctgttcagcggcgcccagaccgccgaggccgagggcggcggcggcaagaagggcggcaagaagaagggcagcagcttccagaccgtgagcgccctgttcagagagaacctgaacaagctgatgaccaacctgagaagcacccacccccacttcgtgagatgcatcatccccaacgagaccaagacccccggcgccatggagcacgagctggtgctgcaccagctgagatgcaacggcgtgctggagggcatcagaatctgcagaaagggcttccccagcagaatcctgtacgccgacttcaagcagagatacaaggtgctgaacgccagcgccatccccgagggccagttcatcgacagcaagaaggccagcgagaagctgctgggcagcatcgagatcgaccacacccagtacaagttcggccacaccaaggtgttcttcaaggccggcctgctgggcaccctggaggagatgagagacgagaagctggcccagctgatcaccagaacccaggccatctgcagaggcttcctgatgagagtggagttcagaaagatgatggagagaagagagagcatcttctgcatccagtacaacatcagagccttcatgaacgtgaagcactggccctggatgaagctgtacttcaagatcaagcccctgctgaagagcgccgagaccgagaaggagatggccaacatgaaggaggagttcgagaagaccaaggaggagctggccaagaccgaggccaagagaaaggagctggaggagaagatggtgaccctgatgcaggagaagaacgacctgcagctgcaggtgcaggccgaggccgacgccctggccgacgccgaggagagatgcgaccagctgatcaagaccaagatccagctggaggccaagatcaaggaggtgaccgagagagccgaggacgaggaggagatcaacgccgagctgaccgccaagaagagaaagctggaggacgagtgcagcgagctgaagaaggacatcgacgacctggagctgaccctggccaaggtggagaaggagaagcacgccaccgagaacaaggtgaagaacctgaccgaggagatggccggcctggacgagaccatcgccaagctgaccaaggagaagaaggccctgcaggaggcccaccagcagaccctggacgacctgcagatggaggaggacaaggtgaacaccctgaccaaggccaagaccaagctggagcagcaggtggacgacctggagggcagcctggagcaggagaagaagctgtgcatggacctggagagagccaagagaaagctggagggcgacctgaagctggcccaggagagcaccatggacaccgagaacgacaagcagcagctgaacgagaagctgaagaagaaggagttcgagatgagcaacctgcagggcaagatcgaggacgagcaggccctggccatccagctgcagaagaagatcaaggagctgcaggccagaatcgaggagctggaggaggagatcgaggccgagagagccagcagagccaaggccgagaagcagagaagcgacctgagcagagagctggaggagatcagcgagagactggaggaggccggcggcgccaccagcgcccagatcgagatgaacaagaagagagaggccgagttccagaagatgagaagagacctggaggagagcaccctgcagcacgaggccaccgccgccgccctgagaaagaagcacgccgacagcgtggccgagctgggcgagcagatcgacagcctgcagagagtgaagcagaagctggagaaggagaagagcgagctgaagatggagatcaacgacctggccagcaacatggagaccgtgagcaaggccaaggccaacttcgagaagatgtgcagaaccctggaggaccagctgagcgagatcaagaccaaggaggaggagcagcagagactgatcaacgagctgagcgcccagaaggccagactgcacaccgagagcggcgagttcagcagacagctggacgagaaggacgccatggtgagccagctgagcagaggcaagcaggccttcacccagcagatcgaggagctgaagagacagctggaggaggagaccaaggccaagagcaccctggcccacgccctgcagagcgccagacacgactgcgacctgctgagagagcagtacgaggaggagcaggaggccaaggccgagctgcagagaggcatgagcaaggccaacagcgaggtggcccagtggagaaccaagtacgagaccgacgccatccagagaaccgaggagctggaggaggccaagaagaagctggcccagagactgcaggacgccgaggagcacgtggaggccgtgaacagcaagtgcgccagcctggagaagaccaagcagagactgcagaacgaggtggaggacctgatgatcgacgtggagagaagcaacgccgcctgcatcgccctggacaagaagcagagaaacttcgacaaggtgctggccgagtggaagcagaagtacgaggagacccaggccgagctggaggccagccagaaggagagcagaagcctgagcaccgagctgttcaaggtgaagaacgcctacgaggagagcctggaccacctggagaccctgaagagagagaacaagaacctgcagcaggagatcagcgacctgaccgagcagatcgccgagggcggcaagcacatccacgagctggagaaggtgaagaagcagctggaccacgagaagagcgagctgcagaccagcctggaggaggccgaggccagcctggagcacgaggagggcaagatcctgagaatccagctggagctgaaccaggtgaagagcgagatcgacagaaagatcgccgagaaggacgaggagctggaccagctgaagagaaaccacctgagagtggtggagagcatgcagagcaccctggacgccgagatcagaagcagaaacgacgccctgagaatcaagaagaagatggagggcgacctgaacgagatggagatccagctgaaccacgccaacagacaggccgccgaggccctgagaaacctgagaaacacccagggcatcctgaaggacacccagctgcacctggacgacgccatcagaggccaggacgacctgaaggagcagctggccatggtggagagaagagccaacctgatgcaggccgaggtggaggagctgagagccagcctggagagaaccgagagaggcagaaagatggccgagcaggagctgctggacgccagcgagagagtgcagctgctgcacacccagaacaccagcctgatcaacaccaagaagaagctggagaccgacatcagccagatccagggcgagatggaggacatcgtgcaggaggccagaaacgccgaggagaaggccaagaaggccatcaccgacgccgccatgatggccgaggagctgaagaaggagcaggacaccagcgcccacctggagagaatgaagaagaacatggagcagaccgtgaaggacctgcagctgagactggacgaggccgagcagctggccctgaagggcggcaagaagcagatccagaagctggaggccagagtgagagagctggagagcgaggtggagagcgagcagaagcacaacgtggaggccgtgaagggcctgagaaagcacgagagaagagtgaaggagctgacctaccagaccgaggaggacagaaagaacatcctgagactgcaggacctggtggacaagctgcagaccaaggtgaaggcctacaagagacaggccgaggaggccgaggagcagagcaacgtgaacctggccaagttcagaaagctgcagcacgagctggaggaggccaaggagagagccgacatcgccgagagccaggtgaacaagctgagagtgaagagcagagaggtgcacaccaaggtgatcagcgaggagtag

SEQ ID NO: 193614 - protein, 4116 aa, Artificial Sequence
  derived and/or modified sequence
MGATGRLELTLAAPPHPGPAFQRSKARETQGEEEGSEMQIAKSDSIHHMSHSQGQPELPPLPASANEEPSGLYQTVMSHSFYPPLMQRTSWTLAAPFKEQHHHRGPSDSIANNYSLMAQDLKLKDLLKVYQPATISVPRDRTGQGLPSSGNRSSSEPMRKKTKFSSRNKEDSTRIKLAFKTSIFSPMKKEVKTSLTFPGSRPMSPEQQLDVMLQQEMEMESKEKKPSESDLERYYYYLTNGIRKDMIAPEEGEVMVRISKLISNTLLTSPFLEPLMVVLVQEKENDYYCSLMKSIVDYILMDPMERKRLFIESIPRLFPQRVIRAPVPWHSVYRSAKKWNEEHLHTVNPMMLRLKELWFAEFRDLRFVRTAEILAGKLPLQPQEFWDVIQKHCLEAHQTLLNKWIPTCAQLFTSRKEHWIHFAPKSNYDSSRNIEEYFASVASFMSLQLRELVIKSLEDLVSLFMIHKDGNDFKEPYQEMKFFIPQLIMIKLEVSEPIIVFNPSFDGCWELIRDSFLEIIKNSNGIPKLKYIPLKFSFTAAAADRQCVKAAEPGEPSMHAAATAMAELKGYNLLLGTVNAEEKLVSDFLIQTFKVFQKNQVGPCKYLNVYKKYVDLLDNTAEQNIAAFLKENHDIDDFVTKINAIKKRRNEIASMNITVPLAMFCLDATALNHDLCERAQNLKDHLIQFQVDVNRDTNTSICNQYSHIADKVSEVPANTKELVSLIEFLKKSSAVTVFKLRRQLRDASERLEFLMDYADLPYQIEDIFDNSRNLLLHKRDQAEMDLIKRCSEFELRLEGYHRELESFRKREVMTTEEMKHNVEKLNELSKNLNRAFAEFELINKEEELLEKEKSTYPLLQAMLKNKVPYEQLWSTAYEFSIKSEEWMNGPLFLLNAEQIAEEIGNMWRTTYKLIKTLSDVPAPRRLAENVKIKIDKFKQYIPILSISCNPGMKDRHWQQISEIVGYEIKPTETTCLSNMLEFGFGKFVEKLEPIGAAASKEYSLEKNLDRMKLDWVNVTFSFVKYRDTDTNILCAIDDIQMLLDDHVIKTQTMCGSPFIKPIEAECRKWEEKLIRIQDNLDAWLKCQATWLYLEPIFSSEDIIAQMPEEGRKFGIVDSYWKSLMSQAVKDNRILVAADQPRMAEKLQEANFLLEDIQKGLNDYLEKKRLFFPRFFFLSNDELLEILSETKDPLRVQPHLKKCFEGIAKLEFTDNLEIVGMISSEKETVPFIQKIYPANAKGMVEKWLQQVEQMMLASMREVIGLGIEAYVKVPRNHWVLQWPGQVVICVSSIFWTQEVSQALAENTLLDFLKKSNDQIAQIVQLVRGKLSSGARLTLGALTVIDVHARDVVAKLSEDRVSDLNDFQWISQLRYYWVAKDVQVQIITTEALYGYEYLGNSPRLVITPLTDRCYRTLMGALKLNLGGAPEGPAGTGKTETTKDLAKALAKQCVVFNCSDGLDYKAMGKFFKGLAQAGAWACFDEFNRIEVEVLSVVAQQILSIQQAIIRKLKTFIFEGTELSLNPTCAVFITMNPGYAGRAELPDNLKALFRTVAMMVPDYALIGEISLYSMGFLDSRSLAQKIVATYRLCSEQLSSQHHYDYGMRAVKSVLTAAGNLKLKYPEENESVLLLRALLDVNLAKFLAQDVPLFQGIISDLFPGVVLPKPDYEVFLKVLNDNIKKMKLQPVPWFIGKIIQIYEMMLVRHGYMIVGDPMGGKTSAYKVLAAALGDLHAANQMEEFAVEYKIINPKAITMGQLYGCFDQVSHEWMDGVLANAFREQASSLSDDRKWIIFDGPVDAIWIENMNTVLDDNKKLCLMSGEIIQMNSKMSLIFEPADLEQASPATVSRCGMIYMEPHQLGWKPLKDSYMDTLPSSLTKEHKELVNDMFMWLVQPCLEFGRLHCKFVVQTSPIHLAFSMMRLYSSLLDEIRAVEEEEMELGEGLSSQQIFLWLQGLFLFSLVWTVAGTINADSRKKFDVFFRNLIMGMDDNHPRPKSVKLTKNNIFPERGSIYDFYFIKQASGHWETWTQYITKEEEKVPAGAKVSELIIPTMETARQSFFLKTYLDHEIPMLFVGPTGTGKSAITNNFLLHLPKNTYLPNCINFSARTSANQTQDIIMSKLDRRRKGLFGPPIGKKAVVFVDDLNMPAKEVYGAQPPIELLRQWIDHGYWFDKKDTTRLDIVDMLLVTAMGPPGGGRNDITGRFTRHLNIISINAFEDDILTKIFSSIVDWHFGKGFDVMFLRYGKMLVQATKTIYRDAVENFLPTPSKSHYVFNLRDFSRVIQGVLLCPHTHLQDVEKCIRLWIHEVYRVFYDRLIDKEDRQVFFNMVKETTSNCFKQTIEKVLIHLSPTGKIVDDNIRSLFFGDYFKPESDQKIYDEITDLKQLTVVMEHYLEEFNNISKAPMSLVMFRFAIEHISRICRVLKQDKGHLLLVGIGGSGRQSAAKLSTFMNAYELYQIEITKNYAGNDWREDLKKIILQVGVATKSTVFLFADNQIKDESFVEDINMLLNTGDVPNIFPADEKADIVEKMQTAARTQGEKVEVTPLSMYNFFIERVINKISFSLAMSPIGDAFRNRLRMFPSLINCCTIDWFQSWPTDALELVANKFLEDVELDDNIRVEVVSMCKYFQESVKKLSLDYYNKLRRHNYVTPTSYLELILTFKTLLNSKRQEVAMMRNRYLTGLQKLDFAASQVAVMQRELTALQPQLILTSEETAKMMVKIEAETREADGKKLLVQADEKEANVAAAIAQGIKNECEGDLAEAMPALEAALAALDTLNPADISLVKSMQNPPGPVKLVMESICIMKGMKPERKPDPSGSGKMIEDYWGVSKKILGDLKFLESLKTYDKDNIPPLTMKRIRERFINHPEFQPAVIKNVSSACEGLCKWVRAMEVYDRVAKVVAPKRERLREAEGKLAAQMQKLNQKRAELKLVVDRLQALNDDFEEMNTKKKDLEENIEICSQKLVRAEKLISGLGGEKDRWTEAARQLGIRYTNLTGDVLLSSGTVAYLGAFTVDYRVQCQNQWLAECKDKVIPGFSDFSLSHTLGDPIKIRAWQIAGLPVDSFSIDNGIIVSNSRRWALMIDPHGQANKWIKNMEKANKLAVIKFSDSNYMRMLENALQLGTPVLIENIGEELDASIEPILLKATFKQQGVEYMRLGENIIEYSRDFKLYITTRLRNPHYLPEVAVKVCLLNFMITPLGLQDQLLGIVAAKEKPELEEKKNQLIVESAKNKKHLKEIEDKILEVLSMSKGNILEDETAIKVLSSSKVLSEEISEKQKVASMTETQIDETRMGYKPVAVHSATIFFCISDLANIEPMYQYSLTWFINLYMHSLTHSTKSEELNLRIKYIIDHFTLSIYNNVCRSLFEKDKLLFSLLLTIGIMKQKKEITEEVWYFLLTGGIALDNPYPNPAPQWLSEKAWAEIVRASALPKLHGLMEHLEQNLGEWKLIYDSAWPHEEQLPGSWKFSQGLEKMVILRCLRPDKMVPAVREFIAEHMGKLYIEAPTFDLQGSYNDSSCCAPLIFVLSPSADPMAGLLKFADDLGMGGTRTQTISLGQGQGPIAAKMINNAIKDGTWVVLQNCHLAASWMPTLEKICEEVIVPESTNARFRLWLTSYPSEKFPVSILQNGIKMTNEPPKGLRANLLRSYLNDPISDPVFFQSCAKAVMWQKMLFGLCFFHAVVQERRNFGPLGWNIPYEFNESDLRISMWQIQMFLNDYKEVPFDALTYLTGECNYGGRVTDDKDRRLLLSLLSMFYCKEIEEDYYSLAPGDTYYIPPHGSYQSYIDYLRNLPITAHPEVFGLHENADITKDNQETNQLFEGVLLTLPRQSGGSGKSPQEVVEELAQDILSKLPRDFDLEEVMKLYPVVYEESMNTVLRQELIRFNRLTKVVRRSLINLGRAIKGQVLMSSELEEVFNSMLVGKVPAMWAAKSYPSLKPLGGYVADLLARLTFFQEWIDKGPPVVFWISGFYFTQSFLTGVSQNYARKYTIPIDHIGFEFEVTPQETVMENNPEDGAYIKGLFLEGARWDRKTMQIGESLPKILYDPLPIIWLKPGESAMFLHQDIYVCPVYKTSARRGTLSTTGHSTNYVLSIELPTDMPQKHWINRGVASLCQLDN

SEQ ID NO: 193615 - protein, 1887 aa, Artificial Sequence
  derived and/or modified sequence
MGATGRLELTLAAPPHPGPAFQRSKARETQGEEEGSEMQIAKSDSIHHMSHSQGQPELPPLPASANEEPSGLYQTVMSHSFYPPLMQRTSWTLAAPFKEQHHHRGPSDSIANNYSLMAQDLKLKDLLKVYQPATISVPRDRTGQGLPSSGNRSSSEPMRKKTKFSSRNKEDSTRIKLAFKTSIFSPMKKEVKTSLTFPGSRPMSPEQQLDVMLQQEMEMESKEKKPSESDLERYYYYLTNGIRKDMIAPEEGEVMVRISKLISNTLLTSPFLEPLMVVLVQEKENDYYCSLMKSIVDYILMDPMERKRLFIESIPRLFPQRVIRAPVPWHSVYRSAKKWNEEHLHTVNPMMLRLKELWFAEFRDLRFVRTAEILAGKLPLQPQEFWDVIQKHCLEAHQTLLNKWIPTCAQLFTSRKEHWIHFAPKSNYDSSRNIEEYFASVASFMSLQLRELVIKSLEDLVSLFMIHKDGNDFKEPYQEMKFFIPQLIMIKLEVSEPIIVFNPSFDGCWELIRDSFLEIIKNSNGIPKLKYIPLKFSFTAAAADRQCVKAAEPGEPSMHAAATAMAELKGYNLLLGTVNAEEKLVSDFLIQTFKVFQKNQVGPCKYLNVYKKYVDLLDNTAEQNIAAFLKENHDIDDFVTKINAIKKRRNEIASMNITVPLAMFCLDATALNHDLCERAQNLKDHLIQFQVDVNRDTNTSICNQYSHIADKVSEVPANTKELVSLIEFLKKSSAVTVFKLRRQLRDASERLEFLMDYADLPYQIEDIFDNSRNLLLHKRDQAEMDLIKRCSEFELRLEGYHRELESFRKREVMTTEEMKHNVEKLNELSKNLNRAFAEFELINKEEELLEKEKSTYPLLQAMLKNKVPYEQLWSTAYEFSIKSEEWMNGPLFLLNAEQIAEEIGNMWRTTYKLIKTLSDVPAPRRLAENVKIKIDKFKQYIPILSISCNPGMKDRHWQQISEIVGYEIKPTETTCLSNMLEFGFGKFVEKLEPIGAAASKEYSLEKNLDRMKLDWVNVTFSFVKYRDTDTNILCAIDDIQMLLDDHVIKTQTMCGSPFIKPIEAECRKWEEKLIRIQDNLDAWLKCQATWLYLEPIFSSEDIIAQMPEEGRKFGIVDSYWKSLMSQAVKDNRILVAADQPRMAEKLQEANFLLEDIQKGLNDYLEKKRLFFPRFFFLSNDELLEILSETKDPLRVQPHLKKCFEGIAKLEFTDNLEIVGMISSEKETVPFIQKIYPANAKGMVEKWLQQVEQMMLASMREVIGLGIEAYVKVPRNHWVLQWPGQVVICVSSIFWTQEVSQALAENTLLDFLKKSNDQIAQIVQLVRGKLSSGARLTLGALTVIDVHARDVVAKLSEDRVSDLNDFQWISQLRYYWVAKDVQVQIITTEALYGYEYLGNSPRLVITPLTDRCYRTLMGALKLNLGGAPEGPAGTGKTETTKDLAKALAKQCVVFNCSDGLDYKAMGKFFKGLAQAGAWACFDEFNRIEVEVLSVVAQQILSIQQAIIRKLKTFIFEGTELSLNPTCAVFITMNPGYAGRAELPDNLKALFRTVAMMVPDYALIGEISLYSMGFLDSRSLAQKIVATYRLCSEQLSSQHHYDYGMRAVKSVLTAAGNLKLKYPEENESVLLLRALLDVNLAKFLAQDVPLFQGIISDLFPGVVLPKPDYEVFLKVLNDNIKKMKLQPVPWFIGKIIQIYEMMLVRHGYMIVGDPMGGKTSAYKVLAAALGDLHAANQMEEFAVEYKIINPKAITMGQLYGCFDQVSHEWMDGVLANAFREQASSLSDDRKWIIFDGPVDAIWIENMNTVLDDNKKLCLMSGEIIQMNSKMSLIFEPADLEQASPATVSRCGMIYMEPHQLGWKPLKDSYMDTLPSSLTKEHKELMKSGQ

SEQ ID NO: 193616 - protein, 153 aa, Artificial Sequence
  derived and/or modified sequence
MLHMGLAHVKRMPRSSRLQCKEAQAFFSLQSGTYRVLSTPLKLGVWEEKKHWAALLQPVSLGRKWKKRPCNLDDYVWGQLKYIPLKFSFTAAAADRQCVKAAEPGEPSMHAAATAMAGTRAGTTFDELQCQEDMVCTRFENKAYVNTNDFTRQ

SEQ ID NO: 193617 - DNA, 12351 bp, Artificial Sequence
  derived and/or modified sequence
atgggcgccacgggacggctggagctcactctggctgcgcccccccacccagggcccgcattccagcgatccaaggctagagagactcagggggaggaagagggtagcgaaatgcaaatagccaagtcagattctatacatcatatgtcccattctcaggggcagccagaattgccacctcttcccgctagtgccaacgaagaaccatccggtctctaccagaccgtgatgtcgcactctttttaccctcctctaatgcagcgaaccagttggaccctggccgcaccctttaaggagcagcaccaccatcgaggtccatctgacagtatcgctaacaactacagtttgatggcccaggatctgaagctgaaggatctgctgaaagtgtaccaacccgccactatctctgtgcccagagacagaacaggccaaggattgccaagttcgggcaaccgctccagtagcgagcccatgcgcaaaaagactaaattttcttccaggaacaaggaggattctacaagaattaaactcgcctttaaaacgtccatattttccccgatgaagaaggaggtgaagaccagcctgacatttcctggttcacggccaatgtcccctgaacagcaacttgatgtgatgctccagcaagaaatggagatggaatcaaaggagaagaagccatccgaatctgaccttgagcggtattattattaccttactaacgggatcaggaaagacatgatcgcccccgaagagggagaggtaatggttcgtatctccaagctcatctccaatactctgctcacatctcccttccttgaacccttgatggtggtcctcgtgcaagagaaagagaatgattattactgctccctcatgaagagtattgtggattacatcctaatggatccaatggagcgtaagcgcctgtttatcgagtctatccctcgcctatttccacagagggtgatacgggcgccagttccgtggcattcagtatataggtccgccaaaaagtggaatgaggagcatctgcataccgtaaacccaatgatgctgaggctgaaggagttatggttcgctgagttcagagatcttcggtttgtgcgcaccgccgagatactggcaggcaaattgccgttacaaccccaggagttttgggatgtgattcagaagcactgcttggaggcacaccagacattgctcaataaatggatccccacttgcgcacagctgtttacaagtagaaaggaacactggattcactttgcccctaagtccaactatgacagcagccggaacattgaggaatattttgcgtctgttgctagctttatgtccctgcagttgagggagctcgttatcaaatccctcgaggatttagtgtcactgttcatgattcataaagatggcaatgactttaaggagccgtatcaggagatgaagtttttcatcccccagctgataatgatcaagcttgaagtgagcgagccaatcattgtttttaaccctagctttgatggttgctgggagttaattcgagattcttttctagaaatcattaagaattctaatggaatacccaaactcaagtatattcctcttaagttttcattcacagcagctgcagccgaccgccagtgtgtgaaagccgccgagcccggcgaacccagtatgcatgcggcagccacagccatggcagagttaaaaggctacaatttactgctcgggaccgtgaacgctgaggaaaaactcgtatccgattttctgatccagacattcaaggtcttccagaaaaaccaggtgggaccttgcaaatatctgaatgtgtataagaagtacgtcgacctactggacaacactgcagaacaaaacatcgcggcttttctgaaagagaaccatgacatcgacgacttcgtaacaaagatcaacgctataaaaaagcgcagaaatgagatagcctcgatgaatatcacggttccactggcaatgttctgccttgacgctactgccctaaaccatgacttatgtgagcgggcccagaatctgaaggaccaccttattcaatttcaagttgacgtcaatagggacaccaacactagtatttgcaatcaatactcacacatcgccgataaagtgtcagaagtgccggctaataccaaagaattagtgagtcttatagaatttctcaagaagagtagtgccgtcactgtgtttaaactacgaaggcagctgagggatgcctccgagaggctcgaattcctcatggattatgctgatctgccttaccagatcgaagatattttcgacaacagccgtaacctactccttcacaagagggaccaagcagagatggacctcattaagcggtgttctgaattcgaattgaggctcgaaggctatcaccgcgagctggagtcatttcgaaaaagggaggttatgacaacagaagaaatgaagcataatgtagaaaagctcaacgagctgtccaaaaacctcaaccgtgcttttgctgagttcgaactgattaacaaagaagaagagctgctggaaaaagaaaaaagtacctacccactgctgcaggcgatgctgaagaataaggtgccttatgagcagctgtggtccactgcatacgagttttctatcaagtccgaagaatggatgaatggccccctttttctgctcaacgcagaacagatcgccgaagaaattggcaatatgtggcgtaccacctacaaactgatcaagaccctgagtgatgtgcccgcgcccagacggctcgcagaaaacgtgaagattaagatcgataagttcaaacagtacatccctatactgtctatttcgtgtaatcccgggatgaaggaccgacattggcagcagatctctgagattgtaggttatgaaattaagcccactgaaacgacttgtctcagcaatatgctagaattcgggtttgggaagttcgtggaaaaactcgagcccatcggcgcagctgcaagtaaagaatactcattagaaaaaaatctggaccgcatgaagcttgattgggttaatgtgacgtttagcttcgtgaaatatcgcgataccgacaccaatattttatgcgcaatcgatgacattcagatgttgttagacgatcatgtgatcaagacccagaccatgtgcggaagtccttttatcaaaccaatagaggcagaatgtaggaaatgggaggaaaagctcattcggattcaggataatcttgatgcatggctgaaatgccaggcaacatggttgtacctcgagcctatattttctagtgaggacattatcgcccagatgccagaggaaggccgtaaattcggtattgtcgattcatactggaagtctctgatgtctcaggcggtcaaagataatcggattttagttgccgccgaccagccaagaatggccgaaaaacttcaggaggccaattttttattagaagacatccagaagggactgaatgactacctggagaaaaagcgcctgtttttcccaagattcttctttctcagcaatgacgaacttttggagattctgtcagagaccaaagatcctctgagagtacagccacatctaaagaaatgtttcgagggcatcgctaagctggagtttaccgataaccttgaaatagtgggcatgatttccagcgagaaagaaaccgtgccctttattcaaaagatataccccgcaaacgctaagggcatggtcgaaaagtggttgcagcaggtcgagcagatgatgttggccagcatgcgggaggtcattgggttgggaatcgaggcctacgtgaaagtccctcgaaatcattgggttctccagtggccaggccaggtggtgatctgcgtgtcaagtatcttttggacacaggaagtttctcaggccctcgccgaaaataccctgctggacttcctcaagaagtcgaacgaccagatagcccaaatagtccaacttgtccgcgggaagctgtcgtcaggcgccagactaacactgggcgccttgaccgttattgacgtccatgctcgggatgtcgtcgcaaagctatctgaggatagggtctctgacctgaatgactttcagtggatctcccagctgcgctactattgggttgccaaggatgtacaagttcagataataactaccgaagccctctacggatatgagtacctaggaaatagtcctagattggtcattaccccgttgaccgacagatgctatcgaaccctgatgggcgccctcaagctgaacttaggcggcgctccggaaggacctgcgggtactggtaaaaccgagaccactaaggacctggccaaggcgctggcgaaacaatgcgttgtctttaactgtagcgatggcctggattacaaggctatgggcaaattttttaagggactggcacaagccggggcctgggcctgtttcgatgagttcaatagaatcgaggtggaggttttgtcagttgtggcccagcagattctaagcattcagcaggccatcatccgaaaactgaagacctttatatttgaaggcactgagttgtctttgaatcccacctgcgcggtgtttatcactatgaacccaggctatgcgggccgcgcagagcttcccgacaaccttaaggctctatttagaactgtagcaatgatggtgccggattatgctctcattggcgaaatttccctgtacagcatgggctttctggattcaaggagcttagcacagaagatcgtggccacgtataggttatgcagcgagcagctctcgtctcaacaccactatgactacggcatgcgcgctgtgaagagcgtgcttacagccgccggcaacctgaaactgaagtatccagaagaaaatgaatcagttctgctcctgcgagcccttctggatgtgaatcttgccaagttcctggcccaggacgtacccctcttccaagggatcatttcagatctctttccgggcgttgtactcccgaaaccagactacgaggtgtttctcaaggttctgaacgacaacattaaaaagatgaaactccagccagtgccatggtttatcggcaagattatacagatctatgaaatgatgctcgttaggcacggctacatgatcgtaggtgatcccatgggtgggaagacaagcgcatataaggtcttagccgccgcactgggtgacttgcacgctgcaaaccagatggaggagttcgctgtagagtataagattatcaatccaaaagctattacaatgggccaactttacggatgtttcgaccaagtgagccatgagtggatggatggggtgctggctaatgccttccgcgagcaggctagcagcctgtccgacgaccggaaatggatcatttttgacggacccgtagatgcgatctggatcgaaaacatgaacactgtgctcgacgataacaagaaactgtgcctcatgagcggggaaatcatccagatgaacagtaaaatgtcgctgatctttgagccagccgatttggagcaggcctctccagcaacagtatcccgctgtggcatgatttacatggagccgcaccagcttggctggaagccactcaaggattcttacatggacactctgccatccagtctgaccaaggagcacaaggagttagttaatgacatgttcatgtggcttgtgcaaccttgtctggaattcggaagactgcactgtaagtttgtagtacagaccagtccaattcacctcgcctttagcatgatgaggctgtacagctcattattagacgagatccgcgcagtggaggaagaagaaatggaactcggagaggggttgtcctctcaacagatcttcttgtggctccagggcctgttcctattctccctggtgtggaccgtcgcaggcacaattaatgcagattcaagaaagaagttcgatgttttcttccgcaatctgatcatgggcatggatgataatcatccgaggcctaaatccgtgaaattgactaagaacaatatctttcccgaaaggggctcaatttacgatttttactttatcaagcaggcaagtggccattgggaaacctggacccagtatatcacaaaggaagaagagaaagtaccagctggagcgaaagtgagcgagcttatcatccccaccatggaaacggcgcgtcagtcattctttctcaagacatacctggaccacgaaatccccatgctgttcgtcggacctacaggaaccggcaagtcagcaattactaacaatttcctgctgcacctgcctaaaaacacttacctgccaaactgcatcaatttcagtgcacgcacttcggctaatcaaactcaagatataattatgtccaagctggaccggaggcggaagggattgttcggccctcctatagggaagaaagcagtggtcttcgtcgacgaccttaacatgccagccaaggaggtttatggtgcacagccacctatcgaactactaagacaatggattgaccacggatactggttcgataaaaaggatacaacgaggctggatatagtcgatatgttgttagtgaccgcaatgggaccccccgggggcggtagaaatgacattaccggacgattcaccaggcacttgaacattatcagtataaacgcctttgaggatgacatactaactaaaattttcagcagcatagtggattggcacttcggtaagggtttcgatgtcatgttcctgaggtatggtaagatgctcgttcaggccacaaaaacaatctacagggacgcagttgagaattttctgccaacacctagcaagagtcattacgtgttcaacctgcgagacttcagccgcgtgatacagggagtgctgctctgcccacatacccacctgcaagatgttgagaaatgcattcgcctgtggatccatgaggtgtaccgcgtgttttatgatcgcttgatcgataaggaagacaggcaggtgttttttaacatggtgaaagaaaccacttccaactgctttaagcagaccatcgagaaggttctgatacatctttcaccgactggaaagattgttgatgataatatcagaagtctgtttttcggtgattatttcaaacctgaaagcgaccagaaaatttatgatgaaatcactgacctgaagcaactcacagtggtaatggaacactacctggaggaattcaataatatatccaaggctccaatgagcctggtgatgttcagattcgcgatcgaacacatctctcggatttgccgggtgctgaagcaggataagggacacctacttctcgtcggtataggcggcagcggacgtcagtccgccgctaaactgtctactttcatgaacgcgtatgaattatatcagatcgaaatcacaaagaattacgccggaaacgactggcgcgaggacttgaagaaaattatcctccaagtgggcgtggcgaccaaatcaacagtctttctgtttgctgataaccaaattaaagatgagagttttgtggaggacatcaatatgctgttgaacacaggagatgtgcccaacatttttcctgccgatgagaaggcagacatagtggaaaagatgcagaccgcagcccgcactcagggggaaaaagtggaggtgacgcctttgtcgatgtacaattttttcattgagagggtgatcaacaagatctcttttagcctcgccatgtctcccattggcgacgcctttcgcaaccgtctcagaatgtttccttccttgatcaactgctgtacaatagactggttccagagctggcccactgatgccctggaactggtggccaacaagtttttggaagacgttgagcttgacgataacatccgggtcgaggtggtctctatgtgtaagtatttccaggaatccgtaaagaaattatctctggactattataataaactcagaaggcataattatgttactcctacttcctacctagagctgatccttacgttcaagacacttttgaacagcaagcgtcaggaagttgcgatgatgcgcaaccggtacctgactggcctccagaaattggactttgccgcttctcaggtggccgtgatgcagagagaactcaccgccctgcagcctcaactgatcttgacctccgaagagacggctaaaatgatggtcaagatagaagccgagacccgagaggctgacggcaagaagctgttagtgcaggccgacgaaaaggaagccaacgtggccgcagctatcgcccagggtattaagaatgaatgtgaaggcgacctggctgaagccatgccagcactcgaagccgcccttgcagcactcgatacactgaaccctgctgacatcagtttagtgaagtcaatgcagaatcctcctggacccgtcaagctggtcatggagtctatttgtatcatgaaaggcatgaaacctgaacgcaaaccagatccgagcggaagcgggaaaatgattgaggattactggggcgtgtctaagaaaatattgggtgatctcaagttcttggagagcctgaaaacgtatgataaggataacattcccccacttaccatgaagcgtatcagggagcggtttattaaccatcccgaattccaacccgctgtaatcaagaacgtgtcctctgcttgtgagggcttgtgtaaatgggtgcgggctatggaggtgtacgatagagtcgctaaggtagtggcacccaagagggagcgcctccgggaagctgaggggaaactggctgcccagatgcagaagttaaaccaaaaaagggctgaactgaaattagtggttgaccgccttcaggcactgaatgacgatttcgaggagatgaatactaaaaaaaaagatctagaggagaatattgagatatgttcccaaaagctggttcgggcggagaaattaatatctgggttgggcggcgagaaagatcgatggactgaagccgctaggcagctaggcatacggtacactaatctgaccggtgacgtattgttgtccagcggaacagtcgcctaccttggtgccttcaccgtggactatagggtgcagtgtcagaaccagtggctggcagagtgcaaggataaggtgatccctggcttcagcgatttctctctctcacacaccctgggcgacccgattaagatccgtgcatggcagatcgcagggctgccagttgacagtttctcaattgataatggcataatagtgtcaaacagtagacggtgggcgttaatgatcgatccgcatggccaggccaacaaatggattaagaatatggaaaaagctaacaaactggctgtgatcaagttctccgatagcaactacatgcgaatgctggagaatgcacttcagttgggaacaccagttctcatcgaaaatatcggtgaagagcttgatgcctcaatcgagcccatcctcctgaaggccacctttaagcagcagggcgtggaatatatgcgccttggcgaaaatatcatagaatacagtagagactttaaactttacattaccacccggctgaggaacccacactatctgcctgaagtggcagtgaaagtgtgccttttaaatttcatgataacccctctcggcctccaagaccaactgctaggtatcgtcgccgctaaggagaaaccggagctcgaggagaaaaagaatcagttaattgtcgaatcagctaagaataagaagcatcttaaagagatagaggacaaaattctcgaagtgctgagtatgtcgaagggcaatatactggaggatgagactgccattaaagtgcttagctcttcgaaggtgctttccgaggagatcagcgaaaagcagaaggtggccagtatgaccgagactcagatagatgaaacacggatgggctataagcctgtggcagtccactcagcgacgattttcttttgtattagcgacctggcaaacatagagcctatgtatcagtactcgctgacttggtttatcaacctgtatatgcacagcctgacgcacagcactaaatctgaggaattgaatcttcggattaagtacattatcgatcacttcacactgtctatttacaataacgtgtgtcgttctctctttgagaaagataagctgctgttcagcctgttgttgacaataggcattatgaaacagaaaaaagagattaccgaagaggtatggtattttctgctcacaggagggattgccttagacaatccctacccaaacccagccccacagtggctttccgagaaagcctgggcagagatcgttagagcatcagccctgcccaagctgcacgggctgatggagcatctggagcagaatcttggagaatggaaactgatatacgactccgcatggcctcacgaagagcagttgcctggcagctggaagttttcccagggccttgagaagatggtgatcctgcgctgtctaaggcccgacaagatggtgcccgccgtccgagagtttatcgctgaacatatgggaaagctctacatcgaggcgccaactttcgacttgcagggctcatacaatgacagctcttgttgtgcccctcttattttcgtactgtccccctcagcagatcccatggcgggtctgctgaagtttgcagacgatcttggcatgggagggaccaggactcagacaatatctctcggccaagggcagggacctatagctgctaagatgattaacaatgccataaaggatggcacctgggttgtgttacagaactgccaccttgccgcatcttggatgcccacgctagagaaaatctgtgaggaggtcattgtccccgaaagtacgaatgcccggttccgactgtggctgacttcgtacccttccgaaaagttccccgtgagcatcctgcagaatggcattaaaatgacaaacgagccacctaaaggacttagggctaaccttctgcggagctatctcaacgacccaatctcagacccagtattcttccagagctgcgcaaaggcagtcatgtggcagaagatgctgttcggtctctgcttctttcacgccgtggtacaggagaggaggaactttggacccctgggctggaatatcccatacgagtttaacgagtctgacttacgcatttctatgtggcagatccaaatgtttctgaatgattacaaggaggttccctttgacgcgcttacttatctgactggtgaatgtaattatggcggtcgtgtaactgacgataaagacagacgactactcctgtcgttgctcagtatgttctactgcaaggagattgaggaagattactactctttagcccctggagacacatattacatccccccacacgggtcataccagtcatacatcgattatctgcgcaatctgcctataactgcacatcctgaagttttcgggttgcacgaaaatgctgatattaccaaagacaaccaggagaccaaccaactgttcgagggggtgctgctgactttaccgcgccagtccgggggaagtggaaagtcccctcaggaagtggtggaggagctggctcaggacatcctgagtaaactcccaagggatttcgatctggaggaagtcatgaaactgtatcctgttgtttatgaagaatcgatgaacactgtacttcggcaggaactgatccggtttaataggctgactaaggtcgttcgcaggtcacttattaatctgggacgcgcaataaaagggcaggtactgatgtcatctgaactggaggaggtcttcaatagtatgctggtgggaaaggtaccagctatgtgggctgcaaaatcatatccgagcctcaagccactgggaggctacgtggcagaccttctggcccgcctaacttttttccaagagtggatcgataaggggccccctgtggttttctggatcagcggattctacttcacccagtcctttctgaccggggtatctcagaattacgcaaggaaatatacgatacccattgatcatatagggtttgagttcgaggttaccccccaggagacagtgatggagaataacccagaggacggggcttatataaaggggctcttcctggagggtgcaagatgggataggaagacaatgcagataggtgagtccctgcctaagatcctgtacgacccgttacctattatttggctgaagcccggggaatccgctatgtttcttcatcaggatatctacgtctgccctgtgtacaaaacatcggctcgccgcggtacactatccaccaccggccatagcacaaattacgtgctcagcatcgagctaccaaccgacatgcctcagaagcattggattaacaggggagttgcaagcctgtgtcaactggataactag

SEQ ID NO: 193618 - DNA, 5664 bp, Artificial Sequence
  derived and/or modified sequence
atgggtgcaaccggccgtttggagctcacattggcggcccctccgcacccagggccagcattccaacggtccaaagccagagagactcagggtgaggaggagggctcagagatgcagatcgccaaatccgacagtatacaccacatgagtcactcgcagggacagcctgaactgccccccctgccggcctccgctaacgaagagccctccgggctgtatcaaaccgttatgagccatagcttttacccgcctctgatgcaacgaacttcctggacactggccgctccttttaaggaacagcaccatcaccggggccctagcgacagcatcgccaataactacagtctgatggctcaagacctgaagctaaaggacctgctgaaggtttaccagcccgccaccataagcgtgccacgagaccggacgggccagggcctgccgtcctctgggaacagatcatcctccgaacctatgagaaagaaaacgaagttttcgagtcgtaataaagaagatagtacccggataaagttagcattcaagacaagcatcttttctccgatgaagaaggaagtgaaaacttctcttacgttccctggcagccgaccaatgagtccagagcaacagctggacgtcatgctccaacaggaaatggagatggagagcaaggaaaagaagccatcggagtcagacctagaaaggtattattattacctcacaaacgggatcagaaaagacatgatcgcaccggaggaaggggaagtcatggttcgaatttccaagttaatatccaacaccctgctcacttcaccttttctcgagccacttatggtcgtgctggtgcaggagaaagaaaatgattattactgtagtctgatgaagagcatcgtggattatatcctgatggacccaatggaacggaagcgcttattcatcgagtcaatcccaaggctctttccccaacgcgtgattagggcgccagtgccatggcactcagtataccgttctgcaaaaaaatggaatgaagagcacctgcacacggtcaaccccatgatgctccggctgaaggagctatggtttgcagagttcagagatctcagattcgttcgcacagccgaaattctggccggcaagctgccgctccaaccccaggaattctgggatgttattcaaaaacactgtctggaagcccatcagaccctgttaaacaagtggataccgacatgcgcccagctattcacgagcagaaaggaacattggatccatttcgctccaaaatccaactatgattccagccgaaatatcgaagagtattttgcatcggtggcatctttcatgagcctgcagctgcgggagctggtgattaagtccttagaagatctggtttcactgtttatgatccacaaggacgggaatgatttcaaggaaccctaccaggagatgaaattttttatccctcagctgatcatgattaagctggaggtgagtgaaccaattattgtttttaacccaagttttgatgggtgctgggagttgatccgcgactctttcctggagatcattaaaaattctaatggaatcccgaagctgaaatacattccgctgaagttttccttcaccgcagcggccgcagaccgacagtgcgtgaaagccgccgagccgggagaaccaagtatgcacgctgccgccactgctatggcagaacttaagggctataacttactgctaggcactgttaatgctgaggaaaaactggtgagcgatttcctaattcagacctttaaggtcttccagaagaatcaggtgggcccctgtaagtacctcaacgtgtacaaaaagtatgttgatctgctggataatacggctgagcagaatatcgccgcttttcttaaagaaaatcacgatatagacgactttgtgactaaaataaacgcaattaagaagcgacgaaacgagatcgcttctatgaacatcacagtccccctggccatgttctgcctggatgctactgccctgaaccacgacctgtgcgagcgcgcacagaatctaaaggatcatctgatacagtttcaggttgacgtgaatagggataccaacacgagcatatgtaaccagtactcccacattgctgacaaagtatctgaggtgccagctaacactaaagagctcgtgtctttaatcgaatttctgaaaaagtcatccgcggtgactgtattcaagctacggcgccaactgcgggatgccagcgaacgactagaatttctgatggattacgcagacctcccctaccagattgaagatatcttcgataattcccggaacttgctcctccacaaaagggaccaggctgaaatggacctcatcaaaaggtgctcggagtttgagctaaggctcgaaggatatcaccgcgagctggagagcttccgcaaaagagaagttatgaccactgaggagatgaagcataacgtggagaagctaaacgaactgtccaagaaccttaatcgcgctttcgcagagtttgaacttataaataaagaggaagaattgctcgagaaggagaaatctacttatccactcctgcaggcgatgctgaagaacaaggtgccctatgagcagctctggtcaacggcatatgagttcagtatcaaatcagaagagtggatgaatgggcctctgttcctcctcaacgccgagcagatcgctgaagagattggcaatatgtggcgcactacctataagctgattaagaccctgtctgacgtgcctgctccccgtcggctggccgaaaacgtgaagatcaaaatcgataagtttaagcagtacatcccgattctgtctatctcctgtaatcccggcatgaaggaccggcattggcagcagataagcgaaatcgtggggtacgagatcaagccaacagaaacaacttgccttagtaacatgttagaattcgggttcggtaagttcgtggaaaaattagaacctatcggtgccgccgcctcaaaggagtactctctggagaagaatctcgacaggatgaagctcgactgggtgaacgtgaccttttcgtttgtgaaatacagagacacggatactaatatcctctgtgccattgatgacatccagatgctcttggatgatcacgtgataaagactcagacaatgtgcggcagtccattcatcaaaccaatcgaggccgagtgccggaaatgggaagaaaagctgattcgaattcaagataacttggacgcatggctgaagtgccaagccacctggctgtacctcgagccaatcttctcctccgaggacatcatcgcccagatgcccgaggaaggccggaagttcggcatcgttgatagctattggaagagcctcatgtcacaggcggtaaaagataacagaattctggttgccgcagatcagccaaggatggccgagaagcttcaagaggctaacttcctcttagaagacattcagaagggcctgaatgactaccttgagaaaaagaggttgttcttcccacgctttttctttctctcaaatgatgagctcctggagattctctccgagaccaaggaccccctaagagtccagccacatctgaagaagtgctttgaggggattgctaaactggaattcaccgacaacttggaaatagtgggcatgatcagctcagaaaaagagacagtgccatttatacagaagatctaccctgctaatgccaaaggcatggtcgagaaatggctgcagcaagtcgagcaaatgatgcttgcatccatgcgggaggtgatagggctgggcattgaagcatacgtcaaggtacccagaaaccactgggtgctacagtggccaggtcaagtggtgatttgtgtgtcatccatcttttggacacaggaagtaagtcaagctctggcagaaaacacactcttggatttcttgaaaaaaagtaatgaccagattgcccagatcgttcagctggttagaggcaagctcagctcaggcgctcgtttgaccctcggtgctttgacagtgatcgacgtgcacgccagggatgtagtggccaagctgagcgaagaccgtgtgagcgacctgaatgatttccagtggatctctcagctaaggtactactgggtggccaaggacgtacaggttcagatcatcacgacagaggcattgtacgggtatgagtacctgggaaactcaccccggttggtcatcaccccactgactgaccggtgctaccggaccctgatgggtgccctgaagctcaaccttgggggagctcccgaaggacccgccgggaccggcaagacagaaactacaaaggaccttgcaaaagcactcgctaaacagtgtgtggtgttcaactgttctgacggcttggactacaaggccatgggtaagtttttcaaaggactcgcccaagccggagcctgggcctgctttgacgagtttaatcggatcgaagttgaagtgctgtctgtagtggcccagcagatcttgagcatccagcaggcaatcattcggaagctcaagaccttcattttcgaaggtacggagctctctctgaaccccacctgtgccgtgtttatcacaatgaatcctggctatgctgggagagcagagctgccagataacttgaaggccctgttccgcacagtggccatgatggtgcccgattacgcactgatcggcgaaatttccctgtatagcatggggttcctagacagccggtctctggcacagaaaattgtcgccacctacaggctttgctccgaacagctgtcaagccagcaccattatgactacggtatgagggccgtgaagtcggtgctgactgctgcggggaatctcaaactgaagtatcctgaagagaatgagtctgttttgcttctacgggccctgttggacgtgaatctcgctaaattcctcgcgcaggatgtgcctctgttccagggaataatctccgatctgttccccggggtggtgctacctaaaccagactatgaagtctttctaaaggtccttaatgataatatcaagaagatgaaactgcagccagtaccctggtttatcggtaagataattcaaatctacgaaatgatgctggtccgccatggctacatgatcgtcggggacccaatgggtggaaagaccagtgcttacaaagtcctggcggctgccctgggcgatctgcacgcagcgaaccagatggaagaattcgcagtggagtacaagataataaatcccaaggccattactatggggcaactttacggctgctttgatcaggtcagccacgaatggatggatggggttctggccaatgcatttcgagaacaggcaagctccctcagcgatgaccgcaagtggattattttcgacggaccagtagatgctatatggattgagaatatgaacaccgtactcgacgacaacaagaaactttgcctgatgtctggtgagatcattcagatgaattcaaagatgtcgctgatttttgaacccgctgacctcgagcaggcctctccagccaccgtttcaagatgtgggatgatatatatggaaccccaccaattgggctggaagcctctcaaggattcttatatggatacattgccctccagcctgactaaggaacacaaggagctgatgaagtcagggcagtag

SEQ ID NO: 193619 - DNA, 462 bp, Artificial Sequence
  derived and/or modified sequence
atgctgcacatgggactggcccatgtgaagaggatgccaaggtcatctagactacagtgcaaagaggcccaggcttttttctccttgcagtccggcacctacagagttttgagcacacccctgaagctgggcgtgtgggaggagaagaaacattgggcggccctgttgcagcccgtgtcactcggccggaaatggaaaaaacgaccttgcaacttggacgactatgtttgggggcagcttaaatatatcccccttaaattctccttcacagctgctgcagctgacaggcagtgcgttaaagctgcagaacccggggagccatccatgcacgccgcagccaccgccatggctgggacgcgcgccgggacaacattcgatgagctgcaatgtcaggaggatatggtatgtacgcggtttgaaaacaaagcctatgtaaatactaatgatttcacccgccagtag

SEQ ID NO: 193620 - DNA, 12351 bp, Artificial Sequence
  derived and/or modified sequence
atgggcgccaccggccgcctggagctgaccctggccgccccaccccaccctggccctgccttccagaggagcaaggcccgggagacccagggcgaggaggagggcagcgagatgcagatcgccaagagtgacagcatccaccacatgagccacagccagggccagcctgagctgccccccctgcctgccagcgccaatgaggagcccagcggcctgtaccagacagtgatgagccacagcttctacccacccctgatgcagaggacctcctggaccctggccgcccccttcaaggagcagcaccaccaccggggccccagcgacagcatcgccaacaactacagcctgatggcccaggacctgaagctgaaggacctgctgaaggtgtaccagcctgccaccatctctgtgccccgggacagaacaggccagggcctgcccagcagcggcaacagaagcagcagcgagcccatgaggaagaagaccaagttcagcagcaggaacaaggaggacagcacccgcatcaagctggccttcaagaccagcatcttcagccccatgaagaaggaggtgaagaccagcctgaccttccctggcagccggcccatgagccctgagcagcagctggatgtgatgctgcagcaggagatggagatggagagcaaggagaagaagcccagcgagagtgacctggagcgctactactactacctgaccaacggcatcaggaaggacatgattgcccctgaggagggggaggtgatggtgcgcatcagcaagctgatcagcaacaccctgctgaccagccccttcctggagcccctgatggtggtgctggtgcaggagaaggaaaatgactactactgcagcctgatgaagagcatcgtggactacatcctgatggaccccatggagaggaagaggctcttcatcgagagcatccccaggctcttcccccagagggtcatccgggcccctgtgccctggcacagcgtgtacagaagtgccaagaagtggaatgaggagcacctgcacacagtgaaccccatgatgctgcggctgaaggagctgtggtttgctgagttccgggacctgcgctttgtgaggacagctgagatcctggccggcaagctgcccctgcagccccaggagttctgggatgtgatccagaagcactgcctggaggcccaccagaccctgctgaacaagtggatccccacctgtgcccagctgttcaccagcaggaaggagcactggatccactttgcccccaagagcaactatgacagcagcaggaacatcgaggagtactttgcctctgtggccagcttcatgagcctgcagctgcgggagctggtgatcaagagcctggaggacctggtgtccctcttcatgatccacaaggatggaaatgacttcaaggagccctaccaggagatgaagttcttcatcccccagctgatcatgatcaagctggaggtgtctgagcccatcatcgtgttcaaccccagctttgatggctgctgggagctgatccgggacagcttcctggagatcatcaagaacagcaatggcatccccaagctgaagtacatccccctgaagttctccttcaccgctgctgctgctgaccggcagtgtgtgaaggctgctgagcctggagagcccagcatgcacgccgccgccacagccatggccgagctgaagggctacaacctgctgctgggcaccgtgaatgctgaggagaagctggtgtctgacttcctgatccagaccttcaaggtgttccagaagaaccaggtgggcccctgcaagtacctgaatgtgtacaagaagtatgtggacctgctggacaacacagctgagcagaacattgctgccttcctgaaggaaaatcatgacattgatgactttgtgaccaagatcaatgccatcaagaagagaagaaatgagatcgcctccatgaacatcaccgtgcccctggccatgttctgcctggatgccacagccctgaaccacgacctgtgtgagcgggcccagaacctgaaggaccacctgatccagttccaggtggatgtgaacagagacaccaacaccagcatctgcaaccagtacagccacatcgctgacaaggtgtctgaggtgcctgccaacaccaaggagctggtgtccctcatcgagttcctgaagaagagcagcgctgtgaccgtcttcaagctgcggcggcagctgagagatgccagcgagcggctggagttcctgatggactatgctgacctgccctaccagatcgaggacatctttgacaacagcaggaacctgctgctgcacaagagggaccaggccgagatggacctgatcaagcgctgcagcgagtttgagctgcggctggagggctaccaccgggagctggagagcttcaggaagcgggaggtgatgaccacagaggagatgaagcacaacgtggagaagctgaatgagctgagcaagaacctgaacagagcctttgctgagtttgagctgatcaacaaggaggaggagctgctggagaaggagaagagcacctaccccctgctgcaggccatgctgaagaacaaggtgccctatgagcagctgtggagcacagcctatgagttcagcatcaagtctgaggagtggatgaatggccccctcttcctgctgaatgctgagcagattgctgaggagatcggcaacatgtggaggaccacctacaagctgatcaagaccctgagtgatgtgcctgccccccggcggctggccgagaatgtgaagatcaagattgacaagttcaagcagtacatccccatcctgagcatcagctgcaaccctggcatgaaggacagacactggcagcagatcagcgagatcgtgggctatgagatcaagcccacagagaccacctgcctgagcaacatgctggagtttggatttgggaagtttgtggagaagctggagcccatcggggctgctgccagcaaggagtacagcctggagaagaacctggacaggatgaagctggactgggtgaatgtgaccttctcctttgtgaagtacagagacacagacaccaacatcctgtgtgccattgatgacatccagatgctgctggatgaccacgtgatcaagacccagaccatgtgtggcagccccttcatcaagcccatcgaggctgaatgtaggaagtgggaggagaagctgatccgcatccaggacaacctggatgcctggctgaagtgccaggccacctggctgtacctggagcccatcttcagcagcgaggacatcatcgcccagatgcctgaggagggcaggaagtttggaattgtggacagctactggaagagcctgatgagccaggccgtgaaggacaaccgcatcctggtggccgctgaccagcccaggatggccgagaagctgcaggaggccaacttcctgctggaggacatccagaagggcctgaatgactacctggagaagaagaggctcttcttcccccgcttcttcttcctgagcaatgatgagctgctggagatcctgtctgagaccaaggaccccctgcgggtgcagccccacctgaagaagtgctttgagggcatcgccaagctggagttcacagacaacctggagatcgtgggcatgatcagcagcgagaaggagaccgtgcccttcatccagaagatctacccagccaatgccaagggcatggtggagaagtggctgcagcaggtggagcagatgatgctggcctccatgagggaggtgattggcctgggcatcgaggcctacgtgaaggtgcccaggaaccactgggtgctgcagtggccaggccaggtggtgatctgtgtgagcagcatcttctggacccaggaggtgtcccaggccctggccgagaacaccctgctggacttcctgaagaagagcaatgaccagatcgcccagatcgtgcagctggtgcggggcaagctgagcagcggggcccggctgaccctgggcgccctgactgtgattgatgtgcacgccagagatgtggtggccaagctgtctgaggacagagtgtctgacctgaatgacttccagtggatcagccagctgcgctactactgggtggccaaggatgtgcaggtgcagatcatcaccacagaggccctgtatggctatgagtacctgggcaacagcccccggctggtgatcacccccctgacagaccgctgctaccgcaccctgatgggcgccctgaagctgaacctgggcggggcccctgagggccctgctggcaccgggaagacagagaccaccaaggacctggccaaggccctggccaagcagtgtgtggtgttcaactgcagtgatggcctggactacaaggccatgggcaagttcttcaagggcctggcccaggccggggcctgggcctgctttgatgagttcaaccgcatcgaggtggaggtgctgtctgtggtggcccagcagatcctgagcatccagcaggccatcatcaggaagctgaagaccttcatctttgagggcacagagctgagcctgaaccccacctgtgctgtgttcatcaccatgaaccctggctacgccggccgggcagagctgcctgacaacctgaaggccctcttcagaacagtggccatgatggtgcctgactatgccctgattggagagatcagcctgtacagcatgggcttcctggacagccgcagcctggcccagaagatcgtggccacctaccgcctgtgcagcgagcagctgagcagccagcaccactatgactatggcatgagagctgtgaagtctgtgctgacagctgctggcaacctgaagctgaagtacccagaagaaaatgaatctgtgctgctgctgcgggccctgctggatgtgaacctggccaagttcctggcccaggatgtgcccctcttccagggcatcatcagtgacctcttccctggggtggtgctgcccaagccagactatgaggtgttcctgaaggtgctgaatgacaacatcaagaagatgaagctgcagcctgtgccctggttcatcggcaagatcatccagatctatgagatgatgctggtgcgccacggctacatgattgtgggggaccccatgggcggcaagaccagcgcctacaaggtgctggccgccgccctgggggacctgcacgccgccaaccagatggaggagtttgctgtggagtacaagatcatcaaccccaaggccatcaccatgggccagctgtatggctgctttgaccaggtgtcccatgagtggatggatggagtgctggccaatgccttccgggagcaggccagcagcctgagtgatgacaggaagtggatcatctttgatggccctgtggatgccatctggattgagaacatgaacacagtgctggatgacaacaagaagctgtgcctgatgtctggagagatcatccagatgaacagcaagatgagcctcatctttgagcctgctgacctggagcaggccagccctgccaccgtgagccgctgtggcatgatctacatggagccccaccagctgggctggaagcccctgaaggacagctacatggacaccctgcccagcagcctgaccaaggagcacaaggagctggtgaatgacatgttcatgtggctggtgcagccctgcctggagtttggccgcctgcactgcaagtttgtggtgcagaccagccccatccacctggccttctccatgatgaggctgtacagcagcctgctggatgagatccgggctgtggaggaggaggagatggagctgggggagggcctgagcagccagcagatcttcctgtggctgcagggcctcttcctgttcagcctggtgtggacagtggccggcaccatcaatgctgacagcaggaagaagtttgatgtgttcttcaggaacctgatcatgggcatggatgacaaccacccccggcccaagtctgtgaagctgaccaagaacaacatcttccctgagcggggcagcatctatgacttctacttcatcaagcaggccagcggccactgggagacctggacccagtacatcaccaaggaggaggagaaggtgcctgctggggccaaggtgtctgagctgatcatccccaccatggagacagcccggcagagcttcttcctgaagacctacctggaccacgagatccccatgctgtttgtgggccccaccggcaccgggaagagcgccatcaccaacaacttcctgctgcacctgcccaagaacacctacctgcccaactgcatcaacttcagcgcccggaccagcgccaaccagacccaggacatcatcatgagcaagctggacagaagaaggaagggcctgtttggcccccccatcggcaagaaggctgtggtgtttgtggatgacctgaacatgcctgccaaggaggtgtatggagcccagccccccatcgagctgctgcggcagtggattgaccacggctactggtttgacaagaaggacaccacccggctggacatcgtggacatgctgctggtgacagccatgggccccccaggcggcggcagaaatgacatcaccggccgcttcaccaggcacctgaacatcatcagcatcaatgcctttgaagatgacatcctgaccaagatcttcagcagcatcgtggactggcactttgggaagggctttgatgtgatgttcctgcgctatggcaagatgctggtgcaggccaccaagaccatctacagagatgctgtggagaacttcctgcccacccccagcaagagccactacgtgttcaacctgcgggacttcagcagggtcatccagggcgtgctgctgtgcccccacacccacctgcaggatgtggagaagtgcatccggctgtggattcatgaggtgtacagagtcttctatgaccggctgattgacaaggaggaccggcaggtgttcttcaacatggtgaaggagaccaccagcaactgcttcaagcagaccatcgagaaggtgctgatccacctgagccccaccgggaagatcgtggatgacaacatccgcagcctcttctttggagactacttcaagccagagagtgaccagaagatctatgatgagatcacagacctgaagcagctgactgtggtgatggagcactacctggaggagttcaacaacatcagcaaggcccccatgagcctggtgatgttccgctttgccatcgagcacatcagccgcatctgccgggtgctgaagcaggacaagggccacctgctgctggtgggcattggaggcagcggccggcagagcgctgccaagctgagcaccttcatgaatgcctatgagctgtaccagatcgagatcaccaagaactatgctggaaatgactggagggaggacctgaagaagatcatcctgcaggtgggcgtggccaccaagagcacagtgttcctgtttgctgacaaccagatcaaggatgagagctttgtggaggacatcaacatgctgctgaacacaggagatgtgcccaacatcttcccagcagatgagaaggctgacatcgtggagaagatgcagacagctgcccggacccagggcgagaaggtggaggtgacccccctgtccatgtacaacttcttcatcgagagggtcatcaacaagatctccttcagcctggccatgagccccatcggagatgccttcaggaaccggctgaggatgttccccagcctcatcaactgctgcaccatcgactggttccagagctggcccacagatgccctggagctggtggccaacaagttcctggaggatgtggagctggatgacaacatccgggtggaggtggtgtccatgtgcaagtacttccaggagagcgtgaagaagctgagcctggactactacaacaagctgcggcggcacaactacgtgacccccaccagctacctggagctgatcctgaccttcaagaccctgctgaacagcaagaggcaggaggtggccatgatgaggaaccgctacctgaccggcctgcagaagctggactttgctgccagccaggtggccgtgatgcagcgggagctgacagccctgcagccccagctgatcctgaccagcgaggagacagccaagatgatggtgaagattgaagctgagacccgggaggctgatggcaagaagctgctggtgcaggctgatgagaaggaggccaacgtggccgccgccatcgcccagggcatcaagaatgaatgtgagggggacctggccgaggccatgcctgccctggaggccgccctggccgccctggacaccctgaacccagctgacatcagcctggtgaagtccatgcagaaccccccaggccctgtgaagctggtgatggagagcatctgcatcatgaagggcatgaagccagagaggaagccagaccccagcggcagcggcaagatgattgaggactactggggcgtgtccaagaagatcctgggggacctgaagttcctggagagcctgaagacctatgacaaggacaacatcccccccctgaccatgaagaggatccgggagcgcttcatcaaccaccctgagttccagcctgctgtgatcaagaatgtgtcctctgcctgtgagggcctgtgcaagtgggtgcgggccatggaggtgtatgacagagtggccaaggtggtggcccccaagcgggagcggctgcgggaggccgagggcaagctggccgcccagatgcagaagctgaaccagaagagagctgagctgaagctggtggtggaccggctgcaggccctgaatgatgactttgaggagatgaacaccaagaagaaggacctggaggagaacatcgagatctgcagccagaagctggtgcgggcagagaagctgatcagcggcctgggcggggagaaggaccgctggacagaggccgcccggcagctgggcatccgctacaccaacctgactggagatgtgctgctgagcagcggcaccgtggcctacctgggcgccttcaccgtggactacagagtgcagtgccagaaccagtggctggccgagtgcaaggacaaggtgattcctggcttcagtgacttcagcctgagccacaccctgggggaccccatcaagatccgggcctggcagattgctggcctgcctgtggacagcttcagcattgacaatggcatcatcgtgagcaacagccgccgctgggccctgatgattgacccccacggccaggccaacaagtggatcaagaacatggagaaggccaacaagctggccgtcatcaagttcagtgacagcaactacatgaggatgctggagaatgccctgcagctgggcacccctgtgctgattgagaacatcggggaggagctggatgccagcattgagcccatcctgctgaaggccaccttcaagcagcagggcgtggagtacatgaggctgggggagaacatcatcgagtacagccgggacttcaagctgtacatcaccacccggctgaggaacccccactacctgcctgaggtggccgtgaaggtgtgcctgctgaacttcatgatcacccccctgggcctgcaggaccagctgctgggcatcgtggccgccaaggagaagccagagctggaggagaagaagaaccagctgattgtggagagcgccaagaacaagaagcacctgaaggagattgaggacaagatcctggaggtgctgtccatgagcaagggcaacatcctggaggatgaaacagccatcaaggtgctgagcagcagcaaggtgctgtctgaggagatcagcgagaagcagaaggtggcctccatgacagagacccagattgatgagaccaggatgggctacaagcctgtggccgtgcacagcgccaccatcttcttctgcatcagtgacctggccaacatcgagcccatgtaccagtacagcctgacctggttcatcaacctgtacatgcacagcctgacccacagcaccaagtctgaggagctgaacctgcgcatcaagtacatcatcgaccacttcaccctgagcatctacaacaacgtgtgccgcagcctgtttgagaaggacaagctgctcttcagcctgctgctgaccatcggcatcatgaagcagaagaaggagatcacagaggaggtgtggtacttcctgctgaccggcggcatcgccctggacaacccctaccccaacccagccccccagtggctgtctgagaaggcctgggccgagatcgtgcgggccagcgccctgcccaagctgcacggcctgatggagcacctggagcagaacctgggggagtggaagctgatctatgacagcgcctggccccatgaggagcagctgcccggctcctggaagttcagccagggcctggagaagatggtgatcctgcgctgcctgcggccagacaagatggtgcctgctgtgcgggagttcatcgccgagcacatgggcaagctgtacatcgaggcccccacctttgacctgcagggcagctacaatgacagcagctgctgtgcccccctcatctttgtgctgagccccagcgctgaccccatggccggcctgctgaagtttgctgatgacctgggcatgggcggcaccaggacccagaccatcagcctgggccagggccagggccccatcgccgccaagatgatcaacaatgccatcaaggatggcacctgggtggtgctgcagaactgccacctggccgcctcctggatgcccaccctggagaagatctgtgaggaggtgattgtgcctgagagcaccaatgcccgcttccggctgtggctgaccagctaccccagcgagaagtttcctgtgtccatcctgcagaatggcatcaagatgaccaatgaaccacccaagggcctgcgggccaacctgctgcggagctacctgaatgaccccatcagtgaccctgtgttcttccagagctgtgccaaggctgtgatgtggcagaagatgctgtttggcctgtgcttcttccacgctgtggtgcaggagaggaggaactttggccccctgggctggaacatcccctatgagttcaatgaaagtgacctgcgcatctccatgtggcagatccagatgttcctgaatgactacaaggaggtgccctttgatgccctgacctacctgactggagagtgcaactacggcggccgggtgacagatgacaaggaccggcggctgctgctgagcctgctgtccatgttctactgcaaggagattgaggaggactactacagcctggcccctggggacacctactacatcccccctcatggcagctaccagagctacatcgactacctgaggaacctgcccatcacagcccaccctgaggtgtttggcctgcatgaaaatgctgacatcaccaaggacaaccaggagaccaaccagctgtttgagggcgtgctgctgaccctgccccggcagagcggcggcagcggcaagagcccccaggaggtggtggaggagctggcccaggacatcctgagcaagctgccccgggactttgacctggaggaggtgatgaagctgtaccctgtggtgtatgaggagagcatgaacacagtgctgcggcaggagctgatccgcttcaaccggctgaccaaggtggtgagaagaagcctcatcaacctgggccgggccatcaagggccaggtgctgatgagcagcgagctggaggaggtgttcaacagcatgctggtgggcaaggtgcctgccatgtgggccgccaagagctaccccagcctgaagcccctgggcggctacgtggccgacctgctggcccggctgaccttcttccaggagtggattgacaagggcccccctgtggtgttctggatcagcggcttctacttcacccagagcttcctgactggagtgtcccagaactatgccaggaagtacaccatccccatcgaccacatcggctttgaatttgaggtgaccccccaggagaccgtgatggagaacaacccagaagatggagcctacatcaagggcctcttcctggagggcgcccgctgggacaggaagaccatgcagatcggggagagcctgcccaagatcctgtatgaccccctgcccatcatctggctgaagccaggagagagcgccatgttcctgcaccaggacatctacgtgtgccctgtgtacaagaccagcgcccggcggggcaccctgagcaccaccggccacagcaccaactacgtgctgagcattgagctgcccacagacatgccccagaagcactggatcaacagaggagtggccagcctgtgccagctggacaactag

SEQ ID NO: 193621 - DNA, 5664 bp, Artificial Sequence
  derived and/or modified sequence
atgggcgccaccggccgcctggagctgaccctggccgccccaccccaccctggccctgccttccagaggagcaaggcccgggagacccagggcgaggaggagggcagcgagatgcagatcgccaagagtgacagcatccaccacatgagccacagccagggccagcctgagctgccccccctgcctgccagcgccaatgaggagcccagcggcctgtaccagacagtgatgagccacagcttctacccacccctgatgcagaggacctcctggaccctggccgcccccttcaaggagcagcaccaccaccggggccccagcgacagcatcgccaacaactacagcctgatggcccaggacctgaagctgaaggacctgctgaaggtgtaccagcctgccaccatctctgtgccccgggacagaacaggccagggcctgcccagcagcggcaacagaagcagcagcgagcccatgaggaagaagaccaagttcagcagcaggaacaaggaggacagcacccgcatcaagctggccttcaagaccagcatcttcagccccatgaagaaggaggtgaagaccagcctgaccttccctggcagccggcccatgagccctgagcagcagctggatgtgatgctgcagcaggagatggagatggagagcaaggagaagaagcccagcgagagtgacctggagcgctactactactacctgaccaacggcatcaggaaggacatgattgcccctgaggagggggaggtgatggtgcgcatcagcaagctgatcagcaacaccctgctgaccagccccttcctggagcccctgatggtggtgctggtgcaggagaaggaaaatgactactactgcagcctgatgaagagcatcgtggactacatcctgatggaccccatggagaggaagaggctcttcatcgagagcatccccaggctcttcccccagagggtcatccgggcccctgtgccctggcacagcgtgtacagaagtgccaagaagtggaatgaggagcacctgcacacagtgaaccccatgatgctgcggctgaaggagctgtggtttgctgagttccgggacctgcgctttgtgaggacagctgagatcctggccggcaagctgcccctgcagccccaggagttctgggatgtgatccagaagcactgcctggaggcccaccagaccctgctgaacaagtggatccccacctgtgcccagctgttcaccagcaggaaggagcactggatccactttgcccccaagagcaactatgacagcagcaggaacatcgaggagtactttgcctctgtggccagcttcatgagcctgcagctgcgggagctggtgatcaagagcctggaggacctggtgtccctcttcatgatccacaaggatggaaatgacttcaaggagccctaccaggagatgaagttcttcatcccccagctgatcatgatcaagctggaggtgtctgagcccatcatcgtgttcaaccccagctttgatggctgctgggagctgatccgggacagcttcctggagatcatcaagaacagcaatggcatccccaagctgaagtacatccccctgaagttctccttcaccgctgctgctgctgaccggcagtgtgtgaaggctgctgagcctggagagcccagcatgcacgccgccgccacagccatggccgagctgaagggctacaacctgctgctgggcaccgtgaatgctgaggagaagctggtgtctgacttcctgatccagaccttcaaggtgttccagaagaaccaggtgggcccctgcaagtacctgaatgtgtacaagaagtatgtggacctgctggacaacacagctgagcagaacattgctgccttcctgaaggaaaatcatgacattgatgactttgtgaccaagatcaatgccatcaagaagagaagaaatgagatcgcctccatgaacatcaccgtgcccctggccatgttctgcctggatgccacagccctgaaccacgacctgtgtgagcgggcccagaacctgaaggaccacctgatccagttccaggtggatgtgaacagagacaccaacaccagcatctgcaaccagtacagccacatcgctgacaaggtgtctgaggtgcctgccaacaccaaggagctggtgtccctcatcgagttcctgaagaagagcagcgctgtgaccgtcttcaagctgcggcggcagctgagagatgccagcgagcggctggagttcctgatggactatgctgacctgccctaccagatcgaggacatctttgacaacagcaggaacctgctgctgcacaagagggaccaggccgagatggacctgatcaagcgctgcagcgagtttgagctgcggctggagggctaccaccgggagctggagagcttcaggaagcgggaggtgatgaccacagaggagatgaagcacaacgtggagaagctgaatgagctgagcaagaacctgaacagagcctttgctgagtttgagctgatcaacaaggaggaggagctgctggagaaggagaagagcacctaccccctgctgcaggccatgctgaagaacaaggtgccctatgagcagctgtggagcacagcctatgagttcagcatcaagtctgaggagtggatgaatggccccctcttcctgctgaatgctgagcagattgctgaggagatcggcaacatgtggaggaccacctacaagctgatcaagaccctgagtgatgtgcctgccccccggcggctggccgagaatgtgaagatcaagattgacaagttcaagcagtacatccccatcctgagcatcagctgcaaccctggcatgaaggacagacactggcagcagatcagcgagatcgtgggctatgagatcaagcccacagagaccacctgcctgagcaacatgctggagtttggatttgggaagtttgtggagaagctggagcccatcggggctgctgccagcaaggagtacagcctggagaagaacctggacaggatgaagctggactgggtgaatgtgaccttctcctttgtgaagtacagagacacagacaccaacatcctgtgtgccattgatgacatccagatgctgctggatgaccacgtgatcaagacccagaccatgtgtggcagccccttcatcaagcccatcgaggctgaatgtaggaagtgggaggagaagctgatccgcatccaggacaacctggatgcctggctgaagtgccaggccacctggctgtacctggagcccatcttcagcagcgaggacatcatcgcccagatgcctgaggagggcaggaagtttggaattgtggacagctactggaagagcctgatgagccaggccgtgaaggacaaccgcatcctggtggccgctgaccagcccaggatggccgagaagctgcaggaggccaacttcctgctggaggacatccagaagggcctgaatgactacctggagaagaagaggctcttcttcccccgcttcttcttcctgagcaatgatgagctgctggagatcctgtctgagaccaaggaccccctgcgggtgcagccccacctgaagaagtgctttgagggcatcgccaagctggagttcacagacaacctggagatcgtgggcatgatcagcagcgagaaggagaccgtgcccttcatccagaagatctacccagccaatgccaagggcatggtggagaagtggctgcagcaggtggagcagatgatgctggcctccatgagggaggtgattggcctgggcatcgaggcctacgtgaaggtgcccaggaaccactgggtgctgcagtggccaggccaggtggtgatctgtgtgagcagcatcttctggacccaggaggtgtcccaggccctggccgagaacaccctgctggacttcctgaagaagagcaatgaccagatcgcccagatcgtgcagctggtgcggggcaagctgagcagcggggcccggctgaccctgggcgccctgactgtgattgatgtgcacgccagagatgtggtggccaagctgtctgaggacagagtgtctgacctgaatgacttccagtggatcagccagctgcgctactactgggtggccaaggatgtgcaggtgcagatcatcaccacagaggccctgtatggctatgagtacctgggcaacagcccccggctggtgatcacccccctgacagaccgctgctaccgcaccctgatgggcgccctgaagctgaacctgggcggggcccctgagggccctgctggcaccgggaagacagagaccaccaaggacctggccaaggccctggccaagcagtgtgtggtgttcaactgcagtgatggcctggactacaaggccatgggcaagttcttcaagggcctggcccaggccggggcctgggcctgctttgatgagttcaaccgcatcgaggtggaggtgctgtctgtggtggcccagcagatcctgagcatccagcaggccatcatcaggaagctgaagaccttcatctttgagggcacagagctgagcctgaaccccacctgtgctgtgttcatcaccatgaaccctggctacgccggccgggcagagctgcctgacaacctgaaggccctcttcagaacagtggccatgatggtgcctgactatgccctgattggagagatcagcctgtacagcatgggcttcctggacagccgcagcctggcccagaagatcgtggccacctaccgcctgtgcagcgagcagctgagcagccagcaccactatgactatggcatgagagctgtgaagtctgtgctgacagctgctggcaacctgaagctgaagtacccagaagaaaatgaatctgtgctgctgctgcgggccctgctggatgtgaacctggccaagttcctggcccaggatgtgcccctcttccagggcatcatcagtgacctcttccctggggtggtgctgcccaagccagactatgaggtgttcctgaaggtgctgaatgacaacatcaagaagatgaagctgcagcctgtgccctggttcatcggcaagatcatccagatctatgagatgatgctggtgcgccacggctacatgattgtgggggaccccatgggcggcaagaccagcgcctacaaggtgctggccgccgccctgggggacctgcacgccgccaaccagatggaggagtttgctgtggagtacaagatcatcaaccccaaggccatcaccatgggccagctgtatggctgctttgaccaggtgtcccatgagtggatggatggagtgctggccaatgccttccgggagcaggccagcagcctgagtgatgacaggaagtggatcatctttgatggccctgtggatgccatctggattgagaacatgaacacagtgctggatgacaacaagaagctgtgcctgatgtctggagagatcatccagatgaacagcaagatgagcctcatctttgagcctgctgacctggagcaggccagccctgccaccgtgagccgctgtggcatgatctacatggagccccaccagctgggctggaagcccctgaaggacagctacatggacaccctgcccagcagcctgaccaaggagcacaaggagctgatgaagagcggccagtag

SEQ ID NO: 193622 - DNA, 462 bp, Artificial Sequence
  derived and/or modified sequence
atgctgcacatgggcctggcccacgtgaagaggatgcccaggagcagccggctgcagtgcaaggaggcccaggccttcttcagcctgcagagcggcacctacagagtgctgagcacccccctgaagctgggcgtgtgggaggagaagaagcactgggccgccctgctgcagcctgtgtccctgggcaggaagtggaagaagaggccctgcaacctggatgattatgtgtggggccagctgaagtacatccccctgaagttctccttcaccgctgctgctgctgaccggcagtgtgtgaaggctgctgagcccggggagcccagcatgcatgctgctgccacagccatggccggcaccagggctggcaccacctttgatgagctgcagtgccaggaggacatggtgtgcaccaggtttgagaacaaggcctacgtgaacaccaatgacttcacccggcagtag

SEQ ID NO: 193623 - DNA, 12351 bp, Artificial Sequence
  derived and/or modified sequence
atgggcgccaccggccggctggagctgaccctggccgcccccccccatcctggccccgcctttcaaaggtctaaggctcgcgaaactcagggggaagaagaggggagcgaaatgcagattgctaaaagcgatagcatccaccatatgtctcactcacaaggacagcctgagctgcccccactccccgcatctgctaatgaagaaccctcaggtttataccaaaccgtcatgagtcattctttttacccacccttaatgcagcgaactagctggactctggcagctccgttcaaagagcagcaccaccacaggggaccaagtgactctatcgcaaataattattctttaatggcccaagacttgaagctgaaagacctgctgaaggtttaccaaccagcaacaattagcgtgcctagggataggacggggcaaggccttccttcctccggcaaccgctccagtagtgagccaatgaggaagaagactaaatttagctcccgcaataaagaggatagcactaggattaaattagctttcaagacaagtatcttctctccaatgaagaaggaggtgaagacttctttgacctttccgggttctcggcctatgtcaccggaacagcagttggacgtgatgctgcagcaggagatggagatggagagtaaggagaaaaaaccgtccgaatcagatctcgagagatactactactatcttaccaacggaatacgcaaagacatgatagctcccgaggaaggcgaggttatggtccgcatatccaagctcatctccaatactctcctcacttctccatttctggagccgttaatggttgtgctggtccaggagaaagagaacgactactattgtagtctgatgaagagcattgtagactacattctgatggatcccatggagcggaagcgcctctttatcgaatcgataccccggctgtttccacaacgggtgatccgggcacccgtgccttggcatagtgtgtacagatcagcaaagaaatggaacgaggaacatctgcatactgtcaacccaatgatgctgaggctgaaggagttatggttcgctgagttccgagatttgagattcgttcgaacagcagaaattttagctgggaagttacccctgcaaccacaggagttctgggacgtgatccagaaacactgtctggaagctcaccagacactgctcaacaaatggatacccacgtgtgcacagttgtttactagtagaaaggaacactggattcatttcgcacccaagtccaattatgactcaagccgaaatattgaagaatactttgcctcagtagctagtttcatgagcctgcagctgagggagttagtaatcaagtctctcgaggacctcgtctctttgttcatgattcacaaggatggaaatgatttcaaggaaccatatcaggaaatgaagttttttataccccagctgatcatgatcaagctggaagtgtctgagcccatcattgtgttcaacccgtcctttgacggctgctgggaactgattcgtgactccttcctggagatcatcaaaaattccaatggcatccctaagctgaaatacatccccttgaagttctccttcaccgccgctgccgcggaccgccagtgtgtcaaggccgccgaacctggtgaaccatccatgcacgctgcagccaccgccatggcagagttgaaaggctataatcttttattggggactgtgaacgccgaggagaaactggtaagcgactttctgatccagacatttaaagtctttcagaaaaaccaagtgggcccttgcaagtacctgaacgtgtacaaaaagtacgtggatcttctcgacaatacagccgaacaaaatatcgcggccttccttaaagaaaatcacgatatcgacgacttcgtgacaaagattaacgctatcaagaagcggaggaatgaaattgcgtccatgaatatcacggtcccactggcaatgttttgcctggatgctactgcgctgaatcacgacttatgcgagcgcgctcaaaatctgaaagaccatcttattcagttccaggtggacgtcaaccgcgacaccaacacatcgatctgtaaccaatatagccacattgccgacaaagtgtctgaggtacctgctaataccaaggaactggtctccctcatcgaatttcttaagaagagttccgccgtaacagtgttcaaactgaggagacagctacgggacgccagtgaaagactggagtttctgatggattacgcagacctgccttatcagatcgaggacatcttcgataactccaggaacctccttctgcacaaacgggatcaagcggaaatggaccttatcaaacggtgcagcgagttcgagctgcgtcttgaaggctaccaccgggagctcgagagtttccggaagcgcgaggtgatgacgactgaggaaatgaaacacaatgtggagaagttgaatgaactttccaagaatttgaacagggcgttcgctgagttcgagctaattaataaagaggaggagctgcttgaaaaggagaagagcacttatcctctgctgcaggctatgctgaagaataaggtgccttatgagcagctatggtctaccgcctacgaattctctattaagagcgaagaatggatgaatggccccctgtttcttctgaacgccgagcagatcgccgaggaaatcggcaacatgtggagaacgacatataagctgattaaaaccctgtctgacgtgcctgcgccccgtcgcctggcagaaaacgtgaagattaagattgataagttcaagcagtatataccaattctgagcatatcgtgcaacccgggtatgaaagacagacactggcagcagatatcagaaatcgtcggctacgagatcaaacctaccgagactacgtgtctttctaatatgctggaatttggtttcgggaaatttgtggagaaactggaaccaatcggggccgccgcttctaaagagtattctcttgagaagaaccttgatagaatgaaactcgactgggtcaacgttaccttctctttcgttaaatatcgagacaccgatactaacatcctctgcgcaatcgatgatatccagatgctgttggacgatcatgtgatcaaaacacaaacaatgtgtggttctcccttcattaaaccaattgaggcagagtgtcgaaagtgggaagagaaactcatccgaattcaggataacctggacgcctggctgaagtgtcaggcaacctggttatacctggaacccattttctccagtgaagatataattgcacagatgcctgaggagggacgcaagttcggaatcgtcgattcatattggaagagccttatgagtcaagccgtgaaggataatagaatcctagttgcggctgatcagccacggatggctgaaaagttacaagaagccaacttcctgttggaggatattcagaaagggctgaacgattatctcgaaaagaagcgactgtttttccctcggttcttctttttaagcaacgacgagcttctcgagattctgtccgaaaccaaggaccccctgagagtccagccccatcttaagaagtgtttcgaaggcattgcgaagttggaatttaccgataatctggagattgttggcatgattagctccgaaaaagagactgtgccatttattcagaagatttacccagccaatgccaaaggcatggtggagaagtggctgcagcaggtcgagcaaatgatgctggcctccatgcgagaggttattggcttgggaatcgaagcctacgtgaaggtgcctagaaatcactgggttttgcaatggcccgggcaggtcgtcatttgcgtgagttccatcttctggacccaggaagttagtcaagctcttgccgaaaatacactgctagatttcttaaaaaaatcaaacgatcagatcgctcaaatagtgcaacttgtgcgcgggaagcttagcagtggcgccagacttaccctcggtgccctgacagtcattgatgtgcatgcgcgcgatgtggtcgctaagctgtccgaagaccgtgtctccgacctaaacgatttccaatggatctctcagctgagatactattgggtggctaaggacgtgcaggtacagattattaccacggaagctctgtacggctatgaatacttaggcaattccccacggctggtcatcacccctctgacggaccgatgctataggactctgatgggcgcactcaagctgaacctgggaggtgcgcccgagggacctgccggcacaggaaagacagagacaaccaaagatcttgccaaagcactagcaaaacagtgtgtggtgttcaactgctctgacggactcgactacaaggccatgggcaagtttttcaaggggttggctcaagccggagcctgggcttgtttcgacgaattcaatagaatcgaagttgaggtgctctccgtggtagcccagcagatcttgagtattcagcaggctatcattcgaaaattgaagaccttcattttcgaaggaaccgaattgtcactcaaccctacatgtgccgtttttattactatgaatccagggtatgctggtagggccgaactgcccgataatcttaaagctctgttccgaactgtggcaatgatggtccctgactacgcgctgattggggagatcagcctgtatagcatggggttcctggattctcggtccctggcccagaaaatcgtggctacctatagactctgttcagaacagttgagctctcagcatcactacgactatggcatgcgggcagttaaatcagttctgaccgctgcaggaaacctgaagcttaaatatccagaggaaaacgaaagcgtcttgctcctgagagctctactggatgttaacctggccaagtttctagcccaggacgtcccactattccaaggaataatctccgatctgtttccaggggtggtcctgcccaagccagactacgaggtttttctcaaggtgctgaacgataacataaaaaagatgaagctgcagcctgtcccatggtttattggcaagatcatccaaatttacgaaatgatgctcgtgcggcatggttacatgatcgtaggggatcctatgggggggaagactagcgcatataaggtgctggccgcagcgcttggggaccttcatgctgccaaccagatggaagagtttgccgtggagtacaagattatcaatccaaaagcgattaccatgggacaattgtatgggtgttttgatcaagtgagtcatgagtggatggacggcgtgcttgcaaatgcattcagagagcaggctagttcactctcagatgatcggaaatggattatcttcgatggaccggtggacgccatctggatcgagaacatgaatactgtcctggacgataacaagaaattgtgcctaatgagcggagaaattatccagatgaatagcaagatgagcctgatcttcgagcccgcggacctggaacaggctagccctgctacggtgtcaagatgcggaatgatatacatggagccacaccagctagggtggaagccattgaaagactcttacatggatactctgccttcctctttaaccaaggagcacaaagaattggtgaacgacatgttcatgtggttggtgcaaccctgcctcgaattcggccggctccattgcaagttcgtggtccagacctcaccgatacacctcgccttttccatgatgcgtctgtattcaagtttgctcgatgagattagagcagtggaggaagaggagatggagctgggcgaaggactttcaagccaacagatctttctgtggttacaagggctctttcttttcagtctggtctggacagttgctgggacaattaacgccgacagtagaaagaagttcgatgtatttttccgcaatcttattatgggcatggacgacaatcaccccaggcctaagagcgtgaaactgactaagaacaatatttttcccgaaagggggtcaatatatgatttctacttcattaagcaggcgagcgggcattgggagacatggactcaatacataacgaaagaggaagagaaagtaccagctggtgccaaggtgagcgagctcatcattcccaccatggagactgcgagacagtccttcttcctcaagacttacctggaccacgagatccctatgctcttcgtagggcccacaggaactggcaagtctgccatcactaataacttcctgctccacctgcctaagaacacttatttgccgaattgtatcaatttctctgctcggactagtgccaaccaaacccaggatattattatgagtaagctggaccgacggaggaaagggctgttcggaccgcctattggaaaaaaggcagtcgttttcgtggacgacctgaatatgccggcgaaggaagtgtacggcgcccagccccctatcgaattgttgagacagtggatcgaccacgggtattggtttgacaagaaggataccaccaggctggatattgtggatatgcttttggtaaccgctatgggcccccctggcggaggccgaaacgatattacaggtcggttcacacggcacctgaacataatttctattaacgccttcgaagacgatatcctgaccaagatcttctcttccatcgtggattggcatttcggcaaagggtttgatgtgatgttccttcgctacggaaaaatgttggttcaggctaccaagacaatctatagagatgcagtcgaaaacttcctacctacgccgtccaagagtcactacgtgtttaacctccgcgatttttcgcgggtgatacagggtgtcctgctgtgtcctcacacccaccttcaggacgttgaaaaatgtatcaggctgtggatccacgaggtttatagagtgttctacgacagacttattgacaaagaggaccgtcaagttttcttcaacatggtgaaggaaaccacaagcaactgctttaagcaaacaatcgaaaaagtcctcatacacctgtccccaactggtaagatagtcgacgacaacatcagatccctcttttttggcgactatttcaaaccagagagcgaccagaagatctacgacgaaatcacagatcttaagcagcttacggtggtcatggagcattacctcgaagaattcaacaatattagtaaagcgcctatgtccctcgtcatgtttagattcgctatcgagcacatttcaaggatctgtcgtgtcctgaagcaggacaaaggacacctgctcttagtgggcatcggcggttctggcaggcagagcgccgcaaagctcagtacgtttatgaacgcgtatgagctgtaccagattgaaataactaaaaattacgccgggaatgactggcgagaagacctaaagaagataatcttgcaggtgggtgtggctaccaaatctacggtgttcctttttgctgataaccagataaaggacgagtcgtttgtggaggatattaatatgctcctcaacacaggggacgtcccgaacatttttccagccgacgaaaaggcggatatcgtggaaaagatgcagactgctgcccggactcagggtgaaaaagtggaggtcactcccctgtccatgtataatttcttcattgaaagagtgatcaacaagatttccttcagcctcgccatgagcccaatcggggatgccttcagaaacaggttgcggatgtttccttcactgatcaattgttgcaccatcgactggttccagagctggcctacagatgccctcgaattagtggccaacaaattcctcgaggatgtcgagctcgacgataacatccgggtggaagtggtttcgatgtgtaagtacttccaagaaagtgtcaagaagcttagtctcgattactacaacaagctcagaaggcacaactacgtgacacctacctcctacctagaactgattctgaccttcaagacactgttgaactcaaaaaggcaggaggtggccatgatgcgaaacagatatctcaccggccttcagaaacttgattttgctgcttcgcaggttgcagtgatgcagcgggaactgacagccctccagccgcaactgatcttgacgtctgaagagaccgctaagatgatggtgaagatagaggcggaaaccagagaagccgatggcaagaaactactcgtgcaggcagacgaaaaagaagcaaacgtggctgctgccattgcccagggtatcaaaaatgagtgtgaaggcgatctggcagaagccatgcctgcccttgaggctgctctcgctgccctcgacacacttaacccagctgatatttcccttgtgaagtcaatgcaaaatccacccgggcctgtaaagctggtgatggagtccatttgcatcatgaaaggcatgaagccggagcggaagcctgatccctctggctcaggcaagatgatcgaggactattggggagtcagtaagaagatcctgggagacctgaagtttctcgagagcctcaagacctatgacaaggacaacatacccccactgacaatgaaacgcatacgagagcgttttataaatcatccagaattccagcccgctgtgatcaagaatgttagttccgcctgcgaaggcctgtgtaagtgggtccgagcaatggaagtgtacgatcgagttgcgaaggtggtcgcccccaaacgagagcggctcagggaggccgagggtaagctagccgcccaaatgcagaaactgaaccagaagagagcagaactaaagctagtggtggatagactgcaagcattgaacgatgacttcgaagagatgaacactaaaaagaaagatctggaagagaacatcgaaatatgttcccagaagttggtgcgggctgagaaactgattagcggactagggggggagaaagatcggtggacagaggccgcacgtcagttaggcatcaggtacaccaatctgacaggggatgtgcttctatcttccggtacagtggcgtacctaggcgccttcacggttgactaccgtgtgcaatgtcagaatcagtggctggcagaatgtaaagataaagttatcccgggatttagcgacttcagcttgtcacataccctgggagacccgataaagattcgcgcctggcaaatcgccgggctacccgtagactctttttccattgacaacgggattattgtgagtaactcacgaaggtgggctctgatgatcgaccctcacgggcaggctaacaagtggattaaaaatatggagaaggctaataagctggccgtcatcaagttttccgatagcaattacatgagaatgctggagaatgctcttcagctcggcacccctgtcctgattgaaaacattggtgaggaattggatgcttcaatagaaccaattcttctgaaagcgacttttaagcagcaaggcgtcgaatatatgaggctgggtgagaatattatcgagtattctagagactttaagctctacatcacaacacggcttaggaatcctcattacctcccggaagtcgccgtgaaggtgtgtctcctgaacttcatgattacaccactgggactgcaggaccagctcctaggcatcgtggcggcaaaggaaaagcccgagcttgaagagaaaaagaatcagctgattgtggaaagcgccaagaacaaaaaacatctgaaagagatcgaggacaaaattctggaagtgctcagcatgtccaagggaaacattttagaagacgagaccgctatcaaggtactgagctcttctaaggtgctctccgaagagatcagtgagaagcagaaagtagcctcgatgaccgagacacagatagatgagaccaggatgggctacaaacccgtggcggtgcacagcgctaccatttttttttgtatcagcgatctagcaaacattgagcctatgtaccagtactcactgacatggttcattaacctctacatgcactctctgacccacagcacaaaaagcgaagagttaaacctccgaattaaatacatcatcgaccattttactctgtctatctacaacaatgtctgtcggtctttgttcgaaaaagacaaactgctcttctccctgctccttacaatcggaatcatgaagcaaaaaaaggagatcacagaggaagtgtggtacttcctgctaacaggaggcatagccctggataacccctatcctaatcctgccccgcagtggttgagtgagaaagcctgggccgagattgtgcgcgcctcagctctcccaaaacttcatggattaatggaacatctggagcaaaacctgggtgaatggaaactaatttatgactctgcctggccacacgaggagcaactccctggttcttggaagttttctcaggggctcgagaaaatggtgatcttgaggtgcttgcgtccagataaaatggtccccgctgtgagggagtttatcgcggaacacatggggaagctgtacatagaggcacccaccttcgacctccagggttcctataacgatagctcctgttgtgcccccctgatcttcgtgctcagcccatccgcggatcctatggcaggtctcctgaaattcgcagacgatttaggaatgggtggcacaagaacacagacaatctctctgggccaaggacagggtcctatcgcagctaaaatgatcaataacgccattaaggacggtacctgggtggtcctgcaaaactgtcaccttgcagcttcctggatgcctacattggaaaagatctgtgaagaggtgatcgtacccgagagtacgaacgctcgttttcgcctgtggctaacgtcatacccaagtgaaaaattcccagtgagcattttgcaaaacggtattaagatgaccaacgagccacctaaggggttacgcgccaatctgctccgtagctacttgaacgaccctatttccgatccagtgtttttccaatcctgtgctaaagccgtaatgtggcaaaaaatgctgttcggcttgtgtttctttcatgctgttgtccaggagaggcggaatttcggtccattaggctggaacatcccctatgaattcaatgagtccgacctgcgcatttctatgtggcagatccagatgttcctgaatgattacaaagaggtgccattcgacgcattgacctatctcaccggggagtgtaactacggagggagggttacagacgacaaggacaggaggctgcttctgtcgttactctctatgttttactgcaaggaaatagaggaagattattacagcctagcaccgggggacacgtattatattccccctcacgggtcgtaccagtcctatattgactacttacggaacctccctatcaccgctcacccagaagtcttcggacttcatgagaacgccgacattactaaggacaaccaggagacaaaccagctgttcgagggagttctgttaactttgccccggcagtctggcggttctggcaaaagccctcaagaagtggtcgaggagctcgcccaggacattctctcaaaactaccaagagattttgatctggaagaggttatgaagctttatccagtagtctatgaagaaagcatgaatacagtcctcagacaggaattgattaggtttaaccgtctgacaaaagttgtgagacgctccctgatcaacctcggaagggctattaaaggccaggtactgatgtccagcgagttggaggaagtgtttaattctatgttggttggtaaagtgcccgcaatgtgggcggcaaagagctacccgagtctgaagccactaggtggctacgtagccgacttgctggcacgactgacttttttccaggagtggattgacaagggaccacccgtggtattctggatctccggattctacttcacgcagagcttcctgactggagtgtcccagaactacgctcgcaaatacaccatcccaattgaccatataggtttcgagttcgaggttacccctcaggagacggtgatggagaacaacccagaggatggagcatacatcaaggggctttttctggaaggcgcccgctgggaccgcaaaacaatgcaaataggtgaatctctgcctaagatcctgtacgatcctctgcctatcatatggctcaagccaggagagtctgcgatgtttctccaccaagatatatacgtttgcccagtgtataaaactagcgcccgccgggggaccctttccacaacagggcactccaccaattatgtgctttccatcgagttaccaacagatatgccccagaagcactggatcaaccggggtgtggcatccctctgccagctcgacaactag

SEQ ID NO: 193624 - DNA, 5664 bp, Artificial Sequence
  derived and/or modified sequence
atgggcgccaccggccggctggagctgaccctggccgcccccccccacccagggccggctttccagaggtctaaggcacgcgagacgcagggtgaagaagagggatctgagatgcagatcgccaagagtgattcgatccaccacatgagccacagtcaggggcagccagagctcccgcccctcccagcgagcgccaatgaggaaccttcgggcctgtaccagacagtcatgtcccacagcttctatccccctctgatgcaacggacaagctggacactggccgccccgttcaaggaacagcatcatcaccggggaccaagcgatagcatcgcgaacaattacagtctgatggcgcaagatctgaagcttaaggacctcctcaaggtttaccagcccgccacgatctctgtgcctcgagatcggaccgggcaaggtctgccttctagcggtaatagaagtagcagcgaaccaatgcgcaaaaagaccaagtttagctcccgtaataaagaggactccacgcggattaaattggctttcaagacctcaatttttagccctatgaaaaaagaagtaaagacttctttgacattcccaggttcccggcctatgagtcctgagcagcagctagatgtgatgttacagcaagagatggaaatggagtcgaaagagaaaaaacctagtgaatccgacttggaacgctattattattatctgacaaatggaataaggaaagatatgattgctccagaagaaggcgaagtgatggtccgaattagtaagctgatatctaacacgctactgacatcacctttccttgagcccctcatggtggtccttgttcaggaaaaggagaacgactactattgttcattaatgaagtccattgtggattacatcctcatggatcccatggaaaggaaaagactattcattgaatcaatcccccgtttattccctcagcgggtgatacgggccccagtcccctggcacagcgtgtatcgcagtgctaagaagtggaatgaggagcacctacacaccgtgaatcccatgatgctgaggcttaaggagctgtggtttgccgaattcagggatctccggtttgtccgaacggcagaaattctcgccggtaagctccctctgcagccacaggaattctgggatgtaattcagaaacattgcctggaggctcaccagaccctgcttaacaagtggatcccaacatgcgcgcagttgtttacttcaaggaaggaacactggattcatttcgcgcccaagtctaactatgacagctccagaaatattgaagagtactttgcttcagtcgccagtttcatgtccctccaactccgggagctcgtcataaagtccctggaagacttagtgtcattgttcatgattcataaagatggaaatgattttaaagagccataccaagagatgaagttcttcataccccaactgatcatgatcaaactggaagtgtcagagccaattattgtattcaatccatctttcgacggctgctgggagctgatcagggattctttcctcgagattattaagaacagcaacggcatacctaaactgaagtacatcccattaaaattctctttcaccgctgcagctgcagaccggcagtgcgtcaaggctgctgagccgggggaaccaagcatgcacgctgcagccactgccatggcggaattgaaaggatacaatctcctcttgggaactgtaaacgcggaagaaaagctcgtatcggactttcttattcagactttcaaggtattccagaaaaaccaggtgggtccctgcaagtacctgaatgtgtacaaaaagtatgtggacctgctcgataacaccgccgaacaaaacatcgccgcatttctcaaagaaaaccacgacatcgacgacttcgtgacgaagattaacgccatcaagaaaaggagaaacgagatcgcctctatgaatataacagtccccctagcgatgttctgccttgacgcaacagctctgaaccatgacctttgtgagcgcgcccagaatctcaaagaccaccttatccagttccaagtggatgtcaacagggataccaacacctcaatctgtaatcagtattctcatatcgccgacaaagtgagcgaggtgccagcaaataccaaagagctggtgtctctcatcgaatttctcaaaaagtcctccgccgtgacagtgtttaagctaagaagacaactgcgtgatgcttctgaaagactcgagttcctcatggattatgccgacctgccataccagatagaggacatttttgacaattcccgcaaccttcttttgcacaaaagggaccaggctgaaatggatcttatcaaaaggtgcagcgagtttgaactgcgtttggaaggctatcatcgtgagctggagtcattccgcaagcgggaagttatgaccactgaggagatgaaacacaacgttgaaaagttgaacgagctcagcaaaaacctaaaccgcgcttttgctgaatttgagctgataaacaaggaggaggaactcttagagaaggagaagtccacatacccccttttacaggccatgctgaaaaataaagtgccatacgagcagctgtggtccacagcttacgagttttcaatcaaatcagaggaatggatgaacggccccctgtttttgctgaacgcggaacagatcgccgaggagatcggtaatatgtggcgaactacgtacaagctgattaagactttgtcggatgttcccgcgcctaggcgcctggccgaaaatgtaaaaatcaaaatcgataagtttaaacaatacattcctattctgtccatatcttgtaaccctggtatgaaagaccgccattggcagcagatctccgaaatagtagggtacgagattaagcccacggaaacgacctgtctgtcgaacatgctagagtttggattcggcaagtttgtggagaagctagaacccataggcgccgctgctagcaaggaatactcgctagagaaaaatttggacaggatgaaactggactgggtcaacgtcacattttcatttgtcaaatatagggacactgacacaaacatcttgtgtgcaatcgatgacatccagatgctgctcgacgatcacgtgatcaagacacaaacaatgtgcggttcacccttcattaaacccatcgaggccgagtgccgtaaatgggaggagaaactcatccgtatccaggataacttggacgcgtggctcaagtgtcaggctacttggctgtatctggagccgatctttagttctgaggacattattgcacagatgcccgaagagggccgcaaattcggcattgtggattcatactggaaatcgctcatgagccaggccgtgaaggacaataggatcctggtcgctgctgaccagccgcggatggctgagaaactacaggaggctaactttctgctggaggatatacagaaggggttgaatgattatctagagaaaaagcggttgtttttccctcggtttttctttttaagcaatgatgaattgctggagatcctcagtgagactaaggacccactaagagtgcagccacacctgaagaagtgtttcgagggtattgctaaattggagtttactgataacctggaaatagtaggtatgatcagcagcgagaaggagacagtcccatttatccagaagatttaccctgccaatgcaaaaggcatggtcgaaaagtggcttcagcaagtggagcagatgatgttggcatctatgagagaagttatcggactcgggattgaagcctatgttaaggtgccccggaaccactgggttcttcaatggcctgggcaggttgtgatatgcgtgagcagtatcttctggacgcaagaggtgagccaggctctagcagaaaatacactgctcgattttttaaaaaagagcaacgaccagatcgcacagattgttcagctggtgcgaggtaaactgagtagcggagcccggcttaccttgggcgccctgacagttatcgacgtgcacgcccgggatgtggtcgccaaacttagcgaggacagagtgtccgatttgaatgatttccaatggatatcccagctgcgctactattgggtggccaaggacgtgcaggtccagatcatcactaccgaagccctatacggctacgaatacttagggaacagtccgaggttggtaatcacccccctcaccgatcgctgctaccgcactttaatgggcgcactcaaacttaacctagggggtgcccctgaaggcccagccgggaccggcaagacagaaaccacaaaggatctcgctaaagctctagccaagcagtgtgtcgtgttcaactgttccgacggtttagactataaggctatgggaaagtttttcaaaggtctcgctcaagccggcgcgtgggcatgctttgatgagtttaatcgtattgaggtagaggtcttgagtgttgtggcacaacaaatcctgtctattcagcaggcaattatccggaagttgaagacctttatcttcgagggtaccgaactgagccttaatcccacatgcgccgtgtttatcaccatgaatccgggttatgccggtagggcagagctccctgataatctaaaggctttgtttagaaccgttgccatgatggtacctgattacgctctgattggtgaaatttcactgtattctatgggatttctagactctaggtctctcgcacaaaagatcgtggccacataccggctctgttccgagcagctgagctcccagcatcactatgattacggcatgcgcgcagtgaaatctgtgctaacggcagccggaaacttaaagctgaagtaccctgaggagaacgaatccgtactccttctgcgtgccctactggatgtaaacctcgccaaatttttagcccaggatgtgcctttgtttcaaggcattatctcagaccttttccctggcgtggtccttccaaagcctgactatgaagtgtttctgaaggtgcttaacgacaacatcaagaaaatgaaactccaaccagtgccctggttcattgggaaaatcattcagatctatgagatgatgctcgtcagacacggctacatgattgtcggggaccctatggggggtaaaacatctgcctacaaggttctcgcagctgcactgggcgatttgcacgccgccaatcagatggaggagtttgccgtggagtacaagattataaatcccaaagcaattacgatgggtcagctgtacggctgttttgaccaggtttcacacgagtggatggacggagtgctggctaacgcgttcagggagcaggcttcatctctgtccgatgatcggaaatggattattttcgatggccccgtggacgctatctggatcgagaacatgaataccgtgctggacgataacaagaagctgtgtctcatgagtggtgaaatcatccagatgaacagcaagatgtcactgatctttgagcccgcagacctggagcaggcttcccctgctaccgtgtcgaggtgtggcatgatttacatggaaccacatcagctcggatggaagccccttaaggactcatatatggatactctgcccagttccctgactaaagaacataaggagctgatgaagagcggccagtag

SEQ ID NO: 193625 - DNA, 462 bp, Artificial Sequence
  derived and/or modified sequence
atgctgcacatgggcctggcccacgtgaagcggatgccccggagcagccggctccaatgtaaggaagctcaggcgttctttagtcttcagagcggcacatacagggtgttatcgactccactcaaacttggtgtgtgggaagagaagaagcattgggcagcactgctccagcctgtcagtcttggacggaagtggaaaaagagaccctgtaatctggacgactacgtctggggtcagttaaagtatatccccctgaaattctccttcacagcagcggcagcggatcgacagtgcgtgaaggctgccgagccaggggagccttcgatgcatgcagcggctaccgctatggcagggactagagctggtaccactttcgatgaactgcagtgtcaggaagatatggtctgtacaaggttcgaaaacaaggcttatgtcaacaccaatgactttacgcggcagtag

SEQ ID NO: 193626 - DNA, 12351 bp, Artificial Sequence
  derived and/or modified sequence
atgggtgccactgggagactggaattgactctggctgccccaccgcaccctgggccagcttttcagaggagtaaagctcgtgagacacagggcgaggaagaaggatcagaaatgcagattgccaaatccgatagcatccaccatatgtctcactcccaagggcagccggaactcccacccctgcccgcaagcgccaacgaggaaccctccggactctatcaaactgtcatgtcgcactcattctacccgccacttatgcagcgaactagctggactctcgctgcaccctttaaggagcagcatcatcatcggggaccttcagattcaatcgcaaataactacagcctaatggcccaggatctaaaactcaaggacctcctcaaggtgtatcagcccgctactataagtgtgccccgagatcggactgggcagggcttacccagctcaggtaacagatcctccagcgagccgatgagaaagaagaccaagttctcttcgcggaacaaggaggattcgacgcggattaaattagccttcaagacctctatttttagccccatgaagaaggaggtgaaaacatctctaacttttcctggtagccggccaatgtcaccagagcagcagctggacgtgatgttgcagcaggagatggagatggaaagtaaggagaaaaagccaagtgaatcagacctggagaggtactattattacttgaccaatggaattagaaaagacatgattgcgcctgaagagggagaggtcatggtgagaatttccaaacttatatcaaacacgttgctcacttctcctttcctggaacccttaatggtcgtcctggtgcaagagaaagaaaacgattactattgttctctgatgaaaagcatcgttgactatattctcatggacccaatggagcgcaagcgtttgttcatcgaatcaatccctaggctctttccccagcgcgttatcagggccccagtgccctggcactctgtgtatcggagcgccaaaaagtggaacgaggagcacctccacacagtaaaccccatgatgctacggctgaaggagctctggttcgccgaattccgtgacctaagattcgtccgcaccgccgagatccttgcagggaaacttcctcttcaacctcaagaattctgggatgtgatccagaagcattgtctcgaggctcatcagacactgctgaataagtggatccctacttgtgcgcagctttttacgagccgtaaagagcactggatacactttgcgccaaagtccaattacgactcctcccgaaacattgaggaatacttcgcctctgtggcctcatttatgagtctccagttgcgggaactcgtgatcaaatcactggaggatctggtgtccttattcatgatacataaggacggaaatgacttcaaagagccctatcaggagatgaagttttttattccccagctgatcatgatcaaattggaggtgagcgagccgattatcgtgttcaatccaagcttcgatgggtgctgggagctgatccgagactctttcctggagatcataaagaattccaacgggatccctaagttgaagtatattccccttaagttcagtttcactgcagcggctgcggacagacagtgtgttaaggctgcagagcctggggaaccatcaatgcacgccgcagccaccgctatggcagagctgaagggctataacttgttgctgggcactgtgaacgcggaggaaaagcttgtaagtgactttctgatccagacgtttaaggtcttccagaagaaccaggtgggaccgtgtaagtacttgaacgtatacaagaagtatgtcgacctgctagataataccgctgagcagaacattgctgcgttcctgaaagaaaatcacgacatcgacgactttgtgaccaagataaacgccattaaaaaaagaagaaacgaaattgcaagtatgaacattacggtgccactggccatgttctgtttggacgcaacagcactcaaccacgatctctgtgagagagcccagaacttgaaggaccatctgatccagttccaggtggacgtcaaccgggatacaaacacaagcatctgtaaccagtattcccatattgccgataaagtttccgaggtgccagcaaataccaaagagcttgtatcattaattgagtttctcaagaaaagctctgctgtcactgtgtttaagctccgcagacagcttcgggatgcatccgaacggctggagttcctgatggattatgccgatctgccctaccaaattgaggatatcttcgacaactctaggaacctgctgctccacaaacgggaccaggccgaaatggatcttattaaacggtgctccgaatttgagctgcggttggaaggctatcatagagaactggagagcttccgtaagagagaggtgatgaccactgaagagatgaagcataatgtggaaaagctgaacgaattgagcaagaatctaaaccgtgcattcgcggagtttgagctgatcaacaaggaggaggagctgctagagaaagagaaatccacctatcctctccttcaagcaatgttaaagaacaaggttccatacgaacagctgtggtcaacagcatacgagttctcaattaaatccgaggagtggatgaacggccctttattcctcctgaacgctgaacagattgccgaagaaatcgggaacatgtggcgcacaacatataaacttataaagactctctcagatgtgcctgctccacgaaggctggcggagaatgtaaaaattaaaattgacaagttcaaacagtatatccccatcctctcgatttcatgcaatcccggtatgaaggataggcattggcagcaaatttctgagatcgtgggatatgaaataaagccaactgagaccacttgcttgtctaatatgcttgagttcggctttggcaagtttgtggaaaagttagagcccataggagcagctgcctccaaggagtattctctagagaaaaacctggaccgaatgaagctggattgggtgaacgtgaccttctcattcgttaaatacagggataccgacactaacatcctgtgcgccatagatgatatccagatgctgctggatgaccatgttatcaaaactcaaacgatgtgcggaagcccattcatcaaacctatcgaggcagagtgtaggaagtgggaagagaagctgattcggatacaagacaatctagacgcgtggctgaaatgtcaggccacatggctctacctggagcctatcttcagcagcgaggacatcatagcccagatgcccgaggagggtcgaaaattcggcatcgttgacagctactggaagtcgctcatgtcacaagctgttaaagacaatcgcattctagtggccgctgaccagcctcggatggccgaaaagctgcaggaagctaacttcttgttggaggacattcaaaaagggctcaacgactatcttgagaagaagagattgttttttccacggtttttctttctgtccaatgacgaactcctcgaaatcttgtctgagactaaagacccactgcgggttcagccacaccttaagaagtgtttcgagggcatcgccaagctggagtttacagacaacctcgagatcgttggcatgatctcttctgagaaggaaactgttcccttcatccagaagatctacccagcaaacgccaagggcatggtcgagaagtggctgcagcaggtcgagcagatgatgttagcctctatgcgggaggtgatcggcctaggtatcgaagcctacgtgaaagtgcctaggaaccattgggtgctccaatggcccggtcaggtggtgatctgcgtcagtagcattttttggacccaggaagtatcacaggccttggccgagaatacattactggacttcctcaagaaatccaacgatcagattgcacagatcgtgcagctggttaggggtaaactgagctctggagcccgtttgactttgggagctctgaccgtgattgacgttcacgcacgggacgttgtggccaaactgagcgaggacagagtgtctgatttgaacgactttcaatggatctcccagttacggtattactgggtggctaaagacgttcaagtgcagatcattacaactgaagcactatatggatacgagtacctgggcaatagtcctcggctagtcattacccctctgaccgatcggtgttaccgcaccctaatgggggcactcaaacttaatttaggcggagcccctgagggcccagcaggaacggggaaaactgaaactactaaggatctggccaaggccctcgccaagcaatgcgttgtctttaattgttctgacggtctggattataaggccatggggaaatttttcaaaggcctggcgcaggcaggcgcatgggcatgcttcgatgaattcaatcgcatcgaagttgaagtattgtcggttgtagcccagcagattctgagcattcaacaagctattattcggaaactaaagacatttattttcgaagggacggagctcagcttgaaccccacatgcgccgtgttcatcaccatgaatccaggctatgctggcagggcagaattacctgataatctcaaagccctgtttcgaaccgttgccatgatggtacctgactatgctttaattggcgaaatctcactctacagcatgggattcctggactctcggtccctggctcagaaaattgtggccacctatcgtctttgctcagaacagctatcctcacagcaccattacgactatggaatgcgcgctgttaaatccgtgctgaccgctgctggtaatttgaaacttaaataccccgaggaaaacgagtccgtccttttgctgagagcattattagatgttaatctcgcaaagttcctcgctcaagatgtccccctattccagggaatcatttctgaccttttccctggcgtggtgttacccaaacccgactatgaggtgtttctgaaagttttgaatgacaatattaaaaaaatgaagctgcaacctgtgccttggttcataggcaagatcattcaaatctacgagatgatgcttgtgcgtcacgggtacatgatcgtgggagacccaatggggggtaagacatctgcatataaggttcttgctgcggcactgggtgacctgcacgctgccaatcaaatggaggagttcgctgtcgagtacaaaattataaaccctaaagctataaccatgggccaactctatggctgctttgatcaggtgtcacacgagtggatggacggagtgctcgctaacgcgtttcgtgagcaagccagcagtctctcggatgatcggaagtggattatttttgatggacccgtggatgccatctggattgagaacatgaacactgtgctggatgacaataagaagctgtgcctgatgagcggtgagatcattcagatgaacagcaaaatgagtctgatcttcgaaccggctgacctagagcaagctagcccagctactgtctctcggtgtggtatgatttacatggagcctcaccaacttggatggaagccgctgaaagacagctatatggacacactgccgagttctttaacgaaagagcacaaggagctagtgaatgacatgtttatgtggctcgtgcagccttgcctcgaattcggcaggctgcactgcaagtttgtggtccaaacctccccaatccatctggctttctctatgatgcggctgtattctagtctcttggatgaaataagggcggtggaagaagaggagatggagttgggggagggtctttccagtcagcaaatctttctgtggctgcagggtctgttcctgttttctttggtgtggacagttgctggaaccattaatgctgactctcgcaagaagttcgacgtgttttttagaaatctgatcatgggtatggatgacaatcatcctcgacctaagtctgtgaaactaaccaagaataatattttcccagagagaggttctatttatgacttctattttatcaagcaggcaagtgggcattgggaaacctggactcagtacattaccaaagaagaggaaaaggtgccagctggggcaaaggttagtgagctcatcattcccaccatggaaaccgctagacagtccttcttcctcaaaacttatctcgaccacgagatccctatgctctttgtggggccaaccggcaccgggaaatctgccatcacaaacaattttttgcttcacctgcccaagaacacctatttgcctaattgcataaacttttccgccaggacctccgcaaatcagacgcaggacattatcatgtcaaagctggatcgtaggagaaaaggcttgtttggcccacccattgggaagaaggccgtagtgtttgtggacgatctgaatatgcccgcaaaggaagtctacggtgcacaaccccctatcgagctcctgaggcagtggatagaccacggctattggtttgataaaaaagatactactcgattggatattgtggacatgctgctggtgacagcaatgggcccacctggaggtggtaggaacgacataaccggcaggtttacgaggcacctcaacatcatttccatcaacgcctttgaggatgatatcctgactaaaatttttagttcgatagtggactggcattttgggaagggtttcgatgtgatgtttttgcgctacgggaagatgctggtgcaggccacgaaaaccatctacagggacgccgttgaaaattttttgcctacgccgagtaagtcccattacgtcttcaatctgcgtgacttctcacgagtgatccagggggttctgctgtgccctcacacccacctccaagatgttgagaagtgtattagactgtggattcacgaggtctacagagtcttttatgacaggctgattgacaaagaagatcgacaagtctttttcaatatggtcaaggaaacgactagcaactgctttaagcaaacgatcgaaaaggtacttatccatttaagtccaaccgggaagattgtagatgacaatattcgctcccttttcttcggcgactactttaagcctgagtctgatcagaaaatatatgacgaaattactgacctgaaacagcttaccgttgttatggaacattacctggaagaattcaacaacatatccaaagcgccaatgtcacttgtgatgttcaggtttgccattgaacatatctcccgaatctgtcgtgtcctgaaacaggacaagggacacttgttactggtcgggattggcggtagtgggaggcagagcgcagctaaactgagcacatttatgaacgcttacgaactctaccagatcgaaatcacaaaaaattatgccggtaatgattggcgcgaggacctgaaaaagatcattctccaggtaggcgtcgcaactaagagtactgtttttctgtttgctgacaaccaaatcaaggacgagagcttcgtcgaagacataaatatgctgttgaatacgggggatgtgcccaacatctttcctgccgacgaaaaggcagatatcgttgagaagatgcagacagcagccaggacccagggcgaaaaagtggaggtaacgccgctttccatgtataatttttttatcgaacgtgtgatcaacaaaatatccttttccctcgccatgtcaccgattggggacgccttccggaacagattgcggatgttcccctcactgatcaattgttgcaccatcgattggtttcagagttggccaactgatgcactcgagcttgtggccaacaagttcctggaggacgtcgagcttgacgacaacataagggttgaggtggtctcaatgtgtaagtactttcaggaatcagttaagaaattgagccttgactattataacaaactccggagacataattacgtgacgcccaccagctatctagaattaattcttacctttaaaacgctcctgaattctaagcgtcaagaagtcgcaatgatgaggaatcggtatttaacaggtttgcagaagttggactttgctgcctcgcaggttgctgttatgcaaagggagctcacagctttacaaccccagctaatcctcacttctgaggaaactgccaaaatgatggtgaagatcgaggctgaaacgcgggaggctgacgggaagaagctcctcgtgcaggccgatgagaaagaggccaatgtggccgcagccatagcccagggcattaagaacgagtgcgaaggcgatttggctgaggcaatgcccgcacttgaagccgctctagccgcacttgatacccttaacccagccgatatttcactggttaagagcatgcagaatcctcccggaccagtgaagctagtgatggagtccatttgcattatgaaagggatgaaacctgagaggaaacctgacccctcgggctccgggaagatgatcgaagattattggggagtgagcaaaaagattctcggagaccttaaattcttggagagcctgaagacatatgataaggataacattcccccacttaccatgaaacgcatccgggaaaggtttattaaccaccctgaattccagcccgcagtaattaagaacgtatccagtgcatgcgaaggactctgtaaatgggtgcgagccatggaggtttacgacagggtggctaaagtcgtggccccaaagcgtgagcgcctgcgggaagctgagggcaaattggccgctcagatgcagaaactgaatcagaaacgcgctgagcttaagctagtagtcgaccgcctgcaagccctcaatgacgatttcgaggagatgaacaccaaaaagaaagatctcgaagagaacatcgagatctgttcccaaaagctggttagagccgagaagctgataagtggcttgggcggagaaaaagacaggtggacagaggccgctaggcagcttgggatcagatatactaatctcaccggggatgttctgcttagttccggcactgtggcttacctcggagcgttcaccgtggactatcgagttcagtgccagaaccagtggctggccgaatgcaaagacaaggttatacctggcttttcagactttagtctgagccacacgctgggggatccaattaagatccgcgcttggcaaattgccggtcttcccgtggatagtttttctatcgataatggaataattgtcagtaattcgcgccgatgggcactgatgatcgatcctcacgggcaggccaataagtggattaaaaatatggaaaaggccaacaaactggccgttataaagttctccgatagtaactacatgagaatgcttgaaaatgcccttcagctcggtaccccagtcctcatcgagaatatcggcgaggagttggatgcttccatcgagcctattctcttgaaggccaccttcaagcagcagggagtcgaatatatgcggttaggagagaatattatcgaatacagcagagacttcaaactctatattacgacaagactccgtaatccacactatctgcccgaagtcgccgtgaaggtttgcctgttgaacttcatgattacacccttagggctgcaggatcagctcttggggatcgttgccgcaaaagagaagcccgaactggaggaaaaaaaaaatcagctgatcgtagagtccgccaaaaacaaaaagcatttaaaagaaatcgaagacaagatcctggaggttttgtctatgtctaagggaaatatactcgaagacgaaacagcgatcaaagtgttaagttcatccaaggtattaagcgaagagatctccgaaaagcagaaggttgccagcatgacggaaacccagattgatgaaaccaggatgggatacaaaccagtggccgtgcatagcgccaccattttcttctgcatctctgacctcgctaatatagagcctatgtatcagtattctctgacatggttcatcaatctgtacatgcactctctgacccattctaccaagtctgaagagttgaatttaagaatcaagtacattatagaccacttcacactctccatttacaacaacgtctgccgcagcctgttcgaaaaggacaaacttttgttctcactcctgttaacaatcgggatcatgaagcagaaaaaggaaatcaccgaggaggtctggtattttctattgactggcggaatcgccctagacaacccataccctaaccccgcacctcagtggctgagtgagaaagcctgggctgagatcgttcgggcttccgccctgcccaagctgcacggcctcatggaacacctggagcagaatctgggtgagtggaaactcatatacgacagtgcatggccacacgaggaacagctgcctgggagttggaagttctctcaggggctggagaaaatggtgatcctgagatgcctgcggccagacaagatggtgcccgctgtgcgagagttcatcgccgagcatatggggaaactatacattgaagcgccaacttttgacctccagggctcatacaatgactcgtcctgttgtgctccactaattttcgttctgtctcccagcgcggaccctatggctgggctcctcaagttcgccgacgaccttggcatgggaggcacaaggacccagacaatatccttgggccaagggcaaggcccaattgcagcaaaaatgattaataacgccatcaaggacggaacgtgggttgtactccagaactgccatttggccgcatcatggatgcccactcttgagaagatctgcgaagaagtcatcgtgcccgagagcaccaacgctagattccggctgtggctgacctcataccctagcgaaaagttcccggtgagcattctgcagaatggcataaaaatgaccaatgagccgcctaagggcctgcgtgccaacctccttcggtcatacttgaacgaccccatctccgatccggttttcttccagtcttgcgctaaggctgtcatgtggcagaagatgctcttcggtctctgtttctttcacgcagtcgtgcaggagagacgcaactttggacccctcggatggaatattccttacgagttcaatgaatccgatctcaggattagtatgtggcagatccagatgtttctgaacgactataaggaagtgcccttcgatgccctcacctatctcacaggagaatgcaactacggaggcagagtgaccgacgataaagatcggagactgctgcttagcctgctctccatgttttactgtaaagagatagaagaggactattacagtctggctccaggagacacctactacatcccaccacacggctcctaccagtcttatatcgactacctccgcaatctccccatcaccgctcacccagaagtgttcggactgcatgaaaatgctgacattactaaagacaaccaggaaacaaaccagctcttcgaaggcgtgctccttactctcccaagacaatctggagggtccgggaaatccccacaggaagtcgtggaagagttggcccaagacattttgagcaaactgccccgagattttgacctggaggaagtgatgaaactttaccccgtcgtctatgaggagtcaatgaacaccgtcctccggcaggagctcatccggttcaatcgtctcacgaaggtggttaggagaagcctgataaatttggggagagcaatcaagggacaggtgttgatgtccagcgagctcgaggaagtgtttaattccatgttggttggcaaggtgcccgctatgtgggccgcaaagtcttaccccagcttgaaacccttgggcggttatgtagctgatctgctggcaagattgacgttcttccaagaatggatagacaagggcccacccgtcgtcttttggatttcagggttttactttacgcagagcttcctgacaggtgtgagccagaattacgcgcgtaaatataccattcccattgatcatattggtttcgagttcgaagtgacaccacaggagactgtgatggagaataatcctgaggacggtgcctatatcaagggcctctttttagagggggcacgatgggatcggaaaactatgcagatcggggagagcctccccaagattctgtacgacccgcttcctattatttggctcaagccaggggagtctgcaatgttcctgcaccaggacatctatgtatgtcccgtctataaaacttcagccaggagagggacactttctaccactgggcatagtactaactatgtgctctcaattgagctgcctaccgacatgccacagaagcactggatcaatcggggagtggcatctctctgtcagctggacaactac

SEQ ID NO: 193627 - DNA, 5663 bp, Artificial Sequence
  derived and/or modified sequence
atgggcgctactggtagactggagcttacgcttgcagcacctccacaccctggcccagccttccaacgctcaaaggccagagagacccagggggaagaagagggttccgagatgcaaattgcgaagtctgattctatccatcatatgagccatagtcaggggcagccagaacttccaccccttccggcttccgccaatgaggagccttcgggactctatcagacagtgatgagccacagcttctacccaccccttatgcagagaacaagctggaccctggctgctccttttaaggaacagcatcaccaccgtggccctagcgacagcattgccaacaattactcactgatggcgcaggacctgaaactcaaggatctcctgaaggtgtaccagcccgcaacaataagtgtgcccagggacaggacaggtcagggtctaccctcctccggaaatagatcatcctccgagcccatgcgcaagaaaaccaaattttcatcaaggaataaggaagactccactcggataaaacttgcttttaagactagcatcttcagcccaatgaagaaagaagtgaagacctctcttactttccccggatcccggccaatgtctccagagcagcagctggatgttatgcttcaacaagagatggagatggagtcaaaggagaaaaaaccgagcgaatccgatttggagcggtactactattacttaacgaatgggattagaaaagatatgatcgcccctgaagagggggaggtaatggttcgaatctcaaagcttatttccaacacattactgacctcccctttcctcgaaccactcatggtggttttagttcaggagaaggaaaatgactattactgcagcctcatgaagtctattgtcgactacatcctgatggacccgatggaacgcaaacggctgttcattgagtcgatccctagactgttccctcagcgtgttatacgagcccctgttccctggcattccgtatatcgttcggccaagaagtggaatgaggagcatctccacacagtgaatccaatgatgctgaggctgaaggaactatggtttgcggaatttcgcgacctgaggttcgttcgcaccgctgaaatcctggctggaaaattgccgttgcagccccaagaattctgggacgttatccaaaagcactgcttggaagcccaccagaccctgcttaataagtggattcccacttgtgctcagctgttcacttcacgcaaagagcactggattcacttcgcccctaaaagcaattacgattccagccgtaacatcgaggaatactttgccagtgtggcaagctttatgtctctccaattaagggaattggtgattaagtcacttgaggatctggtatctttatttatgattcataaggacggcaacgactttaaagagccatatcaggaaatgaaatttttcatcccccagctcatcatgatcaaactggaggtctcggagccaattattgtgtttaacccctccttcgatggatgctgggaactcattcgagatagttttttggagattatcaaaaactccaacgggatcccaaagctcaaatacattcccttaaagttcagcttcacggctgcagctgccgatcggcagtgtgtgaaggccgctgagccaggcgagccttctatgcacgcggctgccaccgcaatggcagagcttaaaggttacaacctcctgttgggaacagtgaatgcagaggaaaaactggtcagtgacttccttattcagacctttaaagtgtttcagaaaaaccaggtgggaccatgcaagtatctgaacgtatacaagaagtatgtagacctgctagataacaccgccgaacagaatatcgctgctttcctgaaggagaaccacgacatcgacgactttgtgacaaaaattaatgccattaagaagcggagaaatgaaatagccagtatgaatatcaccgtccctctggccatgttttgtttggacgccacagctctgaaccatgacctatgtgaacgtgcccagaacttgaaggaccatctgattcaattccaagtggacgtgaaccgcgacaccaatactagtatttgcaatcagtattcccatatagctgacaaggtttccgaggtgcctgcaaacacgaaggaactcgttagcctcatagagtttcttaagaaatctagcgctgtgacggtcttcaaactcaggcggcagcttcgcgacgctagtgagcgcctcgagtttctgatggactacgccgatctgccttaccagatcgaagacatatttgataattctcggaacttgctgttgcacaagagagaccaggcggagatggatctaattaaacggtgctctgagtttgagctgagactggaagggtaccaccgcgaactagaatcgttccgtaagcgcgaagtaatgactaccgaggaaatgaaacacaacgtggagaagttaaacgagctaagtaaaaatctgaacagggccttcgcagagtttgagttgatcaataaagaggaggagctcttggaaaaggagaagtccacatacccactcctgcaggccatgttaaagaacaaggtgccttatgagcaactgtggtcaaccgcatatgagttttcaatcaagtctgaggagtggatgaatggccctctgtttcttctgaatgcagaacagattgctgaggagattggcaacatgtggcggacgacctataagctgataaagactctgtcagatgtgcccgctccccgacggctcgccgaaaatgttaaaattaagatagacaagtttaaacaatacatacccatcttgtctatctcttgcaaccccggtatgaaggatcgacactggcagcagattagcgagattgtgggatatgagatcaagcccaccgagaccacatgcctgtctaacatgctggaatttggctttggaaaattcgtagaaaaactcgaaccaatcggggctgctgcctcaaaagaatacagtctagaaaagaacttggacagaatgaagctcgactgggttaatgtcacattttcttttgtgaagtaccgagacaccgacaccaatatcctgtgcgccatagacgacattcaaatgctgctggacgaccacgttattaaaacccagacaatgtgcggcagcccattcataaaaccaatcgaagcagagtgcagaaagtgggaagaaaagttgattcggatccaggacaacctcgacgcatggctgaaatgtcaggctacctggctttacttagaacctattttttcttcggaggatatcattgcccagatgcctgaggagggacggaaattcggcatcgtggacagttattggaagagtctgatgtcacaggcagtgaaagacaacagaattctggtggccgcagaccagccaaggatggccgagaagctgcaagaggccaactttttgttagaagacatccagaagggactgaatgattacttagagaagaagcgactgttcttccctcgcttctttttcctgtctaatgacgaactccttgaaatcctttctgagactaaagatcctttgcgcgttcagccccacctaaagaaatgcttcgaaggaatagctaaattggaatttacagacaacctcgaaatcgtgggaatgatctctagtgagaaggagacagttccgttcattcagaagatctatcctgcaaacgcaaagggaatggtggagaaatggttacagcaagtggagcagatgatgctggcatcaatgcgggaagtcatcggtttgggcatcgaagcctacgtaaaagtcccacggaatcattgggttcttcagtggcctgggcaggtggtgatctgcgtgagctccatcttctggacccaggaggtctcacaggccctggccgagaatacactgctggactttctgaagaaaagtaatgaccagatcgcacagattgtgcagctggtgaggggcaagctgtcttccggcgctcgcctgactttgggtgcactcaccgtcattgatgtgcacgcacgcgatgttgtggccaagttgagtgaggacagggttagcgaccttaatgacttccaatggatctcacaactgaggtactactgggtggcaaaggacgtgcaggtacaaattatcacaactgaggcgctctacggctacgaatacctgggcaatagtcctcgactcgttatcacgccactgactgacaggtgctatcgaaccctcatgggggcactcaaacttaatcttgggggagcaccggaagggcctgccggaaccggaaagaccgagaccacaaaggatctggctaaggccctagccaagcagtgtgttgtgtttaactgtagtgacggcctggactacaaagctatgggaaaattctttaaggggcttgcccaggctggggcatgggcttgtttcgatgagtttaacaggattgaggtggaagttctctccgtcgtggcccagcaaattctctccatccaacaagcgatcatccggaagctgaagacttttatattcgaaggaaccgaattgagcctcaaccctacgtgcgcagtcttcattactatgaaccccggttatgccggacgcgcagaactgcctgacaacctaaaagccctcttccgtaccgtggctatgatggtccccgactatgcactgattggggaaatctcattatattcgatggggttcctagattcccggagcctcgcccaaaagatcgtggccacataccgactttgcagcgagcaactgtcctcccagcaccactacgattacggaatgcgggctgtgaaaagtgtccttaccgctgctggaaacctgaagcttaaatacccagaggaaaatgaatcagtactattgctgcgcgctctgctcgatgtcaatttggcaaagttcctggctcaggatgtccctctgttccagggcattatcagtgatctgttccctggagtggtcctgcccaagcccgactacgaagtgtttctcaaggtccttaacgacaacattaagaaaatgaagctgcagcccgtgccatggtttatcggcaagatcatacagatatacgagatgatgctggtgagacatggatacatgattgtaggggaccctatgggcggtaagacatccgcgtacaaagtcctagctgcggcactgggtgatctgcacgccgctaaccagatggaggagttcgctgtggagtacaaaatcattaatcctaaagccattactatgggccagctgtatggttgctttgatcaagtttctcacgaatggatggatggggtcctggctaacgctttccgcgaacaggcttcttccctaagcgatgatcgcaagtggattatctttgacggccctgtggatgcgatttggattgagaatatgaatactgtgctggacgataacaagaaactgtgcttgatgtctggtgaaatcatccagatgaacagcaagatgtcgttgatattcgaacccgcagacttggaacaggcaagtcccgcaacggtttccaggtgtggcatgatctacatggagcctcatcagctggggtggaagccattgaaggatagttatatggacaccttaccttcttcattgacaaaagagcacaaggagctgatgaagagtggacaata

SEQ ID NO: 193628 - DNA, 462 bp, Artificial Sequence
  derived and/or modified sequence
atgcttcacatggggttggcccacgttaagagaatgcctcggagcagccggttgcagtgcaaagaagcacaggctttcttttctttacagtccgggacttatcgcgttctctccaccccactcaagctgggcgtgtgggaagagaagaaacactgggctgccctcctccagcccgtgagtctcggccgtaaatggaaaaagcgcccttgtaacctggatgactacgtatgggggcagctgaaatatatccctttaaagtttagtttcacggccgcagcggctgaccggcagtgcgtaaaggccgctgagcccggagagccctccatgcatgctgccgcaacagcaatggcagggactcgcgcaggcaccactttcgacgagctgcagtgtcaggaagatatggtctgtaccaggtttgagaataaagcatacgttaacaccaatgattttactaggcaatag

SEQ ID NO: 193629 - DNA, 12351 bp, Artificial Sequence
  derived and/or modified sequence
atgggcgccaccggcagactggagctgaccctggccgcccccccccaccccggccccgccttccagagaagcaaggccagagagacccagggcgaggaggagggcagcgagatgcagatcgccaagagcgacagcatccaccacatgagccacagccagggccagcccgagctgccccccctgcccgccagcgccaacgaggagcccagcggcctgtaccagaccgtgatgagccacagcttctacccccccctgatgcagagaaccagctggaccctggccgcccccttcaaggagcagcaccaccacagaggccccagcgacagcatcgccaacaactacagcctgatggcccaggacctgaagctgaaggacctgctgaaggtgtaccagcccgccaccatcagcgtgcccagagacagaaccggccagggcctgcccagcagcggcaacagaagcagcagcgagcccatgagaaagaagaccaagttcagcagcagaaacaaggaggacagcaccagaatcaagctggccttcaagaccagcatcttcagccccatgaagaaggaggtgaagaccagcctgaccttccccggcagcagacccatgagccccgagcagcagctggacgtgatgctgcagcaggagatggagatggagagcaaggagaagaagcccagcgagagcgacctggagagatactactactacctgaccaacggcatcagaaaggacatgatcgcccccgaggagggcgaggtgatggtgagaatcagcaagctgatcagcaacaccctgctgaccagccccttcctggagcccctgatggtggtgctggtgcaggagaaggagaacgactactactgcagcctgatgaagagcatcgtggactacatcctgatggaccccatggagagaaagagactgttcatcgagagcatccccagactgttcccccagagagtgatcagagcccccgtgccctggcacagcgtgtacagaagcgccaagaagtggaacgaggagcacctgcacaccgtgaaccccatgatgctgagactgaaggagctgtggttcgccgagttcagagacctgagattcgtgagaaccgccgagatcctggccggcaagctgcccctgcagccccaggagttctgggacgtgatccagaagcactgcctggaggcccaccagaccctgctgaacaagtggatccccacctgcgcccagctgttcaccagcagaaaggagcactggatccacttcgcccccaagagcaactacgacagcagcagaaacatcgaggagtacttcgccagcgtggccagcttcatgagcctgcagctgagagagctggtgatcaagagcctggaggacctggtgagcctgttcatgatccacaaggacggcaacgacttcaaggagccctaccaggagatgaagttcttcatcccccagctgatcatgatcaagctggaggtgagcgagcccatcatcgtgttcaaccccagcttcgacggctgctgggagctgatcagagacagcttcctggagatcatcaagaacagcaacggcatccccaagctgaagtacatccccctgaagttcagcttcaccgccgccgccgccgacagacagtgcgtgaaggccgccgagcccggcgagcccagcatgcacgccgccgccaccgccatggccgagctgaagggctacaacctgctgctgggcaccgtgaacgccgaggagaagctggtgagcgacttcctgatccagaccttcaaggtgttccagaagaaccaggtgggcccctgcaagtacctgaacgtgtacaagaagtacgtggacctgctggacaacaccgccgagcagaacatcgccgccttcctgaaggagaaccacgacatcgacgacttcgtgaccaagatcaacgccatcaagaagagaagaaacgagatcgccagcatgaacatcaccgtgcccctggccatgttctgcctggacgccaccgccctgaaccacgacctgtgcgagagagcccagaacctgaaggaccacctgatccagttccaggtggacgtgaacagagacaccaacaccagcatctgcaaccagtacagccacatcgccgacaaggtgagcgaggtgcccgccaacaccaaggagctggtgagcctgatcgagttcctgaagaagagcagcgccgtgaccgtgttcaagctgagaagacagctgagagacgccagcgagagactggagttcctgatggactacgccgacctgccctaccagatcgaggacatcttcgacaacagcagaaacctgctgctgcacaagagagaccaggccgagatggacctgatcaagagatgcagcgagttcgagctgagactggagggctaccacagagagctggagagcttcagaaagagagaggtgatgaccaccgaggagatgaagcacaacgtggagaagctgaacgagctgagcaagaacctgaacagagccttcgccgagttcgagctgatcaacaaggaggaggagctgctggagaaggagaagagcacctaccccctgctgcaggccatgctgaagaacaaggtgccctacgagcagctgtggagcaccgcctacgagttcagcatcaagagcgaggagtggatgaacggccccctgttcctgctgaacgccgagcagatcgccgaggagatcggcaacatgtggagaaccacctacaagctgatcaagaccctgagcgacgtgcccgcccccagaagactggccgagaacgtgaagatcaagatcgacaagttcaagcagtacatccccatcctgagcatcagctgcaaccccggcatgaaggacagacactggcagcagatcagcgagatcgtgggctacgagatcaagcccaccgagaccacctgcctgagcaacatgctggagttcggcttcggcaagttcgtggagaagctggagcccatcggcgccgccgccagcaaggagtacagcctggagaagaacctggacagaatgaagctggactgggtgaacgtgaccttcagcttcgtgaagtacagagacaccgacaccaacatcctgtgcgccatcgacgacatccagatgctgctggacgaccacgtgatcaagacccagaccatgtgcggcagccccttcatcaagcccatcgaggccgagtgcagaaagtgggaggagaagctgatcagaatccaggacaacctggacgcctggctgaagtgccaggccacctggctgtacctggagcccatcttcagcagcgaggacatcatcgcccagatgcccgaggagggcagaaagttcggcatcgtggacagctactggaagagcctgatgagccaggccgtgaaggacaacagaatcctggtggccgccgaccagcccagaatggccgagaagctgcaggaggccaacttcctgctggaggacatccagaagggcctgaacgactacctggagaagaagagactgttcttccccagattcttcttcctgagcaacgacgagctgctggagatcctgagcgagaccaaggaccccctgagagtgcagccccacctgaagaagtgcttcgagggcatcgccaagctggagttcaccgacaacctggagatcgtgggcatgatcagcagcgagaaggagaccgtgcccttcatccagaagatctaccccgccaacgccaagggcatggtggagaagtggctgcagcaggtggagcagatgatgctggccagcatgagagaggtgatcggcctgggcatcgaggcctacgtgaaggtgcccagaaaccactgggtgctgcagtggcccggccaggtggtgatctgcgtgagcagcatcttctggacccaggaggtgagccaggccctggccgagaacaccctgctggacttcctgaagaagagcaacgaccagatcgcccagatcgtgcagctggtgagaggcaagctgagcagcggcgccagactgaccctgggcgccctgaccgtgatcgacgtgcacgccagagacgtggtggccaagctgagcgaggacagagtgagcgacctgaacgacttccagtggatcagccagctgagatactactgggtggccaaggacgtgcaggtgcagatcatcaccaccgaggccctgtacggctacgagtacctgggcaacagccccagactggtgatcacccccctgaccgacagatgctacagaaccctgatgggcgccctgaagctgaacctgggcggcgcccccgagggccccgccggcaccggcaagaccgagaccaccaaggacctggccaaggccctggccaagcagtgcgtggtgttcaactgcagcgacggcctggactacaaggccatgggcaagttcttcaagggcctggcccaggccggcgcctgggcctgcttcgacgagttcaacagaatcgaggtggaggtgctgagcgtggtggcccagcagatcctgagcatccagcaggccatcatcagaaagctgaagaccttcatcttcgagggcaccgagctgagcctgaaccccacctgcgccgtgttcatcaccatgaaccccggctacgccggcagagccgagctgcccgacaacctgaaggccctgttcagaaccgtggccatgatggtgcccgactacgccctgatcggcgagatcagcctgtacagcatgggcttcctggacagcagaagcctggcccagaagatcgtggccacctacagactgtgcagcgagcagctgagcagccagcaccactacgactacggcatgagagccgtgaagagcgtgctgaccgccgccggcaacctgaagctgaagtaccccgaggagaacgagagcgtgctgctgctgagagccctgctggacgtgaacctggccaagttcctggcccaggacgtgcccctgttccagggcatcatcagcgacctgttccccggcgtggtgctgcccaagcccgactacgaggtgttcctgaaggtgctgaacgacaacatcaagaagatgaagctgcagcccgtgccctggttcatcggcaagatcatccagatctacgagatgatgctggtgagacacggctacatgatcgtgggcgaccccatgggcggcaagaccagcgcctacaaggtgctggccgccgccctgggcgacctgcacgccgccaaccagatggaggagttcgccgtggagtacaagatcatcaaccccaaggccatcaccatgggccagctgtacggctgcttcgaccaggtgagccacgagtggatggacggcgtgctggccaacgccttcagagagcaggccagcagcctgagcgacgacagaaagtggatcatcttcgacggccccgtggacgccatctggatcgagaacatgaacaccgtgctggacgacaacaagaagctgtgcctgatgagcggcgagatcatccagatgaacagcaagatgagcctgatcttcgagcccgccgacctggagcaggccagccccgccaccgtgagcagatgcggcatgatctacatggagccccaccagctgggctggaagcccctgaaggacagctacatggacaccctgcccagcagcctgaccaaggagcacaaggagctggtgaacgacatgttcatgtggctggtgcagccctgcctggagttcggcagactgcactgcaagttcgtggtgcagaccagccccatccacctggccttcagcatgatgagactgtacagcagcctgctggacgagatcagagccgtggaggaggaggagatggagctgggcgagggcctgagcagccagcagatcttcctgtggctgcagggcctgttcctgttcagcctggtgtggaccgtggccggcaccatcaacgccgacagcagaaagaagttcgacgtgttcttcagaaacctgatcatgggcatggacgacaaccaccccagacccaagagcgtgaagctgaccaagaacaacatcttccccgagagaggcagcatctacgacttctacttcatcaagcaggccagcggccactgggagacctggacccagtacatcaccaaggaggaggagaaggtgcccgccggcgccaaggtgagcgagctgatcatccccaccatggagaccgccagacagagcttcttcctgaagacctacctggaccacgagatccccatgctgttcgtgggccccaccggcaccggcaagagcgccatcaccaacaacttcctgctgcacctgcccaagaacacctacctgcccaactgcatcaacttcagcgccagaaccagcgccaaccagacccaggacatcatcatgagcaagctggacagaagaagaaagggcctgttcggcccccccatcggcaagaaggccgtggtgttcgtggacgacctgaacatgcccgccaaggaggtgtacggcgcccagccccccatcgagctgctgagacagtggatcgaccacggctactggttcgacaagaaggacaccaccagactggacatcgtggacatgctgctggtgaccgccatgggcccccccggcggcggcagaaacgacatcaccggcagattcaccagacacctgaacatcatcagcatcaacgccttcgaggacgacatcctgaccaagatcttcagcagcatcgtggactggcacttcggcaagggcttcgacgtgatgttcctgagatacggcaagatgctggtgcaggccaccaagaccatctacagagacgccgtggagaacttcctgcccacccccagcaagagccactacgtgttcaacctgagagacttcagcagagtgatccagggcgtgctgctgtgcccccacacccacctgcaggacgtggagaagtgcatcagactgtggatccacgaggtgtacagagtgttctacgacagactgatcgacaaggaggacagacaggtgttcttcaacatggtgaaggagaccaccagcaactgcttcaagcagaccatcgagaaggtgctgatccacctgagccccaccggcaagatcgtggacgacaacatcagaagcctgttcttcggcgactacttcaagcccgagagcgaccagaagatctacgacgagatcaccgacctgaagcagctgaccgtggtgatggagcactacctggaggagttcaacaacatcagcaaggcccccatgagcctggtgatgttcagattcgccatcgagcacatcagcagaatctgcagagtgctgaagcaggacaagggccacctgctgctggtgggcatcggcggcagcggcagacagagcgccgccaagctgagcaccttcatgaacgcctacgagctgtaccagatcgagatcaccaagaactacgccggcaacgactggagagaggacctgaagaagatcatcctgcaggtgggcgtggccaccaagagcaccgtgttcctgttcgccgacaaccagatcaaggacgagagcttcgtggaggacatcaacatgctgctgaacaccggcgacgtgcccaacatcttccccgccgacgagaaggccgacatcgtggagaagatgcagaccgccgccagaacccagggcgagaaggtggaggtgacccccctgagcatgtacaacttcttcatcgagagagtgatcaacaagatcagcttcagcctggccatgagccccatcggcgacgccttcagaaacagactgagaatgttccccagcctgatcaactgctgcaccatcgactggttccagagctggcccaccgacgccctggagctggtggccaacaagttcctggaggacgtggagctggacgacaacatcagagtggaggtggtgagcatgtgcaagtacttccaggagagcgtgaagaagctgagcctggactactacaacaagctgagaagacacaactacgtgacccccaccagctacctggagctgatcctgaccttcaagaccctgctgaacagcaagagacaggaggtggccatgatgagaaacagatacctgaccggcctgcagaagctggacttcgccgccagccaggtggccgtgatgcagagagagctgaccgccctgcagccccagctgatcctgaccagcgaggagaccgccaagatgatggtgaagatcgaggccgagaccagagaggccgacggcaagaagctgctggtgcaggccgacgagaaggaggccaacgtggccgccgccatcgcccagggcatcaagaacgagtgcgagggcgacctggccgaggccatgcccgccctggaggccgccctggccgccctggacaccctgaaccccgccgacatcagcctggtgaagagcatgcagaacccccccggccccgtgaagctggtgatggagagcatctgcatcatgaagggcatgaagcccgagagaaagcccgaccccagcggcagcggcaagatgatcgaggactactggggcgtgagcaagaagatcctgggcgacctgaagttcctggagagcctgaagacctacgacaaggacaacatcccccccctgaccatgaagagaatcagagagagattcatcaaccaccccgagttccagcccgccgtgatcaagaacgtgagcagcgcctgcgagggcctgtgcaagtgggtgagagccatggaggtgtacgacagagtggccaaggtggtggcccccaagagagagagactgagagaggccgagggcaagctggccgcccagatgcagaagctgaaccagaagagagccgagctgaagctggtggtggacagactgcaggccctgaacgacgacttcgaggagatgaacaccaagaagaaggacctggaggagaacatcgagatctgcagccagaagctggtgagagccgagaagctgatcagcggcctgggcggcgagaaggacagatggaccgaggccgccagacagctgggcatcagatacaccaacctgaccggcgacgtgctgctgagcagcggcaccgtggcctacctgggcgccttcaccgtggactacagagtgcagtgccagaaccagtggctggccgagtgcaaggacaaggtgatccccggcttcagcgacttcagcctgagccacaccctgggcgaccccatcaagatcagagcctggcagatcgccggcctgcccgtggacagcttcagcatcgacaacggcatcatcgtgagcaacagcagaagatgggccctgatgatcgacccccacggccaggccaacaagtggatcaagaacatggagaaggccaacaagctggccgtgatcaagttcagcgacagcaactacatgagaatgctggagaacgccctgcagctgggcacccccgtgctgatcgagaacatcggcgaggagctggacgccagcatcgagcccatcctgctgaaggccaccttcaagcagcagggcgtggagtacatgagactgggcgagaacatcatcgagtacagcagagacttcaagctgtacatcaccaccagactgagaaacccccactacctgcccgaggtggccgtgaaggtgtgcctgctgaacttcatgatcacccccctgggcctgcaggaccagctgctgggcatcgtggccgccaaggagaagcccgagctggaggagaagaagaaccagctgatcgtggagagcgccaagaacaagaagcacctgaaggagatcgaggacaagatcctggaggtgctgagcatgagcaagggcaacatcctggaggacgagaccgccatcaaggtgctgagcagcagcaaggtgctgagcgaggagatcagcgagaagcagaaggtggccagcatgaccgagacccagatcgacgagaccagaatgggctacaagcccgtggccgtgcacagcgccaccatcttcttctgcatcagcgacctggccaacatcgagcccatgtaccagtacagcctgacctggttcatcaacctgtacatgcacagcctgacccacagcaccaagagcgaggagctgaacctgagaatcaagtacatcatcgaccacttcaccctgagcatctacaacaacgtgtgcagaagcctgttcgagaaggacaagctgctgttcagcctgctgctgaccatcggcatcatgaagcagaagaaggagatcaccgaggaggtgtggtacttcctgctgaccggcggcatcgccctggacaacccctaccccaaccccgccccccagtggctgagcgagaaggcctgggccgagatcgtgagagccagcgccctgcccaagctgcacggcctgatggagcacctggagcagaacctgggcgagtggaagctgatctacgacagcgcctggccccacgaggagcagctgcccggcagctggaagttcagccagggcctggagaagatggtgatcctgagatgcctgagacccgacaagatggtgcccgccgtgagagagttcatcgccgagcacatgggcaagctgtacatcgaggcccccaccttcgacctgcagggcagctacaacgacagcagctgctgcgcccccctgatcttcgtgctgagccccagcgccgaccccatggccggcctgctgaagttcgccgacgacctgggcatgggcggcaccagaacccagaccatcagcctgggccagggccagggccccatcgccgccaagatgatcaacaacgccatcaaggacggcacctgggtggtgctgcagaactgccacctggccgccagctggatgcccaccctggagaagatctgcgaggaggtgatcgtgcccgagagcaccaacgccagattcagactgtggctgaccagctaccccagcgagaagttccccgtgagcatcctgcagaacggcatcaagatgaccaacgagccccccaagggcctgagagccaacctgctgagaagctacctgaacgaccccatcagcgaccccgtgttcttccagagctgcgccaaggccgtgatgtggcagaagatgctgttcggcctgtgcttcttccacgccgtggtgcaggagagaagaaacttcggccccctgggctggaacatcccctacgagttcaacgagagcgacctgagaatcagcatgtggcagatccagatgttcctgaacgactacaaggaggtgcccttcgacgccctgacctacctgaccggcgagtgcaactacggcggcagagtgaccgacgacaaggacagaagactgctgctgagcctgctgagcatgttctactgcaaggagatcgaggaggactactacagcctggcccccggcgacacctactacatccccccccacggcagctaccagagctacatcgactacctgagaaacctgcccatcaccgcccaccccgaggtgttcggcctgcacgagaacgccgacatcaccaaggacaaccaggagaccaaccagctgttcgagggcgtgctgctgaccctgcccagacagagcggcggcagcggcaagagcccccaggaggtggtggaggagctggcccaggacatcctgagcaagctgcccagagacttcgacctggaggaggtgatgaagctgtaccccgtggtgtacgaggagagcatgaacaccgtgctgagacaggagctgatcagattcaacagactgaccaaggtggtgagaagaagcctgatcaacctgggcagagccatcaagggccaggtgctgatgagcagcgagctggaggaggtgttcaacagcatgctggtgggcaaggtgcccgccatgtgggccgccaagagctaccccagcctgaagcccctgggcggctacgtggccgacctgctggccagactgaccttcttccaggagtggatcgacaagggcccccccgtggtgttctggatcagcggcttctacttcacccagagcttcctgaccggcgtgagccagaactacgccagaaagtacaccatccccatcgaccacatcggcttcgagttcgaggtgaccccccaggagaccgtgatggagaacaaccccgaggacggcgcctacatcaagggcctgttcctggagggcgccagatgggacagaaagaccatgcagatcggcgagagcctgcccaagatcctgtacgaccccctgcccatcatctggctgaagcccggcgagagcgccatgttcctgcaccaggacatctacgtgtgccccgtgtacaagaccagcgccagaagaggcaccctgagcaccaccggccacagcaccaactacgtgctgagcatcgagctgcccaccgacatgccccagaagcactggatcaacagaggcgtggccagcctgtgccagctggacaactag

SEQ ID NO: 193630 - DNA, 5664 bp, Artificial Sequence
  derived and/or modified sequence
atgggcgccaccggcagactggagctgaccctggccgcccccccccaccccggccccgccttccagagaagcaaggccagagagacccagggcgaggaggagggcagcgagatgcagatcgccaagagcgacagcatccaccacatgagccacagccagggccagcccgagctgccccccctgcccgccagcgccaacgaggagcccagcggcctgtaccagaccgtgatgagccacagcttctacccccccctgatgcagagaaccagctggaccctggccgcccccttcaaggagcagcaccaccacagaggccccagcgacagcatcgccaacaactacagcctgatggcccaggacctgaagctgaaggacctgctgaaggtgtaccagcccgccaccatcagcgtgcccagagacagaaccggccagggcctgcccagcagcggcaacagaagcagcagcgagcccatgagaaagaagaccaagttcagcagcagaaacaaggaggacagcaccagaatcaagctggccttcaagaccagcatcttcagccccatgaagaaggaggtgaagaccagcctgaccttccccggcagcagacccatgagccccgagcagcagctggacgtgatgctgcagcaggagatggagatggagagcaaggagaagaagcccagcgagagcgacctggagagatactactactacctgaccaacggcatcagaaaggacatgatcgcccccgaggagggcgaggtgatggtgagaatcagcaagctgatcagcaacaccctgctgaccagccccttcctggagcccctgatggtggtgctggtgcaggagaaggagaacgactactactgcagcctgatgaagagcatcgtggactacatcctgatggaccccatggagagaaagagactgttcatcgagagcatccccagactgttcccccagagagtgatcagagcccccgtgccctggcacagcgtgtacagaagcgccaagaagtggaacgaggagcacctgcacaccgtgaaccccatgatgctgagactgaaggagctgtggttcgccgagttcagagacctgagattcgtgagaaccgccgagatcctggccggcaagctgcccctgcagccccaggagttctgggacgtgatccagaagcactgcctggaggcccaccagaccctgctgaacaagtggatccccacctgcgcccagctgttcaccagcagaaaggagcactggatccacttcgcccccaagagcaactacgacagcagcagaaacatcgaggagtacttcgccagcgtggccagcttcatgagcctgcagctgagagagctggtgatcaagagcctggaggacctggtgagcctgttcatgatccacaaggacggcaacgacttcaaggagccctaccaggagatgaagttcttcatcccccagctgatcatgatcaagctggaggtgagcgagcccatcatcgtgttcaaccccagcttcgacggctgctgggagctgatcagagacagcttcctggagatcatcaagaacagcaacggcatccccaagctgaagtacatccccctgaagttcagcttcaccgccgccgccgccgacagacagtgcgtgaaggccgccgagcccggcgagcccagcatgcacgccgccgccaccgccatggccgagctgaagggctacaacctgctgctgggcaccgtgaacgccgaggagaagctggtgagcgacttcctgatccagaccttcaaggtgttccagaagaaccaggtgggcccctgcaagtacctgaacgtgtacaagaagtacgtggacctgctggacaacaccgccgagcagaacatcgccgccttcctgaaggagaaccacgacatcgacgacttcgtgaccaagatcaacgccatcaagaagagaagaaacgagatcgccagcatgaacatcaccgtgcccctggccatgttctgcctggacgccaccgccctgaaccacgacctgtgcgagagagcccagaacctgaaggaccacctgatccagttccaggtggacgtgaacagagacaccaacaccagcatctgcaaccagtacagccacatcgccgacaaggtgagcgaggtgcccgccaacaccaaggagctggtgagcctgatcgagttcctgaagaagagcagcgccgtgaccgtgttcaagctgagaagacagctgagagacgccagcgagagactggagttcctgatggactacgccgacctgccctaccagatcgaggacatcttcgacaacagcagaaacctgctgctgcacaagagagaccaggccgagatggacctgatcaagagatgcagcgagttcgagctgagactggagggctaccacagagagctggagagcttcagaaagagagaggtgatgaccaccgaggagatgaagcacaacgtggagaagctgaacgagctgagcaagaacctgaacagagccttcgccgagttcgagctgatcaacaaggaggaggagctgctggagaaggagaagagcacctaccccctgctgcaggccatgctgaagaacaaggtgccctacgagcagctgtggagcaccgcctacgagttcagcatcaagagcgaggagtggatgaacggccccctgttcctgctgaacgccgagcagatcgccgaggagatcggcaacatgtggagaaccacctacaagctgatcaagaccctgagcgacgtgcccgcccccagaagactggccgagaacgtgaagatcaagatcgacaagttcaagcagtacatccccatcctgagcatcagctgcaaccccggcatgaaggacagacactggcagcagatcagcgagatcgtgggctacgagatcaagcccaccgagaccacctgcctgagcaacatgctggagttcggcttcggcaagttcgtggagaagctggagcccatcggcgccgccgccagcaaggagtacagcctggagaagaacctggacagaatgaagctggactgggtgaacgtgaccttcagcttcgtgaagtacagagacaccgacaccaacatcctgtgcgccatcgacgacatccagatgctgctggacgaccacgtgatcaagacccagaccatgtgcggcagccccttcatcaagcccatcgaggccgagtgcagaaagtgggaggagaagctgatcagaatccaggacaacctggacgcctggctgaagtgccaggccacctggctgtacctggagcccatcttcagcagcgaggacatcatcgcccagatgcccgaggagggcagaaagttcggcatcgtggacagctactggaagagcctgatgagccaggccgtgaaggacaacagaatcctggtggccgccgaccagcccagaatggccgagaagctgcaggaggccaacttcctgctggaggacatccagaagggcctgaacgactacctggagaagaagagactgttcttccccagattcttcttcctgagcaacgacgagctgctggagatcctgagcgagaccaaggaccccctgagagtgcagccccacctgaagaagtgcttcgagggcatcgccaagctggagttcaccgacaacctggagatcgtgggcatgatcagcagcgagaaggagaccgtgcccttcatccagaagatctaccccgccaacgccaagggcatggtggagaagtggctgcagcaggtggagcagatgatgctggccagcatgagagaggtgatcggcctgggcatcgaggcctacgtgaaggtgcccagaaaccactgggtgctgcagtggcccggccaggtggtgatctgcgtgagcagcatcttctggacccaggaggtgagccaggccctggccgagaacaccctgctggacttcctgaagaagagcaacgaccagatcgcccagatcgtgcagctggtgagaggcaagctgagcagcggcgccagactgaccctgggcgccctgaccgtgatcgacgtgcacgccagagacgtggtggccaagctgagcgaggacagagtgagcgacctgaacgacttccagtggatcagccagctgagatactactgggtggccaaggacgtgcaggtgcagatcatcaccaccgaggccctgtacggctacgagtacctgggcaacagccccagactggtgatcacccccctgaccgacagatgctacagaaccctgatgggcgccctgaagctgaacctgggcggcgcccccgagggccccgccggcaccggcaagaccgagaccaccaaggacctggccaaggccctggccaagcagtgcgtggtgttcaactgcagcgacggcctggactacaaggccatgggcaagttcttcaagggcctggcccaggccggcgcctgggcctgcttcgacgagttcaacagaatcgaggtggaggtgctgagcgtggtggcccagcagatcctgagcatccagcaggccatcatcagaaagctgaagaccttcatcttcgagggcaccgagctgagcctgaaccccacctgcgccgtgttcatcaccatgaaccccggctacgccggcagagccgagctgcccgacaacctgaaggccctgttcagaaccgtggccatgatggtgcccgactacgccctgatcggcgagatcagcctgtacagcatgggcttcctggacagcagaagcctggcccagaagatcgtggccacctacagactgtgcagcgagcagctgagcagccagcaccactacgactacggcatgagagccgtgaagagcgtgctgaccgccgccggcaacctgaagctgaagtaccccgaggagaacgagagcgtgctgctgctgagagccctgctggacgtgaacctggccaagttcctggcccaggacgtgcccctgttccagggcatcatcagcgacctgttccccggcgtggtgctgcccaagcccgactacgaggtgttcctgaaggtgctgaacgacaacatcaagaagatgaagctgcagcccgtgccctggttcatcggcaagatcatccagatctacgagatgatgctggtgagacacggctacatgatcgtgggcgaccccatgggcggcaagaccagcgcctacaaggtgctggccgccgccctgggcgacctgcacgccgccaaccagatggaggagttcgccgtggagtacaagatcatcaaccccaaggccatcaccatgggccagctgtacggctgcttcgaccaggtgagccacgagtggatggacggcgtgctggccaacgccttcagagagcaggccagcagcctgagcgacgacagaaagtggatcatcttcgacggccccgtggacgccatctggatcgagaacatgaacaccgtgctggacgacaacaagaagctgtgcctgatgagcggcgagatcatccagatgaacagcaagatgagcctgatcttcgagcccgccgacctggagcaggccagccccgccaccgtgagcagatgcggcatgatctacatggagccccaccagctgggctggaagcccctgaaggacagctacatggacaccctgcccagcagcctgaccaaggagcacaaggagctgatgaagagcggccagtag

SEQ ID NO: 193631 - DNA, 462 bp, Artificial Sequence
  derived and/or modified sequence
atgctgcacatgggcctggcccacgtgaagagaatgcccagaagcagcagactgcagtgcaaggaggcccaggccttcttcagcctgcagagcggcacctacagagtgctgagcacccccctgaagctgggcgtgtgggaggagaagaagcactgggccgccctgctgcagcccgtgagcctgggcagaaagtggaagaagagaccctgcaacctggacgactacgtgtggggccagctgaagtacatccccctgaagttcagcttcaccgccgccgccgccgacagacagtgcgtgaaggccgccgagcccggcgagcccagcatgcacgccgccgccaccgccatggccggcaccagagccggcaccaccttcgacgagctgcagtgccaggaggacatggtgtgcaccagattcgagaacaaggcctacgtgaacaccaacgacttcaccagacagtag

SEQ ID NO: 193632 - DNA, 12394 bp, Artificial Sequence
  derived and/or modified sequence
atgggagctacagggcgcctcgagctcacactggccgcccctccccatccgggcccagcctttcagcgttcaaaagccagggagacccaaggagaggaggaagggagtgaaatgcagatcgccaaaagtgactccatacatcacatgagccactcccaggggcagccagagctgcctcctctgcctgcttctgctaatgaggaaccgtctggactctatcagactgtcatgtcacacagcttttacccgcccttgatgcaacgcacgtcatggaccttggctgcacccttcaaagaacagcatcaccaccgtggacccagtgattccatcgccaacaactactccttgatggcccaggacctgaagctgaaagatctgctgaaggtctaccaaccggccaccatcagtgtccctagggacaggaccggtcaggggctgccatcatcaggaaatagaagctcatcagagcccatgaggaaaaaaacgaagttttcctccagaaacaaagaggattccactaggatcaagttggccttcaagacgtcaatcttctcacccatgaagaaggaggtaaagacatctttgacgttcccaggaagcagaccaatgagtccagaacagcagctcgatgtcatgttacagcaggagatggaaatggaaagtaaagaaaagaagccatctgaatcggacctggagagatactattactatctgaccaatggaattcgcaaagacatgattgcccctgaggagggtgaagtgatggttcggatttcaaagctgatttctaacacgctgctgacgagtcccttcctggagcccctgatggtggtcctcgtgcaggagaaggagaatgactattactgtagcctcatgaaaagcatcgttgattacatcctcatggacccaatggagagaaaacggctctttattgagagcatcccccgcttgtttcctcaaagagtgatccgggcccctgtgccctggcacagtgtctacaggagcgccaagaagtggaacgaggagcatctgcacacggtgaaccccatgatgctcaggctgaaagaactgtggtttgcagaattcagagacctcaggtttgttcgaacagcagaaatactagcgggaaaattgcctctgcagcctcaggaattttgggatgtgatccagaaacactgcctggaggcacaccagactcttctcaacaagtggatccccacctgcgcccagctttttacctcacggaaggagcactggattcattttgctcccaagagcaactatgactcaagtcgaaacattgaggaatattttgcttctgtggcatcattcatgtcgctgcagcttagggagctggtcattaagtcacttgaggacctcgtttcccttttcatgatacacaaagatgggaatgattttaaggagccctaccaagagatgaagtttttcatacctcagctaatcatgatcaaacttgaagtcagtgaacccattattgtcttcaatccatcttttgatggctgctgggaattaatacgtgactctttcctggaaattattaagaactctaatgggatccccaagctgaaatacataccacttaagttctccttcactgctgctgctgctgatcggcaatgtgtgaaagcagctgagccaggagagcccagcatgcacgcggctgccactgcaatggcagagctgaaaggatataatctgctccttggaactgttaacgcagaagaaaaacttgtttctgattttttgattcaaactttcaaggtatttcagaaaaatcaagttggcccctgcaaatatttaaatgtctacaaaaagtatgttgacttattggataacacggcagagcaaaacatcgctgcgttcctgaaagaaaatcatgacattgatgattttgtgacgaagatcaatgccataaagaaacggagaaatgaaattgcatccatgaacatcaccgtgcctttagccatgttctgccttgatgctacggccctaaatcatgatctctgtgagcgagctcaaaatcttaaagaccatctgattcaattccaagtggatgtaaaccgagacaccaataccagcatttgtaatcagtacagccacatcgcagacaaagtcagtgaggttcctgccaacactaaggagctggtatccctcattgaattcctaaagaaatccagtgctgtcactgtgttcaaactcaggaggcaacttagagatgcaagtgaacggctggagttcctgatggactatgcagacttgccgtaccagattgaagatatctttgacaacagccggaacttgctccttcacaagagggatcaggcagaaatggatctgattaaaagatgctcagaatttgagttgagacttgagggctaccacagagaactggaaagttttaggaagcgcgaagtgatgactacagaagaaatgaagcacaatgttgaaaagcttaatgagctttcaaagaacctaaatcgggcgtttgcagagtttgagttgatcaataaggaggaagagctattggaaaaggagaagagtacttaccctcttctgcaggccatgctgaagaacaaagtaccttatgagcagctgtggtcgacagcctatgagttcagcatcaagtcagaggaatggatgaatggacccctcttcttactgaatgctgagcaaattgcggaggagatagggaatatgtggaggacaacgtataaactgatcaagaccttgtctgatgtgcctgcacccaggcgcttagcagagaatgtgaagatcaagatcgataagttcaagcagtacattcccatcctcagtatttcctgcaacccaggaatgaaagaccgacactggcagcagatcagtgagattgttggctatgagataaagcccaccgaaacgacctgcctctcaaatatgctcgaatttggattcggcaaattcgttgaaaaattggagcccattggtgcagctgccagcaaggaatactctctggagaaaaacttggatagaatgaagttggattgggttaacgtgacgttcagcttcgtgaaatacagggacactgatacaaacatcttgtgtgcaattgatgacattcaaatgctacttgatgatcacgtgataaagacccagaccatgtgtggctccccattcatcaaaccaatagaagcagaatgccggaaatgggaagaaaagctaattcgcatacaagacaatttggatgcctggttgaaatgccaagccacctggctgtacctggaaccaatcttcagttcagaggacatcatagcccagatgccagaagaggggaggaaatttggcattgttgatagttactggaaatcacttatgtcccaagcggtgaaagataacaggattctggtggcagccgaccagccacggatggcagagaagcttcaagaagccaactttctcttggaggacatccagaaagggctgaatgattacttggagaagaagagactattcttccccagattcttcttcctatcaaacgatgagctgctggaaatcttgtccgagacaaaggaccctctccgagtgcagccgcacttgaagaagtgctttgaaggaattgccaagcttgagtttacagacaatctggaaattgtgggcatgatcagctcggaaaaagaaactgttccattcatacagaaaatctacccagctaatgccaagggcatggtggaaaagtggctccagcaggtggagcagatgatgctggccagtatgcgagaagtcattggacttgggattgaagcatatgtcaaggtccctcgaaatcactgggtcttacagtggcctggacaggtggttatctgtgtctcctccatcttttggacccaggaggtgtcccaagccctggcggaaaataccttactggattttctgaaaaagagcaatgatcagattgcgcagattgtccagctggtgcgagggaagctgagcagtggagctcgactcactctcggggccctcacggtcatcgatgtccacgcccgcgacgtggtggccaagttatctgaggacagggtctccgatctgaatgatttccaatggatctcacagctgcgctactactgggtggccaaggatgtgcaggtgcagattatcaccacagaagccttgtatggctatgagtacctgggaaactccccccggctggtgatcacacccctcaccgaccgctgctacaggacactgatgggagctttgaagctgaaccttgggggtgctccagagggtccagctgggactggcaagacagaaaccaccaaagatttggccaaagccttggctaagcagtgtgtggtcttcaactgctccgatggtttggattacaaagctatggggaagttcttcaaggggctggcacaggctggagcatgggcgtgctttgatgagttcaacaggatcgaggtagaagtgctgtctgtggtcgctcagcagatcctcagcatccaacaagccatcattcggaagctaaagacattcatctttgaagggactgagctctctctgaacccaacctgcgctgtgttcatcaccatgaaccccgggtatgctggcagggctgaactgcccgacaatctcaaggccttgttccggacagtggccatgatggtcccagattacgccctcattggagaaatctccctctactccatggggtttctggactccagaagtctcgcccagaagatcgttgcgacctaccgcctgtgctcggaacaactgtcctctcagcatcactatgactacggtatgcgcgctgtcaagtctgtgcttactgccgcaggaaacctgaagctcaagtatccagaggagaatgaaagtgtcctgctgctccgggcattgcttgatgtcaatctggccaagttcttagcgcaagatgtccctctgtttcagggaattatatctgatttatttcctggagttgttcttccaaagccagactatgaagtttttctgaaagtgctgaatgataacatcaaaaagatgaaactccagccagtaccttggtttatagggaaaattatccagatctacgaaatgatgctggtgagacatggctatatgattgtaggagaccccatgggcggcaagacctctgcttataaagtgttggctgcagctctcggcgatttacacgcagccaatcagatggaggagtttgctgtggagtacaagatcatcaaccccaaggctatcacgatggggcagctgtatgggtgctttgaccaagtgagccacgagtggatggatggtgtccttgccaatgctttccgggagcaagcgtcttcactctctgatgatcgcaagtggattatatttgatgggccagtggatgctatttggattgaaaatatgaacactgttctggatgacaataaaaagctgtgtctcatgagtggggaaattatccagatgaactccaagatgagcctgatcttcgagcccgccgacctcgagcaagcctctccagccactgtgagcaggtgtgggatgatctacatggagccccatcaactaggctggaagcccctgaaggattcctacatggacaccctgccctccagtctcaccaaggagcacaaagaattggtcaatgacatgttcatgtggcttgtccagccctgcctggaatttggtcgccttcattgtaaatttgttgtccagacatctcccatccaccttgccttctcaatgatgagactgtactcttctctgcttgatgaaatcagggcagtagaagaggaggaaatggaattaggtgaaggcctgtcaagtcaacagatctttctctggctccaaggactgtttctcttttccttggtgtggaccgtggctggcaccatcaacgcagacagcagaaagaaatttgatgtgtttttccgcaacctgatcatgggcatggatgataaccacccaaggcccaaaagcgtcaaactcaccaaaaacaacatctttccagaaagaggaagcatctatgatttttattttatcaaacaagctagtggacattgggaaacgtggacacagtatatcaccaaagaggaggaaaaagttccagctggtgcaaaggtctcagaactcatcatccccacaatggagacagcccggcagtccttcttcttgaaaacctacttagaccatgagattccaatgctgttcgtgggtcccacaggcactggcaaatcagccatcaccaacaacttccttctccaccttcccaaaaatacgtacctacccaactgcatcaatttctctgccagaacctcagccaatcagacccaggatatcatcatgtccaagctggatcgacgacggaagggccttttcgggcctcccatagggaagaaagcagtggtgtttgtggatgacctcaacatgccagccaaagaggtgtatggggcccagccacccatcgagctcctgaggcagtggattgaccatggttactggtttgacaaaaaagacacaaccaggctggacatcgtggacatgctgctcgtgacagccatggggccccccgggggaggaaggaatgacattactggacgattcactcgccatctgaatatcatttccatcaatgcctttgaggatgacattttaaccaagattttcagttcgattgttgactggcacttcgggaaagggtttgatgtgatgtttttaaggtacggaaagatgctggtccaagctactaagacaatttatagagatgcagtggagaacttcttgccaactccctcgaagtcacattacgtctttaacctgcgggacttctcacgagtgattcaaggggtcctgctgtgccctcacacacacctgcaggatgtagaaaaatgtatccggctttggatccatgaggtttatcgggtcttctatgatcgtctgattgacaaggaggacagacaggtctttttcaacatggtgaaggaaaccacctccaattgcttcaagcagaccatagagaaggtgcttatccacttgtcacccactggaaagatagtcgatgataacattcgaagcctcttctttggagattatttcaagccagaaagtgaccaaaaaatctacgatgagatcactgacctgaaacagctgactgtggtcatggagcactatctggaagaattcaacaacatcagcaaggcccccatgtccctggtcatgttcaggtttgccattgagcacatctctaggatctgccgtgtcctgaagcaggacaaaggccacctgctcctggtgggcatagggggcagcgggcggcaaagtgccgccaaactgtccacattcatgaacgcatacgagctataccagattgagatcaccaagaactacgcaggcaatgactggcgagaagatcttaagaagatcatactgcaggtcggtgtggccaccaagagcaccgtgttcctcttcgccgacaaccagatcaaggatgaatcattcgtggaggacatcaacatgcttctgaacacaggtgacgtgcctaacatcttccctgctgacgagaaggctgacatcgtggagaagatgcagactgcagccaggacccaaggagagaaggttgaagtcactcctctttctatgtataacttctttattgagagggtaattaacaaaatctccttttcattagccatgagtccaataggggatgccttcaggaaccgcctgcggatgttcccttcgctgatcaattgctgtacgattgattggttccagtcctggcccacagatgccctagagttggtggctaacaaatttctagaggatgtggagcttgatgacaacattcgggtagaggtcgtgtccatgtgcaaatatttccaagagagcgtcaagaagctgtcactcgattattacaacaaacttcgaagacacaactatgttacccccacctcctaccttgaattgattctaaccttcaagacgctcctgaatagcaagaggcaagaggtggctatgatgaggaaccgctacctgacaggcttgcagaaactcgactttgcagcttctcaggtagcggttatgcaaagagaactgacagctcttcaacctcaactcatcctcacctccgaggaaactgccaagatgatggtgaaaattgaagcggagacgagagaagctgatggaaagaaacttctggtgcaggcagatgaaaaagaagccaatgttgctgctgccattgcccaaggaatcaagaacgaatgtgagggggacctagctgaggcaatgcctgcactcgaggctgcactagctgctctggacaccctgaacccggccgacatctcgctggtgaagtcgatgcagaacccaccaggccctgtcaaactggtcatggagagcatctgcatcatgaaagggatgaagccagagaggaagccagaccccagtggctccggtaagatgatagaagattactggggggtatccaaaaagattcttggggatctgaaattcttggagagtcttaagacatatgacaaagacaacatccccccactgaccatgaagcggatccgggaaaggtttatcaatcacccggaattccagccagctgtcattaaaaatgtatcgtcggcctgcgagggtctgtgcaagtgggtgagggccatggaggtgtacgatcgcgtggccaaggtggtggctcccaaacgggagcgactgagggaggcagaggggaagctggctgcacagatgcagaagctgaaccagaaaagagcagagctgaagctggtggtagatcggctccaggccctgaatgacgactttgaagagatgaacaccaagaaaaaggacttggaggaaaacattgaaatctgctcccaaaagctggtcagggcagagaaactgatcagtggtcttgggggagagaaggacagatggaccgaagctgcccgacagctggggatccgctatactaatctgactggtgacgtgttgctgtcctcaggaactgtggcttacctgggcgcttttacagtggattatcgggtccagtgccaaaatcagtggttggctgaatgtaaggacaaggtcatccctggcttcagtgacttcagtctcagccacacgttaggggatcccataaaaatccgtgcctggcagattgctgggcttcccgttgactccttctccatcgacaatggcatcattgtatccaattccagacgctgggccttaatgattgaccctcacgggcaggccaataaatggattaagaacatggagaaggcgaataaactggctgtcatcaagttctctgatagcaactacatgaggatgctggaaaacgcgctgcagttaggcacccctgtcttgattgaaaacattggagaagagctggatgcttctatcgaacctatcttgctcaaggcaacattcaaacagcaaggagttgagtacatgaggctgggtgaaaacatcattgaatattccagggattttaagttatacatcacaacccgtttgaggaatccacattacctcccagaagttgccgtgaaggtctgtctcctcaacttcatgatcacccccttgggtctccaagatcaactccttggcatcgtggctgcgaaggagaagccagagctggaagagaaaaagaaccagttgattgtggaaagtgccaagaacaagaagcatctcaaggaaattgaagataagatcttggaggttctctccatgtccaagggtaacatcctggaggatgaaaccgccatcaaagttctgtcctcctccaaagtgctatctgaagagatctcagagaaacagaaagttgcttccatgacagaaacgcagattgacgagactcggatgggctacaagccagtggctgtgcattctgccaccatcttcttttgtatctcggacctggccaacatcgagccgatgtaccagtactccctgacttggttcataaatctctacatgcattccttgacccacagcacgaagagcgaggaactgaatctgcgcatcaagtacatcattgaccatttcaccctgagcatctacaacaacgtgtgccgttctctgtttgagaaggacaagctactcttctctctcctcctgaccatcggcatcatgaaacagaagaaggaaattacggaggaggtgtggtacttccttctcactggaggcatcgcactggataacccctaccccaatccagctccccaatggctgtctgagaaggcatgggcagagattgtccgtgcatctgccttacccaaactgcatggcctgatggagcatttggaacagaacctgggtgaatggaagctgatctatgactcggcctggccccatgaggagcaactccctgggtcttggaagttctctcaaggattggagaagatggtgatccttcgatgtttgcggcctgacaaaatggtgccagcggtccgggagttcattgctgaacatatgggaaagctgtatatcgaagcccctacgttcgatctccagggatcctacaatgattccagctgctgtgcgcctttgatttttgtgttgtctccaagtgcagacccaatggcaggcctgctgaagtttgctgatgatcttggtatgggaggtaccagaacacagaccatctcccttggccaaggccaaggccctattgctgccaaaatgatcaacaatgccatcaaagacgggacctgggtggtcttacagaactgccacctggccgcaagctggatgcctaccctggagaagatttgtgaggaggtgattgttcctgagagcaccaatgccagattcagactctggctaaccagctatccatcagagaagtttccagtcagcattctccagaatggaatcaaaatgaccaatgagccccccaaagggctccgggccaacctgttgcgctcctacctcaatgaccccatctcagatcctgtgttcttccaaagctgtgcaaaggcggtgatgtggcaaaagatgttatttggcctttgtttcttccacgccgttgttcaagagagaagaaacttcggccccctagggtggaatattccctatgaattcaacgaatctgacctgaggattagtatgtggcagatccagatgtttctcaatgactacaaggaggtgccctttgatgctctgacctacctgacaggggaatgtaattacggaggcagagtgactgatgacaaagaccggcgtctcctgctgtcacttctgtccatgttctactgtaaggaaattgaggaggactattactccctcgctcctggagacacttactacatccctcctcatggctcctaccagtcctatatcgactatctcaggaatctccccatcacagcccacccagaagtgttcggcctccatgagaacgcagacatcaccaaagacaaccaggaaaccaaccagctgtttgagggggtcctgctgaccctccctagacagtcaggaggaagtggcaagtcccctcaggaagtggttgaggagttggcacaagacattctctccaagcttcccagagactttgacctggaagaggtcatgaagttgtaccccgtggtctatgaagaatccatgaataccgtcctaaggcaggagctcatcagattcaacaggctgaccaaagtggttcggaggagcctcatcaatcttggccgagccatcaaaggacaggtcctgatgtcctcggagctagaggaagtctttaacagcatgcttgtgggtaaagtgccagccatgtgggcagccaagtcttacccatcactgaagcctctggggggctacgtggctgacctgctggcccgcctgaccttcttccaggaatggattgacaaggggccccctgtggtattttggatctctggattctacttcacacagtcttttttgactggcgtctctcaaaattatgcccggaaatataccatccccattgaccacattggatttgagtttgaggtaaccccacaagaaacagtgatggagaataaccccgaagatggggcctacatcaaagggctcttcttagaaggtgcccgttgggacaggaaaacgatgcagattggggaatctctccccaaaatcctctatgacccactgcccatcatttggctgaaacctggggagagcgcaatgtttctgcatcaggacatctatgtgtgtccagtctacaaaacaagtgcccgcagaggaaccctctccaccacaggccactctaccaactatgtcctctccattgagcttccaacagacatgccccagaagcactggataaaccgaggggtggcctcactgtgccagctggataactgatggcatttgtctcaagacagaaaataaaaagcatttcattctt

SEQ ID NO: 193633 - DNA, 12221 bp, Artificial Sequence
  derived and/or modified sequence
atgggagctacagggcgcctcgagctcacactggccgcccctccccatccgggcccagcctttcagcgttcaaaagccagggagacccaaggagaggaggaagggagtgaaatgcagatcgccaaaagtgactccatacatcacatgagccactcccaggggcagccagagctgcctcctctgcctgcttctgctaatgaggaaccgtctggactctatcagactgtcatgtcacacagcttttacccgcccttgatgcaacgcacgtcatggaccttggctgcacccttcaaagaacagcatcaccaccgtggacccagtgattccatcgccaacaactactccttgatggcccaggacctgaagctgaaagatctgctgaaggtctaccaaccggccaccatcagtgtccctagggacaggaccggtcaggggctgccatcatcaggaaatagaagctcatcagagcccatgaggaaaaaaacgaagttttcctccagaaacaaagaggattccactaggatcaagttggccttcaagacgtcaatcttctcacccatgaagaaggaggtaaagacatctttgacgttcccaggaagcagaccaatgagtccagaacagcagctcgatgtcatgttacagcaggagatggaaatggaaagtaaagaaaagaagccatctgaatcggacctggagagatactattactatctgaccaatggaattcgcaaagacatgattgcccctgaggagggtgaagtgatggttcggatttcaaagctgatttctaacacgctgctgacgagtcccttcctggagcccctgatggtggtcctcgtgcaggagaaggagaatgactattactgtagcctcatgaaaagcatcgttgattacatcctcatggacccaatggagagaaaacggctctttattgagagcatcccccgcttgtttcctcaaagagtgatccgggcccctgtgccctggcacagtgtctacaggagcgccaagaagtggaacgaggagcatctgcacacggtgaaccccatgatgctcaggctgaaagaactgtggtttgcagaattcagagacctcaggtttgttcgaacagcagaaatactagcgggaaaattgcctctgcagcctcaggaattttgggatgtgatccagaaacactgcctggaggcacaccagactcttctcaacaagtggatccccacctgcgcccagctttttacctcacggaaggagcactggattcattttgctcccaagagcaactatgactcaagtcgaaacattgaggaatattttgcttctgtggcatcattcatgtcgctgcagcttagggagctggtcattaagtcacttgaggacctcgtttcccttttcatgatacacaaagatgggaatgattttaaggagccctaccaagagatgaagtttttcatacctcagctaatcatgatcaaacttgaagtcagtgaacccattattgtcttcaatccatcttttgatggctgctgggaattaatacgtgactctttcctggaaattattaagaactctaatgggatccccaagctgaaatacataccacttaagttctccttcactgctgctgctgctgatcggcaatgtgtgaaagcagctgagccaggagagcccagcatgcacgcggctgccactgcaatggcagagctgaaaggatataatctgctccttggaactgttaacgcagaagaaaaacttgtttctgattttttgattcaaactttcaaggtatttcagaaaaatcaagttggcccctgcaaatatttaaatgtctacaaaaagtatgttgacttattggataacacggcagagcaaaacatcgctgcgttcctgaaagaaaatcatgacattgatgattttgtgacgaagatcaatgccataaagaaacggagaaatgaaattgcatccatgaacatcaccgtgcctttagccatgttctgccttgatgctacggccctaaatcatgatctctgtgagcgagctcaaaatcttaaagaccatctgattcaattccaagtggatgtaaaccgagacaccaataccagcatttgtaatcagtacagccacatcgcagacaaagtcagtgaggttcctgccaacactaaggagctggtatccctcattgaattcctaaagaaatccagtgctgtcactgtgttcaaactcaggaggcaacttagagatgcaagtgaacggctggagttcctgatggactatgcagacttgccgtaccagattgaagatatctttgacaacagccggaacttgctccttcacaagagggatcaggcagaaatggatctgattaaaagatgctcagaatttgagttgagacttgagggctaccacagagaactggaaagttttaggaagcgcgaagtgatgactacagaagaaatgaagcacaatgttgaaaagcttaatgagctttcaaagaacctaaatcgggcgtttgcagagtttgagttgatcaataaggaggaagagctattggaaaaggagaagagtacttaccctcttctgcaggccatgctgaagaacaaagtaccttatgagcagctgtggtcgacagcctatgagttcagcatcaagtcagaggaatggatgaatggacccctcttcttactgaatgctgagcaaattgcggaggagatagggaatatgtggaggacaacgtataaactgatcaagaccttgtctgatgtgcctgcacccaggcgcttagcagagaatgtgaagatcaagatcgataagttcaagcagtacattcccatcctcagtatttcctgcaacccaggaatgaaagaccgacactggcagcagatcagtgagattgttggctatgagataaagcccaccgaaacgacctgcctctcaaatatgctcgaatttggattcggcaaattcgttgaaaaattggagcccattggtgcagctgccagcaaggaatactctctggagaaaaacttggatagaatgaagttggattgggttaacgtgacgttcagcttcgtgaaatacagggacactgatacaaacatcttgtgtgcaattgatgacattcaaatgctacttgatgatcacgtgataaagacccagaccatgtgtggctccccattcatcaaaccaatagaagcagaatgccggaaatgggaagaaaagctaattcgcatacaagacaatttggatgcctggttgaaatgccaagccacctggctgtacctggaaccaatcttcagttcagaggacatcatagcccagatgccagaagaggggaggaaatttggcattgttgatagttactggaaatcacttatgtcccaagcggtgaaagataacaggattctggtggcagccgaccagccacggatggcagagaagcttcaagaagccaactttctcttggaggacatccagaaagggctgaatgattacttggagaagaagagactattcttccccagattcttcttcctatcaaacgatgagctgctggaaatcttgtccgagacaaaggaccctctccgagtgcagccgcacttgaagaagtgctttgaaggaattgccaagcttgagtttacagacaatctggaaattgtgggcatgatcagctcggaaaaagaaactgttccattcatacagaaaatctacccagctaatgccaagggcatggtggaaaagtggctccagcaggtggagcagatgatgctggccagtatgcgagaagtcattggacttgggattgaagcatatgtcaaggtccctcgaaatcactgggtcttacagtggcctggacaggtggttatctgtgtctcctccatcttttggacccaggaggtgtcccaagccctggcggaaaataccttactggattttctgaaaaagagcaatgatcagattgcgcagattgtccagctggtgcgagggaagctgagcagtggagctcgactcactctcggggccctcacggtcatcgatgtccacgcccgcgacgtggtggccaagttatctgaggacagggtctccgatctgaatgatttccaatggatctcacagctgcgctactactgggtggccaaggatgtgcaggtgcagattatcaccacagaagccttgtatggctatgagtacctgggaaactccccccggctggtgatcacacccctcaccgaccgctgctacaggacactgatgggagctttgaagctgaaccttgggggtgctccagagggtccagctgggactggcaagacagaaaccaccaaagatttggccaaagccttggctaagcagtgtgtggtcttcaactgctccgatggtttggattacaaagctatggggaagttcttcaaggggctggcacaggctggagcatgggcgtgctttgatgagttcaacaggatcgaggtagaagtgctgtctgtggtcgctcagcagatcctcagcatccaacaagccatcattcggaagctaaagacattcatctttgaagggactgagctctctctgaacccaacctgcgctgtgttcatcaccatgaaccccgggtatgctggcagggctgaactgcccgacaatctcaaggccttgttccggacagtggccatgatggtcccagattacgccctcattggagaaatctccctctactccatggggtttctggactccagaagtctcgcccagaagatcgttgcgacctaccgcctgtgctcggaacaactgtcctctcagcatcactatgactacggtatgcgcgctgtcaagtctgtgcttactgccgcaggaaacctgaagctcaagtatccagaggagaatgaaagtgtcctgctgctccgggcattgcttgatgtcaatctggccaagttcttagcgcaagatgtccctctgtttcagggaattatatctgatttatttcctggagttgttcttccaaagccagactatgaagtttttctgaaagtgctgaatgataacatcaaaaagatgaaactccagccagtaccttggtttatagggaaaattatccagatctacgaaatgatgctggtgagacatggctatatgattgtaggagaccccatgggcggcaagacctctgcttataaagtgttggctgcagctctcggcgatttacacgcagccaatcagatggaggagtttgctgtggagtacaagatcatcaaccccaaggctatcacgatggggcagctgtatgggtgctttgaccaagtgagccacgagtggatggatggtgtccttgccaatgctttccgggagcaagcgtcttcactctctgatgatcgcaagtggattatatttgatgggccagtggatgctatttggattgaaaatatgaacactgttctggatgacaataaaaagctgtgtctcatgagtggggaaattatccagatgaactccaagatgagcctgatcttcgagcccgccgacctcgagcaagcctctccagccactgtgagcaggtgtgggatgatctacatggagccccatcaactaggctggaagcccctgaaggattcctacatggacaccctgccctccagtctcaccaaggagcacaaagaattgatgaaatcagggcagtagaagaggaggaaatggaattaggtgaaggcctgtcaagtcaacagatctttctctggctccaaggactgtttctcttttccttggtgtggaccgtggctggcaccatcaacgcagacagcagaaagaaatttgatgtgtttttccgcaacctgatcatgggcatggatgataaccacccaaggcccaaaagcgtcaaactcaccaaaaacaacatctttccagaaagaggaagcatctatgatttttattttatcaaacaagctagtggacattgggaaacgtggacacagtatatcaccaaagaggaggaaaaagttccagctggtgcaaaggtctcagaactcatcatccccacaatggagacagcccggcagtccttcttcttgaaaacctacttagaccatgagattccaatgctgttcgtgggtcccacaggcactggcaaatcagccatcaccaacaacttccttctccaccttcccaaaaatacgtacctacccaactgcatcaatttctctgccagaacctcagccaatcagacccaggatatcatcatgtccaagctggatcgacgacggaagggccttttcgggcctcccatagggaagaaagcagtggtgtttgtggatgacctcaacatgccagccaaagaggtgtatggggcccagccacccatcgagctcctgaggcagtggattgaccatggttactggtttgacaaaaaagacacaaccaggctggacatcgtggacatgctgctcgtgacagccatggggccccccgggggaggaaggaatgacattactggacgattcactcgccatctgaatatcatttccatcaatgcctttgaggatgacattttaaccaagattttcagttcgattgttgactggcacttcgggaaagggtttgatgtgatgtttttaaggtacggaaagatgctggtccaagctactaagacaatttatagagatgcagtggagaacttcttgccaactccctcgaagtcacattacgtctttaacctgcgggacttctcacgagtgattcaaggggtcctgctgtgccctcacacacacctgcaggatgtagaaaaatgtatccggctttggatccatgaggtttatcgggtcttctatgatcgtctgattgacaaggaggacagacaggtctttttcaacatggtgaaggaaaccacctccaattgcttcaagcagaccatagagaaggtgcttatccacttgtcacccactggaaagatagtcgatgataacattcgaagcctcttctttggagattatttcaagccagaaagtgaccaaaaaatctacgatgagatcactgacctgaaacagctgactgtggtcatggagcactatctggaagaattcaacaacatcagcaaggcccccatgtccctggtcatgttcaggtttgccattgagcacatctctaggatctgccgtgtcctgaagcaggacaaaggccacctgctcctggtgggcatagggggcagcgggcggcaaagtgccgccaaactgtccacattcatgaacgcatacgagctataccagattgagatcaccaagaactacgcaggcaatgactggcgagaagatcttaagaagatcatactgcaggtcggtgtggccaccaagagcaccgtgttcctcttcgccgacaaccagatcaaggatgaatcattcgtggaggacatcaacatgcttctgaacacaggtgacgtgcctaacatcttccctgctgacgagaaggctgacatcgtggagaagatgcagactgcagccaggacccaaggagagaaggttgaagtcactcctctttctatgtataacttctttattgagagggtaattaacaaaatctccttttcattagccatgagtccaataggggatgccttcaggaaccgcctgcggatgttcccttcgctgatcaattgctgtacgattgattggttccagtcctggcccacagatgccctagagttggtggctaacaaatttctagaggatgtggagcttgatgacaacattcgggtagaggtcgtgtccatgtgcaaatatttccaagagagcgtcaagaagctgtcactcgattattacaacaaacttcgaagacacaactatgttacccccacctcctaccttgaattgattctaaccttcaagacgctcctgaatagcaagaggcaagaggtggctatgatgaggaaccgctacctgacaggcttgcagaaactcgactttgcagcttctcaggtagcggttatgcaaagagaactgacagctcttcaacctcaactcatcctcacctccgaggaaactgccaagatgatggtgaaaattgaagcggagacgagagaagctgatggaaagaaacttctggtgcaggcagatgaaaaagaagccaatgttgctgctgccattgcccaaggaatcaagaacgaatgtgagggggacctagctgaggcaatgcctgcactcgaggctgcactagctgctctggacaccctgaacccggccgacatctcgctggtgaagtcgatgcagaacccaccaggccctgtcaaactggtcatggagagcatctgcatcatgaaagggatgaagccagagaggaagccagaccccagtggctccggtaagatgatagaagattactggggggtatccaaaaagattcttggggatctgaaattcttggagagtcttaagacatatgacaaagacaacatccccccactgaccatgaagcggatccgggaaaggtttatcaatcacccggaattccagccagctgtcattaaaaatgtatcgtcggcctgcgagggtctgtgcaagtgggtgagggccatggaggtgtacgatcgcgtggccaaggtggtggctcccaaacgggagcgactgagggaggcagaggggaagctggctgcacagatgcagaagctgaaccagaaaagagcagagctgaagctggtggtagatcggctccaggccctgaatgacgactttgaagagatgaacaccaagaaaaaggacttggaggaaaacattgaaatctgctcccaaaagctggtcagggcagagaaactgatcagtggtcttgggggagagaaggacagatggaccgaagctgcccgacagctggggatccgctatactaatctgactggtgacgtgttgctgtcctcaggaactgtggcttacctgggcgcttttacagtggattatcgggtccagtgccaaaatcagtggttggctgaatgtaaggacaaggtcatccctggcttcagtgacttcagtctcagccacacgttaggggatcccataaaaatccgtgcctggcagattgctgggcttcccgttgactccttctccatcgacaatggcatcattgtatccaattccagacgctgggccttaatgattgaccctcacgggcaggccaataaatggattaagaacatggagaaggcgaataaactggctgtcatcaagttctctgatagcaactacatgaggatgctggaaaacgcgctgcagttaggcacccctgtcttgattgaaaacattggagaagagctggatgcttctatcgaacctatcttgctcaaggcaacattcaaacagcaaggagttgagtacatgaggctgggtgaaaacatcattgaatattccagggattttaagttatacatcacaacccgtttgaggaatccacattacctcccagaagttgccgtgaaggtctgtctcctcaacttcatgatcacccccttgggtctccaagatcaactccttggcatcgtggctgcgaaggagaagccagagctggaagagaaaaagaaccagttgattgtggaaagtgccaagaacaagaagcatctcaaggaaattgaagataagatcttggaggttctctccatgtccaagggtaacatcctggaggatgaaaccgccatcaaagttctgtcctcctccaaagtgctatctgaagagatctcagagaaacagaaagttgcttccatgacagaaacgcagattgacgagactcggatgggctacaagccagtggctgtgcattctgccaccatcttcttttgtatctcggacctggccaacatcgagccgatgtaccagtactccctgacttggttcataaatctctacatgcattccttgacccacagcacgaagagcgaggaactgaatctgcgcatcaagtacatcattgaccatttcaccctgagcatctacaacaacgtgtgccgttctctgtttgagaaggacaagctactcttctctctcctcctgaccatcggcatcatgaaacagaagaaggaaattacggaggaggtgtggtacttccttctcactggaggcatcgcactggataacccctaccccaatccagctccccaatggctgtctgagaaggcatgggcagagattgtccgtgcatctgccttacccaaactgcatggcctgatggagcatttggaacagaacctgggtgaatggaagctgatctatgactcggcctggccccatgaggagcaactccctgggtcttggaagttctctcaaggattggagaagatggtgatccttcgatgtttgcggcctgacaaaatggtgccagcggtccgggagttcattgctgaacatatgggaaagctgtatatcgaagcccctacgttcgatctccagggatcctacaatgattccagctgctgtgcgcctttgatttttgtgttgtctccaagtgcagacccaatggcaggcctgctgaagtttgctgatgatcttggtatgggaggtaccagaacacagaccatctcccttggccaaggccaaggccctattgctgccaaaatgatcaacaatgccatcaaagacgggacctgggtggtcttacagaactgccacctggccgcaagctggatgcctaccctggagaagatttgtgaggaggtgattgttcctgagagcaccaatgccagattcagactctggctaaccagctatccatcagagaagtttccagtcagcattctccagaatggaatcaaaatgaccaatgagccccccaaagggctccgggccaacctgttgcgctcctacctcaatgaccccatctcagatcctgtgttcttccaaagctgtgcaaaggcggtgatgtggcaaaagatgttatttggcctttgtttcttccacgccgttgttcaagagagaagaaacttcggccccctagggtggaatattccctatgaattcaacgaatctgacctgaggattagtatgtggcagatccagatgtttctcaatgactacaaggaggtgccctttgatgctctgacctacctgacaggggaatgtaattacggaggcagagtgactgatgacaaagaccggcgtctcctgctgtcacttctgtccatgttctactgtaaggaaattgaggaggactattactccctcgctcctggagacacttactacatccctcctcatggctcctaccagtcctatatcgactatctcaggaatctccccatcacagcccacccagaagtgttcggcctccatgagaacgcagacatcaccaaagacaaccaggaaaccaaccagctgtttgagggggtcctgctgaccctccctagacagtcaggaggaagtggcaagtcccctcaggaagtggttgaggagttggcacaagacattctctccaagcttcccagagactttgacctggaagaggtcatgaagttgtaccccgtggtctatgaagaatccatgaataccgtcctaaggcaggagctcatcagattcaacaggctgaccaaagtggttcggaggagcctcatcaatcttggccgagccatcaaaggacaggtcctgatgtcctcggagctagaggaagtctttaacagcatgcttgtgggtaaagtgccagccatgtgggcagccaagtcttacccatcactgaagcctctggggggctacgtggctgacctgctggcccgcctgaccttcttccaggaatggattgacaaggggccccctgtggtattttggatctctggattctacttcacacagtcttttttgactggcgtctctcaaaattatgcccggaaatataccatccccattgaccacattggatttgagtttgaggtaaccccacaagaaacagtgatggagaataaccccgaagatggggcctacatcaaagggctcttcttagaaggtgcccgttgggacaggaaaacgatgcagattggggaatctctccccaaaatcctctatgacccactgcccatcatttggctgaaacctggggagagcgcaatgtttctgcatcaggacatctatgtgtgtccagtctacaaaacaagtgcccgcagaggaaccctctccaccacaggccactctaccaactatgtcctctccattgagcttccaacagacatgccccagaagcactggataaaccgaggggtggcctcactgtgccagctggataactga

SEQ ID NO: 193634 - protein, 178 aa, Artificial Sequence
  derived and/or modified sequence
MSKTGTKITFYEDKNFQGRRYDCDCDCADFHTYLSRCNSIKVEGGTWAVYERPNFAGYMYILPQGEYPEYQRWMGLNDRLSSCRAVHLPSGGQYKIQIFEKGDFSGQMYETTEDCPSIMEQFHMREIHSCKVLEGVWIFYELPNYRGRQYLLDKKEYRKPIDWGAASPAVQSFRRIVE

SEQ ID NO: 193635 - DNA, 537 bp, Artificial Sequence
  derived and/or modified sequence
atgagcaagaccggcacaaagatcactttttacgaagacaaaaattttcagggccgccggtacgattgtgactgtgactgcgctgatttccacacgtacctgtctagatgcaattccatcaaagtcgaaggtggtacatgggccgtttacgagcggccaaattttgcaggatacatgtacatcctgcctcagggggagtatccagaatatcagcgatggatgggtcttaacgacaggctttcttcctgtcgcgcggtccatcttccctccggcgggcaatataagatacagatcttcgagaagggagacttctccgggcaaatgtacgaaaccacagaggactgcccctcgattatggagcaatttcacatgagagagatccacagttgtaaagtcctggagggggtgtggatattttatgaactgcctaactatagaggacgacagtatcttttagataaaaaggaatataggaaacccattgattggggagccgcttctcctgccgttcagtcttttaggcgaatcgtggagtag

SEQ ID NO: 193636 - DNA, 537 bp, Artificial Sequence
  derived and/or modified sequence
atgagcaaaactggcactaaaatcactttctatgaagacaagaacttccagggacgacgctacgattgtgactgtgattgcgcggatttccacacatatctatcccggtgcaattccattaaagtggaaggagggacttgggccgtgtatgagaggccaaacttcgccggatatatgtacatactgccccagggagagtatccagaataccaaagatggatgggactgaacgaccgactcagctcatgccgcgccgttcacttgccatcagggggacagtacaagattcagatttttgagaagggagacttctcggggcaaatgtatgagacaactgaggattgcccaagcattatggagcagttccacatgcgtgaaatccacagttgtaaagtgttagaaggggtgtggattttttatgagctgccaaactaccgggggcgacaatatcttctcgacaagaaagagtatcgtaagcccatcgattggggcgctgccagcccagccgtccagtccttccgcagaatcgttgaatag

SEQ ID NO: 193637 - DNA, 537 bp, Artificial Sequence
  derived and/or modified sequence
atgagcaagacaggcaccaagatcaccttctatgaggacaagaacttccagggcagaagatatgactgtgactgtgactgtgccgacttccacacctacctgagccgctgcaacagcatcaaggtggagggcggcacctgggccgtgtatgaaagacccaactttgctggctacatgtacatcctgccccagggcgagtacccagagtaccagcgctggatgggcctgaatgaccggctgagcagctgcagagctgtgcacctgcccagcggcggccagtacaagatccagatctttgagaagggggacttcagcggccagatgtatgagaccacagaggactgccccagcatcatggagcagttccacatgagggagatccacagctgcaaggtgctggagggcgtgtggatcttctatgagctgcccaactaccggggccggcagtacctgctggacaagaaggagtacaggaagcccatcgactggggcgccgccagccctgctgtgcagagcttccgccgcatcgtggagtag

SEQ ID NO: 193638 - DNA, 537 bp, Artificial Sequence
  derived and/or modified sequence
atgagcaagaccggcaccaagatcaccttctacgaggacaagaactttcaaggaagacgctacgattgcgactgcgactgcgccgactttcatacctatctgtctagatgcaatagtatcaaggtggagggaggaacttgggcggtttatgagcgtcctaattttgcaggttacatgtacatcctcccgcagggagagtacccggaataccagcgctggatgggcctcaacgatcggttgtcttcatgcagggctgtgcatctccctagtgggggccaatacaagattcagatatttgaaaagggcgattttagtggacaaatgtacgaaactactgaagattgtccaagcattatggagcagtttcacatgcgagagatccattcttgtaaggtcctggagggggtgtggatcttctatgagcttcccaattatagaggcagacagtacctgcttgacaagaaagagtataggaagcctatagattggggcgctgcatccccagccgtgcagagctttcggaggatcgtggagtag

SEQ ID NO: 193639 - DNA, 537 bp, Artificial Sequence
  derived and/or modified sequence
atgagcaagaccggcaccaagatcaccttctacgaggacaagaactttcaggggaggcgctacgactgtgattgtgactgcgccgatttccatacttatctgagccgctgtaattcaattaaggtggaagggggaacttgggctgtctacgagagacccaatttcgccgggtatatgtatatcctgccccagggcgaataccctgagtaccagagatggatgggactgaatgataggttgtcctcctgtcgcgccgtacatctgccttccggcgggcaatacaagattcagatcttcgagaaaggcgactttagtggacagatgtacgaaacaaccgaagactgcccctccataatggagcaattccacatgagagagatccactcatgtaaggttctcgaaggggtgtggattttttacgaactgcccaactatagagggcggcagtatctcttggacaagaaggaataccggaagcccatcgattggggggccgcttcacctgcagttcaaagcttcaggcggattgtcgagtag

SEQ ID NO: 193640 - DNA, 537 bp, Artificial Sequence
  derived and/or modified sequence
atgtccaaaacggggactaaaatcactttctatgaggacaaaaacttccaaggaaggagatatgactgcgattgcgattgcgctgatttccatacctatttatccaggtgtaactctataaaagtggagggcggaacatgggcggtgtatgagaggccaaacttcgcaggctatatgtacatcctcccccaaggggagtatccagaatatcagaggtggatgggtcttaatgaccgcctcagttcctgccgcgcagtgcacctgccctccggaggtcagtacaagatccagatttttgagaaaggcgacttcagtggacagatgtacgaaaccactgaagactgtccgtctatcatggagcagttccacatgcgtgagattcactcttgcaaggtactcgagggagtgtggatattctacgagttgcccaattatcgaggccgtcagtacctcttggataaaaaagagtataggaagccaatagattggggggctgctagccccgctgtccagtccttcagaagaattgtggaatag

SEQ ID NO: 193641 - DNA, 537 bp, Artificial Sequence
  derived and/or modified sequence
atgagtaagactggaaccaagattacgttttacgaggacaagaatttccaggggcgacgatatgactgcgattgcgattgtgccgacttccacacatatctgtctcgttgtaattccattaaagtggaaggtggtacatgggccgtgtacgaacgtcccaattttgctggatacatgtacattctccctcagggcgaataccctgaataccagcgctggatgggtcttaatgatcggctcagtagttgtcgagctgtgcacctgccctctggagggcagtataaaatacagatttttgagaagggcgatttcagcggtcagatgtatgaaacaaccgaggactgtccatctattatggaacagtttcacatgcgggagattcactcctgcaaggtgctggaaggagtctggatcttctacgaacttccaaattacaggggaaggcagtatttattagataagaaggaatatcggaagcctatcgactggggggcagcctcacctgccgtgcagtccttccgcaggattgtagagtag

SEQ ID NO: 193642 - DNA, 759 bp, Artificial Sequence
  derived and/or modified sequence
ctattctcatgactaagcaaatgtttgactgaaaccagcccatataaatgtcactgtgcctctaactctctgtagccattcctgaatttctttcagcactgggaaaaccagtctatgcaccaaaaatgtctaaaactggaaccaagattactttctatgaagacaaaaattttcaaggccgtcgctatgactgtgattgcgactgtgcagatttccacacatacctaagtcgctgcaactccattaaagtggaaggaggcacctgggctgtttatgaaaggcccaactttgctgggtacatgtacatcttaccacagggagagtaccctgaataccagcgttggatgggcctcaacgaccgcctcagctcctgcagagctgttcatctgcctagtggaggccagtataagattcagatctttgagaaaggggattttagtggtcagatgtatgaaaccaccgaagattgcccttccatcatggagcaatttcacatgcgagagatccactcctgtaaggtgctggagggtgtctggattttctatgagctacccaactaccgtggcaggcagtacctcctggacaagaaggagtaccggaagcccatcgattggggtgcagcctccccagctgtccagtctttccgccgcattgtggagtaatgacatgaatggggccatattcttcctggggcccaaatgctggctggccttgtggtccaaataggcatcatcaataaaacagttggcatgcatccca

SEQ ID NO: 193643 - DNA, 1132 bp, Artificial Sequence
  derived and/or modified sequence
cccgccaccacgcccggccaattttttttgtatttttagtagagacggggtttcaccgtgttagtcaggatggtctcgatttcctgacctcgtgatccgcccatctcggcctcccaaagtgctgggattacaggcgtgagccaccgtgcccagccttctgttctatttaagaactttgatttccattccattttcatttattactgtttaggccgaattttcgctaaacttctgactttcatataaacatattgcttatagaacatcagaagactcgtctttgtgatgcccaaatgaaaaagttggtgaagcactgggaaaaccagtctatgcaccaaaaatgtctaaaactggaaccaagattactttctatgaagacaaaaattttcaaggccgtcgctatgactgtgattgcgactgtgcagatttccacacatacctaagtcgctgcaactccattaaagtggaaggaggcacctgggctgtttatgaaaggcccaactttgctgggtacatgtacatcttaccacagggagagtaccctgaataccagcgttggatgggcctcaacgaccgcctcagctcctgcagagctgttcatctgcctagtggaggccagtataagattcagatctttgagaaaggggattttagtggtcagatgtatgaaaccaccgaagattgcccttccatcatggagcaatttcacatgcgagagatccactcctgtaaggtgctggagggtgtctggattttctatgagctacccaactaccgtggcaggcagtacctcctggacaagaaggagtaccggaagcccatcgattggggtgcagcctccccagctgtccagtctttccgccgcattgtggagtaatgacatgaatggggccatattcttcctggggcccaaatgctggctggccttgtggtccaaataggcatcatcaataaaacagttggcatgcatcccactgctgactataatgcctctccttaaatgcttctagggaccagcaatacagtgctcgccacagtgggcagtcacacaaagctacccatctgccagatcaccaatctagatctttgtgccaaacaaaatgagatctcattaaaaggttagaaagtcata

SEQ ID NO: 193644 - DNA, 537 bp, Artificial Sequence
  derived and/or modified sequence
atgagcaagaccggcaccaagatcaccttctacgaggacaagaacttccagggcagaagatacgactgcgactgcgactgcgccgacttccacacctacctgagcagatgcaacagcatcaaggtggagggcggcacctgggccgtgtacgagagacccaacttcgccggctacatgtacatcctgccccagggcgagtaccccgagtaccagagatggatgggcctgaacgacagactgagcagctgcagagccgtgcacctgcccagcggcggccagtacaagatccagatcttcgagaagggcgacttcagcggccagatgtacgagaccaccgaggactgccccagcatcatggagcagttccacatgagagagatccacagctgcaaggtgctggagggcgtgtggatcttctacgagctgcccaactacagaggcagacagtacctgctggacaagaaggagtacagaaagcccatcgactggggcgccgccagccccgccgtgcagagcttcagaagaatcgtggagtag

SEQ ID NO: 193645 - protein, 609 aa, Artificial Sequence
  derived and/or modified sequence
MESTAYPLNLSLKEEEEEEEIQSRELEDGPADMQKVRICSEGGWVPALFDEVAIYFSDEEWEVLTEQQKALYREVMRMNYETVLSLEFPFPKPDMITRLEGEEESQNSDEWQLQGGTSAENEESDVKPPDWPNPMNATSQFPQPQHFDSFGLRLPRDITELPEWSEGYPFYMAMGFPGYDLSADDIAGKFQFSRGMRRSYDAGFKLMVVEYAESTNNCQAAKQFGVLEKNVRDWRKVKPQLQNAHAMRRAFRGPKNGRFALVDQRVAEYVRYMQAKGDPITREAMQLKALEIAQEMNIPEKGFKASLGWCRRMMRRYDLSLRHKVPVPQHLPEDLTEKLVTYQRSVLALRRAHDYEVAQMGNADETPICLEVPSRVTVDNQGEKPVLVKTPGREKLKITAMLGVLADGRKLPPYIILRGTYIPPGKFPSGMEIRCHRYGWMTEDLMQDWLEVVWRRRTGAVPKQRGMLILNGFRGHATDSVKNSMESMNTDMVIIPGGLTSQLQVLDVVVYKPLNDSVRAQYSNWLLAGNLALSPTGNAKKPPLGLFLEWVMVAWNSISSESIVQGFKKCHISSNLEEEDDVLWEIESELPGGGEPPKDCDTESMAESN

SEQ ID NO: 193646 - protein, 209 aa, Artificial Sequence
  derived and/or modified sequence
MESTAYPLNLSLKEEEEEEEIQSRELEDGPADMQKVRICSEGGWVPALFDEVAIYFSDEEWEVLTEQQKALYREVMRMNYETVLSLEFPFPKPDMITRLEGEEESQNSDEWQLQGGTSAENEESDVKPPDWPNPMNATSQFPQPQHFDSFGLRLPRDITELPEWSEGYPFYMAMGFPGYDLSADDIAGKFQFSRGMRRSYDAGFKLMVV

SEQ ID NO: 193647 - protein, 524 aa, Artificial Sequence
  derived and/or modified sequence
MEFPFPKPDMITRLEGEEESQNSDEWQLQGGTSAENEESDVKPPDWPNPMNATSQFPQPQHFDSFGLRLPRDITELPEWSEGYPFYMAMGFPGYDLSADDIAGKFQFSRGMRRSYDAGFKLMVVEYAESTNNCQAAKQFGVLEKNVRDWRKVKPQLQNAHAMRRAFRGPKNGRFALVDQRVAEYVRYMQAKGDPITREAMQLKALEIAQEMNIPEKGFKASLGWCRRMMRRYDLSLRHKVPVPQHLPEDLTEKLVTYQRSVLALRRAHDYEVAQMGNADETPICLEVPSRVTVDNQGEKPVLVKTPGREKLKITAMLGVLADGRKLPPYIILRGTYIPPGKFPSGMEIRCHRYGWMTEDLMQDWLEVVWRRRTGAVPKQRGMLILNGFRGHATDSVKNSMESMNTDMVIIPGGLTSQLQVLDVVVYKPLNDSVRAQYSNWLLAGNLALSPTGNAKKPPLGLFLEWVMVAWNSISSESIVQGFKKCHISSNLEEEDDVLWEIESELPGGGEPPKDCDTESMAESN

SEQ ID NO: 193648 - protein, 491 aa, Artificial Sequence
  derived and/or modified sequence
MENEESDVKPPDWPNPMNATSQFPQPQHFDSFGLRLPRDITELPEWSEGYPFYMAMGFPGYDLSADDIAGKFQFSRGMRRSYDAGFKLMVVEYAESTNNCQAAKQFGVLEKNVRDWRKVKPQLQNAHAMRRAFRGPKNGRFALVDQRVAEYVRYMQAKGDPITREAMQLKALEIAQEMNIPEKGFKASLGWCRRMMRRYDLSLRHKVPVPQHLPEDLTEKLVTYQRSVLALRRAHDYEVAQMGNADETPICLEVPSRVTVDNQGEKPVLVKTPGREKLKITAMLGVLADGRKLPPYIILRGTYIPPGKFPSGMEIRCHRYGWMTEDLMQDWLEVVWRRRTGAVPKQRGMLILNGFRGHATDSVKNSMESMNTDMVIIPGGLTSQLQVLDVVVYKPLNDSVRAQYSNWLLAGNLALSPTGNAKKPPLGLFLEWVMVAWNSISSESIVQGFKKCHISSNLEEEDDVLWEIESELPGGGEPPKDCDTESMAESN

SEQ ID NO: 193649 - DNA, 1830 bp, Artificial Sequence
  derived and/or modified sequence
atggagtccactgcatatcccctgaacctgagccttaaggaagaagaggaggaagaagagattcagtcccgcgaattagaggacggtccagcagacatgcaaaaagtaagaatttgtagcgagggtggctgggtgccagctctgtttgacgaagtggccatctacttctccgatgaagaatgggaggttctgaccgagcaacaaaaggccttatacagagaggttatgaggatgaattatgagactgtgctctccttggagttcccgttcccaaaaccggacatgatcaccagactcgaaggcgaggaagagtcccaaaattccgatgagtggcaacttcagggcgggacatctgccgagaacgaagagtccgacgttaagcctcccgactggccgaaccccatgaatgcaacgagtcagttccctcaacctcagcactttgactcttttgggctgagactgcccagggatattaccgaactccccgaatggtcagagggctaccccttctatatggcaatgggttttccaggatacgacctgagcgcagacgatatcgcaggtaagtttcagttcagcagaggcatgagacggtcctatgacgccggattcaaattaatggtggtggaatatgccgagtcgaccaataactgtcaggctgccaagcagtttggcgtgctggagaagaacgtcagagattggcgcaaagtcaagccccaactccagaatgcccacgcaatgcgccgggcgtttagaggacctaagaacggtcgattcgccctcgtggatcagcgcgtggctgaatatgttcgctacatgcaagcgaagggagatcctatcacccgcgaagcaatgcagctcaaggccctagaaattgcacaggagatgaacattccagagaaagggttcaaagcaagtttggggtggtgccgaaggatgatgcgtaggtatgatttgtcactacggcataaggtcccggtgcctcaacatttgcccgaagatcttaccgagaagctggtgacttatcagcgcagtgttctcgctctgcggagagcccatgactatgaggttgcccaaatggggaatgctgacgagacccccatctgtctagaagtaccctcccgcgtcactgttgataaccagggggagaagccagtgctggtcaaaacccctggcagggaaaagttgaaaattactgccatgttaggcgtcctcgccgacggccgcaagcttcccccttatatcattctgcgtgggacctacatcccgccaggcaagtttccttctggaatggagattagatgtcacaggtacgggtggatgacagaagatcttatgcaggactggctcgaagtggtttggagacggcgaacaggggctgttcctaaacagcggggcatgctgatcctgaatggattccgcggtcatgccaccgacagtgttaaaaactcaatggagtccatgaacacggatatggtgatcatcccaggtggactgaccagccaactacaggtgcttgatgtggtcgtgtataagccactaaatgatagtgttagagctcagtatagcaactggttattggctggaaacctagcattatcccctactggcaatgccaagaagccaccccttggtctcttccttgagtgggttatggttgcatggaactccattagctccgagagtatcgtccagggattcaaaaagtgtcatatcagctcaaacttggaggaggaggatgatgtcctgtgggaaatcgaatccgagctgcctggcggcggggaacctccaaaagactgcgacaccgaaagtatggccgagtcgaactag

SEQ ID NO: 193650 - DNA, 1830 bp, Artificial Sequence
  derived and/or modified sequence
atggagtcgacggcatatcctttaaatctgagcctaaaggaagaggaggaggaagaggagatacaatccagggaactggaggatggacccgctgacatgcagaaggtgcgcatatgttcggaaggtggctgggtgcctgctctgtttgatgaagtggccatatatttcagtgatgaggaatgggaggtcctgaccgaacagcagaaagccttgtatagggaagtgatgagaatgaattacgagaccgtgctatctctggagttcccattccccaagccagacatgattactcgtctcgagggcgaggaggagtcccagaattcggacgaatggcagctgcagggcggcacatctgctgagaatgaagaatcagatgtcaagccccccgattggccaaatccaatgaatgcaaccagccagtttcctcagccccagcactttgatagcttcggattgcgtctgcccagagatataacagaactgcccgagtggagcgaagggtaccctttctacatggctatgggttttcccggatacgatctgtccgcggacgacattgcgggtaagtttcagttttcaagaggaatgcgccggtcgtatgatgcaggtttcaagcttatggtggtagaatacgccgagtcaacaaacaactgccaggcagcgaagcagtttggagtgctcgagaaaaatgtccgggattggcggaaggtgaagccccaactccagaacgctcacgccatgcgaagagcattccgggggcctaagaacggccggtttgccctggttgaccagcgcgtcgccgaatatgttagatacatgcaggccaagggggaccccattacccgggaggcgatgcagctgaaggcactcgaaatcgcccaagagatgaacattccggaaaaggggtttaaagcctcccttggatggtgtcgacgtatgatgcggcggtacgatttatccctcaggcataaggttccagttccccagcacctgcctgaagatttgactgaaaagcttgtcacgtatcaaagatcagtcctggcgctacggagggcccacgactacgaagtcgcccagatggggaatgctgacgagacccctatctgtctcgaagtgccctcccgggtgactgtggataatcagggtgagaaaccagtcctcgttaagacaccaggccgagaaaaacttaaaattaccgccatgcttggcgtgctggctgacgggcgcaaactgccaccttatataattttgaggggcacctatattccccctggcaaatttccctccggcatggagatccgctgtcacaggtacggctggatgacggaggacctgatgcaagactggctagaagtagtctggcgaaggcggaccggggcggtacccaagcagcgggggatgctgattctgaatgggtttcggggacatgctacagacagcgtcaagaacagtatggaaagcatgaacacagacatggtgataattccaggaggcctgactagccagctccaggtgttggatgtggtggtctataaaccactgaatgactcagtcagggcccagtacagcaattggctgctggctggcaatctggccctgtcacctactggaaatgctaaaaaacctcctctgggactgtttctagagtgggttatggtggcctggaactccatttcgagcgagagcatcgtccagggctttaaaaagtgccacatcagcagcaatctggaggaagaggacgacgtgctgtgggaaattgaaagtgaactgcccggagggggggagccccctaaggactgcgatacagagtcaatggctgagtctaactag

SEQ ID NO: 193651 - DNA, 6254 bp, Artificial Sequence
  derived and/or modified sequence
ggaaatatcgaaggaaccgactttgaactccagagggatcttttctttggaggttccccgatgcagccctcaagatgcatccgcactccacacctaggaattgcccgcgcccatagagggcaggagtgcggccctttgtactggccaagagtcagcgaatagagaatttgcagcccagaggcaatgggttatttccctgtcggggtgggccccagccgatttctgcacctttttgggtatccaggcataaccctcactatgtttcactgactcctgcgtttgcaaagtcccttaaggtagaatgaccctattttctgaaccagctcgtggacagaacctttgaatttggaaaatccagagatggagtccacagcctaccctctcaatttgagcctgaaagaagaggaagaggaagaagagattcagagccgggaactagaggacggcccggcagacatgcagaaagtacgaatctgctctgagggcggatgggtaccggccctatttgatgaggtggccatatatttttccgatgaggaatgggaagttttgacggagcaacaaaaggccctctaccgggaagtcatgaggatgaattatgaaactgtcctgtccctggaattcccattccctaagccagacatgatcacccgtttggaaggggaggaggagtctcagaattctgacgagtggcagctccaaggaggcacctctgcagaaaatgaagaatctgacgtaaagcctccagactggccaaacccaatgaatgctacctcccagtttcctcagcctcagcactttgacagctttggcctccgtctgcctcgggatatcacagagctgcccgagtggagtgaggggtaccccttctacatggccatgggcttcccagggtatgacctctcggctgatgacatagctgggaagtttcagttcagccggggcatgcgccgcagttacgacgcagggttcaagctgatggtagtggaatatgctgagagtaccaacaactgccaggctgccaagcagtttggagtattggaaaaaaacgttcgagactggcgcaaagtgaagccacagcttcaaaacgcccacgccatgcggcgggcattccgaggccccaagaatgggaggtttgctctggtggaccagcgtgtggccgaatatgtcagatacatgcaggccaaaggggaccccatcacccgggaggcgatgcagctgaaagctctcgaaatcgcccaggaaatgaacattccagagaaagggttcaaggcaagcttgggttggtgtcgaagaatgatgagaaggtatgacctgtctctgaggcataaagtgcccgtgccccagcacctgccggaagacctgactgagaaactcgtcacttaccagcgcagtgtcctggctctgcgcagggcgcatgactatgaggtagctcagatggggaatgcagatgagacgcccatttgtttagaggtgccatcacgggtaactgttgataaccagggcgaaaagcctgtcttggtcaagacaccaggcagggaaaaactgaaaatcacagcaatgcttggtgtcttggctgatgggaggaagttaccaccgtacatcattttgaggggaacatatatccccccggggaagtttcccagtgggatggaaattcgctgccaccggtatgggtggatgactgaagacttgatgcaggactggttggaagtggtgtggagacggaggacaggagcagtgcccaagcagcgagggatgctgatcttgaatggcttccggggccatgccacagattccgtgaagaactccatggaaagcatgaacactgacatggtgatcatcccagggggtctgacctcacagcttcaggtgctggatgtcgtggtctacaagccactgaatgacagtgtgcgggcccagtactccaactggcttctggctgggaacctggcgctgagcccaaccgggaatgctaagaagccacccctgggcctctttctggagtgggtcatggtcgcgtggaatagcatctcaagtgagtccatcgtccaagggttcaagaagtgccatatctccagcaacttggaggaggaagacgatgtcctgtgggaaatcgagagtgagttgccaggaggaggagaaccaccaaaagattgtgacaccgaaagcatggctgagagcaactgaagggaaagggaaaggtaaccactcaggagtagatactcagtgcctttgctgacatgtctgtgttctacaaacaccttctctccattatttttctgtttttaagttcccttagagcctacagtgcagtagtgtagatcaggggtccccaacccccaggtcacggaccatactggtccatggcctgtcaggaactgggctgcacagcaggaggtgagcggcaggtgagcaagcattaccacctgagctccgcccgctgtcacagcagcggcattagattctcataggagcacaaaccctgttgtgaactgcacatgtgagggatctaggttgcaggctcctcaatgcctgaggatctgaggcggaacagtttcatcccaaagccatcctaccacccactaccccgcacttcctgggtccctgcaaaaattgtcttccatgaaaccagtccctggtgccagaaaagttggggactgctggtatagataacagaccattagcattttctcctttatatgaaacatttattatttgatttatttgtgtctattttgctctgtggcttggacccagaaacacttgtataataggtgaaatgaacaaagaatgagctgccagaacatctgagagctgtaaagttaaaattatttggacccaaagaagcatagtctgacgttgttcagttcacacaaaattttgtctgaaaagccaacttttttctttcccttttaaattatgctgaacatttagggccagtatgtgtaactgacatgctgggacagttgtactcacttttgctggcctgtaggactgtgacatagggagaacactaagtgtgtcctccgggcctcgggtctcagtcctggagctatctacagtatgttaccagcgagtaagaataatagcttctacttgcttttccctacagagttcaggagttttaaaacgtcatcttagtctcattatgaccttcacatgggctatgacaataatttcctgtagtcagcagatgtctgaaggaagatattttttaactgaatctttacaccaaaaaaagaaaataaaacggtgcgtatctaggactctagtgagggctgaggacaataggcctggaattttctgggttgagtacacaagaagaacagctttcaaaggaaagtaggaatggaggcctaactgagacaacactagtgaaatgaccccacccacctacacctccagagaggaggaggatgagcatgtacagcaggggggacacccacaaagaacaaacaattcatttacctgttcgttctcatctccctaattataaattaaattgatcctccagacagtgttttatatgaaggaagaagccaccttttttacagaggacctgaaaccgtcaaccatcttcacacattctttttctttcttttaaagtataattaggtatttccatcttccttgcttttttctccaaatgaaatgctaatgggagccttattttacccacttcagctatataagtccatctgtgtttcaaagagtgacttatgtctcctgccttgcttccaaattaaattgtactcatattgctgaatcccattgtaattctgggatccctggaattacaatggagcaagaagttcttactattacattcaaaatcaccaaaattgcttttttttcccccttgggtcctccttgctttgagaaaccccatgaatccagcctcccttttctgctgacccttatattgcctgcattggatatcaaactgaattacattgagtttccatcttttcttcatttaccttttgcttttccctctccttgttagataacatttttgtgcacttttaatttcctaagctccttaccacctcagggacatgattaaaaacttccagaagaggaaaggagaaaaagctatgctaagttgcatttatgaatgttggcctgtaatattggtcatgagcttttgctcttctagtctgccacaattctctctgcagctcctgaggaagtgatgggagtagacagattcacagtgaacaagagatttgggagaccaagtgggcataaaactacgtcttggcctctatttggaaatctgaatgatggaattattatgtttgttaaaagttataccaaaaagccaagggttaattcatttaggttctctctgttttccagcaaatggaactctgatttaaacagctggggatgaaattcctcaagatgattattcctgaaagtgtggatgcgctggatgcgcagggaacatcaggaaaaggccacggggctctgaacagccccggtccagacagcagcctgtacatccatcccaggacacagcccagcccctccccacaccatacaaggtatcagaaaagtctaggacctatcatttcatcagagacatgatcagaaaagaaactgcttctgccccatttcttgttttggagattactccatctgtccatcaaaagaaacctgtaaatatgaaagaacaaaggttatttcctggagaaaagacaatttattcaacaccaacgagggactcatcatatgggcacaactctggtgtccttctatggagaaaacctcaagtaaagttttattctgcctttgaaaatgcttccaaaagtagaccctgtccccacacaggtcaagactacagagaaggctttgtagaaatgtgtcacctatgtacacctgctacttacacatttcctcttttggaaaaatgagatacttagaataacaagaaaattaagacatactggcctggtgccagcagatggcttttctatagacaaactaggttagtgtggaagatataggttaaaataaactatgctgttttatttatcttcccaacctgattggcagctagacttttttagggtctcatttaatggccctgtttttttcattattatatttaatgatagggcaggatttcgtatgcaagctcttgtttctcaggctgcctgcagaagaagtcgctataaattatctgttgtctacatggtacaaggcccattgactcatctgatgcttgttttgttaatttctttaatatttttatcacggggcagtgggagggcttgggcttttagccacagctgttttaagacttctgatctcctgccctgcaggaataggtgggaagtcattgaatttttacactatagtaatttgcattcccacataagtttgagtgttacgaaaacattcctttaaagggatctgtgctacacaaaatatgccaggacctcacagacaaagccattgctagaaatgtcattccaatgatcagatctggaaacaggctgccataaccacttttccttcttgtagactcagctcacctgtatatttaaactgttcttggcatcttgaaacacctatttctactcaggtactcattgtcctgttactgattcacctttctgatccttttcaaccagttttcccccaaggggggaaattttacttaacctctagtatttgaacaactcaatatttgaattgttgccccatttgcttttacctgtactgtattcttggtcatctcaaatggcgtctaaacccagctactttgcattccagaagtttccattccctccaattccacctaatttttcatctgtcctagttactggctctttcttcatgtcttatttctcttgctttgggagcttaaaagattttacaagacctaattttgggttccttccttggagccatagttaccctgccaagaagagtagaaaatgggttcaactcctgtttcgctccaccaacacctctgtgagtctcatcatcagctgagcgatgatgccttacaggttgcatagcactggaactttcctagagtaacggctctgctgccagggtttctctgggctcattcttccactgacttaattatgatctatgcctaacagagccccagtacaactattttgcagaatggctgttaccctagaattactatagcacatattgagatatagttgtactccctagtagataggaactgaccccaacaataaactttgataataaagacaata

SEQ ID NO: 193652 - DNA, 5754 bp, Artificial Sequence
  derived and/or modified sequence
accctccctcctcccaccacgtgtcctccccgctccctcccgaggggccgcgcgcacgggaggacggagaggcggaaaggatggcgctgtgacagccgggccggagccctcgcgtccccaccccgcgccctggccgctgggcccggcgagatggagtccacagcctaccctctcaatttgagcctgaaagaagaggaagaggaagaagagattcagagccgggaactagaggacggcccggcagacatgcagaaagtacgaatctgctctgagggcggatgggtaccggccctatttgatgaggtggccatatatttttccgatgaggaatgggaagttttgacggagcaacaaaaggccctctaccgggaagtcatgaggatgaattatgaaactgtcctgtccctggaattcccattccctaagccagacatgatcacccgtttggaaggggaggaggagtctcagaattctgacgagtggcagctccaaggaggcacctctgcagaaaatgaagaatctgacgtaaagcctccagactggccaaacccaatgaatgctacctcccagtttcctcagcctcagcactttgacagctttggcctccgtctgcctcgggatatcacagagctgcccgagtggagtgaggggtaccccttctacatggccatgggcttcccagggtatgacctctcggctgatgacatagctgggaagtttcagttcagccggggcatgcgccgcagttacgacgcagggttcaagctgatggtagtggaatatgctgagagtaccaacaactgccaggctgccaagcagtttggagtattggaaaaaaacgttcgagactggcgcaaagtgaagccacagcttcaaaacgcccacgccatgcggcgggcattccgaggccccaagaatgggaggtttgctctggtggaccagcgtgtggccgaatatgtcagatacatgcaggccaaaggggaccccatcacccgggaggcgatgcagctgaaagctctcgaaatcgcccaggaaatgaacattccagagaaagggttcaaggcaagcttgggttggtgtcgaagaatgatgagaaggtatgacctgtctctgaggcataaagtgcccgtgccccagcacctgccggaagacctgactgagaaactcgtcacttaccagcgcagtgtcctggctctgcgcagggcgcatgactatgaggtagctcagatggggaatgcagatgagacgcccatttgtttagaggtgccatcacgggtaactgttgataaccagggcgaaaagcctgtcttggtcaagacaccaggcagggaaaaactgaaaatcacagcaatgcttggtgtcttggctgatgggaggaagttaccaccgtacatcattttgaggggaacatatatccccccggggaagtttcccagtgggatggaaattcgctgccaccggtatgggtggatgactgaagacttgatgcaggactggttggaagtggtgtggagacggaggacaggagcagtgcccaagcagcgagggatgctgatcttgaatggcttccggggccatgccacagattccgtgaagaactccatggaaagcatgaacactgacatggtgatcatcccagggggtctgacctcacagcttcaggtgctggatgtcgtggtctacaagccactgaatgacagtgtgcgggcccagtactccaactggcttctggctgggaacctggcgctgagcccaaccgggaatgctaagaagccacccctgggcctctttctggagtgggtcatggtcgcgtggaatagcatctcaagtgagtccatcgtccaagggttcaagaagtgccatatctccagcaacttggaggaggaagacgatgtcctgtgggaaatcgagagtgagttgccaggaggaggagaaccaccaaaagattgtgacaccgaaagcatggctgagagcaactgaagggaaagggaaagcaaatggaactctgatttaaacagctggggatgaaattcctcaagatgattattcctgaaagtgtggatgcgctggatgcgcagggaacatcaggaaaaggccacggggctctgaacagccccggtccagacagcagcctgtacatccatcccaggacacagcccagcccctccccacaccatacaaggtatcagaaaagtctaggacctatcatttcatcagagacatgatcagaaaagaaactgcttctgccccatttcttgttttggagattactccatctgtccatcaaaagaaacctgtaaatatgaaagaacaaaggttatttcctggagaaaagacaatttattcaacaccaacgagggactcatcatatgggcacaactctggtgtccttctatggagaaaacctcaagtaaagttttattctgcctttgaaaatgcttccaaaagtagaccctgtccccacacaggtcaagactacagagaaggctttgtagaaatgtgtcacctatgtacacctgctacttacacatttcctcttttggaaaaatgagatacttagaataacaagaaaattaagacatactggcctggtgccagcagatggcttttctatagacaaactaggttagtgtggaagatataggttaaaataaactatgctgttttatttatcttcccaacctgattggcagctagacttttttagggtctcatttaatggccctgtttttttcattattatatttaatgatagggcaggatttcgtatgcaagctcttgtttctcaggctgcctgcagaagaagtcgctataaattatctgttgtctacatggtacaaggcccattgactcatctgatgcttgttttgttaatttctttaatatttttatcacggggcagtgggagggcttgggcttttagccacagctgttttaagacttctgatctcctgccctgcaggaataggtgggaagtcattgaatttttacactatagtaatttgcattcccacataagtttgagtgttacgaaaacattcctttaaagggatctgtgctacacaaaatatgccaggacctcacagacaaagccattgctagaaatgtcattccaatgatcagatctggaaacaggctgccataaccacttttccttcttgtagactcagctcacctgtatatttaaactgttcttggcatcttgaaacacctatttctactcaggtactcattgtcctgttactgattcacctttctgatccttttcaaccagttttcccccaaggggggaaattttacttaacctctagtatttgaacaactcaatatttgaattgttgccccatttgcttttacctgtactgtattcttggtcatctcaaatggcgtctaaacccagctactttgcattccagaagtttccattccctccaattccacctaatttttcatctgtcctagttactggctctttcttcatgtcttatttctcttgctttgggagcttaaaagattttacaagacctaattttgggttccttccttggagccatagttaccctgccaagaagagtagaaaatgggttcaactcctgtttcgctccaccaacacctctgtgagtctcatcatcagctgagcgatgatgccttacaggttgcatagcactggaactttcctagagtaacggctctgctgccagggtttctctgggctcattcttccactgacttaattatgatctatgcctaacagagccccagtacaactattttgcagaatggctgttaccctagaattactatagcacatattgagatatagttgtactccctagtagataggaactgaccccaacaataaactttgataataaagacaataggctatggtgattttatttctttacctattagcattgtgaaaagttacattcaaggtattggctacaccttattctccatccggtttggtaccaatatattacatctttcagtcaaaaagtgttcatgagatgcagtgtaagtaatattggtatctgtgaagacacagggaagaacgtgtgcagtggggcaagtttgacataaatagcttttttcctcagtcatgttttgtatgctctcagcagtggtacattaccaaaatcacatgaaagaaatcccataaagggatctgaattttaaatgaaagtatgatgaacccgcaagtcttaattatgcacttttaataaaattagtcctgacaatttacagtgcccataaagtagtagttgattctccaggaataatctggcagtgttatttttccttttcaacccatcagcattaaatgctgagccactctccaagtctgacccctagactaagcttccttactcttactcttcctcccagaggcattttggaatgagtcaaaggcatggtaggacacggcatttacctgtggtcatcacttcaggcaatggaaaggaaaagtgtttgtccttggttgatcagagaagtgggtgataagaacgtgctaaataacaaacctgcacacttgtacctctgaacctaaaatgttttttttttaattcagaacaacaaaagaacatgctaagcgagtcctcccacctgcctggtaaaatacagccagctttatcacacctggttttgcacagtgataaattcctgcaggaaaaaataagttttattctaagtctgaaattatatggtttccaacagctttttccctcgttaaaataattatttttctacatgatgcttgataataagcatttgtttcttaacctaattagagaagcgattgcactcgagtccccacagctggcagtggtgttacagatggaaccagcctttggtggacagagttcagatgtttcaggggctcttgtgaaaatgctaagtattactgtttctaccttactgccctgcactttaccccatcatctcccctccttagaaaatgatttcataggaaaattggcatggagagcagatagtagagtgtagacctgaaatacatgaggcaaaggcagtcttccagcattctatggtcccaccaggtgggtaggtgactaggaattcaggccaggtcctagagagtagtgagaagttttccagtttgcagtttcctctgtgctgtatgtacagccatacagcctatggaacctgacattgcagtgggcagcaggacacggtcaaggctcctagctgcctctccatctatggaactatgaaatttcacacatattccctaggcagcattaaggcccaggtatattgagtagtccaaaccaaaaaactatattcgagtatcagtttaaattcttccaagccctaaaaattcttacgtagtttctcacctaaaactaatggcttgtgccaagaactgaaactaagctattgatttttttttaagaagtcttaatctatacataagaaattacatacctggccaggtgcagtagttcaggcctgtaatcctaacaaacactctgggaggccaaggtgggcagactgcttgagctcaggagttcattaccagtctgggcaacatgataaaaccgtgtctttacaaaaaaaaaaaattttaaattagccgggcatggtggtgtgaatctgtagtcccagctacttaggaggttgcgatgggagaatcacctgagcccagaggtccagtctgcagtgagccatgatcacaccacagcactccagctggggtgacagagtgagaccctatctcaaaaagaaaag

SEQ ID NO: 193653 - DNA, 1830 bp, Artificial Sequence
  derived and/or modified sequence
atggagagcacagcctaccccctgaacctgagcctgaaggaggaggaggaggaggaggagatccagagccgggagctggaggatggccctgctgacatgcagaaggtgcgcatctgcagcgagggcggctgggtgcctgccctgtttgatgaggtggccatctacttcagtgatgaggagtgggaggtgctgacagagcagcagaaggccctgtaccgggaggtgatgaggatgaactatgagaccgtgctgagcctggagttccccttccccaagccagacatgatcacccggctggagggggaggaggagagccagaacagtgatgagtggcagctgcagggcggcaccagcgcagaaaatgaggagagtgatgtgaagcccccagactggcccaaccccatgaatgccaccagccagttcccccagccccagcactttgacagctttggcctgcggctgccccgggacatcacagagctgcctgagtggagcgagggctaccccttctacatggccatgggcttccctggctatgacctgtctgcagatgacattgctgggaagttccagttcagccggggcatgagaagaagctatgatgctggcttcaagctgatggtggtggagtatgcagagagcaccaacaactgccaggccgccaagcagtttggagtgctggagaagaatgtgcgggactggaggaaggtgaagccccagctgcagaatgcccacgccatgaggcgggccttccggggccccaagaatggccgctttgccctggtggaccagagggtggccgagtatgtgcgctacatgcaggccaagggggaccccatcacccgggaggccatgcagctgaaggccctggagatcgcccaggagatgaacatccctgagaagggcttcaaggccagcctgggctggtgcaggaggatgatgagaagatatgacctgagcctgcggcacaaggtgcctgtgccccagcacctgcctgaggacctgacagagaagctggtgacctaccagaggtctgtgctggccctgcggcgggcccatgactatgaggtggcccagatgggaaatgctgatgagacccccatctgcctggaggtgcccagccgggtgacagtggacaaccagggcgagaagcctgtgctggtgaagaccccaggccgggagaagctgaagatcacagccatgctgggcgtgctggctgatggcaggaagctgcccccctacatcatcctgcggggcacctacatccccccaggcaagttccccagcggcatggagatccgctgccacagatatggctggatgacagaggacctgatgcaggactggctggaggtggtgtggaggagaagaactggagctgtgcccaagcagaggggcatgctgatcctgaatggcttccggggccacgccacagacagcgtgaagaacagcatggagagcatgaacacagacatggtgatcatccctgggggcctgaccagccagctgcaggtgctggatgtggtggtgtacaagcccctgaatgattctgtgcgggcccagtacagcaactggctgctggccggcaacctggccctgagccccactggaaatgccaagaagccacccctgggcctcttcctggagtgggtgatggtggcctggaacagcatcagcagcgagagcatcgtgcagggcttcaagaagtgccacatcagcagcaacctggaggaggaggatgatgtgctgtgggagattgagagcgagctgcccggcggcggggagccccccaaggactgtgacacagagagcatggccgagagcaactag

SEQ ID NO: 193654 - DNA, 1830 bp, Artificial Sequence
  derived and/or modified sequence
atggagagcaccgcctaccccctgaacctgagcctgaaggaggaggaagaagaagaagaaattcaaagtagggagcttgaagatgggcctgcagatatgcagaaggtgaggatatgcagtgagggaggctgggtgcctgcattgttcgatgaagtagcgatctatttctctgacgaggagtgggaggtactgacagagcaacaaaaggcgttgtaccgggaggttatgagaatgaactacgagactgttctgtctctggaattcccgttcccaaagcctgatatgatcaccagactcgaaggcgaggaggagtcacagaacagcgacgagtggcagctacagggtggcacctctgcagaaaacgaggagtccgacgttaaacctcccgattggccaaacccgatgaatgcaacctcccagttcccccagccccagcacttcgattcttttgggctccgcctgccccgtgacatcaccgaattgcctgagtggagcgaaggctatccattttacatggccatgggcttcccaggatatgacctctccgccgatgatatcgcagggaagtttcagtttagcaggggcatgaggcgctcctacgacgccggtttcaaactgatggttgtcgaatacgcggagagtactaacaactgccaggcggcgaagcaattcggcgtgctggaaaagaacgtgagggactggcggaaggtgaaaccacaattgcagaacgcacatgccatgagaagagcctttcgagggcccaagaatggccgatttgccttggtggaccaaagggtggcggagtacgtcaggtatatgcaggccaagggagatcctataacccgcgaggccatgcagcttaaggccctcgaaattgcccaggagatgaatataccagagaaaggttttaaagctagcttaggctggtgcaggcgcatgatgcgtaggtacgatttatccctgcggcataaagttcccgtaccccagcatctgcctgaagacttgacagagaaactggttacataccaaagaagcgtcctcgccttacggcgagcacatgattacgaagtggcccagatgggcaatgccgacgaaactcccatttgtctggaagtacctagccgggtgactgtggacaaccagggagagaagccagtgttggttaagacacccggtcgtgaaaaattaaagattaccgctatgctgggtgtccttgccgacggcaggaaactgcccccgtacatcatactgcgagggacatatatcccacccgggaagtttccttccggtatggaaattagatgccataggtatgggtggatgacagaggatctgatgcaggattggcttgaggtggtctggcgtaggaggacaggagctgttcccaagcagcgagggatgttgatcctgaacggctttaggggccacgctacagacagtgttaaaaactctatggagagcatgaatacagatatggtgatcatcccaggggggctgacttcacagttgcaagtgctggatgtagtggtctacaaaccactcaatgattccgtgcgtgcacagtactccaactggctgttagccggcaatctagccctctcacccactggcaacgccaagaaaccaccgctggggctgtttttagagtgggtaatggttgcctggaacagtattagttctgaatcaattgtccaaggatttaaaaagtgccatattagttctaacctggaagaggaagatgatgtgttatgggagatagagtcggaactcccgggtggcggcgaaccacccaaagattgtgacacggagtcgatggcggagagcaactag

SEQ ID NO: 193655 - DNA, 1830 bp, Artificial Sequence
  derived and/or modified sequence
atggagagcaccgcctaccccctgaacctgagcctgaaggaggaggaggaggaggaggagatccaatctcgggaacttgaggacggccccgcagacatgcaaaaggtgcgcatttgtagtgaaggcggctgggtcccagccctgttcgatgaggtcgccatttatttcagcgatgaggagtgggaggtgcttacagaacaacagaaagcattatatagggaagtgatgaggatgaactatgagacagtgctgtcactagagttcccttttcccaaacctgacatgatcacaagactcgagggtgaagaggaatctcaaaattcagacgagtggcagctacagggaggcactagcgccgaaaatgaggaatccgatgtgaaacctccggactggcccaaccctatgaacgccacgtcccaattccctcagccacagcattttgattctttcggtctgaggcttccaagagatattaccgagttgcctgagtggagtgaagggtacccattttacatggcaatgggtttccctggttacgacctgagcgctgatgatattgccggaaagttccaattttcccgtggaatgcggaggtcttacgacgcaggcttcaagctcatggttgttgagtacgccgagagtaccaacaactgtcaggccgccaagcagttcggggtgttggaaaagaacgtgagggattggaggaaagtgaaaccccaacttcaaaacgctcatgctatgaggagagcattccgtggaccaaaaaacggccggttcgccctggtggaccagagagtggctgagtatgtgcggtacatgcaggccaaaggggacccaattaccagggaggcaatgcagcttaaggcactcgaaatagcgcaggagatgaacattcctgagaagggcttcaaggcttctctcggatggtgccggcggatgatgaggcggtatgatctcagtttgcgccataaggttcccgtcccacagcatttacccgaagaccttacggagaaactcgtgacctaccagaggagcgttctggcgctgagaagggctcatgactatgaagtggctcaaatgggtaacgcagatgaaactcctatctgtctggaagtgccatcccgggtcaccgtggataaccagggcgaaaagcctgtgctcgtgaaaaccccggggcgggagaagctaaagatcactgcgatgctgggggtcctggccgatggccgaaagttgccaccctacataattttgcgggggacttatatccccccgggcaagtttccttcaggaatggaaattaggtgtcatcgatatgggtggatgactgaggatctcatgcaggattggctggaggtggtgtggaggaggcgtactggtgcagtgccaaaacaacggggaatgttgatcctgaatggttttcggggacatgcgactgattccgtgaagaattctatggagagtatgaatacagatatggtgatcatacccggtggtctaacatcccagctgcaggttctcgatgtagtcgtttacaaacctctgaatgactctgtgcgtgcccagtattctaattggctgctcgccggcaacctggccttatctccaacgggcaacgccaagaaacccccactgggcctgttcctggagtgggttatggtggcttggaactcaatctccagcgagtctatcgtgcagggctttaagaagtgccatatctcaagcaacctcgaagaggaagatgacgtgttgtgggagatcgagtctgaattaccagggggaggcgaaccaccaaaggattgcgataccgagtctatggccgaatcaaattag

SEQ ID NO: 193656 - DNA, 1830 bp, Artificial Sequence
  derived and/or modified sequence
atggagtccaccgcttatcccctgaatttaagtttaaaagaagaggaagaagaggaggagattcaatctcgggagctggaggacgggccagcagacatgcaaaaagtgcgtatctgcagtgagggtggttgggtgcctgccctcttcgatgaagtggctatttatttcagcgatgaggaatgggaagtattgacagaacaacagaaagcattgtaccgggaggtgatgaggatgaactacgaaacagtgttgtccctcgaattcccattccccaaaccggacatgattactcgcctcgagggtgaagaagaatcccagaattccgatgagtggcaactgcaaggtggaactagcgcagagaacgaagagagcgatgtgaaaccccctgactggccgaacccaatgaatgcaacgtcacagtttccccaacctcagcatttcgactccttcggactgaggcttccgagagatatcactgagctgcccgaatggtccgaaggataccctttttacatggccatggggtttcccggttatgacctctcggcggatgacattgcgggaaagttccagttctcccggggaatgagacgatcttatgacgcgggtttcaagctgatggtggttgagtatgccgagtctacaaataactgccaggctgccaagcagttcggagtgttggagaagaatgtgcgagattggcggaaagtgaaaccccaattgcagaatgcccatgccatgcggagagccttccggggacccaaaaatggtcggtttgccttggtggatcagcgagtagctgaatatgtgcgatacatgcaggccaagggtgatcctatcactcgtgaagccatgcagctcaaagccctggaaatcgcccaggagatgaacatacctgaaaaaggcttcaaggcttcactgggctggtgcaggcggatgatgcggagatacgacctgtctctccggcacaaggtccccgtaccacaacatcttccagaagacctcacagagaaattagtgacctaccagaggtcagtcctagccctcagacgggcacatgactacgaagtggcacagatgggaaacgcagatgagactcccatctgcttagaggttccatccagagtcaccgtagataaccagggagagaagcctgtactggtgaagaccccaggacgagagaagctcaaaatcacagctatgctcggggttctggccgatggcagaaagctcccgccatacattatcctgagggggacctatattcctcctggcaagttcccgagcggaatggagatcagatgtcatagatatggatggatgaccgaagatctgatgcaggactggctggaggttgtctggagacgaaggactggggctgtacctaaacagcgagggatgttgatactgaatggcttccggggtcacgcaacagacagcgtcaagaactccatggagtccatgaatactgatatggttatcataccagggggtttgacttctcagctccaagtactggacgttgtggtgtacaagccacttaacgactcagtaagggcccagtattcaaactggctcctggccggaaatctcgcgctgagccctactgggaacgctaaaaagcccccattgggactatttctagagtgggtcatggttgcatggaattctatctcctcagaatctatagtacagggattcaagaagtgccatatttcctccaaccttgaggaagaagacgacgtgctttgggaaatcgagtctgagctccctggcggaggggagcctcccaaggattgtgacaccgagtccatggccgagtccaattag

SEQ ID NO: 193657 - DNA, 1830 bp, Artificial Sequence
  derived and/or modified sequence
atggaatctactgcatacccgttgaacctctccctgaaagaggaagaggaggaagaagagatccaatccagagaacttgaagatggccctgctgacatgcagaaagtccgaatttgcagcgaggggggatgggtgcctgctctgttcgatgaagtcgctatttatttcagcgatgaggagtgggaggtgcttaccgagcaacagaaagcattgtatcgagaagtcatgcggatgaattacgaaactgttctctcactggagtttcccttccccaagccagacatgatcactcgactcgaaggtgaggaagaatcccagaacagcgatgagtggcagctgcagggcggtacttcagccgagaacgaggagagcgacgtcaagcctccagattggcctaatcctatgaacgctacctcgcagtttcctcagccacaacatttcgattctttcggtctgcgcctgcctcgtgacataaccgagctgccagaatggtccgaagggtacccgttttacatggcaatggggtttcctgggtacgacctctcggccgacgatatagccggtaagttccagttttccagaggaatgcggcgtagctacgatgctggatttaaactgatggttgtcgagtacgccgagagtaccaataactgtcaggcagccaagcagtttggggtgctcgagaaaaatgtccgggactggcgtaaagttaagcctcagcttcagaacgcccacgccatgcgccgagccttcagggggccaaagaacggcaggtttgcgttggtcgaccagcgagttgctgagtacgtgcgttacatgcaagccaagggggacccaatcactcgcgaggctatgcagttgaaggccctggagatcgcacaggagatgaatatccccgaaaagggcttcaaggcaagccttggctggtgtcggcgaatgatgcgtaggtacgatctgtctcttcggcataaggtcccggtgccccagcacctccccgaagacctgacagagaaattagttacataccagagatcggtgcttgcgctccgtcgtgctcatgactacgaggttgctcagatggggaacgctgacgagactcccatctgtctggaggtcccgagtagagttaccgtggacaatcagggcgagaaaccggtcctcgtgaaaactcccggtagagagaaactgaaaattacggccatgctaggcgtgttagccgatgggagaaaattgccgccatacatcatcctcagggggacatacataccaccaggcaagttcccttccggaatggagattaggtgtcatcgctacggatggatgacggaggacctcatgcaggactggcttgaggtggtgtggcgtcgcaggactggggcagtaccgaaacagaggggaatgcttatccttaacggttttaggggccacgccacagatagcgtgaagaatagcatggaaagtatgaacaccgatatggtcataatcccaggaggccttaccagccaactacaagtcctcgatgtagttgtgtacaaacctctaaacgacagtgtccgcgcacagtattctaattggctactagctgggaaccttgcactttccccaaccggaaacgccaaaaagcctcccctgggtttgtttctggagtgggttatggttgcctggaacagtatttcttctgaatcaatcgttcaaggttttaagaaatgccacatcagttccaatctcgaggaagaagacgatgtcctgtgggagatcgagtccgaactgccgggtggaggggagccgcctaaggactgcgacaccgagtccatggccgagtccaactag

SEQ ID NO: 193658 - DNA, 1830 bp, Artificial Sequence
  derived and/or modified sequence
atggagagcaccgcctaccccctgaacctgagcctgaaggaggaggaggaggaggaggagatccagagcagagagctggaggacggccccgccgacatgcagaaggtgagaatctgcagcgagggcggctgggtgcccgccctgttcgacgaggtggccatctacttcagcgacgaggagtgggaggtgctgaccgagcagcagaaggccctgtacagagaggtgatgagaatgaactacgagaccgtgctgagcctggagttccccttccccaagcccgacatgatcaccagactggagggcgaggaggagagccagaacagcgacgagtggcagctgcagggcggcaccagcgccgagaacgaggagagcgacgtgaagccccccgactggcccaaccccatgaacgccaccagccagttcccccagccccagcacttcgacagcttcggcctgagactgcccagagacatcaccgagctgcccgagtggagcgagggctaccccttctacatggccatgggcttccccggctacgacctgagcgccgacgacatcgccggcaagttccagttcagcagaggcatgagaagaagctacgacgccggcttcaagctgatggtggtggagtacgccgagagcaccaacaactgccaggccgccaagcagttcggcgtgctggagaagaacgtgagagactggagaaaggtgaagccccagctgcagaacgcccacgccatgagaagagccttcagaggccccaagaacggcagattcgccctggtggaccagagagtggccgagtacgtgagatacatgcaggccaagggcgaccccatcaccagagaggccatgcagctgaaggccctggagatcgcccaggagatgaacatccccgagaagggcttcaaggccagcctgggctggtgcagaagaatgatgagaagatacgacctgagcctgagacacaaggtgcccgtgccccagcacctgcccgaggacctgaccgagaagctggtgacctaccagagaagcgtgctggccctgagaagagcccacgactacgaggtggcccagatgggcaacgccgacgagacccccatctgcctggaggtgcccagcagagtgaccgtggacaaccagggcgagaagcccgtgctggtgaagacccccggcagagagaagctgaagatcaccgccatgctgggcgtgctggccgacggcagaaagctgcccccctacatcatcctgagaggcacctacatcccccccggcaagttccccagcggcatggagatcagatgccacagatacggctggatgaccgaggacctgatgcaggactggctggaggtggtgtggagaagaagaaccggcgccgtgcccaagcagagaggcatgctgatcctgaacggcttcagaggccacgccaccgacagcgtgaagaacagcatggagagcatgaacaccgacatggtgatcatccccggcggcctgaccagccagctgcaggtgctggacgtggtggtgtacaagcccctgaacgacagcgtgagagcccagtacagcaactggctgctggccggcaacctggccctgagccccaccggcaacgccaagaagccccccctgggcctgttcctggagtgggtgatggtggcctggaacagcatcagcagcgagagcatcgtgcagggcttcaagaagtgccacatcagcagcaacctggaggaggaggacgacgtgctgtgggagatcgagagcgagctgcccggcggcggcgagccccccaaggactgcgacaccgagagcatggccgagagcaactag

SEQ ID NO: 193659 - protein, 370 aa, Artificial Sequence
  derived and/or modified sequence
MLPRLICINDYEQHAKSVLPKSIYDYYRSGANDEETLADNIAAFSRWKLYPRMLRNVAETDLSTSVLGQRVSMPICVGATAMQRMAHVDGELATVRACQSLGTGMMLSSWATSSIEEVAEAGPEALRWLQLYIYKDREVTKKLVRQAEKMGYKAIFVTVDTPYLGNRLDDVRNRFKLPPQLRMKNFETSTLSFSPEENFGDDSGLAAYVAKAIDPSISWEDIKWLRRLTSLPIVAKGILRGDDAREAVKHGLNGILVSNHGARQLDGVPATIDVLPEIVEAVEGKVEVFLDGGVRKGTDVLKALALGAKAVFVGRPIVWGLAFQGEKGVQDVLEILKEEFRLAMALSGCQNVKVIDKTLVRKNPLAVSKI

SEQ ID NO: 193660 - DNA, 1113 bp, Artificial Sequence
  derived and/or modified sequence
atgctccctagactgatttgtatcaacgactatgagcagcatgcaaagtctgtgctccctaaatcgatttacgactactacagaagcggggcaaacgacgaagagaccctcgcagacaatatcgcggcattcagccgctggaagctgtacccaaggatgctcagaaacgtggccgaaacagacctgagtacctcagtcctggggcaaagagtgagtatgcccatatgtgtgggcgccacggctatgcaaaggatggcccacgtcgacggcgaacttgcgacagtcagagcctgtcagtcattaggaactggtatgatgttgtcatcatgggctacctcatctatcgaagaggtggccgaggccggccctgaggccctgcggtggctccaactttacatctataaagatagagaggtcactaagaaactggtccggcaggccgagaagatggggtacaaggccattttcgtcactgtagatactccctatttggggaaccgcctggatgatgtgagaaataggttcaagctgcccccacagctgcgcatgaagaacttcgagacttcaacgttatccttttcacctgaggaaaacttcggcgatgattcgggtctggcagcctatgttgcaaaggcaatcgaccccagtatctcgtgggaggacattaaatggctccgccgactgaccagcctgccaatcgtggccaaagggatcctgcgcggggacgatgcacgagaagcagtgaagcatgggctcaatgggattctagtatccaaccacggagctcgacaactggacggagtgcctgcgacaattgacgtactgcctgagatagtggaggcagtggaagggaaagtggaggtgttcctcgacggcggagtgcgcaagggcacggatgtactcaaagccctcgccctcggggcaaaggctgtttttgtggggcgtcccatcgtgtggggactggcattccaaggagagaaaggggtccaggatgtgctggagatcctgaaggaggagtttaggctcgcaatggccctgtccgggtgccagaacgttaaggtaatcgataaaaccttggtcaggaagaatcccctggcagtcagcaaaatatag

SEQ ID NO: 193661 - DNA, 1777 bp, Artificial Sequence
  derived and/or modified sequence
ttaaaaaaaaaaaaacaacgaactccatctgggatagcaataacctgtgaaaatgctcccccggctaatttgtatcaatgattatgaacaacatgctaaatcagtacttccaaagtctatatatgactattacaggtctggggcaaatgatgaagaaactttggctgataatattgcagcattttccagatggaagctgtatccaaggatgctccggaatgttgctgaaacagatctgtcgacttctgttttaggacagagggtcagcatgccaatatgtgtgggggctacggccatgcagcgcatggctcatgtggacggcgagcttgccactgtgagagcctgtcagtccctgggaacgggcatgatgttgagttcctgggccacctcctcaattgaagaagtggcggaagctggtcctgaggcacttcgttggctgcaactgtatatctacaaggaccgagaagtcaccaagaagctagtgcggcaggcagagaagatgggctacaaggccatatttgtgacagtggacacaccttacctgggcaaccgtctggatgatgtgcgtaacagattcaaactgccgccacaactcaggatgaaaaattttgaaaccagtactttatcattttctcctgaggaaaattttggagacgacagtggacttgctgcatatgtggctaaagcaatagacccatctatcagctgggaagatatcaaatggctgagaagactgacatcattgccaattgttgcaaagggcattttgagaggtgatgatgccagggaggctgttaaacatggcttgaatgggatcttggtgtcgaatcatggggctcgacaactcgatggggtgccagccactattgatgttctgccagaaattgtggaggctgtggaagggaaggtggaagtcttcctggacgggggtgtgcggaaaggcactgatgttctgaaagctctggctcttggcgccaaggctgtgtttgtggggagaccaatcgtttggggcttagctttccagggggagaaaggtgttcaagatgtcctcgagatactaaaggaagaattccggttggccatggctctgagtgggtgccagaatgtgaaagtcatcgacaagacattggtgaggaaaaatcctttggccgtttccaagatctgacagtgcacaatattttcccatctgtattattttttttcagcatgtattacttgacaaagagacactgtgcagagggtgaccacagtctgtaattccccacttcaatacaaagggtgtcgttcttttccaacaaaatagcaatcccttttatttcattgcttttgacttttcaatgggtgtcctaggaaccttttagaaagaaatggactttcatcctggaaatatattaactgttaaaaagaaaacattgaaaatgtgtttagacaacgtcatcccctggcaggctaaagtgctgtatcctttagtaaaattggaggtagcaaacactaaggtgaaaagataatgatctcattgtttattaacctgtattctgtttacatgtctttaaaacagtggttcttaaattgtaagctcaggttcaaagtgttggtaatgcctgattcacaactttgagaaggtagcactggagagaattggaatgggtggcggtaattggtgatacttctttgaatgtagatttccaatcacatctttagtgtctgaatatatccaaatgttttaggatgtatgttacttcttagagagaaataaagcatttttgggaagaatata

SEQ ID NO: 193662 - DNA, 1113 bp, Artificial Sequence
  derived and/or modified sequence
atgctgcccaggctcatctgcatcaatgactatgagcagcacgccaagtctgtgctgcccaagagcatctatgactactacagaagtggggccaatgatgaggagaccctggccgacaacattgctgccttcagccgctggaagctgtaccccaggatgctgagaaatgtggccgagacagacctgagcacctctgtgctgggccagagggtgtccatgcccatctgtgtgggcgccacagccatgcagaggatggcccacgtggatggagagctggccaccgtgcgggcctgccagagcctgggcaccggcatgatgctgagctcctgggccaccagcagcattgaggaggtggccgaggccggccctgaggccctgcgctggctgcagctgtacatctacaaggaccgggaggtgaccaagaagctggtgcggcaggccgagaagatgggctacaaggccatctttgtgacagtggacaccccctacctgggcaaccggctggatgatgtgaggaaccgcttcaagctgcccccccagctgaggatgaagaactttgagaccagcaccctgtccttctccccagaagaaaattttggagatgattctggcctggccgcctacgtggccaaggccatcgaccccagcatctcctgggaggacatcaagtggctgcggcggctgaccagcctgcccatcgtggccaagggcatcctgcggggagatgatgcccgggaggccgtgaagcacggcctgaatggcatcctggtgagcaaccacggggcccggcagctggatggagtgcctgccaccattgatgtgctgcctgagatcgtggaggccgtggagggcaaggtggaggtgttcctggatggaggagtgaggaagggcacagatgtgctgaaggccctggccctgggcgccaaggctgtgtttgtgggccggcccatcgtgtggggcctggccttccagggcgagaagggcgtgcaggatgtgctggagatcctgaaggaggagttccggctggccatggccctgagcggctgccagaatgtgaaggtgattgacaagaccctggtgaggaagaaccccctggccgtgtccaagatctag

SEQ ID NO: 193663 - DNA, 1113 bp, Artificial Sequence
  derived and/or modified sequence
atgctgccccggctgatctgcatcaacgactacgagcagcacgccaagtcagtgttaccaaaaagtatctacgattactacagatctggggctaatgacgaggaaactctggcagataacatcgcggctttcagcagatggaaattgtacccaagaatgctgcggaacgtggcagaaactgatttgtctacctcagtcctgggtcagcgagtgtctatgccaatatgtgtcggagcaaccgccatgcagcgtatggcccatgtcgacggggagctcgccacagtgcgggcatgccagtcactgggaactggaatgatgctcagttcatgggccacctcatcaattgaagaagtcgccgaagcaggccccgaagccctcagatggctgcagttgtacatttataaggaccgtgaggtgacgaagaagctggttcgacaagcagagaagatgggttataaggctattttcgtcaccgtggacacaccttatctggggaatcggctggacgacgtgcggaaccgttttaagttaccaccccagttgcggatgaagaattttgagacgtccactctaagcttttcccctgaggagaatttcggcgatgattccggcttagccgcctacgttgcgaaggctattgacccttcaatctcctgggaggacatcaagtggctgcggcgactgacgtctctacctatcgtcgctaaggggattctcagaggtgacgatgcccgtgaggctgtgaagcatgggcttaacggcattctggtgagtaatcacggggcgagacagctcgatggtgtaccagcgaccattgatgttctgccagagatagtggaggctgttgagggcaaagtggaggtgtttttggatggtggcgtgagaaaggggaccgacgttctgaaagcgctggccttgggcgccaaagcagtgtttgtgggccggcctatagtatggggactggcctttcagggagagaaaggggtccaggacgtgttggaaattctcaaagaggagtttcgattagccatggccttatccggttgccagaacgtgaaagtgattgataagaccctcgttaggaagaatccactcgccgtgtcaaaaatatag

SEQ ID NO: 193664 - DNA, 1113 bp, Artificial Sequence
  derived and/or modified sequence
atgctgcccaggctgatctgcattaatgactatgagcagcacgccaagtccgtcctgccgaaaagcatttacgactactaccgctctggcgcaaacgatgaggaaaccctggccgataatattgcagcattctcgaggtggaaactatatcctcggatgttgcggaacgtggccgaaaccgacctctccaccagcgtcttaggacagcgggtaagtatgcccatctgcgtcggtgctaccgctatgcagcggatggcacacgtagacggagagctggcaaccgtcagagcgtgtcagtctctgggcaccggaatgatgctgtcttcctgggcgaccagcagtattgaagaggttgccgaagccggtcccgaagccttacgttggttacagctgtatatctacaaggaccgggaggtgaccaagaagctggtgagacaagcagagaagatgggatataaggcgattttcgtgactgtggatacaccctatctcggcaatcgccttgatgatgtgcgcaaccgatttaaactgccaccacaactcagaatgaagaactttgaaacctcaacactgtcgttctctcccgaagagaacttcggcgacgactccggcctggccgcatacgtcgccaaagctattgacccttcaatttcatgggaggatattaaatggctaaggcgtctcaccagccttcctattgtggccaaaggcattctccggggtgacgacgcgagagaagcagtgaagcatggtctgaacgggatcctcgtttcaaaccacggcgctcgccagctcgacggagtgcctgcaaccatagatgtgctacccgagatcgttgaggctgtggagggcaaagtcgaggtgttcctggatggaggcgtacgtaaaggaacagacgtactgaaagcgctcgctctgggggcaaaagcggtgttcgtcggtcgtccgattgtctgggggctcgcttttcagggggagaaaggggtacaggacgtgcttgaaatcctgaaggaggagttcagactggcaatggctttgtcgggctgccaaaacgtcaaggttattgacaaaactcttgtccgcaaaaacccactggcggtgtcaaaaatctag

SEQ ID NO: 193665 - DNA, 1113 bp, Artificial Sequence
  derived and/or modified sequence
atgctgcccagactgatctgcatcaacgactacgagcagcacgccaagagcgtgctgcccaagagcatctacgactactacagaagcggcgccaacgacgaggagaccctggccgacaacatcgccgccttcagcagatggaagctgtaccccagaatgctgagaaacgtggccgagaccgacctgagcaccagcgtgctgggccagagagtgagcatgcccatctgcgtgggcgccaccgccatgcagagaatggcccacgtggacggcgagctggccaccgtgagagcctgccagagcctgggcaccggcatgatgctgagcagctgggccaccagcagcatcgaggaggtggccgaggccggccccgaggccctgagatggctgcagctgtacatctacaaggacagagaggtgaccaagaagctggtgagacaggccgagaagatgggctacaaggccatcttcgtgaccgtggacaccccctacctgggcaacagactggacgacgtgagaaacagattcaagctgcccccccagctgagaatgaagaacttcgagaccagcaccctgagcttcagccccgaggagaacttcggcgacgacagcggcctggccgcctacgtggccaaggccatcgaccccagcatcagctgggaggacatcaagtggctgagaagactgaccagcctgcccatcgtggccaagggcatcctgagaggcgacgacgccagagaggccgtgaagcacggcctgaacggcatcctggtgagcaaccacggcgccagacagctggacggcgtgcccgccaccatcgacgtgctgcccgagatcgtggaggccgtggagggcaaggtggaggtgttcctggacggcggcgtgagaaagggcaccgacgtgctgaaggccctggccctgggcgccaaggccgtgttcgtgggcagacccatcgtgtggggcctggccttccagggcgagaagggcgtgcaggacgtgctggagatcctgaaggaggagttcagactggccatggccctgagcggctgccagaacgtgaaggtgatcgacaagaccctggtgagaaagaaccccctggccgtgagcaagatctag

SEQ ID NO: 193666 - protein, 486 aa, Artificial Sequence
  derived and/or modified sequence
MIRRVLPHGMGRGLLTRRPGTRRGGFSLDWDGKVSEIKKKIKSILPGRSCDLLQDTSHLPPEHSDVVIVGGGVLGLSVAYWLKKLESRRGAIRVLVVERDHTYSQASTGLSVGGICQQFSLPENIQLSLFSASFLRNINEYLAVVDAPPLDLRFNPSGYLLLASEKDAAAMESNVKVQRQEGAKVSLMSPDQLRNKFPWINTEGVALASYGMEDEGWFDPWCLLQGLRRKVQSLGVLFCQGEVTRFVSSSQRMLTTDDKAVVLKRIHEVHVKMDRSLEYQPVECAIVINAAGAWSAQIAALAGVGEGPPGTLQGTKLPVEPRKRYVYVWHCPQGPGLETPLVADTSGAYFRREGLGSNYLGGRSPTEQEEPDPANLEVDHDFFQDKVWPHLALRVPAFETLKVQSAWAGYYDYNTFDQNGVVGPHPLVVNMYFATGFSGHGLQQAPGIGRAVAEMVLKGRFQTIDLSPFLFTRFYLGEKIQENNII

SEQ ID NO: 193667 - protein, 316 aa, Artificial Sequence
  derived and/or modified sequence
MESNVKVQRQEGAKVSLMSPDQLRNKFPWINTEGVALASYGMEDEGWFDPWCLLQGLRRKVQSLGVLFCQGEVTRFVSSSQRMLTTDDKAVVLKRIHEVHVKMDRSLEYQPVECAIVINAAGAWSAQIAALAGVGEGPPGTLQGTKLPVEPRKRYVYVWHCPQGPGLETPLVADTSGAYFRREGLGSNYLGGRSPTEQEEPDPANLEVDHDFFQDKVWPHLALRVPAFETLKVQSAWAGYYDYNTFDQNGVVGPHPLVVNMYFATGFSGHGLQQAPGIGRAVAEMVLKGRFQTIDLSPFLFTRFYLGEKIQENNII

SEQ ID NO: 193668 - protein, 472 aa, Artificial Sequence
  derived and/or modified sequence
MAHTGRTVGRLGEGDWDGKVSEIKKKIKSILPGRSCDLLQDTSHLPPEHSDVVIVGGGVLGLSVAYWLKKLESRRGAIRVLVVERDHTYSQASTGLSVGGICQQFSLPENIQLSLFSASFLRNINEYLAVVDAPPLDLRFNPSGYLLLASEKDAAAMESNVKVQRQEGAKVSLMSPDQLRNKFPWINTEGVALASYGMEDEGWFDPWCLLQGLRRKVQSLGVLFCQGEVTRFVSSSQRMLTTDDKAVVLKRIHEVHVKMDRSLEYQPVECAIVINAAGAWSAQIAALAGVGEGPPGTLQGTKLPVEPRKRYVYVWHCPQGPGLETPLVADTSGAYFRREGLGSNYLGGRSPTEQEEPDPANLEVDHDFFQDKVWPHLALRVPAFETLKVQSAWAGYYDYNTFDQNGVVGPHPLVVNMYFATGFSGHGLQQAPGIGRAVAEMVLKGRFQTIDLSPFLFTRFYLGEKIQENNII

SEQ ID NO: 193669 - DNA, 1970 bp, Artificial Sequence
  derived and/or modified sequence
gcgcggagcagtgacggctgcgataatagcgaggcagcagtgcagctttcagagggtccgggctcagaggggttatgattcggagggttctgccgcacggcatgggccggggcctcttgacccggaggccaggcacgcgcagaggaggcttttctctggactgggatggaaaggtgtctgagattaagaagaagatcaagtcgatcctgcctggaaggtcctgtgatctactgcaagacaccagccacctgcctcccgagcactcggatgtggtgatcgtgggaggtggggtgcttggcttgtctgtggcctattggctgaagaagctggagagcagacgaggtgctattcgagtgctagtggtggaacgggaccacacgtattcacaggcctccactgggctctcagtaggtgggatttgtcagcagttctcattgcctgagaacatccagctctccctcttttcagccagctttctacggaacatcaatgagtacctggccgtagtcgatgctcctcccctggacctccggttcaacccctcgggctacctcttgctggcttcagaaaaggatgctgcagccatggagagcaacgtgaaagtgcagaggcaggagggagccaaagtttctctgatgtctcctgatcagcttcggaacaagtttccctggataaacacagagggagtggctttggcgtcttatgggatggaggacgaaggttggtttgacccctggtgtctgctccaggggcttcggcgaaaggtccagtccttgggagtccttttctgccagggagaggtgacacgttttgtctcttcatctcaacgcatgttgaccacagatgacaaagcggtggtcttgaaaaggatccatgaagtccatgtgaagatggaccgcagcctggagtaccagcctgtggaatgcgccattgtgatcaacgcagccggagcctggtctgcgcaaatcgcagcactggctggtgttggagaggggccgcctggcaccctgcagggcaccaagctacctgtggagccgaggaaaaggtatgtgtatgtgtggcactgcccccagggaccaggcctagagactccgcttgttgcagacaccagtggagcctattttcgccgggaaggattaggtagcaactacctaggtggtcgtagccccactgagcaggaagaaccggacccggcgaacctggaagtggaccatgatttcttccaggacaaggtgtggccccatttggccctgagggtcccagcttttgagactctgaaggttcagagcgcctgggccggctattacgactacaacacctttgaccagaatggcgtggtgggcccccacccgctagttgtcaacatgtactttgctactggcttcagtggtcacgggctccagcaggcccctggcattgggcgagctgtagcagagatggtactgaagggcaggttccagaccatcgacctgagccccttcctctttacccgcttttacttgggagagaagatccaggagaacaacatcatctgagcatgtgtgctctgcactggctccactggcttgcatcctggctgtgttcacagccttgtttgctgcttccatcttccccagtactgtgccaggccttctccccctccccagtgtcctctcctctcaggcaggccattgcacccatatggctgggcaggcacaggcagtgaggccgaggccaatagcgagtgatgagcgggatcctaggactgatctgtagcccatgctgatgtcacccaccagggcaatccatctggaggcctgagcaccctggcccaggactggcttcatcctggcactgaccaggaaagactgcctctgaccctcttagcagacagagcccaggcatgggagcactctggggcagcctggctcaggtttattgattttcgtctgtttaccctatccattaatcaatacatgtaattaactcct

SEQ ID NO: 193670 - DNA, 1427 bp, Artificial Sequence
  derived and/or modified sequence
agtgcagctttcagagggtccgggctcagaggggttatgattcggagggttctgccgcacggcatgggccggggcctcttgacccggaggccaggcacgcgcagaggaggcttttctctggtattcacaggcctccactgggctctcagtaggtgggatttgtcagcagttctcattgcctgagaacatccagctctccctcttttcagccagctttctacggaacatcaatgagtacctggccgtagtcgatgctcctcccctggacctccggttcaacccctcgggctacctcttgctggcttcagaaaaggatgctgcagccatggagagcaacgtgaaagtgcagaggcaggagggagccaaagtttctctgatgtctcctgatcagcttcggaacaagtttccctggataaacacagagggagtggctttggcgtcttatgggatggaggacgaaggttggtttgacccctggtgtctgctccaggggcttcggcgaaaggtccagtccttgggagtccttttctgccagggagaggtgacacgttttgtctcttcatctcaacgcatgttgaccacagatgacaaagcggtggtcttgaaaaggatccatgaagtccatgtgaagatggaccgcagcctggagtaccagcctgtggaatgcgccattgtgatcaacgcagccggagcctggtctgcgcaaatcgcagcactggctggtgttggagaggggccgcctggcaccctgcagggcaccaagctacctgtggagccgaggaaaaggtatgtgtatgtgtggcactgcccccagggaccaggcctagagactccgcttgttgcagacaccagtggagcctattttcgccgggaaggattaggtagcaactacctaggtggtcgtagccccactgagcaggaagaaccggacccggcgaacctggaagtggaccatgatttcttccaggacaaggtgtggccccatttggccctgagggtcccagcttttgagactctgaaggttcagagcgcctgggccggctattacgactacaacacctttgaccagaatggcgtggtgggcccccacccgctagttgtcaacatgtactttgctactggcttcagtggtcacgggctccagcaggcccctggcattgggcgagctgtagcagagatggtactgaagggcaggttccagaccatcgacctgagccccttcctctttacccgcttttacttgggagagaagatccaggagaacaacatcatctgagcatgtgtgctctgcactggctccactggcttgcatcctggctgtgttcacagccttgtttgctgcttccatcttccccagtactgtgccaggccttctccccctccccagtgtcctctcctctcaggcaggccattgcacccatatggct

SEQ ID NO: 193671 - DNA, 1825 bp, Artificial Sequence
  derived and/or modified sequence
gattcggagggttctgccgcacggcatgggccggggcctcttgacccggaggccaggcacgcgcagaggaggcttttctctgggtaaagttgaggacgacagagggtattgtggttctgggttgtccccaacctccgactgtgtgtccttcaggacccgaaaccatggcccacactggcaggacagtgggtcggcttggggaaggggactgggatggaaaggtgtctgagattaagaagaagatcaagtcgatcctgcctggaaggtcctgtgatctactgcaagacaccagccacctgcctcccgagcactcggatgtggtgatcgtgggaggtggggtgcttggcttgtctgtggcctattggctgaagaagctggagagcagacgaggtgctattcgagtgctagtggtggaacgggaccacacgtattcacaggcctccactgggctctcagtaggtgggatttgtcagcagttctcattgcctgagaacatccagctctccctcttttcagccagctttctacggaacatcaatgagtacctggccgtagtcgatgctcctcccctggacctccggttcaacccctcgggctacctcttgctggcttcagaaaaggatgctgcagccatggagagcaacgtgaaagtgcagaggcaggagggagccaaagtttctctgatgtctcctgatcagcttcggaacaagtttccctggataaacacagagggagtggctttggcgtcttatgggatggaggacgaaggttggtttgacccctggtgtctgctccaggggcttcggcgaaaggtccagtccttgggagtccttttctgccagggagaggtgacacgttttgtctcttcatctcaacgcatgttgaccacagatgacaaagcggtggtcttgaaaaggatccatgaagtccatgtgaagatggaccgcagcctggagtaccagcctgtggaatgcgccattgtgatcaacgcagccggagcctggtctgcgcaaatcgcagcactggctggtgttggagaggggccgcctggcaccctgcagggcaccaagctacctgtggagccgaggaaaaggtatgtgtatgtgtggcactgcccccagggaccaggcctagagactccgcttgttgcagacaccagtggagcctattttcgccgggaaggattaggtagcaactacctaggtggtcgtagccccactgagcaggaagaaccggacccggcgaacctggaagtggaccatgatttcttccaggacaaggtgtggccccatttggccctgagggtcccagcttttgagactctgaaggttcagagcgcctgggccggctattacgactacaacacctttgaccagaatggcgtggtgggcccccacccgctagttgtcaacatgtactttgctactggcttcagtggtcacgggctccagcaggcccctggcattgggcgagctgtagcagagatggtactgaagggcaggttccagaccatcgacctgagccccttcctctttacccgcttttacttgggagagaagatccaggagaacaacatcatctgagcatgtgtgctctgcactggctccactggcttgcatcctggctgtgttcacagccttgtttgctgcttccatcttccccagtactgtgccaggccttctccccctccccagtgtcctctcctctcaggcaggccattgcacccatatggctgggcaggcacaggcagtgaggccgaggccaatagcgagtgatgagcgggatcctaggactgatctgtagcccatgctgatgtcacccacca

SEQ ID NO: 193672 - DNA, 1461 bp, Artificial Sequence
  derived and/or modified sequence
atgatacgtcgagtccttcctcacgggatggggagaggacttctcactaggagacctggaacacgccgcggcggctttagtctggactgggatggtaaagtctccgagattaagaagaaaatcaagtcaattctcccgggccggtcttgcgatctactgcaggacaccagccatctgcctccagagcactccgatgtcgtgatcgtcggggggggggtgttggggcttagtgtggcatattggctcaagaagctggagagtcggcggggcgctatcagggtcctcgtagtggagagagaccacacctactcacaggcctccactggcctctctgttggtggaatctgtcagcagttctctctaccggagaatattcagttaagcttgttctctgccagctttctgaggaacattaatgaatatctggcggtggttgatgctcctcctctcgacctgaggtttaatccatcaggataccttctattggcaagcgaaaaagatgctgctgcaatggagagtaacgtgaaagtgcagcgccaggagggcgctaaggtcagtctgatgtctcccgatcagctcaggaacaagtttccctggatcaatacagagggcgtagcactggcttcatacggtatggaggatgaggggtggtttgatccatggtgcctgctgcaggggctccgacgcaaggtccagtccctgggagtgcttttctgccagggtgaggtgactcggtttgtttctagctcacagaggatgcttacgactgacgacaaggcggtggttctaaaacgaatccatgaagtgcacgttaagatggaccgctctctggagtaccagccggttgagtgcgcgattgtgatcaacgcagccggcgcttggtccgcacagatagcagccctggccggggtgggggaaggacctccgggaacactgcagggcacaaaactgccagtggagcctcgcaaaagatatgtatacgtgtggcactgcccccaggggcctggactcgaaacacctttggtggcagataccagcggagcctactttcgccgcgaggggctgggcagtaactacctgggaggacgatctccgacagagcaagaggaacctgaccctgccaatctggaggtggaccacgacttcttccaggacaaggtctggccccacttggccctgcgggtgccagcctttgagactctcaaggtacagagcgcctgggctgggtattatgattataatacatttgatcagaatggggtcgtgggcccccatcctctcgtggtgaatatgtactttgctactggattttctggacatggtctccagcaggccccaggaatcggtagggctgtggccgaaatggtgctcaagggtagatttcaaacaattgacctgagcccgtttctcttcacccgcttctacttaggcgagaaaatacaagaaaataatatcatatag

SEQ ID NO: 193673 - DNA, 1419 bp, Artificial Sequence
  derived and/or modified sequence
atggctcataccgggagaactgtggggcggctgggagaaggtgactgggacggcaaagtgagcgagattaaaaaaaaaatcaagagcattttgccaggtcgtagctgcgatttgctgcaggacacaagccatctgcctcctgagcactccgacgtggtgatcgtgggcgggggtgtcctgggcctgagtgtggcgtattggctgaaaaagttggaatctaggcggggggctattcgggtgctagtcgtggaacgagaccacacatattcacaggcctcaacaggcctatctgtgggcgggatctgccagcagttttctctaccagagaacattcagctgagtctgtttagtgcctcatttctgcggaacatcaatgagtatcttgcagtcgtggacgctcctcccttggacctgagatttaatccgagcgggtacctgttgctggcttctgagaaggacgctgcagctatggagagtaacgtgaaggtgcagaggcaagagggtgccaaagtctccctgatgtcacccgaccaactgaggaataagtttccgtggatcaatacagaaggggtggcgttggcttcttatggcatggaggacgaagggtggttcgatccatggtgcctgttgcagggcctgcgacgtaaggtacagtctctaggcgtactcttttgccagggcgaggtcacacgcttcgtcagcagtagtcagcgtatgttgaccacagatgacaaggctgtcgtcctcaagcggatacatgaagtgcacgtgaagatggatcggagcttagaatatcagccagtcgagtgtgccattgttattaacgccgcgggtgcatggtccgcccaaatcgctgctctagccggggttggagagggccctccaggaacgctccagggcaccaagttgcctgtagagcctcgaaaacgctacgtgtacgtgtggcattgcccccagggtcctgggttggagacacctctggtcgcggacacatcaggagcatatttcaggagagagggacttggaagtaactacctaggcggacggtctccaactgaacaagaagaacccgatccagcaaacttagaggtggaccacgatttttttcaggacaaagtctggccccacttagcactcagggtgcccgcctttgaaacgctcaaggtgcaatctgcatgggccgggtattatgactataacacgttcgaccagaacggagtggttggcccccacccactcgttgtgaacatgtattttgcgactggcttctcgggccatgggctccagcaggctccaggcatcggacgtgccgtggctgagatggtgttaaagggacggttccagaccattgacctttctccgttcctgttcacacggttttatctaggtgaaaagatacaggagaacaacataatctag

SEQ ID NO: 193674 - DNA, 1461 bp, Artificial Sequence
  derived and/or modified sequence
atgatcagaagagtgctgccccacggcatgggccggggcctgctgaccaggaggcctggcacccggcggggcggcttcagcctggactgggatggcaaggtgtctgagatcaagaagaagatcaagagcatcctgcccggccgcagctgtgacctgctgcaggacaccagccacctgcccccagagcacagtgatgtggtgattgtgggcggcggcgtgctgggcctgtctgtggcctactggctgaagaagctggagagccggcggggggccatccgggtgctggtggtggagcgggaccacacctacagccaggccagcacaggcctgtctgtgggcggcatctgccagcagttcagcctgcctgagaacatccagctgagcctcttcagcgccagcttcctgaggaacatcaatgagtacctggccgtggtggatgccccacccctggacctgcgcttcaaccccagcggctacctgctgctggccagcgagaaggatgctgctgccatggagagcaatgtgaaggtgcagaggcaggagggcgccaaggtgtccctgatgagcccagaccagctgaggaacaagttcccctggatcaacacagagggcgtggccctggccagctatggcatggaggatgagggctggtttgacccctggtgcctgctgcagggcctgcggaggaaggtgcagagcctgggcgtgctcttctgccagggcgaggtgaccaggtttgtgagcagcagccagaggatgctgaccacagatgacaaggctgtggtgctgaagagaattcatgaggtgcacgtgaagatggacaggagcctggagtaccagcctgtggagtgtgccatcgtcatcaatgctgctggggcctggagcgcccagattgctgccctggccggcgtgggggagggccccccaggcaccctgcagggcaccaagctgcctgtggagcccaggaagagatatgtgtatgtgtggcactgcccccagggccctggcctggagacccccctggtggccgacaccagcggggcctacttcagaagagagggcctgggcagcaactacctgggcggccgcagccccacagagcaggaggagccagaccctgccaacctggaggtggaccatgacttcttccaggacaaggtgtggccccacctggccctgcgggtgcctgcctttgagaccctgaaggtgcagagcgcctgggccggctactatgactacaacacctttgaccagaatggagtggtgggcccccaccccctggtggtgaacatgtactttgccaccggcttcagcggccacggcctgcagcaggcccctggcatcggccgggctgtggccgagatggtgctgaagggccgcttccagaccatcgacctgagccccttcctgttcacccgcttctacctgggggagaagatccaggagaacaacatcatctag

SEQ ID NO: 193675 - DNA, 1419 bp, Artificial Sequence
  derived and/or modified sequence
atggcccacacaggccgcacagtgggccgcctgggggagggggactgggatggcaaggtgtctgagatcaagaagaagatcaagagcatcctgcccggccgcagctgtgacctgctgcaggacaccagccacctgcccccagagcacagtgatgtggtgattgtgggcggcggcgtgctgggcctgtctgtggcctactggctgaagaagctggagagccggcggggggccatccgggtgctggtggtggagcgggaccacacctacagccaggccagcacaggcctgtctgtgggcggcatctgccagcagttcagcctgcctgagaacatccagctgagcctcttcagcgccagcttcctgaggaacatcaatgagtacctggccgtggtggatgccccacccctggacctgcgcttcaaccccagcggctacctgctgctggccagcgagaaggatgctgctgccatggagagcaatgtgaaggtgcagaggcaggagggcgccaaggtgtccctgatgagcccagaccagctgaggaacaagttcccctggatcaacacagagggcgtggccctggccagctatggcatggaggatgagggctggtttgacccctggtgcctgctgcagggcctgcggaggaaggtgcagagcctgggcgtgctcttctgccagggcgaggtgaccaggtttgtgagcagcagccagaggatgctgaccacagatgacaaggctgtggtgctgaagagaattcatgaggtgcacgtgaagatggacaggagcctggagtaccagcctgtggagtgtgccatcgtcatcaatgctgctggggcctggagcgcccagattgctgccctggccggcgtgggggagggccccccaggcaccctgcagggcaccaagctgcctgtggagcccaggaagagatatgtgtatgtgtggcactgcccccagggccctggcctggagacccccctggtggccgacaccagcggggcctacttcagaagagagggcctgggcagcaactacctgggcggccgcagccccacagagcaggaggagccagaccctgccaacctggaggtggaccatgacttcttccaggacaaggtgtggccccacctggccctgcgggtgcctgcctttgagaccctgaaggtgcagagcgcctgggccggctactatgactacaacacctttgaccagaatggagtggtgggcccccaccccctggtggtgaacatgtactttgccaccggcttcagcggccacggcctgcagcaggcccctggcatcggccgggctgtggccgagatggtgctgaagggccgcttccagaccatcgacctgagccccttcctgttcacccgcttctacctgggggagaagatccaggagaacaacatcatctag

SEQ ID NO: 193676 - DNA, 1461 bp, Artificial Sequence
  derived and/or modified sequence
atgatccggcgggtgctgccccacggcatgggccggggcctgctgacacggcggcctggcacgaggcgggggggcttctctctggactgggatggcaaagtctccgagattaaaaagaagattaaaagcattctcccgggaaggtcttgcgacctgttgcaggataccagtcatctgcctcccgagcactctgatgttgtcatagttggcgggggagtcctcggactgtccgttgcttactggctgaagaaactcgagtcgcggcgtggcgccatcagggtgttggtggtagaaagagatcatacatactctcaggcttctactggcctgtcagtcggcggaatctgtcaacaattcagtctgcccgagaacatccagctgagcctgttctcagccagctttctgcgaaacatcaacgaatatctagccgtcgtggacgcccctcccctcgacctgcgatttaatcccagcgggtatctgctgctcgcatcagaaaaggatgcagcagctatggagagtaatgtgaaggtgcagaggcaggaaggggcaaaggtctcactgatgagccctgaccagcttcggaacaagttcccatggataaataccgagggagtggccctggcctcctacggtatggaggacgaggggtggtttgacccgtggtgtctactgcagggtctccggaggaaggtacagtcgcttggcgtgttattctgtcagggcgaagtaacacggtttgtgtcctccagccaacggatgctaacaacggacgataaagccgttgtcctgaagagaatccatgaagtacatgtgaagatggaccgatcacttgagtaccaacctgttgaatgtgctatcgtaatcaatgctgctggagcttggagcgcccagattgcagctctggcaggggttggagagggccctcctggtaccctacagggcaccaaattgccggtcgagcctcggaaaaggtacgtgtacgtttggcattgtccacaaggaccagggctcgagacaccgttggtcgccgataccagcggggcttatttcagacgagagggcttaggttcgaactacctgggcgggcgctctcctacggaacaggaggaacctgaccccgctaacctggaggtggatcacgatttcttccaggacaaagtgtggcctcacctggccctgcgggtccccgcgttcgaaaccctgaaagttcaatccgcctgggctggctactacgactacaataccttcgatcagaacggtgtggttgggccacatccactcgtagtgaacatgtattttgccactggcttcagtggacacgggctgcagcaggcccccggcattggcagggcggtcgctgaaatggtgctgaaaggaaggtttcaaaccatcgatctttcacccttcctgttcacacgattctatcttggcgagaagatccaagaaaataacataatatag

SEQ ID NO: 193677 - DNA, 1419 bp, Artificial Sequence
  derived and/or modified sequence
atggcccacaccggccggaccgtgggccggctgggcgagggcgactgggacggaaaagtcagcgagattaagaagaagatcaagtccatcctgccaggacgaagttgcgatctgctacaagacacatcccatctgcccccagaacactctgatgtggttatagtgggcgggggcgtcctgggtctcagcgtcgcttactggctcaagaagctcgagtcccggagaggcgccatcagggtgctcgtggtcgagcgcgaccacacatattcgcaagccagtacagggttatcggtcgggggcatttgccagcagttttctctcccagaaaacatacaattgtctctcttctcagccagcttcctacggaatatcaatgagtacttggcagttgttgacgctccccctcttgacttacggtttaacccttccggataccttctgttagcctcagaaaaagatgctgctgccatggagagtaatgtgaaggttcagcggcaggagggggctaaggtgagccttatgtcccctgatcagctccgcaacaagtttccatggattaataccgagggcgtcgcactcgccagctacggaatggaggatgaaggctggtttgacccctggtgtctgctccaagggctgcgacgaaaggtgcagtctctgggcgtgctattttgccaaggggaagtgacgcgctttgtcagtagcagtcaaaggatgcttacgaccgatgacaaagctgtcgtcctgaaacgcatccatgaagttcacgtcaaaatggacaggagcctggagtatcaaccggtcgagtgtgctatcgtcataaacgccgccggcgcctggtctgcacagatcgcagccctggcaggagtgggggaaggaccacccggcactctgcagggcacaaagcttccagtggagcctagaaaacggtacgtgtacgtgtggcactgcccacaaggacccggcttggagacccctctggtggccgatacgagtggcgcatattttagacgggaaggcctgggctcaaattatctgggaggacgtagcccaactgagcaggaggagcctgatcctgcaaatctcgaggttgaccacgatttcttccaggacaaagtgtggccacatctggctctccgggtccccgcattcgaaactctaaaggtccagagcgcatgggcgggttattatgattacaacactttcgatcagaacggggtggtgggaccacatccgctggtcgtaaatatgtactttgcgacaggattcagcgggcacggattgcagcaggcccccgggatcggtcgtgcagtggcggagatggttttaaagggacggttccaaaccatcgatctgagcccatttctcttcacccgcttttaccttggcgagaagattcaggaaaataacatcatctag

SEQ ID NO: 193678 - DNA, 1461 bp, Artificial Sequence
  derived and/or modified sequence
atgatccgccgagtcttgccgcatggcatgggacgcggacttctgactcggcgtccaggcacccgtagagggggattctcactagactgggacggaaaagtttccgagatcaagaagaagatcaaatccattctgcccggtcgctcgtgtgacctgttgcaggatacttcgcacctcccaccggagcactccgacgtggtcatagtggggggaggcgttctggggctttccgtggcttactggcttaagaagctcgaatctagaaggggagctattagggtcctggtggtggaacgagaccatacctattcccaagcctccaccggactgtccgtcggtgggatctgtcagcagttctccctgccagagaatatccaattgtcactgttttcggccagtttcttacggaatattaacgagtatctcgccgtcgtggatgcccctccactagatctgcgcttcaatccgtcgggctaccttctgttagcatctgaaaaggacgcagctgctatggagagcaatgtcaaagtgcagcggcaagaaggtgccaaagtgtcattaatgtcccctgaccagttgcggaataagtttccctggattaacaccgagggtgtggccctcgcttcatatggcatggaagatgagggatggttcgacccatggtgtctcttgcagggcctgcggaggaaggtacagtccctcggcgtactgttctgtcagggagaggtgactcgcttcgtgtcttcctcgcagcgtatgctgactaccgacgataaggccgtcgtgctcaagcgcatccacgaagtgcacgtcaagatggacaggagtctggaataccagcccgtggaatgtgcaatagttataaacgccgctggggcttggtccgctcagatcgctgcgctagctggagtcggcgagggccctcccggtactctgcaggggaccaaactcccagtagagcctcggaagcggtacgtgtacgtatggcactgtccacagggtcctggtctggagactcctctcgtggctgatacaagcggtgcttattttcggagggagggtctaggctctaactaccttgggggtagaagccctactgagcaagaggagcccgaccctgcaaaccttgaagtagaccatgacttctttcaggacaaagtgtggccacatctcgccctgcgtgtgccagctttcgaaactctgaaggtgcagagcgcatgggctgggtattatgactacaataccttcgatcaaaacggcgtcgttggccctcaccccttagtagtcaacatgtacttcgccactgggttctcaggacatggactgcagcaggccccaggaataggcagggccgttgccgagatggtgctcaagggacgctttcagaccattgacctaagcccattcctgttcactcgcttttatctgggcgaaaagattcaggaaaacaacatcatttag

SEQ ID NO: 193679 - DNA, 1419 bp, Artificial Sequence
  derived and/or modified sequence
atggcccacaccgggcgaacagtcgggagactgggcgagggtgattgggatggtaaagtctcagagatcaagaagaaaatcaaaagcatactgccagggcgaagctgcgacctcctccaggatactagccatctgcctcctgaacactccgatgtcgtgattgttggtggtggcgttcttggtcttagtgtggcttactggctaaagaagctggagagtcggaggggcgctatccgggtactggtcgttgagcgcgaccatacttattcccaggcatccactggcctgagcgtggggggtatatgccagcagttcagcttgccagaaaacatccagctttccctgttcagcgctagtttcttgcgcaacattaatgagtacctggcagtggtggacgctccccctctggatctgaggttcaatccgtctggctacctgttgcttgcctccgagaaggatgcagccgcaatggagagcaatgttaaggtgcagagacaggaaggagcgaaggtgagcctgatgagccctgaccaactgcggaacaaatttccttggattaacacggaaggagttgcgctggcctcatacggcatggaggacgagggctggtttgacccttggtgtctactccagggtctgcgtaggaaagtgcagtctttgggcgtactgttttgccagggggaagtcacgcgcttcgtttcttcgagccagcgcatgctgacaactgacgacaaggcagtagtgctgaagaggatacatgaagtgcacgtcaaaatggacagatccctagagtaccagcccgtagaatgcgctatcgtgattaacgccgctggagcttggagcgcccagatcgcagcactggccggtgtaggggagggaccgcctgggaccctccagggcacgaagctgcctgtggagccccgaaaaagatatgtttacgtatggcactgtccacagggacccggactcgagacacctcttgtcgccgatacaagcggggcttacttcagacgcgaaggattagggtctaattacctgggcggacggtccccaactgagcaggaagagcctgaccccgctaatctcgaggtggatcatgactttttccaggacaaagtgtggccacatctagcgctaagggttcccgcattcgagactttaaaggtgcagtcagcctgggctggctattatgactataatacctttgaccaaaacggagtggtgggcccacacccactcgttgtgaacatgtacttcgccacggggtttagcggccacggtcttcagcaggcgcctggtattggccgagccgttgctgaaatggtcctcaagggccgattccaaaccattgacctctcaccctttctgtttacacgcttctacctcggagagaaaatccaagaaaacaatatcatctag

SEQ ID NO: 193680 - DNA, 1461 bp, Artificial Sequence
  derived and/or modified sequence
atgatcagaagagtgctgccccacggcatgggcagaggcctgctgaccagaagacccggcaccagaagaggcggcttcagcctggactgggacggcaaggtgagcgagatcaagaagaagatcaagagcatcctgcccggcagaagctgcgacctgctgcaggacaccagccacctgccccccgagcacagcgacgtggtgatcgtgggcggcggcgtgctgggcctgagcgtggcctactggctgaagaagctggagagcagaagaggcgccatcagagtgctggtggtggagagagaccacacctacagccaggccagcaccggcctgagcgtgggcggcatctgccagcagttcagcctgcccgagaacatccagctgagcctgttcagcgccagcttcctgagaaacatcaacgagtacctggccgtggtggacgccccccccctggacctgagattcaaccccagcggctacctgctgctggccagcgagaaggacgccgccgccatggagagcaacgtgaaggtgcagagacaggagggcgccaaggtgagcctgatgagccccgaccagctgagaaacaagttcccctggatcaacaccgagggcgtggccctggccagctacggcatggaggacgagggctggttcgacccctggtgcctgctgcagggcctgagaagaaaggtgcagagcctgggcgtgctgttctgccagggcgaggtgaccagattcgtgagcagcagccagagaatgctgaccaccgacgacaaggccgtggtgctgaagagaatccacgaggtgcacgtgaagatggacagaagcctggagtaccagcccgtggagtgcgccatcgtgatcaacgccgccggcgcctggagcgcccagatcgccgccctggccggcgtgggcgagggcccccccggcaccctgcagggcaccaagctgcccgtggagcccagaaagagatacgtgtacgtgtggcactgcccccagggccccggcctggagacccccctggtggccgacaccagcggcgcctacttcagaagagagggcctgggcagcaactacctgggcggcagaagccccaccgagcaggaggagcccgaccccgccaacctggaggtggaccacgacttcttccaggacaaggtgtggccccacctggccctgagagtgcccgccttcgagaccctgaaggtgcagagcgcctgggccggctactacgactacaacaccttcgaccagaacggcgtggtgggcccccaccccctggtggtgaacatgtacttcgccaccggcttcagcggccacggcctgcagcaggcccccggcatcggcagagccgtggccgagatggtgctgaagggcagattccagaccatcgacctgagccccttcctgttcaccagattctacctgggcgagaagatccaggagaacaacatcatctag

SEQ ID NO: 193681 - DNA, 1419 bp, Artificial Sequence
  derived and/or modified sequence
atggcccacaccggcagaaccgtgggcagactgggcgagggcgactgggacggcaaggtgagcgagatcaagaagaagatcaagagcatcctgcccggcagaagctgcgacctgctgcaggacaccagccacctgccccccgagcacagcgacgtggtgatcgtgggcggcggcgtgctgggcctgagcgtggcctactggctgaagaagctggagagcagaagaggcgccatcagagtgctggtggtggagagagaccacacctacagccaggccagcaccggcctgagcgtgggcggcatctgccagcagttcagcctgcccgagaacatccagctgagcctgttcagcgccagcttcctgagaaacatcaacgagtacctggccgtggtggacgccccccccctggacctgagattcaaccccagcggctacctgctgctggccagcgagaaggacgccgccgccatggagagcaacgtgaaggtgcagagacaggagggcgccaaggtgagcctgatgagccccgaccagctgagaaacaagttcccctggatcaacaccgagggcgtggccctggccagctacggcatggaggacgagggctggttcgacccctggtgcctgctgcagggcctgagaagaaaggtgcagagcctgggcgtgctgttctgccagggcgaggtgaccagattcgtgagcagcagccagagaatgctgaccaccgacgacaaggccgtggtgctgaagagaatccacgaggtgcacgtgaagatggacagaagcctggagtaccagcccgtggagtgcgccatcgtgatcaacgccgccggcgcctggagcgcccagatcgccgccctggccggcgtgggcgagggcccccccggcaccctgcagggcaccaagctgcccgtggagcccagaaagagatacgtgtacgtgtggcactgcccccagggccccggcctggagacccccctggtggccgacaccagcggcgcctacttcagaagagagggcctgggcagcaactacctgggcggcagaagccccaccgagcaggaggagcccgaccccgccaacctggaggtggaccacgacttcttccaggacaaggtgtggccccacctggccctgagagtgcccgccttcgagaccctgaaggtgcagagcgcctgggccggctactacgactacaacaccttcgaccagaacggcgtggtgggcccccaccccctggtggtgaacatgtacttcgccaccggcttcagcggccacggcctgcagcaggcccccggcatcggcagagccgtggccgagatggtgctgaagggcagattccagaccatcgacctgagccccttcctgttcaccagattctacctgggcgagaagatccaggagaacaacatcatctag

SEQ ID NO: 193682 - protein, 258 aa, Artificial Sequence
  derived and/or modified sequence
MAETEERSLDNFFAKRDKKKKKERSNRAASAAGAAGSAGGSSGAAGAAGGGAGAGTRPGDGGTASAGAAGPGAATKAVTKDEDEWKELEQKEVDYSGLRVQAMQISSEKEEDDNEKRQDPGDNWEEGGGGGGGMEKSSGPWNKTAPVQAPPAPVIVTETPEPAMTSGVYRPPGARLTTTRKTPQGPPEIYSDTQFPSLQSTAKHVESRKDKEMEKSFEVVRHKNRGRDEVSKNQALKLQLDNQYAVLENQKSSHSQYN

SEQ ID NO: 193683 - DNA, 777 bp, Artificial Sequence
  derived and/or modified sequence
atggccgagacagaagagagatctcttgataattttttcgccaaacgtgataaaaagaagaagaaggaacgctccaatcgggccgcaagcgccgctggcgctgcagggagcgcagggggctccagcggcgccgccggcgcggctggggggggcgccggggcagggacaaggcccggcgacggaggaactgcctccgccggggccgctggacctggggccgcgaccaaagctgtaaccaaggatgaagatgagtggaaggagctggagcagaaagaggtggactactccggattacgagtgcaggctatgcagatatcaagcgagaaggaggaagatgacaatgagaagcggcaggatccaggggacaactgggaggagggaggagggggcggagggggcatggagaaaagcagtgggccctggaataaaactgctcctgtacaagcacctcctgctcctgtgatagtgaccgaaacccctgaaccggctatgacgagcggtgtatataggcctccgggggcgcgccttacgacaacacgcaagacccctcagggacccccagagatctactcggatacacagttcccaagtttgcagagtaccgcaaagcacgtcgaaagtcgaaaagacaaagagatggagaagagtttcgaggtagtcagacacaaaaaccgaggtcgtgatgaagtgagtaagaaccaggcactgaaactacaacttgacaatcagtatgcagtcctcgagaatcagaagtccagccacagtcagtataactag

SEQ ID NO: 193684 - DNA, 777 bp, Artificial Sequence
  derived and/or modified sequence
atggccgagacagaggagaggagcctggacaacttctttgccaagagggacaagaagaagaagaaggagaggagcaacagagctgccagcgctgctggagctgctggcagcgctgggggcagcagcggggctgctggagctgctgggggcggggccggggccggcaccaggcctggagatggcggcacagccagcgctggagctgctggccctggagctgccaccaaggctgtgaccaaggatgaagatgagtggaaggagctggagcagaaggaggtggactacagcggcctgcgggtgcaggccatgcagatcagcagcgagaaggaggaggatgacaatgagaagaggcaggaccccggggacaactgggaggagggcggcggcggcggcggcggcatggagaagagcagcggcccctggaacaagacagcccctgtgcaggcccccccagcccctgtgattgtgacagagaccccagagcccgccatgaccagcggcgtgtacagacctcctggggcccggctgaccaccaccaggaagaccccccagggccccccagagatctacagcgacacccagttccccagcctgcagagcacagccaagcacgtggagagcaggaaggacaaggagatggagaagagctttgaggtggtgcgccacaagaacagaggaagagatgaggtgtccaagaaccaggccctgaagctgcagctggacaaccagtatgctgtgctggagaaccagaagagcagccacagccagtacaactag

SEQ ID NO: 193685 - DNA, 777 bp, Artificial Sequence
  derived and/or modified sequence
atggccgagaccgaggagcggagcctggacaacttcttcgccaagcgggataaaaagaaaaaaaaggaacgaagcaatagagctgctagcgccgccggagctgccgggagcgccgggggatcttctggcgcagccggagccgcaggggggggcgcgggggctggcactagacctggcgatggtgggaccgcatcagcgggtgctgcaggccctggtgccgctacaaaggcagtgacgaaggacgaagatgaatggaaggagctggaacaaaaggaggtggattactccggactcagagtgcaggcaatgcagataagctctgagaaagaggaggatgataatgagaagcggcaggaccctggggacaactgggaggagggtggcggaggcggcggcggcatggagaaatcttcagggccctggaataagacagcgcccgtacaagctcctcctgcccctgtgatcgtgacagaaactcctgaacccgccatgacatctggagtgtaccgcccaccgggtgcccggctgacgacaacccgcaagacacctcaggggccacctgaaatttattccgacacgcagtttccttcattacagtcaacggccaaacacgtagaatctaggaaagataaggagatggagaagtcgtttgaagttgtgcgacacaagaatagaggtagagacgaggtctctaagaaccaggccctgaaacttcagctggacaaccagtatgccgtactcgagaatcagaagtcgtctcatagccagtataactag

SEQ ID NO: 193686 - DNA, 777 bp, Artificial Sequence
  derived and/or modified sequence
atggctgagacagaggagcggtctctggacaatttctttgctaagagagataagaagaagaagaaggagcgctcaaatcgggctgccagtgcggctggcgcagcaggatccgccggaggtagttccggcgcagccggtgccgcaggtggcggagcaggcgctggcacccgtcctggagatggaggaacggctagtgctggcgcagccggacccggagccgctaccaaagctgtgactaaagatgaagacgagtggaaggaactggaacagaaggaagtcgattacagcgggttaagagtgcaagctatgcagatatctagcgagaaggaggaagatgacaacgagaaacgccaggatcccggtgacaattgggaggagggcggtgggggtgggggaggcatggaaaagagtagtggcccttggaacaagactgcccctgttcaagcccctcctgcgcctgtgatcgtgactgagacacctgaaccagccatgacaagcggtgtgtatcggcctcccggtgctaggctcacgacaacaaggaaaacaccacaggggccacctgagatttattccgatacacagttcccatcccttcagagtacggctaagcacgtggagtcccggaaagacaaagagatggaaaagtccttcgaagtcgtgaggcacaagaatcgcggacgagatgaggtctctaaaaaccaggccctcaaattgcagctcgacaatcagtacgccgtgctggagaatcagaaaagttcacactcccaatacaactag

SEQ ID NO: 193687 - DNA, 3307 bp, Artificial Sequence
  derived and/or modified sequence
ctggctcgcgcgtgccttttcccctcaggttgtggggagagcggaatcctgctccgccgtcgcagcagcagcggcagccccggcagcctcgggcgacagcggcggcgcgcgagcccccgggcggaccgtaccaccgctcgccagcacgcagggggagccgcccgtctcgccgcgcacgcctcggcgaccccgcggggctgaggcgtcgccgcgcccggcagcgtgagcgcagagccggcctcgaccccgagctcggagccccgcgggccgcgcccgccgccggccccacccatccgggtcgaggaggccgaggccatggctgagacggaggagcggagcctggacaacttctttgccaagagggacaagaagaagaagaaggagcggagcaaccgggcggcgagtgccgcgggcgcagcgggcagcgccggcggaagcagtggagccgcgggtgcggcgggcggcggggcgggcgcggggacccggccgggtgacggcgggaccgccagcgcgggggctgcgggcccaggggccgccaccaaggctgtgacgaaggacgaagatgaatggaaagaattggagcaaaaagaggttgattacagcggcctcagggttcaggcaatgcaaataagcagtgaaaaggaagaagacgataatgaaaagagacaagatccaggtgataactgggaagaaggtggaggtggtggtggaggtatggaaaaatcttcaggtccctggaataaaacagctccagtacaagcacctcctgctccagtaattgttacagaaaccccagaaccagcgatgactagtggtgtgtataggcctcctggggccaggttaaccacaacaaggaaaacaccacaaggaccaccagaaatctacagtgatacacagttcccatccctgcagtcaactgccaagcatgtagaaagccggaaggataaagaaatggagaagagctttgaagtagtaagacacaaaaatagaggtagggatgaggtttcaaaaaaccaggcccttaaacttcagctagacaaccaatatgctgtgcttgaaaatcagaaaagcagccactcacaatacaattaaggaatgggctttgctaacccttctgaggtaactagactgcagctaaccaccaccaacagccattcatcatctgatctctgctggatctacagacaccgatgcagaccactcgatttcatgaccggccctattgcactatggaagttaaagtgtcacgactgctctatgcatattggatttaggggaattttcattgttacataaatgtgtgaactagtttcaacagtgttctttcatatttactctgcaaatacaaaaaaccaaaacctgcagccagtggtcatttcaaaatctttttatgttcagatactgagccttcataagggttgactacctcagatttgctgcactcattgtggacttcatgtggatcacaacttctggataagaagattacaactattaagtgtcgatgtgaaccttgcaaccagctctactggattcttatcagaaatcctgcataaaaagtcagccatctgggttctgatctgctgtaaaagatgaagatttaagtgaccttaattaacctgtcctgtgccctacccttaaggaatactctctgtagtaggctgttgttatattagacttcctggaacacactgctgaaaagaactgatgtgttcagatcatctgtgtagggctgtgatttgtaatttaaactaattgtattctgaggtaaccacaaaataaattcaaccaaactggggtccaccaagtgggggaaggggaagggagagaataatcttgggggttttttttttttggtaatttttttatttggatagtgcttttttgttttgtttttgttctgcattaaggccttttttgctttgacttgaaataagttctttgacagagcatattgcttggttaattaagtaacctaaagtatgcattaggattgtgaaatgtctcgtgagtatgccaatcctgagggtggaaccaaatagcctttgatgaaaagggcagtggattctggaggctctacttcaggtgctgctataatgcctcatctaatcaggactaaattgtgtaggaaactgcagtgggaagaatatgctttctgctcaggctaagagggtcactgatctgtccttagaaattcagagtaacatgagcaaaacctcagctaaaacccatttaagtggcatggattgtgcatgatctttgataagaattcctcatgtacttgtgcctagtttttcaaggtattggctgttctatagatgcagtgattgtcccagctagctctgttaccagccttttggtgtgtctttatgttcatttggagagtcagggcgaaagacaggtgatgtagcacttctgtttttaataattattgcttaaaatacctattaatagttttgggtcatttaaagggacttgaggaagctacccaggattacagaagagtgtccacctaacaagatggtctggcagtttcctagttttgtatctggttcaatagaaatatgtgaaagtggtaatgtcatcatttgatgcagagtccgggtttctctataataaatccctttgccaaatgcatgagttgcagacttgctactggcaagagtgaagcaagtgggtgagtaaaactattttgacgtgggagcgttttcagataggagtttagtcttgacgaaagtgtccgtgcaggaattggactccgaggagggttacagtatctcctgacgggacctgccactcgcatctgggcaatgttgacatttgaggtggcaggcaggatgcctgccttctaatatatttgggtgagtaactgagccagccaagggaaggttgaatgattaaatcagaaatgggattcttggtaaactgaagacttttatttgggaatgaaaaaccttaaaaaaatctcttcatcgttgaactgtgcattttccctgcattttttcccaacaaaattttgttgggggttatgttactgaagaatgaacagatgagtaagtggaggtgttatgtaaaggcatattgtactcgaaatctgaagacctgcagcagatttaaattacaactcttgttataactttttaaaagattgtgaaaatatcaaaatataaatgaatcaagttttaatatactgtatgatgggtggatgaggctgtccattgtaccatttgtttgaattctcaggcatggtttggcagtgcaagaattctgtaacattaacaaattcaataaaaagtaaatatatgga

SEQ ID NO: 193688 - DNA, 777 bp, Artificial Sequence
  derived and/or modified sequence
atggccgagaccgaggagagaagcctggacaacttcttcgccaagagagacaagaagaagaagaaggagagaagcaacagagccgccagcgccgccggcgccgccggcagcgccggcggcagcagcggcgccgccggcgccgccggcggcggcgccggcgccggcaccagacccggcgacggcggcaccgccagcgccggcgccgccggccccggcgccgccaccaaggccgtgaccaaggacgaggacgagtggaaggagctggagcagaaggaggtggactacagcggcctgagagtgcaggccatgcagatcagcagcgagaaggaggaggacgacaacgagaagagacaggaccccggcgacaactgggaggagggcggcggcggcggcggcggcatggagaagagcagcggcccctggaacaagaccgcccccgtgcaggccccccccgcccccgtgatcgtgaccgagacccccgagcccgccatgaccagcggcgtgtacagaccccccggcgccagactgaccaccaccagaaagaccccccagggcccccccgagatctacagcgacacccagttccccagcctgcagagcaccgccaagcacgtggagagcagaaaggacaaggagatggagaagagcttcgaggtggtgagacacaagaacagaggcagagacgaggtgagcaagaaccaggccctgaagctgcagctggacaaccagtacgccgtgctggagaaccagaagagcagccacagccagtacaactag

SEQ ID NO: 193689 - protein, 224 aa, Artificial Sequence
  derived and/or modified sequence
MPGRAPLRTVPGALGAWLLGGLWAWTLCGLCSLGAVGAPRPCQAPQQWEGRQVMYQQSSGRNSRALLSYDGLNQRVRVLDERKALIPCKRLFEYILLYKDGVMFQIDQATKQCSKMTLTQPWDPLDIPQNSTFEDQYSIGGPQEQITVQEWSDRKSARSYETWIGIYTVKDCYPVQETFTINYSVILSTRFFDIQLGIKDPSVFTPPSTCQMAQLEKMSEDCSW

SEQ ID NO: 193690 - protein, 344 aa, Artificial Sequence
  derived and/or modified sequence
MPPRMLVAPLPLHFLLAAVSSENRSGRRQWQQAVAAGSGPGRNSSRAIHWSLPRALVPATGTRASGSQKRQRPPKGQEALWSRPHSRHSAERAGGSHSDPGRLSAPLGLGLPSGRGRLTAMPGRAPLRTVPGALGAWLLGGLWAWTLCGLCSLGAVGAPRPCQAPQQWEGRQVMYQQSSGRNSRALLSYDGLNQRVRVLDERKALIPCKRLFEYILLYKDGVMFQIDQATKQCSKMTLTQPWDPLDIPQNSTFEDQYSIGGPQEQITVQEWSDRKSARSYETWIGIYTVKDCYPVQETFTINYSVILSTRFFDIQLGIKDPSVFTPPSTCQMAQLEKMSEDCSW

SEQ ID NO: 193691 - DNA, 1035 bp, Artificial Sequence
  derived and/or modified sequence
atgcccccccggatgctggtggcccccctgcccctgcacttcctgctagccgccgtgagctcggaaaaccggagtggacgaaggcaatggcaacaggccgtggccgcaggatccgggccgggccgaaatagtagccgggctatccattggtccctaccaagggccctggtgcccgcaaccggtacaagggcttcggggtcccagaaacggcagagacccccaaaggggcaggaggcgctctggagcaggcctcacagccgacatagcgctgagcgcgccggaggttcccattctgaccctggacgccttagtgctccattaggacttgggctgccttccggccgaggtaggttaaccgctatgcccggacgtgcgcctttgcgtaccgtgccaggcgccctgggcgcttggctcctgggcggactgtgggcgtggactctctgtggcctttgcagcctgggagccgtgggtgccccacgcccatgccaagctccacagcaatgggaaggacgacaagtgatgtatcagcagtcttcgggtagaaatagtagagccctcctatcgtatgacggtctaaaccagagggtgcgcgtgctggacgagcgcaaggcactcattccctgtaaacggttgttcgagtacattttgctgtataaggacggggttatgtttcagatagaccaggccacaaagcaatgtagtaagatgactctgacccagccatgggaccctctcgacataccccagaactctacttttgaagatcagtattccatcgggggccctcaggagcagatcactgtgcaagaatggtccgacaggaaatccgcgcgatcctatgaaacttggataggaatctacaccgtgaaggattgctatcctgtgcaagagacttttaccatcaattattctgtcattctgtcaaccaggttctttgacatccaactggggatcaaggacccatcagtctttacaccaccaagcacttgtcagatggctcagctcgagaagatgtcagaggactgttcatggtag

SEQ ID NO: 193692 - DNA, 675 bp, Artificial Sequence
  derived and/or modified sequence
atgcctggaagagctccgctgagaacagtgcctggggctctcggagcatggttgctggggggactctgggcctggaccctctgcggtctgtgctcactgggggcagtcggggcaccacgcccatgccaggcccctcagcagtgggagggacggcaggttatgtaccaacaatcctccgggcgtaattctcgggcactactatcgtatgacggattgaaccagagagtccgagtgctggacgaaagaaaagccctcatcccttgtaaaaggctttttgagtacatcctgttatataaagatggtgtgatgttccagatcgaccaggccacgaaacaatgcagcaagatgacactgacccaaccatgggatccgctggacatacctcaaaattccacttttgaggatcagtattctatcgggggtccgcaggaacaaatcactgtgcaggaatggtccgatcggaagagtgcccgaagttacgagacttggatcgggatctataccgtcaaggattgctatcctgtgcaggaaacgttcaccatcaattacagtgtcatcctaagtacccggttcttcgatattcagctgggcattaaagacccaagcgtcttcacacccccttctacttgccagatggcccagctagaaaagatgtccgaagactgcagctggtag

SEQ ID NO: 193693 - DNA, 1035 bp, Artificial Sequence
  derived and/or modified sequence
atgccacctcgcatgctcgtggcccctttgcccttgcactttctactggctgctgtgtccagcgaaaatcggagcggaaggaggcagtggcagcaggccgtggccgctggctccggccctggacgaaatagcagtagagcaatccactggtctttgccgagggccctggttccagccacaggaacaagagcaagtgggagtcagaaacgccagcgcccaccaaagggacaggaggccctgtggagcagaccgcactcaagacattcagcagagcgcgcaggagggtcgcactctgacccaggccgtctcagcgcgcctctcggactgggtctcccttccggccgaggaagattgaccgcgatgcctggcagggcacctctcaggacagttcctggcgcactaggagcatggcttctgggaggtctgtgggcttggacactttgtggcctctgtagtctcggagccgttggcgcaccacgcccatgtcaggcaccccagcaatgggaaggaaggcaagtgatgtatcaacagtcctctggacgaaatagcagggccctattgagttatgacgggctgaatcagagagtccgtgtgttggatgagcgcaaggcactcattccttgcaaaaggctgtttgagtatattctgctctataaggatggcgtgatgttccagatagatcaagccacaaaacagtgttccaaaatgacattgacgcagccctgggaccctctggacatcccccagaatagcacgtttgaggatcagtactccatcggtgggcctcaggagcaaatcacggttcaagaatggagtgatcggaaatccgctcggtcgtatgagacatggattgggatatacactgtgaaagactgttatccagtgcaggaaaccttcaccatcaattattcagtcatccttagcactagatttttcgatatccagttgggcataaaagatccatcagtcttcaccccccctagcacatgccagatggctcagcttgagaaaatgtccgaagactgttcgtggtag

SEQ ID NO: 193694 - DNA, 675 bp, Artificial Sequence
  derived and/or modified sequence
atgccagggcgcgcacccctgcggaccgtgcctggtgccctgggcgcctggttgttgggaggcctttgggcatggactctgtgcggtctgtgttcactcggagccgtgggagcccctcggccttgtcaagctcctcagcagtgggagggccgccaagttatgtatcagcaaagcagcgggagaaacagccgcgcccttctgagctacgatggattgaatcaacgtgtgagagttctggatgagcgtaaggctctgataccgtgcaaaagattgttcgagtacatcttactatataaggacggggtaatgttccaaattgatcaggctacgaagcaatgctctaaaatgacgctgacacagccatgggatcctcttgatattccccagaacagcactttcgaggatcagtacagcataggcggtccccaggagcaaatcacagtacaggagtggagcgacaggaaatccgcacgctcctatgaaacgtggatcggcatctacacagttaaagattgctaccccgtgcaagagacatttaccattaattactcggtcatactgtcgaccagattcttcgatatacagttgggaataaaggatccaagcgtgtttacaccaccatcaacctgtcagatggcccagctggaaaagatgagtgaagactgtagctggtag

SEQ ID NO: 193695 - DNA, 1035 bp, Artificial Sequence
  derived and/or modified sequence
atgcctcctcgtatgctggtcgctcccctccccctgcactttctgttagccgcagtgtctagtgagaacaggtccggtagaagacagtggcagcaggctgtggctgcaggatccgggcccggcagaaactcatccagagccattcattggtctttaccccgagctctggtcccggcaactggcacaagagcctccggatctcagaaaaggcaacggccgcctaagggacaagaggctttatggtctcggccacattcaagacattccgccgagcgcgccggagggtcccatagcgacccgggacgattgtccgctccgcttggactgggcctcccttcaggccggggtcggcttaccgcaatgccaggtcgagcacctctaaggactgttcccggcgcactcggggcttggctgttgggcggcctgtgggcctggaccctttgtggactctgtagcctgggcgctgtcggtgctcccagaccctgtcaggcaccccagcaatgggagggccgtcaagtgatgtatcaacagagcagcggtcgaaattctagggccttattatcttacgacgggttgaatcagagggtgcgagttctcgatgagcgcaaagccctcatcccttgtaaaagacttttcgagtacattctgctgtataaagatggagtcatgttccagatcgatcaagcgacaaaacagtgctcaaagatgacacttacccagccttgggatcccttggacattccgcaaaacagcacctttgaggaccagtactctataggtggaccccaggaacagatcaccgttcaggaatggagcgacaggaaatccgcccgatcttacgagacgtggatcggaatttacacagtgaaagactgttaccctgtacaggagacattcactattaattatagtgtgattctgagtactcgattctttgatatccagttaggtataaaggacccatctgtcttcacaccaccttccacatgccagatggctcaattggagaagatgtctgaggattgtagctggtag

SEQ ID NO: 193696 - DNA, 675 bp, Artificial Sequence
  derived and/or modified sequence
atgcccgggagggcccccctccgcacagttcctggagccctcggtgcttggttgctgggggggctgtgggcatggactttgtgtggactttgttctctgggtgctgtgggcgcacctagaccctgtcaggcacctcagcagtgggaaggcagacaggtaatgtaccagcaatccagcggcagaaatagcagagccctactgtcatacgatggcttgaaccagcgagttagagtccttgacgagcggaaagccctgataccgtgtaaacggttgttcgaatacatactcctgtataaagacggggtaatgttccagatcgatcaggctactaaacagtgcagcaagatgacccttactcaaccatgggatccattggacatacctcagaacagtactttcgaagatcagtattctattggcggtccccaggaacagattacagtccaggaatggtccgatcgcaagtctgctcgtagctacgaaacgtggattggcatatatactgtaaaggattgctaccctgtacaagagacttttacaatcaactattcagtaattcttagtacccgctttttcgatatccagctgggaatcaaggacccttcagtgtttacccccccttcaacctgccaaatggcccagctcgaaaaaatgtctgaagattgctcatggtag

SEQ ID NO: 193697 - DNA, 1035 bp, Artificial Sequence
  derived and/or modified sequence
atgccgcctagaatgctggtcgcacccctccctctacattttctgttggctgccgtgtcctctgagaatcgctccggtagaaggcaatggcaacaggccgtggccgctggcagcggccctgggagaaactcttcccgagctattcactggtcgttgcccagagccctcgtgccagctactggtacacgagcatccggatcccagaagagacagcggcccccaaaaggccaggaagcgctatggagccgtccccattctcggcactccgccgaacgcgccggaggatctcactctgaccccggacgattgtccgctccgcttggactgggcctcccttcaggccggggtcggcttaccgcaatgccaggtcgagcacctctaaggactgttcccggcgcactcggggcttggctgttgggcggcctgtgggcctggaccctttgtggactctgtagcctgggcgctgtcggtgctcccagaccctgtcaggcaccccagcaatgggagggccgtcaagtgatgtatcaacagagcagcggtcgaaattctagggccttattatcttacgacgggttgaatcagagggtgcgagttctcgatgaacgtaaagctctgatcccctgcaaacgactctttgagtacattcttctttataaggacggagtgatgttccagattgaccaggccaccaagcagtgcagtaagatgaccctgactcagccatgggaccccctagacatcccacagaattctacattcgaggatcaatactccatcggcggcccacaggaacagatcaccgtgcaagaatggagcgaccgcaaaagtgcacgcagctatgagacctggattggaatatataccgtaaaagactgctatcccgtccaagaaactttcaccatcaattactctgtcatactatccacccgtttctttgatatccagctcggaataaaggatccttccgtgttcacaccacccagcacctgccagatggctcagctcgaaaagatgtctgaagactgttcttggtag

SEQ ID NO: 193698 - DNA, 2599 bp, Artificial Sequence
  derived and/or modified sequence
tcccccctcttaaaacacgatgcctcccaggatgctagtggcaccactgccactgcatttcctgttggcagcagtgagcagtgaaaaccgaagcggcagaaggcagtggcagcaggcagtggcagcaggcagtggcccaggcagaaatagctcccgcgcgattcactggagccttccccgggccctggtcccggctaccgggactcgcgcgtccggatctcaaaagcggcagaggccaccgaagggacaggaagcactttggtccagaccacactcccggcacagtgcggaaagagccggcgggagccactctgatcccggacgcctcagcgcccccttgggcttgggcttgccctcgggccggggaaggctgaccgcgatgccaggacgcgctcccctccgcaccgtcccgggcgccctgggtgcctggctgctgggcggcctctgggcctggaccctgtgcggcctgtgcagcctgggggcggtgggagccccgcgcccgtgccaggcgccgcagcagtgggaggggcgccaggttatgtaccagcaaagtagcgggcgcaacagccgcgccctgctctcctacgacgggctcaaccagcgcgtgcgggtgctggacgagaggaaggcgctgatcccctgcaagagattatttgaatatattttgctgtataaggatggagtgatgtttcagattgaccaagccaccaagcagtgctcaaagatgaccctgacacagccctgggatcctcttgacattcctcaaaactccacctttgaagaccagtactccatcggggggcctcaggagcagatcaccgtccaggagtggtcggacagaaagtcagctagatcctatgaaacctggattggcatctatacagtcaaggattgctatcctgtccaggaaacctttaccataaactacagtgtgatattgtctacgcggttttttgacatccagctgggtattaaagacccctcggtgtttacccctccaagcacgtgccagatggcccaactggagaagatgagcgaagactgctcctggtgagcctgtgcatagggaagcggcagcatcggatgtcagccccctgcggccccagctggagatggatatgagactagtcaagatgtgaatgctaattggagagaaatataattttaggaagatgcacattgatgtggggttttgatgtgtctgattttgactactcaagctctgtttacagaagaaaattgaatggcgagggtgtggccatatgaactgactagatggctaatatggacactttgggtatttctaatgcctgttcagggctggttttctgcatgcacgggtatacacataatgcagtgccatgcacatagggaagggtcagtaagagaagtttgccttggcagcaagtatttattgttgacattattcagaattagtgataataaaaagcagagtgattttggtcaattttattattaattcttaaattccctgcagagaatgccccctttattgctgcaccagggttggcattgctcccactgagccctactccaccctgtccctgcactcccttggttgccaaaaaaatgataacttaaatcccttccagacttaagaattttatggcatggcccaattgatataaacatttagaaggaaatgaaaagctaaaataggaagtaattattcctctaaagaaacattttgagcaaggcagtttagagaatcctaatgtctacactggcatagcacgagccatgtaagcttcttttttttctatgcaagagtattgatgtatgtgctgaatcttcacagacttgtcaatacacaggcagtattctaaaatagcactgaacagggagtcaggagactattgtctcctaaacccaggactagagttccctcgtactgtcactcctttggtcattaaatgcactgggcttgcccgcactttggccttcctagaacactgcttcataacctctctgtctgacttctgcatctccttccaggtcagctcattcacaagagttgctcccaagcctggatgagttgcaccttgcatcttgagcatgcatttctcacaataattattaagctgtgtgataatttctgctttcaggacactcatccattatcttggctgtgagctccttgggtacgggtaccttgtatgtttacttttatatccctagcacaaagcaagtgcctggcacatagtcagtgccctaagtattcgtagagtgaagaatgccagcctctcttgtccctggtttccttatgtgttgaatgtggttgagtttgtccattgctagggagagacttccagtaataaaatttactattctagatgcttctactgttatgttttatctgcccatttatctttcttagttaccaggagaaatgtgtgacacctatattataatgaaaacaatctcattacttatagtttatctatattaaacaaatttaattgcattttaaagcattctttgatactgttgcttttgcaataaatatggataatcttggttataagggagttaaaacaatgctgtaataaataaagtgcttcatgtgatcaaaatcaaa

SEQ ID NO: 193699 - DNA, 2596 bp, Artificial Sequence
  derived and/or modified sequence
tcccccctcttaaaacacgatgcctcccaggatgctagtggcaccactgccactgcatttcctgttggcagcagtgagcagtgaaaaccgaagcggcagaaggcagtggcagcaggcagtggcagcaggcagtggcccaggcagaaatagctcccgcgcgattcactggagccttccccgggccctggtcccggctaccgggactcgcgcgtccggatctcaaaagcggcagaggccaccgaagggacaggaagcactttggtccagaccacactcccggcacagtgcggaaagagccggcgggagccactctgatcccggacgcctcagcgcccccttgggcttgggcttgccctcgggccggggaaggctgaccgcgatgccaggacgcgctcccctccgcaccgtcccgggcgccctgggtgcctggctgctgggcggcctctgggcctggaccctgtgcggcctgtgcagcctgggggcggtgggagccccgcgcccgtgccaggcgccgcagcagtgggaggggcgccaggttatgtaccagcaaagtagcgggcgcaacagccgcgccctgctctcctacgacgggctcaaccagcgcgtgcgggtgctggacgagaggaaggcgctgatcccctgcaagagattatttgaatatattttgctgtataaggatggagtgatgtttcagattgaccaagccaccaagcagtgctcaaagatgaccctgacacagccctgggatcctcttgacattcctcaaaactccacctttgaagaccagtactccatcggggggcctcaggagcagatcaccgtccaggagtggtcggacagaaagtcagctagatcctatgaaacctggattggcatctatacagtcaaggattgctatcctgtccaggaaacctttaccataaactacagtgtgatattgtctacgcggttttttgacatccagctgggtattaaagacccctcggtgtttacccctccaagcacgtgccagatggcccaactggagaagatgagcgaagactgctcctggtgagcctgtgcatagggaagcggcagcatcggatgtcagccccctgcggccccagctggagatggatatgagactagtcaagatgtgaatgctaattggagagaaatataattttaggaagatgcacattgatgtggggttttgatgtgtctgattttgactactcaagctctgtttacagaagaaaattgaatggcgagggtgtggccatatgaactgactagatggctaatatggacactttgggtatttctaatgcctgttcagggctggttttctgcatgcacgggtatacacataatgcagtgccatgcacatagggaagggtcagtaagagaagtttgccttggcagcaagtatttattgttgacattattcagaattagtgataataaaaagcagagtgattttggtcaattttattattaattcttaaattccctgcagagaatgccccctttattgctgcaccagggttggcattgctcccactgagccctactccaccctgtccctgcactcccttggttgccaaaaaaatgataacttaaatcccttccagacttaagaattttatggcatggcccaattgatataaacatttagaaggaaatgaaaagctaaaataggaagtaattattcctctaaagaaacattttgagcaaggcagtttagagaatcctaatgtctacactggcatagcacgagccatgtaagcttcttttttttctatgcaagagtattgatgtatgtgctgaatcttcacagacttgtcaatacacaggcagtattctaaaatagcactgaacagggagtcaggagactattgtctcctaaacccaggactagagttccctcgtactgtcactcctttggtcattaaatgcactgggcttgcccgcactttggccttcctagaacactgcttcataacctctctgtctgacttctgcatctccttccaggtcagctcattcacaagagttgctcccaagcctggatgagttgcaccttgcatcttgagcatgcatttctcacaataattattaagctgtgtgataatttctgctttcaggacactcatccattatcttggctgtgagctccttgggtacgggtaccttgtatgtttacttttatatccctagcacaaagcaagtgcctggcacatagtcagtgccctaagtattcgtagagtgaagaatgccagcctctcttgtccctggtttccttatgtgttgaatgtggttgagtttgtccattgctagggagagacttccagtaataaaatttactattctagatgcttctactgttatgttttatctgcccatttatctttcttagttaccaggagaaatgtgtgacacctatattataatgaaaacaatctcattacttatagtttatctatattaaacaaatttaattgcattttaaagcattctttgatactgttgcttttgcaataaatatggataatcttggttataagggagttaaaacaatgctgtaataaataaagtgcttcatgtgatcaaaatc

SEQ ID NO: 193700 - DNA, 675 bp, Artificial Sequence
  derived and/or modified sequence
atgcccggcagagcccccctgagaaccgtgcccggcgccctgggcgcctggctgctgggcggcctgtgggcctggaccctgtgcggcctgtgcagcctgggcgccgtgggcgcccccagaccctgccaggccccccagcagtgggagggcagacaggtgatgtaccagcagagcagcggcagaaacagcagagccctgctgagctacgacggcctgaaccagagagtgagagtgctggacgagagaaaggccctgatcccctgcaagagactgttcgagtacatcctgctgtacaaggacggcgtgatgttccagatcgaccaggccaccaagcagtgcagcaagatgaccctgacccagccctgggaccccctggacatcccccagaacagcaccttcgaggaccagtacagcatcggcggcccccaggagcagatcaccgtgcaggagtggagcgacagaaagagcgccagaagctacgagacctggatcggcatctacaccgtgaaggactgctaccccgtgcaggagaccttcaccatcaactacagcgtgatcctgagcaccagattcttcgacatccagctgggcatcaaggaccccagcgtgttcaccccccccagcacctgccagatggcccagctggagaagatgagcgaggactgcagctggtag

SEQ ID NO: 193701 - DNA, 1035 bp, Artificial Sequence
  derived and/or modified sequence
atgccccccagaatgctggtggcccccctgcccctgcacttcctgctggccgccgtgagcagcgagaacagaagcggcagaagacagtggcagcaggccgtggccgccggcagcggccccggcagaaacagcagcagagccatccactggagcctgcccagagccctggtgcccgccaccggcaccagagccagcggcagccagaagagacagagaccccccaagggccaggaggccctgtggagcagaccccacagcagacacagcgccgagagagccggcggcagccacagcgaccccggcagactgagcgcccccctgggcctgggcctgcccagcggcagaggcagactgaccgccatgcccggcagagcccccctgagaaccgtgcccggcgccctgggcgcctggctgctgggcggcctgtgggcctggaccctgtgcggcctgtgcagcctgggcgccgtgggcgcccccagaccctgccaggccccccagcagtgggagggcagacaggtgatgtaccagcagagcagcggcagaaacagcagagccctgctgagctacgacggcctgaaccagagagtgagagtgctggacgagagaaaggccctgatcccctgcaagagactgttcgagtacatcctgctgtacaaggacggcgtgatgttccagatcgaccaggccaccaagcagtgcagcaagatgaccctgacccagccctgggaccccctggacatcccccagaacagcaccttcgaggaccagtacagcatcggcggcccccaggagcagatcaccgtgcaggagtggagcgacagaaagagcgccagaagctacgagacctggatcggcatctacaccgtgaaggactgctaccccgtgcaggagaccttcaccatcaactacagcgtgatcctgagcaccagattcttcgacatccagctgggcatcaaggaccccagcgtgttcaccccccccagcacctgccagatggcccagctggagaagatgagcgaggactgcagctggtag

SEQ ID NO: 193702 - DNA, 675 bp, Artificial Sequence
  derived and/or modified sequence
atgcccggtcgggctccactgcgtacagtgccgggagccctcggggcttggctgctgggcggtttatgggcatggactttgtgcggcttgtgttccttgggagccgtgggagcgcctcggccgtgtcaagccccacagcaatgggaggggaggcaggtgatgtatcagcagagctcaggacggaacagtagggcccttcttagttacgacgggttgaaccagagagtgcgcgtgctagacgagcggaaagcactcatcccatgcaagaggctgtttgagtacatcctgctatacaaagatggcgtgatgtttcagatagatcaggccacgaagcaatgctctaagatgacccttactcagccctgggaccccttagacatcccacaaaatagtacttttgaggaccagtattccatcggcgggccacaggagcaaatcaccgtgcaggagtggtctgatagaaagtccgcccggtcatacgagacgtggattggtatatacactgttaaagactgttatccagtgcaagagacatttaccatcaactactcagttatcctcagcacccgattctttgacatccagctagggattaaggacccttctgtgtttacgcctcctagcacctgtcagatggcacaacttgagaagatgtcagaagactgtagctggtag

SEQ ID NO: 193703 - DNA, 1035 bp, Artificial Sequence
  derived and/or modified sequence
atgcccccacgcatgctggtcgctcccctgccattacacttcctgctagccgcagtgagctcggaaaatcggtctggaagacggcagtggcagcaagccgttgccgcaggctcaggcccaggaagaaatagctcacgcgccatacactggtccctccctagggcactcgtccctgccacggggactcgagcttcggggtctcagaagagacagaggcctccgaagggacaggaagccctatggtcccgcccccattctcgccactcagctgagcgagccggcggctctcactccgatcccggaagactctcggctcctctgggcctgggtctcccctcaggacgaggacgtcttacagccatgcccggaagggccccacttaggaccgttccaggagccctcggcgcctggctgctgggtggcctgtgggcgtggacgctgtgtggcctatgttctctcggagctgtcggagcccctaggccatgccaggctccccagcagtgggaaggtagacaggtgatgtatcaacagagttctggacgcaattctcgtgccctcctgagttatgacggtctgaaccagagagtccgggtgctcgacgaacggaaggctcttatcccatgcaagcggctcttcgagtatattctattatataaagatggagtgatgttccagattgaccaggcaactaaacagtgcagcaagatgactctgacacagccttgggatccactggatataccacagaactccacatttgaggaccaatactcaatcggggggcctcaagaacagatcacagtgcaggaatggagcgataggaagtctgcccgcagttacgagacttggatagggatctatactgtgaaagactgttatcccgtgcaggagactttcaccatcaactactccgtaattcttagcacacgattctttgatatccagttggggattaaggacccctctgtgttcaccccaccgtccacgtgccagatggcacaactggagaagatgtctgaggattgttcttggtag

SEQ ID NO: 193704 - DNA, 675 bp, Artificial Sequence
  derived and/or modified sequence
atgcctggccgggcccccctgaggacagtgcctggggccctgggcgcctggctgctgggcggcctgtgggcctggaccctgtgtggcctgtgcagcctgggcgctgtgggcgccccccggccctgccaggccccccagcagtgggagggccggcaggtgatgtaccagcagagcagtggaagaaacagccgggccctgctgtcctatgatggcctgaaccagagggtgcgggtgctggatgagaggaaggccctgatcccctgcaagaggctgtttgagtacatcctgctgtacaaggatggagtgatgttccagattgaccaggccaccaagcagtgcagcaagatgaccctgacccagccctgggaccccctggacatcccccagaacagcacctttgaggaccagtacagcattggaggcccccaggagcagatcaccgtgcaggagtggagcgacaggaagagcgcccggagctatgagacctggattggcatctacacagtgaaggactgctaccctgtgcaggagaccttcaccatcaactacagcgtcatcctgagcacccgcttctttgacatccagctgggcatcaaggaccccagcgtcttcaccccacccagcacctgccagatggcccagctggagaagatgtctgaggactgctcctggtag

SEQ ID NO: 193705 - DNA, 1035 bp, Artificial Sequence
  derived and/or modified sequence
atgccacccaggatgctggtggcccccctgcccctgcacttcctgctggccgctgtgtcctctgagaacagaagtggaagacggcagtggcagcaggccgtggccgccggcagcggccctggcaggaacagcagccgggccatccactggagcctgccccgggccctggtgcctgccaccggcacccgggccagcggcagccagaagaggcagaggcctcccaagggccaggaggccctgtggagccggccccacagccgccacagcgctgagagagctgggggcagccacagcgaccccggccgcctgagcgcccccctgggcctgggcctgcccagcggccggggccgcctgacagccatgcctggccgggcccccctgaggacagtgcctggggccctgggcgcctggctgctgggcggcctgtgggcctggaccctgtgtggcctgtgcagcctgggcgctgtgggcgccccccggccctgccaggccccccagcagtgggagggccggcaggtgatgtaccagcagagcagtggaagaaacagccgggccctgctgtcctatgatggcctgaaccagagggtgcgggtgctggatgagaggaaggccctgatcccctgcaagaggctgtttgagtacatcctgctgtacaaggatggagtgatgttccagattgaccaggccaccaagcagtgcagcaagatgaccctgacccagccctgggaccccctggacatcccccagaacagcacctttgaggaccagtacagcattggaggcccccaggagcagatcaccgtgcaggagtggagcgacaggaagagcgcccggagctatgagacctggattggcatctacacagtgaaggactgctaccctgtgcaggagaccttcaccatcaactacagcgtcatcctgagcacccgcttctttgacatccagctgggcatcaaggaccccagcgtcttcaccccacccagcacctgccagatggcccagctggagaagatgtctgaggactgctcctggtag

SEQ ID NO: 193706 - DNA, 675 bp, Artificial Sequence
  derived and/or modified sequence
atgcccggccgggcccccctgcggaccgtgcccggcgccctgggcgcctggctattgggagggctctgggcatggactctgtgtggtctatgtagtctgggtgccgttggagctccgaggccttgccaggctcctcagcagtgggaaggtaggcaggtgatgtaccagcagagttccgggcgcaactcccgggctctgttatcttacgacggattaaaccagagggtgcgggtgctggacgagagaaaggcactaataccgtgcaaaaggttatttgagtatattttgctttataaggacggagtgatgtttcagattgatcaggctactaagcaatgcagcaagatgaccttgacccagccttgggaccccctcgacatcccacagaactccacattcgaagaccagtacagcatcgggggacctcaagagcagattacagtacaggagtggtctgatcggaagtccgcacgcagttatgaaacttggataggaatctacactgtcaaggattgttacccagtgcaggaaacattcacgatcaactatagcgttatcctgtctacccgtttcttcgatatccagctgggcattaaggatccctcagtcttcacccccccctctacctgccagatggcccagctggagaaaatgtccgaagattgctcctggtag

SEQ ID NO: 193707 - RNA, 675 nt, Artificial Sequence
  derived and/or modified sequence
augccagggcgcgcaccccugcggaccgugccuggugcccugggcgccugguuguugggaggccuuugggcauggacucugugcggucuguguucacucggagccgugggagccccucggccuugucaagcuccucagcagugggagggccgccaaguuauguaucagcaaagcagcgggagaaacagccgcgcccuucugagcuacgauggauugaaucaacgugugagaguucuggaugagcguaaggcucugauaccgugcaaaagauuguucgaguacaucuuacuauauaaggacgggguaauguuccaaauugaucaggcuacgaagcaaugcucuaaaaugacgcugacacagccaugggauccucuugauauuccccagaacagcacuuucgaggaucaguacagcauaggcgguccccaggagcaaaucacaguacaggaguggagcgacaggaaauccgcacgcuccuaugaaacguggaucggcaucuacacaguuaaagauugcuaccccgugcaagagacauuuaccauuaauuacucggucauacugucgaccagauucuucgauauacaguugggaauaaaggauccaagcguguuuacaccaccaucaaccugucagauggcccagcuggaaaagaugagugaagacuguagcugguag

SEQ ID NO: 193708 - RNA, 1035 nt, Artificial Sequence
  derived and/or modified sequence
augccuccucguaugcuggucgcuccccucccccugcacuuucuguuagccgcagugucuagugagaacagguccgguagaagacaguggcagcaggcuguggcugcaggauccgggcccggcagaaacucauccagagccauucauuggucuuuaccccgagcucuggucccggcaacuggcacaagagccuccggaucucagaaaaggcaacggccgccuaagggacaagaggcuuuauggucucggccacauucaagacauuccgccgagcgcgccggagggucccauagcgacccgggacgauuguccgcuccgcuuggacugggccucccuucaggccggggucggcuuaccgcaaugccaggucgagcaccucuaaggacuguucccggcgcacucggggcuuggcuguugggcggccugugggccuggacccuuuguggacucuguagccugggcgcugucggugcucccagacccugucaggcaccccagcaaugggagggccgucaagugauguaucaacagagcagcggucgaaauucuagggccuuauuaucuuacgacggguugaaucagagggugcgaguucucgaugagcgcaaagcccucaucccuuguaaaagacuuuucgaguacauucugcuguauaaagauggagucauguuccagaucgaucaagcgacaaaacagugcucaaagaugacacuuacccagccuugggaucccuuggacauuccgcaaaacagcaccuuugaggaccaguacucuauagguggaccccaggaacagaucaccguucaggaauggagcgacaggaaauccgcccgaucuuacgagacguggaucggaauuuacacagugaaagacuguuacccuguacaggagacauucacuauuaauuauagugugauucugaguacucgauucuuugauauccaguuagguauaaaggacccaucugucuucacaccaccuuccacaugccagauggcucaauuggagaagaugucugaggauuguagcugguag

SEQ ID NO: 193709 - RNA, 675 nt, Artificial Sequence
  derived and/or modified sequence
augcccgggagggccccccuccgcacaguuccuggagcccucggugcuugguugcugggggggcugugggcauggacuuuguguggacuuuguucucugggugcugugggcgcaccuagacccugucaggcaccucagcagugggaaggcagacagguaauguaccagcaauccagcggcagaaauagcagagcccuacugucauacgauggcuugaaccagcgaguuagaguccuugacgagcggaaagcccugauaccguguaaacgguuguucgaauacauacuccuguauaaagacgggguaauguuccagaucgaucaggcuacuaaacagugcagcaagaugacccuuacucaaccaugggauccauuggacauaccucagaacaguacuuucgaagaucaguauucuauuggcgguccccaggaacagauuacaguccaggaaugguccgaucgcaagucugcucguagcuacgaaacguggauuggcauauauacuguaaaggauugcuacccuguacaagagacuuuuacaaucaacuauucaguaauucuuaguacccgcuuuuucgauauccagcugggaaucaaggacccuucaguguuuacccccccuucaaccugccaaauggcccagcucgaaaaaaugucugaagauugcucaugguag

SEQ ID NO: 193710 - RNA, 1035 nt, Artificial Sequence
  derived and/or modified sequence
augccgccuagaaugcuggucgcaccccucccucuacauuuucuguuggcugccguguccucugagaaucgcuccgguagaaggcaauggcaacaggccguggccgcuggcagcggcccugggagaaacucuucccgagcuauucacuggucguugcccagagcccucgugccagcuacugguacacgagcauccggaucccagaagagacagcggcccccaaaaggccaggaagcgcuauggagccguccccauucucggcacuccgccgaacgcgccggaggaucucacucugaccccggacgauuguccgcuccgcuuggacugggccucccuucaggccggggucggcuuaccgcaaugccaggucgagcaccucuaaggacuguucccggcgcacucggggcuuggcuguugggcggccugugggccuggacccuuuguggacucuguagccugggcgcugucggugcucccagacccugucaggcaccccagcaaugggagggccgucaagugauguaucaacagagcagcggucgaaauucuagggccuuauuaucuuacgacggguugaaucagagggugcgaguucucgaugaacguaaagcucugauccccugcaaacgacucuuugaguacauucuucuuuauaaggacggagugauguuccagauugaccaggccaccaagcagugcaguaagaugacccugacucagccaugggacccccuagacaucccacagaauucuacauucgaggaucaauacuccaucggcggcccacaggaacagaucaccgugcaagaauggagcgaccgcaaaagugcacgcagcuaugagaccuggauuggaauauauaccguaaaagacugcuaucccguccaagaaacuuucaccaucaauuacucugucauacuauccacccguuucuuugauauccagcucggaauaaaggauccuuccguguucacaccacccagcaccugccagauggcucagcucgaaaagaugucugaagacuguucuugguag

SEQ ID NO: 193711 - protein, 545 aa, Artificial Sequence
  derived and/or modified sequence
MAEASSLGRQSPRVVSCLEHSLCPGEPGLQTTAVVSMGSGDHQFNLAEILSQNYSVRGECEEASRCPDKPKEELEKDFISQSNDMPFDELLALYGYEASDPISDRESEGGDVAPNLPDMTLDKEQIAKDLLSGEEEEETQSSADDLTPSVTSHEASDLFPNRSGSRFLADEDREPGSSASSDTEEDSLPANKCKKEIMVGPQFQADLSNLHLNRHCEKIYENEDQLLWDPSVLPEREVEEFLYRAVKRRWHEMAGPQLPEGEAVKDSEQALYELVKCNFNVEEALRRLRFNVKVIRDGLCAWSEEECRNFEHGFRVHGKNFHLIQANKVRTRSVGECVEYYYLWKKSERYDYFAQQTRLGRRKYVPSGTTDADQDLDGSDPDGPGRPRPEQDTLTGMRTDPLSVDGTAGGLDEPGVASDGLPSSEPGPCSFQQLDESPAVPLSHRPPALADPASYQPAVTAPEPDASPRLAVDFALPKELPLISSHVDLSGDPEETVAPAQVALSVTEFGLIGIGDVNPFLAAHPTCPAPGLHSEPLSHCNVMTC

SEQ ID NO: 193712 - DNA, 1638 bp, Artificial Sequence
  derived and/or modified sequence
atggcagaggcttcttccctgggccgacagagcccgcgcgtcgtgtcctgcctggaacattcgctgtgtcctggggagccaggtttgcagaccaccgctgtcgtgtcaatgggaagcggggaccatcaatttaatctcgctgaaatcctgtcgcagaattattcagtgcgtggcgaatgcgaggaggctagtcgctgcccggacaagcccaaagaagagctagagaaggacttcatttcacagtccaatgatatgcccttcgatgagttgctggctctctacggctacgaggcaagcgacccaattagtgatcgcgaatccgagggaggtgatgtggcacctaaccttcccgacatgacgctggacaaggaacagatagcgaaggaccttctctccggggaggaagaggaagagacacagtcttccgccgacgatctcactccatccgtcacaagccacgaagctagtgatttattccctaatagatctggaagtaggttcctcgcagacgaagatcgggagcccggctcttcagcttcatctgacactgaagaggattcccttcctgccaataaatgcaaaaaagagatcatggtgggtcctcagttccaagccgatttgtccaatctgcacttgaatcggcattgtgagaaaatctatgagaacgaagatcagctgctgtgggacccttcggtcctgccagagcgagaggtggaagagtttctctatcgtgcagtgaaacggcgatggcacgaaatggccgggcctcagcttccagaaggcgaggccgtgaaggacagcgagcaagccctctatgagctggttaagtgtaatttcaatgtggaagaggctctgagacgactgcggtttaacgtaaaagtaatccgagatgggctgtgcgcatggagtgaagaagagtgccggaactttgagcacggcttccgagtgcacggaaaaaacttccaccttatccaagcaaacaaagtgaggacacgctctgtcggagaatgcgtggagtactattatctctggaaaaaaagcgagcggtatgattactttgcgcagcagacaagattgggaagaagaaaatatgtgccgtctggtaccactgatgctgatcaagacctggatggatccgacccagacggccccggtcgtccccgcccagaacaggacacactgaccggcatgcgcacggacccattaagcgtggacggcacagcaggaggtttagacgaaccaggcgtagccagtgatggactcccatccagcgaacccggcccttgtagctttcaacagctagatgagagtccagccgtccccctcagtcatagaccccccgcattagctgaccctgcgagttatcagccagcagtaactgcccccgaacccgacgcctcccctcggctcgctgtggacttcgccctgcctaaagagctgcccctgattagcagccatgtagatctcagtggcgaccccgaggagactgtcgctccagcacaggttgcgctgtctgttacagagttcgggcttatcgggataggcgacgtgaaccccttcttggccgcgcatcctacctgccccgctccagggctgcactctgagccactgagtcactgcaatgtgatgacctgttag

SEQ ID NO: 193713 - DNA, 2762 bp, Artificial Sequence
  derived and/or modified sequence
cacacggccatggcggaggcctcctcgctggggaggcagagtcctcgcgtggtctcctgcctcgagcacagcctgtgcccaggggagccgggcttgcagacaacagcagtggtgtccatgggctctggagaccatcagttcaacctcgcagagatcctgtcacagaactacagtgttaggggggagtgcgaggaggcctcgaggtgcccagacaagcccaaggaggagctggagaaggacttcatctcccagagcaacgacatgccctttgatgagctgcttgcgctctatggctacgaggcgtcagaccccatttcagaccgggagagtgagggtggtgacgtggccccgaacctcccagacatgaccctggacaaagaacaaatagcgaaggatttgctttcaggggaagaagaggaagagacgcaatcatctgctgacgacctcaccccgtccgtgacctcccacgaggcctccgacctcttccctaaccggagtggatctcgtttcctggctgatgaagacagagagcctggctcttctgcctcctccgacaccgaggaggactctcttcctgccaacaaatgtaagaaggagatcatggtgggacctcagttccaagctgacctcagcaacctgcacttgaaccggcactgtgagaagatctacgagaacgaagaccagctgctctgggaccccagcgtcctccctgagagggaggtggaggagttcctgtacagggcggtgaagcggcgttggcacgagatggccgggcctcagctcccagagggagaagccgtgaaagacagtgagcaggcgctgtacgagttggtgaaatgcaacttcaatgtggaggaggccctgcgaaggctgcggttcaacgtgaaggtgatccgagatgggctctgtgcttggagtgaagaggagtgcaggaactttgagcacggcttccgtgtgcatggaaagaactttcacctgatccaggccaacaaggtgcgcacacggtcagtgggcgagtgtgtcgagtactactacctgtggaagaagtcggagcgctacgactacttcgcccagcagacgcggctgggccggaggaagtacgtcccgtccggaaccacggacgcagaccaggacctggatggcagcgaccccgatggccccggccgtccgcgcccggagcaagacaccctgactgggatgcgcacagatccactgagcgtggatggcacggccggtggtctcgatgagcccggagtggcctctgatggactcccgtcctcggagccagggccgtgttccttccagcagctggatgagtcccccgctgtacccctgtcccatcggcccccagccctggccgacccagcctcataccagccagctgtcactgctccggagccagacgccagcccaaggctggccgtggacttcgccctgcccaaggagctgcccctcatctccagccatgtggacctcagcggggatccggaggagactgtggccccagcacaggtggctttgtcggtcaccgagtttggactcatcggcattggggacgtgaaccccttcctggccgcccaccccacgtgcccggcccccgggctacactcggagcccctgtcacactgtaacgtgatgacctgctgactcctggccgcgggcggcgtatgcggcccagactggacttagcgctgccgctgggcccgcctctgtcagtcttcctgaccccttccccaccccccgggccttggggtagcacctccttctgcttcagaacacgtcaggactggggtgaggtggctgggccgtgagcccttgcccctgtccacacagaatggacccacggccccacccagcgccgtcagcgcccggcactgccacccgggtccgggccgctgcctgcacgtgggatccgtcgggcagccggggacagaagagaccccgccgttgggacgcagggcagagccggccacctagtcccttccagccagcagaggcgagggaaggcgtcactgccccggcggggagacgggcaggacgccctgccccgcaccagcagcctccgccggggcgccctcagctccctgcttggctctgtctctccacacccggcagggccgcgggctgccccagccctgggggtcgtgggcagctgctactcagtgccaaccccgtggggcacagagccatatacctcgctgtccggcccccaccccagcctcgccttcccaccccatcgtctccacttcaggaaaagccgcactttacacccccacctgcctcttccccctccatccctgctccccgatcctgagcggttggggtggggtccctcagcaaccccaggcgtgggtttgaggagacaggtgatttacatcccctttgctgtcctcccccggtaccaaggcagggagcctccggaggagccggccctgctggccacgcaggggccagactccagcctgtttccccagccctgcaggtcttccttctgtgggaagcttcctagcaagatggcttggagtcctggtccccctcctccctggccctctcgttcgtttctgtttctgtttacacgttggagtggggtcctccgtgggcggcggcgcgccctgccccgggtgtcgtccggcctcttgtgctcgagcccctttccgagttggactcgaccatccctcaccccaccaaggaccacactgtgaagtgataactgccttgaacccccctttgctgttttatttattaaacttgatttgaagccc

SEQ ID NO: 193714 - DNA, 1638 bp, Artificial Sequence
  derived and/or modified sequence
atggccgaggccagcagcctgggccggcagagcccccgggtggtgtcctgcctggagcacagcctgtgccctggagagcccggcctgcagaccacagctgtggtgtccatgggcagcggggaccaccagttcaacctggccgagatcctgagccagaactacagcgtgagaggagaatgtgaggaggccagccgctgcccagacaagcccaaggaggagctggagaaggacttcatcagccagagcaatgacatgccctttgatgagctgctggccctgtatggctatgaggccagtgaccccatcagtgaccgggagagcgagggcggagatgtggcccccaacctgcctgacatgaccctggacaaggagcagatcgccaaggacctgctgagcggggaggaggaggaggagacccagagcagcgcagatgacctgaccccatctgtgaccagccatgaggccagtgacctcttccccaacagaagtggcagccgcttcctggctgatgaagatcgggagcccggcagcagcgccagcagtgacacagaggaggacagcctgcctgccaacaagtgcaagaaggagatcatggtgggcccccagttccaggccgacctgagcaacctgcacctgaacagacactgtgagaagatctatgaaaatgaagaccagctgctgtgggaccccagcgtgctgcctgagcgggaggtggaggagttcctgtacagagctgtgaagaggcgctggcatgagatggccggcccccagctgcctgagggggaggccgtgaaggacagcgagcaggccctgtatgagctggtgaagtgcaacttcaacgtggaggaggccctgcggcggctgcgcttcaacgtgaaggtgatcagagatggcctgtgtgcctggagcgaggaggagtgcaggaactttgagcacggcttccgggtgcacggcaagaacttccacctgatccaggccaacaaggtgaggaccaggtctgtgggggagtgtgtggagtactactacctgtggaagaagtcagaaagatatgactactttgcccagcagacccggctgggccgcaggaaatatgtgcccagcggcaccacagatgctgaccaggacctggatggcagtgaccctgatggccctggccggcccaggcctgagcaggacaccctgaccggcatgaggacagaccccctgtctgtggatggaacagctgggggcctggatgagcccggggtggccagtgatggcctgcccagcagcgagcccggcccctgcagcttccagcagctggatgagagccctgctgtgcccctgagccaccggcccccagccctggccgaccctgccagctaccagcctgctgtgacagcccctgagccagatgccagcccccggctggccgtggactttgccctgcccaaggagctgcccctcatcagcagccacgtggacctgagcggggaccctgaggagaccgtggccccagcccaggtggccctgtctgtgacagaatttggcctcatcggcattggagatgtgaaccccttcctggccgcccaccccacctgcccagcccctggcctgcacagcgagcccctgagccactgcaatgtgatgacctgctag

SEQ ID NO: 193715 - DNA, 1638 bp, Artificial Sequence
  derived and/or modified sequence
atggccgaggccagcagcctgggccggcagagcccccgggtggtgagctgtttggagcactcactgtgtccgggtgagcccggcttgcagactaccgctgtggtctccatgggaagcggggatcaccagtttaatcttgcagagatcttgtcccagaactactccgtccgtggggaatgcgaggaggcctccaggtgccctgacaagcctaaggaagaactagaaaaagactttatcagccagagcaacgatatgccatttgacgagcttctggcgttgtatgggtatgaggcctccgatccaatatctgatagagaatcggaaggaggagacgtagccccaaatctgcctgatatgacactcgacaaggaacaaatcgccaaggatctgctgtcaggggaagaggaggaggaaacccagagcagcgccgatgacctgacaccgtcagtgacttcccacgaggctagtgacttgttccctaatcggtccggctcccgatttctggcagatgaagatagggaaccggggagttccgcttcctctgatacggaggaggatagcctgccagcaaataaatgtaagaaggagattatggtaggaccgcaatttcaggctgacctttccaacctgcatctgaatagacactgcgaaaagatttacgagaatgaggatcagttgttatgggatccttccgtgctcccggaaagggaggttgaggagtttctctatcgagccgtgaagcgccgatggcacgagatggcaggcccacagctgcctgagggtgaagctgtgaaggatagtgagcaggctttgtacgagttggtaaagtgcaactttaatgtcgaagaagctctgcgccggttgcggttcaatgttaaggtaataagagatggactttgtgcctggtcagaagaagagtgcaggaatttcgaacacggatttagagtccacggcaagaatttccacctgattcaggcaaataaagtgcgtacaaggtccgttggggagtgtgttgagtactactatctttggaaaaagtcggaacgttatgattacttcgctcagcaaacgaggctgggaaggaggaagtacgtgccttccggaacaacagatgccgatcaagatctggatggctctgatccggatgggcccggcaggccacgcccagaacaagatactctgaccgggatgcgaacggacccactgtccgtcgatgggaccgcgggagggcttgatgagccaggggtggcatccgacggcctcccatcatcagaaccaggcccttgctcctttcagcagctcgatgagtctccggccgtgcccttatcccataggccccccgcattggccgatcctgccagctatcaacccgcagtgaccgctccggaacctgatgcatctcccagactggccgttgattttgccctgcctaaagagttgcctctgatcagctcccatgtggacttaagtggcgatcctgaggaaaccgtggcccccgctcaggtcgctttgtccgtgactgagttcggcctgattggtattggagatgtgaatccatttttagctgcccaccctacctgccctgcgccaggactccactcagaacccctgagccattgtaacgtcatgacttgctag

SEQ ID NO: 193716 - DNA, 1638 bp, Artificial Sequence
  derived and/or modified sequence
atggctgaggctagctcactcggcaggcaaagccccagggtggtgtcttgcctggaacattcactgtgcccaggcgagcccggactccagacaactgcggtcgtgtcaatgggaagcggtgatcaccagttcaacctggccgaaattcttagtcagaattatagcgtgcggggtgaatgcgaagaggcaagcagatgtcctgacaaacccaaggaggaactcgagaaagactttatcagtcaatccaatgatatgcccttcgacgagctgcttgccctctatggctacgaagcatcagaccccatttccgacagagaaagcgagggcggagacgtggcccctaatctgcccgatatgaccctcgataaagagcagattgcgaaggacctgctttccggcgaggaagaggaggaaacgcagagcagcgcagacgatctcacgccttctgtcacatctcacgaggccagtgatctcttccctaaccgcagcggctcccggttcctggctgacgaagatcgagagcctggaagtagtgcatcctcagataccgaagaggatagccttcccgcaaataaatgcaagaaggagattatggtgggcccacagtttcaggccgacctatcaaatctccatttgaataggcactgcgagaaaatctacgaaaacgaagaccaacttttgtgggacccaagtgtattgccagagcgtgaggtggaggagttcctgtaccgcgcagtgaaacgtaggtggcatgaaatggctgggccacaattaccagagggtgaggcagttaaggactccgagcaggccctttacgagctcgtgaagtgtaacttcaatgtggaagaggctctgcggagactcaggttcaatgtgaaggtgatccgagacggcctgtgtgcatggagcgaggaagagtgccgaaatttcgagcatggttttcgtgtgcatggtaaaaactttcatctgatacaggctaataaggtgcggacccgatccgttggggagtgcgttgaatactactatctttggaagaaatccgagaggtatgactatttcgctcagcaaacccgtctgggccgacggaaatatgttccctcaggaacaacagacgccgatcaggatctggacggttccgatcccgacgggcctggacggccacgccctgaacaagatactttaacgggtatgaggaccgacccactctctgtggacggtactgctgggggactggacgaaccgggagtagcatcagacggtcttccttcatccgaacccggtccttgctcatttcaacagctggacgagtcccctgccgtcccgctgagtcacaggcctccagccttggcggatccggcaagctatcagccagccgttacagctcccgagcctgacgcctcccctaggcttgccgtcgattttgcgctccccaaggagctcccattgatctccagccacgttgacctgtccggcgaccccgaggaaaccgtcgccccagctcaggtcgccctgagcgtgacggaatttggcctaatcggcatcggagacgtgaaccccttcctggccgcacacccaacttgccctgccccagggctgcactcggagcccctgtctcattgcaatgtaatgacctgttag

SEQ ID NO: 193717 - DNA, 1638 bp, Artificial Sequence
  derived and/or modified sequence
atggccgaggccagcagcctgggcagacagagccccagagtggtgagctgcctggagcacagcctgtgccccggcgagcccggcctgcagaccaccgccgtggtgagcatgggcagcggcgaccaccagttcaacctggccgagatcctgagccagaactacagcgtgagaggcgagtgcgaggaggccagcagatgccccgacaagcccaaggaggagctggagaaggacttcatcagccagagcaacgacatgcccttcgacgagctgctggccctgtacggctacgaggccagcgaccccatcagcgacagagagagcgagggcggcgacgtggcccccaacctgcccgacatgaccctggacaaggagcagatcgccaaggacctgctgagcggcgaggaggaggaggagacccagagcagcgccgacgacctgacccccagcgtgaccagccacgaggccagcgacctgttccccaacagaagcggcagcagattcctggccgacgaggacagagagcccggcagcagcgccagcagcgacaccgaggaggacagcctgcccgccaacaagtgcaagaaggagatcatggtgggcccccagttccaggccgacctgagcaacctgcacctgaacagacactgcgagaagatctacgagaacgaggaccagctgctgtgggaccccagcgtgctgcccgagagagaggtggaggagttcctgtacagagccgtgaagagaagatggcacgagatggccggcccccagctgcccgagggcgaggccgtgaaggacagcgagcaggccctgtacgagctggtgaagtgcaacttcaacgtggaggaggccctgagaagactgagattcaacgtgaaggtgatcagagacggcctgtgcgcctggagcgaggaggagtgcagaaacttcgagcacggcttcagagtgcacggcaagaacttccacctgatccaggccaacaaggtgagaaccagaagcgtgggcgagtgcgtggagtactactacctgtggaagaagagcgagagatacgactacttcgcccagcagaccagactgggcagaagaaagtacgtgcccagcggcaccaccgacgccgaccaggacctggacggcagcgaccccgacggccccggcagacccagacccgagcaggacaccctgaccggcatgagaaccgaccccctgagcgtggacggcaccgccggcggcctggacgagcccggcgtggccagcgacggcctgcccagcagcgagcccggcccctgcagcttccagcagctggacgagagccccgccgtgcccctgagccacagaccccccgccctggccgaccccgccagctaccagcccgccgtgaccgcccccgagcccgacgccagccccagactggccgtggacttcgccctgcccaaggagctgcccctgatcagcagccacgtggacctgagcggcgaccccgaggagaccgtggcccccgcccaggtggccctgagcgtgaccgagttcggcctgatcggcatcggcgacgtgaaccccttcctggccgcccaccccacctgccccgcccccggcctgcacagcgagcccctgagccactgcaacgtgatgacctgctag

SEQ ID NO: 193718 - protein, 1009 aa, Artificial Sequence
  derived and/or modified sequence
MEALTLWLLPWICQCVSVRADSIIHIGAIFEENAAKDDRVFQLAVSDLSLNDDILQSEKITYSIKVIEANNPFQAVQEACDLMTQGILALVTSTGCASANALQSLTDAMHIPHLFVQRNPGGSPRTACHLNPSPDGEAYTLASRPPVRLNDVMLRLVTELRWQKFVMFYDSEYDIRGLQSFLDQASRLGLDVSLQKVDKNISHVFTSLFTTMKTEELNRYRDTLRRAILLLSPQGAHSFINEAVETNLASKDSHWVFVNEEISDPEILDLVHSALGRMTVVRQIFPSAKDNQKCTRNNHRISSLLCDPQEGYLQMLQISNLYLYDSVLMLANAFHRKLEDRKWHSMASLNCIRKSTKPWNGGRSMLDTIKKGHITGLTGVMEFREDSSNPYVQFEILGTTYSETFGKDMRKLATWDSEKGLNGSLQERPMGSRLQGLTLKVVTVLEEPFVMVAENILGQPKRYKGFSIDVLDALAKALGFKYEIYQAPDGRYGHQLHNTSWNGMIGELISKRADLAISAITITPERESVVDFSKRYMDYSVGILIKKPEEKISIFSLFAPFDFAVWACIAAAIPVVGVLIFVLNRIQAVRAQSAAQPRPSASATLHSAIWIVYGAFVQQGGESSVNSMAMRIVMGSWWLFTLIVCSSYTANLAAFLTVSRMDNPIRTFQDLSKQVEMSYGTVRDSAVYEYFRAKGTNPLEQDSTFAELWRTISKNGGADNCVSSPSEGIRKAKKGNYAFLWDVAVVEYAALTDDDCSVTVIGNSISSKGYGIALQHGSPYRDLFSQRILELQDTGDLDVLKQKWWPHMGRCDLTSHASAQADGKSLKLHSFAGVFCILAIGLLLACLVAALELWWNSNRCHQETPKEDKEVNLEQVHRRMNSLMDEDIAHKQISPASIELSALEMGGLAPTQTLEPTREYQNTQLSVSTFLPEQSSHGTSRTLSSGPSSNLPLPLSSSATMPSMQCKHRSPNGGLFRQSPVKTPIPMSFQPVPGGVLPEALDTSHGTSI

SEQ ID NO: 193719 - protein, 580 aa, Artificial Sequence
  derived and/or modified sequence
MGSRLQGLTLKVVTVLEEPFVMVAENILGQPKRYKGFSIDVLDALAKALGFKYEIYQAPDGRYGHQLHNTSWNGMIGELISKRADLAISAITITPERESVVDFSKRYMDYSVGILIKKPEEKISIFSLFAPFDFAVWACIAAAIPVVGVLIFVLNRIQAVRAQSAAQPRPSASATLHSAIWIVYGAFVQQGGESSVNSMAMRIVMGSWWLFTLIVCSSYTANLAAFLTVSRMDNPIRTFQDLSKQVEMSYGTVRDSAVYEYFRAKGTNPLEQDSTFAELWRTISKNGGADNCVSSPSEGIRKAKKGNYAFLWDVAVVEYAALTDDDCSVTVIGNSISSKGYGIALQHGSPYRDLFSQRILELQDTGDLDVLKQKWWPHMGRCDLTSHASAQADGKSLKLHSFAGVFCILAIGLLLACLVAALELWWNSNRCHQETPKEDKEVNLEQVHRRMNSLMDEDIAHKQISPASIELSALEMGGLAPTQTLEPTREYQNTQLSVSTFLPEQSSHGTSRTLSSGPSSNLPLPLSSSATMPSMQCKHRSPNGGLFRQSPVKTPIPMSFQPVPGGVLPEALDTSHGTSI

SEQ ID NO: 193720 - DNA, 3030 bp, Artificial Sequence
  derived and/or modified sequence
atggaagctctgacgttgtggctgctgccgtggatttgccagtgcgtgtctgtgagggccgattccattatccacatcggagctatctttgaggagaatgctgcaaaggacgaccgggtgtttcaattggccgtgagtgatctttcgctgaacgatgatatactgcaaagtgagaaaatcacctactctatcaaggtcatcgaagctaataatccttttcaggcggtgcaggaggcatgtgatttaatgacccagggaatcctcgcattggtaacttctacaggctgtgcctcagcgaatgctctccagagccttactgatgcaatgcacattcctcacctgtttgtccagagaaacccaggaggaagtcctagaaccgcctgccacctgaacccctccccggatggtgaagcctacaccctggccagcagacctcctgtccggctgaatgacgtgatgcttagactggtgactgagctgaggtggcagaagtttgtcatgttctacgacagtgaatatgacatccgcggtctccagtccttcctggatcaggcaagcaggctggggttggatgtgtccttgcagaaggtggataaaaatatatcccacgtcttcacctcccttttcactacgatgaaaacagaggaacttaaccgctaccgagacacgcttcgccgtgcaatactgttgttgagcccccagggcgcccactcctttattaacgaagcagtggagactaatttggccagtaaagattcccattgggtctttgtgaatgaggagattagcgaccctgaaatactagacctcgtgcattctgcacttggtcggatgacggttgtcaggcagattttcccttcggccaaggacaaccaaaaatgcacacgtaacaatcatcgaatcagtagcctcttgtgcgatccccaagagggctacctacaaatgctgcagatctccaacctttacctgtacgacagtgtcctgatgctggcaaacgcattccacagaaaactggaggatcggaagtggcactcaatggcaagcctgaattgcattcgaaagtctaccaaaccgtggaatggaggaagaagcatgcttgacaccataaagaaagggcacatcacagggctgaccggggtgatggagtttcgagaagattccagtaacccttatgtgcaatttgagatcctgggaactacatactcagagaccttcgggaaggacatgcgcaagctggctacatgggattctgaaaaagggctgaatggctcactccaggagagaccgatgggtagccgccttcaggggttgactctaaaggtcgtgacagtcctagaagaacctttcgtgatggtggccgaaaacatcctgggccagcctaaacggtacaagggattttcaatagacgtgctggacgcactggcaaaagcgctgggttttaagtatgaaatttaccaagcacctgacggacgctatgggcatcagcttcataatacgtcttggaacgggatgattggtgagctgatctccaaacgggcagatctcgcgatttctgccattacaatcacacccgagagggaaagtgtcgtcgacttttcgaaacggtatatggactactcggtgggaatcctgattaaaaagcctgaagaaaagatcagcatcttctcgctctttgcacccttcgactttgctgtgtgggcctgcatcgcagctgctattcccgtggttggagtgctgatttttgtgcttaaccgtattcaggccgtgagagcacagtccgctgcacagccgaggccaagtgcttctgccacactgcacagcgcgatctggatcgtgtatggggcttttgtccaacaagggggcgaaagctctgtgaactcaatggccatgagaattgttatgggttcatggtggctttttacactcatcgtgtgctcctcgtacactgcgaacctggccgcgttcttgactgtctctaggatggacaaccctattagaacatttcaggacctgagcaaacaggtggagatgtcatatggtactgtgcgggacagtgccgtttatgagtacttccgggcgaaaggaacaaacccactggaacaagatagtaccttcgccgagctctggcgcacaatatcaaaaaatggcggcgcggacaattgcgtctcctctccatcagaaggtattcggaaggctaaaaaaggaaattatgcttttctctgggatgtcgcggtggtcgagtacgctgccctcaccgatgacgactgtagcgtcaccgtaatcggtaatagtatctctagtaagggctatggtatcgccctgcagcatgggagcccatacagggatctgtttagtcagcgaattttggaactgcaagatacaggggatcttgacgtgctcaaacagaaatggtggccgcacatgggaaggtgtgacttaacaagccacgcctccgcgcaggccgacggcaagtcattgaagctgcatagttttgcgggcgtgttttgcatcttggccataggcctactcttggcctgcctggttgccgcccttgagctctggtggaacagtaatcggtgccaccaggagaccccaaaagaagacaaggaggtgaaccttgaacaagttcaccgccgaatgaacagtctgatggatgaggatattgctcacaagcagatttcccccgcctcaattgagctgagcgcactcgaaatgggcgggttggcaccaacacaaaccctcgagcccacccgggagtaccaaaatacacagctatcagtcagcacttttctccccgaacagtcctcgcacgggacgtctcggacactctccagtggaccatctagcaacctgccactcccactttctagcagcgctacaatgccctccatgcagtgcaagcatcggagcccaaatgggggtctgttccgccagagcccggtgaagacccccataccgatgtcttttcagcccgtgccagggggagtcctcccagaggccctcgatacgtctcatggcactagcatttag

SEQ ID NO: 193721 - DNA, 1743 bp, Artificial Sequence
  derived and/or modified sequence
atgggttcccggctgcaaggcctgaccttgaaagtagtgactgtcctcgaagagccatttgtaatggtggccgagaatatactaggacagccaaagaggtacaaggggttctctatcgatgtgctagatgcactggctaaagctctaggctttaagtacgaaatttatcaggctcccgacgggcgttacggacaccagttgcacaatacatcctggaacggaatgataggcgagttgatctccaaaagagcggaccttgccatctctgcaattactatcactccagaaagggaatccgtggtggacttttccaagcgctacatggactatagtgtgggtatcctcatcaagaagcctgaggaaaaaataagtatcttcagcctcttcgcccccttcgattttgcagtgtgggcttgcatcgcagctgctatccctgtcgttggtgtgttaattttcgtcctaaataggattcaggccgtccgcgcccagtccgccgcgcagcctcgtcccagtgctagcgccacactgcatagtgccatttggatagtgtatggtgcctttgtgcaacagggcggcgaatcatccgtaaactctatggcaatgcgaattgtgatgggcagctggtggctcttcaccttaatcgtatgtagcagctatactgccaacttggccgcttttcttactgtgtccagaatggacaaccctatccggacattccaggacctgtcgaagcaagtggagatgtcatacggtaccgtgagagactcggcagtgtatgagtattttcgcgctaagggtaccaaccctcttgagcaggattctacatttgccgagttatggcgcaccatatcgaagaacggcggggccgacaactgtgtctcatctccttctgaaggtatccgcaaagccaagaaaggcaactacgcctttttgtgggacgtggctgttgtggagtatgctgccctgacagacgatgattgttctgtgaccgtgatcggcaactcaatctctagtaaagggtacgggatcgctctgcaacacggatctccgtaccgtgatcttttttcccaaagaatccttgaactgcaggacaccggtgacttagatgtgcttaagcagaaatggtggccgcacatgggtcgatgtgacctcactagccatgcttctgcccaggctgatggaaaatcgctcaagttgcacagcttcgccggagtcttctgcatcctggccataggattattgctcgcctgtctggtggccgcattggagctgtggtggaattcgaacagatgccaccaggagactcctaaggaagataaggaggttaatctggagcaggttcatagaagaatgaatagcttaatggatgaggacatcgcccacaaacagatcagccctgccagtattgagctatctgcgctagaaatgggtggtctggccccaactcagaccctagagccaacccgcgagtaccagaacacccagttatctgtctccactttcctgccagagcagagtagccacggaacttcaagaaccctgtcttcagggcccagcagcaacctgccacttccattatcatcttccgccacaatgccaagcatgcagtgtaagcatcggtcacctaatggcggtctgtttagacagtcccccgtaaagacaccgattcccatgagctttcagcccgtgcccggcggtgttctcccagaggcgctggacacgtcacacggaacatcaatttag

SEQ ID NO: 193722 - DNA, 5834 bp, Artificial Sequence
  derived and/or modified sequence
actgcaccgggaccagcgcctccccgcttcgcgctgccctcggcctcgccccgggcccgggtggatgagccgcgcgcccgggggacatggaagcgctgacgctgtggcttctcccctggatatgccagtgcgtgtcggtgcgggccgactccatcatccacatcggtgccatcttcgaggagaacgcggccaaggacgacagggtgttccagttggcggtatccgacctgagcctcaacgatgacatcctgcagagcgagaagatcacctactccatcaaggtcatcgaggccaacaacccattccaggctgtgcaggaagcctgtgacctcatgacccaggggattttggccttggtcacgtccactggctgtgcatctgccaatgccctgcagtccctcacggatgccatgcacatcccacacctctttgtccagcgcaacccgggagggtcgccacgcaccgcatgccacctgaaccccagccccgatggtgaggcctacacactggcttcgagaccacccgtccgcctcaatgatgtcatgctcaggctggtgacggagctgcgctggcagaagttcgtcatgttctacgacagcgagtatgatatccgtgggcttcaaagctttctggaccaggcctcgcggctgggccttgacgtctctttacaaaaggtggacaagaacattagccacgtattcaccagcctcttcaccacgatgaagacagaggagctgaatcgctaccgggacacgcttcgccgcgccatcctgctgctcagcccacagggagcccactccttcatcaacgaggccgtggagaccaacctggcttccaaggacagccactgggtctttgtgaatgaggaaatcagtgacccggagatcctggatctggtccatagtgcccttggaaggatgaccgtggtccggcaaatctttccgtctgcaaaggacaatcagaaatgcacgaggaacaaccaccgcatctcctccctgctctgcgacccccaggaaggctacctccagatgctgcagatctccaacctctatctgtatgacagtgttctgatgctggccaacgcctttcacaggaagctggaggaccggaagtggcatagcatggcgagcctcaactgcatacggaaatccactaagccatggaatggtgggaggtccatgctggataccatcaaaaagggccacatcactggcctcactggggtgatggagtttcgggaggacagttcgaatccctatgtccagtttgaaatccttggcactacctatagtgagacttttggcaaagacatgcgcaagttggcgacatgggactcagagaagggcttgaatggcagcttgcaagagaggcccatgggcagccgcctccaaggattgactcttaaagtggtgactgtcttggaagagcctttcgtgatggtggctgagaacatcctaggacagcccaagcgctacaaagggttctccatagatgtcctggatgcactggccaaggctctgggctttaaatatgagatttaccaagcccctgatggcaggtacggtcaccagctccataacacctcctggaacgggatgatcggggagctcatcagcaagagagcagacttggccatctctgccatcaccatcaccccagagagggagagcgttgtggacttcagcaagcggtacatggactattcagtggggattctaattaagaagcccgaggagaaaatcagcatcttctccctctttgctccatttgatttcgctgtgtgggcctgcattgcagcagccatccctgtggttggtgtgctgatatttgtgttgaacaggatacaggctgtgagggctcagagtgctgcccagcccaggccgtcagcttctgccactctgcacagcgccatctggattgtctatggagccttcgtacagcaaggtggcgaatcttccgtgaactccatggccatgcgcatcgtgatgggcagctggtggctcttcacgctcattgtgtgctcctcctacacagccaaccttgctgccttcctcacagtgtccaggatggacaaccccataaggactttccaggacctgtccaaacaagtggaaatgtcttatggcactgtccgggattctgctgtatatgagtacttccgagccaagggcaccaaccccctggagcaggacagcacgtttgctgaactctggcggaccatcagcaagaacggaggggctgacaactgcgtgtccagtccttcagaaggcatcaggaaggcaaagaaggggaactacgccttcctgtgggatgtggccgtggtggaatacgcagccctgacggatgacgactgctcggtgactgtcatcggcaacagcatcagcagcaagggttacgggattgccctgcagcatggcagcccctacagggacctcttctcccagaggatcctggagctgcaggacacaggggacctggatgtgctgaagcagaagtggtggccgcacatgggccgctgtgacctcaccagccatgccagcgcccaggccgacggcaaatccctcaagctgcacagcttcgccggggtcttctgcatcctggccattggcctgctcctggcctgcctggtggctgccctggagttgtggtggaacagcaaccggtgccaccaggagacccccaaggaggacaaagaagtgaacttggagcaggtccaccggcgcatgaacagcctcatggatgaagacattgctcacaagcagatttccccagcgtcgattgagctctcggccctggagatggggggcctggctcccacccagaccttggagccgacacgggagtaccagaacacccagctctcggtcagcacctttctgccagagcagagcagccatggcaccagccggacactctcatcagggcccagcagcaacctgccgctgccgctgagcagctcggcgaccatgccctccatgcagtgcaaacacaggtcacccaacggggggctgttccggcagagcccggtgaagacccccatccccatgtccttccagcccgtgcctggaggcgtccttccagaggctctggacacctcccacgggacctccatctgactgcgccgcctgccctcctgcccaccctcccacccacccgaccagcagagctttttaatacaagaaaacaacaacacaaaccacacacactcgcacacacacacatacacagagactctttcatttttcttgtacatatgtgtaaataatgacagaatggagtggggtaaaagtgtattttgaatattcccaattttcgaagtcagtaaaaaaacacaaaaactgtatgaatgactttgtaaattttgttctatatgaataaaaaggcaaattacttgtgatcattctgaagtgccaaaggagcccccccattcctgggcctttctgagggcaggaggggcgaccagataaggagcccctctctgctgggggagaagggaagacgaggaaccccacatgccactcgctgccttgtcccacagcttgctgccccatttctttgctcctggcacctcgtcccttttagtccctcagcttgataaagagtgagtttggagcccgcattgggctggcccactgggttgctgtgctgtagggtgatcggctgttctgggtagcctggggctgaggaggtgccctggactcagggctatcctgtcctgtcttggatcttgcgggacgagttagtcaccgctgtgtgtgttgcagtgtgcctctgccccatgggcccgagagaagctgacaattacccatagtgaggtaattgagggctttgatactgagctgttctcatatcatactgttggccttgtttttcattttcttttcaaaattagaagaatcaaaaagtgatagaatattgggggaaggagggcagactccatcgtttcctcagggagactgggcggaggtggggttggtctggaagaaggtccatgggggcagggagttgcgaggtggggttagttgcatggaccaggtgaggtggtggaacaaaaggccaggtagaggaagaatattcccttgggtttggacccatggtcccaggtgagagaaggaagtgaggccatagatgcagggagtagaagctttgtggtgtcaggcaaacggactctgttagtaagagttgggggaggtgcccaggtgggtggaccagtactccaggtgatggggcatgctgagaaatagagaaaagagaccatgtttatttgggtaggaggaagccttgccttgcgccttaggtgagaagcataagtgtaactcccatccaccagggaagttgcttgtagccccaaaagtaaaggcctatctctgggtcataaatcctgcaggcagtccaacaaacagggctggctccagcacaaactctcccttccacctttacgaccctctccagaccagacctggagtcctcttcaagcagcaatccaacccagagcaggggccctccccactcaggcatctgataacctctgagatttccaggcctatccctgtgcaggtacagctgcagggaagcccagttttctaagcctaggaccacctaacagcgccccctccttcagttgccctttctgaggcaactaaactacagaatcagggaaagaaccattaggagtggaactgggggaatctgagttgtgtcacttcagttcctctcctaaagacaaaggttagtctgatctccagacccgtcagaatggaatacacagcccacatctgtcactgaaggaggtggagctcccacagccagcagtaatcagggagctgagagcctggttctgtgatcatggagaaatacaaagtcctattgattgcttcttctatagccttgtagagtttctagagagatgtatttatgagggtgataactagcccaggattgatttctttcctaaagtccctagtgacatgattgagcagtaaagaacggccaaatcacacagtcagctaaaagcactgtggggaagagagtgtttataattatgttatttattgctggatgctgagaatggtctgatattcgtgctacctaggcaatccattgacatttctccaatcagagcatgtggaccttggagccaggcatgctcagagaagcctaggtgggctaccatgaccccgaggaagagcaggctttgttttccatcagcacgttgggggccctgccctgaatggtcaatttttcacatatatatctctctatttttttaatcaaactctggtctcactgccttatctcacaccaactctgtttcctcattgccccctgagatggcctgtcttctggggtatagcttggatgtcttcttggatggttctgcttagaatgagtgtcaaggaggaaagagagggagatggaggatgtgtttgtgcgcctgtgtgtgtgtgtttgtgtgtgtgtgtgtgtgtgagagagagagagagagagagagagaccagcatcttcaagagaagtattctgcttatacaaaatccttaacacctcatggtgttattcttcaccatgtttatatatatatatatatatttttttttttttttagaattttctacccttggcatgaggggaaatgattgatattcaagcaagttctctaggaaaaaaaaaaacttcccaactcagatttctgtgtcagctcagaatgtatctttttttcatgctttgctctttggatttataactctgtttagactattccatacattttaggtatattttgtgccttcagacactgcaaataataatcagcatttggattaaagttgtttaataat

SEQ ID NO: 193723 - DNA, 2199 bp, Artificial Sequence
  derived and/or modified sequence
attcaccttcaaagagagctggctccctgtttcagaaagtgtagggagggactggggaccagggtcaggagcttgctggggccgtccttggcttctgtgagaattgttggcgacatgggactcagagaagggcttgaatggcagcttgcaagagaggcccatgggcagccgcctccaaggattgactcttaaagtggtgactgtcttggaagagcctttcgtgatggtggctgagaacatcctaggacagcccaagcgctacaaagggttctccatagatgtcctggatgcactggccaaggctctgggctttaaatatgagatttaccaagcccctgatggcaggtacggtcaccagctccataacacctcctggaacgggatgatcggggagctcatcagcaagagagcagacttggccatctctgccatcaccatcaccccagagagggagagcgttgtggacttcagcaagcggtacatggactattcagtggggattctaattaagaagcccgaggagaaaatcagcatcttctccctctttgctccatttgatttcgctgtgtgggcctgcattgcagcagccatccctgtggttggtgtgctgatatttgtgttgaacaggatacaggctgtgagggctcagagtgctgcccagcccaggccgtcagcttctgccactctgcacagcgccatctggattgtctatggagccttcgtacagcaaggtggcgaatcttccgtgaactccatggccatgcgcatcgtgatgggcagctggtggctcttcacgctcattgtgtgctcctcctacacagccaaccttgctgccttcctcacagtgtccaggatggacaaccccataaggactttccaggacctgtccaaacaagtggaaatgtcttatggcactgtccgggattctgctgtatatgagtacttccgagccaagggcaccaaccccctggagcaggacagcacgtttgctgaactctggcggaccatcagcaagaacggaggggctgacaactgcgtgtccagtccttcagaaggcatcaggaaggcaaagaaggggaactacgccttcctgtgggatgtggccgtggtggaatacgcagccctgacggatgacgactgctcggtgactgtcatcggcaacagcatcagcagcaagggttacgggattgccctgcagcatggcagcccctacagggacctcttctcccagaggatcctggagctgcaggacacaggggacctggatgtgctgaagcagaagtggtggccgcacatgggccgctgtgacctcaccagccatgccagcgcccaggccgacggcaaatccctcaagctgcacagcttcgccggggtcttctgcatcctggccattggcctgctcctggcctgcctggtggctgccctggagttgtggtggaacagcaaccggtgccaccaggagacccccaaggaggacaaagaagtgaacttggagcaggtccaccggcgcatgaacagcctcatggatgaagacattgctcacaagcagatttccccagcgtcgattgagctctcggccctggagatggggggcctggctcccacccagaccttggagccgacacgggagtaccagaacacccagctctcggtcagcacctttctgccagagcagagcagccatggcaccagccggacactctcatcagggcccagcagcaacctgccgctgccgctgagcagctcggcgaccatgccctccatgcagtgcaaacacaggtcacccaacggggggctgttccggcagagcccggtgaagacccccatccccatgtccttccagcccgtgcctggaggcgtccttccagaggctctggacacctcccacgggacctccatctgactgcgccgcctgccctcctgcccaccctcccacccacccgaccagcagagctttttaatacaagaaaacaacaacacaaaccacacacactcgcacacacacacatacacagagactctttcatttttcttgtacatatgtgtaaataatgacagaatggagtggggtaaaagtgtattttgaatattcccaattttcgaagtcagtaaaaaaacacaaaaactgtatgaatgactttgtaaattttgttctatatgaataaaaaggcaaattacttgtgatcattctgaagtgcc

SEQ ID NO: 193724 - DNA, 3030 bp, Artificial Sequence
  derived and/or modified sequence
atggaggccctgaccctgtggctgctgccctggatctgccagtgtgtgtctgtgcgggctgacagcatcatccacatcggggccatctttgaggagaatgctgccaaggatgacagagtcttccagctggccgtgtctgacctgagcctgaatgatgacatcctgcagagcgagaagatcacctacagcatcaaggtgattgaggccaacaaccccttccaggccgtgcaggaggcctgtgacctgatgacccagggcatcctggccctggtgaccagcacaggctgtgccagcgccaatgccctgcagagcctgacagatgccatgcacatcccccacctgtttgtgcagaggaaccctgggggcagccccaggacagcctgccacctgaaccccagcccagatggagaggcctacaccctggccagcaggcctcctgtgcggctgaatgatgtgatgctgcggctggtgacagagctgcgctggcagaagtttgtgatgttttatgattctgaatatgacatccggggcctgcagagcttcctggaccaggccagccggctgggcctggatgtgtccctgcagaaggtggacaagaacatcagccacgtgttcaccagcctcttcaccaccatgaagacagaggagctgaaccgctacagagacaccctgcggcgggccatcctgctgctgagcccccagggcgcccacagcttcatcaatgaagctgtggagaccaacctggccagcaaggacagccactgggtgtttgtgaatgaggagatcagtgaccctgagatcctggacctggtgcacagcgccctgggccgcatgacagtggtgcggcagatcttccccagcgccaaggacaaccagaagtgcaccaggaacaaccaccgcatcagcagcctgctgtgtgacccccaggagggctacctgcagatgctgcagatcagcaacctgtacctgtatgacagcgtgctgatgctggccaatgccttccacaggaagctggaggacaggaagtggcacagcatggccagcctgaactgcatcaggaagagcaccaagccctggaatggaggccgctccatgctggacaccatcaagaagggccacatcaccggcctgactggagtgatggagttccgggaggacagcagcaacccctacgtgcagtttgagatcctgggcaccacctacagcgagaccttcggcaaggacatgaggaagctggccacctgggacagcgagaagggcctgaatggcagcctgcaggagcggcccatgggcagccggctgcagggcctgaccctgaaggtggtgacagtgctggaggagccctttgtgatggtggccgagaacatcctgggccagcccaagcgctacaagggcttcagcattgatgtgctggatgccctggccaaggccctgggcttcaagtatgagatctaccaggccccagatggccgctatggccaccagctgcacaacacctcctggaatggcatgattggagagctgatcagcaagagagctgacctggccatcagcgccatcaccatcaccccagagcgggagagcgtggtggacttcagcaagcgctacatggactacagcgtgggcatcctgatcaagaagccagaggagaagatcagcatcttcagcctgtttgccccctttgattttgctgtgtgggcctgcatcgctgctgccatccctgtggtgggcgtgctgatctttgtgctgaaccgcatccaggccgtgcgggcccagagcgctgcccagccccggcccagcgccagcgccaccctgcacagcgccatctggatcgtgtatggagcctttgtgcagcagggcggggagagctctgtgaacagcatggccatgagaattgtgatgggctcctggtggctgttcaccctgattgtgtgcagcagctacacagccaacctggccgccttcctgactgtgtccaggatggacaaccccatccgcaccttccaggacctgagcaagcaggtggagatgtcctatggaacagtgcgggacagcgctgtgtatgagtacttccgggccaagggcaccaaccccctggagcaggacagcacctttgctgagctgtggaggaccatcagcaagaatggaggagctgacaactgtgtgagcagccccagcgagggcatcaggaaggccaagaagggcaactatgccttcctgtgggatgtggccgtggtggagtatgctgccctgacagatgatgactgcagcgtgacagtgattggcaacagcatcagcagcaagggctacggcatcgccctgcagcacggcagcccctacagagacctcttcagccagaggatcctggagctgcaggacaccggggacctggatgtgctgaagcagaagtggtggccccacatgggccgctgtgacctgaccagccacgccagcgcccaggctgatggcaagagcctgaagctgcacagctttgctggggtcttctgcatcctggccatcggcctgctgctggcctgcctggtggccgccctggagctgtggtggaacagcaaccgctgccaccaggagacccccaaggaggacaaggaggtgaacctggagcaggtgcacaggaggatgaacagcctgatggatgaggacatcgcccacaagcagatcagccctgccagcattgagctgagcgccctggagatgggcggcctggcccccacccagaccctggagcccacccgggagtaccagaacacccagctgtctgtgtccaccttcctgcctgagcagagcagccacggcaccagcaggaccctgagcagcggccccagcagcaacctgcccctgcccctgagcagcagcgccaccatgcccagcatgcagtgcaagcacaggagccccaacggcggcctcttccggcagagccctgtgaagacccccatccccatgtccttccagcctgtgcctggaggagtgctgcctgaggccctggacaccagccacggcaccagcatctag

SEQ ID NO: 193725 - DNA, 1743 bp, Artificial Sequence
  derived and/or modified sequence
atgggcagccggctgcagggcctgaccctgaaggtggtgacagtgctggaggagccctttgtgatggtggccgagaacatcctgggccagcccaagcgctacaagggcttcagcattgatgtgctggatgccctggccaaggccctgggcttcaagtatgagatctaccaggccccagatggccgctatggccaccagctgcacaacacctcctggaatggcatgattggagagctgatcagcaagagagctgacctggccatcagcgccatcaccatcaccccagagcgggagagcgtggtggacttcagcaagcgctacatggactacagcgtgggcatcctgatcaagaagccagaggagaagatcagcatcttcagcctgtttgccccctttgattttgctgtgtgggcctgcatcgccgccgccatccctgtggtgggcgtgctgatctttgtgctgaaccgcatccaggccgtgcgggcccagagcgctgcccagccccggcccagcgccagcgccaccctgcacagcgccatctggatcgtgtatggagcctttgtgcagcagggcggggagagctctgtgaacagcatggccatgagaattgtgatgggctcctggtggctgttcaccctcatcgtgtgcagcagctacacagccaacctggccgccttcctgactgtgtccaggatggacaaccccatccgcaccttccaggacctgagcaagcaggtggagatgtcctatggcaccgtgcgggacagcgctgtgtatgagtacttccgggccaagggcaccaaccccctggagcaggacagcacctttgctgagctgtggaggaccatcagcaagaatggaggagctgacaactgtgtgagcagccccagcgagggcatcaggaaggccaagaagggcaactatgccttcctgtgggatgtggccgtggtggagtatgctgccctgacagatgatgactgcagcgtgaccgtcatcggcaacagcatcagcagcaagggctatggaattgccctgcagcacggcagcccctacagagacctcttcagccagaggatcctggagctgcaggacacaggagacctggatgtgctgaagcagaagtggtggccccacatgggccgctgtgacctgaccagccacgccagcgcccaggctgatggcaagagcctgaagctgcacagctttgctggggtcttctgcatcctggccatcggcctgctgctggcctgcctggtggccgccctggagctgtggtggaacagcaaccgctgccaccaggagacccccaaggaggacaaggaggtgaacctggagcaggtgcacaggaggatgaacagcctgatggatgaagatattgcccacaagcagatcagccctgccagcattgagctgagcgccctggagatgggcggcctggcccccacccagaccctggagcccacccgggagtaccagaacacccagctgtctgtgtccaccttcctgcctgagcagagcagccacggcaccagcaggaccctgagcagcggccccagcagcaacctgcccctgcccctgagcagcagcgccaccatgcccagcatgcagtgcaagcacaggagccccaatggaggcctcttccggcagagccctgtgaagacccccatccccatgtccttccagcctgtgcctgggggcgtgctgcctgaggccctggacaccagccacggcaccagcatctag

SEQ ID NO: 193726 - DNA, 3030 bp, Artificial Sequence
  derived and/or modified sequence
atggaggccctgaccctgtggctgctgccctggatctgccagtgcgtatcggtgagggcggatagcatcattcacatcggagcgatcttcgaagaaaacgcggccaaggatgatagggtgtttcaactcgcggtttccgatttaagcctgaatgacgacatacttcaaagcgaaaaaatcacctacagcatcaaggtaatcgaagccaacaatccctttcaggcggtgcaggaagcttgcgacctgatgacacagggaatactggccctagttacatctactggatgcgcctcagcaaacgctctgcagtctctcacagatgctatgcacatccctcatttgttcgtgcaaaggaaccctggtggatcacctcgaaccgcctgccatctgaatccatcccccgacggggaagcatacaccctcgcaagccgaccgccagtaagattgaacgacgttatgctgcgactggtgactgaacttaggtggcaaaagtttgtaatgttctacgattcagagtacgatattagggggctgcagtcctttctggatcaggcctctcgactgggacttgatgtgagcctgcagaaggtcgacaaaaatattagtcatgtgttcacatctctttttactaccatgaagactgaggagttaaacaggtatagggatacgttgcgccgcgcaatcctacttctctccccccagggagcgcacagctttattaatgaggctgtggagactaatctggcctccaaggattcccattgggtatttgtgaacgaagaaatctcagatccagaaattttggatctggtgcactccgctctgggcaggatgaccgtcgtgaggcagatctttccgagtgcaaaagataaccagaaatgcacacgaaataaccatcggatatccagtctgctttgtgacccacaagaaggctacctacaaatgctgcagatttccaatctgtatctgtacgatagcgtcctcatgctggcgaacgcatttcatcgaaaactggaggatcggaagtggcattccatggcatctctcaactgtattagaaagtctaccaagccgtggaacgggggacgcagcatgcttgacaccattaagaagggacatatcactggattgacgggggtgatggagtttcgagaagattccagtaacccttatgtgcagtttgaaatcctgggtaccacctattctgaaacatttggaaaggacatgcggaaattggctacttgggattccgagaaggggttgaatgggtctctgcaggaacggccaatgggctcccgtctccagggacttacgctgaaagtggtaaccgtccttgaggaaccctttgtgatggtggcagaaaatatactcggacagccaaagagatataaaggcttttcaattgatgtcctcgatgctttagccaaagcgctcggtttcaagtatgagatctaccaggccccagacggccggtatggacaccagctccacaatacctcctggaacgggatgataggcgagttaatcagcaaacgagctgacctggcaattagcgcaatcactataacgcccgaacgggaaagcgtggtcgatttctctaagcgctacatggactactcagtggggattctgataaaaaagcctgaggaaaaaatctcgatttttagtctgtttgcccctttcgattttgcggtctgggcttgtatcgccgccgccatccccgttgtcggcgttcttatattcgttctgaatcgcatccaggctgtgcgtgcacagtccgccgctcagcctcggccttccgcctcggcaacactccatagcgcaatctggatagtgtacggggcgttcgtccagcaggggggcgagagttcagtgaattccatggccatgcggattgtcatgggcagttggtggctgttcaccctgatcgtttgctcctcctatacagcgaacctggcggccttcctcaccgtgtctaggatggacaaccctatcagaaccttccaggatctgtccaagcaggtagaaatgtcctacgggacggtccgcgattccgcagtctacgagtatttccgggccaagggaacaaaccccctggaacaggactccaccttcgctgagttatggaggactataagtaagaacgggggagccgacaactgtgtgagttccccgagtgaaggaattcgaaaagccaagaagggcaattatgccttcctgtgggatgtagcagttgttgagtacgcggcactcaccgacgacgactgctcagttaccgtgatcggcaactctatatcttccaaaggatacggcattgccctgcagcatgggtccccatatcgggacctcttctcgcagagaatcttagagctacaggatactggggatctagacgtgctgaaacagaaatggtggcctcatatgggacgttgtgacttgacttcccacgccagtgcacaggccgatggcaagagcctgaagttgcacagctttgccggcgtattctgcatccttgcaatcggcttgttgctggcatgtctggtagccgccctagaattgtggtggaacagtaatcggtgccaccaggagaccccgaaggaggacaaggaagtcaacttggaacaggtccatagacggatgaactctctcatggatgaggatatcgcacacaaacagatctcccccgctagcatagaactgagtgccttggaaatgggcggcctagcgccaactcagactttggaacccaccagagaatatcagaacacccagctgagcgtgtctaccttcctccccgagcagtcttctcacggcacatccagaactctctccagcgggccctcgtccaatctgcctctacccttgtcgtctagcgccacaatgccctctatgcagtgtaagcatcggtcgcccaacggaggattgttccggcagtctcccgtaaagactccaatacccatgagcttccagccagtacccggcggagtgctacccgaggctctcgacaccagccatggaacatccatttag

SEQ ID NO: 193727 - DNA, 1743 bp, Artificial Sequence
  derived and/or modified sequence
atgggcagccggctgcagggcctgaccctgaaggtggtgaccgtgttggaagaaccttttgtcatggtggctgagaacatcctgggccagcccaagaggtacaagggattcagtatagatgtcctcgatgccctggcgaaggcgcttggctttaagtatgaaatttaccaggcgccagacgggaggtacggccatcagctgcacaacacatcatggaatggcatgatcggcgaactgatatcaaaacgggccgatctggcaatcagcgccatcaccatcactccagaaagggaaagcgtagttgatttctctaaaaggtacatggattattccgttggcatcctaattaaaaagcctgaagagaagatttctattttctcccttttcgcaccctttgatttcgccgtgtgggcctgcattgccgctgctatccctgtggttggcgtgctaatcttcgtgctgaacaggattcaggctgtcagagcccagagcgccgcccagcctagaccttccgcaagcgctacactgcactctgctatatggatcgtgtatggggcttttgtacagcagggaggcgagtcctctgtgaactctatggcgatgcggattgtgatgggctcctggtggctctttaccttgatcgtctgctcttcttacacagctaatttggctgcgttccttaccgtctcacgaatggataacccgattaggacgtttcaggatctatccaaacaggtggagatgtcttacggaactgtgagggactctgccgtatacgagtacttccgagccaaagggacaaatcctttagagcaggactcaacttttgcggaattgtggcggactattagtaaaaacgggggcgcggataattgcgtgagctccccctcggaaggcatcagaaaagcaaagaaaggaaactatgcatttctgtgggacgtcgccgtcgtggaatacgcagccctgactgatgacgactgcagcgtaacagttataggcaactcaatctccagtaaaggctacgggatcgcacttcagcatgggagcccatatcgggacttattcagtcagcggattctcgaactgcaggacacgggtgaccttgacgtgctgaagcagaagtggtggccacacatgggccgctgtgacctcacaagccatgcatcggcacaggccgacggtaaatccctgaagctgcacagttttgcaggcgttttttgtattctggctatcggacttctcctggcctgcttggtcgctgccctcgaactttggtggaactctaataggtgccatcaggaaacccctaaggaagacaaagaagtgaacctggaacaggtgcaccggcgcatgaatagtctcatggacgaagatatagcacataaacaaatttctcctgctagtattgaactcagcgcactggaaatgggtgggctggcacccacccagactttagagcctaccagagagtaccagaacacccagctctcagtgtccacttttctgcctgagcagtcgtctcacggcacaagtcgaaccctcagtagcggcccctcctccaacctcccattacctcttagcagttccgctactatgcccagcatgcagtgcaaacaccgaagccccaatggtggattgtttaggcagtctccagtcaagacacccattcctatgagcttccagcccgtcccaggtggtgttctccccgaggccctggacactagtcatggaaccagcatctag

SEQ ID NO: 193728 - DNA, 3030 bp, Artificial Sequence
  derived and/or modified sequence
atggaagcactcaccctttggctgctgccctggatttgtcagtgtgtgtctgtgagggccgactccatcattcacatcggggcaattttcgaggagaacgccgcaaaagacgaccgtgttttccaactggctgtgagcgatctttccttaaacgacgacatcctccaatctgaaaagatcacgtatagcatcaaggtcatcgaggctaataacccttttcaggccgtgcaggaagcatgtgatctgatgacacagggtattttggcactcgtcactagtacaggctgcgctagtgccaacgcgctgcagtcacttacagatgcaatgcatattccgcatttatttgttcagagaaacccaggcggatccccccgaactgcttgtcatcttaatccttctcctgacggggaagcatacactttagctagcagacctcccgtgagacttaacgatgtcatgctcaggttagtgactgaactgcggtggcagaaatttgtgatgttttacgactcagaatacgatattcgaggcctgcagtcattcctcgatcaagcgagccggctcggcctcgatgtcagtctgcagaaggtggacaaaaatatctctcacgtgttcacctccctcttcactactatgaagactgaggagctcaacagataccgcgatacattgcgtcgcgctatccttctcttgagtccccaaggtgcccattcattcataaacgaggccgttgaaactaatcttgcgagtaaagattctcactgggtgttcgttaacgaagagatcagcgatcccgagatcctggatctggtccacagcgctttgggacgtatgacagtggtgcgacaaatctttccttctgccaaggacaaccagaagtgcacgaggaataatcatcggatatcttccctgctgtgcgatccccaggaaggttatctccagatgttgcagattagtaacctgtacctgtatgatagcgtcctcatgttggccaacgccttccatcgaaagttggaagataggaagtggcactcaatggccagcctgaattgtatcagaaagtccactaagccgtggaatggcggacgcagcatgctggacacaattaagaaagggcatataacaggcctgaccggagttatggagtttcgtgaggattcgagtaacccatatgttcagttcgaaattctcgggacgacttactcagagactttcgggaaggacatgcgcaagctcgccacatgggacagcgagaagggtttaaatggatcccttcaggagcgccctatgggcagccgacttcaaggcctgacgcttaaagtggttacagtcctagaggaacccttcgtcatggtggcagagaacattctgggacagccgaagagatataaaggattcagcatcgacgtgctggacgcactcgccaaagcccttggattcaagtacgaaatctaccaagcaccagacggcaggtacgggcatcagctccataacacctcttggaacggcatgattggcgaacttatttccaagagggccgatctggccatctctgcaattacgatcactccagagcgcgaaagtgtcgtggacttctctaagcgctatatggattactccgtcgggatcctaattaaaaagcctgaggagaaaatctcaatcttttccctgtttgccccatttgacttcgccgtgtgggcatgtattgcagcagccatccccgtggtgggagtgctgatattcgtgcttaataggatccaggcggtgagagcccaaagcgcagcccagccacgacccagtgcttccgcaacattgcactctgccatctggatcgtgtacggagcattcgtacagcaagggggtgagtcttccgtaaactccatggctatgaggatagttatgggcagttggtggctatttaccctgatcgtgtgttcttcctacacagccaatctcgcggcttttctcacagtgtccaggatggataaccctatccgaaccttccaggacttaagtaaacaggtcgagatgtcctacggtaccgtgcgggactcggccgtctacgaatattttcgtgccaagggaaccaacccactggagcaagatagtacattcgccgagctgtggagaacaatatcaaagaatggaggggctgataattgcgtgagcagcccaagcgagggaataagaaaggctaagaaggggaactacgctttcttgtgggacgttgctgtcgtcgaatacgcagctttgaccgacgacgactgcagcgtgaccgtcattgggaactctattagctctaagggatatggcatcgcattacagcacggctctccatacagagacctcttctcccagagaattctcgagctccaagacactggtgatctcgacgtactgaagcagaagtggtggccgcacatggggcgatgtgacttgactagccatgcctcggctcaagccgatgggaagagcttgaagttgcacagctttgcaggtgtcttctgtattctggctattggcttattactggcttgtcttgtggccgcactggagctctggtggaactcgaatagatgccaccaggagacccccaaggaagacaaagaagtgaatcttgagcaggtgcatcgaagaatgaatagcctgatggacgaagatatcgcacataagcagatcagtcccgcatctatagagttatccgccttggagatggggggactcgcacccacacaaacactcgagccgacccgcgagtaccaaaatactcagttgtccgtaagtacattcctccctgagcaatctagccacggcacaagtaggactttgtctagtggaccttcctccaacttgcccctgcccctcagcagcagcgctactatgcccagtatgcagtgcaaacataggtcccccaacggcggtctgttccggcagagccccgtgaagactcctattccaatgtcattccagcccgtgcccggaggcgtgctgccggaggccttagacacatcccacggcacttctatttag

SEQ ID NO: 193729 - DNA, 1743 bp, Artificial Sequence
  derived and/or modified sequence
atgggttctcggctgcaagggcttactctcaaggtggtgaccgttctagaagagccgtttgtgatggtggccgagaacattcttggacagccaaaacggtataagggattctcaatcgacgtcttagatgcactggcgaaagcattagggtttaagtacgaaatatatcaggccccagacgggagatacggacatcaactccataatacctcatggaacggaatgattggggaactgatttcaaaaagggccgatctcgccatatcggcgattactattacacctgagagggagtccgtagtagatttctcaaaacgctacatggattacagcgtaggaattctcattaaaaagccagaggagaaaatctctatcttctccctgttcgcccctttcgactttgccgtgtgggcctgtatcgcagccgctataccagtggttggcgtgctgatttttgtattaaatcgcatccaagctgtgcgcgctcagagcgctgcccagccaagaccgagtgcttctgccacccttcactccgccatttggattgtgtatggagcattcgtacaacaggggggagagtcttcggttaatagcatggccatgaggatcgtgatggggtcatggtggctatttaccttgattgtatgcagcagctacaccgcaaacttggccgcattcctgaccgtatcacggatggataacccaatacgcaccttccaggacctttcaaaacaggtggaaatgtcctacggaaccgtgagagattccgccgtctatgaatattttcgggcaaagggcacaaatcctttggagcaggacagcacgtttgcagagctctggcgcaccattagtaagaacggtggggctgataactgcgtcagcagtccaagcgaaggaatcaggaaggctaaaaagggaaactatgctttcttatgggacgtggctgtggtcgaatatgcagcattaaccgacgatgactgttccgtaacagtgattggaaatagcatctcttctaaagggtatggaatcgcactccaacacggcagtccttatcgcgacctcttttcacagaggatcttggagctccaggacaccggtgacttggacgttctgaaacaaaaatggtggccacacatggggaggtgcgaccttacaagccatgcttcagctcaggctgacggaaagagtcttaaactgcattcctttgcgggagtcttttgcatcttagccatcgggctcctgttagcatgcctggtcgcagccctcgaactgtggtggaatagcaaccgctgtcaccaggaaacacccaaagaggacaaggaggttaacttggaacaggtgcaccgcagaatgaactcactcatggatgaggatatcgcgcataaacagatctccccagcctccattgagttaagtgcacttgagatgggagggttagctcccacccagactcttgaaccgacacgggagtatcaaaatacccagttatccgtgtccacgttccttccagagcagtcatcccacgggacatccaggactctctctagcggcccatccagcaatctgccactgccactatctagtagcgctactatgcctagcatgcagtgcaaacacaggtccccgaatgggggattatttagacagagccccgtcaagacacctatccccatgagcttccagccggtacccggaggcgtactcccagaggcacttgacacatcacatggcactagcatctag

SEQ ID NO: 193730 - DNA, 3030 bp, Artificial Sequence
  derived and/or modified sequence
atggaggccctgaccctgtggctgctgccctggatctgccagtgcgtgagcgtgagagccgacagcatcatccacatcggcgccatcttcgaggagaacgccgccaaggacgacagagtgttccagctggccgtgagcgacctgagcctgaacgacgacatcctgcagagcgagaagatcacctacagcatcaaggtgatcgaggccaacaaccccttccaggccgtgcaggaggcctgcgacctgatgacccagggcatcctggccctggtgaccagcaccggctgcgccagcgccaacgccctgcagagcctgaccgacgccatgcacatcccccacctgttcgtgcagagaaaccccggcggcagccccagaaccgcctgccacctgaaccccagccccgacggcgaggcctacaccctggccagcagaccccccgtgagactgaacgacgtgatgctgagactggtgaccgagctgagatggcagaagttcgtgatgttctacgacagcgagtacgacatcagaggcctgcagagcttcctggaccaggccagcagactgggcctggacgtgagcctgcagaaggtggacaagaacatcagccacgtgttcaccagcctgttcaccaccatgaagaccgaggagctgaacagatacagagacaccctgagaagagccatcctgctgctgagcccccagggcgcccacagcttcatcaacgaggccgtggagaccaacctggccagcaaggacagccactgggtgttcgtgaacgaggagatcagcgaccccgagatcctggacctggtgcacagcgccctgggcagaatgaccgtggtgagacagatcttccccagcgccaaggacaaccagaagtgcaccagaaacaaccacagaatcagcagcctgctgtgcgacccccaggagggctacctgcagatgctgcagatcagcaacctgtacctgtacgacagcgtgctgatgctggccaacgccttccacagaaagctggaggacagaaagtggcacagcatggccagcctgaactgcatcagaaagagcaccaagccctggaacggcggcagaagcatgctggacaccatcaagaagggccacatcaccggcctgaccggcgtgatggagttcagagaggacagcagcaacccctacgtgcagttcgagatcctgggcaccacctacagcgagaccttcggcaaggacatgagaaagctggccacctgggacagcgagaagggcctgaacggcagcctgcaggagagacccatgggcagcagactgcagggcctgaccctgaaggtggtgaccgtgctggaggagcccttcgtgatggtggccgagaacatcctgggccagcccaagagatacaagggcttcagcatcgacgtgctggacgccctggccaaggccctgggcttcaagtacgagatctaccaggcccccgacggcagatacggccaccagctgcacaacaccagctggaacggcatgatcggcgagctgatcagcaagagagccgacctggccatcagcgccatcaccatcacccccgagagagagagcgtggtggacttcagcaagagatacatggactacagcgtgggcatcctgatcaagaagcccgaggagaagatcagcatcttcagcctgttcgcccccttcgacttcgccgtgtgggcctgcatcgccgccgccatccccgtggtgggcgtgctgatcttcgtgctgaacagaatccaggccgtgagagcccagagcgccgcccagcccagacccagcgccagcgccaccctgcacagcgccatctggatcgtgtacggcgccttcgtgcagcagggcggcgagagcagcgtgaacagcatggccatgagaatcgtgatgggcagctggtggctgttcaccctgatcgtgtgcagcagctacaccgccaacctggccgccttcctgaccgtgagcagaatggacaaccccatcagaaccttccaggacctgagcaagcaggtggagatgagctacggcaccgtgagagacagcgccgtgtacgagtacttcagagccaagggcaccaaccccctggagcaggacagcaccttcgccgagctgtggagaaccatcagcaagaacggcggcgccgacaactgcgtgagcagccccagcgagggcatcagaaaggccaagaagggcaactacgccttcctgtgggacgtggccgtggtggagtacgccgccctgaccgacgacgactgcagcgtgaccgtgatcggcaacagcatcagcagcaagggctacggcatcgccctgcagcacggcagcccctacagagacctgttcagccagagaatcctggagctgcaggacaccggcgacctggacgtgctgaagcagaagtggtggccccacatgggcagatgcgacctgaccagccacgccagcgcccaggccgacggcaagagcctgaagctgcacagcttcgccggcgtgttctgcatcctggccatcggcctgctgctggcctgcctggtggccgccctggagctgtggtggaacagcaacagatgccaccaggagacccccaaggaggacaaggaggtgaacctggagcaggtgcacagaagaatgaacagcctgatggacgaggacatcgcccacaagcagatcagccccgccagcatcgagctgagcgccctggagatgggcggcctggcccccacccagaccctggagcccaccagagagtaccagaacacccagctgagcgtgagcaccttcctgcccgagcagagcagccacggcaccagcagaaccctgagcagcggccccagcagcaacctgcccctgcccctgagcagcagcgccaccatgcccagcatgcagtgcaagcacagaagccccaacggcggcctgttcagacagagccccgtgaagacccccatccccatgagcttccagcccgtgcccggcggcgtgctgcccgaggccctggacaccagccacggcaccagcatctag

SEQ ID NO: 193731 - DNA, 1743 bp, Artificial Sequence
  derived and/or modified sequence
atgggcagcagactgcagggcctgaccctgaaggtggtgaccgtgctggaggagcccttcgtgatggtggccgagaacatcctgggccagcccaagagatacaagggcttcagcatcgacgtgctggacgccctggccaaggccctgggcttcaagtacgagatctaccaggcccccgacggcagatacggccaccagctgcacaacaccagctggaacggcatgatcggcgagctgatcagcaagagagccgacctggccatcagcgccatcaccatcacccccgagagagagagcgtggtggacttcagcaagagatacatggactacagcgtgggcatcctgatcaagaagcccgaggagaagatcagcatcttcagcctgttcgcccccttcgacttcgccgtgtgggcctgcatcgccgccgccatccccgtggtgggcgtgctgatcttcgtgctgaacagaatccaggccgtgagagcccagagcgccgcccagcccagacccagcgccagcgccaccctgcacagcgccatctggatcgtgtacggcgccttcgtgcagcagggcggcgagagcagcgtgaacagcatggccatgagaatcgtgatgggcagctggtggctgttcaccctgatcgtgtgcagcagctacaccgccaacctggccgccttcctgaccgtgagcagaatggacaaccccatcagaaccttccaggacctgagcaagcaggtggagatgagctacggcaccgtgagagacagcgccgtgtacgagtacttcagagccaagggcaccaaccccctggagcaggacagcaccttcgccgagctgtggagaaccatcagcaagaacggcggcgccgacaactgcgtgagcagccccagcgagggcatcagaaaggccaagaagggcaactacgccttcctgtgggacgtggccgtggtggagtacgccgccctgaccgacgacgactgcagcgtgaccgtgatcggcaacagcatcagcagcaagggctacggcatcgccctgcagcacggcagcccctacagagacctgttcagccagagaatcctggagctgcaggacaccggcgacctggacgtgctgaagcagaagtggtggccccacatgggcagatgcgacctgaccagccacgccagcgcccaggccgacggcaagagcctgaagctgcacagcttcgccggcgtgttctgcatcctggccatcggcctgctgctggcctgcctggtggccgccctggagctgtggtggaacagcaacagatgccaccaggagacccccaaggaggacaaggaggtgaacctggagcaggtgcacagaagaatgaacagcctgatggacgaggacatcgcccacaagcagatcagccccgccagcatcgagctgagcgccctggagatgggcggcctggcccccacccagaccctggagcccaccagagagtaccagaacacccagctgagcgtgagcaccttcctgcccgagcagagcagccacggcaccagcagaaccctgagcagcggccccagcagcaacctgcccctgcccctgagcagcagcgccaccatgcccagcatgcagtgcaagcacagaagccccaacggcggcctgttcagacagagccccgtgaagacccccatccccatgagcttccagcccgtgcccggcggcgtgctgcccgaggccctggacaccagccacggcaccagcatctag

SEQ ID NO: 193732 - protein, 192 aa, Artificial Sequence
  derived and/or modified sequence
MDRAHRLGQTKQVTVYRLICKGTIEERILQRAKEKSEIQRMVISGGNFKPDTLKPKEVVSLLLDDEELEKKLRLRQEEKRQQEETNRVKERKRKREKYAEKKKKEDELDGKRRKEGVNLVIPFVPSADNSNLSADGDDSFISVDSAMPSPFSEISISSELHTGSIPLDESSSLAPDSLVRKQGKGTNPSGGR

SEQ ID NO: 193733 - protein, 1556 aa, Artificial Sequence
  derived and/or modified sequence
MASELGARDDGGCTELAKPLYLQYLERALRLDHFLRQTSAIFNRNISSDDSEDGLDDSNPLLPQSGDPLIQVKEEPPNSLLGETSGAGSSGMLNTYSLNGVLQSESKCDKGNLYNFSKLKKSRKWLKSILLSDESSEADSQSEDDDEEELNLSREELHNMLRLHKYKKLHQNKYSKDKELQQYQYYSAGLLSTYDPFYEQQRHLLGPKKKKFKEEKKLKAKLKKVKKKRRRDEELSSEESPRRHHHQTKVFAKFSHDAPPPGTKKKHLSIEQLNARRRKVWLSIVKKELPKANKQKASARNLFLTNSRKLAHQCMKEVRRAALQAQKNCKETLPRARRLTKEMLLYWKKYEKVEKEHRKRAEKEALEQRKLDEEMREAKRQQRKLNFLITQTELYAHFMSRKRDMGHDGIQEEILRKLEDSSTQRQIDIGGGVVVNITQEDYDSNHFKAQALKNAENAYHIHQARTRSFDEDAKESRAAALRAANKSGTGFGESYSLANPSIRAGEDIPQPTIFNGKLKGYQLKGMNWLANLYEQGINGILADEMGLGKTVQSIALLAHLAERENIWGPFLIISPASTLNNWHQEFTRFVPKFKVLPYWGNPHDRKVIRRFWSQKTLYTQDAPFHVVITSYQLVVQDVKYFQRVKWQYMVLDEAQALKSSSSVRWKILLQFQCRNRLLLTGTPIQNTMAELWALLHFIMPTLFDSHEEFNEWFSKDIESHAENKSAIDENQLSRLHMILKPFMLRRIKKDVENELSDKIEILMYCQLTSRQKLLYQALKNKISIEDLLQSSMGSTQQAQNTTSSLMNLVMQFRKVCNHPELFERQETWSPFHISLKPYHISKFIYRHGQIRVFNHSRDRWLRVLSPFAPDYIQRSLFHRKGINEESCFSFLRFIDISPAEMANLMLQGLLARWLALFLSLKASYRLHQLRSWGAPEGESHQRYLRNKDFLLGVNFPLSFPNLCSCPLLKSLVFSSHCKAVSGYSDQVVHQRRSATSSLRRCLLTELPSFLCVASPRVTAVPLDSYCNDRSAEYERRVLKEGGSLAAKQCLLNGAPELAADWLNRRSQFFPEPAGGLWSIRPQNGWSFIRIPGKESLITDSGKLYALDVLLTRLKSQGHRVLIYSQMTRMIDLLEEYMVYRKHTYMRLDGSSKISERRDMVADFQNRNDIFVFLLSTRAGGLGINLTAADTVIFYDSDWNPTVDQQAMDRAHRLGQTKQVTVYRLICKGTIEERILQRAKEKSEIQRMVISGGNFKPDTLKPKEVVSLLLDDEELEKKLRLRQEEKRQQEETNRVKERKRKREKYAEKKKKEDELDGKRRKEGVNLVIPFVPSADNSNLSADGDDSFISVDSAMPSPFSEISISSELHTGSIPLDESSSDMLVIVDDPASSAPQSRATNSPASITGSVSDTVNGISIQEMPAAGRGHSARSRGRPKGSGSTAKGAGKGRSRKSTAGSAAAMAGAKAGAAAASAAAYAAYGYNVSKGISASSPLQTSLVRPAGLADFGPSSASSPLSSPLSKGNNVPGNPKNLHMTSSLAPDSLVRKQGKGTNPSGGR

SEQ ID NO: 193734 - DNA, 4671 bp, Artificial Sequence
  derived and/or modified sequence
atggcatccgagctcggagctagggatgatggtggttgtacagaacttgccaagcccctttacctgcagtacttggagagggccctgagactcgatcacttcctcaggcagacatctgctattttcaacaggaacatttcctctgatgacagcgaagacgggcttgacgattctaatcccctacttcctcagtctggtgaccctctaatccaggtcaaagaggaaccgccaaactccctcctgggcgagacatcaggtgccggatccagcgggatgctgaacacctattctctcaacggtgtgctgcagtctgagagcaaatgtgacaaaggtaacctttataacttctctaagttgaaaaaatcacgtaagtggctgaaatcaatcttgctgtctgacgaaagcagcgaagcggactctcagtctgaggacgacgatgaagaggaactcaacctgtctagggaagaacttcacaatatgctgcggttgcataaatacaaaaaattgcatcagaataagtacagcaaggacaaagaacttcaacagtaccagtactactccgctggactgctgtcaacctatgacccattctatgagcagcagaggcatctgttggggcccaaaaaaaagaagtttaaggaagagaagaagctgaaagcgaagctgaagaaagtgaagaagaagcgcagaagagacgaggaactgagttcggaagagagtcctcgcagacatcatcatcagactaaggtctttgcaaagttttctcacgatgccccacccccaggaactaaaaagaaacatctctctatagaacagctgaacgctcgtcgccgcaaggtctggctcagtatcgtgaaaaaagaactcccgaaagctaataagcaaaaggcctccgctcgaaatcttttcttgaccaacagtcgtaagctggctcatcagtgtatgaaagaggttagacgcgcggccttacaggcacagaagaattgtaaggaaaccctgccacgggcacgacgcctcacaaaagaaatgttgctgtactggaaaaagtacgagaaggttgagaaggaacatagaaaacgggccgaaaaggaggcactcgagcaacgaaaactcgacgaggagatgagagaggccaaaagacagcagaggaaactgaattttctgataacccagacagagctctacgcacactttatgtctcgtaagcgcgatatggggcacgacgggatccaagaagaaattctacggaaattagaggactctagcactcagcggcagattgacattggcggaggggttgttgtgaatattactcaggaggattacgactcaaatcactttaaagcacaagctctgaagaacgcagaaaatgcttaccacatccaccaggctcgtaccagatcttttgacgaagatgccaaggagtcacgggccgccgccctgagagctgccaacaaaagcggaaccggatttggggaatcatattcactagcaaaccccagcatccgcgcgggcgaggatattccccagcccactatcttcaacggcaagttaaaggggtaccaattaaaaggcatgaattggttggccaatttgtacgaacagggcattaatgggattttggcagacgagatggggcttggtaaaactgtacagtctattgctcttctggcccatttggccgaaagagagaatatctggggccccttcctgatcatatctccagcttccactcttaacaactggcaccaggaattcacaagattcgtccccaaatttaaggtgctgccctattggggaaatcctcatgatcggaaggtaattagacggttctggtcccagaagaccctatacacacaggacgctcccttccatgtggtcataacttcatatcagctcgttgtacaggatgttaagtatttccagcgggttaaatggcagtatatggtgttagatgaggctcaggctctgaagtcctcaagctccgtccggtggaaaatacttctacagttccaatgccgaaatcggctgctgcttactggtacacctatacagaatacaatggcagagctgtgggccctgcttcacttcattatgcctactttgtttgatagccacgaggagttcaacgaatggttttctaaggatatagagtcccatgcagagaataaatcagccatagacgaaaatcagctttcacgcttgcatatgatcctgaagcccttcatgctgcggaggatcaagaaagacgtcgaaaacgagctgtctgacaagattgagatcctgatgtactgccagctcacaagtcgacagaaattgctgtaccaagccctcaaaaataagatttccatcgaggacttattgcagagcagcatgggcagtactcaacaggcgcagaataccactagctccttgatgaatcttgtgatgcagtttcggaaggtgtgtaaccacccagaactctttgaacgacaggaaacttggtcccccttccatatcagcctcaagccttaccacatctcgaagtttatctataggcatggacagatcagggtttttaaccatagccgcgatagatggctccgggttttatctccttttgcccccgattatatccagcgatcacttttccatagaaaagggatcaatgaggaatcgtgtttctcattcctccgtttcatcgacataagccctgccgagatggctaacctaatgctgcagggattgctcgcaagatggttggcgctatttctctctttgaaggcatcttacagactccaccagctgcgaagctggggggcccctgaaggggaatcgcaccagagatatctgaggaataaagattttttactgggggtgaattttccgctaagctttccaaatctttgttcttgtcccctgctgaaatcgcttgtgtttagtagccactgtaaggctgtgtctggctacagcgaccaagtggtccatcagaggcggtctgcaacttcgagtttacgtcgatgtcttctgaccgaactgccctcattcctctgcgtggcatccccacgagtcacagccgtcccactcgactcttactgtaacgatcgctctgctgagtacgaacggagggtgctgaaagaggggggcagtctggccgcaaaacagtgcttgctgaatggcgctcccgagctagccgccgactggctgaatcgaagatcgcagttcttccctgagccggcaggcgggctctggtccataagaccccagaacggatggtcatttatccgaatccctgggaaggaaagtttaatcaccgactccggtaaactgtacgcattagatgtgctgctcactcgtttgaagtcacaaggccatcgggtgctgatctattctcaaatgaccaggatgattgacctgctggaggagtacatggtttaccgcaagcatacttatatgcgcttagatgggtctagcaagataagcgagaggagggacatggttgcggactttcagaatcggaacgacatctttgtgtttctactgtcgacacgtgcaggtgggctcggcatcaatctcaccgccgccgacaccgtcatcttctacgactcagactggaacccaactgttgatcaacaggcaatggaccgggctcatcggctggggcaaaccaagcaggtcacagtttatagattaatttgcaagggtacaatcgaggaaaggatcttgcagagggctaaagagaagtctgagatccagagaatggtgatctctggcggtaattttaaaccggataccttgaagccgaaagaggtggtgagcctactgctagacgacgaggaacttgaaaagaaactgcgcctgcgacaggaagagaagcgacagcaggaggagactaatagagttaaagagagaaaaaggaagagagagaagtacgcggagaaaaagaagaaggaggacgaactggatggcaagcggagaaaggaaggggtcaacctggtaatcccttttgtcccaagtgcagataacagtaatctgagtgccgacggcgatgattccttcatttccgtggacagcgccatgccatctcctttctctgaaatctccatttcatctgagctgcacaccggtagcatccccctcgatgagagttcttccgatatgctggtgatcgttgatgatccggcatcaagcgccccacagtcccgcgcgactaactccccggccagtattacgggctccgtaagcgacaccgttaatggaatctcgatacaggagatgccggctgccgggcgggggcactcagcgcgatcacgaggcaggccaaagggcagtgggtccacagctaagggcgccgggaagggaaggagtaggaagtctactgccggaagcgcagccgcaatggccggcgccaaggctggggcagcagctgcatctgccgcagcctatgccgcatatggatataacgtcagcaaagggattagcgctagtagtcctctgcagacatctctggtgcgccccgctggtttagccgacttcggacccagctccgctagctcccctctttcctcacccctctctaagggaaacaatgtgcccgggaacccaaagaacctccatatgactagcagccttgctcctgattccctggttcgtaagcagggcaaggggactaatcccagtggtgggcgctag

SEQ ID NO: 193735 - DNA, 4671 bp, Artificial Sequence
  derived and/or modified sequence
atggcatcagagctaggggccagggacgatgggggatgtacagaactggccaagccactgtacctccagtatctggaaagggctcttaggctggaccatttcctgcgacaaaccagcgccattttcaaccgaaatatctcaagtgatgacagcgaagacggcctggatgatagcaatccactcctgccgcaaagcggtgatccattgatccaggtaaaagaggagccacctaattccctgctgggcgaaacttctggagccgggtcatccggaatgctcaacacttacagcctgaacggtgtgttgcaaagcgagtcaaaatgcgataaggggaatctgtacaacttttcaaagctgaagaaatcccgcaaatggctgaaaagcattcttctgagtgacgaatcctccgaggccgacagccagtcagaggacgatgatgaagaggagctaaatctgtcaagggaagaacttcataatatgcttcggctacataagtacaaaaaacttcaccagaacaaatattcgaaagacaaagagcttcagcagtaccaatactatagtgccgggttgctgtctacctacgatcctttctatgaacagcagagacacttgcttggtcctaagaagaagaaatttaaagaagagaaaaagctgaaagctaagcttaaaaaggtaaagaaaaagcggcggcgcgacgaagagctcagctccgaagagtcccccagacgacatcaccaccaaacgaaggtttttgcaaaattttcacatgacgcccccccaccgggcacaaaaaagaaacatttgagtatagagcaactcaacgctcggagacgaaaggtgtggctttcaatcgtgaaaaaggagctgccgaaagctaataaacagaaagcttctgcacggaacctcttcctcacaaacagtaggaaactcgcccaccagtgcatgaaagaagtgcggcgcgccgcgttgcaagctcaaaagaattgtaaggaaactctccctcgagccaggcggctgacaaaggagatgctgttgtactggaagaagtacgagaaagttgagaaagaacaccggaagagagcggagaaagaagcactagaacaacggaagctggacgaggagatgcgggaggctaaacgacagcaaagaaagttgaattttctcattacccagacagaactgtacgcccacttcatgagtcgaaaacgcgatatgggacatgatggcatccaggaggagatccttcggaagttggaagactcttccactcagaggcagatagatatcggcggcggagtcgtggttaacattacgcaggaggactacgatagtaatcattttaaggcgcaggcccttaaaaacgccgagaatgcgtaccatatccaccaggcaaggaccagaagcttcgatgaagatgcaaaggagtcccgggccgctgctttgagagccgccaacaaaagtggaactggtttcggtgaatcttacagtctagcaaatccatccatccgagctggcgaggatatccctcaacccactatatttaacggaaagttgaaaggataccagttaaaaggcatgaactggctggccaacctctatgaacaaggcatcaacgggatccttgcagacgagatgggcctggggaagactgttcagagcattgcactgctggctcacctcgctgagcgggagaacatctggggcccgttccttattatctcacctgctagtaccttgaacaattggcatcaggagttcaccagattcgttcctaaatttaaggtactaccttattggggtaatcctcacgatcgcaaggtgattcgtcgtttttggagccagaaaactttgtatacacaggatgcaccgttccacgtggtcatcaccagctaccaattggttgtgcaggatgtcaaatattttcagcgtgtcaagtggcagtatatggtcctggatgaagcccaggcgctgaaaagcagttcctcggtgcggtggaaaatcctgttgcagtttcaatgtaggaatcgccttctcctgactggaactccgatccagaacacaatggccgagttgtgggctctcctgcacttcataatgccaactctgtttgactcccacgaagagttcaacgagtggttttccaaagatattgagtcccatgccgagaataaatctgctatagatgagaaccaactcagccgccttcacatgatcctgaagcctttcatgctgcgaaggattaagaaggacgtcgaaaatgagctgtcggacaaaattgagatcctgatgtactgccagttgacctcacggcagaagctgctgtatcaggccctcaagaataagattagtatcgaggatctcctacaaagcagcatgggatccacacagcaagctcagaacaccacctccagcctaatgaatttggtcatgcaatttcggaaggtttgtaaccacccagagttattcgaacgccaggagacctggtctccttttcatatatccttgaaaccctatcacattagcaagtttatttatcgccacgggcagatacgagtgttcaatcactcacgcgacagatggctccgggtcctatccccctttgctccagactatattcagcgttccctgttccatcgcaagggcattaacgaggaaagttgtttctcatttctgcgattcatcgacatttctcccgccgaaatggcgaacctgatgctgcaagggttactggcccgctggctggccctgttcctgagcctgaaggctagttatcggctgcatcagttaagatcttggggggctcctgagggcgaatcccaccagaggtacttacgcaacaaagactttctattaggagttaatttcccactgagcttccccaacctgtgctcttgtcccctgttgaaatcactagtgttttcttcccattgtaaggctgtcagcggttactctgatcaagttgtgcaccaaaggcgcagtgccacttcctccttgagaaggtgcctgctaactgagctgccctcgttcttatgcgttgccagccccagagtcacggcagtgcctctcgactcctactgtaacgaccgttctgcagagtatgagcggcgcgtgcttaaagagggagggagtctcgccgccaagcagtgcctgcttaatggcgcaccagagcttgctgcagactggctgaaccgccgtagtcagttttttcctgaacccgccggaggcttatggtccattaggccccagaatggatggtcgttcatccgtatccccggcaaagagagtcttattacggattcgggcaaactgtacgctctggacgtactgttgaccagacttaagagtcagggtcatagagtgctcatttactcccagatgacaagaatgattgacttacttgaagaatacatggtgtaccggaaacacacgtacatgcggcttgacggtagcagcaagatcagcgagagacgagacatggtggcggattttcaaaatcgcaatgacatttttgtcttcttgctgagtacccgggccggcggacttgggataaatctaacggcagccgacaccgttatattctacgattcggattggaaccccaccgtggaccagcaagccatggatcgagcgcaccgacttggacagactaaacaggtcaccgtctaccggctgatctgtaagggcacaatagaggagcgcatactccagagggctaaagaaaaaagcgaaattcagcggatggttatctcaggggggaactttaagccagatacgctcaagcccaaggaagtggtcagtctgcttctggatgatgaagaactggaaaagaaactcagactgcggcaggaggagaaacgccaacaggaagagaccaaccgcgtgaaggaacgtaaacgaaagagggaaaagtatgcggaaaagaagaagaaggaggatgagctcgacgggaagcgtcggaaggagggcgtcaacctggtgatcccattcgtgcctagtgctgataattccaacctcagtgcagatggagatgacagctttatatctgtggacagtgcgatgccaagtccgttcagcgagattagcatctctagcgagcttcacacaggttcgatccccctggacgaatccagctcggacatgttggtcattgtggacgatccagccagttctgcccctcagtcacgagcaacaaacagccctgcgtccatcaccggcagcgtgtccgacacagtgaatggtataagtattcaggagatgcccgctgctgggagaggccattctgcacggagtagaggcagacctaaaggctcgggatccacagcgaaaggagccgggaagggacgttctagaaaatccaccgctggcagcgcagctgcaatggccggcgctaaagccggggccgctgccgcttctgcagctgcatacgcagcctatggatataatgtgagcaaggggatcagcgcttcatcaccgctgcagacatcacttgtgcgccccgccggactggccgatttcggccccagctcagcgtcatctccgctgtcctccccgctcagtaagggcaacaatgtccccggaaaccctaagaacctgcatatgactagttcattggcccccgactccctagtgcggaagcagggtaaaggaaccaatcctagcggaggaaggtag

SEQ ID NO: 193736 - DNA, 6439 bp, Artificial Sequence
  derived and/or modified sequence
aggcgacgagcagtgagtgtgggcggggtgggggtaagccacccgtgtagcggctcgattgttctggcctggctatggcgcctctcctcccccccgccatggctccccgtgtccctgctccgctcctctcagtgagtgaaagtggccgccgccgccgccggcccagcgcccgcagccgcctcagcgccgccgccatcttggggtcccaggagccgcggagggagcgagctaggagcgtccacgcccaacgcagtcaccgtcccacggcctcagagagcgaaccgcggctccaccgtcggcggggcgacccccccctccggaccccgcccgcaccccgccccccctccgccgccgtcgcggcggcggggccaggcggcccgagccgtgcagtcggaggtccttgtgcatgaagacagatttgttctatggcctcggagttgggtgccagggatgatggaggctgcactgagctggcaaagcccctctatcttcagtacttggagagggccctccggttggaccattttctgcgacaaacgtcagctatcttcaataggaatatttctagtgatgacagtgaagatggactggatgacagtaatccattattgccccagtctggggatcccttaatacaagttaaggaagaacctccaaattcattgcttggtgaaacttctggagcaggcagttctggaatgttaaacacatattctctgaatggagttctacagtcagaatcaaaatgtgataaggggaatttatataatttctctaagctgaagaaaagcagaaagtggctaaagagcattctgctaagtgatgaatccagcgaggctgattctcagagtgaagacgatgatgaagaagaactcaatctcagcagagaagaacttcacaacatgcttcgactacacaaatataagaaacttcaccaaaataagtatagtaaagacaaggagttgcagcaatatcagtactacagtgcaggcctgctctccacatatgaccctttctatgagcaacaacggcacctacttggacccaagaaaaagaaatttaaggaggaaaagaaacttaaagctaagttgaaaaaagtgaagaaaaaaagacgaagagatgaagaactttcctctgaagaatcccctcgtcgccatcaccaccagaccaaagtctttgccaagttttctcacgatgcacctccccctggcactaagaaaaagcacttatccattgagcagctgaatgctcgtcgcaggaaagtatggctcagcattgtgaaaaaggaactaccaaaggcaaataagcagaaagcttcagctcgtaacctgtttctcaccaatagccgaaagcttgctcaccagtgcatgaaggaggtgcgtcgagctgccttgcaggcccagaagaactgtaaggaaaccttgcctcgtgcccgccgcctcaccaaggagatgcttctgtactggaagaaatatgagaaagtagagaaggagcaccgcaagagagcagagaaggaagctttggagcagcggaagttggatgaggaaatgcgggaggccaagaggcaacagcgaaaactcaacttcttaattacccagacagagttgtatgcccatttcatgagtcgcaaacgagatatgggtcatgatggtatccaggaagaaatcctaaggaaactggaagacagttctacccagagacaaatcgatataggtggaggagtggtagttaacatcacacaggaggattatgatagtaaccattttaaagcccaggccctgaagaatgctgaaaatgcttaccatattcaccaagctcggacaaggtcatttgatgaagatgcaaaagaaagtcgagcagctgccctacgggcagcaaacaagtctggcactgggtttggggagagttatagcctggctaacccatctatccgggctggtgaggatattccacagcccacaatttttaatggcaaattgaaaggttatcaactgaaaggcatgaattggttggccaatctatatgaacagggtattaatggcattcttgctgatgaaatgggccttggtaaaacagtacagagcattgcccttctggcccatctggctgagagagagaacatttggggacctttcttaataatttcacctgcgtctacacttaacaattggcaccaggagtttactagatttgttcctaaatttaaggtgctaccatattggggaaatcctcatgatagaaaagtcatcagaaggttctggagtcagaagaccctctacactcaggatgcccccttccatgtggttattaccagctatcagctggtggtgcaggatgtaaagtatttccagcgggtcaagtggcaatacatggtactggatgaggctcaggcgctcaagagtagttccagtgttcgttggaagatcctcttacagttccagtgtcggaatcggcttttgctaaccgggaccccaattcagaacaccatggcagagctttgggctctgctgcatttcattatgccaacattatttgattcacatgaggaatttaatgaatggttttccaaggacattgagagccatgccgaaaacaaatctgctattgatgagaatcaactttctcgcttacacatgattttgaagccatttatgctgaggagaatcaagaaagatgtggaaaatgaattatctgacaagattgagattctaatgtattgccaactgaccagccgacagaagctgctatatcaggcactaaagaacaaaatttccattgaggatttattgcagtcttctatgggctctacccaacaagcacagaacaccaccagcagcctcatgaatctggtcatgcagtttaggaaggtgtgtaatcacccggagttatttgaacggcaagaaacttggtctccatttcatatttccctaaagccataccacatttcaaagtttatctaccgtcatggacagatcagggtcttcaatcattcacgagacaggtggttaagggttctttctccatttgcaccagactatatccaacggtctctctttcacagaaaaggtattaatgaagaaagctgtttctctttccttcgctttattgatatatctccagcagaaatggcaaaccttatgcttcagggacttttggccagatggttagctcttttcctgtctctgaaagcctcctacaggctccatcagctacgctcctggggagcgccagaaggggagagccaccagagatacctgaggaacaaggatttccttcttggggttaattttccactctcctttccaaacctttgcagctgccctttgttaaagtctcttgttttcagcagccactgtaaagcagtgagtggctactcagaccaggttgtccatcagcggagatcagctacctcctcgctgcgtcgctgcctgctcactgagctgccatcttttttgtgtgtggccagtccacgagttaccgcagtgccattggattcttactgcaatgaccgaagtgcagaatatgaaaggcgagttctgaaggaaggagggagtctggcagccaagcagtgtttgttgaatggggcccctgaactggctgcagactggctaaatagacgatcacagttcttcccagagccagctggaggtctgtggagcatcagacctcagaatggctggtctttcatcaggattccaggcaaggagagcctcatcactgacagtggaaagctgtatgcccttgatgtcctgctgactcggctcaagtctcaagggcatagggtccttatctactcccagatgaccaggatgatagacctactggaggaatacatggtttacaggaagcatacctacatgaggcttgatggctcatccaagatctcggagaggcgagacatggttgctgattttcagaacaggaatgacatctttgtgttcctgttaagcacacgagctggaggactgggtatcaatctcactgctgcagacacagtgattttctatgatagcgactggaaccccactgtggaccagcaggccatggacagggcccaccgcttagggcagacaaagcaggttactgtgtaccggctcatctgtaaaggcaccattgaagaacgcattctgcaaagagccaaggagaagagtgagattcagcggatggtgatttcaggtgggaacttcaaaccagataccttgaaacccaaagaggtggttagtcttcttctagacgacgaagagttggagaagaaactgaggctgcggcaggaagagaaacggcaacaggaggaaaccaaccgagtgaaagagcgcaagcggaagcgggaaaagtatgcagagaagaagaaaaaagaagatgaattggatgggaaaaggagaaaagagggtgtgaacctggtgatcccatttgttccctcggctgataactccaacctctctgctgacggagatgactccttcattagcgtggactcagccatgccaagccctttcagtgagatctccatcagcagtgagctgcacactggctccattcccctggacgagagcagcagtgacatgctggtcattgtggatgacccagcctcctcagcccctcagtctcgagctaccaactctcccgcatccataacaggctccgtctcagataccgtgaatggaatttccattcaggaaatgccagctgcaggacgtggtcactcagcccgaagccgaggccgccccaaaggttcaggaagcacagccaaaggagcagggaagggccggagccgaaagtccacggcaggcagtgctgctgcaatggcaggagccaaagccggggctgcagcggcctctgcagctgcctatgccgcatacgggtacaacgtgtctaaaggaatctccgccagcagtcctctgcagacatcccttgttcggcctgctggccttgctgactttggaccttcaagcgcctcttctcctttgagttcccctttgagcaagggaaataatgttcctgggaatcccaagaacctccacatgaccagcagcctagccccagactctctggtccggaaacagggcaaaggcaccaacccctctggaggacggtaaccatctgggccctccgacttccttcaaccaaaccagggctagagtcctgacctgccagtggtctttggatggcttgccccgtgcagcatcttgcatcctgagtcagaagtggaaatgtccagcaggggaaggacaggcaggtggatggtgtgagcacttttatcatctgtgtctcatcaggagcatctggggtgcctgtaggaggaaggccacagggcatggatcagccccactgcatctcaagtgaactgtatagccaagtcttaaacctctcacggggcaagcctgacacagaccccctttagatgctcaggcatactgtttccatcccgattccactcttcggctctgacacgtcccttgcaaagtctccgcaggtgctgtgaagagccttccatggtagagatttctcttaagagtgtgatttctcatagggctagtaagggagattgtatacctgttgtccacagtcttcaggcagctccccaggtctctgaaccccagagtgtcatcattggagagagcagtgactgcgagagatggtggaggccgctaagcatggtagaggctagaggaagtctatccacaggcagttgtgttcccagcaattcctcccatcctgcatggttcacaccaagagaaccttcagatcctaccagcaaccgtagcaccttccacccaggggactcccagaagccagtagagagaccaggagccacctcaatcagcaggacagcctcactgcccctcttgcagagtcccctttgcccatcctgaatgcacagtctccctgctcatgcccttcagtcccctgcttggctgtatgcactgtctatattgcactgagagaggaagggacagcaggagtgaggtgaagagggcggagagagggggcaggctcggcaccggccctcccagcccggccagcctgagcttgctgccctccagtagagacagaggggcagtgtttgcatgggaggtgtttctgcctgtccctgcctgatgtccctggtggagcaggtacctccgggcgggcaagcctctgatttgcacacctgaaaatcgcggaattgagtttcgatagattgatttttaaaacttttttggagtagggggtataggggaatcatttaatttaaatcattaagattcccctgctcaaacccagattcctgtgtacagatgctatttagagggaatcagaaaaatgccaagccttttctctttgaatgtgctatttttataactgaacttgtacatatgtataaagagagacacatcttccttttactaactggataaaaaaatcttaaataaaatggagtgagataattttatgtaaa

SEQ ID NO: 193737 - DNA, 5989 bp, Artificial Sequence
  derived and/or modified sequence
ggtcccaggagccgcggagggagcgagctaggagcgtccacgcccaacgcagtcaccgtcccacggcctcagagagcgaaccgcggctccaccgtcggcggggcgacccccccctccggaccccgcccgcaccccgccccccctccgccgccgtcgcggcggcggggccaggcggcccgagccgtgcagtcggaggtccttgtgcatgaagacagatttgttctatggcctcggagttgggtgccagggatgatggaggctgcactgagctggcaaagcccctctatcttcagtacttggagagggccctccggttggaccattttctgcgacaaacgtcagctatcttcaataggaatatttctagtgatgacagtgaagatggactggatgacagtaatccattattgccccagtctggggatcccttaatacaagttaaggaagaacctccaaattcattgcttggtgaaacttctggagcaggcagttctggaatgttaaacacatattctctgaatggagttctacagtcagaatcaaaatgtgataaggggaatttatataatttctctaagctgaagaaaagcagaaagtggctaaagagcattctgctaagtgatgaatccagcgaggctgattctcagagtgaagacgatgatgaagaagaactcaatctcagcagagaagaacttcacaacatgcttcgactacacaaatataagaaacttcaccaaaataagtatagtaaagacaaggagttgcagcaatatcagtactacagtgcaggcctgctctccacatatgaccctttctatgagcaacaacggcacctacttggacccaagaaaaagaaatttaaggaggaaaagaaacttaaagctaagttgaaaaaagtgaagaaaaaaagacgaagagatgaagaactttcctctgaagaatcccctcgtcgccatcaccaccagaccaaagtctttgccaagttttctcacgatgcacctccccctggcactaagaaaaagcacttatccattgagcagctgaatgctcgtcgcaggaaagtatggctcagcattgtgaaaaaggaactaccaaaggcaaataagcagaaagcttcagctcgtaacctgtttctcaccaatagccgaaagcttgctcaccagtgcatgaaggaggtgcgtcgagctgccttgcaggcccagaagaactgtaaggaaaccttgcctcgtgcccgccgcctcaccaaggagatgcttctgtactggaagaaatatgagaaagtagagaaggagcaccgcaagagagcagagaaggaagctttggagcagcggaagttggatgaggaaatgcgggaggccaagaggcaacagcgaaaactcaacttcttaattacccagacagagttgtatgcccatttcatgagtcgcaaacgagatatgggtcatgatggtatccaggaagaaatcctaaggaaactggaagacagttctacccagagacaaatcgatataggtggaggagtggtagttaacatcacacaggaggattatgatagtaaccattttaaagcccaggccctgaagaatgctgaaaatgcttaccatattcaccaagctcggacaaggtcatttgatgaagatgcaaaagaaagtcgagcagctgccctacgggcagcaaacaagtctggcactgggtttggggagagttatagcctggctaacccatctatccgggctggtgaggatattccacagcccacaatttttaatggcaaattgaaaggttatcaactgaaaggcatgaattggttggccaatctatatgaacagggtattaatggcattcttgctgatgaaatgggccttggtaaaacagtacagagcattgcccttctggcccatctggctgagagagagaacatttggggacctttcttaataatttcacctgcgtctacacttaacaattggcaccaggagtttactagatttgttcctaaatttaaggtgctaccatattggggaaatcctcatgatagaaaagtcatcagaaggttctggagtcagaagaccctctacactcaggatgcccccttccatgtggttattaccagctatcagctggtggtgcaggatgtaaagtatttccagcgggtcaagtggcaatacatggtactggatgaggctcaggcgctcaagagtagttccagtgttcgttggaagatcctcttacagttccagtgtcggaatcggcttttgctaaccgggaccccaattcagaacaccatggcagagctttgggctctgctgcatttcattatgccaacattatttgattcacatgaggaatttaatgaatggttttccaaggacattgagagccatgccgaaaacaaatctgctattgatgagaatcaactttctcgcttacacatgattttgaagccatttatgctgaggagaatcaagaaagatgtggaaaatgaattatctgacaagattgagattctaatgtattgccaactgaccagccgacagaagctgctatatcaggcactaaagaacaaaatttccattgaggatttattgcagtcttctatgggctctacccaacaagcacagaacaccaccagcagcctcatgaatctggtcatgcagtttaggaaggtgtgtaatcacccggagttatttgaacggcaagaaacttggtctccatttcatatttccctaaagccataccacatttcaaagtttatctaccgtcatggacagatcagggtcttcaatcattcacgagacaggtggttaagggttctttctccatttgcaccagactatatccaacggtctctctttcacagaaaaggtattaatgaagaaagctgtttctctttccttcgctttattgatatatctccagcagaaatggcaaaccttatgcttcagggacttttggccagatggttagctcttttcctgtctctgaaagcctcctacaggctccatcagctacgctcctggggagcgccagaaggggagagccaccagagatacctgaggaacaaggatttccttcttggggttaattttccactctcctttccaaacctttgcagctgccctttgttaaagtctcttgttttcagcagccactgtaaagcagtgagtggctactcagaccaggttgtccatcagcggagatcagctacctcctcgctgcgtcgctgcctgctcactgagctgccatcttttttgtgtgtggccagtccacgagttaccgcagtgccattggattcttactgcaatgaccgaagtgcagaatatgaaaggcgagttctgaaggaaggagggagtctggcagccaagcagtgtttgttgaatggggcccctgaactggctgcagactggctaaatagacgatcacagttcttcccagagccagctggaggtctgtggagcatcagacctcagaatggctggtctttcatcaggattccaggcaaggagagcctcatcactgacagtggaaagctgtatgcccttgatgtcctgctgactcggctcaagtctcaagggcatagggtccttatctactcccagatgaccaggatgatagacctactggaggaatacatggtttacaggaagcatacctacatgaggcttgatggctcatccaagatctcggagaggcgagacatggttgctgattttcagaacaggaatgacatctttgtgttcctgttaagcacacgagctggaggactgggtatcaatctcactgctgcagacacagtgattttctatgatagcgactggaaccccactgtggaccagcaggccatggacagggcccaccgcttagggcagacaaagcaggttactgtgtaccggctcatctgtaaaggcaccattgaagaacgcattctgcaaagagccaaggagaagagtgagattcagcggatggtgatttcaggtgggaacttcaaaccagataccttgaaacccaaagaggtggttagtcttcttctagacgacgaagagttggagaagaaactgaggctgcggcaggaagagaaacggcaacaggaggaaaccaaccgagtgaaagagcgcaagcggaagcgggaaaagtatgcagagaagaagaaaaaagaagatgaattggatgggaaaaggagaaaagagggtgtgaacctggtgatcccatttgttccctcggctgataactccaacctctctgctgacggagatgactccttcattagcgtggactcagccatgccaagccctttcagtgagatctccatcagcagtgagctgcacactggctccattcccctggacgagagcagcagtgacatgctggtcattgtggatgacccagcctcctcagcccctcagtctcgagctaccaactctcccgcatccataacaggctccgtctcagataccgtgaatggaatttccattcaggaaatgccagctgcaggacgtggtcactcagcccgaagccgaggccgccccaaaggttcaggaagcacagccaaaggagcagggaagggccggagccgaaagtccacggcaggcagtgctgctgcaatggcaggagccaaagccggggctgcagcggcctctgcagctgcctatgccgcatacgggtacaacgtgtctaaaggaatctccgccagcagtcctctgcagacatcccttgttcggcctgctggccttgctgactttggaccttcaagcgcctcttctcctttgagttcccctttgagcaagggaaataatgttcctgggaatcccaagaacctccacatgaccagcagcctagccccagactctctggtccggaaacagggcaaaggcaccaacccctctggaggacggtaaccatctgggccctccgacttccttcaaccaaaccagggctagagtcctgacctgccagtggtctttggatggcttgccccgtgcagcatcttgcatcctgagtcagaagtggaaatgtccagcaggggaaggacaggcaggtggatggtgtgagcacttttatcatctgtgtctcatcaggagcatctggggtgcctgtaggaggaaggccacagggcatggatcagccccactgcatctcaagtgaactgtatagccaagtcttaaacctctcacggggcaagcctgacacagaccccctttagatgctcaggcatactgtttccatcccgattccactcttcggctctgacacgtcccttgcaaagtctccgcaggtgctgtgaagagccttccatggtagagatttctcttaagagtgtgatttctcatagggctagtaagggagattgtatacctgttgtccacagtcttcaggcagctccccaggtctctgaaccccagagtgtcatcattggagagagcagtgactgcgagagatggtggaggccgctaagcatggtagaggctagaggaagtctatccacaggcagttgtgttcccagcaattcctcccatcctgcatggttcacaccaagagaaccttcagatcctaccagcaaccgtagcaccttccacccaggggactcccagaagccagtagagagaccaggagccacctcaatcagcagtgtttgcatgggaggtgtttctgcctgtccctgcctgatgtccctggtggagcaggtacctccgggcgggcaagcctctgatttgcacacctgaaaatcgcggaattgagtttcgatagattgatttttaaaacttttttggagtagggggtataggggaatcatttaatttaaatcattaagattcccctgctcaaacccagattcctgtgtacagatgctatttagagggaatcagaaaaatgccaagccttttctctttgaatgtgctatttttataactgaacttgtacatatgtataaagagagacacatcttccttttactaactggataaaaaaatcttaaataaaatggagtgag

SEQ ID NO: 193738 - DNA, 4671 bp, Artificial Sequence
  derived and/or modified sequence
atggccagcgagctgggcgccagagatgatggcggctgcacagagctggccaagcccctgtacctgcagtacctggagcgggccctgcggctggaccacttcctgcggcagaccagcgccatcttcaacagaaacatcagcagtgatgattctgaagatggcctggatgacagcaaccccctgctgccccagagcggggaccccctcatccaggtgaaggaggagccccccaacagcctgctgggggagaccagcggggccggcagcagcggcatgctgaacacctacagcctgaatggagtgctgcagagcgagagcaaatgtgacaagggcaacctgtacaacttcagcaagctgaagaagagcaggaagtggctgaagagcatcctgctgagtgatgagagcagcgaggccgacagccagagtgaagatgatgatgaggaggagctgaacctgagccgggaggagctgcacaacatgctgcggctgcacaagtacaagaagctgcaccagaacaagtacagcaaggacaaggagctgcagcagtaccagtactacagcgctggcctgctgagcacctatgaccccttctatgagcagcagaggcacctgctgggccccaagaagaagaagttcaaggaggagaagaagctgaaggccaagctgaagaaggtgaagaagaagagaagaagagatgaggagctgagcagcgaggagagcccccggcggcaccaccaccagaccaaggtgtttgccaagttcagccatgatgcccctcctcctggcaccaagaagaagcacctgagcattgagcagctgaatgcccggcggaggaaggtgtggctgagcatcgtgaagaaggagctgcccaaggccaacaagcagaaggccagcgccaggaacctcttcctgaccaacagcaggaagctggcccaccagtgcatgaaggaggtgagaagagctgccctgcaggcccagaagaactgcaaggagaccctgccccgggcccggcggctgaccaaggagatgctgctgtactggaagaagtatgagaaggtggagaaggagcacaggaagagagctgagaaggaggccctggagcagaggaagctggatgaggagatgagggaggccaagaggcagcagaggaagctgaacttcctgatcacccagacagagctgtatgcccacttcatgagcaggaagagggacatgggccatgatggcatccaggaggagatcctgaggaagctggaggacagcagcacccagaggcagattgatattggaggcggcgtggtggtgaacatcacccaggaggactatgacagcaaccacttcaaggcccaggccctgaagaatgcagaaaatgcctaccacatccaccaggcccggaccaggagctttgatgaagatgccaaggagagcagagctgctgccctgcgggccgccaacaagtctggaactggatttggagagagctacagcctggccaaccccagcatccgggccggggaggacatcccccagcccaccatcttcaacgggaagctgaagggctaccagctgaagggcatgaactggctggccaacctgtatgagcagggcatcaatggcatcctggctgatgagatgggcctgggcaagacagtgcagagcatcgccctgctggcccacctggccgagcgggagaacatctggggccccttcctgatcatcagccctgccagcaccctgaacaactggcaccaggagttcaccaggtttgtgcccaagttcaaggtgctgccctactggggcaacccccatgacaggaaggtgatccgccgcttctggagccagaagaccctgtacacccaggatgcccccttccacgtggtgatcaccagctaccagctggtggtgcaggatgtgaagtacttccagagggtgaagtggcagtacatggtgctggatgaggcccaggccctgaagagcagcagctctgtgcgctggaagatcctgctgcagttccagtgcaggaaccggctgctgctgaccggcacccccatccagaacaccatggccgagctgtgggccctgctgcacttcatcatgcccaccctgtttgacagccatgaggagttcaatgagtggttcagcaaggacatcgagagccatgctgagaacaagagcgccattgatgagaaccagctgagccggctgcacatgatcctgaagcccttcatgctgcggcgcatcaagaaggatgtggagaatgagctgagtgacaagattgagatcctgatgtactgccagctgaccagccggcagaagctgctgtaccaggccctgaagaacaagatcagcattgaggacctgctgcagagctccatgggcagcacccagcaggcccagaacaccaccagcagcctgatgaacctggtgatgcagttcaggaaggtgtgcaaccaccctgagctgtttgagcggcaggagacctggagccccttccacatcagcctgaagccctaccacatcagcaagttcatctacagacatggccagatccgggtcttcaaccacagccgggaccgctggctgcgggtgctgagcccctttgccccagactacatccagaggagcctcttccacaggaagggcatcaatgaggagagctgcttctccttcctgcgcttcatcgacatcagccctgctgagatggccaacctgatgctgcagggcctgctggcccgctggctggccctcttcctgagcctgaaggccagctaccgcctgcaccagctgcgctcctggggcgcccctgagggggagagccaccagcgctacctgaggaacaaggacttcctgctgggcgtgaacttccccctgtccttccccaacctgtgcagctgccccctgctgaagagcctggtgttcagcagccactgcaaggctgtgtctggctacagcgaccaggtggtgcaccagaggagaagtgccaccagcagcctgcggcgctgcctgctgacagagctgcccagcttcctgtgtgtggccagcccccgggtgacagctgtgcccctggacagctactgcaatgacagatctgcagaatatgaaagaagagtgctgaaggagggcggcagcctggccgccaagcagtgcctgctgaatggagcccctgagctggccgctgactggctgaacagaagaagccagttcttccctgagcctgctgggggcctgtggagcatccggccccagaatggctggagcttcatccgcatccctgggaaggagagcctcatcacagacagcggcaagctgtatgccctggatgtgctgctgacccggctgaagagccagggccaccgggtgctgatctacagccagatgaccaggatgattgacctgctggaggagtacatggtgtacaggaagcacacctacatgaggctggatggcagcagcaagatcagcgagcggcgggacatggtggccgacttccagaacagaaatgacatctttgtgttcctgctgagcacccgggccggcggcctgggcatcaacctgacagctgctgacaccgtcatcttctatgacagcgactggaaccccaccgtggaccagcaggccatggaccgggcccaccggctgggccagaccaagcaggtgacagtgtaccgcctcatctgcaagggcaccatcgaggagcgcatcctgcagagggccaaggagaagtctgagatccagaggatggtgatcagcggcggcaacttcaagccagacaccctgaagcccaaggaggtggtgtccctgctgctggatgatgaggagctggagaagaagctgcggctgcggcaggaggagaagaggcagcaggaggagaccaacagagtgaaggagaggaagaggaagcgggagaagtatgcagagaagaagaagaaggaggatgagctggatggcaagaggaggaaggagggcgtgaacctggtgatcccctttgtgcccagcgctgacaacagcaacctgtctgcagatggagatgacagcttcatctctgtggacagcgccatgcccagccccttcagcgagatcagcatcagcagcgagctgcacacaggcagcatccccctggatgagagcagcagtgacatgctggtgattgtggatgatcctgccagcagcgccccccagagccgggccaccaacagccctgccagcatcaccggctctgtgtctgacacagtgaatggcatcagcatccaggagatgcctgctgctggccggggccacagcgcccggagccggggccggcccaagggcagcggcagcacagccaagggggccggcaagggccgcagcaggaagagcacagctggcagcgctgctgccatggccggggccaaggccggggctgctgctgccagcgctgctgcctatgctgcctacggctacaacgtgtccaagggcatcagcgccagcagccccctgcagaccagcctggtgcggcctgctggcctggccgactttggccccagcagcgccagcagccccctgagcagccccctgagcaagggcaacaacgtgcccggcaaccccaagaacctgcacatgaccagcagcctggccccagacagcctggtgaggaagcagggcaagggcaccaaccccagcggcggccgctag

SEQ ID NO: 193739 - DNA, 4671 bp, Artificial Sequence
  derived and/or modified sequence
atggccagcgagctgggcgcccgggacgacggcggctgcaccgagctggccaagccgctgtacctgcaatacctggagcgcgccttacggttggatcatttccttcgtcagacaagtgccattttcaaccgaaatatctccagcgacgactccgaagatggtcttgatgatagtaatccactgctgccacaatccggcgatccacttatccaagtgaaggaggagccaccaaattcccttctgggggaaacctccggtgccggctccagtggcatgctcaatacatattccctgaacggagttctacagtccgaatccaagtgcgataagggcaatctgtacaacttctcgaaactcaaaaagagtaggaaatggttgaagtcaatcctcttgtctgatgagagctccgaagcagattcacagagcgaagatgacgacgaggaggagctcaacctgagccgggaggagcttcataatatgctccgactgcacaagtacaaaaagctccaccagaacaaatactcaaaggataaagaacttcagcagtaccagtattacagcgctggtttgctgagtacttatgaccctttctacgaacagcagaggcacctgctgggacctaaaaagaaaaagttcaaagaggaaaagaaactgaaggccaaattgaaaaaagtgaaaaaaaaaagacgccgagatgaggagctttcctctgaagaaagtccgagaagacatcatcatcagacaaaggttttcgccaagttttctcatgacgcaccgccccctggaacaaaaaagaagcatctgagcatcgagcagttaaacgcgagacggaggaaggtgtggctaagcatcgttaaaaaagagctcccaaaggcaaacaagcaaaaagcatcagcgcggaatttgtttctgactaactctaggaaactggcccaccagtgcatgaaggaagtgagaagggctgctttacaggcacagaagaactgcaaagagaccttgcctagagcccggcggcttactaaagaaatgttattgtattggaagaaatacgagaaagtggaaaaagaacaccggaaaagagctgaaaaggaagctctggagcaacgcaagcttgatgaagagatgagggaagccaagagacagcaacggaaattgaacttcctcataactcaaacggaattatacgcacactttatgtctcggaagagagatatgggccacgatgggatccaggaagagattctgaggaaactcgaagactctagcacacagcgccagattgacataggcggcggagtcgtggttaatataacgcaagaggactatgatagcaaccactttaaggcccaggccctgaaaaacgcagaaaatgcttaccacattcaccaggcccgcactcgatccttcgatgaggatgcaaaagagtctagggcagccgccctgagggctgccaataagtctggcaccgggtttggcgagagctacagtctcgcaaatccaagcatccgggccggtgaagacatcccccaacccacgatttttaacgggaagctgaagggataccagctcaagggcatgaactggctcgctaatctctatgaacagggaatcaatggtatacttgctgacgagatgggcctgggcaagaccgtccagtccatcgcactccttgcccacctggccgaaagggagaatatctgggggccctttctgattatcagtccagcgagcacccttaacaattggcaccaagagttcacccgctttgttcccaagtttaaagttctgccctactgggggaacccacacgaccgcaaggttatacggcggttctggtcccagaagaccctctatactcaggatgcccccttccatgtagtcatcacctcataccagctcgttgtccaggacgtaaagtatttccaacgagtaaagtggcaatacatggtgctggatgaagctcaggctcttaaatcatccagttcggtaagatggaaaatcctcctgcaatttcagtgccggaaccggctcctactgactggtactccaatccaaaataccatggccgaactgtgggccctcctacattttatcatgccaacactgtttgacagccatgaagagtttaacgagtggttctcgaaggacatcgaaagccacgccgagaacaaaagcgcaatcgacgagaatcagttgagtaggctccatatgattttgaagccttttatgctgaggaggatcaagaaggatgtggagaacgagctgagcgacaaaatcgagatcctcatgtactgtcagttgacctccagacagaaactcttgtatcaggcgttgaagaataaaatcagcatcgaggacttactccaaagcagcatggggagcacccagcaggctcagaacaccacatcatcactcatgaatttggtgatgcagttccggaaggtgtgcaatcaccccgaattgtttgaaagacaggagacatggtctccgtttcatatttcgcttaagccgtatcatatatctaagttcatttacagacacggccagatcagggtgttcaatcattcccgcgacaggtggctgcgagtccttagcccattcgccccagactacattcagaggtctctgttccatagaaaaggtataaatgaggagagttgcttcagctttctgaggtttatagacattagtccggccgaaatggctaacttgatgcttcaaggcttgcttgcccggtggctcgcacttttcctgtccctgaaggccagctaccggttacaccaactgcgaagctggggagcccccgagggtgagtcccaccaacgttatctgcgaaataaagattttcttctgggtgtgaattttcccctgagctttccaaacctatgcagctgcccactgctgaaatctctggtatttagtagccactgtaaggctgtcagcggctatagcgatcaggtcgtccatcaaaggcgatcagctactagctcactcaggaggtgcctgcttacagaactgccctccttcctgtgtgtggccagcccacgcgtgaccgcggtcccgctcgacagctactgcaatgaccgttcagctgagtacgaacgccgtgtgctgaaagaaggcgggagtctggccgccaaacagtgtctgctgaatggagcgcccgagctcgccgcggactggcttaatcggcggagtcagttttttcccgagccagctggcggactatggagcatcagaccacagaatggttggagtttcattcgcattcccggaaaggagtcacttatcaccgactccggcaagctgtatgcactggatgtgttgctcaccagactgaaatctcagggccacagggtgttaatctacagccagatgaccagaatgattgatttactggaagaatatatggtttatcggaagcatacttacatgagactggatggttctagcaagatttcggagcggcgcgatatggtcgcagacttccagaatcggaatgacatcttcgtatttctcctcagcactagggctggcggtttagggatcaacctgacggccgccgatacagtcattttttacgattcagactggaaccccacagtggaccagcaggctatggatcgggctcatcgcctgggccagaccaagcaggtgactgtgtaccgcctgatctgtaaaggtacgatcgaagaacggatccttcaacgagccaaggaaaagtccgaaattcagcgaatggtgatctcgggaggtaactttaaacctgacaccctcaagccaaaggaagtcgtctctctcctgcttgatgatgaagaattggagaaaaagctgcgcttgaggcaggaggagaagcggcagcaggaagagaccaatcgggttaaggaacggaaacggaagagggagaaatatgccgaaaagaaaaaaaaagaggatgaattggatggcaaaaggagaaaagaaggcgttaatcttgtcattcccttcgtaccaagtgccgataactctaacttatccgccgacggagacgactccttcatcagcgttgattccgctatgcctagtcccttctcggaaatttccatatcaagcgaactgcacaccggcagcatccccctcgatgagagctcatcagacatgctcgtgatcgtcgacgatcctgcctccagcgcaccacagtccagggcgactaacagccccgcctcaatcactgggagcgtgtccgacactgtgaatggaatctcaattcaggaaatgcccgccgcaggacgcggccacagtgcaaggtctcgcggacgcccaaagggtagcggctccacagccaaaggcgccggaaagggccgatcccggaagagcactgcaggatcagctgctgccatggctggggccaaagcaggagctgctgccgctagtgcagcggcgtacgccgcttatgggtacaatgtgtctaagggaatcagtgcaagttcacctttgcagacctcactggtcaggccagcaggcctggccgactttgggccttcgtctgcctcttccccactaagtagtccactgagcaagggcaataatgttcctggaaacccaaaaaatttacatatgacatcttcactcgctcccgattcacttgttagaaaacaggggaaaggaaccaaccccagcggggggagatag

SEQ ID NO: 193740 - DNA, 4671 bp, Artificial Sequence
  derived and/or modified sequence
atggccagcgagctgggcgcccgggacgacggcggctgcaccgagctggcaaagcccctctaccttcaatatcttgaacgcgcgttgcgactcgatcactttcttaggcaaacgtccgccatcttcaaccgcaatatcagcagcgatgactctgaagatggcctagatgactcaaatcctctgctgccacaatcaggagatcctctcatacaggtcaaagaagaaccacccaactctctgctcggagagacaagcggagccggatctagcggcatgctaaatacctactcactgaacggcgtgctccaatctgaatccaaatgcgacaaggggaacctgtataacttttctaaacttaaaaagagccggaaatggctgaagtctatactgctgagcgatgaatccagcgaggctgattcacagagcgaagatgatgatgaagaggaactgaaccttagtcgagaggagttgcacaacatgctacggctgcacaagtataagaagctccatcagaacaaatacagtaaagacaaagaactccagcagtaccagtattactcggccggcctcttaagtacatatgatcccttttatgagcagcagaggcatcttctgggccccaagaagaagaagtttaaagaggagaaaaaactaaaggcaaagctcaagaaagttaagaagaagcgccggagggacgaagaattgtccagcgaagagtcaccccggcgacatcaccaccaaacaaaggtgttcgctaaattttcccacgacgctccccctccgggcaccaaaaagaaacacctttccatagaacagctgaatgctaggagaagaaaagtttggctgtccatcgtcaaaaaagaactgcccaaagccaataagcaaaaggcaagtgcccggaacctctttttaacgaacagtaggaagctggcacatcagtgtatgaaggaggtgcggagggccgcactccaggctcagaaaaactgcaaggagacgctgcccagggctcggagattgactaaagaaatgctactttactggaagaaatacgagaaggttgagaaggaacatagaaagagagctgaaaaggaagccctcgagcagcggaagctggatgaggagatgcgggaggcaaagaggcagcagaggaagctgaacttcctgataacccagaccgagctctatgcacatttcatgtcacgcaaacgggacatgggacacgatgggatccaggaggaaattttgcggaaactggaggattcatctacacagaggcagatcgatatcggcggcggtgtggtggtcaacattacacaggaagactacgactccaatcattttaaggctcaagccctaaagaacgcagaaaacgcttaccatattcatcaggcacgcacaagatcttttgacgaagatgcaaaagagtcacgagccgccgctctgagggccgccaataagtcgggtactggattcggtgaatcatacagtctggcaaatccgtctatccgggcaggggaggatattcctcagcctactatcttcaatggaaagctcaaagggtatcagctgaaggggatgaattggttggctaacctgtacgagcaagggataaatggaatcctcgccgacgaaatgggtctggggaagacggtacagtccattgctctgctcgcccacctggccgaaagggagaacatctggggccctttcctgatcatatcgcccgcctccaccctcaataattggcaccaggagttcacaaggtttgtaccaaaatttaaggtgctgccttattggggtaaccctcacgatagaaaagtgattcgaaggttctggagccagaaaacactctatactcaggatgctccttttcacgttgtgatcaccagttatcagctggtggtacaagacgtaaaatacttccagagagtaaagtggcaatatatggttctggacgaggcccaggccttaaaatcttcttctagcgtgagatggaagatcctactgcaatttcagtgcaggaatcggctcctgctgaccggaacccccatacaaaacactatggcggaactatgggcattattgcactttattatgccaacactgttcgattcccacgaggagttcaacgagtggtttagtaaagatatcgagtcacatgccgagaacaaatccgcaattgacgagaaccagctgtctcgcctccacatgattctgaagcctttcatgcttcggcgcattaagaaggatgtggagaacgaactgtcagataaaatcgagattttgatgtattgccagcttacttcacggcagaagctgctgtaccaagcgctaaagaataagatttctatagaggatctcttacagtctagcatgggctccactcagcaggcccagaacaccacttcctcactcatgaatctggtcatgcaattccgcaaagtctgtaatcatccagaattgttcgagagacaggagacgtggtccccatttcatatctcactcaaaccataccacatttccaagtttatataccggcatgggcaaatccgtgtgtttaaccacagtcgtgaccggtggttgagagtcctgtcacccttcgcccccgactatatccaacgctctttgtttcatcgaaaagggatcaatgaagaatcttgcttttcttttctgcggtttatagatatcagcccggccgaaatggcgaatttaatgctgcagggcctgcttgccagatggcttgctctcttcttgtcgctgaaggcaagctacagattgcaccaattgcgtagctggggagctcccgagggagagtctcatcagaggtacctgagaaacaaggactttcttctgggtgtcaacttccctcttagtttccccaatctttgctcgtgccctctgcttaagtccctggttttttcctctcactgtaaggcagtttcagggtattccgatcaggtcgtacaccagcggcggagtgctacgagctccctgcgcaggtgtctgctcacagaactaccgtcttttctgtgtgtggcatccccacgagtcacggcggtaccccttgactcatactgtaatgacaggagtgcagaatacgagcgaagggtcttgaaggagggaggttcgctcgctgcaaaacagtgcctcctcaacggcgcgccggagctggcagcagattggctgaatcgcagaagccagtttttcccagagcccgctgggggactctggagtattagacctcagaacggctggagctttatcaggatacctggtaaggaatccctcatcaccgacagtggtaagctctatgcgctggacgtgcttctgacccggttgaaatctcagggtcatcgagtactgatatatagtcagatgactagaatgatcgatctcctggaagagtatatggtgtatcggaaacacacttatatgaggctcgatggcagctcaaagatcagcgagcgcagagacatggtcgccgatttccaaaaccgtaacgatatcttcgtgtttcttctgagcacgcgtgccggtggccttggcataaatcttacggccgccgataccgtgattttctacgactcggactggaacccaaccgtggaccagcaagccatggacagagctcacagacttggccagactaagcaggtgacagtctataggttaatctgcaagggcactatcgaagaaagaatccttcagagagcaaaagagaagagcgaaattcaaaggatggttatctccgggggaaatttcaagccagataccctaaagccgaaggaggtcgtgtcactgctactggatgacgaggagctggagaagaagcttagactgaggcaagaagaaaagcgccaacaggaggagactaacagagtcaaagaacggaagcgtaagcgcgagaagtatgccgagaaaaaaaaaaaagaggatgaattagacggcaaacggcgaaaggaaggagtgaaccttgtcatacccttcgttcccagcgccgacaatagtaatctgagtgctgacggagacgacagctttatatccgtcgactccgcgatgccgtccccattctcagagatctccatcagttctgaacttcacactggttctattcccctggatgagtcctcttccgacatgcttgtgattgtagatgacccagcatcctctgcccctcaatcacgagcgactaactctccagcctctataacagggagtgtcagtgatacagtaaatggaatttcgatccaggagatgccagctgccggaaggggacacagcgctcgctcgagggggcgccccaaaggaagcgggagtaccgctaaaggtgctgggaagggacgcagccggaaaagtacggctggatccgccgcagccatggctggggccaaagccggagctgccgctgcctctgccgccgcctatgctgcctatgggtacaatgttagtaaaggcatttctgcttcaagcccgctacagaccagcttggtcagaccggccgggcttgccgacttcgggcctagcagcgcctcaagcccccttagctctcccctgagcaagggtaacaacgtccctgggaaccccaaaaacctacatatgacttcatcactagcccctgatagtctggtgagaaaacagggaaaaggaactaatccaagcggcggcagatag

SEQ ID NO: 193741 - DNA, 4671 bp, Artificial Sequence
  derived and/or modified sequence
atggcatccgagctaggtgccagggacgatgggggatgcactgagctcgctaagcccctctatctgcaatacctagaacgcgctcttcggctcgaccatttcctccggcagaccagcgcaatttttaatcgcaacattagttcagatgacagtgaagacggacttgacgacagcaaccctttgcttcctcagtcgggcgatccccttatccaagtgaaagaagaaccacctaactctctgctaggggagaccagcggcgcagggtctagcgggatgctcaatacatacagtctgaacggagttcttcagagcgagagcaaatgtgacaagggcaatctgtacaatttctcgaaactgaagaaatcgagaaagtggctcaagtcaatactgttgtccgacgagtcctcagaagcagattcccagagcgaggacgacgatgaggaggagttgaatttgtcccgggaagagctccacaacatgctgcgcctgcataagtacaagaaactgcatcagaataagtatagcaaggataaggaattgcagcagtaccagtactactctgcagggctgctgtccacatacgacccattctacgaacagcagagacaccttttgggtccaaagaaaaagaaattcaaagaagagaaaaagctgaaggccaagctgaaaaaggtgaaaaaaaaaaggcggagggatgaggagcttagtagcgaagagtccccacggaggcatcatcaccagactaaggtgttcgccaaattttcacatgatgccccacctcccggtacaaaaaagaaacacctttccattgagcagctgaatgcaaggcgtcgaaaggtttggctatcgattgtgaagaaggaactgcccaaggcaaacaagcagaaggccagtgctcggaacctgttcctcaccaatagccggaaactggcccatcagtgcatgaaggaggtgagaagggccgctctccaggctcaaaaaaattgcaaggagacccttccaagagctcgacgcctgacaaaggagatgttgctgtattggaaaaaatatgaaaaagtcgagaaggaacatcgaaagcgggctgagaaggaggctctcgagcagcggaaattagatgaagagatgcgcgaggctaaacgacagcagagaaagttgaatttcctgatcacccaaacagagctctatgcacactttatgagcaggaaacgggatatggggcacgatggtattcaggaagagatcctaaggaagcttgaggactcctcaacacagagacagatcgacataggcggaggtgttgtggtgaacatcacccaggaggattatgatagcaaccacttcaaggcacaggccctgaagaatgccgagaacgcttaccacattcaccaggctcgcacccggagttttgacgaggatgccaaagaaagcagggccgcagctctgagggctgccaacaaaagcggaactggattcggtgagagttactctctcgccaatccaagtattagagctggagaggatattccccagcctactatctttaacgggaagctgaaaggctaccagctgaagggaatgaactggttagctaacctgtacgagcaaggaatcaatggaattcttgccgacgagatggggttggggaagaccgtgcaatccatcgccctcctggcccatttggctgaacgcgagaatatctggggcccattcctcattatctctcccgcttctactctaaacaattggcatcaggaattcacccgattcgtgccgaagtttaaagtgcttccttattgggggaacccccacgatcgaaaagtgatcaggcgcttctggagccagaagactctgtacacccaggacgccccatttcatgtggttatcaccagctatcagctggtcgtacaagatgtaaaatattttcagcgcgtcaaatggcagtacatggttctagatgaggcacaagccctcaaatcttcaagcagcgtgaggtggaagatcctactgcagttccagtgcaggaacagactgcttctgacaggtactcctatccagaacaccatggccgagctgtgggcccttctgcatttcatcatgccaaccctgttcgattcccacgaagagtttaacgaatggtttagtaaggacattgaaagccatgctgagaataaaagcgcaatagatgagaatcagctatctcgactgcatatgatcctgaaacccttcatgctccggaggatcaagaaagacgtggagaatgagttatctgacaaaattgagattctcatgtactgccagctgacatcacggcagaagctattgtaccaggctctgaagaacaagatcagtatcgaggatctgttgcaatcaagcatggggagcacccagcaagctcagaacacaacttccagtctgatgaatctggttatgcagttccgtaaggtttgtaaccatcctgaactcttcgagaggcaggagacttggagcccctttcacatttcacttaaaccatatcacatctctaagtttatctaccgccatggacagattagagtcttcaatcattctagggaccgctggctcagggttctatccccgtttgccccagactacattcagcggtcgctgtttcatcggaaaggaattaatgaggagtcatgtttttctttcctgaggtttatcgacatatctcccgctgagatggctaacctgatgttgcaagggctcctcgcccgatggctcgccctgtttctctctctgaaagccagctacagattgcaccaactacgatcatggggtgctcccgaaggcgaatcccaccagcggtatctgcgaaataaggactttctcctcggtgtcaatttcccccttagctttccgaacctgtgcagctgcccactcttaaagtcactcgtgttcagcagtcactgtaaggcggttagcggctacagcgaccaggtagtccaccagaggagatctgccacctcttctctgagacgatgcctcctgaccgagctgccttctttcttatgcgtggcatccccaagggtcaccgccgttccactggactcttattgcaacgacaggagcgctgaatacgaaagacgggtgctgaaggaaggaggaagcctagcagctaagcagtgccttctgaacggcgcacccgagctggccgcagattggctgaatagaaggtcccagttctttcccgaacccgcaggcggtctctggagcatcaggccgcagaatggttggtccttcatcagaatcccaggaaaagagagccttatcacggatagtggcaaactctatgcgcttgacgtattgctcacacggctaaagtcccagggacatcgggtgcttatctattctcaaatgacccgtatgatagacctgttagaggaatatatggtataccgaaaacacacgtatatgaggttggatggctccagcaagatttcagagcgcagagatatggtcgctgactttcagaacaggaacgacattttcgtctttctgctgagcacccgcgctggcggactcggcataaatcttaccgccgctgacactgttattttttacgactccgactggaacccaacggtggatcagcaagcaatggatcgggcacatagactgggccagaccaagcaagttacagtctatcgactgatctgcaaaggcaccatcgaagaacggattctccaacgcgctaaggagaaaagcgaaattcaacgcatggtgatttcaggcggtaacttcaaaccggacaccttgaaacctaaggaggtggtcagtctgcttttggatgatgaagagcttgagaaaaagctaaggctgcggcaagaggaaaaacggcagcaggaagagactaatcgggtcaaggaaaggaagaggaagcgcgaaaaatacgccgaaaaaaaaaaaaaggaggatgagctggacggcaaaagacgcaaagaaggcgttaacctggtgattccctttgtgccctcagctgacaactctaatcttagcgccgacggagacgatagcttcatcagcgtggattctgccatgccgtctcccttcagtgagattagtatctcttcagagctgcataccgggtcaattcccctggatgaatcctcctccgacatgctcgtgattgtcgacgaccctgctagctccgctcctcagtcgcgcgcaactaattctcccgcatccatcaccggctctgtatccgatacagtcaacggcatctctatccaggagatgcctgccgcaggcagggggcactcagcccgttcccggggacgccctaagggcagtggtagcactgccaaaggtgccggaaagggaaggtcgcggaaaagcaccgccggaagcgccgcagcgatggctggcgctaaggcaggggctgctgcggcttccgctgcggcatacgctgcctatggctataacgtgtctaagggtataagcgctagcagtcccctgcagactagcctcgtgcggcctgcaggccttgctgacttcggcccatcaagcgccagctcacccctctcctcacctctaagcaaaggaaataatgtgcctggcaatcccaaaaacctgcacatgacctcttccctggcacctgactctctcgtgcgaaagcagggcaaggggacaaatccaagcgggggtcgatag

SEQ ID NO: 193742 - DNA, 4671 bp, Artificial Sequence
  derived and/or modified sequence
atggcctctgagcttggcgctcgtgatgatggcggatgcacggagttggcaaaacccctgtacctgcagtaccttgaacgtgccttgcggcttgaccattttcttcgccagacatcagctatctttaatcggaacatctcttctgatgacagcgaagacggactggatgacagtaaccctcttctgcctcagtcaggagatcccctgattcaggttaaagaggaaccaccaaatagccttttgggtgagactagcggggctgggtcctccggaatgcttaatacatacagcctaaatggagtgctccaaagcgagtcaaagtgcgataaggggaacctgtataactttagtaagcttaagaagagtcgaaaatggctaaaatccatcctcctgtctgacgagagttcggaggccgattcacagagcgaagacgatgatgaggaagaactgaatttgagcagggaagagctgcataatatgctgaggctgcataagtacaaaaaattgcaccagaacaagtactcaaaagataaggaactccagcagtatcagtactattccgctggacttctgtcaacctatgaccctttctacgaacagcaaaggcatctgttggggcctaagaagaaaaaatttaaggaggagaagaagctgaaggctaagctgaaaaaggtaaagaaaaaaagaagaagggacgaggaactgagctccgaggaatcccctcggaggcatcaccaccagacaaaggtctttgctaagttcagtcacgacgccccacctccagggacaaagaaaaagcatctgtccatcgagcagctgaatgctaggcgtcgcaaggtatggctgtcaatcgtaaagaaagagctgccgaaggctaacaagcagaaggctagcgcccgaaacctgtttctcacaaattcacgcaagctggcccatcaatgcatgaaggaagttcggagagctgccctgcaggcacagaaaaattgcaaggagacactgccccgagcccgtagactgacgaaagaaatgctcctgtactggaaaaagtacgagaaagtggaaaaggagcatcgtaagcgcgctgaaaaggaagctctggagcaacgtaaactggatgaagagatgcgagaagcaaagaggcaacaacgtaaactcaatttcctcatcacccagacagagctctatgctcatttcatgagcagaaagcgggatatggggcatgatggcatccaagaggaaatcctgcggaagctggaggactctagtactcaacggcagattgatattggagggggagttgtagttaatatcacacaggaagattacgattcaaatcacttcaaagcccaggcactcaaaaacgctgagaatgcctaccacattcatcaagcgcgtaccagaagtttcgacgaagatgccaaggaatcccgagccgctgccctccgggcagcaaacaagagtggcaccggatttggagagtcctattcccttgcaaacccttcaatccgggcaggcgaggatatacctcaaccaacaatatttaacggcaagttgaagggctaccagttaaaggggatgaattggttggcaaacctctatgagcaagggatcaacggaatcctggctgacgaaatgggtctgggaaaaaccgttcagagtatcgccctattagcccacctcgcagaacgcgaaaatatctgggggccattcctgattatatccccagcatctaccttgaataactggcaccaggaattcaccagatttgtccccaaattcaaagttctgccatattggggtaatccacacgataggaaagtgatccggcgattctggagccagaagaccttgtacacccaagacgccccatttcacgttgttattacttcctatcaactcgtggtccaggacgtaaagtacttccaacgtgttaagtggcagtatatggtcttggacgaggcccaggcgctgaagtcatccagttcagttcggtggaaaatacttctgcaattccagtgccgcaatcggttgctcttaaccggcacccccatccagaacaccatggccgaactgtgggcattgttgcatttcataatgccaactctgtttgacagccatgaagagttcaatgaatggttttcaaaagatatcgagtcgcacgccgagaacaaaagcgcaatcgacgagaaccagcttagcagacttcacatgatcctgaagccctttatgctaagacgaattaagaaagacgttgaaaacgagctttctgataagatcgaaatattgatgtattgtcagttgacctcccgccagaagctcctataccaggcgctgaagaataaaatctccatcgaggatttactgcaatcctccatgggcagtacccagcaggctcagaacacaacaagctccctaatgaacctggtaatgcagtttcgcaaagtgtgtaaccatcccgagctcttcgagagacaggagacctggagccccttccacattagccttaaaccatatcacatctcaaaattcatctatagacacgggcagattcgggttttcaaccattctcgggaccgctggttgcgggtgcttagtccgttcgccccagattacatacagcgctcactattccatcgcaaaggcattaacgaggagagctgcttcagctttttgaggttcatcgatatctcccccgcagagatggctaacctgatgctgcagggtttgctggctcgctggctggccctgtttctcagtctgaaggcttcttataggctccaccagctgcgcagctggggcgcacctgagggcgaaagccaccaaaggtatctgaggaataaagatttcctgcttggtgttaatttccctctgtctttcccaaatctctgctcctgtccgctgttgaagagtctcgtcttcagttcgcactgtaaagccgtgagcggatactccgaccaggtggtgcaccaaaggaggtctgccacttcgtccttacggaggtgcttactaacagagcttcctagcttcctttgtgtggcaagcccacgggtcactgctgtacctcttgactcctactgtaatgatagatctgcggagtacgagaggcgggtactgaaagagggcggatccttagccgctaagcagtgcctgttaaacggtgctcctgagttggccgcagactggctgaacaggaggagccagttttttccagaacctgctgggggactctggtctataaggcctcagaatggctggagctttattagaattcctggtaaggaatcactgataacggacagcggcaagctatacgccctggatgtactgctgacaagactcaagtcccaagggcatcgcgtgctcatttatagccagatgacaagaatgatcgatctcctggaggaatatatggtctatagaaagcacacgtatatgcgactggatggatccagtaaaatcagcgaacgcagggatatggtcgccgattttcagaatcgcaacgatatttttgtgtttctgctgagcacccgagcaggtgggctggggattaacctgacagccgcagataccgttattttttatgacagcgactggaatcctacagttgaccagcaggccatggatagagcacaccgacttggccagaccaagcaggtgacagtttaccggctgatctgtaaggggacaattgaggaacgtatcctgcagagggcgaaggagaagtcagaaattcagcgtatggttatcagcggtggcaatttcaagccagatactctgaagcccaaggaggtcgtgagcctgctgcttgatgacgaggagctggagaagaaactgcgactgcgtcaagaggaaaagcgacaacaggaagagaccaaccgcgtaaaggagagaaagagaaagcgcgaaaagtacgccgagaagaaaaaaaaagaggatgaactggatgggaaaaggcgaaaggaaggcgtgaaccttgtgattccatttgtaccttctgcggataacagcaacctgtcggcagatggcgacgactcgttcatttccgtagatagcgccatgccaagcccgttcagcgagattagcatctcatcagaactacacactgggagcattccccttgatgagtcctcatctgatatgttggtaatcgtcgacgatcctgcatcgtccgcgccacagagtagggctaccaattcaccggcttcaatcacaggcagcgtttctgatactgtgaatgggatatcgatacaggaaatgcccgctgcagggagaggccacagcgcacgatctcgaggcaggcctaagggttctggatccacggccaaaggagcaggcaaggggcgatccagaaagtccaccgctggcagcgccgctgctatggctggagctaaggcgggagctgccgcagcctctgctgccgcatacgctgcctatggatacaatgtctccaaaggaatcagtgctagtagcccacttcaaacctctctggtcagaccggcaggtctagccgattttggaccttcgagcgccagctctcccctgagtagtccccttagcaagggtaacaatgtgcctggaaaccccaaaaacctgcatatgacctcttcactcgctcctgatagtctggtgcggaaacaagggaaaggcacaaacccgtccgggggtcgctag

SEQ ID NO: 193743 - DNA, 4671 bp, Artificial Sequence
  derived and/or modified sequence
atggccagcgagctgggcgccagagacgacggcggctgcaccgagctggccaagcccctgtacctgcagtacctggagagagccctgagactggaccacttcctgagacagaccagcgccatcttcaacagaaacatcagcagcgacgacagcgaggacggcctggacgacagcaaccccctgctgccccagagcggcgaccccctgatccaggtgaaggaggagccccccaacagcctgctgggcgagaccagcggcgccggcagcagcggcatgctgaacacctacagcctgaacggcgtgctgcagagcgagagcaagtgcgacaagggcaacctgtacaacttcagcaagctgaagaagagcagaaagtggctgaagagcatcctgctgagcgacgagagcagcgaggccgacagccagagcgaggacgacgacgaggaggagctgaacctgagcagagaggagctgcacaacatgctgagactgcacaagtacaagaagctgcaccagaacaagtacagcaaggacaaggagctgcagcagtaccagtactacagcgccggcctgctgagcacctacgaccccttctacgagcagcagagacacctgctgggccccaagaagaagaagttcaaggaggagaagaagctgaaggccaagctgaagaaggtgaagaagaagagaagaagagacgaggagctgagcagcgaggagagccccagaagacaccaccaccagaccaaggtgttcgccaagttcagccacgacgcccccccccccggcaccaagaagaagcacctgagcatcgagcagctgaacgccagaagaagaaaggtgtggctgagcatcgtgaagaaggagctgcccaaggccaacaagcagaaggccagcgccagaaacctgttcctgaccaacagcagaaagctggcccaccagtgcatgaaggaggtgagaagagccgccctgcaggcccagaagaactgcaaggagaccctgcccagagccagaagactgaccaaggagatgctgctgtactggaagaagtacgagaaggtggagaaggagcacagaaagagagccgagaaggaggccctggagcagagaaagctggacgaggagatgagagaggccaagagacagcagagaaagctgaacttcctgatcacccagaccgagctgtacgcccacttcatgagcagaaagagagacatgggccacgacggcatccaggaggagatcctgagaaagctggaggacagcagcacccagagacagatcgacatcggcggcggcgtggtggtgaacatcacccaggaggactacgacagcaaccacttcaaggcccaggccctgaagaacgccgagaacgcctaccacatccaccaggccagaaccagaagcttcgacgaggacgccaaggagagcagagccgccgccctgagagccgccaacaagagcggcaccggcttcggcgagagctacagcctggccaaccccagcatcagagccggcgaggacatcccccagcccaccatcttcaacggcaagctgaagggctaccagctgaagggcatgaactggctggccaacctgtacgagcagggcatcaacggcatcctggccgacgagatgggcctgggcaagaccgtgcagagcatcgccctgctggcccacctggccgagagagagaacatctggggccccttcctgatcatcagccccgccagcaccctgaacaactggcaccaggagttcaccagattcgtgcccaagttcaaggtgctgccctactggggcaacccccacgacagaaaggtgatcagaagattctggagccagaagaccctgtacacccaggacgcccccttccacgtggtgatcaccagctaccagctggtggtgcaggacgtgaagtacttccagagagtgaagtggcagtacatggtgctggacgaggcccaggccctgaagagcagcagcagcgtgagatggaagatcctgctgcagttccagtgcagaaacagactgctgctgaccggcacccccatccagaacaccatggccgagctgtgggccctgctgcacttcatcatgcccaccctgttcgacagccacgaggagttcaacgagtggttcagcaaggacatcgagagccacgccgagaacaagagcgccatcgacgagaaccagctgagcagactgcacatgatcctgaagcccttcatgctgagaagaatcaagaaggacgtggagaacgagctgagcgacaagatcgagatcctgatgtactgccagctgaccagcagacagaagctgctgtaccaggccctgaagaacaagatcagcatcgaggacctgctgcagagcagcatgggcagcacccagcaggcccagaacaccaccagcagcctgatgaacctggtgatgcagttcagaaaggtgtgcaaccaccccgagctgttcgagagacaggagacctggagccccttccacatcagcctgaagccctaccacatcagcaagttcatctacagacacggccagatcagagtgttcaaccacagcagagacagatggctgagagtgctgagccccttcgcccccgactacatccagagaagcctgttccacagaaagggcatcaacgaggagagctgcttcagcttcctgagattcatcgacatcagccccgccgagatggccaacctgatgctgcagggcctgctggccagatggctggccctgttcctgagcctgaaggccagctacagactgcaccagctgagaagctggggcgcccccgagggcgagagccaccagagatacctgagaaacaaggacttcctgctgggcgtgaacttccccctgagcttccccaacctgtgcagctgccccctgctgaagagcctggtgttcagcagccactgcaaggccgtgagcggctacagcgaccaggtggtgcaccagagaagaagcgccaccagcagcctgagaagatgcctgctgaccgagctgcccagcttcctgtgcgtggccagccccagagtgaccgccgtgcccctggacagctactgcaacgacagaagcgccgagtacgagagaagagtgctgaaggagggcggcagcctggccgccaagcagtgcctgctgaacggcgcccccgagctggccgccgactggctgaacagaagaagccagttcttccccgagcccgccggcggcctgtggagcatcagaccccagaacggctggagcttcatcagaatccccggcaaggagagcctgatcaccgacagcggcaagctgtacgccctggacgtgctgctgaccagactgaagagccagggccacagagtgctgatctacagccagatgaccagaatgatcgacctgctggaggagtacatggtgtacagaaagcacacctacatgagactggacggcagcagcaagatcagcgagagaagagacatggtggccgacttccagaacagaaacgacatcttcgtgttcctgctgagcaccagagccggcggcctgggcatcaacctgaccgccgccgacaccgtgatcttctacgacagcgactggaaccccaccgtggaccagcaggccatggacagagcccacagactgggccagaccaagcaggtgaccgtgtacagactgatctgcaagggcaccatcgaggagagaatcctgcagagagccaaggagaagagcgagatccagagaatggtgatcagcggcggcaacttcaagcccgacaccctgaagcccaaggaggtggtgagcctgctgctggacgacgaggagctggagaagaagctgagactgagacaggaggagaagagacagcaggaggagaccaacagagtgaaggagagaaagagaaagagagagaagtacgccgagaagaagaagaaggaggacgagctggacggcaagagaagaaaggagggcgtgaacctggtgatccccttcgtgcccagcgccgacaacagcaacctgagcgccgacggcgacgacagcttcatcagcgtggacagcgccatgcccagccccttcagcgagatcagcatcagcagcgagctgcacaccggcagcatccccctggacgagagcagcagcgacatgctggtgatcgtggacgaccccgccagcagcgccccccagagcagagccaccaacagccccgccagcatcaccggcagcgtgagcgacaccgtgaacggcatcagcatccaggagatgcccgccgccggcagaggccacagcgccagaagcagaggcagacccaagggcagcggcagcaccgccaagggcgccggcaagggcagaagcagaaagagcaccgccggcagcgccgccgccatggccggcgccaaggccggcgccgccgccgccagcgccgccgcctacgccgcctacggctacaacgtgagcaagggcatcagcgccagcagccccctgcagaccagcctggtgagacccgccggcctggccgacttcggccccagcagcgccagcagccccctgagcagccccctgagcaagggcaacaacgtgcccggcaaccccaagaacctgcacatgaccagcagcctggcccccgacagcctggtgagaaagcagggcaagggcaccaaccccagcggcggcagatag

SEQ ID NO: 193744 - protein, 282 aa, Artificial Sequence
  derived and/or modified sequence
MSKLASFLGFSKQSPQKKNHLVLEKKTESATFRVCGENVTCVEYAISWLQDLIEKEQCPYTSEDECIKDFDEKEYQELNELQKKLNINISLDHKRPLIKVLGISRDVMQARDEIEAMIKRVRLAKEQESRADCISEFIEWQYNDNNTSHCFNKMTNLKLEDARREKKKTVDVKINHRHYTVNLNTYTATDTKGHSLSVQRLTKSKVDIPAHWSDMKQQNFCVVELLPSDPEYNTVASKFNQTCSHFRIEKVNVMIRACSPSYWEAEVEGLHEPRSLTPVWVT

SEQ ID NO: 193745 - protein, 797 aa, Artificial Sequence
  derived and/or modified sequence
MYLRRLLRPLQMLLVKEGVQNAKTDVVVNSVPLDLVLSRGPLSKSLLEKAGPELQEELDTVGQGVAVSMGTVLKTSSWNLDCRYVLHVVAPEWRNGSTSSLKIMEDIIRECMEITESLSLKSIAFPAIGTGNLGFPKNIFAELIISEVFKFSSKNQLKTLQEVHFLLHPSDHENIQAFSDEFARRANGNLVSDKIPKAKDTQGFYGTVSSPDSGVYEMKIGSIIFQVASGDITKEEADVIVNSTSNSFNLKAGVSKAILECAGQNVERECSQQAQQRKNDYIITGGGFLRCKNIIHVIGGNDVKSSVSSVLQECEKKNYSSICLPAIGTGNAKQHPDKVAEAIIDAIEDFVQKGSAQSVKKVKVVIFLPQVLDVFYANMKKREGTQLSSQQSVMSKLASFLGFSKQSPQKKNHLVLEKKTESATFRVCGENVTCVEYAISWLQDLIEKEQCPYTSEDECIKDFDEKEYQELNELQKKLNINISLDHKRPLIKVLGISRDVMQARDEIEAMIKRVRLAKEQESRADCISEFIEWQYNDNNTSHCFNKMTNLKLEDARREKKKTVDVKINHRHYTVNLNTYTATDTKGHSLSVQRLTKSKVDIPAHWSDMKQQNFCVVELLPSDPEYNTVASKFNQTCSHFRIEKIERIQNPDLWNSYQAKKKTMDAKNGQTMNEKQLFHGTDAGSVPHVNRNGFNRSYAGKNAVAYGKGTYFAVNANYSANDTYSRPDANGRKHVYYVRVLTGIYTHGNHSLIVPPSKNPQNPTDLYDTVTDNVHHPSLFVAFYDYQAYPEYLITFRK

SEQ ID NO: 193746 - protein, 1720 aa, Artificial Sequence
  derived and/or modified sequence
MAVPGSFPLLVEGSWGPDPPKNLNTKLQMYFQSPKRSGGGECEVRQDPRSPSRFLVFFYPEDVRQKVLERKNHELVWQGKGTFKLTVQLPATPDEIDHVFEEELLTKESKTKEDVKEPDTIRFVDDCTKHHSIKQLQLSPRLLEVTNTIRVENLPPGADDYSLKLFFENPYNGGGRVANVEYFPEESSALIEFFDRKVLDTIMATKLDFNKMPLSVFPYYASLGTALYGKEKPLIKLPAPFEESLDLPLWKFLQKKNHLIEEINDEMRRCHCELTWSQLSGKVTIRPAATLVNEGRPRIKTWQADTSTTLSSIRSKYKVNPIKVDPTMWDTIKNDVKDDRILIEFDTLKEMVILAGKSEDVQSIEVQVRELIESTTQKIKREEQSLKEKMIISPGRYFLLCHSSLLDHLLTECPEIEICYDRVTQHLCLKGPSADVYKAKCEIQEKVYTMAQKNIQVSPEIFQFLQQVNWKEFSKCLFIAQKILALYELEGTTVLLTSCSSEALLEAEKQMLSALNYKRIEVENKEVLHGKKWKGLTHNLLKKQNSSPNTVIINELTSETTAEVIITGCVKEVNETYKLLFNFVEQNMKIERLVEVKPSLVIDYLKTEKKLFWPKIKKVNVQVSFNPENKQKGILLTGSKTEVLKAVDIVKQVWDSVCVKSVHTDKPGAKQFFQDKARFYQSEIKRLFGCYIELQENEVMKEGGSPAGQKCFSRTVLAPGVVLIVQQGDLARLPVDVVVNASNEDLKHYGGLAAALSKAAGPELQADCDQIVKREGRLLPGNATISKAGKLPYHHVIHAVGPRWSGYEAPRCVYLLRRAVQLSLCLAEKYKYRSIAIPAISSGVFGFPLGRCVETIVSAIKENFQFKKDGHCLKEIYLVDVSEKTVEAFAEAVKTVFKATLPDTAAPPGLPPAAAGPGKTSWEKGSLVSPGGLQMLLVKEGVQNAKTDVVVNSVPLDLVLSRGPLSKSLLEKAGPELQEELDTVGQGVAVSMGTVLKTSSWNLDCRYVLHVVAPEWRNGSTSSLKIMEDIIRECMEITESLSLKSIAFPAIGTGNLGFPKNIFAELIISEVFKFSSKNQLKTLQEVHFLLHPSDHENIQAFSDEFARRANGNLVSDKIPKAKDTQGFYGTVSSPDSGVYEMKIGSIIFQVASGDITKEEADVIVNSTSNSFNLKVGVSKAILECAGQNVERECSQQAQQRKNDYIITGGGFLRCKNIIHVIGGNDVKSSVSSVLQECEKKNYSSICLPAIGTGNAKQHPDKVAEAIIDAIEDFVQKGSAQSVKKVKVVIFLPQVLDVFYANMKKREGTQLSSQQSVMSKLASFLGFSKQSPQKKNHLVLEKKTESATFRVCGENVTCVEYAISWLQDLIEKEQCPYTSEDECIKDFDEKEYQELNELQKKLNINISLDHKRPLIKVLGISRDVMQARDEIEAMIKRVRLAKEQESRADCISEFIEWQYNDNNTSHCFNKMTNLKLEDARREKKKTVDVKINHRHYTVNLNTYTATDTKGHSLSVQRLTKSKVDIPAHWSDMKQQNFCVVELLPSDPEYNTVASKFNQTCSHFRIEKIERIQNPDLWNSYQAKKKTMDAKNGQTMNEKQLFHGTDAGSVPHVNRNGFNRSYAGKNAVAYGKGTYFAVNANYSANDTYSRPDANGRKHVYYVRVLTGIYTHGNHSLIVPPSKNPQNPTDLYDTVTDNVHHPSLFVAFYDYQAYPEYLITFRK

SEQ ID NO: 193747 - protein, 1801 aa, Artificial Sequence
  derived and/or modified sequence
MAVPGSFPLLVEGSWGPDPPKNLNTKLQMYFQSPKRSGGGECEVRQDPRSPSRFLVFFYPEDVRQKVLERKNHELVWQGKGTFKLTVQLPATPDEIDHVFEEELLTKESKTKEDVKEPDVSEELDTKLPLDGGLDKMEDIPEECENISSLVAFENLKANVTDIMLILLVENISGLSNDDFQVEIIRDFDVAVVTFQKHIDTIRFVDDCTKHHSIKQLQLSPRLLEVTNTIRVENLPPGADDYSLKLFFENPYNGGGRVANVEYFPEESSALIEFFDRKVLDTIMATKLDFNKMPLSVFPYYASLGTALYGKEKPLIKLPAPFEESLDLPLWKFLQKKNHLIEEINDEMRRCHCELTWSQLSGKVTIRPAATLVNEGRPRIKTWQADTSTTLSSIRSKYKVNPIKVDPTMWDTIKNDVKDDRILIEFDTLKEMVILAGKSEDVQSIEVQVRELIESTTQKIKREEQSLKEKMIISPGRYFLLCHSSLLDHLLTECPEIEICYDRVTQHLCLKGPSADVYKAKCEIQEKVYTMAQKNIQVSPEIFQFLQQVNWKEFSKCLFIAQKILALYELEGTTVLLTSCSSEALLEAEKQMLSALNYKRIEVENKEVLHGKKWKGLTHNLLKKQNSSPNTVIINELTSETTAEVIITGCVKEVNETYKLLFNFVEQNMKIERLVEVKPSLVIDYLKTEKKLFWPKIKKVNVQVSFNPENKQKGILLTGSKTEVLKAVDIVKQVWDSVCVKSVHTDKPGAKQFFQDKARFYQSEIKRLFGCYIELQENEVMKEGGSPAGQKCFSRTVLAPGVVLIVQQGDLARLPVDVVVNASNEDLKHYGGLAAALSKAAGPELQADCDQIVKREGRLLPGNATISKAGKLPYHHVIHAVGPRWSGYEAPRCVYLLRRAVQLSLCLAEKYKYRSIAIPAISSGVFGFPLGRCVETIVSAIKENFQFKKDGHCLKEIYLVDVSEKTVEAFAEAVKTVFKATLPDTAAPPGLPPAAAGPGKTSWEKGSLVSPGGLQMLLVKEGVQNAKTDVVVNSVPLDLVLSRGPLSKSLLEKAGPELQEELDTVGQGVAVSMGTVLKTSSWNLDCRYVLHVVAPEWRNGSTSSLKIMEDIIRECMEITESLSLKSIAFPAIGTGNLGFPKNIFAELIISEVFKFSSKNQLKTLQEVHFLLHPSDHENIQAFSDEFARRANGNLVSDKIPKAKDTQGFYGTVSSPDSGVYEMKIGSIIFQVASGDITKEEADVIVNSTSNSFNLKAGVSKAILECAGQNVERECSQQAQQRKNDYIITGGGFLRCKNIIHVIGGNDVKSSVSSVLQECEKKNYSSICLPAIGTGNAKQHPDKVAEAIIDAIEDFVQKGSAQSVKKVKVVIFLPQVLDVFYANMKKREGTQLSSQQSVMSKLASFLGFSKQSPQKKNHLVLEKKTESATFRVCGENVTCVEYAISWLQDLIEKEQCPYTSEDECIKDFDEKEYQELNELQKKLNINISLDHKRPLIKVLGISRDVMQARDEIEAMIKRVRLAKEQESRADCISEFIEWQYNDNNTSHCFNKMTNLKLEDARREKKKTVDVKINHRHYTVNLNTYTATDTKGHSLSVQRLTKSKVDIPAHWSDMKQQNFCVVELLPSDPEYNTVASKFNQTCSHFRIEKIERIQNPDLWNSYQAKKKTMDAKNGQTMNEKQLFHGTDAGSVPHVNRNGFNRSYAGKNAVAYGKGTYFAVNANYSANDTYSRPDANGRKHVYYVRVLTGIYTHGNHSLIVPPSKNPQNPTDLYDTVTDNVHHPSLFVAFYDYQAYPEYLITFRK

SEQ ID NO: 193748 - protein, 194 aa, Artificial Sequence
  derived and/or modified sequence
  misc_feature (1)..(1): Xaa can be any naturally occurring amino acid
XVRRRAELRMAVPGSFPLLVEGSWGPDPPKNLNTKLQMYFQSPKRSGGGECEVRQDPRSPSRFLVFFYPEDVRQKVLERKNHELVWQGKGTFKLTVQLPATPDEIDHVFEEELLTKESKTKEDVKEPDTIRFVDDCTKHHSIKQLQLSPRLLEVTNTIRVENLPPGADDYSLKLFFENPYNGGGRVANVEYFPE

SEQ ID NO: 193749 - DNA, 849 bp, Artificial Sequence
  derived and/or modified sequence
atgagtaagttggcctcctttctgggatttagtaagcagtcgccacaaaagaagaatcatctggttctcgaaaagaagacagagagcgcaacattcagagtttgcggggaaaatgtgacctgtgtagagtacgcaatatcctggctccaagatctgatagagaaggagcaatgtccatacacatctgaggacgagtgcattaaggatttcgatgaaaaggagtaccaggagctgaatgagctgcagaagaagttaaatattaacatcagcctggaccataaacgacctctgattaaggtactggggatttcacgggatgtgatgcaggcccgagacgagatcgaagctatgatcaaacgagtgagactggcaaaggagcaagagtccagagccgactgcatttcagagttcatcgagtggcagtacaacgataataatacatcccactgttttaacaagatgaccaatctaaagctggaagacgcccgtcgagaaaagaaaaaaactgttgacgtgaagataaatcaccgtcattacacggtgaaccttaacacatacaccgccaccgacaccaaagggcatagtctgtccgtccaacgcctgaccaaaagcaaagtggacatcccagctcactggtccgacatgaaacagcagaacttttgcgtcgtggagctcctcccctccgaccctgaatacaacaccgtggcttcaaagttcaaccagacatgctctcactttagaatagaaaaagtgaatgttatgatcagggcctgttcgccatcctactgggaagccgaggttgagggtttgcatgagcccaggtcactcacaccagtgtgggtgacctag

SEQ ID NO: 193750 - DNA, 2394 bp, Artificial Sequence
  derived and/or modified sequence
atgtacttgaggcgcctgttgcgccccctacagatgctgctggtgaaagagggggtgcaaaacgccaaaaccgatgtagtcgtgaatagtgtgccgctcgacctggttttaagtcgcggccccttgagcaaaagcttactagagaaggccggccctgagctccaggaggagcttgacactgtaggccaaggagtggcagtcagcatgggcaccgtgctaaaaacctcctcttggaatctggattgcagatacgtgcttcatgtcgtggctcccgagtggagaaacggaagtacatcaagcttaaaaatcatggaggatatcataagggaatgtatggaaatcactgagtcccttagcctgaaatctattgctttccccgctattgggactgggaaccttggttttccgaaaaatatctttgctgaactgatcatttctgaggtttttaaattctcatccaagaatcaactcaaaaccctgcaggaagtgcatttccttctgcacccaagcgaccacgaaaacattcaggcgtttagcgacgagttcgcacgtcgggctaacgggaatttagtctcagataaaattcctaaagcgaaagacacccaaggattttatggcaccgtgtctagcccagacagtggcgtgtacgagatgaaaataggctcaataatcttccaggtggcctcaggagacatcaccaaagaggaagccgacgtgattgtgaacagcacgagcaactccttcaatttgaaggcgggcgtgtctaaggcaatcctcgagtgcgccggccaaaacgtggagagagaatgctcccaacaggctcagcagaggaagaacgactatatcataaccgggggaggcttcctgagatgtaagaatataattcatgttattgggggcaacgacgtgaaaagcagcgtgtcttccgtattgcaggaatgcgaaaagaagaattattcttccatatgcctgccagcgatcgggacaggcaatgctaaacagcatcccgacaaggtggcagaggcaattatcgacgccattgaagacttcgtccagaaaggttcagcccagtctgtcaagaaggttaaggtggtgatcttcctaccacaggtgctagacgtgttctatgcgaacatgaagaagagagaaggcacacagttgtcctctcaacagagtgtcatgtcaaagcttgcctcatttctgggcttctccaagcagtcaccacagaaaaagaatcacctggttctcgaaaagaagaccgagtccgcaaccttccgagtttgtggggagaatgtgacctgcgtcgagtatgctatttcctggttacaagacctaatcgagaaggagcaatgcccatacacctcagaggatgagtgcataaaggatttcgacgagaaagagtaccaggagttgaacgagttacagaagaaacttaacatcaacatcagtctcgaccacaagaggccacttatcaaggtgttaggtatttctagagatgtcatgcaggccagggacgagattgaagccatgattaaaagggtacggttggccaaggagcaggagtcccgcgctgactgcatatctgagttcattgagtggcaatacaatgacaataataccagccattgttttaataagatgacaaacctgaagctcgaggacgcacggcgggagaagaaaaagactgtcgatgtaaaaattaaccaccggcactatacagtcaatctcaatacatatactgctactgacaccaagggacactccctctcagtacaacgcctgacaaagagcaaggttgatattccagcccactggtctgacatgaagcagcaaaatttctgcgtcgtggaactgctgccaagcgacccggaatacaacaccgtagcttcaaagtttaaccagacctgttctcacttcagaatcgagaagatcgagcggattcagaaccccgatctgtggaatagttaccaggccaaaaagaagaccatggatgctaagaacgggcagacaatgaatgagaagcagctgtttcatggaacagatgctggatcagtcccccacgtcaatcggaatggtttcaatcggagttatgccggcaaaaatgccgtggcctacgggaagggcacttacttcgcggtgaatgcaaattatagtgccaatgacacctattctcgccctgacgccaacggacggaaacatgtctactatgtccgcgtgctgacagggatatatacacacgggaatcactctctgatcgttccaccatctaagaacccccaaaatcctactgatctgtacgatacagtcacagacaacgtgcaccatccctctttgttcgtagctttttacgattatcaggcctacccggaatacctcatcacattcagaaaatag

SEQ ID NO: 193751 - DNA, 5163 bp, Artificial Sequence
  derived and/or modified sequence
atggccgtgccaggctcctttcctctgctagtcgaaggttcctgggggcccgacccaccgaagaatctgaacacgaagctccagatgtattttcagtccccaaaaaggtctggagggggtgaatgtgaagtacgccaggacccgagaagcccttctcgctttctggtgtttttttaccctgaagacgtgcgccagaaggttctagaaaggaagaatcacgaacttgtatggcaggggaaaggtacctttaaactgactgtgcagttaccagccacaccagacgaaatcgatcacgtcttcgaagaggagttactgaccaaggaatctaaaactaaagaagacgtaaaagaacccgacacaattaggtttgtcgacgactgtacaaaacatcactcaatcaaacagctgcagctgtccccaaggctcttggaggttactaatactatccgagttgagaaccttccccccggggccgatgactattctctaaaattattctttgagaacccctataacggagggggacgggtggccaatgtcgaatacttcccagaggagtcttccgcactgatcgaatttttcgatagaaaagtccttgacaccattatggccacgaaactggactttaataagatgcctcttagcgtgtttccatactacgcttcactgggtacagcattatacggaaaggaaaagcccttaattaaactgccggccccctttgaggagagcctggatctccccttatggaagttcctacagaagaaaaaccacctgattgaagaaataaatgatgagatgagacgctgccattgcgagctgacctggagtcaactcagcggcaaagttacgatcagaccagcagctaccctggtgaatgagggaaggccacgtatcaagacctggcaggcagatactagcacaaccctcagctcaatacggagcaagtataaagttaatcctataaaggtggatccgacgatgtgggatacaattaagaacgatgtgaaagacgaccgcatacttatcgaatttgacacgctgaaggaaatggtaatactggcgggcaaatcagaagacgtgcagtctattgaagtgcaagtgagggaactgattgaatccaccacacaaaagatcaagagagaggaacagtctctgaaagaaaagatgattatttctccaggccggtacttcctgctgtgtcactcttccctgctggaccatctcttgacggagtgcccagaaattgagatttgttacgatcgggtgacgcagcacctttgcttgaagggaccctccgctgatgtatacaaagctaagtgtgaaattcaggagaaagtatatacaatggcgcagaagaatattcaggtgtctccagagatattccaattcctgcagcaggtaaattggaaggagttcagcaaatgcttatttatcgctcagaagatcctagcactctacgaattggaagggaccaccgtcctgttgacctcatgttcctcagaagcattgcttgaggccgaaaaacagatgctttcagcactaaattacaagagaatcgaggtggaaaacaaggaggtgctccatggaaaaaagtggaaagggctcactcacaatctcctcaagaaacagaattcctccccaaatactgtgataatcaacgagcttacaagcgagaccacggccgaggttattattaccggctgcgtcaaggaagttaatgagacctacaaactgctttttaattttgtcgagcaaaacatgaaaatcgagaggctggtagaggtgaagccatcactggtgatcgattatttgaagactgaaaaaaaattgttctggccaaagattaagaaggttaatgtgcaggtgtcatttaatccagagaacaaacagaaaggcatccttctgacaggtagcaaaactgaggtgctcaaggcagtggacatcgtgaaacaagtttgggactccgtttgcgtcaagagcgtgcacactgataagcccggcgcaaagcagttctttcaagacaaggcgcgcttttaccagagcgaaatcaagcggctcttcgggtgttacatcgagttacaggagaacgaagtgatgaaagagggtgggagccctgcaggtcagaagtgcttctcgagaactgttcttgcaccgggggtggtgctaatcgtccagcagggggacttggctcggctgccggtcgacgtggtggtcaatgctagcaatgaggacctcaaacattatggaggactggctgctgctctgagcaaggccgctggcccggaactgcaggctgattgcgaccagatcgtgaaacgtgaggggcgtcttctgccaggtaacgcaacgatcagtaaagctggaaaactgccttaccaccatgtcatccacgcagtgggaccccgctggagcggctacgaagccccccgatgcgtatatctgctaaggagggcagtccagcttagcctgtgcctggcagagaaatacaaatatcgaagcattgcaatacccgccattagctctggggtgttcggattccctctgggacgctgtgtagaaaccatcgtgtctgccatcaaagagaactttcagtttaaaaaggatggccattgtcttaaagagatttatcttgtggatgtgtctgagaaaactgtggaggcctttgcggaggccgtgaaaacggtatttaaggcaactttgccggacacagccgcacctcccgggctcccccccgcagcagctggacccggaaaaactagctgggagaaaggaagcctcgtgtctccagggggattgcaaatgcttcttgtgaaggaaggagttcagaacgcgaaaacagacgtggtagttaactcagtgccgctagacctcgtcttatcacgcggcccgctgagcaaatccctgctggaaaaggccgggccagagctgcaggaggagcttgatacagtaggtcagggggtagcggtatccatgggcacggttctaaagacatcctcctggaacctcgactgccgatacgtgttgcacgttgtagcccctgagtggagaaatggaagtacctcctcgctaaaaattatggaagacatcattagggagtgtatggagatcaccgagtcactttccttgaagtctatcgcttttcccgccattgggaccggaaatctcggctttcctaaaaacatttttgctgagctgataatttctgaggtttttaaattcagttcaaagaaccagttgaaaacactgcaggaggtgcactttctgcttcatccctctgatcacgaaaatattcaagcattctctgatgagttcgctcgtcgcgccaacggcaacctagtcagcgacaaaattccgaaggccaaggacacacaggggttctacgggactgtgagctcaccggatagcggtgtgtacgagatgaagatcgggtccattatctttcaggtcgctagcggagacatcaccaaggaggaggcagacgttatcgtgaattccactagcaatagttttaacctaaaggtcggcgtgtccaaagctatccttgagtgcgccggtcagaacgtcgaacgggagtgctctcaacaagctcagcaaaggaaaaatgattatatcatcacgggtggcggttttttgagatgcaagaacatcatccacgtgattgggggaaacgacgtcaaatcctcggtgagttcagtgctgcaggagtgtgagaagaaaaattactcttcaatttgtctgccggccattgggacgggcaatgcaaagcagcaccctgataaggtagcagaagctatcatcgatgcgattgaggacttcgtgcagaaaggatctgctcagtccgttaagaaggtgaaggtcgtcatttttctcccccaggtgctcgacgtgttctacgctaacatgaaaaaaagggaaggtactcagctcagttcccagcaaagtgtgatgtccaagttagcctcttttctggggtttagcaagcagtcacctcagaagaagaaccacctggtgctggaaaagaaaaccgaatccgcaacttttagggtctgtggagaaaatgttacctgtgtcgaatacgcaatttcttggcttcaggatctgatcgagaaagaacaatgcccatacaccagcgaagatgaatgcatcaaagactttgatgaaaaggagtatcaggagctcaatgagctgcagaagaagctaaatattaacatctcactcgatcacaaacggcctctgatcaaagtgttgggaatcagcagagacgtgatgcaggctagagatgagatcgaggcaatgattaagcgggtcagactcgccaaagagcaggagtcgcgcgctgattgtatctctgaattcattgaatggcagtataacgacaacaacacgagccattgttttaacaagatgacaaatttaaaacttgaagatgctcgccgagaaaaaaagaagacagtggacgtcaaaattaaccatcgtcattacacagtcaacctgaatacatacaccgcaaccgacactaaagggcactcgttgagcgtgcagcgtctaaccaagagcaaagtggatatacctgcgcattggtctgatatgaagcagcaaaacttttgtgtcgtagagctacttcctagtgaccctgaatacaacacagtggcttcaaagttcaaccagacatgttcccactttcggattgagaagatcgagaggattcagaaccctgacctatggaatagctatcaggcaaaaaagaagaccatggacgcgaaaaatgggcaaactatgaatgagaaacagctgtttcatggcacggacgcaggtagcgtaccccatgttaatcggaacggattcaacaggagttatgctggcaaaaatgcagttgcctatggcaaggggacctactttgcagtgaatgcaaattactcagccaacgacacctattctagaccagacgccaacgggcggaagcatgtctattacgtgagagtgcttaccggaatctacacccatgggaatcactccctgatagttcccccctctaagaacccccagaacccaactgacctctatgataccgttacagacaacgtccatcatccatctctgttcgttgctttctatgactatcaggcgtatccagaatacctgattacttttcggaagtag

SEQ ID NO: 193752 - DNA, 5406 bp, Artificial Sequence
  derived and/or modified sequence
atggctgtgccaggctccttccctctcttagtggaaggtagctggggccccgatcctcctaaaaacttaaacaccaaactccagatgtacttccaatcacccaaacgaagcgggggaggcgaatgtgaggttcgacaggaccctcggagccccagccgatttcttgtgttcttctacccagaagatgtgaggcagaaggttctggagagaaaaaatcacgagctcgtctggcagggtaagggcacctttaaactgactgtgcagctgcccgctacccctgacgagattgaccacgttttcgaagaggagctgctgaccaaggagagcaagaccaaagaggacgtcaaagaacccgatgtgtccgaagaactggatactaaactgcccctggatggaggcctagacaagatggaggacatccccgaggagtgcgagaatatcagctcgcttgtggctttcgaaaatttgaaagccaacgtcacagacattatgctcattctgctcgtagagaacatctctggactgtccaatgatgacttccaggttgagattatcagagacttcgacgtcgccgtggtaacgtttcagaagcacatagatacaatcagattcgtcgacgactgtacgaaacaccacagtatcaagcaactccagctcagcccgaggctcctagaggtaacaaacacaataagagtagagaatctcccacccggcgctgacgattacagcctcaagctcttcttcgaaaacccctacaacggaggaggccgcgttgctaatgtcgaatactttccagaggaatcttcagctcttattgaatttttcgacagaaaggtattagacactattatggcgactaagctcgactttaacaagatgccgctcagtgtgtttccatactatgccagcttgggtaccgcactgtatggcaaggagaagcctctgataaagctgccagcaccttttgaggagagcctcgacttgcctctctggaagttcctgcagaaaaaaaaccatctcatagaagagattaacgatgagatgaggaggtgccattgcgagctcacttggtctcagctgtccgggaaggtcaccatccggccagctgcaacgctcgttaatgagggacgccctcgtatcaaaacctggcaagcagatactagtacaaccctatcctctattcgaagcaagtataaggtcaatccaatcaaggttgatcctaccatgtgggacacaataaagaatgacgtcaaggatgacaggatccttattgagttcgataccttaaaagaaatggtcattctcgcggggaagtctgaagatgtgcagagcatagaagtccaggtacgtgagctgatcgagagcacaacccaaaagattaagagagaggaacagtccctgaaagaaaagatgatcatttctcccgggcgctactttctgctctgtcattcgagccttctcgatcacctgctgacagagtgcccagaaatcgagatttgttacgatcgcgtcacccagcacctgtgcctgaagggaccttcagccgacgtctataaggcaaagtgcgaaattcaagagaaagtgtatactatggcccagaaaaacatccaggtgtctccagaaatctttcaatttctccagcaagtgaactggaaagagttttcaaagtgcttattcatagcacagaagatcttggcactgtacgagcttgagggcaccaccgtgttactcacatcttgttcttctgaagccctgttggaggccgagaaacaaatgctcagtgcactaaattacaaacggatcgaggtggagaacaaagaggtgctgcacggcaagaaatggaagggtttgacacataacctgttgaagaaacagaacagctcgcccaacacagtcatcatcaacgagcttacatcagagactacggcggaggtcattatcaccggctgcgtgaaagaagtgaacgagacttacaaattactgttcaacttcgttgagcagaacatgaagattgagagactcgtagaggtcaaaccctctctggtgattgattatcttaagaccgagaagaagctgttttggccaaagataaagaaggtgaacgtgcaggtctcatttaatccggagaacaagcagaaggggattctgctgacgggaagcaagaccgaagtattaaaggcagttgatatcgtcaagcaagtatgggacagtgtctgtgttaagagcgtccatactgacaagcccggggctaagcagttttttcaagataaggcaaggttttaccagtccgagatcaaacggctgttcggttgctatattgagctgcaagaaaacgaagtgatgaaggaaggcggttcaccagctggccagaaatgcttttcacgaacagttctcgcccccggagtggtactgatagtccagcaaggagacctagctagattacctgtggacgtcgtggtgaacgcctccaatgaagatctgaagcactatggagggctcgccgccgccctgtctaaggctgcggggcccgagctgcaagcggattgcgaccagatagtgaagcgtgaagggaggcttctgcccggcaatgccacgatttccaaggccggtaagctaccataccaccatgtgatccatgccgtggggcctaggtggtctggttacgaggcacctcggtgtgtatacttactgcggcgtgctgtgcagctgtcactctgcttagccgaaaagtacaaataccgctcgatcgctatacctgccatctcgtctggagtgtttggcttccccctgggtcggtgcgtggagacaatcgtgagcgcaattaaggaaaatttccagttcaagaaggatggtcattgcctcaaagaaatttatctggtagatgtgagcgagaagactgtcgaggcctttgcggaggccgtgaagaccgtgtttaaggctacattgcctgacaccgccgcaccccccgggctgcccccagctgcagcagggccaggaaagacatcctgggagaagggatctctcgtatcacctggcggcctccagatgcttctagtgaaggaaggagtgcaaaacgccaagactgacgtggtagtaaattccgtgcctctcgacctcgttctgtcaagagggccactgtccaagagtttgctcgagaaggccggaccagagctccaggaggaactagatacggtgggccagggagtcgctgtttccatggggaccgtgttaaagacctccagctggaacctcgattgtcgatacgtactgcacgtggtcgcaccagaatggcgcaatggtagcacatcttcactgaagattatggaggacatcattagagaatgcatggagatcaccgagtcactgtccctaaaatctattgcttttccagcaatagggaccggcaacctcggcttcccaaagaatatttttgccgagctgatcatttcagaggtatttaagtttagttcgaagaaccagctaaagacccttcaagaggtacacttccttctgcacccaagtgaccacgaaaacatacaggcgttctccgatgaattcgctcgacgtgccaatggtaacctggttagcgacaaaattccgaaagccaaagatacacagggcttttacggaacagtgagtagccctgattctggtgtgtatgagatgaagattggcagcatcattttccaagtagcttcaggggatattactaaggaagaagcagacgtaattgttaactctacgtcaaatagcttcaaccttaaagccggcgtctccaaagcgatcttagagtgtgcagggcagaatgttgagcgagaatgtagtcagcaggctcagcagcgcaaaaatgattatatcattacgggcgggggtttcttgagatgcaaaaatattattcatgtgataggagggaacgacgtaaagagctccgtctcatccgtgctccaggagtgcgagaagaagaactattcttctatatgcctgccagctattggaacgggcaatgccaagcagcacccggataaagtcgccgaagctatcatcgatgccattgaggattttgtgcagaagggctcagcgcaatccgttaagaaagtgaaggtggtgattttcttgcctcaggtcctcgacgttttttatgccaatatgaagaaacgcgaaggcacccaactttcttcccaacaatcggttatgagtaagctcgcttcatttcttggattctctaagcaatcgcctcagaagaaaaatcacctagttttagaaaagaaaaccgagtccgcaacatttcgtgtctgtggcgaaaacgttacctgcgttgagtatgctatatcttggctgcaggatctgatcgaaaaagagcagtgcccctacacctctgaagatgagtgtattaaagactttgatgagaaggagtaccaggagctgaacgagctccaaaaaaagttgaatataaatatcagtctcgaccacaaacggcccctaatcaaggtactgggtatcagcagagatgtaatgcaggcacgggatgaaatcgaagcaatgatcaagcgcgtgagactggctaaggagcaggaatctcgtgccgattgcattagcgaatttatagagtggcagtataacgataacaatacatcgcactgctttaacaaaatgacgaaccttaagctggaagacgctagaagggagaagaagaagaccgtggacgtgaagattaaccaccgacactatacagttaatcttaacacctataccgctaccgatacgaaaggacactcattatcagtgcagcgactgactaagtccaaagtagacattcccgcccattggagtgacatgaagcaacagaacttttgcgtggtagaactcttgccttccgaccccgaatacaacactgttgcctcaaaatttaatcagacttgcagccacttccgaatagagaaaatcgagcgtattcagaatcctgatctgtggaactcctaccaggcaaagaagaaaactatggatgccaaaaatggccagactatgaatgagaaacagctcttccatggaactgatgccggttctgtgccccacgttaaccgtaacgggtttaatcggagctatgctggcaaaaatgccgtggcctatggtaagggaacatacttcgccgtaaatgctaattactccgcaaacgacacttactcacgtcccgacgccaacggacgcaaacacgtgtattatgtaagggtgctgacgggcatctacacacacggcaatcactccctgatcgtgccgcctagtaaaaatccacagaatcccaccgacctctacgacaccgtcactgacaacgtgcaccacccttcactctttgtggcgttttacgactatcaggcctaccctgagtacttaataacttttagaaaatag

SEQ ID NO: 193753 - DNA, 849 bp, Artificial Sequence
  derived and/or modified sequence
atgagcaagctggccagcttcctgggcttcagcaagcagagcccccagaagaagaaccacctggtgctggagaagaagacagaaagtgccaccttccgggtgtgtggagaaaatgtgacctgtgtggagtatgccatctcctggctgcaggacctgattgagaaggagcagtgcccctacaccagtgaagatgagtgcatcaaggactttgatgagaaggagtaccaggagctgaatgagctgcagaagaagctgaacatcaacatcagcctggaccacaagaggcccctcatcaaggtgctgggcatcagcagagatgtgatgcaggccagagatgaaattgaggccatgatcaagagggtgcggctggccaaggagcaggagagcagagctgactgcatcagcgagttcatcgagtggcagtacaatgacaacaacaccagccactgcttcaacaagatgaccaacctgaagctggaggatgcccggcgggagaagaagaagacagtggatgtgaagatcaaccaccgccactacacagtgaacctgaacacctacacagccacagacaccaagggccacagcctgtctgtgcagaggctgaccaagagcaaggtggacatcccagcccactggagcgacatgaagcagcagaacttctgtgtggtggagctgctgcccagcgaccctgagtacaacacagtggccagcaagttcaaccagacctgcagccacttccgcatcgagaaggtgaatgtgatgatccgggcctgcagccccagctactgggaggccgaggtggagggcctgcacgagcccaggagcctgacccctgtgtgggtgacctag

SEQ ID NO: 193754 - DNA, 2394 bp, Artificial Sequence
  derived and/or modified sequence
atgtacctgcggcggctgctgcggcccctgcagatgctgctggtgaaggagggcgtgcagaatgccaagacagatgtggtggtgaacagcgtgcccctggacctggtgctgagccggggccccctgagcaagagcctgctggagaaggccggccctgagctgcaggaggagctggacacagtgggccagggcgtggccgtgtccatgggcaccgtgctgaagaccagctcctggaacctggactgccgctacgtgctgcacgtggtggcccctgagtggagaaatggcagcaccagcagcctgaagatcatggaggacatcatccgggagtgcatggagatcacagagagcctgagcctgaagagcatcgccttccctgccatcggcaccggcaacctgggcttccccaagaacatctttgctgagctgatcatcagcgaggtgttcaagttcagcagcaagaaccagctgaagaccctgcaggaggtgcacttcctgctgcaccccagcgaccacgagaacatccaggccttcagtgatgaatttgcccggcgggccaatggaaacctggtgtctgacaagatccccaaggccaaggacacccagggcttctatggaacagtgagcagcccagattctggagtgtatgagatgaagattggcagcatcatcttccaggtggccagcggggacatcaccaaggaggaggctgatgtgattgtgaacagcaccagcaacagcttcaacctgaaggccggcgtgtccaaggccatcctggagtgtgccggccagaatgtggagagagaatgttcccagcaggcccagcagaggaagaatgactacatcatcaccggcggcggcttcctgcgctgcaagaacatcatccacgtgattggaggaaatgatgtgaagagctctgtgtcctctgtgctgcaggagtgtgagaagaagaactacagcagcatctgcctgcctgccatcggcactggaaatgccaagcagcacccagacaaggtggccgaggccatcattgatgccatcgaggactttgtgcagaagggcagcgcccagagcgtgaagaaggtgaaggtggtgatcttcctgccccaggtgctggatgtgttctacgccaacatgaagaagcgggagggcacccagctgagcagccagcagagcgtgatgagcaagctggccagcttcctgggcttcagcaagcagagcccccagaagaagaaccacctggtgctggagaagaagacagagagcgccaccttccgggtgtgtggggagaatgtgacctgtgtggagtatgccatctcctggctgcaggacctgattgagaaggagcagtgcccctacaccagtgaagatgagtgcatcaaggactttgatgagaaggagtaccaggagctgaatgagctgcagaagaagctgaacatcaacatcagcctggaccacaagaggcccctcatcaaggtgctgggcatcagcagagatgtgatgcaggccagagatgaaattgaggccatgatcaagagggtgcggctggccaaggagcaggagagcagagctgactgcatcagcgagttcatcgagtggcagtacaatgacaacaacaccagccactgcttcaacaagatgaccaacctgaagctggaggatgcccggcgggagaagaagaagacagtggatgtgaagatcaaccaccgccactacacagtgaacctgaacacctacacagccacagacaccaagggccacagcctgtctgtgcagaggctgaccaagagcaaggtggacatcccagcccactggagcgacatgaagcagcagaacttctgtgtggtggagctgctgcccagcgaccctgagtacaacacagtggccagcaagttcaaccagacctgcagccacttcagaattgagaagattgaaagaatccagaacccagacctgtggaacagctaccaggccaagaagaagaccatggatgccaagaatggccagaccatgaatgagaagcagctgttccacggcacagatgctggctctgtgccccacgtgaacagaaatggcttcaacagaagctatgctgggaagaatgctgtggcctacggcaagggcacctactttgctgtgaatgccaactacagcgccaatgacacctacagcaggccagatgccaatggaaggaagcacgtgtactacgtgcgggtgctgaccggcatctacacccacggcaaccacagcctcatcgtgccccccagcaagaacccccagaaccccacagacctgtatgacacagtgacagacaacgtgcaccaccccagcctgtttgtggccttctatgactaccaggcctacccagagtacctgatcaccttcaggaagtag

SEQ ID NO: 193755 - DNA, 5163 bp, Artificial Sequence
  derived and/or modified sequence
atggctgtgcccggcagcttccccctgctggtggagggctcctggggccctgacccccccaagaacctgaacaccaagctgcagatgtacttccagagccccaagaggtctggaggaggagaatgtgaggtgcggcaggaccccaggagccccagccgcttcctggtgttcttctacccagaagatgtgcggcagaaggtgctggagaggaagaaccacgagctggtgtggcagggcaagggcaccttcaagctgactgtgcagctgcctgccaccccagatgaaattgaccacgtgtttgaggaggagctgctgaccaaggagagcaagaccaaggaggatgtgaaggagccagacaccatccgctttgtggatgactgcaccaagcaccacagcatcaagcagctgcagctgagcccccggctgctggaggtgaccaacaccatccgggtggagaacctgcccccaggagcagatgactacagcctgaagctgttctttgagaacccctacaacggcggcggccgggtggccaacgtggagtacttccctgaggagagcagcgccctgattgagttctttgacaggaaggtgctggacaccatcatggccaccaagctggacttcaacaagatgcccctgtctgtgttcccctactatgccagcctgggcacagccctgtatggcaaggagaagcccctcatcaagctgcctgccccctttgaggagagcctggacctgcccctgtggaagttcctgcagaagaagaaccacctgattgaggagatcaatgatgagatgaggcgctgccactgtgagctgacctggagccagctgagcggcaaggtgaccatccggcctgctgccaccctggtgaatgaaggccggccccgcatcaagacctggcaggccgacaccagcaccaccctgagcagcatccgcagcaagtacaaggtgaaccccatcaaggtggaccccaccatgtgggacaccatcaagaatgatgtgaaggatgaccgcatcctgattgaatttgacaccctgaaggagatggtgatcctggccggcaagtcagaagatgtgcagagcattgaggtgcaggtgcgggagctgattgagagcaccacccagaagatcaagcgggaggagcagagcctgaaggagaagatgatcatcagccctggccgctacttcctgctgtgccacagcagcctgctggaccacctgctgacagagtgcccagaaattgagatctgctatgacagagtgacccagcacctgtgcctgaagggccccagcgcagatgtgtacaaggccaagtgtgagatccaggagaaggtgtacaccatggcccagaagaacatccaggtgtccccagagatcttccagttcctgcagcaggtgaactggaaggagttcagcaaatgtctcttcatcgcccagaagatcctggccctgtatgagctggagggcaccaccgtgctgctgaccagctgcagcagcgaggccctgctggaggccgagaagcagatgctgagcgccctgaactacaagagaattgaggtggagaacaaggaggtgctgcacggcaagaagtggaagggcctgacccacaacctgctgaagaagcagaacagcagccccaacacagtcatcatcaatgagctgaccagcgagaccacagctgaggtgatcatcaccggctgtgtgaaggaggtgaatgagacctacaagctgctcttcaactttgtggagcagaacatgaagattgaaaggctggtggaggtgaagcccagcctggtgattgactacctgaagacagagaagaagctgttctggcccaagatcaagaaggtgaatgtgcaggtgtccttcaaccctgagaacaagcagaagggcatcctgctgaccggcagcaagacagaggtgctgaaggctgtggacatcgtgaagcaggtgtgggacagcgtgtgtgtgaagtctgtgcacacagacaagccaggggccaagcagttcttccaggacaaggcccgcttctaccagagcgagatcaagaggctgtttggctgctacatcgagctgcaggagaatgaggtgatgaaggagggcggcagccctgctggccagaagtgcttcagcaggacagtgctggcccctggggtggtgctgattgtgcagcagggcgacctggcccggctgcctgtggatgtggtggtgaatgccagcaatgaagacctgaagcactatggaggcctggccgccgccctgagcaaggccgccggccctgagctgcaggccgactgtgaccagatcgtgaagcgggagggccgcctgctgcctggaaatgccaccatcagcaaggccggcaagctgccctaccaccacgtgattcatgctgtgggcccccgctggagcggctatgaggccccccgctgtgtgtacctgctgcggcgggctgtgcagctgagcctgtgcctggccgagaagtacaagtaccgcagcatcgccatcccagccatcagcagcggcgtgtttggcttccccctgggccgctgtgtggagaccatcgtgtctgccatcaaggagaacttccagttcaagaaggatggccactgcctgaaggagatctacctggtggatgtgtctgagaagacagtggaggcctttgctgaggccgtgaagacagtgttcaaggccaccctgcctgacacagctgcccctcctggcctgcccccagctgctgctggccctgggaagacctcctgggagaagggcagcctggtgtcccctgggggcctgcagatgctgctggtgaaggagggcgtgcagaatgccaagacagatgtggtggtgaacagcgtgcccctggacctggtgctgagccggggccccctgagcaagagcctgctggagaaggccggccctgagctgcaggaggagctggacacagtgggccagggcgtggccgtgtccatgggcaccgtgctgaagaccagctcctggaacctggactgccgctacgtgctgcacgtggtggcccctgagtggagaaatggcagcaccagcagcctgaagatcatggaggacatcatccgggagtgcatggagatcacagagagcctgagcctgaagagcatcgccttccctgccatcggcactggaaacctgggcttccccaagaacatctttgctgagctgatcatcagcgaggtgttcaagttcagcagcaagaaccagctgaagaccctgcaggaggtgcacttcctgctgcaccccagcgaccacgagaacatccaggccttcagtgatgaatttgcccggcgggccaacggcaacctggtgtctgacaagatccccaaggccaaggacacccagggcttctacggcaccgtgagcagcccagacagcggcgtgtatgagatgaagattggcagcatcatcttccaggtggccagcggggacatcaccaaggaggaggctgatgtgattgtgaacagcaccagcaacagcttcaacctgaaggtgggcgtgtccaaggccatcctggagtgtgccggccagaatgtggagcgggagtgcagccagcaggcccagcagaggaagaatgactacatcatcactggaggcggcttcctgcgctgcaagaacatcatccacgtgattggaggaaatgatgtgaagagctctgtgtcctctgtgctgcaggagtgtgagaagaagaactacagcagcatctgcctgcctgccatcggcactggaaatgccaagcagcacccagacaaggtggccgaggccatcattgatgccattgaagattttgtgcagaagggcagcgcccagagcgtgaagaaggtgaaggtggtgatcttcctgccccaggtgctggatgtgttctacgccaacatgaagaagcgggagggcacccagctgagcagccagcagagcgtgatgagcaagctggccagcttcctgggcttcagcaagcagagcccccagaagaagaaccacctggtgctggagaagaagacagaaagtgccaccttccgggtgtgtggagaaaatgtgacctgtgtggagtatgccatctcctggctgcaggacctgattgagaaggagcagtgcccctacaccagtgaagatgagtgcatcaaggactttgatgagaaggagtaccaggagctgaatgagctgcagaagaagctgaacatcaacatcagcctggaccacaagaggcccctcatcaaggtgctgggcatcagcagagatgtgatgcaggccagagatgaaattgaggccatgatcaagagggtgcggctggccaaggagcaggagagcagagctgactgcatcagcgagttcatcgagtggcagtacaatgacaacaacaccagccactgcttcaacaagatgaccaacctgaagctggaggatgcccggcgggagaagaagaagacagtggatgtgaagatcaaccaccgccactacacagtgaacctgaacacctacacagccacagacaccaagggccacagcctgtctgtgcagaggctgaccaagagcaaggtggacatcccagcccactggagcgacatgaagcagcagaacttctgtgtggtggagctgctgcccagcgaccctgagtacaacacagtggccagcaagttcaaccagacctgcagccacttccgcatcgagaagattgagcgcatccagaacccagacctgtggaacagctaccaggccaagaagaagaccatggatgccaagaatggccagaccatgaatgagaagcagctgttccatggaacagatgctggctctgtgccccacgtgaacagaaatggcttcaacagaagctatgccggcaagaatgctgtggcctacggcaagggcacctactttgctgtgaatgccaactacagcgccaatgacacctacagcaggccagatgccaacggcaggaagcacgtgtactacgtgcgggtgctgaccggcatctacacccacggcaaccacagcctgattgtgccccccagcaagaacccccagaaccccacagacctgtatgacacagtgacagacaacgtgcaccaccccagcctgtttgtggccttctatgactaccaggcctacccagagtacctgatcaccttcaggaagtag

SEQ ID NO: 193756 - DNA, 5406 bp, Artificial Sequence
  derived and/or modified sequence
atggctgtgcccggcagcttccccctgctggtggagggctcctggggccctgacccccccaagaacctgaacaccaagctgcagatgtacttccagagccccaagaggtctggaggaggagaatgtgaggtgcggcaggaccccaggagccccagccgcttcctggtgttcttctacccagaagatgtgcggcagaaggtgctggagaggaagaaccacgagctggtgtggcagggcaagggcaccttcaagctgactgtgcagctgcctgccaccccagatgaaattgaccacgtgtttgaggaggagctgctgaccaaggagagcaagaccaaggaggatgtgaaggagccagatgtgtctgaggagctggacaccaagctgcccctggatggcggcctggacaagatggaggacatcccagaagaatgtgagaacatcagcagcctggtggcctttgagaacctgaaggccaacgtgacagacatcatgctgatcctgctggtggagaacatcagcggcctgagcaatgatgacttccaggtggagatcatccgggactttgatgtggccgtggtgaccttccagaagcacatcgacaccatccgctttgtggatgactgcaccaagcaccacagcatcaagcagctgcagctgagcccccggctgctggaggtgaccaacaccatccgggtggagaacctgcccccaggagcagatgactacagcctgaagctgttctttgagaacccctacaatggaggcggccgggtggccaacgtggagtacttccctgaggagagcagcgccctgattgagttctttgacaggaaggtgctggacaccatcatggccaccaagctggacttcaacaagatgcccctgagcgtcttcccctactatgccagcctgggcacagccctgtatggcaaggagaagcccctcatcaagctgcctgccccctttgaggagagcctggacctgcccctgtggaagttcctgcagaagaagaaccacctgattgaggagatcaatgatgagatgaggcgctgccactgtgagctgacctggagccagctgagcggcaaggtgaccatccggcctgctgccaccctggtgaatgaaggccggccccgcatcaagacctggcaggccgacaccagcaccaccctgagcagcatccgcagcaagtacaaggtgaaccccatcaaggtggaccccaccatgtgggacaccatcaagaatgatgtgaaggatgaccgcatcctgattgaatttgacaccctgaaggagatggtgatcctggccggcaagtcagaagatgtgcagagcattgaggtgcaggtgcgggagctgattgagagcaccacccagaagatcaagcgggaggagcagagcctgaaggagaagatgatcatcagccctggccgctacttcctgctgtgccacagcagcctgctggaccacctgctgacagaatgtcctgagattgagatctgctatgacagagtgacccagcacctgtgcctgaagggccccagcgcagatgtgtacaaggccaagtgtgagatccaggagaaggtgtacaccatggcccagaagaacatccaggtgtccccagagatcttccagttcctgcagcaggtgaactggaaggagttcagcaagtgcctcttcatcgcccagaagatcctggccctgtatgagctggagggcaccaccgtgctgctgaccagctgcagcagcgaggccctgctggaggccgagaagcagatgctgagcgccctgaactacaagagaattgaggtggagaacaaggaggtgctgcacggcaagaagtggaagggcctgacccacaacctgctgaagaagcagaacagcagccccaacacagtcatcatcaatgagctgaccagcgagaccacagctgaggtgatcatcaccggctgtgtgaaggaggtgaatgagacctacaagctgctcttcaactttgtggagcagaacatgaagattgagcggctggtggaggtgaagcccagcctggtgattgactacctgaagacagagaagaagctgttctggcccaagatcaagaaggtgaatgtgcaggtgtccttcaaccctgagaacaagcagaagggcatcctgctgaccggcagcaagacagaggtgctgaaggctgtggacatcgtgaagcaggtgtgggacagcgtgtgtgtgaagtctgtgcacacagacaagccaggggccaagcagttcttccaggacaaggcccgcttctaccagagcgagatcaagaggctgtttggctgctacatcgagctgcaggagaatgaggtgatgaaggagggcggcagccctgctggccagaagtgcttcagcaggacagtgctggcccctggggtggtgctgattgtgcagcagggcgacctggcccggctgcctgtggatgtggtggtgaatgccagcaatgaagacctgaagcactacggcggcctggccgccgccctgagcaaggctgctggccctgagctgcaggccgactgtgaccagatcgtgaagcgggagggccgcctgctgcctggaaatgccaccatcagcaaggccggcaagctgccctaccaccacgtgattcatgctgtgggcccccgctggagcggctatgaggccccccgctgtgtgtacctgctgcggcgggctgtgcagctgagcctgtgcctggccgagaagtacaagtaccgcagcatcgccatcccagccatcagcagtggagtgtttggcttccccctgggccgctgtgtggagaccatcgtgtctgccatcaaggagaacttccagttcaagaaggatggccactgcctgaaggagatctacctggtggatgtgtctgagaagacagtggaggcctttgctgaggccgtgaagacagtgttcaaggccaccctgcctgacacagctgcccctcctggcctgcccccagctgctgctggccctgggaagacctcctgggagaagggcagcctggtgtccccaggcggcctgcagatgctgctggtgaaggagggcgtgcagaatgccaagacagatgtggtggtgaacagcgtgcccctggacctggtgctgagccggggccccctgagcaagagcctgctggagaaggccggccctgagctgcaggaggagctggacacagtgggccagggcgtggccgtgtccatgggcaccgtgctgaagaccagctcctggaacctggactgccgctacgtgctgcacgtggtggcccctgagtggagaaatggcagcaccagcagcctgaagatcatggaggacatcatccgggagtgcatggagatcacagagagcctgagcctgaagagcatcgccttccctgccatcggcaccggcaacctgggcttccccaagaacatctttgctgagctgatcatcagcgaggtgttcaagttcagcagcaagaaccagctgaagaccctgcaggaggtgcacttcctgctgcaccccagcgaccacgagaacatccaggccttcagtgatgaatttgcccggcgggccaatggaaacctggtgtctgacaagatccccaaggccaaggacacccagggcttctatggaacagtgagcagcccagattctggagtgtatgagatgaagattggcagcatcatcttccaggtggccagcggggacatcaccaaggaggaggctgatgtgattgtgaacagcaccagcaacagcttcaacctgaaggccggcgtgtccaaggccatcctggagtgtgccggccagaatgtggagagagaatgttcccagcaggcccagcagaggaagaatgactacatcatcaccggcggcggcttcctgcgctgcaagaacatcatccacgtgattggaggaaatgatgtgaagagctctgtgtcctctgtgctgcaggagtgtgagaagaagaactacagcagcatctgcctgcctgccatcggcactggaaatgccaagcagcacccagacaaggtggccgaggccatcattgatgccatcgaggactttgtgcagaagggcagcgcccagagcgtgaagaaggtgaaggtggtgatcttcctgccccaggtgctggatgtgttctacgccaacatgaagaagcgggagggcacccagctgagcagccagcagagcgtgatgagcaagctggccagcttcctgggcttcagcaagcagagcccccagaagaagaaccacctggtgctggagaagaagacagagagcgccaccttccgggtgtgtggggagaatgtgacctgtgtggagtatgccatctcctggctgcaggacctgattgagaaggagcagtgcccctacaccagtgaagatgagtgcatcaaggactttgatgagaaggagtaccaggagctgaatgagctgcagaagaagctgaacatcaacatcagcctggaccacaagaggcccctcatcaaggtgctgggcatcagcagagatgtgatgcaggccagagatgaaattgaggccatgatcaagagggtgcggctggccaaggagcaggagagcagagctgactgcatcagcgagttcatcgagtggcagtacaatgacaacaacaccagccactgcttcaacaagatgaccaacctgaagctggaggatgcccggcgggagaagaagaagacagtggatgtgaagatcaaccaccgccactacacagtgaacctgaacacctacacagccacagacaccaagggccacagcctgtctgtgcagaggctgaccaagagcaaggtggacatcccagcccactggagcgacatgaagcagcagaacttctgtgtggtggagctgctgcccagcgaccctgagtacaacacagtggccagcaagttcaaccagacctgcagccacttcagaattgagaagattgaaagaatccagaacccagacctgtggaacagctaccaggccaagaagaagaccatggatgccaagaatggccagaccatgaatgagaagcagctgttccacggcacagatgctggctctgtgccccacgtgaacagaaatggcttcaacagaagctatgctgggaagaatgctgtggcctacggcaagggcacctactttgctgtgaatgccaactacagcgccaatgacacctacagcaggccagatgccaatggaaggaagcacgtgtactacgtgcgggtgctgaccggcatctacacccacggcaaccacagcctcatcgtgccccccagcaagaacccccagaaccccacagacctgtatgacacagtgacagacaacgtgcaccaccccagcctgtttgtggccttctatgactaccaggcctacccagagtacctgatcaccttcaggaagtag

SEQ ID NO: 193757 - DNA, 849 bp, Artificial Sequence
  derived and/or modified sequence
atgagcaagctggccagcttcctgggcttcagcaagcagagcccccagaagaaaaatcacctggtgttggagaagaaaaccgagtcagcaacattcagagtttgcggcgaaaatgtgacttgtgtggaatatgcaatatcttggctccaggatttgatcgaaaaagagcaatgtccttacacgagtgaagacgagtgtatcaaggacttcgacgagaaggaataccaggagctcaatgagctgcagaaaaagctgaatatcaatatctcattagatcacaagcggcccctgatcaaggtgctggggatctcgcgggatgtgatgcaagcgagagatgagatcgaggcaatgatcaagagagtgagactcgcaaaagagcaggaaagtagggccgactgcatttccgagttcatcgagtggcagtataacgataataatacctctcattgcttcaataaaatgacgaatcttaaattagaggacgccaggagggagaaaaaaaaaaccgttgatgtgaaaataaatcaccggcactataccgttaacctgaacacatataccgcgactgataccaagggacatagtcttagcgtacaacgccttacaaagagtaaagttgatatccctgcccattggagcgacatgaaacagcagaacttctgtgttgttgaactgctgcccagcgaccctgaatacaacaccgtagcctcaaagttcaatcagacatgcagccattttcggatagagaaagtcaatgtgatgatccgtgcatgtagtccttcttactgggaggccgaggtggagggactccacgagcctagatctcttaccccggtgtgggtcacttag

SEQ ID NO: 193758 - DNA, 2394 bp, Artificial Sequence
  derived and/or modified sequence
atgtacctgcggcggctgctgcggcccctgcagatgctgctggtgaaggagggcgtgcagaacgcaaaaacggacgtggttgtgaattcagtccctctggatctggtccttagcagaggcccactctctaagagtctgctggagaaggccggccccgagcttcaggaggagttagatacagtggggcagggagttgccgtgagcatgggaactgttctcaagacttcttcttggaatctcgactgtagatacgttttgcatgtagtcgctccagagtggcgtaacggatctacaagctctctcaagatcatggaagacatcattcgcgaatgtatggaaattactgagtccctatctctaaagtccattgcatttccagctattgggacaggaaatctgggcttccctaagaacatctttgcggaactgattatctctgaggtgtttaagttttcaagcaagaaccagttaaaaacactgcaagaggtgcactttttgctccacccttccgaccatgaaaatattcaagccttttctgatgagtttgccaggcgtgcaaacggaaatctggtttcggacaaaatccctaaagcaaaggatactcaggggttttatgggactgtgagttcaccagatagcggtgtgtacgagatgaagatcggaagtatcatatttcaggtcgcatcgggcgatattaccaaagaggaagccgacgtaattgtgaattcgacatctaactccttcaaccttaaggcgggcgtttccaaggccattctggagtgcgccggccagaatgtggaacgcgaatgctcacagcaggcccagcaaagaaagaacgactatataatcactggtggtggatttctccggtgcaagaatataattcatgtgattggcggaaatgatgttaagtcaagtgtgagcagcgtcctgcaggaatgcgagaaaaagaattattcgagtatctgtctcccagccattggcaccggcaacgcaaagcagcaccccgacaaggtcgcggaggctataatagatgcaatcgaggacttcgtgcagaagggttctgcacagtctgtgaaaaaggtcaaggtcgtcatatttctccctcaggtccttgacgtattttatgcaaatatgaagaagagggaggggacgcagttgtccagccagcagtcggtgatgtcgaagcttgcctcttttctgggatttagcaaacagtcgccgcagaagaaaaatcacctggtgctggaaaagaaaacagagagcgcaaccttccgggtttgtggagaaaatgtgacttgtgtcgagtatgccatcagctggttgcaggacttaattgagaaggaacaatgcccatacacgtcagaagatgagtgcattaaggatttcgatgagaaggagtatcaggagttaaatgagctgcagaagaaactgaatatcaatatttctttggatcacaaaagacctttgatcaaggtgcttggcatctcacgggatgtgatgcaggctcgagatgagattgaggccatgataaaaagagttcgcctcgccaaagagcaagagagtagggccgattgtatcagcgagttcattgagtggcaatacaatgacaacaatacaagtcactgtttcaataaaatgacaaacctgaaactggaggacgcccgccgtgaaaagaagaaaaccgtggacgtcaagatcaaccataggcattacacagtaaacctgaacacatacacagccacggacacaaagggacacagtctgtctgtgcaaaggctgacaaagtccaaagtcgacatacctgcccactggagtgacatgaagcagcagaatttctgcgtggtggaattactgccaagcgacccagaatataatactgtggccagtaaattcaatcagacatgctctcattttcggatcgaaaagatcgagcgaatccagaacccagacctgtggaactcatatcaagctaagaagaaaactatggacgccaagaatggccaaacaatgaacgaaaaacagctgtttcatggaactgatgccggttccgtacctcacgtcaaccgcaatggctttaataggtcctatgctggtaagaatgccgtggcgtacggaaagggaacgtactttgctgtgaacgctaactattcagccaacgacacctactcccggcctgacgccaatgggcggaaacacgtgtactatgttagggttctgaccggcatctacacgcacggtaaccactctctcattgtgcctccgtcaaagaacccccaaaatcctaccgacttgtacgataccgtgacagacaatgtccatcacccaagccttttcgtggcgttctacgattaccaggcctatcccgagtacctgattactttcagaaaatag

SEQ ID NO: 193759 - DNA, 5163 bp, Artificial Sequence
  derived and/or modified sequence
atggccgtgcccggcagcttccccctgctggtggagggcagctggggtcctgatccccccaagaacttgaacactaagctgcagatgtatttccagtcccccaagaggagcggcggcggtgaatgtgaggtgcggcaagatcctcggtcaccgtctcgatttttggtgttcttctatcccgaggacgtccggcagaaagtgcttgaacggaagaaccacgagctagtgtggcaaggcaagggaacctttaaactgaccgtccagcttcctgcgaccccagatgagatcgaccatgtgttcgaggaggaactgctgacaaaggagagtaagactaaggaggacgttaaggaacctgatactatccggttcgtggacgactgtaccaaacatcacagtataaagcagctacaactcagcccgcggctgcttgaagtgaccaataccataagagttgaaaatttgccacctggcgcagatgactatagccttaagctctttttcgaaaatccgtataatggcggggggagagtcgctaacgtcgaatacttcccagaagagtccagtgcattgattgagtttttcgatagaaaagttctcgacacaattatggccaccaaactcgatttcaataagatgcccctctctgtgtttccttactatgccagcttgggaaccgctctctatggtaaggaaaagccgttaataaaattacccgccccatttgaggagagtctggatcttcctctttggaaattcctccagaaaaagaatcatctcattgaagaaatcaatgatgagatgaggcgttgccactgtgaattaacttggtcacagttatcagggaaagtaactattcggccggccgctacactggttaacgaaggcagacctcgtatcaagacctggcaagctgacactagtacgactctgagttctatcagaagtaaatacaaggtaaatcccattaaggtagatccgactatgtgggacacaatcaagaacgatgtgaaagatgatcggattctgattgaattcgacacacttaaggaaatggtgatccttgccgggaagtccgaggacgtgcagtctatcgaggtccaggtgagggaactcatcgaaagcaccacccaaaagattaaaagggaggagcagtcactaaaggaaaaaatgatcatctctccaggacgctatttcctgctctgtcactcgtcactcttggatcacctgttgactgaatgccctgagatcgaaatctgctatgatagagtgacccaacatctgtgcttgaagggcccctcggcagatgtgtataaagctaagtgtgagattcaggagaaggtatacactatggcccagaaaaacatccaggtgtccccagagatcttccaattcctgcagcaagtgaactggaaggaattctctaaatgcctttttatcgctcaaaagatcctggctctctatgaattggaaggcacaaccgtgctacttacctcttgcagttctgaggccctcctagaggcggaaaagcagatgctgtccgcgctgaactacaaacgcatagaggtcgagaacaaggaggtgctacatggtaagaaatggaaaggcctgacacacaacttactgaagaagcagaacagttcccctaataccgtcatcatcaatgagctcacgagcgagaccactgccgaggtgattattaccggatgtgtgaaggaggtaaacgaaacttacaagttgctattcaattttgttgagcaaaatatgaaaattgaaaggctggtggaagtgaagccttcactcgttatagactacttgaagacagaaaaaaagctgttttggccgaaaattaagaaggtgaacgtgcaggtctcctttaaccccgagaataaacagaaaggaattctcctgaccggctcaaagacggaggtcctgaaagcagttgatattgtgaaacaagtgtgggactctgtgtgcgtgaagtccgtccatacagataaaccaggtgccaaacagttttttcaggataaggctagattttaccaaagtgaaattaagcgactgtttggttgctatatcgagctacaggaaaatgaagttatgaaagaaggtggatcgcctgcaggacagaagtgcttttctaggacagtgctcgctccaggggtggtccttatcgtacagcaaggcgatctagctaggctcccagttgacgtggtcgtgaacgcttcaaatgaggacctcaagcactatggcggtctcgccgccgcgttgtccaaggctgccggccctgagctacaagccgactgtgatcagatcgtgaagagagaaggtagactgctccctgggaatgccacaatcagcaaggcggggaagcttccataccaccacgtaatccatgcggtcggaccaagatggtctggttacgaggctccaaggtgcgtctacttgctcaggagagctgtgcagttgagcttgtgcttggccgagaaatataaatatcgctccattgcgatacccgccatttcctctggcgtgttcggcttccctctcggaagatgtgtcgagactattgtgtctgctatcaaggagaatttccaattcaagaaggatggtcactgccttaaggagatctatttggtcgatgtaagcgagaagactgtcgaggctttcgctgaggctgtcaagacggtgttcaaagccactctaccagataccgccgcccccccggggctgccacccgccgcagccggaccagggaagactagctgggagaaggggtcattggtgagtcctggcggactgcaaatgctgttggtcaaagagggggtgcagaatgcaaagaccgacgtcgttgttaacagtgtaccccttgatctagttctgtcccgtgggccactgtcgaaaagcctgctggagaaggccggaccagaactgcaggaagaactcgatacagtgggacagggcgtggccgtgtccatgggaacagtattaaaaacttctagttggaacttggactgccgctacgttctgcatgtcgtggcccctgaatggagaaatggcagcacatccagtctcaaaattatggaagatattattagggaatgtatggagatcactgaaagcctcagtctaaaaagcatcgcattccctgccattggcacaggaaatttggggtttcctaagaacattttcgccgagttgatcatctccgaggtgttcaaattttccagcaagaatcagctaaagacattgcaggaggtgcacttcctactccaccccagcgatcacgaaaacatccaggctttctccgacgaatttgcgcgacgcgctaacggcaacctcgtatcagataagattccaaaggcaaaggatacgcagggattctacgggactgtctcatcacccgatagtggagtgtacgagatgaaaattggtagtataatatttcaagtggctagcggagacattaccaaagaggaggccgatgtaatcgttaactccaccagtaattcgttcaaccttaaggtgggagtatcaaaagcgatcttggaatgtgctggacagaatgttgaaagagaatgttcgcagcaggctcagcagagaaagaatgactacattattactgggggcggcttcctcaggtgcaagaacattatccacgttattggcgggaacgacgtcaaatcctctgtgtcgtctgtcctccaagagtgcgagaagaagaattatagctccatttgtttaccagccattggcaccgggaacgccaagcagcacccagataaagttgccgaagctatcatagatgcaatcgaagactttgttcagaaagggtcagcacaaagtgttaaaaaggtgaaggtggttattttcctccctcaggttctcgacgttttttatgccaatatgaagaagagagagggtacacagctctcctctcagcagtctgtgatgagcaaacttgcctcttttcttggtttcagcaaacagtctccacaaaagaaaaatcaccttgtcctcgaaaaaaagaccgaaagtgccaccttccgcgtctgcggagagaatgtcacttgcgtcgaatatgctatatcatggttgcaagacctgatcgagaaagaacagtgcccctatacctctgaagatgaatgtataaaggattttgatgagaaagaataccaggagctcaacgagctgcaaaagaagttgaatataaatatttccctcgaccacaagcggccactgatcaaggtccttggaatatcccgagacgtgatgcaggccagagacgagatcgaagcgatgattaaaagggtccgcctggctaaagagcaggagtctcgcgcagattgcatctcggagtttatcgaatggcaatataacgacaacaacacttcccattgtttcaataaaatgacaaaccttaagctcgaggatgcccgtagggagaaaaagaaaaccgttgatgtcaaaataaaccacagacattataccgtcaacctgaatacctacacggctacggacacgaagggtcactccctgagcgtacagagactgactaaatccaaggtggatatccccgcccattggagtgacatgaagcagcagaacttctgtgtagtagaactgttaccttccgatcctgagtacaacacggtggcatccaagtttaaccagacatgctctcatttcaggatcgagaagattgagcgcatacaaaatcctgacctttggaattcctaccaggcaaaaaaaaaaactatggatgccaaaaacggtcagacgatgaacgagaaacagctgtttcacggtaccgatgctggttccgtcccccacgtcaataggaacggttttaacaggtcctacgctggaaagaatgcagtggcatacggaaagggcacctattttgccgttaacgctaactactcagctaatgacacatattcccgacccgacgccaacggtcgcaagcacgtctattatgttcgagtcctcactggcatttatacccacggtaaccacagcctcatagtgccaccctcaaagaatccacagaaccccaccgacctttacgacacagtgaccgacaatgtacatcatccttctcttttcgtagcattctatgactaccaagcctaccccgagtacctaatcacattcagaaaatag

SEQ ID NO: 193760 - DNA, 5406 bp, Artificial Sequence
  derived and/or modified sequence
atggccgtgcccggcagcttccccctgctggtggagggcagctggggcccagatcctcccaagaacctgaatacaaagctgcagatgtactttcaaagccctaagagatccggtggaggcgagtgtgaagtgaggcaggaccccaggtcgcccagccgcttcttggtcttcttttacccagaagatgtgcggcagaaagtcttagagcggaagaaccatgagctagtctggcaaggtaaaggcacctttaagctgacagtgcagctccccgctacgcctgacgagatcgaccacgtgtttgaagaagagctcctcaccaaggagtcgaaaacaaaggaagatgtgaaagagcctgacgtgagtgaagagctggatacaaagctcccactggatggcgggctggataaaatggaggacatccccgaggaatgtgagaatattagctctctggtcgcgtttgagaacctgaaggccaacgttacagacattatgctaattttgctcgtggaaaacatctccggcctcagcaacgacgatttccaggttgaaattataagggactttgacgtggctgtcgtgacattccagaagcacattgatacgataagattcgttgatgattgtacaaagcaccattctatcaaacaactgcagctatcaccaagactgctggaggttacaaacacaatccgggtcgagaatctgcccccgggtgcagacgactactctctcaaattatttttcgaaaatccatataatggaggcgggagagtggctaacgtggagtactttcccgaggaaagctccgcgcttatagagttctttgatagaaaggtgttggatacgatcatggccactaagttagattttaacaaaatgcctctgtccgtctttccctactatgcgtctcttggaacggcactgtatggcaaggaaaagcccctgatcaaactcccggcaccctttgaagaaagcctcgaccttcccttgtggaagttcctgcaaaaaaaaaatcacctcatagaagaaataaacgacgaaatgcgtcgatgccactgtgagttaacttggtcccagctttcaggcaaagtgactatccgccccgcggcaaccctggtgaatgagggtcgaccaagaatcaaaacttggcaagccgatacctccactacgctttcttctattaggtccaagtataaggtgaaccctatcaaagtagatcctaccatgtgggacacaattaagaatgacgttaaagatgaccgtattcttattgaatttgacactcttaaagagatggtgatccttgctggcaaatcagaagacgttcagagtatcgaagtccaggtgagagaattgatagagtcaactacacagaaaattaaaagggaggaacagtcgctgaaagagaaaatgattatttcgcccggacggtatttcctcctctgtcattcttccctactggaccatcttcttacggagtgccctgagatagaaatttgctatgaccgagtcacccaacacttgtgcctcaaagggccttccgcagatgtttacaaggcaaagtgtgagatccaagagaaagtgtacacgatggcccagaagaatatccaagtgtcacccgagatcttccagttcctgcaacaggtgaattggaaagaattctcgaagtgtttgtttattgcccagaaaatactggccctgtacgaactcgagggaaccaccgtgctgcttactagctgctcctctgaggcccttttagaagcagagaaacagatgctctccgcacttaactataagcgcattgaggtggaaaacaaggaagttctgcacggcaagaagtggaagggccttacccacaacctgttgaagaaacagaatagctcacccaacactgtgattattaatgagctcacctctgaaacgaccgcagaagtaatcatcaccggttgtgttaaagaagttaacgaaacatataaactcctctttaacttcgtagagcagaatatgaagattgaacggctggtcgaagtgaagccctcccttgttatcgattatctgaaaacggaaaagaaactgttttggcctaaaatcaaaaaggtcaacgttcaagtgagctttaacccagagaacaaacagaagggaatcctcctaactgggagcaaaacagaggtgttgaaggccgtggacatcgtgaaacaggtttgggacagcgtgtgtgttaaatccgtgcacactgacaagcccggagcaaagcagttcttccaggataaagcacgattttatcagagcgagattaaacggctgtttggctgctacatcgaacttcaagagaatgaggtgatgaaggaaggcgggagccccgctggccagaaatgtttcagccggactgttttagcaccaggcgttgttctgatcgtgcagcaaggggatctggcccggctgcctgtggacgtcgtagtgaacgcatcaaacgaagacctgaagcactatggtggcctcgcggccgccctgtcaaaggcagctggcccagaactgcaggcagattgtgaccagatagtgaagcgtgaggggcgtctcctgcccggaaatgccacgatctcaaaagcgggcaaattaccataccatcatgttattcacgctgtcggccctcgctggtcaggttatgaggcccccaggtgcgtgtatttacttaggagagcagtccagctcagcctctgccttgccgaaaaatataaatacaggtccatcgctatccctgctatttcaagcggagtcttcggcttcccgctggggcgatgcgtggaaaccatagtttcagccatcaaggagaactttcagttcaaaaaggatgggcactgcctcaaggagatttatctggtagatgtgtctgagaaaacagtagaggcctttgcagaggccgttaagacggtgtttaaagccactctcccagatactgcggcgcctccgggactcccgccagcggctgctggccctgggaagacctcatgggaaaaagggtcactagtgtctccgggtggcctccagatgctgcttgtcaaggagggtgtgcagaatgcaaaaacggatgtggtcgttaacagtgttccactggatctggtgttgtctagagggcccctgagtaaatccttgttggagaaggcgggacctgaactgcaagaagaactggacactgtgggccaaggtgttgcagtgagcatgggtaccgtactgaagacatcatcatggaacctcgactgcaggtatgtactacacgtcgtggcgcctgagtggcgcaatggctccacctcttcattgaagatcatggaagacataatccgcgagtgtatggagatcacagagagcctgtcattgaaaagtattgctttccctgcaatcggcactgggaatctgggcttcccaaaaaacatctttgctgaactcataatatctgaggtcttcaagttttcttcaaagaaccagttaaaaaccctccaggaagtgcattttcttcttcaccccagtgaccatgaaaatattcaggcatttagtgacgagtttgctcggcgggcaaatggcaacctcgtgagtgacaaaatccctaaggcgaaggatacccaggggttttatggcactgtgtcttccccggattccggcgtttacgaaatgaagatagggtcaatcattttccaagtcgccagcggggatattacaaaagaggaggccgacgtgattgtcaactctacgagtaatagctttaacctcaaggctggtgtttcaaaagccatcctggagtgcgccggccagaatgtggaaagggaatgctcacaacaggctcagcagcggaaaaatgactacatcattacaggggggggcttcctgaggtgtaaaaacatcattcatgtgatcggcgggaacgacgtgaaatcttccgtctcctcggttctgcaagaatgcgagaaaaaaaactactcttcaatctgtttaccggccatcggaacaggcaatgccaagcagcatccagataaagtcgctgaggccatcattgatgccatcgaggacttcgtgcaaaagggttccgcacagtctgtgaagaaagttaaggtagtaatttttctgccccaagtcctggacgtattttacgctaacatgaaaaagagggaaggaacccagctctcaagtcaacaatccgttatgagcaaacttgcatcttttctgggtttctctaagcagtctccccaaaagaagaatcatctggtactcgaaaaaaaaaccgaaagtgcaaccttcagagtatgtggggagaacgtgacctgcgtcgagtacgctatctcttggctccaggatctcatcgaaaaagaacagtgcccgtacaccagcgaggacgagtgtattaaggactttgatgagaaggagtatcaggaactgaacgagctgcaaaagaagctgaacattaatattagcctggaccataagagacccctgataaaggtgttgggtatctctagggatgtgatgcaggcccgggacgagattgaagccatgatcaagagggtccggcttgctaaggaacaggaaagtcgggcagattgcattagcgaatttatcgagtggcagtacaatgataacaatacatctcattgctttaacaagatgacgaacttgaaacttgaagacgcccgaagagagaaaaagaaaacggtcgatgtcaagatcaaccatagacattatacggttaaccttaacacatacaccgccaccgacaccaagggtcacagtttatcagttcagaggctcaccaaaagcaaagtagatatcccggctcactggtcagatatgaaacaacagaacttttgtgttgtggagctgctgccgtccgatcctgagtataatacagtggcatctaagtttaatcaaacttgtagccatttccgcattgaaaagatagaaagaatacagaacccggacctgtggaatagctaccaggctaagaaaaagacaatggacgccaaaaacgggcaaacaatgaacgaaaaacaactgttccacgggacagacgcaggctccgtccctcacgtcaatcgaaacgggtttaacaggtcctatgctggcaagaacgcagtcgcatatgggaaaggcacttacttcgctgtaaacgcaaactactctgccaatgatacttacagccgccccgacgcgaacggaaggaaacacgtatactatgttcgcgtactcacagggatctacacccacggaaaccactccctgattgtgcctccatctaagaaccctcagaaccccaccgatttatacgacaccgtcacagacaatgtgcatcaccccagcttatttgtcgctttttacgattatcaggcctaccccgaatacctgattacttttaggaaatag

SEQ ID NO: 193761 - DNA, 5099 bp, Artificial Sequence
  derived and/or modified sequence
aaagttagcggcccggagttggcgcggcccctgcagtccggcggagagcggagctgaggatggctgtgcccggctccttcccgctgctggtcgagggctcctggggccccgaccccccgaagaacttgaacaccaagttgcagatgtacttccagagcccgaagaggtcgggaggcggcgagtgtgaggtccgccaggatcccaggagcccatcccgcttcctggtgttcttctacccggaggacgttcggcagaaggttctggagagaaaaaatcatgagttggtatggcaaggaaaaggaacattcaagttaactgtccagttacctgcaaccccagatgaaatcgatcatgtctttgaagaggaacttctaacaaaagaatccaagaccaaagaagatgttaaagaaccagatgtgtcagaagaattggatacaaaactccctcttgatggtggattagacaaaatggaagatatcccagaggaatgtgaaaatatttcctctttggtggcatttgaaaacctcaaggcaaatgtgactgacataatgctaatcttgttagtggagaacataagtggcctgtctaatgatgactttcaagtggaaataataagagattttgatgttgctgttgttacctttcaaaagcacatagatactataagatttgttgatgattgtaccaagcaccattcaattaaacaacttcagctttctccaagacttctggaagtgacaaacacaatcagggttgaaaacctgccacctggtgctgatgactacagtttaaaacttttctttgaaaatccctataatggagggggaagagttgccaatgttgaatattttcctgaagagagttcagctctgattgaattttttgacagaaaagtgttagacaccatcatggccacaaaactcgacttcaataaaatgccactttctgtgttcccatactatgcctcattgggcacagccttgtatggaaaggagaagcctctgatcaagcttccagcaccatttgaagagtcactagatcttcccttatggaagttcttacagaaaaagaatcacctcattgaggagataaacgatgaaatgaggcgttgtcactgtgagctcacgtggtcccaactcagtggtaaagttaccatcagaccagcagccaccttagtcaatgaaggaagaccgagaatcaagacctggcaggcagatacttccacaacactctctagcatcaggtctaaatataaagtcaacccaattaaagtggatccaacaatgtgggacaccataaaaaatgatgtgaaagatgacaggattttgattgagtttgatacacttaaggagatggtaatcttagcagggaaatcagaggatgtccaaagcattgaggtacaagtcagggagttaatagaaagcactactcaaaaaattaaaagggaagagcaaagtttgaaggaaaaaatgatcatttctccaggcaggtattttcttttgtgtcacagcagtctactggaccatttactcacggagtgcccagagatagagatttgttacgatagagtcactcaacacttgtgcttgaaaggacctagtgcagatgtgtataaagcaaagtgtgaaatccaggaaaaggtgtacaccatggctcagaaaaacattcaggtttctcctgagatttttcagtttttgcaacaggtaaactggaaagaattctctaagtgtcttttcatagcacagaagattcttgcactttatgagctagagggtacaactgttctcttaaccagctgttcttctgaagccctgttagaagcagaaaagcaaatgctcagtgccttaaattataagcgcattgaagttgagaacaaagaagttcttcatggcaagaaatggaaagggctcactcacaatttgcttaagaaacaaaattcctccccaaacactgtaatcatcaatgagttaacttcagaaaccacagctgaagtcatcattacaggctgtgtaaaagaagtaaatgaaacctataaattgctttttaacttcgttgaacaaaacatgaaaatagagagactggttgaagtaaagccttccttagttattgactatttaaagacagaaaagaagctattctggccaaagataaagaaggtaaatgtgcaggtaagtttcaatcctgagaacaaacaaaaaggcattttactaactggctcaaagaccgaagtactgaaggcagtggacattgtcaagcaagtctgggattcagtctgtgttaaaagtgtccatactgataagccaggagccaagcagttcttccaggataaagcacggttttatcaaagtgagatcaaacggttgtttggttgttacattgaactacaggagaatgaagtaatgaaggagggaggcagccccgctgggcagaagtgcttctctcggacagtcttggcccctggcgttgtgctgattgtgcagcagggtgacttggcacggcttcctgtcgatgtggtggtgaatgcatctaatgaggaccttaagcattatggtggcctggccgctgcgctctcaaaagcagctggccctgagctccaggccgactgtgaccagatagtgaagagagagggcagactcctaccgggcaatgccaccatctccaaggcaggaaagctgccctaccaccacgtgatccatgcagtggggccccgctggagcggatatgaggccccgaggtgtgtgtacctattaaggagagctgtgcaactcagtctctgtctagccgaaaaatacaagtaccgatccatagccatcccagctattagttctggagtctttggctttcccttaggccgatgcgtggagaccattgtttctgccatcaaggaaaacttccaattcaagaaggatggacactgcttgaaagaaatctaccttgtggatgtatctgagaagactgttgaggcctttgcagaagctgtgaaaactgtatttaaagccaccctgccagatacagctgccccgccaggtttaccaccagcagcagcggggcctgggaaaacatcatgggaaaaaggaagcctggtgtccccgggaggcctgcagatgctgttggtgaaagagggtgtgcagaatgctaagaccgatgttgttgtcaactccgttcccttggatctcgtgcttagtagagggcctctttctaagtccctcttggaaaaagctggaccagagctccaggaggaattggacacagttggacaaggggtggctgtcagcatgggcacagtgctcaaaaccagcagctggaatctggactgtcgctatgtgcttcacgtggtagctccggagtggagaaatggtagcacatcttcactcaagataatggaagacataatcagagaatgtatggagatcactgagagcttgtccttaaaatcaattgcatttccagcaataggaacaggaaacttgggatttcctaaaaacatattcgctgaattaatcatttcagaggtgttcaaatttagtagcaagaatcagctgaaaactttacaagaggttcactttctgctgcacccgagtgatcatgaaaatattcaggcattttcagatgaatttgccagaagggctaatggaaatctcgtcagtgacaaaattccgaaggctaaagatacacaaggtttttatgggactgtttctagccctgattcaggtgtgtatgaaatgaagattggctccatcatcttccaggtggcttctggagatatcacgaaagaagaggcagatgtgattgtaaattcaacatcaaactcattcaatctcaaagcaggggtctccaaagcaattttagaatgtgctggacaaaatgtagaaagggaatgttctcagcaagctcagcagcgcaaaaatgattatataatcaccggaggtggatttttgaggtgcaagaatatcattcatgtaattggtggaaatgatgtcaagagttcagtttcctctgttttgcaggagtgtgaaaaaaaaaattactcatccatttgcctcccagccattgggacaggaaatgccaaacaacacccagataaggttgctgaagccataattgatgccattgaagactttgtccagaaaggatcagcccagtctgtgaaaaaagttaaagttgttatctttctgcctcaagtactggatgtgttttatgccaacatgaagaaaagagaagggactcagctttcttcccaacagtctgtgatgtctaaacttgcatcatttttgggcttttcaaagcaatctccccaaaaaaagaatcatttggttttggaaaagaaaacagaatcagcaacttttcgggtgtgtggtgaaaatgtcacgtgtgtggaatatgctatctcctggctacaagacctgattgaaaaagaacagtgtccttacaccagtgaagatgagtgcatcaaagactttgatgaaaaggagtatcaggagttgaatgagctgcagaagaagttaaatattaacatttccctggaccataagagacctttgattaaggttttgggaattagcagagatgtgatgcaggctagagatgaaattgaggcgatgatcaagagagttcgattggccaaagaacaggaatcccgggcagattgtatcagtgagtttatagaatggcagtataatgacaataacacttctcattgttttaacaaaatgaccaatctgaaattagaggatgcaaggagagaaaagaaaaaaacagttgatgtcaaaattaatcatcggcactacacagtgaacttgaacacatacactgccacagacacaaagggccacagtttatctgttcagcgcctcacgaaatccaaagttgacatccctgcacactggagtgatatgaagcagcagaatttctgtgtggtggagctgctgcctagtgatcctgagtacaacacggtggcaagcaagtttaatcagacctgctcacacttcagaatagagaaggtgaatgtgatgattcgtgcctgtagtcccagctattgggaggctgaggtggaaggattgcatgagcccaggagtttgacgccagtctgggtaacatag

SEQ ID NO: 193762 - DNA, 4636 bp, Artificial Sequence
  derived and/or modified sequence
atgtatctgagaagactgttgaggcctttgcagatgctgttggtgaaagagggtgtgcagaatgctaagaccgatgttgttgtcaactccgttcccttggatctcgtgcttagtagagggcctctttctaagtccctcttggaaaaagctggaccagagctccaggaggaattggacacagttggacaaggggtggctgtcagcatgggcacagtgctcaaaaccagcagctggaatctggactgtcgctatgtgcttcacgtggtagctccggagtggagaaatggtagcacatcttcactcaagataatggaagacataatcagagaatgtatggagatcactgagagcttgtccttaaaatcaattgcatttccagcaataggaacaggaaacttgggatttcctaaaaacatattcgctgaattaatcatttcagaggtgttcaaatttagtagcaagaatcagctgaaaactttacaagaggttcactttctgctgcacccgagtgatcatgaaaatattcaggcattttcagatgaatttgccagaagggctaatggaaatctcgtcagtgacaaaattccgaaggctaaagatacacaaggtttttatgggactgtttctagccctgattcaggtgtgtatgaaatgaagattggctccatcatcttccaggtggcttctggagatatcacgaaagaagaggcagatgtgattgtaaattcaacatcaaactcattcaatctcaaagcaggggtctccaaagcaattttagaatgtgctggacaaaatgtagaaagggaatgttctcagcaagctcagcagcgcaaaaatgattatataatcaccggaggtggatttttgaggtgcaagaatatcattcatgtaattggtggaaatgatgtcaagagttcagtttcctctgttttgcaggagtgtgaaaaaaaaaattactcatccatttgcctcccagccattgggacaggaaatgccaaacaacacccagataaggttgctgaagccataattgatgccattgaagactttgtccagaaaggatcagcccagtctgtgaaaaaagttaaagttgttatctttctgcctcaagtactggatgtgttttatgccaacatgaagaaaagagaagggactcagctttcttcccaacagtctgtgatgtctaaacttgcatcatttttgggcttttcaaagcaatctccccaaaaaaagaatcatttggttttggaaaagaaaacagaatcagcaacttttcgggtgtgtggtgaaaatgtcacgtgtgtggaatatgctatctcctggctacaagacctgattgaaaaagaacagtgtccttacaccagtgaagatgagtgcatcaaagactttgatgaaaaggagtatcaggagttgaatgagctgcagaagaagttaaatattaacatttccctggaccataagagacctttgattaaggttttgggaattagcagagatgtgatgcaggctagagatgaaattgaggcgatgatcaagagagttcgattggccaaagaacaggaatcccgggcagattgtatcagtgagtttatagaatggcagtataatgacaataacacttctcattgttttaacaaaatgaccaatctgaaattagaggatgcaaggagagaaaagaaaaaaacagttgatgtcaaaattaatcatcggcactacacagtgaacttgaacacatacactgccacagacacaaagggccacagtttatctgttcagcgcctcacgaaatccaaagttgacatccctgcacactggagtgatatgaagcagcagaatttctgtgtggtggagctgctgcctagtgatcctgagtacaacacggtggcaagcaagtttaatcagacctgctcacacttcagaatagagaagattgagaggatccagaatccagatctctggaatagctaccaggcaaagaaaaaaactatggatgccaagaatggccagacaatgaatgagaagcaactcttccatgggacagatgccggctccgtgccacacgtcaatcgaaatggctttaaccgcagctatgccggaaagaatgctgtggcatatggaaagggaacctattttgctgtcaatgccaattattctgccaatgatacgtactccagaccagatgcaaatgggagaaagcatgtgtattatgtgcgagtacttactggaatctatacacatggaaatcattcattaattgtgcctccttcaaagaaccctcaaaatcctactgacctgtatgacactgtcacagataatgtgcaccatccaagtttatttgtggcattttatgactaccaagcatacccagagtaccttattacgtttagaaaataacactttggtatccttcccacaaaattattctccatttgtacatatctagttgtaaaacaagttttagcttttttttttaattcctcttaacagatttttctaatatccaaggatcattctttgtcgctgaagtcagtctttcttcagcttccctttcataatggaaatgaacttattatcttgagagcaaataacttggaaaatttaaatgagataatgcagttgcaactgtgtgtccacaagtatggacatcaaatctgtgggaaaagaacaggtttgtattttcaggaaggagagaataacagtcttatagacagagggcacagctaagcacagctgccactgcaggagacaggccccatgtcaggatgccatagtgctgtggggagcacagtattacccagtgggtagggcttctgtcttccctgggagcagggatggtatcttagtcaatttttttcccttgagatgaggtctgtgcctgatgtacaacggatactccataaatgtttgacaaaccaacgaagaatgaaaaaaagcctagtcagactcccatccaaagtaggaactatctctttaacattcttgactcactatcactttacctcaaattgaacagattccatgacggaacttcattcttcacaaactagccagtgacatgtgggacagctctggccagggctctgggactgcagtgtacttgcgctctgcacggtccaggagctgtgatgtggctgtggtctaggggaatcctgcctgccccatggagttgcgcagcacaaccctggctccaattgccagaaggctctttttaatgctgaaccaaaatgtgcctttttttttttttttttgagatggagtttcactcttgttgcccaggctggagtgcaatggcgcgatctcagctcactgcagccactgcctcccaggttcaagtgattctcctgcctcagcctcccgagtagctgggattacaggcatgcgctaacacacccagctaattttgtatttttagtagagacgaggtttctccatgttcgacaggctggtctcgaactcccacctcagcctcccaaactgctgggattacaggtgtgagccaccgtgaccagccaatgtgccttcttatagtgtctactcattggtctttgttctgcccagtgataacaatgggataacgcctgctacacatcttcattgtgaaacccttcccctgtgctgagattaaatgaactctaagattattaaatagtatattttccttgacagcctagcgtttgatgattttaaagccttatgtataaataaaccaaaggaagtaagcagtcatattgctaatttgctaactcctatctattgaatggtgaagttttaaaaatttccccaggtaagtttaagattcaaacaccatctattgagcacctacattgtgtgccaggtagtaaaataggtgctttcatacacattgtctcaattcctgtgaggtcagaattatctctgcatttgaaacttgaggaaacatgctcagagtgcaagaagcttccttgcctgagatcacctagaaaggaaccctcagagccggcaactgaatcttggtccctgtgatgtcaagcccattgctctcccactgcagaacatggcctctagattaatgccaccgattcaggaacacctccgacagtcttgaaatacccccatgttgccttgtttgttttttccttctggcttcttctattacagtctcttcattggaagctctgtaggccaaggccagagctgatactgacacggagccaatgcagatagcacatcagatgctaggggtcgctgggaggattaagggacttaatctgctaggaacacctgtacttgaagtggaggaggctagggggccacagttgctgcttcattaacatagaggttttggatttttttctcttgtggtttgttttttaagtggattggcagactccttgttgcttaagagtggctttctaggcaggccactggcatctgaattcatcattgacaataaatgtaagaaattggaataaaaaagagagacctgctgttattcgcttttgttctccagtgatttgattaactcagggcaaggctgaatatcagagtgtatcgcactgaagaataataatccattcagtaatgttatagttatcctcaatctaaatatgtcaactgtcattttgctacttttcaaataaaatacttgaaaactgtc

SEQ ID NO: 193763 - DNA, 7464 bp, Artificial Sequence
  derived and/or modified sequence
aaagttagcggcccggagttggcgcggcccctgcagtccggcggagagcggagctgaggatggctgtgcccggctccttcccgctgctggtcgagggctcctggggccccgaccccccgaagaacttgaacaccaagttgcagatgtacttccagagcccgaagaggtcgggaggcggcgagtgtgaggtccgccaggatcccaggagcccatcccgcttcctggtgttcttctacccggaggacgttcggcagaaggttctggagagaaaaaatcatgagttggtatggcaaggaaaaggaacattcaagttaactgtccagttacctgcaaccccagatgaaatcgatcatgtctttgaagaggaacttctaacaaaagaatccaagaccaaagaagatgttaaagaaccagatactataagatttgttgatgattgtaccaagcaccattcaattaaacaacttcagctttctccaagacttctggaagtgacaaacacaatcagggttgaaaacctgccacctggtgctgatgactacagtttaaaacttttctttgaaaatccctataatggagggggaagagttgccaatgttgaatattttcctgaagagagttcagctctgattgaattttttgacagaaaagtgttagacaccatcatggccacaaaactcgacttcaataaaatgccactttctgtgttcccatactatgcctcattgggcacagccttgtatggaaaggagaagcctctgatcaagcttccagcaccatttgaagagtcactagatcttcccttatggaagttcttacagaaaaagaatcacctcattgaggagataaacgatgaaatgaggcgttgtcactgtgagctcacgtggtcccaactcagtggtaaagttaccatcagaccagcagccaccttagtcaatgaaggaagaccgagaatcaagacctggcaggcagatacttccacaacactctctagcatcaggtctaaatataaagtcaacccaattaaagtggatccaacaatgtgggacaccataaaaaatgatgtgaaagatgacaggattttgattgagtttgatacacttaaggagatggtaatcttagcagggaaatcagaggatgtccaaagcattgaggtacaagtcagggagttaatagaaagcactactcaaaaaattaaaagggaagagcaaagtttgaaggaaaaaatgatcatttctccaggcaggtattttcttttgtgtcacagcagtctactggaccatttactcacggagtgcccagagatagagatttgttacgatagagtcactcaacacttgtgcttgaaaggacctagtgcagatgtgtataaagcaaagtgtgaaatccaggaaaaggtgtacaccatggctcagaaaaacattcaggtttctcctgagatttttcagtttttgcaacaggtaaactggaaagaattctctaagtgtcttttcatagcacagaagattcttgcactttatgagctagagggtacaactgttctcttaaccagctgttcttctgaagccctgttagaagcagaaaagcaaatgctcagtgccttaaattataagcgcattgaagttgagaacaaagaagttcttcatggcaagaaatggaaagggctcactcacaatttgcttaagaaacaaaattcctccccaaacactgtaatcatcaatgagttaacttcagaaaccacagctgaagtcatcattacaggctgtgtaaaagaagtaaatgaaacctataaattgctttttaacttcgttgaacaaaacatgaaaatagagagactggttgaagtaaagccttccttagttattgactatttaaagacagaaaagaagctattctggccaaagataaagaaggtaaatgtgcaggtaagtttcaatcctgagaacaaacaaaaaggcattttactaactggctcaaagaccgaagtactgaaggcagtggacattgtcaagcaagtctgggattcagtctgtgttaaaagtgtccatactgataagccaggagccaagcagttcttccaggataaagcacggttttatcaaagtgagatcaaacggttgtttggttgttacattgaactacaggagaatgaagtaatgaaggagggaggcagccccgctgggcagaagtgcttctctcggacagtcttggcccctggcgttgtgctgattgtgcagcagggtgacttggcacggcttcctgtcgatgtggtggtgaatgcatctaatgaggaccttaagcattatggtggcctggccgctgcgctctcaaaagcagctggccctgagctccaggccgactgtgaccagatagtgaagagagagggcagactcctaccgggcaatgccaccatctccaaggcaggaaagctgccctaccaccacgtgatccatgcagtggggccccgctggagcggatatgaggccccgaggtgtgtgtacctattaaggagagctgtgcaactcagtctctgtctagccgaaaaatacaagtaccgatccatagccatcccagctattagttctggagtctttggctttcccttaggccgatgcgtggagaccattgtttctgccatcaaggaaaacttccaattcaagaaggatggacactgcttgaaagaaatctaccttgtggatgtatctgagaagactgttgaggcctttgcagaagctgtgaaaactgtatttaaagccaccctgccagatacagctgccccgccaggtttaccaccagcagcagcggggcctgggaaaacatcatgggaaaaaggaagcctggtgtccccgggaggcctgcagatgctgttggtgaaagagggtgtgcagaatgctaagaccgatgttgttgtcaactccgttcccttggatctcgtgcttagtagagggcctctttctaagtccctcttggaaaaagctggaccagagctccaggaggaattggacacagttggacaaggggtggctgtcagcatgggcacagtgctcaaaaccagcagctggaatctggactgtcgctatgtgcttcacgtggtagctccggagtggagaaatggtagcacatcttcactcaagataatggaagacataatcagagaatgtatggagatcactgagagcttgtccttaaaatcaattgcatttccagcaataggaacaggaaacttgggatttcctaaaaacatattcgctgaattaatcatttcagaggtgttcaaatttagtagcaagaatcagctgaaaactttacaagaggttcactttctgctgcacccgagtgatcatgaaaatattcaggcattttcagatgaatttgccagaagggctaatggaaatctcgtcagtgacaaaattccgaaggctaaagatacacaaggtttttatgggactgtttctagccctgattcaggtgtgtatgaaatgaagattggctccatcatcttccaggtggcttctggagatatcacgaaagaagaggcagatgtgattgtaaattcaacatcaaactcattcaatctcaaagtaggggtctccaaagcaattttagaatgtgctggacaaaatgtagaaagggaatgttctcagcaagctcagcagcgcaaaaatgattatataatcaccggaggtggatttttgaggtgcaagaatatcattcatgtaattggtggaaatgatgtcaagagttcagtttcctctgttttgcaggagtgtgaaaaaaaaaattactcatccatttgcctcccagccattgggacaggaaatgccaaacaacacccagataaggttgctgaagccataattgatgccattgaagactttgtccagaaaggatcagcccagtctgtgaaaaaagttaaagttgttatctttctgcctcaagtactggatgtgttttatgccaacatgaagaaaagagaagggactcagctttcttcccaacagtctgtgatgtctaaacttgcatcatttttgggcttttcaaagcaatctccccaaaaaaagaatcatttggttttggaaaagaaaacagaatcagcaacttttcgggtgtgtggtgaaaatgtcacgtgtgtggaatatgctatctcctggctacaagacctgattgaaaaagaacagtgtccttacaccagtgaagatgagtgcatcaaagactttgatgaaaaggagtatcaggagttgaatgagctgcagaagaagttaaatattaacatttccctggaccataagagacctttgattaaggttttgggaattagcagagatgtgatgcaggctagagatgaaattgaggcgatgatcaagagagttcgattggccaaagaacaggaatcccgggcagattgtatcagtgagtttatagaatggcagtataatgacaataacacttctcattgttttaacaaaatgaccaatctgaaattagaggatgcaaggagagaaaagaaaaaaacagttgatgtcaaaattaatcatcggcactacacagtgaacttgaacacatacactgccacagacacaaagggccacagtttatctgttcagcgcctcacgaaatccaaagttgacatccctgcacactggagtgatatgaagcagcagaatttctgtgtggtggagctgctgcctagtgatcctgagtacaacacggtggcaagcaagtttaatcagacctgctcacacttcagaatagagaagattgagaggatccagaatccagatctctggaatagctaccaggcaaagaaaaaaactatggatgccaagaatggccagacaatgaatgagaagcaactcttccatgggacagatgccggctccgtgccacacgtcaatcgaaatggctttaaccgcagctatgccggaaagaatgctgtggcatatggaaagggaacctattttgctgtcaatgccaattattctgccaatgatacgtactccagaccagatgcaaatgggagaaagcatgtgtattatgtgcgagtacttactggaatctatacacatggaaatcattcattaattgtgcctccttcaaagaaccctcaaaatcctactgacctgtatgacactgtcacagataatgtgcaccatccaagtttatttgtggcattttatgactaccaagcatacccagagtaccttattacgtttagaaaataacactttggtatccttcccacaaaattattctccatttgtacatatctagttgtaaaacaagttttagcttttttttttaattcctcttaacagatttttctaatatccaaggatcattctttgtcgctgaagtcagtctttcttcagcttccctttcataatggaaatgaacttattatcttgagagcaaataacttggaaaatttaaatgagataatgcagttgcaactgtgtgtccacaagtatggacatcaaatctgtgggaaaagaacaggtttgtattttcaggaaggagagaataacagtcttatagacagagggcacagctaagcacagctgccactgcaggagacaggccccatgtcaggatgccatagtgctgtggggagcacagtattacccagtgggtagggcttctgtcttccctgggagcagggatggtatcttagtcaatttttttcccttgagatgaggtctgtgcctgatgtacaacggatactccataaatgtttgacaaaccaacgaagaatgaaaaaaagcctagtcagactcccatccaaagtaggaactatctctttaacattcttgactcactatcactttacctcaaattgaacagattccatgacggaacttcattcttcacaaactagccagtgacatgtgggacagctctggccagggctctgggactgcagtgtacttgcgctctgcacggtccaggagctgtgatgtggctgtggtctaggggaatcctgcctgccccatggagttgcgcagcacaaccctggctccaattgccagaaggctctttttaatgctgaaccaaaatgtgcctttttttttttttttttgagatggagtttcactcttgttgcccaggctggagtgcaatggcgcgatctcagctcactgcagccactgcctcccaggttcaagtgattctcctgcctcagcctcccgagtagctgggattacaggcatgcgctaacacacccagctaattttgtatttttagtagagacgaggtttctccatgttcgacaggctggtctcgaactcccacctcagcctcccaaactgctgggattacaggtgtgagccaccgtgaccagccaatgtgccttcttatagtgtctactcattggtctttgttctgcccagtgataacaatgggataacgcctgctacacatcttcattgtgaaacccttcccctgtgctgagattaaatgaactctaagattattaaatagtatattttccttgacagcctagcgtttgatgattttaaagccttatgtataaataaaccaaaggaagtaagcagtcatattgctaatttgctaactcctatctattgaatggtgaagttttaaaaatttccccaggtaagtttaagattcaaacaccatctattgagcacctacattgtgtgccaggtagtaaaataggtgctttcatacacattgtctcaattcctgtgaggtcagaattatctctgcatttgaaacttgaggaaacatgctcagagtgcaagaagcttccttgcctgagatcacctagaaaggaaccctcagagccggcaactgaatcttggtccctgtgatgtcaagcccattgctctcccactgcagaacatggcctctagattaatgccaccgattcaggaacacctccgacagtcttgaaatacccccatgttgccttgtttgttttttccttctggcttcttctattacagtctcttcattggaagctctgtaggccaaggccagagctgatactgacacggagccaatgcagatagcacatcagatgctaggggtcgctgggaggattaagggacttaatctgctaggaacacctgtacttgaagtggaggaggctagggggccacagttgctgcttcattaacatagaggttttggatttttttctcttgtggtttgttttttaagtggattggcagactccttgttgcttaagagtggctttctaggcaggccactggcatctgaattcatcattgacaataaatgtaagaaattggaataaaaaagagagacctgctgttattcgcttttgttctccagtgatttgattaactcagggcaaggctgaatatcagagtgtatcgcactgaagaataataatccattcagtaatgttatagttatcctcaatctaaatatgtcaactgtcattttgctacttttcaaataaaatacttgaaaactgtc

SEQ ID NO: 193764 - DNA, 7915 bp, Artificial Sequence
  derived and/or modified sequence
ccgtggagcacaggtgaactgaggccgccttcccggggcgccgctggccagccccaaagggttactttggccttggctgtgggccgaatgcgaaggtggggaggtgggcgggggatgactctgccattcctgggtccgctgtgttaggctgaaggcaaaaggaaaccaaggcctgggagttttccaggaaacgaaagcgaaagagtcaaagttagcggcccggagttggcgcggcccctgcagtccggcggagagcggagctgaggatggctgtgcccggctccttcccgctgctggtcgagggctcctggggccccgaccccccgaagaacttgaacaccaagttgcagatgtacttccagagcccgaagaggtcgggaggcggcgagtgtgaggtccgccaggatcccaggagcccatcccgcttcctggtgttcttctacccggaggacgttcggcagaaggttctggagagaaaaaatcatgagttggtatggcaaggaaaaggaacattcaagttaactgtccagttacctgcaaccccagatgaaatcgatcatgtctttgaagaggaacttctaacaaaagaatccaagaccaaagaagatgttaaagaaccagatgtgtcagaagaattggatacaaaactccctcttgatggtggattagacaaaatggaagatatcccagaggaatgtgaaaatatttcctctttggtggcatttgaaaacctcaaggcaaatgtgactgacataatgctaatcttgttagtggagaacataagtggcctgtctaatgatgactttcaagtggaaataataagagattttgatgttgctgttgttacctttcaaaagcacatagatactataagatttgttgatgattgtaccaagcaccattcaattaaacaacttcagctttctccaagacttctggaagtgacaaacacaatcagggttgaaaacctgccacctggtgctgatgactacagtttaaaacttttctttgaaaatccctataatggagggggaagagttgccaatgttgaatattttcctgaagagagttcagctctgattgaattttttgacagaaaagtgttagacaccatcatggccacaaaactcgacttcaataaaatgccactttctgtgttcccatactatgcctcattgggcacagccttgtatggaaaggagaagcctctgatcaagcttccagcaccatttgaagagtcactagatcttcccttatggaagttcttacagaaaaagaatcacctcattgaggagataaacgatgaaatgaggcgttgtcactgtgagctcacgtggtcccaactcagtggtaaagttaccatcagaccagcagccaccttagtcaatgaaggaagaccgagaatcaagacctggcaggcagatacttccacaacactctctagcatcaggtctaaatataaagtcaacccaattaaagtggatccaacaatgtgggacaccataaaaaatgatgtgaaagatgacaggattttgattgagtttgatacacttaaggagatggtaatcttagcagggaaatcagaggatgtccaaagcattgaggtacaagtcagggagttaatagaaagcactactcaaaaaattaaaagggaagagcaaagtttgaaggaaaaaatgatcatttctccaggcaggtattttcttttgtgtcacagcagtctactggaccatttactcacggagtgcccagagatagagatttgttacgatagagtcactcaacacttgtgcttgaaaggacctagtgcagatgtgtataaagcaaagtgtgaaatccaggaaaaggtgtacaccatggctcagaaaaacattcaggtttctcctgagatttttcagtttttgcaacaggtaaactggaaagaattctctaagtgtcttttcatagcacagaagattcttgcactttatgagctagagggtacaactgttctcttaaccagctgttcttctgaagccctgttagaagcagaaaagcaaatgctcagtgccttaaattataagcgcattgaagttgagaacaaagaagttcttcatggcaagaaatggaaagggctcactcacaatttgcttaagaaacaaaattcctccccaaacactgtaatcatcaatgagttaacttcagaaaccacagctgaagtcatcattacaggctgtgtaaaagaagtaaatgaaacctataaattgctttttaacttcgttgaacaaaacatgaaaatagagagactggttgaagtaaagccttccttagttattgactatttaaagacagaaaagaagctattctggccaaagataaagaaggtaaatgtgcaggtaagtttcaatcctgagaacaaacaaaaaggcattttactaactggctcaaagaccgaagtactgaaggcagtggacattgtcaagcaagtctgggattcagtctgtgttaaaagtgtccatactgataagccaggagccaagcagttcttccaggataaagcacggttttatcaaagtgagatcaaacggttgtttggttgttacattgaactacaggagaatgaagtaatgaaggagggaggcagccccgctgggcagaagtgcttctctcggacagtcttggcccctggcgttgtgctgattgtgcagcagggtgacttggcacggcttcctgtcgatgtggtggtgaatgcatctaatgaggaccttaagcattatggtggcctggccgctgcgctctcaaaagcagctggccctgagctccaggccgactgtgaccagatagtgaagagagagggcagactcctaccgggcaatgccaccatctccaaggcaggaaagctgccctaccaccacgtgatccatgcagtggggccccgctggagcggatatgaggccccgaggtgtgtgtacctattaaggagagctgtgcaactcagtctctgtctagccgaaaaatacaagtaccgatccatagccatcccagctattagttctggagtctttggctttcccttaggccgatgcgtggagaccattgtttctgccatcaaggaaaacttccaattcaagaaggatggacactgcttgaaagaaatctaccttgtggatgtatctgagaagactgttgaggcctttgcagaagctgtgaaaactgtatttaaagccaccctgccagatacagctgccccgccaggtttaccaccagcagcagcggggcctgggaaaacatcatgggaaaaaggaagcctggtgtccccgggaggcctgcagatgctgttggtgaaagagggtgtgcagaatgctaagaccgatgttgttgtcaactccgttcccttggatctcgtgcttagtagagggcctctttctaagtccctcttggaaaaagctggaccagagctccaggaggaattggacacagttggacaaggggtggctgtcagcatgggcacagtgctcaaaaccagcagctggaatctggactgtcgctatgtgcttcacgtggtagctccggagtggagaaatggtagcacatcttcactcaagataatggaagacataatcagagaatgtatggagatcactgagagcttgtccttaaaatcaattgcatttccagcaataggaacaggaaacttgggatttcctaaaaacatattcgctgaattaatcatttcagaggtgttcaaatttagtagcaagaatcagctgaaaactttacaagaggttcactttctgctgcacccgagtgatcatgaaaatattcaggcattttcagatgaatttgccagaagggctaatggaaatctcgtcagtgacaaaattccgaaggctaaagatacacaaggtttttatgggactgtttctagccctgattcaggtgtgtatgaaatgaagattggctccatcatcttccaggtggcttctggagatatcacgaaagaagaggcagatgtgattgtaaattcaacatcaaactcattcaatctcaaagcaggggtctccaaagcaattttagaatgtgctggacaaaatgtagaaagggaatgttctcagcaagctcagcagcgcaaaaatgattatataatcaccggaggtggatttttgaggtgcaagaatatcattcatgtaattggtggaaatgatgtcaagagttcagtttcctctgttttgcaggagtgtgaaaaaaaaaattactcatccatttgcctcccagccattgggacaggaaatgccaaacaacacccagataaggttgctgaagccataattgatgccattgaagactttgtccagaaaggatcagcccagtctgtgaaaaaagttaaagttgttatctttctgcctcaagtactggatgtgttttatgccaacatgaagaaaagagaagggactcagctttcttcccaacagtctgtgatgtctaaacttgcatcatttttgggcttttcaaagcaatctccccaaaaaaagaatcatttggttttggaaaagaaaacagaatcagcaacttttcgggtgtgtggtgaaaatgtcacgtgtgtggaatatgctatctcctggctacaagacctgattgaaaaagaacagtgtccttacaccagtgaagatgagtgcatcaaagactttgatgaaaaggagtatcaggagttgaatgagctgcagaagaagttaaatattaacatttccctggaccataagagacctttgattaaggttttgggaattagcagagatgtgatgcaggctagagatgaaattgaggcgatgatcaagagagttcgattggccaaagaacaggaatcccgggcagattgtatcagtgagtttatagaatggcagtataatgacaataacacttctcattgttttaacaaaatgaccaatctgaaattagaggatgcaaggagagaaaagaaaaaaacagttgatgtcaaaattaatcatcggcactacacagtgaacttgaacacatacactgccacagacacaaagggccacagtttatctgttcagcgcctcacgaaatccaaagttgacatccctgcacactggagtgatatgaagcagcagaatttctgtgtggtggagctgctgcctagtgatcctgagtacaacacggtggcaagcaagtttaatcagacctgctcacacttcagaatagagaagattgagaggatccagaatccagatctctggaatagctaccaggcaaagaaaaaaactatggatgccaagaatggccagacaatgaatgagaagcaactcttccatgggacagatgccggctccgtgccacacgtcaatcgaaatggctttaaccgcagctatgccggaaagaatgctgtggcatatggaaagggaacctattttgctgtcaatgccaattattctgccaatgatacgtactccagaccagatgcaaatgggagaaagcatgtgtattatgtgcgagtacttactggaatctatacacatggaaatcattcattaattgtgcctccttcaaagaaccctcaaaatcctactgacctgtatgacactgtcacagataatgtgcaccatccaagtttatttgtggcattttatgactaccaagcatacccagagtaccttattacgtttagaaaataacactttggtatccttcccacaaaattattctccatttgtacatatctagttgtaaaacaagttttagcttttttttttaattcctcttaacagatttttctaatatccaaggatcattctttgtcgctgaagtcagtctttcttcagcttccctttcataatggaaatgaacttattatcttgagagcaaataacttggaaaatttaaatgagataatgcagttgcaactgtgtgtccacaagtatggacatcaaatctgtgggaaaagaacaggtttgtattttcaggaaggagagaataacagtcttatagacagagggcacagctaagcacagctgccactgcaggagacaggccccatgtcaggatgccatagtgctgtggggagcacagtattacccagtgggtagggcttctgtcttccctgggagcagggatggtatcttagtcaatttttttcccttgagatgaggtctgtgcctgatgtacaacggatactccataaatgtttgacaaaccaacgaagaatgaaaaaaagcctagtcagactcccatccaaagtaggaactatctctttaacattcttgactcactatcactttacctcaaattgaacagattccatgacggaacttcattcttcacaaactagccagtgacatgtgggacagctctggccagggctctgggactgcagtgtacttgcgctctgcacggtccaggagctgtgatgtggctgtggtctaggggaatcctgcctgccccatggagttgcgcagcacaaccctggctccaattgccagaaggctctttttaatgctgaaccaaaatgtgcctttttttttttttttttgagatggagtttcactcttgttgcccaggctggagtgcaatggcgcgatctcagctcactgcagccactgcctcccaggttcaagtgattctcctgcctcagcctcccgagtagctgggattacaggcatgcgctaacacacccagctaattttgtatttttagtagagacgaggtttctccatgttcgacaggctggtctcgaactcccacctcagcctcccaaactgctgggattacaggtgtgagccaccgtgaccagccaatgtgccttcttatagtgtctactcattggtctttgttctgcccagtgataacaatgggataacgcctgctacacatcttcattgtgaaacccttcccctgtgctgagattaaatgaactctaagattattaaatagtatattttccttgacagcctagcgtttgatgattttaaagccttatgtataaataaaccaaaggaagtaagcagtcatattgctaatttgctaactcctatctattgaatggtgaagttttaaaaatttccccaggtaagtttaagattcaaacaccatctattgagcacctacattgtgtgccaggtagtaaaataggtgctttcatacacattgtctcaattcctgtgaggtcagaattatctctgcatttgaaacttgaggaaacatgctcagagtgcaagaagcttccttgcctgagatcacctagaaaggaaccctcagagccggcaactgaatcttggtccctgtgatgtcaagcccattgctctcccactgcagaacatggcctctagattaatgccaccgattcaggaacacctccgacagtcttgaaatacccccatgttgccttgtttgttttttccttctggcttcttctattacagtctcttcattggaagctctgtaggccaaggccagagctgatactgacacggagccaatgcagatagcacatcagatgctaggggtcgctgggaggattaagggacttaatctgctaggaacacctgtacttgaagtggaggaggctagggggccacagttgctgcttcattaacatagaggttttggatttttttctcttgtggtttgttttttaagtggattggcagactccttgttgcttaagagtggctttctaggcaggccactggcatctgaattcatcattgacaataaatgtaagaaattggaataaaaaagagagacctgctgttattcgcttttgttctccagtgatttgattaactcagggcaaggctgaatatcagagtgtatcgcactgaagaataataatccattcagtaatgttatagttatcctcaatctaaatatgtcaactgtcattttgctacttttcaaataaaatacttgaaaactgtca

SEQ ID NO: 193765 - DNA, 849 bp, Artificial Sequence
  derived and/or modified sequence
atgtcaaaactggctagctttctagggttcagcaagcagtccccccaaaaaaaaaaccatctagtgcttgaaaagaaaaccgaatccgccacattccgagtctgtggcgaaaatgtgacatgcgtcgaatacgccatcagctggttacaggatctcatcgagaaggaacagtgcccatacacatctgaggacgagtgcattaaagactttgatgagaaagagtatcaggaactgaatgagctccagaagaagctcaacataaatattagtctggatcataaacggcctctaatcaaggtgctgggaattagtagagacgtaatgcaagctcgagatgaaattgaggccatgattaagagagttcggttagcaaaagagcaggagtcaagagcggattgcatatcagagttcatcgagtggcagtacaacgacaacaacacctctcactgctttaataagatgaccaatcttaagctcgaggacgcgagacgcgagaaaaagaagacagtcgatgttaaaatcaatcacaggcactatacagtgaacctgaatacctataccgcaactgatactaagggccactccctctcagttcaacgcctgacaaaaagcaaagtcgacatccctgcacactggagcgatatgaaacagcagaatttctgcgtagttgagctcctccctagtgatccagaatataacactgtcgctagcaaatttaaccagacttgttcccactttcggattgagaaggtcaacgttatgataagagcgtgctcaccgtcctattgggaagcagaagtagagggcttacacgaaccaaggagcttgactccagtttgggttacgtag

SEQ ID NO: 193766 - DNA, 2394 bp, Artificial Sequence
  derived and/or modified sequence
atgtatctgcggaggctgcttcggccactgcagatgctcctggtgaaagaaggggtgcaaaatgccaagactgacgtcgttgtgaattccgtgccattggatctcgtattatcccggggtccgttatcaaaatctctgctcgaaaaggctggccctgagctacaggaggaactcgatacagtgggccaaggcgtcgcagtcagtatgggcactgtcttgaaaacaagtagttggaatcttgactgccgctacgttctgcacgtggtggctcccgaatggagaaatggaagcacaagctcgctaaaaatcatggaagatatcatccgagaatgcatggaaataacagaatccctgtccttaaagagcattgcctttcccgcaataggtaccggtaacttgggtttccccaaaaatatctttgccgaattaatcatctcggaggtgttcaagttttcctccaagaatcagcttaagaccctgcaagaggtccatttccttctgcatccctcagaccacgaaaacatacaagccttctctgacgagttcgccaggcgcgcaaatggcaacctggtttcagacaagatcccaaaggcaaaggacactcagggtttctacggcacagtttcgtccccagattcgggagtctacgaaatgaaaattggcagcattatatttcaggtggcttcaggcgacatcactaaagaagaggctgatgtgattgtgaacagtacttcaaattcattcaatttgaaggcaggagtgagcaaggctatcctcgagtgcgctggtcagaacgttgaacgagagtgttcccaacaggcacaacagaggaaaaacgactatattatcaccggtggcggtttcttgcgctgcaaaaatattatccacgtgataggaggaaatgatgtcaaaagcagcgtgtcctccgtgttgcaagaatgcgaaaaaaaaaattatagttcaatctgcctccctgcaattggcactggtaatgcgaagcaacaccccgataaggtagctgaagctatcattgacgcgatcgaagatttcgttcagaaaggaagcgcccagagcgtgaaaaaggtgaaggtcgttatattcctgccccaggtcctagacgtattctacgctaacatgaaaaaaagagaaggcacacaattgtcttcgcagcagtccgtgatgtccaaactagcatccttcctgggtttctccaagcagtcccctcagaaaaaaaaccatctcgttttagaaaaaaagaccgaaagtgccaccttcagagtctgtggcgagaatgtgacatgtgtcgagtacgccataagctggctccaggacctgatcgaaaaggaacagtgcccgtacaccagtgaggatgagtgtatcaaggactttgacgaaaaggaataccaagagctcaacgagttgcaaaaaaagctgaacataaacatatcgctggaccacaaaagaccgctgatcaaggtgttgggtatatccagggatgtcatgcaggccagagacgagattgaggccatgatcaagcgggtgcgactggccaaagagcaggaaagcagggccgattgtatcagcgaattcatagagtggcagtataacgataacaatacatcccattgttttaacaagatgaccaaccttaaacttgaggacgccagacgagagaagaagaagacggtagacgtgaaaatcaatcaccgccactacaccgtcaatctcaacacatacaccgccaccgataccaaagggcactctctaagtgttcagcgactaactaagtcaaaagtggatatccctgcacactggtccgacatgaagcagcagaacttttgcgtggtggaattgctgcctagcgatccagagtataacacagtggcctccaagtttaatcagacttgctctcactttcgaattgagaaaatcgaaagaatccagaaccccgatctgtggaatagttatcaggccaagaaaaagaccatggatgcgaaaaatggtcaaacaatgaacgagaagcagcttttccacggcacagacgcagggtccgtgccgcacgttaatcggaacgggttcaatagatcatacgcgggaaaaaatgctgtggcatacggcaaggggacgtacttcgcggtgaacgcaaattactccgccaatgatacttactctaggcccgatgcaaatgggagaaagcacgtgtattacgtccgcgtgcttaccggtatttacactcacgggaatcactcattgattgtgcctccttctaagaacccacaaaaccctactgacctgtatgataccgttaccgacaacgtacaccaccccagtctcttcgtggccttttacgactaccaagcctacccagaatacctgatcactttcaggaaatag

SEQ ID NO: 193767 - DNA, 5162 bp, Artificial Sequence
  derived and/or modified sequence
atggcagtcccaggaagctttccactcctcgtagaaggcagctggggtcccgatcctccaaagaacctaaatactaaattgcagatgtacttccaaagtcccaaaaggtctggaggcggagaatgtgaggttcgtcaggacccaagatcacccagccgattccttgtgttcttctatcccgaggatgtgcgacagaaggttcttgagcggaaaaatcacgaactcgtgtggcagggtaaagggaccttcaagcttacggtccagcttcccgcaactcctgacgagatcgaccatgtttttgaagaggaactgctgaccaaggaatctaaaaccaaggaggacgtcaaagagcctgatactataagattcgtggatgactgcacaaaacaccactctatcaaacaactgcagctcagtccgcgtctcttggaggtgaccaatacgattagagttgaaaacctgcccccaggggctgacgactactcactgaagctatttttcgaaaacccctacaatggaggcggtcgcgtcgcaaatgtcgagtattttccggaagagtcctccgcgctgatagaattcttcgataggaaggtgcttgatacgattatggctacaaaactggactttaataagatgcctctctcggtcttcccatactacgcttcgctcgggacagctttgtacggaaaggagaagccactcatcaaactgcctgcccctttcgaagagagccttgatctgcccctgtggaaattcctgcagaagaagaatcatcttattgaagagataaatgacgagatgcgtagatgccattgtgagcttacttggagtcagctctcaggaaaggtgaccatcaggcccgctgcaaccctggtgaacgaggggaggccgcgtataaagacctggcaggctgataccagcaccactctctcttctattcgaagtaaatataaggttaatcccattaaagtagaccctacaatgtgggatacaatcaaaaatgatgtcaaggatgatcggattttaatcgagttcgacaccctaaaagaaatggttattttggctggcaagtcagaggatgtgcagtccattgaggtgcaagtcagagaactcattgagtctacaacccagaaaatcaagcgggaggagcaatcgctgaaagagaagatgatcatttccccaggccgatatttcttactgtgccacagctccctcctggaccacctcctgactgagtgccctgagatcgaaatttgttacgaccgcgtaacacagcatttgtgcctgaaaggaccgagcgctgacgtgtacaaagctaagtgtgaaatccaggaaaaggtatatacaatggcccagaagaacatccaggtgtcccctgaaatattccagttcctgcagcaggtaaattggaaggaatttagtaagtgcctgttcattgctcagaagattctcgctctctacgagcttgagggaaccactgttctcctgactagttgcagtagtgaagcgctgctagaggccgaaaagcagatgttatcggccctcaattacaagagaatcgaggttgagaataaggaagtactgcacgggaagaagtggaaaggcctgacccacaatctgctgaagaaacagaacagttctcctaacactgtgattatcaacgagctgaccagcgaaactaccgccgaagtaatcatcaccggttgcgtgaaagaggtcaacgagacctacaagctcctgtttaacttcgtggagcagaatatgaagatagagcgactggtggaagtcaagccatccttggtgatcgactaccttaagactgagaagaagttgttctggccaaaaatcaagaaggtcaatgtgcaggtgtcctttaatcctgagaacaagcaaaaggggatcctgttaactggctccaagacagaggtcctaaaggcagttgacatcgtaaagcaggtgtgggactctgtctgtgtcaagtctgtccacaccgacaaaccaggagctaagcaattctttcaggacaaagccagattctaccagagtgaaatcaagcgtctgtttggatgctatatagaactgcaagaaaacgaagtaatgaaagaaggtgggtcccccgctggacaaaagtgtttttcccggacagtgttggcccctggtgtagtgctgatcgtgcaacagggggacctggcgagactcccagtagatgtggttgtgaacgccagtaacgaggatttgaagcattatgggggactggcggctgcgctttcgaaggccgcaggccctgagctccaggcagactgcgatcaaatagtgaaaagagaggggagactgctgcccggaaatgctactatctccaaggctggtaaacttccctaccatcatgtgatccacgcagtgggccctcgatggagcggatacgaagccccaagatgtgtctacctgctccgcagggcagttcagctgagcctttgtctggccgagaagtacaagtatcgctccattgcaatccccgcaatcagctcgggcgtgtttggatttcctctgggccgttgtgtcgagacaatcgtgagcgcaatcaaggagaacttccaatttaagaaggacggacactgcctgaaggagatatacttggtggatgtctccgaaaagacagttgaggcctttgccgaggctgttaaaacggtcttcaaagcaacattgcccgataccgccgcaccgcctggactgccccctgctgccgcaggcccagggaagacttcgtgggaaaaggggtcccttgtctcccctggaggattacaaatgcttcttgttaaggagggcgtacaaaacgccaagaccgatgtagtagtgaacagcgtcccgctcgacctggtcttgtctcgcggtccgctgtccaagtcacttctagaaaaagccggaccagagctccaagaagaactcgatacagtaggacaaggggtcgccgtgtctatggggaccgtgctgaaaacttcgtcatggaatctggactgccgatatgtgctacacgttgtggcccctgagtggcgcaacggcagcacatctagcctgaagatcatggaggacattatccgggaatgtatggagataacagagtctctctcgctcaaatctatcgcgtttcctgctattggtactggaaatttgggctttcctaaaaacatctttgcagagcttattatcagtgaggtgtttaaattcagcagtaagaaccagttaaagaccttacaggaagtccacttcctcctccatccatccgaccacgagaatatccaggcgttttccgacgaattcgccaggcgcgcaaatggcaacctcgtgagcgataagatcccaaaggctaaagacacccagggattctatggcaccgtgtcctctccggactctggcgtctacgagatgaagatcggaagtattatattccaagtggccagcggcgacatcactaaagaggaagcggacgtgatcgtgaattctacctccaatagcttcaacctgaaagtgggggtctctaaagctattctggaatgcgccggacagaacgtagagcgagaatgctctcagcaagctcagcaaagaaagaatgattacatcatcacgggcggtggcttcctcaggtgtaagaacattatccacgtcattggtggcaacgacgtgaaaagttccgtgagctccgtgttgcaggagtgtgaaaaaaagaattattcctccatatgtttaccagctatcggcacagggaacgcgaagcagcatcctgacaaggtagccgaggctataattgacgcaatcgaggactttgtacagaaggggtccgcccaaagtgttaagaaagtgaaagtggtcatcttcctgccacaggtgttagacgttttctatgcaaatatgaagaagcgcgagggcacgcagctctcctcacaacagtccgtaatgtccaaattagcatcattcctcggtttttctaagcagagccctcagaaaaaaaatcacctagtgctggagaaaaagactgagtcagcaaccttccgtgtttgtggcgagaacgtgacatgcgtcgagtacgccatttcatggctccaggacttaatcgagaaagagcagtgcccttacacttccgaagacgaatgtataaaggatttcgacgagaaagaataccaggaactaaacgaattgcagaagaagctgaatattaatatctccctagaccacaagagacctcttataaaagttttgggaatcagtcgggatgttatgcaggccagggatgagattgaagcaatgatcaagcgcgtgcgcctggccaaagaacaagagagcagagccgactgtatcagtgagttcatagagtggcagtataacgataataacacctcccactgttttaataaaatgacaaatcttaaactcgaggatgcccgaagagaaaagaaaaagactgtggacgttaagattaaccacagacattatactgtcaatctgaacacgtacaccgcaaccgacaccaaaggccacagcctgagtgtccaacgactgactaagtctaaagtggatatacctgcccattggtctgatatgaagcaacaaaacttttgtgtggttgagctactgccttccgaccccgaatacaataccgtggcctctaagtttaatcagacctgcagccactttcgaatcgagaagattgagagaattcagaatcccgatttgtggaattcatatcaggcgaaaaagaaaacaatggatgccaagaacggtcagactatgaatgaaaaacagctttttcatggaaccgatgctggctcggtgccccatgtcaatagaaacggcttcaataggtcttacgcaggcaagaacgcagtggcctacggaaaaggtacctatttcgcagtgaatgctaactattccgctaacgatacttattcccgacctgacgccaacggacggaaacacgtgtattacgttagggtgcttaccgggatctacactcacggtaatcatagcctgattgtgccccctagcaaaaatccccagaaccccaccgatctgtatgacactgtgacggacaacgtgcaccacccatctctgtttgtcgccttctatgactatcaggcctatcccgaatacctcatcacattcaggaagta

SEQ ID NO: 193768 - DNA, 5405 bp, Artificial Sequence
  derived and/or modified sequence
atggccgtgcctggatccttccctttactggtagagggctcatggggccctgatccgcctaagaacctgaacaccaaattgcaaatgtatttccagagtcctaaacggtccgggggtggggagtgcgaggttaggcaggaccccaggagtccgtccagatttctcgtgtttttttaccccgaggatgtccgtcagaaagtactcgagcgtaagaatcacgagctagtatggcaaggcaaaggcacattcaagctgacagtccagctccccgcaacacctgacgagatcgaccacgtatttgaagaagaactgttgactaaggagtcaaagacaaaggaggacgtgaaagaacctgacgtttcagaagagctcgacaccaaacttccactcgatggcggattagacaagatggaagacattccggaagaatgtgaaaatatatccagcttggtcgctttcgaaaacctcaaagctaatgtgacagatattatgcttattctactggtggagaatatctccggactttccaatgacgactttcaggtcgaaatcatccgagattttgatgttgccgtggtaactttccaaaaacatattgacaccataagattcgtcgacgattgcacaaagcaccattcgatcaaacagctgcagctcagccctcgcctgctggaagtaaccaatactatccgcgtggaaaatttaccccctggcgctgacgattattcactgaagctgtttttcgagaacccgtacaatggcggagggagggttgcaaatgtggagtatttcccagaagagtccagcgcactcattgagttttttgacaggaaggtattggacaccatcatggctacaaaactggacttcaacaagatgccactctcagtctttccttattacgcctctctcggaacagccctgtacggaaaagaaaagccattgatcaagctgcccgcacctttcgaggagtcgctcgacttaccactgtggaagttcttgcagaagaaaaatcacttgattgaggagatcaatgacgagatgaggcgctgccactgcgaactgacgtggtctcagttgtcaggcaaggtgactattcgcccagccgcaactctggtgaatgaaggaagaccacgcataaaaacctggcaagccgatacatcaacaacgttgagttctatcaggtctaagtacaaagtcaacccgatcaaagtggacccaaccatgtgggatactatcaaaaacgacgtgaaggacgataggatcctgatcgagttcgacacattgaaagaaatggtgatcctcgccggtaagagcgaagatgtgcaatctattgaggttcaggttagggagttaatcgaaagtaccacccaaaaaatcaagagagaagagcagtcgctgaaggagaagatgataatctcgccaggtcgctactttctactctgccattcctctttgctggaccatctattgactgaatgccccgaaatcgagatttgttacgatcgagtgactcagcatctatgtttgaagggaccctctgcggatgtgtacaaggccaagtgcgagatacaagagaaagtgtataccatggcccaaaaaaacatccaggtgtcaccggagatctttcaattcctacagcaggtgaactggaaggagttctccaagtgtctcttcattgcccaaaagatcttggctctctatgagctcgagggaaccaccgtgctactgacatcctgctcgtccgaggcccttctagaggctgagaaacagatgctgagtgccctgaactacaaaagaattgaagtcgaaaataaagaggttctccatggcaagaaatggaaaggactcactcataacctacttaaaaaacaaaattcaagccccaacactgttatcatcaacgaattgacctccgagacgaccgctgaagtgattataaccggatgtgtgaaagaggttaatgagacctataagctcctgttcaacttcgtggaacagaatatgaagattgagaggctggttgaagtaaaaccttctctggtgatcgattatctgaagactgaaaagaaactcttctggcccaagatcaagaaggtgaacgtccaggtatcattcaatcctgaaaacaagcagaaaggcatactcctaaccggatccaaaactgaggttctgaaggctgtggatatcgtgaagcaggtgtgggattctgtctgtgtgaaatccgtgcacaccgacaagcccggagccaagcagttttttcaagacaaagcccgtttctatcagtctgagatcaagagactgttcggttgttacatcgagctacaggagaacgaagtgatgaaagagggcggttcccctgcaggccagaagtgctttagtagaacagttctggcacccggagtagtcctgatcgtgcagcagggagatctggccaggctgccggtggacgtcgttgttaacgcatccaatgaggacttgaagcactacggcggattagccgctgccttaagtaaggcggcaggccctgagctccaggcagactgcgaccaaatagtaaagcgcgagggacgactacttcctgggaatgccactataagcaaagccggaaaattgccttaccatcacgtcattcacgcagtagggccacggtggtcgggctacgaagctccaaggtgcgtgtacctgctgcgcagagcagttcagttgagcctgtgtttggccgagaagtataagtatcggagtatcgccatcccagcaatcagtagcggagtgtttggctttcccctgggaaggtgcgtggaaactatcgtctccgcaatcaaggaaaacttccagttcaaaaaagatggacactgcctcaaggagatttatctcgtcgacgtctccgaaaagactgttgaagcattcgctgaagcagtgaaaacagtgtttaaggcgacactgccagatacagcagcacctcctggtcttcctccagccgcagcaggcccaggaaagacatcctgggagaaggggtcattggtgtcacccggaggactacagatgctgctagtgaaggaaggggtacagaacgcaaagacagacgtggtcgtgaatagtgtgcccctggacctggtcctgtccaggggccctcttagtaaatcacttctggagaaagctggacctgagcttcaggaagagcttgataccgttgggcagggcgtcgctgtgtcgatgggcactgtgcttaagacctcttcttggaatctggattgtagatacgtgctgcacgtggtcgcccctgaatggaggaacggatccacaagctccctgaagattatggaggacattatccgggagtgcatggagattaccgagagcctttcactcaaaagcatagcttttccggcaattggcacgggtaatctcggattccctaaaaacatttttgctgagctgatcatttctgaagttttcaaattttccagtaagaatcagctgaagacgctgcaggaagtgcacttcctgttacatccctccgaccacgaaaacattcaggctttcagtgatgaattcgcaagaagggcgaatggtaacttagtttccgacaagatccctaaggcaaaagatactcaggggttttatgggacagtatctagtccagatagtggcgtctatgagatgaagattgggagtattatattccaggttgcctcaggcgatattaccaaagaggaggccgacgtcatagtaaactcaacctccaactcctttaatctcaaggccggtgtaagcaaagctattctcgagtgtgctggccagaacgtcgagcgtgaatgcagccaacaggctcagcagagaaagaacgattacattatcacaggcggtggctttttacgatgtaaaaatatcattcatgtaattggagggaatgacgtgaagagcagcgtctccagcgtgctacaagaatgtgagaagaagaactactcgtccatttgtttacccgctatcgggaccggaaatgctaagcagcatcccgacaaggtggccgaagcaattatcgacgcaatagaagacttcgtgcagaagggtagtgcacagagtgtcaagaaagtaaaggtggtcatcttcctgcctcaggtccttgacgtgttctacgccaatatgaaaaagagggaggggactcagctgtcatctcaacaatcagttatgtcaaagcttgcatcctttctcgggttttccaaacaatccccccagaaaaagaaccacctggtactcgagaagaagaccgagtctgccacattcagagtgtgcggcgaaaacgtgacttgtgtcgaatatgccatctcttggctgcaggatctcattgagaaagagcagtgcccctatacgagcgaggacgagtgtattaaggactttgacgagaaggaataccaagagctgaacgaattgcagaagaaactgaatatcaatatcagccttgatcataaacgaccactgatcaaggtactaggcatttcaagagacgttatgcaggcacgggatgagattgaagccatgattaagcgcgtgcgcctggcgaaggagcaggagagccgagccgactgcattagtgaatttatcgagtggcaatacaacgacaacaacacctctcactgtttcaataagatgacaaacctgaagttggaagacgccaggagggagaaaaaaaagaccgtagacgttaaaatcaaccatcgccattacacagtgaatctcaatacttatacagctactgacactaagggtcactccctgtccgtccagcgactcaccaagagcaaagtggacatccccgcacattggtcagatatgaagcaacagaatttttgcgttgtggagcttctgccatcggaccccgagtacaataccgtggcctccaagttcaaccagacctgttctcatttcaggattgaaaagatcgagcgcatacagaatccagatctttggaacagctatcaggcaaaaaaaaagacgatggatgcgaaaaacggccagaccatgaatgagaaacaattattccacggcacggacgctggatcagtgccccacgttaacagaaatgggtttaatcggagttacgccggaaaaaacgctgttgcatatgggaaaggcacctactttgccgtgaacgctaattatagtgctaacgatacgtacagtaggccagacgctaacggacgcaaacatgtttattacgtccgggttctcacaggcatatatacacacggcaatcactccttaatcgttcccccttcaaaaaacccccagaatcctaccgatctgtatgatactgttacggacaatgtgcatcatccctcgttatttgtagcattttacgattaccaggcctaccctgaatacctgataacctttcgaaagta

SEQ ID NO: 193769 - DNA, 849 bp, Artificial Sequence
  derived and/or modified sequence
atgagcaagctggccagcttcctgggcttcagcaagcagagcccccagaagaagaaccacctggtgctggagaagaagaccgagagcgccaccttcagagtgtgcggcgagaacgtgacctgcgtggagtacgccatcagctggctgcaggacctgatcgagaaggagcagtgcccctacaccagcgaggacgagtgcatcaaggacttcgacgagaaggagtaccaggagctgaacgagctgcagaagaagctgaacatcaacatcagcctggaccacaagagacccctgatcaaggtgctgggcatcagcagagacgtgatgcaggccagagacgagatcgaggccatgatcaagagagtgagactggccaaggagcaggagagcagagccgactgcatcagcgagttcatcgagtggcagtacaacgacaacaacaccagccactgcttcaacaagatgaccaacctgaagctggaggacgccagaagagagaagaagaagaccgtggacgtgaagatcaaccacagacactacaccgtgaacctgaacacctacaccgccaccgacaccaagggccacagcctgagcgtgcagagactgaccaagagcaaggtggacatccccgcccactggagcgacatgaagcagcagaacttctgcgtggtggagctgctgcccagcgaccccgagtacaacaccgtggccagcaagttcaaccagacctgcagccacttcagaatcgagaaggtgaacgtgatgatcagagcctgcagccccagctactgggaggccgaggtggagggcctgcacgagcccagaagcctgacccccgtgtgggtgacctag

SEQ ID NO: 193770 - DNA, 2394 bp, Artificial Sequence
  derived and/or modified sequence
atgtacctgagaagactgctgagacccctgcagatgctgctggtgaaggagggcgtgcagaacgccaagaccgacgtggtggtgaacagcgtgcccctggacctggtgctgagcagaggccccctgagcaagagcctgctggagaaggccggccccgagctgcaggaggagctggacaccgtgggccagggcgtggccgtgagcatgggcaccgtgctgaagaccagcagctggaacctggactgcagatacgtgctgcacgtggtggcccccgagtggagaaacggcagcaccagcagcctgaagatcatggaggacatcatcagagagtgcatggagatcaccgagagcctgagcctgaagagcatcgccttccccgccatcggcaccggcaacctgggcttccccaagaacatcttcgccgagctgatcatcagcgaggtgttcaagttcagcagcaagaaccagctgaagaccctgcaggaggtgcacttcctgctgcaccccagcgaccacgagaacatccaggccttcagcgacgagttcgccagaagagccaacggcaacctggtgagcgacaagatccccaaggccaaggacacccagggcttctacggcaccgtgagcagccccgacagcggcgtgtacgagatgaagatcggcagcatcatcttccaggtggccagcggcgacatcaccaaggaggaggccgacgtgatcgtgaacagcaccagcaacagcttcaacctgaaggccggcgtgagcaaggccatcctggagtgcgccggccagaacgtggagagagagtgcagccagcaggcccagcagagaaagaacgactacatcatcaccggcggcggcttcctgagatgcaagaacatcatccacgtgatcggcggcaacgacgtgaagagcagcgtgagcagcgtgctgcaggagtgcgagaagaagaactacagcagcatctgcctgcccgccatcggcaccggcaacgccaagcagcaccccgacaaggtggccgaggccatcatcgacgccatcgaggacttcgtgcagaagggcagcgcccagagcgtgaagaaggtgaaggtggtgatcttcctgccccaggtgctggacgtgttctacgccaacatgaagaagagagagggcacccagctgagcagccagcagagcgtgatgagcaagctggccagcttcctgggcttcagcaagcagagcccccagaagaagaaccacctggtgctggagaagaagaccgagagcgccaccttcagagtgtgcggcgagaacgtgacctgcgtggagtacgccatcagctggctgcaggacctgatcgagaaggagcagtgcccctacaccagcgaggacgagtgcatcaaggacttcgacgagaaggagtaccaggagctgaacgagctgcagaagaagctgaacatcaacatcagcctggaccacaagagacccctgatcaaggtgctgggcatcagcagagacgtgatgcaggccagagacgagatcgaggccatgatcaagagagtgagactggccaaggagcaggagagcagagccgactgcatcagcgagttcatcgagtggcagtacaacgacaacaacaccagccactgcttcaacaagatgaccaacctgaagctggaggacgccagaagagagaagaagaagaccgtggacgtgaagatcaaccacagacactacaccgtgaacctgaacacctacaccgccaccgacaccaagggccacagcctgagcgtgcagagactgaccaagagcaaggtggacatccccgcccactggagcgacatgaagcagcagaacttctgcgtggtggagctgctgcccagcgaccccgagtacaacaccgtggccagcaagttcaaccagacctgcagccacttcagaatcgagaagatcgagagaatccagaaccccgacctgtggaacagctaccaggccaagaagaagaccatggacgccaagaacggccagaccatgaacgagaagcagctgttccacggcaccgacgccggcagcgtgccccacgtgaacagaaacggcttcaacagaagctacgccggcaagaacgccgtggcctacggcaagggcacctacttcgccgtgaacgccaactacagcgccaacgacacctacagcagacccgacgccaacggcagaaagcacgtgtactacgtgagagtgctgaccggcatctacacccacggcaaccacagcctgatcgtgccccccagcaagaacccccagaaccccaccgacctgtacgacaccgtgaccgacaacgtgcaccaccccagcctgttcgtggccttctacgactaccaggcctaccccgagtacctgatcaccttcagaaagtag

SEQ ID NO: 193771 - DNA, 5163 bp, Artificial Sequence
  derived and/or modified sequence
atggccgtgcccggcagcttccccctgctggtggagggcagctggggccccgacccccccaagaacctgaacaccaagctgcagatgtacttccagagccccaagagaagcggcggcggcgagtgcgaggtgagacaggaccccagaagccccagcagattcctggtgttcttctaccccgaggacgtgagacagaaggtgctggagagaaagaaccacgagctggtgtggcagggcaagggcaccttcaagctgaccgtgcagctgcccgccacccccgacgagatcgaccacgtgttcgaggaggagctgctgaccaaggagagcaagaccaaggaggacgtgaaggagcccgacaccatcagattcgtggacgactgcaccaagcaccacagcatcaagcagctgcagctgagccccagactgctggaggtgaccaacaccatcagagtggagaacctgccccccggcgccgacgactacagcctgaagctgttcttcgagaacccctacaacggcggcggcagagtggccaacgtggagtacttccccgaggagagcagcgccctgatcgagttcttcgacagaaaggtgctggacaccatcatggccaccaagctggacttcaacaagatgcccctgagcgtgttcccctactacgccagcctgggcaccgccctgtacggcaaggagaagcccctgatcaagctgcccgcccccttcgaggagagcctggacctgcccctgtggaagttcctgcagaagaagaaccacctgatcgaggagatcaacgacgagatgagaagatgccactgcgagctgacctggagccagctgagcggcaaggtgaccatcagacccgccgccaccctggtgaacgagggcagacccagaatcaagacctggcaggccgacaccagcaccaccctgagcagcatcagaagcaagtacaaggtgaaccccatcaaggtggaccccaccatgtgggacaccatcaagaacgacgtgaaggacgacagaatcctgatcgagttcgacaccctgaaggagatggtgatcctggccggcaagagcgaggacgtgcagagcatcgaggtgcaggtgagagagctgatcgagagcaccacccagaagatcaagagagaggagcagagcctgaaggagaagatgatcatcagccccggcagatacttcctgctgtgccacagcagcctgctggaccacctgctgaccgagtgccccgagatcgagatctgctacgacagagtgacccagcacctgtgcctgaagggccccagcgccgacgtgtacaaggccaagtgcgagatccaggagaaggtgtacaccatggcccagaagaacatccaggtgagccccgagatcttccagttcctgcagcaggtgaactggaaggagttcagcaagtgcctgttcatcgcccagaagatcctggccctgtacgagctggagggcaccaccgtgctgctgaccagctgcagcagcgaggccctgctggaggccgagaagcagatgctgagcgccctgaactacaagagaatcgaggtggagaacaaggaggtgctgcacggcaagaagtggaagggcctgacccacaacctgctgaagaagcagaacagcagccccaacaccgtgatcatcaacgagctgaccagcgagaccaccgccgaggtgatcatcaccggctgcgtgaaggaggtgaacgagacctacaagctgctgttcaacttcgtggagcagaacatgaagatcgagagactggtggaggtgaagcccagcctggtgatcgactacctgaagaccgagaagaagctgttctggcccaagatcaagaaggtgaacgtgcaggtgagcttcaaccccgagaacaagcagaagggcatcctgctgaccggcagcaagaccgaggtgctgaaggccgtggacatcgtgaagcaggtgtgggacagcgtgtgcgtgaagagcgtgcacaccgacaagcccggcgccaagcagttcttccaggacaaggccagattctaccagagcgagatcaagagactgttcggctgctacatcgagctgcaggagaacgaggtgatgaaggagggcggcagccccgccggccagaagtgcttcagcagaaccgtgctggcccccggcgtggtgctgatcgtgcagcagggcgacctggccagactgcccgtggacgtggtggtgaacgccagcaacgaggacctgaagcactacggcggcctggccgccgccctgagcaaggccgccggccccgagctgcaggccgactgcgaccagatcgtgaagagagagggcagactgctgcccggcaacgccaccatcagcaaggccggcaagctgccctaccaccacgtgatccacgccgtgggccccagatggagcggctacgaggcccccagatgcgtgtacctgctgagaagagccgtgcagctgagcctgtgcctggccgagaagtacaagtacagaagcatcgccatccccgccatcagcagcggcgtgttcggcttccccctgggcagatgcgtggagaccatcgtgagcgccatcaaggagaacttccagttcaagaaggacggccactgcctgaaggagatctacctggtggacgtgagcgagaagaccgtggaggccttcgccgaggccgtgaagaccgtgttcaaggccaccctgcccgacaccgccgccccccccggcctgccccccgccgccgccggccccggcaagaccagctgggagaagggcagcctggtgagccccggcggcctgcagatgctgctggtgaaggagggcgtgcagaacgccaagaccgacgtggtggtgaacagcgtgcccctggacctggtgctgagcagaggccccctgagcaagagcctgctggagaaggccggccccgagctgcaggaggagctggacaccgtgggccagggcgtggccgtgagcatgggcaccgtgctgaagaccagcagctggaacctggactgcagatacgtgctgcacgtggtggcccccgagtggagaaacggcagcaccagcagcctgaagatcatggaggacatcatcagagagtgcatggagatcaccgagagcctgagcctgaagagcatcgccttccccgccatcggcaccggcaacctgggcttccccaagaacatcttcgccgagctgatcatcagcgaggtgttcaagttcagcagcaagaaccagctgaagaccctgcaggaggtgcacttcctgctgcaccccagcgaccacgagaacatccaggccttcagcgacgagttcgccagaagagccaacggcaacctggtgagcgacaagatccccaaggccaaggacacccagggcttctacggcaccgtgagcagccccgacagcggcgtgtacgagatgaagatcggcagcatcatcttccaggtggccagcggcgacatcaccaaggaggaggccgacgtgatcgtgaacagcaccagcaacagcttcaacctgaaggtgggcgtgagcaaggccatcctggagtgcgccggccagaacgtggagagagagtgcagccagcaggcccagcagagaaagaacgactacatcatcaccggcggcggcttcctgagatgcaagaacatcatccacgtgatcggcggcaacgacgtgaagagcagcgtgagcagcgtgctgcaggagtgcgagaagaagaactacagcagcatctgcctgcccgccatcggcaccggcaacgccaagcagcaccccgacaaggtggccgaggccatcatcgacgccatcgaggacttcgtgcagaagggcagcgcccagagcgtgaagaaggtgaaggtggtgatcttcctgccccaggtgctggacgtgttctacgccaacatgaagaagagagagggcacccagctgagcagccagcagagcgtgatgagcaagctggccagcttcctgggcttcagcaagcagagcccccagaagaagaaccacctggtgctggagaagaagaccgagagcgccaccttcagagtgtgcggcgagaacgtgacctgcgtggagtacgccatcagctggctgcaggacctgatcgagaaggagcagtgcccctacaccagcgaggacgagtgcatcaaggacttcgacgagaaggagtaccaggagctgaacgagctgcagaagaagctgaacatcaacatcagcctggaccacaagagacccctgatcaaggtgctgggcatcagcagagacgtgatgcaggccagagacgagatcgaggccatgatcaagagagtgagactggccaaggagcaggagagcagagccgactgcatcagcgagttcatcgagtggcagtacaacgacaacaacaccagccactgcttcaacaagatgaccaacctgaagctggaggacgccagaagagagaagaagaagaccgtggacgtgaagatcaaccacagacactacaccgtgaacctgaacacctacaccgccaccgacaccaagggccacagcctgagcgtgcagagactgaccaagagcaaggtggacatccccgcccactggagcgacatgaagcagcagaacttctgcgtggtggagctgctgcccagcgaccccgagtacaacaccgtggccagcaagttcaaccagacctgcagccacttcagaatcgagaagatcgagagaatccagaaccccgacctgtggaacagctaccaggccaagaagaagaccatggacgccaagaacggccagaccatgaacgagaagcagctgttccacggcaccgacgccggcagcgtgccccacgtgaacagaaacggcttcaacagaagctacgccggcaagaacgccgtggcctacggcaagggcacctacttcgccgtgaacgccaactacagcgccaacgacacctacagcagacccgacgccaacggcagaaagcacgtgtactacgtgagagtgctgaccggcatctacacccacggcaaccacagcctgatcgtgccccccagcaagaacccccagaaccccaccgacctgtacgacaccgtgaccgacaacgtgcaccaccccagcctgttcgtggccttctacgactaccaggcctaccccgagtacctgatcaccttcagaaagtag

SEQ ID NO: 193772 - DNA, 5406 bp, Artificial Sequence
  derived and/or modified sequence
atggccgtgcccggcagcttccccctgctggtggagggcagctggggccccgacccccccaagaacctgaacaccaagctgcagatgtacttccagagccccaagagaagcggcggcggcgagtgcgaggtgagacaggaccccagaagccccagcagattcctggtgttcttctaccccgaggacgtgagacagaaggtgctggagagaaagaaccacgagctggtgtggcagggcaagggcaccttcaagctgaccgtgcagctgcccgccacccccgacgagatcgaccacgtgttcgaggaggagctgctgaccaaggagagcaagaccaaggaggacgtgaaggagcccgacgtgagcgaggagctggacaccaagctgcccctggacggcggcctggacaagatggaggacatccccgaggagtgcgagaacatcagcagcctggtggccttcgagaacctgaaggccaacgtgaccgacatcatgctgatcctgctggtggagaacatcagcggcctgagcaacgacgacttccaggtggagatcatcagagacttcgacgtggccgtggtgaccttccagaagcacatcgacaccatcagattcgtggacgactgcaccaagcaccacagcatcaagcagctgcagctgagccccagactgctggaggtgaccaacaccatcagagtggagaacctgccccccggcgccgacgactacagcctgaagctgttcttcgagaacccctacaacggcggcggcagagtggccaacgtggagtacttccccgaggagagcagcgccctgatcgagttcttcgacagaaaggtgctggacaccatcatggccaccaagctggacttcaacaagatgcccctgagcgtgttcccctactacgccagcctgggcaccgccctgtacggcaaggagaagcccctgatcaagctgcccgcccccttcgaggagagcctggacctgcccctgtggaagttcctgcagaagaagaaccacctgatcgaggagatcaacgacgagatgagaagatgccactgcgagctgacctggagccagctgagcggcaaggtgaccatcagacccgccgccaccctggtgaacgagggcagacccagaatcaagacctggcaggccgacaccagcaccaccctgagcagcatcagaagcaagtacaaggtgaaccccatcaaggtggaccccaccatgtgggacaccatcaagaacgacgtgaaggacgacagaatcctgatcgagttcgacaccctgaaggagatggtgatcctggccggcaagagcgaggacgtgcagagcatcgaggtgcaggtgagagagctgatcgagagcaccacccagaagatcaagagagaggagcagagcctgaaggagaagatgatcatcagccccggcagatacttcctgctgtgccacagcagcctgctggaccacctgctgaccgagtgccccgagatcgagatctgctacgacagagtgacccagcacctgtgcctgaagggccccagcgccgacgtgtacaaggccaagtgcgagatccaggagaaggtgtacaccatggcccagaagaacatccaggtgagccccgagatcttccagttcctgcagcaggtgaactggaaggagttcagcaagtgcctgttcatcgcccagaagatcctggccctgtacgagctggagggcaccaccgtgctgctgaccagctgcagcagcgaggccctgctggaggccgagaagcagatgctgagcgccctgaactacaagagaatcgaggtggagaacaaggaggtgctgcacggcaagaagtggaagggcctgacccacaacctgctgaagaagcagaacagcagccccaacaccgtgatcatcaacgagctgaccagcgagaccaccgccgaggtgatcatcaccggctgcgtgaaggaggtgaacgagacctacaagctgctgttcaacttcgtggagcagaacatgaagatcgagagactggtggaggtgaagcccagcctggtgatcgactacctgaagaccgagaagaagctgttctggcccaagatcaagaaggtgaacgtgcaggtgagcttcaaccccgagaacaagcagaagggcatcctgctgaccggcagcaagaccgaggtgctgaaggccgtggacatcgtgaagcaggtgtgggacagcgtgtgcgtgaagagcgtgcacaccgacaagcccggcgccaagcagttcttccaggacaaggccagattctaccagagcgagatcaagagactgttcggctgctacatcgagctgcaggagaacgaggtgatgaaggagggcggcagccccgccggccagaagtgcttcagcagaaccgtgctggcccccggcgtggtgctgatcgtgcagcagggcgacctggccagactgcccgtggacgtggtggtgaacgccagcaacgaggacctgaagcactacggcggcctggccgccgccctgagcaaggccgccggccccgagctgcaggccgactgcgaccagatcgtgaagagagagggcagactgctgcccggcaacgccaccatcagcaaggccggcaagctgccctaccaccacgtgatccacgccgtgggccccagatggagcggctacgaggcccccagatgcgtgtacctgctgagaagagccgtgcagctgagcctgtgcctggccgagaagtacaagtacagaagcatcgccatccccgccatcagcagcggcgtgttcggcttccccctgggcagatgcgtggagaccatcgtgagcgccatcaaggagaacttccagttcaagaaggacggccactgcctgaaggagatctacctggtggacgtgagcgagaagaccgtggaggccttcgccgaggccgtgaagaccgtgttcaaggccaccctgcccgacaccgccgccccccccggcctgccccccgccgccgccggccccggcaagaccagctgggagaagggcagcctggtgagccccggcggcctgcagatgctgctggtgaaggagggcgtgcagaacgccaagaccgacgtggtggtgaacagcgtgcccctggacctggtgctgagcagaggccccctgagcaagagcctgctggagaaggccggccccgagctgcaggaggagctggacaccgtgggccagggcgtggccgtgagcatgggcaccgtgctgaagaccagcagctggaacctggactgcagatacgtgctgcacgtggtggcccccgagtggagaaacggcagcaccagcagcctgaagatcatggaggacatcatcagagagtgcatggagatcaccgagagcctgagcctgaagagcatcgccttccccgccatcggcaccggcaacctgggcttccccaagaacatcttcgccgagctgatcatcagcgaggtgttcaagttcagcagcaagaaccagctgaagaccctgcaggaggtgcacttcctgctgcaccccagcgaccacgagaacatccaggccttcagcgacgagttcgccagaagagccaacggcaacctggtgagcgacaagatccccaaggccaaggacacccagggcttctacggcaccgtgagcagccccgacagcggcgtgtacgagatgaagatcggcagcatcatcttccaggtggccagcggcgacatcaccaaggaggaggccgacgtgatcgtgaacagcaccagcaacagcttcaacctgaaggccggcgtgagcaaggccatcctggagtgcgccggccagaacgtggagagagagtgcagccagcaggcccagcagagaaagaacgactacatcatcaccggcggcggcttcctgagatgcaagaacatcatccacgtgatcggcggcaacgacgtgaagagcagcgtgagcagcgtgctgcaggagtgcgagaagaagaactacagcagcatctgcctgcccgccatcggcaccggcaacgccaagcagcaccccgacaaggtggccgaggccatcatcgacgccatcgaggacttcgtgcagaagggcagcgcccagagcgtgaagaaggtgaaggtggtgatcttcctgccccaggtgctggacgtgttctacgccaacatgaagaagagagagggcacccagctgagcagccagcagagcgtgatgagcaagctggccagcttcctgggcttcagcaagcagagcccccagaagaagaaccacctggtgctggagaagaagaccgagagcgccaccttcagagtgtgcggcgagaacgtgacctgcgtggagtacgccatcagctggctgcaggacctgatcgagaaggagcagtgcccctacaccagcgaggacgagtgcatcaaggacttcgacgagaaggagtaccaggagctgaacgagctgcagaagaagctgaacatcaacatcagcctggaccacaagagacccctgatcaaggtgctgggcatcagcagagacgtgatgcaggccagagacgagatcgaggccatgatcaagagagtgagactggccaaggagcaggagagcagagccgactgcatcagcgagttcatcgagtggcagtacaacgacaacaacaccagccactgcttcaacaagatgaccaacctgaagctggaggacgccagaagagagaagaagaagaccgtggacgtgaagatcaaccacagacactacaccgtgaacctgaacacctacaccgccaccgacaccaagggccacagcctgagcgtgcagagactgaccaagagcaaggtggacatccccgcccactggagcgacatgaagcagcagaacttctgcgtggtggagctgctgcccagcgaccccgagtacaacaccgtggccagcaagttcaaccagacctgcagccacttcagaatcgagaagatcgagagaatccagaaccccgacctgtggaacagctaccaggccaagaagaagaccatggacgccaagaacggccagaccatgaacgagaagcagctgttccacggcaccgacgccggcagcgtgccccacgtgaacagaaacggcttcaacagaagctacgccggcaagaacgccgtggcctacggcaagggcacctacttcgccgtgaacgccaactacagcgccaacgacacctacagcagacccgacgccaacggcagaaagcacgtgtactacgtgagagtgctgaccggcatctacacccacggcaaccacagcctgatcgtgccccccagcaagaacccccagaaccccaccgacctgtacgacaccgtgaccgacaacgtgcaccaccccagcctgttcgtggccttctacgactaccaggcctaccccgagtacctgatcaccttcagaaagtag

SEQ ID NO: 193773 - DNA, 3054 bp, Artificial Sequence
  derived and/or modified sequence
atgaccagccgcagactagaagagtccatgggagcagtccagatgggtctcgtgaacatgttcaaggggtttcagtcaaaggtcctgccccctctgtctcctaaagtggtcaccgaggaagaagtgaatagaatgctgacacctagcgaatttctgaaggagatgtctctgacgaccgaacaaagattagccaagactcgccttatgtgcaggcctcagataatcgagctgctggacatgggcgaaaccacccatcaaaagttctccgggattgacctggatcaggccctgttccagccatttccatctgaaatcatattccagaattacacaccatgtgaagtctatgaggtgcctcttatcctgaggaacaacgataaaatccctcggctggtcaaggtggtggaggagtcgagtccctatttcaaagtaattagcccaaaagacataggtcataaggtcgcccctggcgttccatcaatctttcgtattctttttaccccagaagaaaacaaagactacgcccacacgttgacttgcgtcaccgaacgagaaaaatttatcgtgcccattaaagcccggggagcaagggcaatcctggactttccggacaagcttaatttctctacatgcccagtaaagtatagcacacaaaaaatcttattagtcagaaatattggcaataaaaacgcagtattccatattaaaacttgccgtcctttttcaatagagcctgccattggaaccttaaacgtgggggagtctatgcaattagaggtcgaattcgagccacagtccgtgggcgaccacagcggaagactcattgtgtgttacgacactggagagaaagtgttcgttagcctgtatggtgcagctattgatatgaacattcgactggacaagaactcacttacaatagagaagacatacattagtctggctaaccagcgcacaattactattcacaataggtcgaacatcattgcacattttctgtggaaggtctttgccactcagcaggaggaggatagggagaagtacagagcttgcgatgatttaataaaggaggaaaaagatgagaccgacgagttcttcgaagaatgtattacagacccccttctgagagagcacttatctgtgctgagccgtacctttgctaaccagcggaggctggtccagggagacagtaagctcttcttcaataatgtgttcacagtggagcccttggagggcgacgtatggccaaactcctctgctgaaatcaccgtttacttcaatcccttggaagcaaaactgtatcagcagacgatctattgtgacatcctgggcagggagattcgactgcctctccgcattaagggtgaggggatgggccccaaaatccactttaatttcgagcttttagatattggaaaggtcttcacaggctcagcccactgctacgaggccattctttataataagggcagcatcgatgctttattcaacatgacaccaccgacaagtgccctcggcgcttgtttcgtgttcagccccaaggagggtattattgagccctctggcgttcaagcaattcagattagcttcagcagtaccatcctgggtaatttcgaagaggaatttctggtgaatgtgaacggctcacctgagccagtaaagctgaccattaggggatgcgtcatcggaccgacattccattttaatgtaccggccttacatttcggggacgtgtcctttgggtttcctcacacgctcatttgtagcctgaacaatacttccttgataccgatgacttataagctccgaatacccggagacggcctgggccacaagtcgatcagttactgtgaacagcacgtggactataaacgccccagttggacgaaagaggagatttccagcatgaagcctaaagaatttacgattagcccagattgcggaactatcaggccgcagggattcgcggccatccgcgtcactctatgttccaataccgtccaaaaatacgagctcgcattggttgtagacgttgagggcatcggtgaagaggtcctcgcactcctgatcaccgcccgctgtgtcgtgccagcccttcatcttgtcaatacggaagttgacttcggtcattgcttcctgaagtacccttatgagaagacacttcagctggccaaccaggacgacctgcccggattctacgaggtacaaccccaggtctgcgaagaggtgcctactgttctcttcagttcccccaccccatcgggggtgattagtccgagtagcaccattcacattcccctcgtgctcgaaacgcaggtgactggggagcacaggtcgacagtttatataagcatcttcggaagccaggaccctcctttggtgtgtcatctcaagtccgccggtgaaggtcctgttatctatgtgcatcccaaccaggtcgactttgggaatatttatgtgctcaaggattctagtagaattctaaatctctgtaatcaaagtttcattcctgcattttttcaggctcatatggctcataaaaagtccctgtggactatagaaccaaatgaaggcatggtgccacccgagacggatgtccagttagctttgaccgctaatctgaatgacacgctgaccttcaaagactgtgtaatattggatatcgagaacagctctacgtaccgcatccctgtgcaggcaagcgggactggaagtactatcgtcagcgacaagcccttcgcaccagagttgaacctcggggcacattttagccttgatacccattattatcactttaagctgataaataaaggccggaggatccagcagctgttttggatgaacgacagctttcgacctcaagcaaaattgtctaagaaaggacgtgtgaagaagggacacgcccatgtgcagccacagccatccggttcacaggagccaagagaccctcagtcccccgtatttcacttgcatcctgcatccatggaattgtacccgggccaggccattgatgtgattctggaaggttattccgcgaccccccgcgtgaggggctag

SEQ ID NO: 193774 - DNA, 3054 bp, Artificial Sequence
  derived and/or modified sequence
atgactagccggagactggaggaatccatgggggccgttcagatgggcctcgtaaatatgttcaaaggcttccagagcaaggtactgcctcccctctctcctaaagtcgtaaccgaggaggaagtgaatcgcatgctcacaccgtcagaattcctgaaggaaatgtccctgacaactgaacagagactggctaaaaccagacttatgtgtcgcccacaaatcattgaattgctggatatgggggaaacgacccaccagaagtttagcggcatcgacctcgatcaggcattgttccagccatttccttccgagattattttccagaactatacgccctgcgaggtgtatgaggtccctctgatacttaggaataatgataagattccgcgcctggttaaagtcgtcgaggaatcttctccttatttcaaagttatttcccccaaggacatcggacataaagtggcccccggggtgccaagcatcttccgaatactgtttacgcccgaagagaacaaggattacgcccatactctgacctgcgtgacagagagggagaagtttattgtgcccatcaaagctcgcggggccagggctatcctggatttcccggataagctgaatttttcaacctgccctgtgaagtatagtacccagaagatcctgctggtcagaaatataggaaataagaacgcagtttttcatatcaaaacatgccgacccttttccatcgaacccgccataggaaccctgaacgtaggcgagtcaatgcagctggaagtcgaatttgaacctcagtccgtgggagaccactccggccgcctcatcgtgtgctacgatacaggagagaaagtgttcgtgtctttatatggcgcagccatcgatatgaacatacggctcgacaagaactcgctcacaatcgagaaaacatacatctcgcttgccaaccagagaacgatcacaatccataacaggagcaatattatcgctcacttcctgtggaaggtatttgccacgcagcaggaggaagaccgggaaaagtaccgggcttgtgacgacctcatcaaagaggagaaggatgagacagacgaattttttgaagaatgcattaccgatccccttctgcgtgagcacctaagcgttttatcacgtacctttgccaaccagcggaggctagttcagggggactccaaactatttttcaacaacgtctttaccgtggagcccctggaaggagacgtgtggcctaactcatctgccgagatcactgtttacttcaatcctcttgaggccaagctctatcaacaaacaatatactgcgacatcctcggaagagagattcgcctgcctctgcgtatcaaaggggagggtatgggacctaaaatacacttcaactttgagctcctggacataggcaaagtttttacgggctcagcccattgctatgaggctatcttatataacaaaggttctattgacgccttattcaacatgactccccccacctccgcgttgggcgcatgcttcgtgtttagccctaaagaaggtatcatcgagccgtctggcgttcaagccatccagatctcgttctcctccacaatcctaggcaactttgaggaagagttcctcgtgaacgtgaacggatccccagagccggtgaaattgaccatcagaggatgcgttattgggccaactttccatttcaacgtgccggcactgcattttggcgacgtgtcctttgggtttcctcacaccttaatatgttctttaaacaatacaagcctgatccctatgacatataaactccggattccaggcgacggcttgggccacaaatcaatctcgtactgcgagcagcacgtggattacaaacgcccctcatggactaaagaagagataagtagcatgaaacctaaagagttcactatcagcccagactgcggaactatacgtccacagggtttcgctgctatcagggtcactttatgctctaacacagtacagaagtatgagctcgccttagtggtggatgttgagggcattggagaggaggtgttggcccttctgattaccgccagatgtgtggtgccagcactgcacttggtcaacacggaagtcgacttcgggcactgcttcctgaaatacccctacgaaaaaacactgcagctcgccaatcaagacgacctgcctgggttttatgaggtacagcctcaggtctgtgaggaagtgcccacggtgctcttctccagtcccactccgtctggcgtgatttcacccagctcaaccatccacattcccttagtgttagagacccaggtaactggcgaacataggtctactgtgtacatttctatattcgggtcacaagatcctcctctggtgtgtcacctgaaatcagccggggaaggacctgtgatctatgtgcaccctaatcaggtcgactttgggaacatctatgtcctgaaggacagctcacgtatcctcaacttatgcaaccaatcgttcattcctgcctttttccaggcccatatggcacacaaaaagagcctgtggaccatcgaacccaatgaggggatggttccaccagaaacagatgtccagctagccctgacagccaatctcaacgatacactgactttcaaagattgcgtgatacttgacatcgagaactcctctacctatcgcatccctgtacaagcctctggaactggctctaccatagtgtctgacaagccttttgcccctgagcttaacctaggcgcgcacttttctttagatacacactactatcactttaagcttattaacaagggccgacggattcaacagctcttctggatgaatgattctttcaggccccaggcaaagttgagcaagaagggacgcgttaagaagggccacgcacacgtacagcctcagccatcggggagccaggaaccccgggatccacagtcccccgtttttcacctccaccccgccagcatggaattgtacccaggacaggccatcgacgtgatcttagagggatattccgctactccacgcgttaggggctag

SEQ ID NO: 193775 - DNA, 3054 bp, Artificial Sequence
  derived and/or modified sequence
atgaccagccggcggctggaggagagcatgggcgctgtgcagatgggcctggtgaacatgttcaagggcttccagagcaaggtgctgccccccctgagccccaaggtggtgacagaggaggaggtgaacaggatgctgaccccatctgagttcctgaaggagatgagcctgaccacagagcagaggctggccaagacccggctgatgtgccggccccagatcatcgagctgctggacatgggagagaccacccaccagaagttctctggaattgacctggaccaggccctcttccagcccttccccagcgagatcatcttccagaactacaccccctgtgaggtgtatgaggtgcccctcatcctgagaaataatgacaagatcccccggctggtgaaggtggtggaggagagcagcccctacttcaaggtgatcagccccaaggacatcggccacaaggtggcccctggggtgcccagcatcttccgcatcctcttcaccccagaggagaacaaggactatgcccacaccctgacctgtgtgacagagcgggagaagttcatcgtgcccatcaaggcccggggggcccgggccatcctggacttcccagacaagctgaacttcagcacctgccctgtgaagtacagcacccagaagatcctgctggtgaggaacatcggcaacaagaatgctgtgttccacatcaagacctgccggcccttcagcattgaaccagccatcggcaccctgaatgtgggggagagcatgcagctggaggtggagtttgagccccagagcgtgggggaccacagcggccgcctgattgtgtgctatgacaccggggagaaggtgtttgtgtccctgtatggagctgccatcgacatgaacatccggctggacaagaacagcctgaccatcgagaagacctacatcagcctggccaaccagaggaccatcaccatccacaacagaagcaacatcatcgcccacttcctgtggaaggtgtttgccacccagcaggaggaggaccgggagaagtaccgggcctgtgatgacctgatcaaggaggagaaggatgaaacagatgagttctttgaggagtgcatcacagaccccctgctgcgggagcacctgtctgtgctgagcaggacctttgccaaccagaggcggctggtgcagggcgacagcaagctgttcttcaacaacgtgttcaccgtggagcccctggagggagatgtgtggcccaacagcagcgctgagatcaccgtgtacttcaaccccctggaggccaagctgtaccagcagaccatctactgtgacatcctgggccgggagatccggctgcccctgcgcatcaagggggagggcatgggccccaagatccacttcaactttgagctgctggacatcggcaaggtgttcaccggcagcgcccactgctatgaggccatcctgtacaacaagggcagcattgatgccctcttcaacatgaccccacccaccagcgccctgggcgcctgctttgtgttcagccccaaggagggcatcatcgagcccagcggcgtgcaggccatccagatctccttcagcagcaccatcctgggcaactttgaggaggagttcctggtgaatgtgaatggcagccctgagcctgtgaagctgaccatccggggctgtgtgattggccccaccttccacttcaacgtgcctgccctgcactttggagatgtgtcctttggcttcccccacaccctcatctgcagcctgaacaacaccagcctcatccccatgacctacaagctgcgcatccctggagatggcctgggccacaagagcatctcctactgtgagcagcacgtggactacaagaggcccagctggaccaaggaggagatcagctccatgaagcccaaggagttcaccatcagcccagactgtggcaccatccggccccagggctttgctgccatccgggtgaccctgtgcagcaacacagtgcagaagtatgagctggccctggtggtggatgtggagggcatcggggaggaggtgctggccctgctgatcacagcccgctgtgtggtgcctgccctgcacctggtgaacacagaggtggactttggccactgcttcctgaagtacccctatgagaagaccctgcagctggccaaccaggatgacctgcccggcttctatgaggtgcagccccaggtgtgtgaggaggtgcccaccgtgctcttcagcagccccaccccatctggagtcatcagccccagcagcaccatccacatccccctggtgctggagacccaggtgactggagagcacaggagcacagtgtacatcagcatcttcggcagccaggacccccccctggtgtgccacctgaagtctgctggggagggccctgtgatctacgtgcaccccaaccaggtggactttggaaacatctacgtgctgaaggacagcagccgcatcctgaacctgtgcaaccagagcttcatcccagccttcttccaggcccacatggcccacaagaagagcctgtggaccatcgagcccaatgaaggcatggtgcccccagagacagatgtgcagctggccctgacagccaacctgaatgacaccctgaccttcaaggactgtgtgatcctggacatcgagaacagcagcacctaccgcatccctgtgcaggccagcggcaccggcagcaccatcgtgtctgacaagccctttgcccctgagctgaacctgggcgcccacttcagcctggacacccactactaccacttcaagctgatcaacaagggccgccgcatccagcagctgttctggatgaatgacagcttccggccccaggccaagctgagcaagaagggccgggtgaagaagggccacgcccacgtgcagccccagcccagcggcagccaggagccccgggacccccagagccctgtgttccacctgcacccagcctccatggagctgtacccaggccaggccattgatgtgatcctggagggctacagcgccaccccccgggtgcggggctag

SEQ ID NO: 193776 - DNA, 3054 bp, Artificial Sequence
  derived and/or modified sequence
atgaccagccggcggctggaggagagcatgggcgccgtgcagatgggcttagttaatatgtttaaaggttttcagtcaaaggtgcttccccccctgtcacccaaggtggtgaccgaggaagaggtgaaccggatgttgacaccatctgaatttctgaaagagatgagtctcaccaccgagcagcggctggcgaagactcggttaatgtgccggccccaaataatcgagctgcttgacatgggggagacaacccaccaaaagttctctggaatagacctggatcaggcattatttcaaccttttccctctgagatcatttttcagaattataccccctgtgaggtgtacgaagtccctctaatcctcagaaataatgacaagattccaaggctcgtgaaggtagtggaggagagtagtccctatttcaaggtcataagtccaaaagatattggccacaaagtggcacctggagtaccctctatttttcggatattatttactcccgaggaaaacaaggattacgcccacacacttacatgtgttactgaacgggaaaaattcatcgtgccaatcaaggcccgaggtgccagagcaatcctggacttcccggacaagctgaacttctccacatgcccagtgaaatactcaacccagaagatcctgctggtcagaaacataggcaacaagaatgctgtgttccacataaagacatgcaggccattctcaattgaacccgccatcggcaccttaaacgttggcgaatccatgcagttggaagtggagttcgaaccacagtctgtcggagaccactcaggcagactgatcgtctgttacgataccggcgaaaaggtgttcgtatccctctatggggccgccatcgacatgaatatcagactggataaaaacagtctaacaatagagaaaacatacattagtctcgccaatcagcgcacaatcaccatccacaatcggagcaacatcattgctcactttctatggaaggtgttcgccactcagcaggaagaagatcgggaaaagtatcgggcctgcgatgatctgatcaaagaggaaaaagacgaaactgatgaattcttcgaagagtgtataactgaccctctgcttcgggaacacctttctgtactgtcaagaacattcgcgaaccagcgacggcttgtgcagggcgacagcaagctcttctttaacaacgtgtttacagtagaaccccttgagggggatgtctggccaaactccagtgccgagatcacagtctactttaatcctttagaggctaagctctaccaacagactatatattgcgatatactcggaagagaaattaggctaccgcttaggattaaaggagagggaatggggcctaaaatccatttcaacttcgaacttctagatatcggtaaagttttcactgggagcgctcactgctacgaagcaattctctataacaaaggcagtattgatgctctgttcaatatgacccctcccacctcagctctgggcgcttgttttgtgtttagccctaaggaaggtattatcgagcccagcggggtccaagccatacagattagctttagtagtaccatcctcggcaattttgaggaggagtttctggtgaacgtgaacgggagtcctgagcccgtcaagctcactatacgcggctgtgtgattggaccaacattccacttcaacgtacctgccctgcactttggcgacgtctccttcggttttccccatactctgatctgctcactgaacaacacatccctgattccaatgacttataagttgaggatccctggcgatggactgggccataagtccatcagctactgcgagcagcatgtcgactacaaaagaccttcttggaccaaggaggagatctcttcaatgaagccaaaagagttcactatttctcccgactgcgggaccatacgccctcaagggttcgctgccatacgtgtgactctgtgttcgaacacagtccagaagtacgaacttgcattggtggttgacgtcgagggcatcggcgaggaggtccttgcactcctgatcaccgcgcgatgcgtcgtgccagcactacacctggtgaacactgaagtcgactttgggcactgcttcctgaaatacccttacgagaaaacccttcagttggccaaccaggatgacctgcccggattctatgaagtgcaacctcaggtgtgcgaggaagtccccaccgtgctcttctcctctccaacaccctctggcgtcatctctccaagcagtaccattcatatcccactagtactggagacgcaagttacaggcgaacacaggagcaccgtgtatatcagcatttttgggtctcaggaccctcccctcgtgtgccacctgaagagcgctggcgagggacctgttatctatgtgcatcccaaccaggtcgatttcggaaacatatatgtgctgaaggacagctcccggatcttgaacttatgcaatcagagctttatccctgcattcttccaggcccatatggcgcataagaagagtctgtggacaatcgaacccaatgaggggatggtacctccggaaaccgacgtgcaactcgcactcacggctaaccttaacgacacacttactttcaaagactgtgttatacttgacatagagaatagctcaacgtatcggatccccgttcaagccagtggaactggcagcacaatcgtttcagacaaaccattcgccccagagctgaatttaggagctcacttttccttggacacccactactaccatttcaagttaatcaacaagggtcgccgaattcagcagttgttttggatgaacgactcttttaggcctcaggcaaaattatctaaaaaagggcgcgtgaagaaggggcacgctcacgtccagcctcagcccagtgggagtcaggaaccacgggatccccaatcaccagtgtttcatctccaccccgcctccatggagttatacccaggccaagcaattgacgtcatcctcgagggctatagtgcaaccccccgggtacgcggctag

SEQ ID NO: 193777 - DNA, 3054 bp, Artificial Sequence
  derived and/or modified sequence
atgaccagccggcggctggaggagagcatgggcgccgtgcagatggggctagtaaacatgtttaaggggttccagagtaaagtattaccacccctatccccgaaagtggttacagaagaagaagtcaacaggatgctgacaccatccgaatttttgaaggaaatgagccttaccacagaacagcgactcgctaagacaaggctcatgtgtcggccacagatcatcgagctcctggacatgggggaaacaacacaccagaagttttccggtatagacttagatcaagcgttgttccaacccttcccctctgaaatcatctttcagaattacactccctgtgaggtgtatgaagttcctctaatcttgagaaacaatgacaagattccacgattagtaaaggtggtggaagaaagctcaccctatttcaaggttatttcgcctaaggacatcggtcataaggtggccccaggcgtgccttccattttcagaatcctttttacaccggaggagaacaaagactatgcccatacactcacatgcgtgacagaacgggagaagtttatagttcccatcaaggctcggggggcccgcgccatcctcgatttccctgacaaactgaatttctcaacatgtcccgtgaagtacagcacccagaaaattctcttggtgaggaatatcggtaacaagaatgcagtttttcatatcaaaacctgtcgacctttcagtatcgaacctgcaataggaactcttaacgtcggggagtcgatgcagcttgaggtggaattcgagccgcaatcggtcggtgaccattctggcagacttatagtgtgctacgacaccggggaaaaagttttcgtgtctttgtatggggcggcaatcgatatgaatatcagattggataagaattcgcttacaatcgagaaaacttatataagtcttgccaaccaacgaaccatcacaattcataaccgaagcaatattatcgcccactttctttggaaggtcttcgccacgcagcaggaagaggatcgcgaaaagtaccgtgcttgcgatgatctcattaaagaggaaaaagacgagaccgatgagttcttcgaagagtgcatcacggaccctctgctaagggaacatctgtccgtgcttagtcgaacgttcgctaaccagcgcaggctggtgcaaggggattctaaactctttttcaacaatgttttcactgtagagccacttgaaggggacgtgtggccaaacagcagcgctgagataacggtgtatttcaacccgttggaagctaaactctatcagcaaaccatctattgtgacattctcggccgcgaaatcaggcttccactgcgcatcaaaggagaggggatggggcctaaaatccacttcaacttcgaactcctggacatcggaaaagtattcacaggctcggcacactgctacgaagcgatcttgtacaataaagggtccattgacgccctctttaacatgactcctcccactagtgctctcggagcctgtttcgtgttctctcccaaggaggggattattgaacccagtggggtacaagcaatccaaatttcctttagttcgactatactggggaacttcgaagaagagtttctggtgaacgtcaacggaagcccagaacctgtgaaactgactatcagaggctgtgtcattggacccacctttcatttcaatgtgcctgctttgcactttggcgacgtcagctttggatttccccacacactcatttgttcgctgaacaatacctctctcatcccaatgacttataagctccggatccccggagatggactaggtcacaagtccatttcttattgtgagcaacacgttgattacaaaaggccctcttggaccaaagaggagattagtagtatgaaacccaaggagttcacaatcagcccagactgcggaactattcgaccccagggatttgctgctattagagtgaccctctgcagcaacactgtgcagaaatacgagctcgctctcgtggtggacgttgaaggcataggagaagaggttctggcactgcttatcaccgcgcgttgcgtggtgccggccctgcatctggtcaatactgaagtcgatttcgggcactgcttcttgaagtatccttacgagaagaccttacagttagccaaccaagatgatctccccggattttatgaggttcagccgcaagtttgcgaggaggtgccaacggtgctgttctcgagccctactccaagcggcgtcattagtccaagcagtaccatccatattcctctcgtcttggaaacacaggtgaccggcgagcataggtcaactgtgtatatctccatcttcggatcccaggaccccccactagtgtgtcatctaaagtcagctggcgaaggccctgtgatctacgtgcaccctaatcaggtcgacttcggaaacatctacgtcctcaaagattctagccggatcctgaacctgtgcaatcaaagcttcatcccggctttcttccaggctcacatggcccataagaaatctctctggacaatcgaacccaacgagggtatggtccctcctgagacagacgtgcagctggcattgacagctaacctcaatgacacactcacctttaaggactgcgtcattctggacatcgagaactcctctacctatagaatccctgttcaggcatctggcaccggcagcaccatcgtgagtgacaagcccttcgctccagaactgaatctgggcgcacacttctcactggacacccactattaccatttcaagctaataaataagggcaggaggattcagcaacttttctggatgaacgattcgttccggccacaggctaaactgtccaagaaggggagggtgaagaaaggccatgcacatgtgcagcctcaaccctcaggatcgcaggagccccgggatcctcagtctccggtattccacctgcatcctgcctcgatggagctttatcctggccaagcgatcgacgtcattctagagggctattccgctaccccaagagttaggggatag

SEQ ID NO: 193778 - DNA, 3054 bp, Artificial Sequence
  derived and/or modified sequence
atgacatcaagacgtctggaggaaagtatgggagccgtgcaaatggggttagtgaatatgttcaagggattccagagcaaggtgttgcccccactgtcgcccaaagtcgtgacggaagaagaagtgaatcgtatgctgaccccctccgagttccttaaggagatgagtctgactacggagcaacgactggccaagacacgcttaatgtgtagaccccaaattatcgagctgcttgacatgggcgaaaccactcaccaaaaattctccggtattgatctcgaccaggctctttttcagccatttccctcagagattatcttccaaaattataccccatgcgaagtctacgaggtgccgctgatcctgcgaaacaatgacaaaatcccacgcctggttaaagtggtggaagagtcctctccttactttaaagtgatctccccaaaggatattgggcataaggtcgcacctggggtgcccagtatcttcaggatcttgttcacccccgaggaaaataaggactacgcccacaccctaacctgcgtgaccgaacgagagaaattcatagtgcctattaaagcacgcggagctagagctatactagactttcctgacaaattgaatttttctacctgccctgtaaagtactccacccagaaaattctgctggttcgcaacatcggcaacaaaaatgctgtcttccacattaagacgtgccgccctttctcaatcgagcccgctatcggcacacttaatgtaggggagtctatgcagctggaagttgaattcgaacctcagtctgtgggggaccattctggacggcttatcgtatgctacgataccggcgaaaaagtgtttgtcagcctgtacggcgcagcgatagacatgaacatcaggttggataaaaatagcttgacaattgagaaaacctacatctccctcgcaaatcagaggacgattaccatacataatcgcagtaatatcatagcacattttctgtggaaggtctttgccacccagcaggaggaggacagggagaaatatagagcatgcgacgacctgattaaagaggaaaaggacgagaccgacgaattcttcgaagaatgcataacagaccctctgctgagggagcatttgtcagtcctgagtcgtacttttgccaatcagcgacgcttagtgcaaggcgattcaaagctcttctttaacaatgtgtttactgtcgagccactggagggtgacgtctggccaaattcttctgcagagattaccgtgtacttcaacccattggaggctaagctctatcagcagactatctattgtgacatcctgggacgggaaattcgtcttccactgcggatcaagggagaggggatggggcctaaaatacacttcaatttcgagcttcttgatatcgggaaagtttttacaggctctgcgcactgctacgaagctatcctgtataataagggatctatcgatgcgctgtttaacatgacccccccaacgtccgccctcggggcatgctttgtgttttcccctaaggaagggatcatcgagccaagcggggtgcaagctattcagatctccttttccagcacgatcctcgggaactttgaggaagagtttcttgttaatgtgaatggctcacccgagccagtgaaactaacaattcgaggttgtgtgattggtcctacattccatttcaacgttcctgctcttcattttggggatgtctccttcggttttccccataccctgatttgcagtctgaacaacacgagtctgatcccgatgacatataaactaagaataccaggggacggattaggccacaaatcaataagttattgtgagcagcacgtggattacaaacggcctagctggaccaaggaggaaatatccagcatgaagcccaaggagtttaccattagccccgattgtggaacgatacggccacaggggttcgccgctattcgagtgactctctgttccaacactgtgcaaaagtacgagcttgcattggtggtggatgtggaagggatcggtgaagaggttttggccctacttataacagccagatgcgttgtcccagcactgcacctagtaaataccgaggttgacttcgggcattgttttttaaaatacccctacgagaagactcttcagctggctaatcaggacgacttgccgggattctatgaagtgcagcctcaggtatgcgaggaagtgccaaccgtcttgttttcttcgccaacgccatccggcgtgatctcgccgtcgagtaccatccacatcccactggtgctcgagacgcaggtcacgggagaacaccgttccacagtgtacatctccattttcgggagccaggatcccccactggtgtgtcacctgaaatctgcaggcgaaggtccagtgatctacgtgcacccaaatcaggtcgatttcggcaacatatatgtcttaaaagactcttcccgaattctgaatctgtgcaaccagtcgtttatacctgctttcttccaggcccacatggcccataagaagagtctttggaccatcgaaccaaatgaaggcatggtacctccagagacagatgtacagcttgcactcactgcgaatctgaatgatacactgacctttaaggattgcgtgattctagacattgaaaattccagtacctaccggatcccagtccaggcaagcggaaccggatcaactatagtctcagataagccttttgctcccgaactgaacctgggtgctcacttcagcctcgacactcattattatcattttaaactgataaacaaggggagaaggattcagcagctgttttggatgaatgacagcttccgccctcaagccaaactgagtaaaaaaggccgtgtgaagaagggccacgctcatgtacagccacagccaagtggcagccaggaacctcgcgatccgcagtcccctgtatttcacctgcatccagcctcaatggagctttacccaggacaggctattgatgtgatcctggagggatacagtgccacaccaagagttagaggctag

SEQ ID NO: 193779 - DNA, 3054 bp, Artificial Sequence
  derived and/or modified sequence
atgacatccagacgcctggaagaaagtatgggcgctgtgcaaatgggactggttaatatgtttaaggggtttcaatcaaaggtgctgcctccactgtcccctaaggtggttactgaggaagaggtgaatagaatgttgacgccctcagaattcctaaaggagatgtctctcaccacagaacagcgcctggctaagaccaggctcatgtgtaggccacaaattattgagctgttggacatgggcgagacaacacatcagaaattctcgggcattgacctggatcaggccttattccaaccctttccatccgaaattatcttccagaattatacaccctgtgaggtctacgaagtgccactgattttacgtaacaacgataagataccacgcctggtgaaggtggtggaggagtcctcaccctattttaaagtgatcagccccaaagacatcggacacaaggtggccccaggtgtccccagcattttccgtatcctgtttacacctgaggagaacaaggattacgctcacactctcacatgcgtcacagaacgcgagaagttcattgtgcccatcaaggcgaggggagccagagcaatcctcgactttcccgacaaattaaacttttctacgtgcccggtgaaatactccacacagaaaatacttcttgttaggaatattgggaacaaaaatgctgtgtttcatattaagacttgcaggcccttctctatcgagccagccatcggaactcttaatgtgggagagtcaatgcagctggaggtggagtttgaaccacaaagcgtaggagaccatagtggacggttaattgtttgctacgatacaggagaaaaggtctttgtttccctgtacggagccgctattgacatgaacatccgcctcgataaaaactccttaacaatcgaaaagacctatataagccttgcaaaccagagaacaatcaccatccacaaccggtctaacatcatagcccactttctgtggaaagtgtttgcaacccagcaggaggaggacagagagaagtaccgcgcatgcgacgatctgattaaggaagagaaagacgaaactgacgaattcttcgaggaatgtatcaccgaccctctgttgcgggaacacctgtccgtgctgtcacggactttcgccaaccagagaaggctcgtacagggagattctaagctgttttttaacaacgtgttcaccgtagagcccctggagggcgatgtatggcctaactcttcagctgaaatcacagtctacttcaatcctctagaggccaagctgtatcagcagaccatctactgcgacattctcggcagggaaatcaggctcccactgcggattaaaggcgaagggatgggaccgaagatacacttcaatttcgaacttctggacattggcaaggtgttcaccggctcagcccactgttatgaggcaatactgtataacaaaggcagtatcgatgccttattcaacatgactcccccaaccagtgccttaggtgcctgctttgtgttttctcctaaggagggcattatcgagccctcaggggttcaggccatccagatcagcttcagctcaaccattcttgggaacttcgaggaagagtttctggtaaatgtgaacgggtccccagaaccagttaagctgaccatcagagggtgcgtgataggccctacctttcattttaatgttcctgctctgcactttggagatgtgagctttgggtttccacataccctgatatgttcacttaacaatacatcgcttattcccatgacatacaaactacgcattccaggtgatggactggggcataagagcatttcctactgtgagcagcacgtcgattacaaaaggccatcttggacgaaagaagagataagctctatgaaacctaaggagttcaccatcagccctgattgtggaaccatccggcctcagggattcgctgccatccgtgttactctatgctccaacacagtccagaaatatgagctggccctggttgtggatgttgagggaataggcgaagaggttctggcgctgctcatcacagcacgttgtgtggtgcctgcactccatctagtcaatactgaggtggatttcgggcattgcttcctaaaatacccttacgagaagaccctgcagctggcaaaccaggatgatctacctgggttctatgaagttcagccccaagtctgcgaagaagtacctaccgtgctcttttcatctcctaccccgtccggtgtcatctccccttcctcaacaatacatatacccctggtgctcgaaacacaggttaccggagaacaccgctccacggtttatatcagcatcttcggatctcaagatcctcctctggtgtgtcatctgaagagcgccggagagggtccagtgatctacgtgcaccccaaccaggtggactttggaaacatctatgtgcttaaggactctagccgaatcttgaacctttgtaaccagtcgttcatcccagcattttttcaagctcacatggcacacaaaaaaagcctctggacaatcgagcccaatgaggggatggtgccaccagagactgatgttcaactggcactaaccgctaacttgaacgacacactgaccttcaaggattgtgtgatactggatatcgagaatagttctacatatcggattcccgtccaggctagcggaactggaagcactattgtatcggacaaaccttttgcccctgaattaaacctaggtgcccatttttctctggatacccattattaccacttcaagctgattaataaaggtcggagaatccaacagctcttctggatgaatgacagcttcagaccacaggccaaactgtctaagaagggtcgggttaagaaggggcacgctcacgtacagcctcagccctctggtagtcaggagccaagggacccccagagtccggtatttcacctgcacccagcttctatggaactctatccaggtcaggccattgatgtaatcctggaaggatatagcgcgacgccgagggtgcgtggctag

SEQ ID NO: 193780 - DNA, 3054 bp, Artificial Sequence
  derived and/or modified sequence
atgaccagcagaagactggaggagagcatgggcgccgtgcagatgggcctggtgaacatgttcaagggcttccagagcaaggtgctgccccccctgagccccaaggtggtgaccgaggaggaggtgaacagaatgctgacccccagcgagttcctgaaggagatgagcctgaccaccgagcagagactggccaagaccagactgatgtgcagaccccagatcatcgagctgctggacatgggcgagaccacccaccagaagttcagcggcatcgacctggaccaggccctgttccagcccttccccagcgagatcatcttccagaactacaccccctgcgaggtgtacgaggtgcccctgatcctgagaaacaacgacaagatccccagactggtgaaggtggtggaggagagcagcccctacttcaaggtgatcagccccaaggacatcggccacaaggtggcccccggcgtgcccagcatcttcagaatcctgttcacccccgaggagaacaaggactacgcccacaccctgacctgcgtgaccgagagagagaagttcatcgtgcccatcaaggccagaggcgccagagccatcctggacttccccgacaagctgaacttcagcacctgccccgtgaagtacagcacccagaagatcctgctggtgagaaacatcggcaacaagaacgccgtgttccacatcaagacctgcagacccttcagcatcgagcccgccatcggcaccctgaacgtgggcgagagcatgcagctggaggtggagttcgagccccagagcgtgggcgaccacagcggcagactgatcgtgtgctacgacaccggcgagaaggtgttcgtgagcctgtacggcgccgccatcgacatgaacatcagactggacaagaacagcctgaccatcgagaagacctacatcagcctggccaaccagagaaccatcaccatccacaacagaagcaacatcatcgcccacttcctgtggaaggtgttcgccacccagcaggaggaggacagagagaagtacagagcctgcgacgacctgatcaaggaggagaaggacgagaccgacgagttcttcgaggagtgcatcaccgaccccctgctgagagagcacctgagcgtgctgagcagaaccttcgccaaccagagaagactggtgcagggcgacagcaagctgttcttcaacaacgtgttcaccgtggagcccctggagggcgacgtgtggcccaacagcagcgccgagatcaccgtgtacttcaaccccctggaggccaagctgtaccagcagaccatctactgcgacatcctgggcagagagatcagactgcccctgagaatcaagggcgagggcatgggccccaagatccacttcaacttcgagctgctggacatcggcaaggtgttcaccggcagcgcccactgctacgaggccatcctgtacaacaagggcagcatcgacgccctgttcaacatgaccccccccaccagcgccctgggcgcctgcttcgtgttcagccccaaggagggcatcatcgagcccagcggcgtgcaggccatccagatcagcttcagcagcaccatcctgggcaacttcgaggaggagttcctggtgaacgtgaacggcagccccgagcccgtgaagctgaccatcagaggctgcgtgatcggccccaccttccacttcaacgtgcccgccctgcacttcggcgacgtgagcttcggcttcccccacaccctgatctgcagcctgaacaacaccagcctgatccccatgacctacaagctgagaatccccggcgacggcctgggccacaagagcatcagctactgcgagcagcacgtggactacaagagacccagctggaccaaggaggagatcagcagcatgaagcccaaggagttcaccatcagccccgactgcggcaccatcagaccccagggcttcgccgccatcagagtgaccctgtgcagcaacaccgtgcagaagtacgagctggccctggtggtggacgtggagggcatcggcgaggaggtgctggccctgctgatcaccgccagatgcgtggtgcccgccctgcacctggtgaacaccgaggtggacttcggccactgcttcctgaagtacccctacgagaagaccctgcagctggccaaccaggacgacctgcccggcttctacgaggtgcagccccaggtgtgcgaggaggtgcccaccgtgctgttcagcagccccacccccagcggcgtgatcagccccagcagcaccatccacatccccctggtgctggagacccaggtgaccggcgagcacagaagcaccgtgtacatcagcatcttcggcagccaggacccccccctggtgtgccacctgaagagcgccggcgagggccccgtgatctacgtgcaccccaaccaggtggacttcggcaacatctacgtgctgaaggacagcagcagaatcctgaacctgtgcaaccagagcttcatccccgccttcttccaggcccacatggcccacaagaagagcctgtggaccatcgagcccaacgagggcatggtgccccccgagaccgacgtgcagctggccctgaccgccaacctgaacgacaccctgaccttcaaggactgcgtgatcctggacatcgagaacagcagcacctacagaatccccgtgcaggccagcggcaccggcagcaccatcgtgagcgacaagcccttcgcccccgagctgaacctgggcgcccacttcagcctggacacccactactaccacttcaagctgatcaacaagggcagaagaatccagcagctgttctggatgaacgacagcttcagaccccaggccaagctgagcaagaagggcagagtgaagaagggccacgcccacgtgcagccccagcccagcggcagccaggagcccagagacccccagagccccgtgttccacctgcaccccgccagcatggagctgtaccccggccaggccatcgacgtgatcctggagggctacagcgccacccccagagtgagaggctag

SEQ ID NO: 193781 - protein, 739 aa, Artificial Sequence
  derived and/or modified sequence
MAPWLQLCSVFFTVNACLNGSQLAVAAGGSGRARGADTCGWRGVGPASRNSGLYNITFKYDNCTTYLNPVGKHVIADAQNITISQYACHDQVAVTILWSPGALGIEFLKGFRVILEELKSEGRQCQQLILKDPKQLNSSFKRTGMESQPFLNMKFETDYFVKVVPFPSIKNESNYHPFFFRTRACDLLLQPDNLACKPFWKPRNLNISQHGSDMQVSFDHAPHNFGFRFFYLHYKLKHEGPFKRKTCKQEQTTETTSCLLQNVSPGDYIIELVDDTNTTRKVMHYALKPVHSPWAGPIRAVAITVPLVVISAFATLFTVMCRKKQQENIYSHLDEESSESSTYTAALPRERLRPRPKVFLCYSSKDGQNHMNVVQCFAYFLQDFCGCEVALDLWEDFSLCREGQREWVIQKIHESQFIIVVCSKGMKYFVDKKNYKHKGGGRGSGKGELFLVAVSAIAEKLRQAKQSSSAALSKFIAVYFDYSCEGDVPGILDLSTKYRLMDNLPQLCSHLHSRDHGLQEPGQHTRQGSRRNYFRSKSGRSLYVAICNMHQFIDEEPDWFEKQFVPFHPPPLRYREPVLEKFDSGLVLNDVMCKPGPESDFCLKVEAAVLGATGPADSQHESQHGGLDQDGEARPALDGSAALQPLLHTVKAGSPSDMPRDSGIYDSSVPSSELSLPLMEGLSTDQTETSSLTESVSSSSGLGEEEPPALPSKLLSSGSCKADLGCRSYTDELHAVAPL

SEQ ID NO: 193782 - DNA, 2220 bp, Artificial Sequence
  derived and/or modified sequence
atggccccatggctacagctctgcagtgtgttttttacagtgaacgcttgcctgaatggcagtcaactggccgtggcagctggcggctccgggcgcgctaggggagctgacacatgcggatggcgcggagtgggccctgccagccgcaacagcggtctttacaatattactttcaaatacgacaactgtacaacctaccttaaccctgtgggcaaacacgtcatcgctgatgcacagaatatcactattagtcagtacgcgtgtcatgaccaggtggcagtgactatcctttggtctcctggtgctctagggattgaattcctgaaaggctttagagtaatcttagaagaactgaagtccgaaggacgacagtgccagcaactgattttgaaagacccgaagcagctcaactcaagttttaagcggactggtatggagagccaaccctttttgaatatgaagtttgaaactgattactttgttaaagtggtccctttcccgagtattaaaaacgagtccaactaccatcccttctttttcaggacccgtgcctgtgacctcctgctccagccagacaatttggcttgcaagccattctggaaacccagaaatctaaacatttcccagcacgggtcagacatgcaggtttcttttgaccacgccccccacaatttcgggttccgttttttctacttgcactacaaactgaagcacgagggcccctttaaacgcaaaacatgtaaacaggagcagaccactgaaaccactagctgcctgctccagaatgtgagccccggagattatattattgagctggttgatgatacgaacaccacccgaaaggtgatgcattacgccctgaaaccggtgcattcaccctgggccggccccatccgggctgtggctatcactgtgcctctcgtcgttatatccgcctttgctactctttttaccgtgatgtgcaggaagaagcagcaggaaaacatatacagtcacctagacgaagagtcatccgagtcttccacatacactgccgctctcccgcgtgagcggctccggccaagacccaaagttttcctttgctactccagcaaggacggacaaaatcatatgaatgttgtgcagtgctttgcttatttcctccaggacttctgtggctgtgaggtggctctcgatctctgggaagacttctcgctctgccgagagggacagcgcgagtgggtcatccagaagattcacgagtcccagtttatcatcgtcgtgtgctcaaaggggatgaaatattttgtggacaagaagaactacaaacacaagggaggtggcagaggctctggaaagggagagctcttcttagtggccgtctccgcaatagcagagaagttaagacaggcaaagcagtctagttccgctgccctgagcaaatttatcgccgtttacttcgattactcatgcgagggtgacgttccaggcattctggatctgtccaccaagtacaggctgatggataacctcccgcagctgtgcagccatcttcacagccgggaccatggtttgcaggaacccggtcaacacactcgtcagggatcccgaagaaactacttccgctccaaatccggccgcagcctgtatgtggctatttgtaatatgcatcagttcattgacgaggagcccgactggtttgagaaacagttcgtgcctttccatcctcctcccttgcggtacagggaacccgtgctagaaaagtttgatagcgggttagtgcttaatgacgtgatgtgtaagcccggtccagagagcgacttttgtttgaaagtcgaagctgccgttctgggggccaccggcccagcggattctcagcatgagagtcagcacggcgggcttgaccaggatggcgaagctcggccggctcttgacgggtccgctgctttacagcctctccttcacactgttaaggcaggctcgccctcagacatgccacgagactctggtatttatgactcgtctgtgccatcttcagagcttagccttccgcttatggaagggctgagcaccgatcagactgaaacgtcttcattaacagagagcgtatcaagttccagtggattgggcgaagaggagccacccgcactcccatctaaactcttgagtagtggaagttgcaaggcagatctgggatgcaggtcttatacagatgagctccacgctgtggcacctctttag

SEQ ID NO: 193783 - DNA, 1788 bp, Artificial Sequence
  derived and/or modified sequence
atggagagtcagccctttcttaatatgaaattcgagaccgactattttgtaaaggtggtgccttttccgtcaatcaagaatgagtcgaattaccaccccttttttttcagaacacgggcctgcgacctcctgcttcagcccgataacctagcatgtaagcctttctggaagccccggaacctcaacatctctcagcacggaagtgatatgcaggtatcttttgaccacgcgcctcacaatttcggctttagattcttctatctccattacaagctgaagcatgagggtccctttaaacgaaagacatgtaagcaagaacaaaccacagagacgacctcatgccttctgcagaatgtgagcccgggagattacatcatagaactggtcgatgataccaatactacgcgcaaagtgatgcactatgctctcaaaccggtgcactcaccatgggctggtccaatccgcgctgtggccatcaccgttccacttgttgtaatttccgccttcgctactctgttcactgtcatgtgtaggaagaagcagcaggagaacatctactctcacctggacgaagaatcttcagaatccagcacgtacaccgccgccctgccgcgagagcgcctccggcctcggcccaaggtcttcctttgttactccagcaaagatgggcagaaccacatgaacgtggtgcagtgctttgcctatttccttcaggatttctgtggctgcgaagtcgctctcgacctatgggaagattttagcttgtgtagagagggtcagcgcgagtgggtcattcaaaaaatccatgagtctcagtttatcattgtagtgtgtagcaaaggcatgaaatacttcgtcgataagaagaactacaagcataagggcggaggccgtggtagcggcaagggcgaactgtttttagtggccgtgagcgctatcgctgaaaagttgaggcaggctaagcagagctctagcgcagcattaagtaagttcatcgcagtgtactttgactacagttgtgaaggcgatgtgccgggtatcttggacttgagcactaaatatcggctgatggataatcttccccagctgtgctcacacctgcattcaagggatcacggccttcaggagccaggacagcacacacgccagggctcacggcgaaactattttcgctcaaagtccggcagaagcctgtatgtagccatctgtaatatgcaccagttcatagacgaagagccagattggttcgaaaagcagttcgtcccgtttcacccacctccactgcgctaccgggagccagtcttggagaagtttgatagtggcctggttcttaacgacgtcatgtgtaagccagggcccgaaagtgatttttgcctgaaggtcgaggccgccgtgcttggtgcaacaggccctgccgacagccagcatgagtcacagcatggagggctggatcaagacggagaggcccgacccgccttggatgggtccgctgctctgcaacctcttcttcataccgtaaaggccgggtcgcctagcgacatgccaagggatagcggaatttacgacagctctgtcccctcctcagagctgtccttacccttaatggaagggttgtcaactgaccagacagaaacatcttctctgaccgaaagcgtgtctagttcctctgggttgggcgaagaagagcctccagcgctgccaagtaagctgctaagcagcgggagttgcaaagcagacctagggtgtagaagctatacagatgagctacacgccgtcgctcctttgtag

SEQ ID NO: 193784 - DNA, 1788 bp, Artificial Sequence
  derived and/or modified sequence
atggagtctcagccctttctcaacatgaagtttgaaacagattattttgtaaaagtggtcccgtttccttccattaagaatgaaagtaattaccaccctttttttttccgcactcgcgcctgtgatcttctgctgcaaccagataatctcgcatgcaaaccattctggaagcctcgcaacctgaatattagtcagcatggatcagacatgcaagtgtcctttgaccacgccccccataatttcggcttcagattcttttacttgcactacaaactgaagcacgagggccccttcaaacggaagacgtgcaagcaggaacagaccacagagaccacatcatgtctgctgcaaaatgttagcccaggtgactacattatagaattggtggacgataccaatacaacgagaaaggtgatgcattatgccttgaagccagttcatagtccctgggccggacctatccgtgccgtggcgatcactgtcccacttgtcgtaatcagcgcatttgccacactgtttaccgtcatgtgccgaaaaaagcagcaggagaatatttactctcacttggatgaggagtcttccgaaagctctacatatacagctgctctgccacgggagaggcttaggcctaggcccaaggtctttctctgctattctagcaaggacggtcagaatcacatgaacgtcgtgcagtgctttgcatatttccttcaggacttttgcggctgtgaggttgctctcgatctctgggaggacttcagtctctgtcgggaggggcaaagggagtgggtgatccagaagatccatgagagccaatttataatcgtggtttgctcaaagggcatgaagtattttgtcgacaaaaagaactacaaacataagggaggtggcagaggttctgggaaaggagagttattcctcgttgctgtgtcagccatcgccgagaaactgcgacaggcaaaacagtccagttccgcagcactcagcaagtttatcgcagtgtatttcgactattcttgcgagggcgacgtgcctggtatactggacctgtcgacaaagtatcgccttatggataatctgccccagctctgttcgcatctgcactctagagaccatgggcttcaggaaccaggccaacatacccggcaagggtctcgcaggaactatttcagatccaaatctgggaggtccctctacgttgccatatgtaacatgcatcaattcattgacgaggagccagactggtttgaaaagcagtttgtaccttttcatccgcctcctctccgatacagggagcctgtcctcgagaaattcgacagtggcctcgtcctgaacgatgttatgtgcaagccagggcctgagtctgacttttgcctgaaagttgaagcggcagtcctgggcgcaacgggcccagccgacagccagcatgaatcacagcacggcgggctggaccaagatggcgaggcccgtccagccttggacgggtctgccgcgttgcagccactgttacacacggtgaaggctggaagtccctccgacatgcctagagactccgggatatatgacagctccgtaccaagctcagaactcagcctgcctctcatggagggtttgagcaccgatcagaccgagacaagctctctaacagagtccgtcagttcgtcgagcggactcggggaggaggagccgccagctctgcctagcaagctcttgagtagtgggtcatgcaaagcggaccttggatgcaggtcatacaccgacgagctacatgccgttgccccgctatag

SEQ ID NO: 193785 - DNA, 8720 bp, Artificial Sequence
  derived and/or modified sequence
gcggccgccgcggccaccgcccactcggggctggccagcggcgggcggccggggcgcagagaacggcctggctgggcgagcgcacggccatggccccgtggctgcagctctgctccgtcttctttacggtcaacgcctgcctcaacggctcgcagctggctgtggccgctggcgggtccggccgcgcgcggggcgccgacacctgtggctggaggggagtggggccagccagcagaaacagtgggctgtacaacatcaccttcaaatatgacaattgtaccacctacttgaatccagtggggaagcatgtgattgctgacgcccagaatatcaccatcagccagtatgcttgccatgaccaagtggcagtcaccattctttggtccccaggggccctcggcatcgaattcctgaaaggatttcgggtaatactggaggagctgaagtcggagggaagacagtgccaacaactgattctaaaggatccgaagcagctcaacagtagcttcaaaagaactggaatggaatctcaacctttcctgaatatgaaatttgaaacggattatttcgtaaaggttgtcccttttccttccattaaaaacgaaagcaattaccaccctttcttctttagaacccgagcctgtgacctgttgttacagccggacaatctagcttgtaaacccttctggaagcctcggaacctgaacatcagccagcatggctcggacatgcaggtgtccttcgaccatgcaccgcacaacttcggcttccgtttcttctatcttcactacaagctcaagcacgaaggacctttcaagcgaaagacctgtaagcaggagcaaactacagagacgaccagctgcctccttcaaaatgtttctccaggggattatataattgagctggtggatgacactaacacaacaagaaaagtgatgcattatgccttaaagccagtgcactccccgtgggccgggcccatcagagccgtggccatcacagtgccactggtagtcatatcggcattcgcgacgctcttcactgtgatgtgccgcaagaagcaacaagaaaatatatattcacatttagatgaagagagctctgagtcttccacatacactgcagcactcccaagagagaggctccggccgcggccgaaggtctttctctgctattccagtaaagatggccagaatcacatgaatgtcgtccagtgtttcgcctacttcctccaggacttctgtggctgtgaggtggctctggacctgtgggaagacttcagcctctgtagagaagggcagagagaatgggtcatccagaagatccacgagtcccagttcatcattgtggtttgttccaaaggtatgaagtactttgtggacaagaagaactacaaacacaaaggaggtggccgaggctcggggaaaggagagctcttcctggtggcggtgtcagccattgccgaaaagctccgccaggccaagcagagttcgtccgcggcgctcagcaagtttatcgccgtctactttgattattcctgcgagggagacgtccccggtatcctagacctgagtaccaagtacagactcatggacaatcttcctcagctctgttcccacttgcactcccgagaccacggcctccaggagccggggcagcacacgcgacagggcagcagaaggaactacttccggagcaagtcaggccggtccctatacgtcgccatttgcaacatgcaccagtttattgacgaggagcccgactggttcgaaaagcagttcgttcccttccatcctcctccactgcgctaccgggagccagtcttggagaaatttgattcgggcttggttttaaatgatgtcatgtgcaaaccagggcctgagagtgacttctgcctaaaggtagaggcggctgttcttggggcaaccggaccagccgactcccagcacgagagtcagcatgggggcctggaccaagacggggaggcccggcctgcccttgacggtagcgccgccctgcaacccctgctgcacacggtgaaagccggcagcccctcggacatgccgcgggactcaggcatctatgactcgtctgtgccctcatccgagctgtctctgccactgatggaaggactctcgacggaccagacagaaacgtcttccctgacggagagcgtgtcctcctcttcaggcctgggtgaggaggaacctcctgcccttccttccaagctcctctcttctgggtcatgcaaagcagatcttggttgccgcagctacactgatgaactccacgcggtcgcccctttgtaacaaaacgaaagagtctaagcattgccactttagctgctgcctccctctgattccccagctcatctccctggttgcatggcccacttggagctgaggtctcatacaaggatatttggagtgaaatgctggccagtacttgttctcccttgccccaaccctttaccggatatcttgacaaactctccaattttctaaaatgatatggagctctgaaaggcatgtccataaggtctgacaacagcttgccaaatttggttagtccttggatcagagcctgttgtgggaggtagggaggaaatatgtaaagaaaaacaggaagatacctgcactaatcattcagacttcattgagctctgcaaactttgcctgtttgctattggctaccttgatttgaaatgctttgtgaaaaaaggcacttttaacatcatagccacagaaatcaagtgccagtctatctggaatccatgttgtattgcagataatgttctcatttatttttgatgtagaatttacattgccatgggtgttaaataagctttgagtcaaaagtcaagaaagtgactgaatatacagtcaccttttatgaaatgagtctctgtgttactgggtggcatgactgattgaggtgaagctcacggggccaggctgaccgtcttgaccgttccacttgagataggttggtcatcgtgcagaaggccccaggacctcagcacacacagcctcctcttggtctgagtaggcatcatgtgggggccagatctgcctgctgtttccatgggttacatttactgtgctgtatctcagatgttggtgtctggaagtttattcttaagagactgctacccagctggtctgtattattggaagttgcagttcgtgctttggttggccttctggtctaaagctgtgtcctgaatattagggatcacaattcactgaaatacagcagtgtgtggaggtgatggccagttaatctgctgaactggttttgactaatgacaaacctctttttaagatggtagaatggaggtgatagtcacaaaagtaaatgttccatttttatgaatgactttctacagagtttctatttctaaagaaaaaacaattgttcacatcccatctgatgattagcatgtgtgtaatgaatgctgtcttggtctcccctgtggaaacccttctccctgtgccttagagcaggtgtgtacatctctcactacctttctcatgggtgctgttagattttggcacccgttttctcagcattcagcccagggaatgtggttttcacttcttcgtcagataagaccaacatgaaggggtatgttgagaaacatcctgaggcaaggtgggaggtgggatggggcaggactttcccttccaagcacatgcatggcaggtggggaaaggggggcttgcacccctgctggaaagaaaaggtttgtgtatatttctgatgcaaatgtcatactcactgctctgtaaaggcagctggcagctttttgggaaaagaacgtgctcgtctgttctctggcatcaagtttcttgcagctgctctgagggagagacagtgagctgcaagactgcctccccataacaacaggcaactcagagaagagtcattttatgttgttcctatggaatctggaatgagtgcagagctcctacccacacatgactgccccgccatttcatcctaggcattctgtgaaggagattggttagtccaaacttgctaacatacgaaaattcacttggaacatgatgagagatttcttattgaggccaagagatgtttcctgtcccagaggaaccattaggagtcgcttttagggtattcagctttgttcatgaaataaggcatctctgagaaagtggccccagggagagaatggaggactgggaggagaagcattaactgagctccaagggtgtgtgggcagagagcttgctatgtgaactcactccttaagaaaatggaagagaaaaagagagtgctagttaaaaaatcgggatgttttagtttggatttagggttttgatacttatgttgaaatactaatgtttctgatcaataaaatcaaactcttaatataccgagtaatgaaaccatagtgtgattgcctcagaataaattgagaagtccaacttcctagttttgtttaattagtttcactttttctactctccccagtatgctagaaatgggaatcgttgccctgcagattacggcaaaacatctgttttaagcaaagctgcattttttgactcagaaattgtcccagacggtggatataagatgaaattcagaaaaacgttctgccaagtcacaggcttttagatattatggaaacaagaaatggaaaacaggatgatctccatgagaggccttgatcctgagagtaaaaggcttgtgtagataggttagacaacgtcctctagaaaagagaccagggataagtccaggtttccaggaaaaccaagaagcctgcgggtagctgaaggtagagtgctagttgttcatcttaacttaccaatgagctacagaaaggacttagcatctgatgtcatcagctttgccaggagagtgatcaaggaggttaaagctcaggtaaaggtgtgccttctcagagattggctacaagcaacagagaccacctcaacagagaccacctcaacagactcagcccagccatacaaggtgccaaagctcctccagagggctgtcttgggcctttgaggcaattgatctccagaaagagtcagaagtcattccagtccaggcccaggtattcagatggtgacccagccagataatagtatcttgagcaaataatagtatcttgagtgcaaataagcaggaagactgtccttcaaaaaatgtggggttacatgattttcagagcctttttttcagagttgagcatcttttcttttaaaagaaataaggggcaagaggaccaattttattccttgaggaaaaatgacacacccttctcccaaaagaaagaaaactctctggccccccaacttcaacactaatttggctccctgaagaagagagaaaatattatttctgtctttattgaagagaaatgggcaatgccaatgtgaaggttactagtcttttttattttctattggtgaagactactactgctcttatttagcagatcttataccttcagtggtcaccagtatagcaggtgaggtataaggaaaacagcagtgtgatgataaatggtaattaatatactttgtctgtgtcagcaatagggaatggtggggactgtggcaaactgaagcgcccctgttccacccacagtgggtaattttccagtcgactgtggccatgaagtacttcctgatcttcccatttttcaagaaaagctgacaatctggatttttatatgaaaaattctgattttaaaaaatattggcaactaagttaaaattcaagtgaatttagacccagcagaagacatggatggacctgatttggtccactgactaccagtttgttaacctgtgctttataagatttgaaggaaaggcattcatggtaattacagacggtgccaccagaaaatgctcttgctaaatgcagccagtagttagattgcttctttctccagtctcccccgcaaagaaatttgacgtgattctgaatgcactggacatgtcttgattgcgtctttacatttcacagtgtcttaaaagaaaggcaagccagttgttaatttcagaatcagatttatgctctctcaatttaaaaaatgctgggaacaatttcatttttttttttttgagatggagtcttgctctgttgcccaggctggagtgcagtggcgtgatctcggctcactgcaagctccacctcccgggttcacgccattctcctgcctcagcctcctgagtagctgggactacaggcgcccaccaccacgcctggctaatttttttgtatttttagtagagacggggtttcactgtgttagccaggatgatctcgatctcctgacctggtgatccgcttgcctcggcctcccaaagtgctgggattacaggcgtgagccactgcgcccggcctaacaatttcatttaaactccacaacctaaagggctttgtttatagttttagctcttggcataatttttttcaggtggtgtgcaattctgagcataggccaagacatgattaggaaagcaggcagttgtagagagtaaggcaaggaacctcctagcgtccattagagccaggtatttgcattatcttccgttttaagtggtctgtgaattgactgtgttttggaggtgtgaaacagtatacagagaaaagcttttcctgatactgagatatcagttaggagtccaaatggggtgttgggtcatccttgccatatcacctcctttccaggctcagagtgaaaatagacaaaaggaaatctgactgcaagccagtggctttgattccagtttcagagtttagggactaggagagagtttagattatctagcatattctccccctggtgtcagacagggctgtgcctgaattattccagacatatggctgtagatggtattctttattttataagaaggagattctgtaacctaccctgctgatcagatagttctttgtatgtcttagagaaattcaagccagcttccttttgttcggcttgtagtggagaaagaacagctggtcaccttccatgtattcaaaaaccacagtgaagtcatccccctggtgtttttatttcagtgataaataattccacccacttaaaccattcttcatggctcttgttttccaggggcctaataattttcactgctgtaatgtttctcagcttcacacttagtttagttgcccaaacaatgttggtgccttactcacattggtgccttgtgaagacgaggctcaggatggggattatggggaaattcttgcacacccagctcctcttaccacttaaaaatataatggcactttcacaaaatgatatgtcacctatattcattgagaattatttgactgccacatttttcccctgatgatagtcatctatcataacttgtgtttgttttcctcctgagatcaaacacttggtgcttattcctgatgtatactctgagaccagctcttaccttctgagtggcagctacccctccctcccaattttagatcctatttttacacatctctatagatatcacctttatttcatgactcacaatattaaatggtacagacttcagtttaaccactggtgtggtaacagcagtagttgctaagtaccaccttcccattgctgtttgagggctaatttgcaaagacatttgaatctcccagtgaagatgtctggggaattttggccagttgtcttccctcttgcccttttgttctttaaaattcagcttggaccatagacacctccaggatcttgtttatgttctgctctcaattgaccaagcactgcgttttgcacaatcagaagtctcacaaaagcaaacagttatgactgcatatctgatgtttatatcctataaaatttcaggaagattcagagtcaatcttctatttgtacatgatgtagacaaaattagctgctccaattgttagacaaaaaattgccattggattacactaatgtgctcatctgttgttttaaaagtttggtatcaggcggggcacggtggctcacgcctgtaatcccagcattttgggaggccaaggtgggcggatcacctgaggtccagagttcaagaccagcctgaccaacatggtgaaaccctgtctctactaaaaatacaaaattaatcaggcgtggttgtgtgtgcctgtaatcccagctactcgagaggctgaggcaggagaatcgcttgaatccgggaggcagaggttgcagtgagctgagatcacgccattgcactctagcctgggcaacaagagcgaaactccgtctcaacaacaacaacaaaaagtttggtatgtttctctcaagaaaaaagcatggtgagtccagacagcagcaaaagcttttgtgaaaaccaattgtgttcatctagatagtaagtaactcctatttttactgttaattttttaaaagagaatttttccctgtggaaactccctgttagtacgtcctaggggagaaagcctgtggaatatggtggttattgatggcgttgcctttgtttcatctttgagtttgccctttgtgggatctagtgggataatgagcactgacagaactcttaacagcgtgctgtatttttgacattgaaaatgttaatgacttgatttgtacataactctgtaactaggtgaaagtagatcacagctgacatttacaaaatgtttttgtaccttagaatttctgcattaaataaaatgttttgttttaa

SEQ ID NO: 193786 - DNA, 4474 bp, Artificial Sequence
  derived and/or modified sequence
atccgctcttcttttcctccgggaaaagaaacgggaagtggccgtgggccggtgaattccgtgtagtggccaagctttgttccaaagagggggaggtggtgacagtctcttgcccactgaagcgtgccagacagagtgctaggcatgggggcagaggtgaatcagatgacagccacctctcaccacgaggagtggctgaaagtgtgactggactacaggcaatcctggccttggcagggagtggggccagccagcagaaacagtgggctgtacaacatcaccttcaaatatgacaattgtaccacctacttgaatccagtggggaagcatgtgattgctgacgcccagaatatcaccatcagccagtatgcttgccatgaccaagtggcagtcaccattctttggtccccaggggccctcggcatcgaattcctgaaaggatttcgggtaatactggaggagctgaagtcggagggaagacagtgccaacaactgattctaaaggatccgaagcagctcaacagtagcttcaaaagaactggaatggaatctcaacctttcctgaatatgaaatttgaaacggattatttcgtaaaggttgtcccttttccttccattaaaaacgaaagcaattaccaccctttcttctttagaacccgagcctgtgacctgttgttacagccggacaatctagcttgtaaacccttctggaagcctcggaacctgaacatcagccagcatggctcggacatgcaggtgtccttcgaccatgcaccgcacaacttcggcttccgtttcttctatcttcactacaagctcaagcacgaaggacctttcaagcgaaagacctgtaagcaggagcaaactacagagacgaccagctgcctccttcaaaatgtttctccaggggattatataattgagctggtggatgacactaacacaacaagaaaagtgatgcattatgccttaaagccagtgcactccccgtgggccgggcccatcagagccgtggccatcacagtgccactggtagtcatatcggcattcgcgacgctcttcactgtgatgtgccgcaagaagcaacaagaaaatatatattcacatttagatgaagagagctctgagtcttccacatacactgcagcactcccaagagagaggctccggccgcggccgaaggtctttctctgctattccagtaaagatggccagaatcacatgaatgtcgtccagtgtttcgcctacttcctccaggacttctgtggctgtgaggtggctctggacctgtgggaagacttcagcctctgtagagaagggcagagagaatgggtcatccagaagatccacgagtcccagttcatcattgtggtttgttccaaaggtatgaagtactttgtggacaagaagaactacaaacacaaaggaggtggccgaggctcggggaaaggagagctcttcctggtggcggtgtcagccattgccgaaaagctccgccaggccaagcagagttcgtccgcggcgctcagcaagtttatcgccgtctactttgattattcctgcgagggagacgtccccggtatcctagacctgagtaccaagtacagactcatggacaatcttcctcagctctgttcccacttgcactcccgagaccacggcctccaggagccggggcagcacacgcgacagggcagcagaaggaactacttccggagcaagtcaggccggtccctatacgtcgccatttgcaacatgcaccagtttattgacgaggagcccgactggttcgaaaagcagttcgttcccttccatcctcctccactgcgctaccgggagccagtcttggagaaatttgattcgggcttggttttaaatgatgtcatgtgcaaaccagggcctgagagtgacttctgcctaaaggtagaggcggctgttcttggggcaaccggaccagccgactcccagcacgagagtcagcatgggggcctggaccaagacggggaggcccggcctgcccttgacggtagcgccgccctgcaacccctgctgcacacggtgaaagccggcagcccctcggacatgccgcgggactcaggcatctatgactcgtctgtgccctcatccgagctgtctctgccactgatggaaggactctcgacggaccagacagaaacgtcttccctgacggagagcgtgtcctcctcttcaggcctgggtgaggaggaacctcctgcccttccttccaagctcctctcttctgggtcatgcaaagcagatcttggttgccgcagctacactgatgaactccacgcggtcgcccctttgtaacaaaacgaaagagtctaagcattgccactttagctgctgcctccctctgattccccagctcatctccctggttgcatggcccacttggagctgaggtctcatacaaggatatttggagtgaaatgctggccagtacttgttctcccttgccccaaccctttaccggatatcttgacaaactctccaattttctaaaatgatatggagctctgaaaggcatgtccataaggtctgacaacagcttgccaaatttggttagtccttggatcagagcctgttgtgggaggtagggaggaaatatgtaaagaaaaacaggaagatacctgcactaatcattcagacttcattgagctctgcaaactttgcctgtttgctattggctaccttgatttgaaatgctttgtgaaaaaaggcacttttaacatcatagccacagaaatcaagtgccagtctatctggaatccatgttgtattgcagataatgttctcatttatttttgatgtagaatttacattgccatgggtgttaaataagctttgagtcaaaagtcaagaaagtgactgaatatacagtcaccttttatgaaatgagtctctgtgttactgggtggcatgactgattgaggtgaagctcacggggccaggctgaccgtcttgaccgttccacttgagataggttggtcatcgtgcagaaggccccaggacctcagcacacacagcctcctcttggtctgagtaggcatcatgtgggggccagatctgcctgctgtttccatgggttacatttactgtgctgtatctcagatgttggtgtctggaagtttattcttaagagactgctacccagctggtctgtattattggaagttgcagttcgtgctttggttggccttctggtctaaagctgtgtcctgaatattagggatcacaattcactgaaatacagcagtgtgtggaggtgatggccagttaatctgctgaactggttttgactaatgacaaacctctttttaagatggtagaatggaggtgatagtcacaaaagtaaatgttccatttttatgaatgactttctacagagtttctatttctaaagaaaaaacaattgttcacatcccatctgatgattagcatgtgtgtaatgaatgctgtcttggtctcccctgtggaaacccttctccctgtgccttagagcaggtgtgtacatctctcactacctttctcatgggtgctgttagattttggcacccgttttctcagcattcagcccagggaatgtggttttcacttcttcgtcagataagaccaacatgaaggggtatgttgagaaacatcctgaggcaaggtgggaggtgggatggggcaggactttcccttccaagcacatgcatggcaggtggggaaaggggggcttgcacccctgctggaaagaaaaggtttgtgtatatttctgatgcaaatgtcatactcactgctctgtaaaggcagctggcagctttttgggaaaagaacgtgctcgtctgttctctggcatcaagtttcttgcagctgctctgagggagagacagtgagctgcaagactgcctccccataacaacaggcaactcagagaagagtcattttatgttgttcctatggaatctggaatgagtgcagagctcctacccacacatgactgccccgccatttcatcctaggcattctgtgaaggagattggttagtccaaacttgctaacatacgaaaattcacttggaacatgatgagagatttcttattgaggccaagagatgtttcctgtcccagaggaaccattaggagtcgcttttagggtattcagctttgttcatgaaataaggcatctctgagaaagtggccccagggagagaatggaggactgggaggagaagcattaactgagctccaagggtgtgtgggcagagagcttgctatgtgaactcactccttaagaaaatggaagagaaaaagagagtgctagttaaaaaatcgggatgttttagtttggatttagggttttgatacttatgttgaaatactaatgtttctgatcaataaaatcaaactcttaatataccgagtaatgaaaccatagtgtgattgcctcagaataaattgagaagtcc

SEQ ID NO: 193787 - DNA, 2220 bp, Artificial Sequence
  derived and/or modified sequence
atggccccctggctgcagctgtgcagcgtcttcttcaccgtgaatgcctgcctgaatggcagccagctggccgtggccgccggcggcagcggccgggcccggggagctgacacctgtggctggaggggcgtgggccctgccagcagaaattctggcctgtacaacatcaccttcaagtatgacaactgcaccacctacctgaaccctgtgggcaagcacgtgattgctgatgcccagaacatcaccatcagccagtatgcctgccacgaccaggtggccgtgaccatcctgtggagccctggggccctgggcatcgagttcctgaagggcttccgggtcatcctggaggagctgaagtctgagggccggcagtgccagcagctgatcctgaaggaccccaagcagctgaacagcagcttcaagaggacaggcatggagagccagcccttcctgaacatgaagtttgaaacagactactttgtgaaggtggtgcccttccccagcatcaagaatgaaagcaactaccaccccttcttcttccgcacccgggcctgtgacctgctgctgcagcctgacaacctggcctgcaagcccttctggaagcccaggaacctgaacatcagccagcacggcagtgacatgcaggtgtcctttgaccacgccccccacaactttggcttccgcttcttctacctgcactacaagctgaagcatgagggccccttcaagaggaagacctgcaagcaggagcagaccacagagaccaccagctgcctgctgcagaatgtgtcccctggggactacatcatcgagctggtggatgacaccaacaccaccaggaaggtgatgcactacgccctgaagcctgtgcacagcccctgggccggccccatccgggctgtggccatcaccgtgcccctggtggtgatcagcgcctttgccaccctcttcaccgtgatgtgcaggaagaagcagcaggagaacatctacagccacctggatgaggagagcagcgagagcagcacctacacagctgccctgccccgggagcggctgcggccccggcccaaggtgttcctgtgctacagcagcaaggatggccagaaccacatgaatgtggtgcagtgctttgcctacttcctgcaggacttctgtggctgtgaggtggccctggacctgtgggaggacttcagcctgtgccgggagggccagcgggagtgggtgatccagaagatccacgagagccagttcatcatcgtggtgtgcagcaagggcatgaagtactttgtggacaagaagaactacaagcacaagggcggcggccggggcagcggcaagggggagctgttcctggtggccgtgtctgccatcgccgagaagctgcggcaggccaagcagagcagcagcgctgccctgagcaagttcatcgctgtgtactttgactacagctgtgaaggagatgtgcccggcatcctggacctgagcaccaagtaccgcctgatggacaacctgccccagctgtgcagccacctgcacagccgggaccacggcctgcaggagcccggccagcacacccggcagggcagcagaagaaactacttccgcagcaagagcggccgcagcctgtatgtggccatctgcaacatgcaccagttcattgatgaggagccagactggtttgagaagcagtttgtgcccttccaccccccacccctgcgctaccgggagcctgtgctggagaagtttgacagcggcctggtgctgaatgatgtgatgtgcaagccaggccctgagagtgacttctgcctgaaggtggaggccgctgtgctgggcgccactggacctgctgacagccagcacgagagccagcacggcggcctggaccaggatggagaggcccggcctgccctggatggcagcgctgccctgcagcccctgctgcacacagtgaaggccggcagccccagcgacatgccccgggacagcggcatctatgacagctctgtgcccagcagcgagctgagcctgcccctgatggagggcctgagcacagaccagacagagaccagcagcctgacagaatctgtgagcagcagcagcggcctgggggaggaggagcccccagccctgcccagcaagctgctgagcagcggcagctgcaaggctgacctgggctgccgcagctacacagatgagctgcatgctgtggcccccctgtag

SEQ ID NO: 193788 - DNA, 1788 bp, Artificial Sequence
  derived and/or modified sequence
atggagagccagcccttcctgaacatgaagtttgaaacagactactttgtgaaggtggtgcccttccccagcatcaagaatgaaagcaactaccaccccttcttcttccgcacccgggcctgtgacctgctgctgcagcctgacaacctggcctgcaagcccttctggaagcccaggaacctgaacatcagccagcacggcagtgacatgcaggtgtcctttgaccacgccccccacaactttggcttccgcttcttctacctgcactacaagctgaagcatgagggccccttcaagaggaagacctgcaagcaggagcagaccacagagaccaccagctgcctgctgcagaatgtgtcccctggggactacatcatcgagctggtggatgacaccaacaccaccaggaaggtgatgcactacgccctgaagcctgtgcacagcccctgggccggccccatccgggctgtggccatcaccgtgcccctggtggtgatcagcgcctttgccaccctcttcaccgtgatgtgcaggaagaagcagcaggagaacatctacagccacctggatgaggagagcagcgagagcagcacctacacagctgccctgccccgggagcggctgcggccccggcccaaggtgttcctgtgctacagcagcaaggatggccagaaccacatgaatgtggtgcagtgctttgcctacttcctgcaggacttctgtggctgtgaggtggccctggacctgtgggaggacttcagcctgtgccgggagggccagcgggagtgggtgatccagaagatccacgagagccagttcatcatcgtggtgtgcagcaagggcatgaagtactttgtggacaagaagaactacaagcacaagggcggcggccggggcagcggcaagggggagctgttcctggtggccgtgtctgccatcgccgagaagctgcggcaggccaagcagagcagcagcgctgccctgagcaagttcatcgctgtgtactttgactacagctgtgaaggagatgtgcccggcatcctggacctgagcaccaagtaccgcctgatggacaacctgccccagctgtgcagccacctgcacagccgggaccacggcctgcaggagcccggccagcacacccggcagggcagcagaagaaactacttccgcagcaagagcggccgcagcctgtatgtggccatctgcaacatgcaccagttcattgatgaggagccagactggtttgagaagcagtttgtgcccttccaccccccacccctgcgctaccgggagcctgtgctggagaagtttgacagcggcctggtgctgaatgatgtgatgtgcaagccaggccctgagagtgacttctgcctgaaggtggaggccgctgtgctgggcgccactggacctgctgacagccagcacgagagccagcacggcggcctggaccaggatggagaggcccggcctgccctggatggcagcgctgccctgcagcccctgctgcacacagtgaaggccggcagccccagcgacatgccccgggacagcggcatctatgacagctctgtgcccagcagcgagctgagcctgcccctgatggagggcctgagcacagaccagacagagaccagcagcctgacagaatctgtgagcagcagcagcggcctgggggaggaggagcccccagccctgcccagcaagctgctgagcagcggcagctgcaaggctgacctgggctgccgcagctacacagatgagctgcatgctgtggcccccctgtag

SEQ ID NO: 193789 - DNA, 2220 bp, Artificial Sequence
  derived and/or modified sequence
atggccccctggctgcagctgtgcagcgtgttcttcaccgtgaacgcatgcctgaacgggagtcagctcgcagtggcagccggtggaagtggacgcgctcgcggcgcagatacctgtgggtggcgcggggtgggacccgcctctcgcaactctgggctctacaacattacattcaagtatgataattgtaccacttacctgaatcccgtaggcaaacatgtgattgccgatgcacagaatataacgattagccagtacgcgtgtcacgatcaggtggctgtcacgatcctctggtcgcctggggctctaggcatcgagtttctcaaaggcttccgagtgatactagaagagctgaaatctgaaggccggcagtgtcagcagctgattctgaaggacccgaaacagcttaattccagttttaagcggacagggatggagtcccaaccttttctcaatatgaaattcgagacagactacttcgtgaaggtggtgcccttccccagcatcaagaatgaaagtaactaccatccttttttctttcgcacgcgcgcctgtgatctcttgctccaacctgacaatctggcttgtaagccattttggaagccacgcaacctgaacatctcccaacatggctcagacatgcaggtctctttcgaccacgcaccccacaacttcggctttaggtttttctatctgcactacaagctcaagcacgaggggccattcaagcgaaagacctgcaaacaggaacagaccactgagactacgtcctgtctcctacagaacgtctcacccggtgactatatcatagagcttgtggatgatacaaatacaactcgtaaggtcatgcattacgcgctcaaacccgtgcattctccgtgggccgggccgatccgtgccgtcgccatcaccgtacccctggtggtcatctcagccttcgccacattgttcaccgttatgtgtaggaaaaagcaacaggagaacatttattcacatctggacgaagaatcatctgagtcgtctacgtataccgccgccctgcctcgcgaacgccttagaccccgccccaaagtcttcctgtgttactcctcaaaggatggccagaatcacatgaatgtggtacagtgctttgcttatttcctacaggatttctgtgggtgtgaggtggctcttgatttatgggaggacttttctctgtgtcgcgaaggccagcgcgaatgggtgattcaaaaaattcatgaaagccagttcataattgtcgtctgctcaaaaggcatgaagtatttcgtggacaagaagaattacaagcacaagggagggggacgggggagcgggaagggtgaactgtttttagttgcagtctctgcaatcgcggaaaaactccgtcaagcaaagcaatccagtagcgctgccctgtccaaattcatagccgtgtattttgactactcctgcgaaggcgatgtgccaggaatcctcgatctttccaccaagtatcgcctgatggacaatttaccccagctttgctctcacttgcatagccgggaccacggattgcaggagcccggccagcatacaaggcaggggagcagacgcaactacttccgttctaagagtggtcggagcttatacgtcgccatatgtaacatgcatcaatttattgacgaagaacctgactggttcgagaagcagtttgtgcccttccatccgccacctttgagatatagagaacccgtgctggagaagttcgacagcggactggttctgaatgatgttatgtgcaagcctggccccgagtccgatttctgtctcaaagtcgaggcggcagtcctgggagcaaccggccctgcagactctcagcacgagtctcagcacggagggctcgatcaggacggcgaagctcgccccgccttagatggctccgccgctctacagcccctgctccacacggtcaaagctggaagcccatctgacatgccacgcgacagcggcatttatgattcatcagtgccgtcaagtgagttgtctctgcccctcatggaagggctgagcactgatcaaacagaaacatcctctctaacggaatcggttagctcttcatcaggtttgggggaagaggagccgccagcacttccatctaagttgttatcaagtgggagctgcaaggccgatttgggctgcaggtcatatacagatgagctccatgccgtcgctcccctgtag

SEQ ID NO: 193790 - DNA, 1788 bp, Artificial Sequence
  derived and/or modified sequence
atggagagccagcccttcctgaacatgaagttcgagaccgactactttgtcaaagtggttccattccccagcatcaagaacgaatctaattaccaccccttcttttttcggactcgcgcctgcgatctgttgctgcaacctgacaatctcgcatgcaaaccgttttggaagcctaggaacctgaacatctcgcagcatggctccgatatgcaggtgtccttcgaccacgccccacacaattttggctttcgttttttttatctgcactataaactgaaacacgaagggcccttcaaacgtaaaacttgcaaacaggaacagacaacagaaacaacctcatgtctactgcagaacgtttcgcccggggattacattatcgaactggtggacgatactaataccacaagaaaggtgatgcactacgctttaaagcccgtacatagcccatgggccggtcctatccgggcagttgctatcactgttccgctcgtggtgattagcgctttcgcaaccctgttcacagtcatgtgccgcaaaaagcagcaggagaacatatactctcacctggacgaagagagctctgagagttctacatatacagctgctctcccgagagaacggctgcgcccaagacccaaggttttcctatgctattcttcgaaggatggccaaaaccacatgaatgttgtgcaatgtttcgcctactttctgcaggatttctgcggctgtgaggtagctctggatctttgggaggatttctctctgtgtagagagggacaaagggaatgggtgatacagaagatacacgaatctcagtttataatcgttgtctgttctaagggaatgaagtacttcgtggacaagaagaactataaacacaaaggaggtggccgagggagtgggaagggtgagttgtttctggtggctgtctcagctatagcagaaaaactgaggcaggccaagcaatcctcttccgcggctctcagtaaattcatagcagtgtatttcgactactcttgtgagggagacgtgccaggaatactagacctgtctaccaaatataggctaatggataatcttcctcagttgtgtagccacctccattcaagagaccatgggttacaggaacccggtcaacatactagacagggcagccgcagaaattacttccgctcaaaatctggccgatccctctatgtcgcaatctgtaatatgcaccaattcatcgacgaagaacccgattggtttgagaaacagtttgtgcctttccacccaccccctctgagatacagggagcccgtccttgaaaaatttgactctgggctggtgctcaatgacgtgatgtgtaaacccggaccggaatccgacttttgtttgaaggtcgaggccgccgtgctgggagccacaggccctgccgacagtcagcacgaaagtcagcacggaggactcgatcaggatggggaggctagaccagccctggacggttctgcagccctgcagcccctcctccacactgttaaggccgggagcccaagtgatatgccacgcgacagtgggatctatgactcatctgtgcctagtagtgagctgtcgttgccactgatggaaggcttatccactgatcagactgaaactagctctttgactgagtcagttagctctagttccgggctcggtgaagaagaaccaccggctctgccaagcaagttattatctagcggatcgtgcaaggcggatctcggctgcaggtcctacacagatgagctgcatgctgtggcccccctttag

SEQ ID NO: 193791 - DNA, 1788 bp, Artificial Sequence
  derived and/or modified sequence
atggagagccagcccttcctgaacatgaagttcgagaccgactacttcgttaaagtcgtgccttttccttccatcaaaaatgaaagcaactatcacccattcttcttccggaccagagcgtgcgacctgcttcttcaaccggataacctggcatgcaagccattttggaagccaaggaacttgaatatatcccagcacggctctgacatgcaagtctcatttgaccacgccccacacaactttggctttagattcttctaccttcattataagttaaaacacgaagggccctttaaacgcaagacttgcaagcaggaacagactactgaaacaacatcgtgtcttcttcaaaacgtgtcacccggcgactatattattgaactggtggatgataccaacacaactagaaaggtaatgcactatgctttgaagcctgttcacagcccatgggcaggccccattcgggctgtcgcaatcaccgtgcccctagtggtcatttctgcttttgctactctgtttactgtgatgtgtcggaaaaagcagcaagagaacatctattctcacctggacgaagaatcatcagagtcatctacttatacagccgctctccctcgagaaaggttaagacctcggcctaaggtattcctgtgttactcctccaaggatggtcagaaccacatgaacgtagtccaatgctttgcttacttccttcaggacttttgtggttgcgaagtggcactcgatttgtgggaagatttttcactctgtagagaggggcagagagaatgggtcattcagaaaattcacgagagccagtttattattgttgtgtgctccaagggcatgaagtacttcgtggataaaaagaactacaaacacaaggggggcggcagaggatcaggcaagggcgagctgttcctcgtggctgtgtctgcaattgccgagaagctgcgccaggcaaaacagtcgtcttccgccgctctgagcaagtttattgcagtctactttgactattcatgcgaaggagacgtacctggtattctggatctcagcactaagtaccggttgatggataacctgcctcagctgtgctcgcacctccattccagggatcacggcttacaggagcccgggcagcacacgcgccaaggcagccgcagaaattatttccggtctaagagtggacgctcgctgtacgttgcaatttgcaacatgcatcagtttatagacgaggaacccgactggttcgagaagcagttcgtcccgtttcatccaccccctttgcgctacagagagcccgttttggaaaagtttgacagcggattggtccttaacgatgttatgtgcaaacccggccccgaatcagacttctgcctgaaggttgaagctgccgttttgggcgccacgggaccagccgatagtcagcacgaaagccaacacgggggtctggaccaagatggggaggcccgacctgccttggacggttccgcggctttgcagccactcttgcacacggtgaaagcagggagcccttcagacatgcctcgggactctggcatttatgattcctcagtcccatcaagcgagttaagcctccctttgatggagggtctgtccaccgaccagacggaaacaagttcccttactgaaagcgtgtccagctcttctggcctgggcgaagaggaaccgcccgcactgcccagcaagctgctgtcttcggggtcttgtaaagccgatttggggtgccggagctacacggatgagctgcacgcagtggctcctctgtag

SEQ ID NO: 193792 - DNA, 2220 bp, Artificial Sequence
  derived and/or modified sequence
atggcaccttggcttcagctctgctctgtgttcttcactgtaaatgcctgtctcaacggtagtcagctggcggtcgctgctgggggtagcggcagggcaagaggtgcggacacctgcggatggagaggagtggggcctgcctccagaaatagtggcctgtacaacattacctttaaatacgataactgtacaacatatctcaaccctgtgggcaaacatgtcattgccgacgcccagaacatcacgatttcacaatacgcctgccacgaccaggtagccgtgactattctctggagtcccggtgccctgggcattgaatttctgaaaggctttagggtgattttggaagaactcaaatccgaagggaggcagtgtcagcagctcatcttgaaggacccaaagcaactaaatagctctttcaaacggacagggatggaatctcagcctttcctgaacatgaaatttgagactgattacttcgtaaaagtggtcccgttccccagcattaaaaacgaatcgaattaccatcccttttttttccgtaccagagcgtgcgacctcttactgcaacctgacaatctggcgtgtaaacccttctggaagcctaggaacctgaacatttctcagcatggttcagatatgcaggtgtcatttgatcacgcccctcacaacttcgggttccgcttcttttatctgcattacaaattgaaacacgaaggtccctttaagcggaaaacgtgcaaacaggaacagactacagagacaacatcttgtctcctgcagaacgtaagcccaggtgattacataatcgagttggtcgatgatacgaatactactcgcaaagtgatgcattatgcattgaaacctgttcacagcccctgggccggaccaatacgtgccgtcgcaatcacagtgcccttagtagtcatatcagcgtttgcaacccttttcacagttatgtgtcgcaagaagcagcaggaaaacatttatagccacctggatgaagagtccagcgaatcatccacctacacggctgccttgccgagggagagattgagaccaaggcccaaagtatttctctgttacagcagtaaggacggacagaatcatatgaatgtggtccagtgctttgcctacttcctgcaagatttttgcgggtgcgaagtggccctcgatctctgggaagacttctcgctgtgccgggagggccagcgggagtgggtgatacagaagattcatgagtcccagttcataattgtagtgtgcagcaagggtatgaaatacttcgtggacaagaaaaactataagcataaagggggaggccgtggctctggcaaaggcgagctgtttctcgtggctgtcagcgcgattgccgagaaactgcggcaggccaagcagtctagcagcgctgccctctcgaagtttatcgcggtgtatttcgactactcatgtgagggtgatgttcctggcatattggacctctcgacaaaatatcgcctgatggataatctaccccagctttgcagtcatctgcacagtcgggatcacggattgcaagagccaggtcagcatacgagacagggctcgcgccgaaactacttcagatccaagtccggcagaagtctgtatgtggccatatgtaacatgcaccaattcatcgatgaagagcccgattggtttgagaaacagtttgtgccttttcacccacccccactacgatacagagagccggtactggagaaattcgattctggactggtgctgaatgacgtgatgtgtaaaccagggccagagtccgacttctgtctcaaagtggaagctgccgtgctaggggcaaccggccctgccgatagccagcatgaaagccagcacggcggtttggatcaggacggggaagctcggcctgccttggacggtagtgccgcacttcagcctctcctacacaccgtaaaggcgggatctcccagcgatatgcccagagattccggaatctatgacagttcagtacctagtagcgaactaagcctgccactgatggagggattgtccacggatcaaacagaaacttcatccctcaccgagagcgtctcatccagctcaggcttgggcgaggaagagccacctgccctgcctagcaagttgctgtcctctgggtcatgtaaggccgatctaggatgccgttcctacaccgatgagctgcatgccgtcgcccctctgtag

SEQ ID NO: 193793 - DNA, 1788 bp, Artificial Sequence
  derived and/or modified sequence
atggaatcacaaccttttctaaatatgaagtttgagaccgactactttgtgaaagtggtcccattcccctctattaaaaatgagtccaactatcatcccttcttttttaggacgcgagcctgcgacctgctgttacagcccgataatttggcctgtaagcctttctggaaacctaggaacttaaacatatcgcagcacggcagcgacatgcaggttagctttgaccacgctcctcataactttggattccggttcttctatcttcattataagctgaaacacgaagggccatttaaaagaaagacctgcaagcaggaacaaacaaccgagacaacctcctgtctcttgcagaatgtgtccccaggggactatatcattgaactggtggacgacactaacacaacgagaaaggtcatgcattacgctctgaaacccgtgcactcaccatgggcgggacccatccgtgcagtcgctattacagtgccactcgtcgtgatcagcgcgtttgccaccctgtttacggtgatgtgcagaaaaaagcaacaagagaacatctacagtcacttggatgaggaaagcagcgagagttcgacgtataccgcagctttgccaagggagcgactccgaccaagaccgaaggtgttcctctgctactcctcgaaggatggacagaatcacatgaacgttgtgcagtgttttgcttatttcttacaggacttttgtggctgcgaagtcgccttggatctgtgggaagacttttcactatgtagagaggggcagcgggagtgggtcattcaaaaaatccatgagagtcagttcattatcgtggtatgcagtaagggaatgaagtacttcgttgacaaaaagaactacaagcacaaagggggagggcgtggctcgggcaagggcgaactcttcctggtagctgtgagtgcaatagcagagaaactgagacaggccaaacagtccagcagcgctgcgctgtccaaatttatcgcagtctacttcgattattcgtgcgaaggagatgttccaggcattctggacttaagcacgaaatatcgactcatggataacctgccacagctctgcagtcatctccattcccgagaccacggactacaggaaccaggacagcacactcgccagggttccaggagaaattattttagatctaaatcgggacgctccttgtacgtggcaatttgcaacatgcatcagtttattgatgaagagcctgactggtttgagaagcagttcgtgccttttcatccacccccactgcggtaccgggaacccgtactggagaaattcgattccgggctggtactgaatgatgtaatgtgtaagcctggccctgaaagcgacttttgcctgaaggttgaggccgctgtgcttggggctacgggacctgctgattcacaacacgagtcacagcatggcggtctagatcaggacggagaagctaggcctgccctggacgggtctgctgcactccagccgttgctgcataccgtgaaagccggttcccctagcgacatgcctcgcgactcaggaatctacgatagtagcgtgccatcttcagaattaagcctcccattgatggaggggctatcgaccgatcagaccgaaacttccagccttactgagagcgtctctagcagttccgggctgggtgaagaggagcccccagcactgccatcgaaattgctgtctagtggttcgtgtaaagccgacttgggctgccggtcgtacacagatgagctccacgctgtggcgccactttag

SEQ ID NO: 193794 - DNA, 1788 bp, Artificial Sequence
  derived and/or modified sequence
atggaatcccaaccatttctgaatatgaagttcgagactgattacttcgtaaaagtggttcctttcccaagcattaaaaacgaatccaattaccaccctttcttcttcagaaccagagcttgtgacctgctgttacaaccggacaacctagcctgcaagcctttttggaagccgaggaatttgaacatcagccagcacggttccgacatgcaagtgtcattcgatcatgcaccccacaactttggcttccgcttcttctacctgcactataagctcaaacatgagggccctttcaagcgtaagacttgcaagcaggaacagactacagagaccactagctgtttgctgcagaacgtgtctcctggcgactatatcatcgaactcgttgacgatactaacacgacaagaaaggtgatgcactatgctcttaagccagtccattcaccatgggcagggccaatcagagccgtggctatcactgtgcccctggtcgttattagtgccttcgccaccttattcacggtaatgtgcagaaagaaacagcaggagaatatatacagtcatttggacgaggagtcatctgagagttctacatacacagcggcacttcctagggagcgcttaaggccccgtcccaaggttttcctgtgctattcttcaaaagatggccagaatcacatgaacgttgtgcaatgtttcgcttatttcctgcaggatttctgcgggtgtgaggtcgctcttgacttgtgggaggacttttccctatgccgtgaggggcaaagggagtgggtgatacaaaagatccacgaatctcagttcatcatagtggtgtgctcaaagggtatgaaatattttgtggataagaagaactacaaacataagggcggagggcgagggtccggcaagggcgagctgtttctggtggctgtctctgccatcgccgagaaactgcgtcaagctaagcagtctagtagcgccgctctgagcaaattcatcgctgtgtacttcgactactcgtgtgagggggacgtgcccggtatactggacctgagcaccaaatacagattaatggacaatcttccccaactgtgctctcacctgcattcacgagatcatggcctgcaggaacctgggcagcatacaaggcaggggtcaagacggaactatttcagatccaagagtggtcgcagcctgtatgttgctatctgtaatatgcaccaattcattgacgaagagccagactggttcgagaagcagttcgtgccattccatcctccaccactgcgttatagggagccagtgctggaaaagttcgacagcgggctggtcctgaatgatgtgatgtgcaagcccggacccgaatccgatttctgtctaaaggtcgaagccgcagtgctgggggctactggacccgctgacagccagcacgaatcccaacacggtggcctcgatcaggatggagaggctcggcctgcgctagacgggtcagccgcacttcaaccactcctgcacacggttaaggcaggcagcccatctgacatgcctcgagactcaggaatctacgactccagtgttccttccagtgagctgagcttgcccctgatggaagggctgtcaaccgatcagacagagacatcaagcctgactgaaagcgtgtcttccagttccggcctgggtgaggaagagcctcctgcattgccttccaagctcctgtcatcagggagttgtaaggcagatctgggctgtaggtcttacaccgacgaactgcatgccgtcgccccactgtag

SEQ ID NO: 193795 - DNA, 2220 bp, Artificial Sequence
  derived and/or modified sequence
atggccccctggctgcagctgtgcagcgtgttcttcaccgtgaacgcctgcctgaacggcagccagctggccgtggccgccggcggcagcggcagagccagaggcgccgacacctgcggctggagaggcgtgggccccgccagcagaaacagcggcctgtacaacatcaccttcaagtacgacaactgcaccacctacctgaaccccgtgggcaagcacgtgatcgccgacgcccagaacatcaccatcagccagtacgcctgccacgaccaggtggccgtgaccatcctgtggagccccggcgccctgggcatcgagttcctgaagggcttcagagtgatcctggaggagctgaagagcgagggcagacagtgccagcagctgatcctgaaggaccccaagcagctgaacagcagcttcaagagaaccggcatggagagccagcccttcctgaacatgaagttcgagaccgactacttcgtgaaggtggtgcccttccccagcatcaagaacgagagcaactaccaccccttcttcttcagaaccagagcctgcgacctgctgctgcagcccgacaacctggcctgcaagcccttctggaagcccagaaacctgaacatcagccagcacggcagcgacatgcaggtgagcttcgaccacgccccccacaacttcggcttcagattcttctacctgcactacaagctgaagcacgagggccccttcaagagaaagacctgcaagcaggagcagaccaccgagaccaccagctgcctgctgcagaacgtgagccccggcgactacatcatcgagctggtggacgacaccaacaccaccagaaaggtgatgcactacgccctgaagcccgtgcacagcccctgggccggccccatcagagccgtggccatcaccgtgcccctggtggtgatcagcgccttcgccaccctgttcaccgtgatgtgcagaaagaagcagcaggagaacatctacagccacctggacgaggagagcagcgagagcagcacctacaccgccgccctgcccagagagagactgagacccagacccaaggtgttcctgtgctacagcagcaaggacggccagaaccacatgaacgtggtgcagtgcttcgcctacttcctgcaggacttctgcggctgcgaggtggccctggacctgtgggaggacttcagcctgtgcagagagggccagagagagtgggtgatccagaagatccacgagagccagttcatcatcgtggtgtgcagcaagggcatgaagtacttcgtggacaagaagaactacaagcacaagggcggcggcagaggcagcggcaagggcgagctgttcctggtggccgtgagcgccatcgccgagaagctgagacaggccaagcagagcagcagcgccgccctgagcaagttcatcgccgtgtacttcgactacagctgcgagggcgacgtgcccggcatcctggacctgagcaccaagtacagactgatggacaacctgccccagctgtgcagccacctgcacagcagagaccacggcctgcaggagcccggccagcacaccagacagggcagcagaagaaactacttcagaagcaagagcggcagaagcctgtacgtggccatctgcaacatgcaccagttcatcgacgaggagcccgactggttcgagaagcagttcgtgcccttccaccccccccccctgagatacagagagcccgtgctggagaagttcgacagcggcctggtgctgaacgacgtgatgtgcaagcccggccccgagagcgacttctgcctgaaggtggaggccgccgtgctgggcgccaccggccccgccgacagccagcacgagagccagcacggcggcctggaccaggacggcgaggccagacccgccctggacggcagcgccgccctgcagcccctgctgcacaccgtgaaggccggcagccccagcgacatgcccagagacagcggcatctacgacagcagcgtgcccagcagcgagctgagcctgcccctgatggagggcctgagcaccgaccagaccgagaccagcagcctgaccgagagcgtgagcagcagcagcggcctgggcgaggaggagccccccgccctgcccagcaagctgctgagcagcggcagctgcaaggccgacctgggctgcagaagctacaccgacgagctgcacgccgtggcccccctgtag

SEQ ID NO: 193796 - DNA, 1788 bp, Artificial Sequence
  derived and/or modified sequence
atggagagccagcccttcctgaacatgaagttcgagaccgactacttcgtgaaggtggtgcccttccccagcatcaagaacgagagcaactaccaccccttcttcttcagaaccagagcctgcgacctgctgctgcagcccgacaacctggcctgcaagcccttctggaagcccagaaacctgaacatcagccagcacggcagcgacatgcaggtgagcttcgaccacgccccccacaacttcggcttcagattcttctacctgcactacaagctgaagcacgagggccccttcaagagaaagacctgcaagcaggagcagaccaccgagaccaccagctgcctgctgcagaacgtgagccccggcgactacatcatcgagctggtggacgacaccaacaccaccagaaaggtgatgcactacgccctgaagcccgtgcacagcccctgggccggccccatcagagccgtggccatcaccgtgcccctggtggtgatcagcgccttcgccaccctgttcaccgtgatgtgcagaaagaagcagcaggagaacatctacagccacctggacgaggagagcagcgagagcagcacctacaccgccgccctgcccagagagagactgagacccagacccaaggtgttcctgtgctacagcagcaaggacggccagaaccacatgaacgtggtgcagtgcttcgcctacttcctgcaggacttctgcggctgcgaggtggccctggacctgtgggaggacttcagcctgtgcagagagggccagagagagtgggtgatccagaagatccacgagagccagttcatcatcgtggtgtgcagcaagggcatgaagtacttcgtggacaagaagaactacaagcacaagggcggcggcagaggcagcggcaagggcgagctgttcctggtggccgtgagcgccatcgccgagaagctgagacaggccaagcagagcagcagcgccgccctgagcaagttcatcgccgtgtacttcgactacagctgcgagggcgacgtgcccggcatcctggacctgagcaccaagtacagactgatggacaacctgccccagctgtgcagccacctgcacagcagagaccacggcctgcaggagcccggccagcacaccagacagggcagcagaagaaactacttcagaagcaagagcggcagaagcctgtacgtggccatctgcaacatgcaccagttcatcgacgaggagcccgactggttcgagaagcagttcgtgcccttccaccccccccccctgagatacagagagcccgtgctggagaagttcgacagcggcctggtgctgaacgacgtgatgtgcaagcccggccccgagagcgacttctgcctgaaggtggaggccgccgtgctgggcgccaccggccccgccgacagccagcacgagagccagcacggcggcctggaccaggacggcgaggccagacccgccctggacggcagcgccgccctgcagcccctgctgcacaccgtgaaggccggcagccccagcgacatgcccagagacagcggcatctacgacagcagcgtgcccagcagcgagctgagcctgcccctgatggagggcctgagcaccgaccagaccgagaccagcagcctgaccgagagcgtgagcagcagcagcggcctgggcgaggaggagccccccgccctgcccagcaagctgctgagcagcggcagctgcaaggccgacctgggctgcagaagctacaccgacgagctgcacgccgtggcccccctgtag

SEQ ID NO: 193797 - protein, 2551 aa, Artificial Sequence
  derived and/or modified sequence
MMLQHLVIFCLGLVVQNFCSPAETTGQARRCDRKSLLTIRTECRSCALNLGVKCPDGYTMITSGSVGVRDCRYTFEVRTYSLSLPGCRHICRKDYLQPRCCPGRWGPDCIECPGGAGSPCNGRGSCAEGMEGNGTCSCQEGFGGTACETCADDNLFGPSCSSVCNCVHGVCNSGLDGDGTCECYSAYTGPKCDKPIPECAALLCPENSRCSPSTEDENKLECKCLPNYRGDGKYCDPINPCLRKICHPHAHCTYLGPNRHSCTCQEGYRGDGQVCLPVDPCQINFGNCPTKSTVCKYDGPGQSHCECKEHYQNFVPGVGCSMTDICKSDNPCHRNANCTTVAPGRTECICQKGYVGDGLTCYGNIMERLRELNTEPRGKWQGRLTSFISLLDKAYAWPLSKLGPFTVLLPTDKGLKGFNVNELLVDNKAAQYFVKLHIIAGQMNIEYMNNTDMFYTLTGKSGEIFNSDKDNQIKLKLHGGKKKVKIIQGDIIASNGLLHILDRAMDKLEPTFESNNEQTIMTMLQPRYSKFRSLLEETNLGHALDEDGVGGPYTIFVPNNEALNNMKDGTLDYLLSPEGSRKLLELVRYHIVPFTQLEVATLISTPHIRSMANQLIQFNTTDNGQILANDVAMEEIEITAKNGRIYTLTGVLIPPSIVPILPHRCDETKREMKLGTCVSCSLVYWSRCPANSEPTALFTHRCVYSGRFGSLKSGCARYCNATVKIPKCCKGFYGPDCNQCPGGFSNPCSGNGQCADSLGGNGTCICEEGFQGSQCQFCSDPNKYGPRCNKKCLCVHGTCNNRIDSDGACLTGTCRDGSAGRLCDKQTSACGPYVQFCHIHATCEYSNGTASCICKAGYEGDGTLCSEMDPCTGLTPGGCSRNAECIKTGTGTHTCVCQQGWTGNGRDCSEINNCLLPSAGGCHDNASCLYVGPGQNECECKKGFRGNGIDCEPITSCLEQTGKCHPLASCQSTSSGVWSCVCQEGYEGDGFLCYGNAAVELSFLSEAAIFNRWINNASLQPTLSATSNLTVLVPSQQATEDMDQDEKSFWLSQSNIPALIKYHMLLGTYRVADLQTLSSSDMLATSLQGNFLHLAKVDGNITIEGASIVDGDNAATNGVIHIINKVLVPQRRLTGSLPNLLMRLEQMPDYSIFRGYIIQYNLANAIEAADAYTVFAPNNNAIENYIREKKVLSLEEDVLRYHVVLEEKLLKNDLHNGMHRETMLGFSYFLSFFLHNDQLYVNEAPINYTNVATDKGVIHGLGKVLEIQKNRCDNNDTTIIRGRCRTCSSELTCPFGTKSLGNEKRRCIYTSYFMGRRTLFIGCQPKCVRTVITRECCAGFFGPQCQPCPGNAQNVCFGNGICLDGVNGTGVCECGEGFSGTACETCTEGKYGIHCDQACSCVHGRCNQGPLGDGSCDCDVGWRGVHCDNATTEDNCNGTCHTSANCLTNSDGTASCKCAAGFQGNGTICTAINACEISNGGCSAKADCKRTTPGRRVCTCKAGYTGDGIVCLEINPCLENHGGCDKNAECTQTGPNQAACNCLPAYTGDGKVCTLINVCLTKNGGCSEFAICNHTGQVERTCTCKPNYIGDGFTCRGSIYQELPKNPKTSQYFFQLQEHFVKDLVGPGPFTVFAPLSAAFDEEARVKDWDKYGLMPQVLRYHVVACHQLLLENLKLISNATSLQGEPIVISVSQSTVYINNKAKIISSDIISTNGIVHIIDKLLSPKNLLITPKDNSGRILQNLTTLATNNGYIKFSNLIQDSGLLSVITDPIHTPVTLFWPTDQALHALPAEQQDFLFNQDNKDKLKEYLKFHVIRDAKVLAVDLPTSTAWKTLQGSELSVKCGAGRDIGDLFLNGQTCRIVQRELLFDLGVAYGIDCLLIDPTLGGRCDTFTTFDASGECGSCVNTPSCPRWSKPKGVKQKCLYNLPFKRNLEGCRERCSLVIQIPRCCKGYFGRDCQACPGGPDAPCNNRGVCLDQYSATGECKCNTGFNGTACEMCWPGRFGPDCLPCGCSDHGQCDDGITGSGQCLCETGWTGPSCDTQAVLPAVCTPPCSAHATCKENNTCECNLDYEGDGITCTVVDFCKQDNGGCAKVARCSQKGTKVSCSCQKGYKGDGHSCTEIDPCADGLNGGCHEHATCKMTGPGKHKCECKSHYVGDGLNCEPEQLPIDRCLQDNGQCHADAKCVDLHFQDTTVGVFHLRSPLGQYKLTFDKAREACANEAATMATYNQLSYAQKAKYHLCSAGWLETGRVAYPTAFASQNCGSGVVGIVDYGPRPNKSEMWDVFCYRMKDVNCTCKVGYVGDGFSCSGNLLQVLMSFPSLTNFLTEVLAYSNSSARGRAFLEHLTDLSIRGTLFVPQNSGLGENETLSGRDIEHHLANVSMFFYNDLVNGTTLQTRLGSKLLITASQDPLQPTETRFVDGRAILQWDIFASNGIIHVISRPLKAPPAPVTLTHTGLGAGIFFAIILVTGAVALAAYSYFRINRRTIGFQHFESEEDINVAALGKQQPENISNPLYESTTSAPPEPSYDPFTDSEERQLEGNDPLRTL

SEQ ID NO: 193798 - DNA, 7656 bp, Artificial Sequence
  derived and/or modified sequence
atgatgctgcagcacctggtgatcttctgcctgggcctggtggtgcagaacttctgcagccccgccgagaccaccggccaggccagaagatgcgacagaaagagcctgctgaccatcagaaccgagtgcagaagctgcgccctgaacctgggcgtgaagtgccccgacggctacaccatgatcaccagcggcagcgtgggcgtgagagactgcagatacaccttcgaggtgagaacctacagcctgagcctgcccggctgcagacacatctgcagaaaggactacctgcagcccagatgctgccccggcagatggggccccgactgcatcgagtgccccggcggcgccggcagcccctgcaacggcagaggcagctgcgccgagggcatggagggcaacggcacctgcagctgccaggagggcttcggcggcaccgcctgcgagacctgcgccgacgacaacctgttcggccccagctgcagcagcgtgtgcaactgcgtgcacggcgtgtgcaacagcggcctggacggcgacggcacctgcgagtgctacagcgcctacaccggccccaagtgcgacaagcccatccccgagtgcgccgccctgctgtgccccgagaacagcagatgcagccccagcaccgaggacgagaacaagctggagtgcaagtgcctgcccaactacagaggcgacggcaagtactgcgaccccatcaacccctgcctgagaaagatctgccacccccacgcccactgcacctacctgggccccaacagacacagctgcacctgccaggagggctacagaggcgacggccaggtgtgcctgcccgtggacccctgccagatcaacttcggcaactgccccaccaagagcaccgtgtgcaagtacgacggccccggccagagccactgcgagtgcaaggagcactaccagaacttcgtgcccggcgtgggctgcagcatgaccgacatctgcaagagcgacaacccctgccacagaaacgccaactgcaccaccgtggcccccggcagaaccgagtgcatctgccagaagggctacgtgggcgacggcctgacctgctacggcaacatcatggagagactgagagagctgaacaccgagcccagaggcaagtggcagggcagactgaccagcttcatcagcctgctggacaaggcctacgcctggcccctgagcaagctgggccccttcaccgtgctgctgcccaccgacaagggcctgaagggcttcaacgtgaacgagctgctggtggacaacaaggccgcccagtacttcgtgaagctgcacatcatcgccggccagatgaacatcgagtacatgaacaacaccgacatgttctacaccctgaccggcaagagcggcgagatcttcaacagcgacaaggacaaccagatcaagctgaagctgcacggcggcaagaagaaggtgaagatcatccagggcgacatcatcgccagcaacggcctgctgcacatcctggacagagccatggacaagctggagcccaccttcgagagcaacaacgagcagaccatcatgaccatgctgcagcccagatacagcaagttcagaagcctgctggaggagaccaacctgggccacgccctggacgaggacggcgtgggcggcccctacaccatcttcgtgcccaacaacgaggccctgaacaacatgaaggacggcaccctggactacctgctgagccccgagggcagcagaaagctgctggagctggtgagataccacatcgtgcccttcacccagctggaggtggccaccctgatcagcaccccccacatcagaagcatggccaaccagctgatccagttcaacaccaccgacaacggccagatcctggccaacgacgtggccatggaggagatcgagatcaccgccaagaacggcagaatctacaccctgaccggcgtgctgatcccccccagcatcgtgcccatcctgccccacagatgcgacgagaccaagagagagatgaagctgggcacctgcgtgagctgcagcctggtgtactggagcagatgccccgccaacagcgagcccaccgccctgttcacccacagatgcgtgtacagcggcagattcggcagcctgaagagcggctgcgccagatactgcaacgccaccgtgaagatccccaagtgctgcaagggcttctacggccccgactgcaaccagtgccccggcggcttcagcaacccctgcagcggcaacggccagtgcgccgacagcctgggcggcaacggcacctgcatctgcgaggagggcttccagggcagccagtgccagttctgcagcgaccccaacaagtacggccccagatgcaacaagaagtgcctgtgcgtgcacggcacctgcaacaacagaatcgacagcgacggcgcctgcctgaccggcacctgcagagacggcagcgccggcagactgtgcgacaagcagaccagcgcctgcggcccctacgtgcagttctgccacatccacgccacctgcgagtacagcaacggcaccgccagctgcatctgcaaggccggctacgagggcgacggcaccctgtgcagcgagatggacccctgcaccggcctgacccccggcggctgcagcagaaacgccgagtgcatcaagaccggcaccggcacccacacctgcgtgtgccagcagggctggaccggcaacggcagagactgcagcgagatcaacaactgcctgctgcccagcgccggcggctgccacgacaacgccagctgcctgtacgtgggccccggccagaacgagtgcgagtgcaagaagggcttcagaggcaacggcatcgactgcgagcccatcaccagctgcctggagcagaccggcaagtgccaccccctggccagctgccagagcaccagcagcggcgtgtggagctgcgtgtgccaggagggctacgagggcgacggcttcctgtgctacggcaacgccgccgtggagctgagcttcctgagcgaggccgccatcttcaacagatggatcaacaacgccagcctgcagcccaccctgagcgccaccagcaacctgaccgtgctggtgcccagccagcaggccaccgaggacatggaccaggacgagaagagcttctggctgagccagagcaacatccccgccctgatcaagtaccacatgctgctgggcacctacagagtggccgacctgcagaccctgagcagcagcgacatgctggccaccagcctgcagggcaacttcctgcacctggccaaggtggacggcaacatcaccatcgagggcgccagcatcgtggacggcgacaacgccgccaccaacggcgtgatccacatcatcaacaaggtgctggtgccccagagaagactgaccggcagcctgcccaacctgctgatgagactggagcagatgcccgactacagcatcttcagaggctacatcatccagtacaacctggccaacgccatcgaggccgccgacgcctacaccgtgttcgcccccaacaacaacgccatcgagaactacatcagagagaagaaggtgctgagcctggaggaggacgtgctgagataccacgtggtgctggaggagaagctgctgaagaacgacctgcacaacggcatgcacagagagaccatgctgggcttcagctacttcctgagcttcttcctgcacaacgaccagctgtacgtgaacgaggcccccatcaactacaccaacgtggccaccgacaagggcgtgatccacggcctgggcaaggtgctggagatccagaagaacagatgcgacaacaacgacaccaccatcatcagaggcagatgcagaacctgcagcagcgagctgacctgccccttcggcaccaagagcctgggcaacgagaagagaagatgcatctacaccagctacttcatgggcagaagaaccctgttcatcggctgccagcccaagtgcgtgagaaccgtgatcaccagagagtgctgcgccggcttcttcggcccccagtgccagccctgccccggcaacgcccagaacgtgtgcttcggcaacggcatctgcctggacggcgtgaacggcaccggcgtgtgcgagtgcggcgagggcttcagcggcaccgcctgcgagacctgcaccgagggcaagtacggcatccactgcgaccaggcctgcagctgcgtgcacggcagatgcaaccagggccccctgggcgacggcagctgcgactgcgacgtgggctggagaggcgtgcactgcgacaacgccaccaccgaggacaactgcaacggcacctgccacaccagcgccaactgcctgaccaacagcgacggcaccgccagctgcaagtgcgccgccggcttccagggcaacggcaccatctgcaccgccatcaacgcctgcgagatcagcaacggcggctgcagcgccaaggccgactgcaagagaaccacccccggcagaagagtgtgcacctgcaaggccggctacaccggcgacggcatcgtgtgcctggagatcaacccctgcctggagaaccacggcggctgcgacaagaacgccgagtgcacccagaccggccccaaccaggccgcctgcaactgcctgcccgcctacaccggcgacggcaaggtgtgcaccctgatcaacgtgtgcctgaccaagaacggcggctgcagcgagttcgccatctgcaaccacaccggccaggtggagagaacctgcacctgcaagcccaactacatcggcgacggcttcacctgcagaggcagcatctaccaggagctgcccaagaaccccaagaccagccagtacttcttccagctgcaggagcacttcgtgaaggacctggtgggccccggccccttcaccgtgttcgcccccctgagcgccgccttcgacgaggaggccagagtgaaggactgggacaagtacggcctgatgccccaggtgctgagataccacgtggtggcctgccaccagctgctgctggagaacctgaagctgatcagcaacgccaccagcctgcagggcgagcccatcgtgatcagcgtgagccagagcaccgtgtacatcaacaacaaggccaagatcatcagcagcgacatcatcagcaccaacggcatcgtgcacatcatcgacaagctgctgagccccaagaacctgctgatcacccccaaggacaacagcggcagaatcctgcagaacctgaccaccctggccaccaacaacggctacatcaagttcagcaacctgatccaggacagcggcctgctgagcgtgatcaccgaccccatccacacccccgtgaccctgttctggcccaccgaccaggccctgcacgccctgcccgccgagcagcaggacttcctgttcaaccaggacaacaaggacaagctgaaggagtacctgaagttccacgtgatcagagacgccaaggtgctggccgtggacctgcccaccagcaccgcctggaagaccctgcagggcagcgagctgagcgtgaagtgcggcgccggcagagacatcggcgacctgttcctgaacggccagacctgcagaatcgtgcagagagagctgctgttcgacctgggcgtggcctacggcatcgactgcctgctgatcgaccccaccctgggcggcagatgcgacaccttcaccaccttcgacgccagcggcgagtgcggcagctgcgtgaacacccccagctgccccagatggagcaagcccaagggcgtgaagcagaagtgcctgtacaacctgcccttcaagagaaacctggagggctgcagagagagatgcagcctggtgatccagatccccagatgctgcaagggctacttcggcagagactgccaggcctgccccggcggccccgacgccccctgcaacaacagaggcgtgtgcctggaccagtacagcgccaccggcgagtgcaagtgcaacaccggcttcaacggcaccgcctgcgagatgtgctggcccggcagattcggccccgactgcctgccctgcggctgcagcgaccacggccagtgcgacgacggcatcaccggcagcggccagtgcctgtgcgagaccggctggaccggccccagctgcgacacccaggccgtgctgcccgccgtgtgcacccccccctgcagcgcccacgccacctgcaaggagaacaacacctgcgagtgcaacctggactacgagggcgacggcatcacctgcaccgtggtggacttctgcaagcaggacaacggcggctgcgccaaggtggccagatgcagccagaagggcaccaaggtgagctgcagctgccagaagggctacaagggcgacggccacagctgcaccgagatcgacccctgcgccgacggcctgaacggcggctgccacgagcacgccacctgcaagatgaccggccccggcaagcacaagtgcgagtgcaagagccactacgtgggcgacggcctgaactgcgagcccgagcagctgcccatcgacagatgcctgcaggacaacggccagtgccacgccgacgccaagtgcgtggacctgcacttccaggacaccaccgtgggcgtgttccacctgagaagccccctgggccagtacaagctgaccttcgacaaggccagagaggcctgcgccaacgaggccgccaccatggccacctacaaccagctgagctacgcccagaaggccaagtaccacctgtgcagcgccggctggctggagaccggcagagtggcctaccccaccgccttcgccagccagaactgcggcagcggcgtggtgggcatcgtggactacggccccagacccaacaagagcgagatgtgggacgtgttctgctacagaatgaaggacgtgaactgcacctgcaaggtgggctacgtgggcgacggcttcagctgcagcggcaacctgctgcaggtgctgatgagcttccccagcctgaccaacttcctgaccgaggtgctggcctacagcaacagcagcgccagaggcagagccttcctggagcacctgaccgacctgagcatcagaggcaccctgttcgtgccccagaacagcggcctgggcgagaacgagaccctgagcggcagagacatcgagcaccacctggccaacgtgagcatgttcttctacaacgacctggtgaacggcaccaccctgcagaccagactgggcagcaagctgctgatcaccgccagccaggaccccctgcagcccaccgagaccagattcgtggacggcagagccatcctgcagtgggacatcttcgccagcaacggcatcatccacgtgatcagcagacccctgaaggccccccccgcccccgtgaccctgacccacaccggcctgggcgccggcatcttcttcgccatcatcctggtgaccggcgccgtggccctggccgcctacagctacttcagaatcaacagaagaaccatcggcttccagcacttcgagagcgaggaggacatcaacgtggccgccctgggcaagcagcagcccgagaacatcagcaaccccctgtacgagagcaccaccagcgccccccccgagcccagctacgaccccttcaccgacagcgaggagagacagctggagggcaacgaccccctgagaaccctgtag

SEQ ID NO: 193799 - DNA, 7656 bp, Artificial Sequence
  derived and/or modified sequence
atgatgctacaacaccttgtcatcttctgtctgggcctcgtagtccagaatttttgctcgccagccgaaactaccggtcaggcaagaaggtgcgaccggaagagtctgctcaccatcaggacagagtgtagaagctgcgcactgaacctgggtgtgaagtgccccgacgggtacacaatgatcacgtctgggtctgtcggtgtgcgtgattgccggtatacttttgaagtgagaacttactccctttcactgcccggttgtcggcatatatgtcggaaggactatctacagccaagatgctgtcccggccgatggggacccgattgtattgagtgccccggcggcgccggatccccctgcaatggtcggggaagttgtgcggaagggatggaaggcaacggcacttgttcctgtcaggaaggctttggcggaacagcctgtgaaacctgcgcggacgacaatctctttggaccctcatgttcaagcgtgtgtaactgtgtccacggggtgtgcaattccggcttagatggggacggaacctgcgaatgttatagcgcatacactggcccgaagtgcgataagcccatccctgagtgtgcagccttgctgtgcccggaaaattcaagatgcagccctagtaccgaggacgagaataagctggagtgcaaatgtctgccaaactatagaggcgacgggaaatactgcgaccccatcaacccctgcctgcgtaaaatctgccatccacacgcccattgtacttacctggggcctaatcgacattcatgtacgtgccaggagggctaccgaggcgatgggcaagtttgtctcccggtggacccgtgccaaattaacttcggaaattgccccacaaagagcacagtgtgtaaatacgacgggcctggacaatctcattgcgagtgcaaggaacattaccagaactttgtacccggcgtcgggtgcagcatgactgacatttgcaagtctgataatccttgtcaccgaaacgccaattgtaccacagtggcgccaggtcggacagaatgtatatgccagaaaggctatgttggcgatggacttacttgttacggcaacatcatggagagactgagagaacttaacaccgaacccaggggaaaatggcagggcaggctaacatcgtttatttctcttctcgacaaagcctatgcctggcctctgagcaaactgggaccattcactgtgctgttaccaaccgacaagggcctgaaaggcttcaacgtgaacgaattactagtggacaataaagccgcgcagtatttcgtaaaacttcacatcatcgcaggccagatgaatatagaatatatgaataacaccgacatgttctacactttgacagggaagagcggagaaatattcaacagcgacaaagacaatcaaatcaaattaaagcttcacgggggaaagaagaaggttaaaattatccagggcgatattatcgctagtaacgggcttctacatattttagaccgggccatggacaagttggaacccacattcgagagcaataatgagcagactattatgactatgttgcagccaagatattcaaaatttcgatccctcctggaggagactaacttgggacatgctctcgacgaggatggagtggggggtccatatactatcttcgttccaaacaacgaggccctgaacaatatgaaagacggcactttagactacctcctgtcgcccgaggggtcccgcaaactgctcgagcttgtaagataccacatcgtcccctttacccaactggaggtggcgacactgataagcactccacatatacgatcaatggccaatcaactgattcagttcaacacaactgacaacggacagatattggctaacgatgttgccatggaggagatcgaaatcacagcaaaaaacggccgcatttacacactgaccggggtgctgatccccccttccatcgtaccaattctgccacaccggtgtgatgagactaaacgggaaatgaagttggggacatgcgtctcttgtagcctcgtttattggtcgaggtgccctgccaactctgaacctacggctctgttcactcataggtgtgtgtatagtgggaggttcggcagcttgaagtccggatgtgccaggtactgcaacgctactgtcaaaataccaaaatgttgtaagggcttttatgggccagattgcaatcagtgcccaggaggcttttcaaacccctgtagcggaaatggccagtgcgctgatagcctgggcggcaatgggacatgcatttgtgaagaaggattccagggcagtcagtgccagttctgttctgatcccaacaaatatggaccaagatgcaataaaaagtgcctgtgtgtacacgggacctgtaataataggatcgacagtgatggggcatgcctaaccggaacatgtcgtgatggttcagcaggaagactgtgtgacaagcaaaccagcgcttgcggcccctatgttcaattttgccatatccacgccacatgcgagtattccaatggcaccgcttcttgcatttgtaaagcggggtacgagggagatggcaccttatgctccgagatggacccttgtaccggtttgaccccaggggggtgctcaagaaacgcagagtgcatcaaaactggcacaggcactcacacctgcgtttgccagcagggctggacgggcaatgggcgagactgttcggaaatcaataactgtctgcttccttccgccggtggatgccacgacaatgcttcgtgtctttacgtggggcctgggcagaatgaatgcgaatgcaaaaaaggattcaggggtaacgggatcgattgcgagccaatcacatcctgtctggagcagactggaaaatgtcaccccctggcctcatgtcagtcgacttccagcggggtctggagctgcgtttgccaggaaggctatgagggcgatggctttctatgctatgggaacgccgccgtggagctgagcttcctgagcgaggccgccatctttaaccgatggataaataatgccagtcttcagccaactttgagcgcaacatcaaacctgactgttttggtgccatcccaacaggccaccgaagacatggatcaggacgaaaaatctttctggctatcccaaagtaacatccctgcacttattaagtatcacatgctgctgggaacgtacagggtagccgacctccagaccctttcctcatccgacatgctggccacatccttgcagggcaacttccttcaccttgctaaagttgacggcaatattaccattgaaggagccagcatcgtcgacggagacaatgctgcaaccaatggcgtcattcacatcattaacaaagtgctggtgcctcagagacgcctgaccggctctctgcctaatctgctcatgagattggaacagatgccggactatagtattttccggggctacatcattcagtacaatctcgctaacgctattgaggcagctgatgcctacaccgtgttcgccccaaataacaacgcaatcgagaattatatccgagaaaaaaaggtgttgtccttggaggaggatgtactgagatatcacgttgtcttggaggagaaattattaaaaaacgatttgcacaatgggatgcacagagagaccatgttgggcttcagttactttctgtcctttttcctccataatgaccaactctatgtgaacgaggcgcccatcaactacaccaacgtggcaaccgataaaggggtgatacacggtctcgggaaagttctggagattcagaaaaaccggtgtgacaacaatgatactactatcatccgcgggcgctgcagaacatgctctagcgaacttacttgccctttcggcactaagtccctcggtaatgaaaagagacggtgtatctacactagctacttcatgggaaggcggactctattcataggctgccagccgaagtgtgttagaactgtcatcaccagagagtgctgcgccggattttttgggccccagtgccagccttgtccaggcaatgcccagaacgtttgcttcggtaatggtatatgccttgacggagtcaatggcactggtgtatgcgagtgcggcgaggggttttctggtacggcctgtgagacttgcaccgagggcaagtacgggatacactgtgaccaggcctgttcctgtgtccatggcaggtgcaatcaggggccgttaggggacgggagctgtgactgcgatgtgggctggcggggcgtgcattgtgacaatgcaaccacagaggataactgtaacggaacttgccatacaagtgctaactgtctgaccaatagtgatggtaccgccagctgtaaatgcgccgccggatttcagggtaacggcaccatctgcacagccatcaatgcctgcgaaatctccaacggaggttgctctgctaaggcagactgcaagcggacaacacctgggcggcgggtctgtacttgcaaggctggctacactggggacgggattgtttgtctggaaattaatccctgtcttgagaaccatggaggatgtgacaaaaatgccgagtgcactcaaacaggtcccaaccaggcagcatgtaattgtcttcccgcctacactggagatggtaaagtctgcaccctgatcaatgtttgcctgacaaagaacggaggttgtagcgagtttgcgatctgtaaccacaccggtcaagtcgaacggacctgcacttgtaaacctaattacataggagacgggttcacctgtcgaggctctatctatcaggaactgcctaagaatcctaaaacttctcaatactttttccaactgcaggagcacttcgtcaaagacttggtcggccccggcccgtttaccgtcttcgcacctctttcggcagctttcgacgaagaggcgagagtaaaagattgggacaaatacggcctaatgcctcaggtcctcaggtatcacgtggtggcttgtcatcagctgctcctggaaaacctgaaactaatttcaaatgccacatcgctgcaaggggagcctatagtcatctctgtgagtcagagcaccgtctacattaataataaagctaaaattatctcctcagatatcattagtaccaatggcattgtccatattatagacaaactcctcagccctaaaaaccttctgataacccccaaggacaattctggacgaatccttcagaatctcaccactcttgcaaccaataatggttacatcaaattcagcaatctaatacaggatagcgggctcttgagcgtgatcaccgatcccatccatacgccagttacccttttttggcctacagatcaggctctgcatgctttgcccgcggaacagcaagacttcttattcaatcaagacaataaggataagctgaaagaatatctgaagtttcacgtcatccgcgacgccaaagtcctggccgtcgatctccctactagcaccgcttggaaaacgctgcaggggtcagaattaagcgtgaagtgtggtgccggccgggatataggcgacctgtttctgaatggtcaaacctgccggatcgtccagagagaattgctgttcgatctcggcgtagcctatggtatagactgtctcctcattgacccaacgttaggggggcgctgcgacacattcaccaccttcgatgcgtctggtgagtgcgggtcctgtgtaaataccccatcttgcccacgctggagcaaaccaaagggcgtaaagcaaaagtgcctctacaacttaccatttaagagaaatctggaggggtgtcgagagaggtgctcactggtcattcagatcccaagatgttgcaagggctatttcggcagggattgccaagcttgcccgggaggccccgatgccccctgtaataatcggggcgtatgtttggaccagtacagtgcaaccggcgaatgcaagtgcaataccggctttaacggaactgcctgcgagatgtgctggccagggagatttggtccggactgtcttccttgcggctgctctgaccacggacagtgcgatgatggaatcaccgggagcggccagtgcctatgtgaaacgggatggacaggaccttcttgtgacacgcaagccgtactccctgccgtgtgcactcctccctgctctgcccatgcaacatgcaaggaaaataacacgtgcgaatgcaatttagattatgagggcgacgggataacctgtacagttgttgatttttgtaaacaggacaatggcggatgtgctaaagtggcgaggtgcagtcagaagggcactaaagtgtcgtgtagttgtcagaagggatacaagggagacggtcattcatgtacagaaattgacccatgcgccgacggactgaatggtggatgtcacgaacacgctacctgcaagatgacaggacctggaaaacataagtgcgaatgcaagtcccactatgtgggcgatggcctgaactgtgagccagagcagctacctatcgatcgctgtctgcaggataatggccagtgtcatgctgacgccaaatgtgttgacttacacttccaggacactacggtgggcgtatttcacctgagatccccgctgggccagtacaagcttactttcgataaagcacgtgaggcctgtgctaacgaagctgccaccatggccacatataaccagctatcttatgcacagaaggcaaaataccacctctgcagcgctgggtggcttgagacgggacgagtcgcttatcccaccgctttcgcctcacagaattgcggcagcggcgtggtgggaatcgtcgattatgggccccggcccaataagagcgagatgtgggatgtattctgctacaggatgaaagatgtcaactgtacctgtaaggtgggctatgtgggggacggtttcagctgcagtggaaaccttctgcaggtgcttatgtcattcccctcactaacgaactttcttacagaggttctggcctacagtaattcttcagcaagagggcgcgctttcctcgaacacctgactgatctgtccatacgagggaccctgttcgttccacagaatagcgggctgggtgaaaatgaaacgctgtccggccgcgatatcgagcatcatcttgccaatgtgtccatgttcttttacaacgacctggtgaacgggacgaccttgcagaccagactgggctccaaattacttattacagcaagccaggatcccttacagccaacggagacccgcttcgtggacggtcgggccatcttgcaatgggacatatttgcttccaatggaatcattcatgtaatctccaggcctttaaaagctcccccagctcccgtcaccctgacccacacaggtctcggggccgggatattcttcgccatcatcctggtgaccggggcagtcgccctggcggcatattcgtattttcgcatcaatagacgcactatcggcttccagcattttgaaagcgaagaagacattaacgtagccgcgctggggaagcagcaacctgagaacatctccaaccccctgtatgaaagtactacaagcgcacctccggagcccagctatgatccatttaccgacagtgaagagcgtcagttggaaggaaacgacccacttagaacactgtag

SEQ ID NO: 193800 - DNA, 7656 bp, Artificial Sequence
  derived and/or modified sequence
atgatgctgcagcacctggtgatcttctgcctgggcctggtggtgcagaacttctgcagccctgctgagaccaccggccaggcccggcgctgtgacaggaagagcctgctgaccatcagaacagagtgccgcagctgtgccctgaacctgggcgtgaagtgcccagatggctacaccatgatcaccagcggctctgtgggcgtgcgggactgccgctacacctttgaggtgaggacctacagcctgagcctgcccggctgccgccacatctgcaggaaggactacctgcagccccgctgctgccccggccgctggggccctgactgcattgaatgtcctggaggagctggcagcccctgcaatggccggggcagctgtgccgagggcatggagggcaatggcacctgcagctgccaggagggctttggaggaacagcctgtgagacctgtgctgatgacaacctgtttggccccagctgcagctctgtgtgcaactgtgtgcacggcgtgtgcaacagcggcctggatggagatggcacctgtgagtgctacagcgcctacacaggccccaagtgtgacaagcccatcccagaatgtgccgccctgctgtgcccagagaacagccgctgcagccccagcacagaagatgagaacaagctggagtgcaagtgcctgcccaactacagaggagatggcaagtactgtgaccccatcaacccctgcctgaggaagatctgccacccccacgcccactgcacctacctgggccccaacagacacagctgcacctgccaggagggctacagaggagatggccaggtgtgcctgcctgtggacccctgccagatcaactttggaaactgccccaccaagagcacagtgtgcaagtatgatggccctggccagagccactgtgagtgcaaggagcactaccagaactttgtgcctggggtgggctgcagcatgacagacatctgcaagagtgacaacccctgccacagaaatgccaactgcaccaccgtggcccctggccgcacagagtgcatctgccagaagggctacgtgggagatggcctgacctgctacggcaacatcatggagcggctgcgggagctgaacacagagccccggggcaagtggcagggccgcctgaccagcttcatcagcctgctggacaaggcctatgcctggcccctgagcaagctgggccccttcaccgtgctgctgcccacagacaagggcctgaagggcttcaacgtgaatgagctgctggtggacaacaaggccgcccagtactttgtgaagctgcacatcatcgccggccagatgaacatcgagtacatgaacaacacagacatgttctacaccctgaccgggaagtctggagagatcttcaacagcgacaaggacaaccagatcaagctgaagctgcacggcggcaagaagaaggtgaagatcatccagggcgacatcatcgccagcaatggcctgctgcacatcctggaccgggccatggacaagctggagcccacctttgagagcaacaatgagcagaccatcatgaccatgctgcagccccgctacagcaagttccgcagcctgctggaggagaccaacctgggccacgccctggatgaagatggagtgggcggcccctacaccatctttgtgcccaacaatgaggccctgaacaacatgaaggatggcaccctggactacctgctgagccctgagggcagcaggaagctgctggagctggtgcgctaccacatcgtgcccttcacccagctggaggtggccaccctcatcagcaccccccacatccgctccatggccaaccagctgatccagttcaacaccacagacaatggccagatcctggccaatgatgtggccatggaggagattgagatcacagccaagaatggccgcatctacaccctgactggagtgctgatcccccccagcatcgtgcccatcctgccccaccgctgtgatgagaccaagcgggagatgaagctgggcacctgtgtgtcctgcagcctggtgtactggagccgctgcccagccaacagcgagcccacagccctcttcacccaccgctgtgtgtacagcggccgcttcggcagcctgaagagcggctgtgcccgctactgcaatgccaccgtgaagatccccaagtgctgcaagggcttctacggccctgactgcaaccagtgccctgggggcttcagcaacccctgcagcggaaatggccagtgtgccgacagcctgggcggcaatggcacctgcatctgtgaggagggcttccagggcagccagtgccagttctgcagcgaccccaacaagtatggcccccgctgcaacaagaagtgcctgtgtgtgcacggcacctgcaacaacagaattgacagtgatggagcctgcctgaccggcacctgcagagatggcagcgctggccgcctgtgtgacaagcagaccagcgcctgtggcccctacgtgcagttctgccacatccacgccacctgtgagtacagcaatggaacagccagctgcatctgcaaggccggctatgaaggagatggcaccctgtgcagcgagatggacccctgcaccggcctgacccctgggggctgcagcagaaatgctgagtgcatcaagacaggcaccggcacccacacctgtgtgtgccagcagggctggacaggaaatggccgggactgcagcgagatcaacaactgcctgctgcccagcgctgggggctgccacgacaatgccagctgcctgtatgtgggccctggccagaatgaatgtgagtgcaagaagggcttcagaggaaatggaattgactgtgagcccatcaccagctgcctggagcagacaggcaagtgccaccccctggccagctgccagagcaccagcagtggagtgtggagctgtgtgtgccaggagggctatgaaggagatggcttcctgtgctatggaaatgctgctgtggagctgtccttcctgtctgaggccgccatcttcaaccgctggatcaacaatgccagcctgcagcccaccctgagcgccaccagcaacctgactgtgctggtgcccagccagcaggccacagaggacatggaccaggatgagaagagcttctggctgagccagagcaacatcccagccctgatcaagtaccacatgctgctgggcacctacagagtggccgacctgcagaccctgagcagcagtgacatgctggccaccagcctgcagggcaacttcctgcacctggccaaggtggatggcaacatcaccattgaaggagccagcatcgtggatggagacaatgctgccaccaatggagtcatccacatcatcaacaaggtgctggtgccccagaggcggctgaccggcagcctgcccaacctgctgatgaggctggagcagatgccagactacagcatcttccggggctacatcatccagtacaacctggccaatgccatcgaggccgcagatgcctacacagtgtttgcccccaacaacaatgccatcgagaactacatccgggagaagaaggtgctgagcctggaggaggatgtgctgcgctaccacgtggtgctggaggagaagctgctgaagaatgacctgcacaacggcatgcaccgggagaccatgctgggcttctcctacttcctgtccttcttcctgcacaatgaccagctgtatgtgaatgaggcccccatcaactacaccaacgtggccacagacaagggcgtcatccacggcctgggcaaggtgctggagatccagaagaacagatgtgacaacaatgacaccaccatcatccggggccgctgcaggacctgcagcagcgagctgacctgccccttcggcaccaagagcctgggcaatgagaagaggcgctgcatctacaccagctacttcatgggccgccgcaccctcttcatcggctgccagcccaagtgtgtgaggacagtcatcacccgggagtgctgtgccggcttcttcggcccccagtgccagccctgccctggaaatgcccagaatgtgtgctttggaaatggcatctgcctggatggagtgaatggaactggagtgtgtgaatgtggggagggcttctctggaacagcctgtgagacctgcacagagggcaagtatggcatccactgtgaccaggcctgcagctgtgtgcacggccgctgcaaccagggccccctgggagatggcagctgtgactgtgatgtgggctggaggggcgtgcactgtgacaatgccaccacagaggacaactgcaatggcacctgccacaccagcgccaactgcctgaccaacagtgatggaacagccagctgcaagtgtgccgccggcttccagggcaatggcaccatctgcacagccatcaatgcctgtgagatcagcaatggaggctgcagcgccaaggctgactgcaagaggaccaccccaggaagaagagtgtgcacctgcaaggccggctacacaggagatggcatcgtgtgcctggagatcaacccctgcctggagaaccacggcggctgtgacaagaatgcagaatgtacccagacaggccccaaccaggccgcctgcaactgcctgcctgcctacacaggagatggcaaggtgtgcaccctcatcaacgtgtgcctgaccaagaatggaggctgcagcgagtttgccatctgcaaccacacaggccaggtggagaggacctgcacctgcaagcccaactacatcggagatggcttcacctgccggggcagcatctaccaggagctgcccaagaaccccaagaccagccagtacttcttccagctgcaggagcactttgtgaaggacctggtgggccctggccccttcaccgtgtttgcccccctgtctgctgcctttgatgaggaggcccgggtgaaggactgggacaagtatggcctgatgccccaggtgctgcgctaccacgtggtggcctgccaccagctgctgctggagaacctgaagctgatcagcaatgccaccagcctgcagggcgagcccatcgtcatctctgtgtcccagagcacagtgtacatcaacaacaaggccaagatcatcagcagtgacatcatcagcaccaacggcatcgtgcacatcatcgacaagctgctgagccccaagaacctgctgatcacccccaaggacaacagcggccgcatcctgcagaacctgaccaccctggccaccaacaacggctacatcaagttcagcaacctgatccaggacagcggcctgctgagcgtcatcacagaccccatccacacccctgtgaccctcttctggcccacagaccaggccctgcacgccctgcctgctgagcagcaggacttcctgttcaaccaggacaacaaggacaagctgaaggagtacctgaagttccacgtgatcagagatgccaaggtgctggccgtggacctgcccaccagcacagcctggaagaccctgcagggcagcgagctgtctgtgaagtgtggggccggccgggacatcggggacctcttcctgaatggccagacctgccgcatcgtgcagcgggagctgctgtttgacctgggcgtggcctatggaattgactgcctgctgattgaccccaccctgggcggccgctgtgacaccttcaccacctttgatgccagcggagaatgtggcagctgtgtgaacacccccagctgcccccgctggagcaagcccaagggcgtgaagcagaagtgcctgtacaacctgcccttcaagaggaacctggagggctgccgggagcgctgcagcctggtgatccagatcccccgctgctgcaagggctacttcggccgggactgccaggcctgccctgggggcccagatgccccctgcaacaacagaggagtgtgcctggaccagtacagcgccactggagagtgcaagtgcaacacaggcttcaatggaacagcctgtgagatgtgctggccaggccgctttggaccagactgcctgccctgtggctgcagcgaccacggccagtgtgatgatggcatcactggaagtggccagtgcctgtgtgagaccggctggacaggccccagctgtgacacccaggccgtgctgcctgctgtgtgcaccccaccctgcagcgcccacgccacctgcaaggagaacaacacctgtgagtgcaacctggactatgaaggagatggcatcacctgcaccgtggtggacttctgcaagcaggacaatggaggctgtgccaaggtggcccgctgcagccagaagggcaccaaggtgtcctgcagctgccagaagggctacaagggagatggccacagctgcacagaaattgacccctgtgctgatggcctgaatggaggctgccacgagcacgccacctgcaagatgacaggccctgggaagcacaagtgtgagtgcaagagccactacgtgggagatggcctgaactgtgagcctgagcagctgcccatcgaccgctgcctgcaggacaatggccagtgccacgcagatgccaagtgtgtggacctgcacttccaggacaccaccgtgggcgtcttccacctgcggagccccctgggccagtacaagctgacctttgacaaggcccgggaggcctgtgccaatgaggccgccaccatggccacctacaaccagctgtcctatgcccagaaggccaagtaccacctgtgcagcgctggctggctggagaccggccgggtggcctaccccacagcctttgccagccagaactgtggcagcggcgtggtgggcatcgtggactatggcccccggcccaacaagtctgagatgtgggatgtgttctgctacaggatgaaggatgtgaactgcacctgcaaggtgggctacgtgggagatggcttcagctgcagcggcaacctgctgcaggtgctgatgtccttccccagcctgaccaacttcctgacagaggtgctggcctacagcaacagcagcgcccggggccgggccttcctggagcacctgacagacctgagcatccggggcaccctgtttgtgccccagaacagcggcctgggagaaaatgagaccctgagcggccgggacatcgagcaccacctggccaacgtgtccatgttcttctacaatgacctggtgaatggcaccaccctgcagacccggctgggcagcaagctgctgatcacagccagccaggaccccctgcagcccacagagaccaggtttgtggatggccgggccatcctgcagtgggacatctttgccagcaatggcatcatccacgtgatcagccggcccctgaaggcccccccagcccctgtgaccctgacccacacaggcctgggcgccggcatcttctttgccatcatcctggtgactggagctgtggccctggccgcctacagctacttccgcatcaacagaaggaccatcggcttccagcactttgaaagtgaggaggacatcaacgtggccgccctgggcaagcagcagcctgagaacatcagcaaccccctgtatgagagcaccaccagcgcccctcctgagcccagctatgaccccttcacagattctgaggagcggcagctggagggcaatgaccccctgcggaccctgtag

SEQ ID NO: 193801 - DNA, 7656 bp, Artificial Sequence
  derived and/or modified sequence
atgatgctgcagcacctggtgatcttctgcctgggcctggtggtgcaaaatttttgcagtcccgcagagaccaccggccaggcgcgtagatgtgacagaaagtccctgctgaccatccggaccgaatgtcggagctgtgcactaaatttgggtgtgaagtgcccagacggctacacgatgatcactagcggctccgttggggtgagagattgtcggtatacattcgaggtccggacatactctctcagcctgcccggctgtcggcacatctgccgtaaagactacttgcagcccaggtgctgcccggggaggtggggaccagattgtattgagtgtcctggtggtgcaggttccccctgtaatggcaggggcagttgtgccgagggaatggagggtaatgggacctgcagctgtcaggaggggtttggaggtaccgcgtgcgagacttgtgcagatgataaccttttcggcccttcgtgcagttctgtttgtaattgcgtgcatggggtgtgtaactctggactggacggcgatggcacatgcgaatgctactcagcatacacagggcctaaatgcgacaagccaatccccgaatgcgcggcgctactgtgtcccgagaacagtcgttgttcgccatcaacagaggacgaaaacaaattggagtgcaaatgcctacccaattatagaggcgacggcaagtattgtgaccctatcaatccctgcttgcggaagatttgccacccccacgcccactgcacctacctgggacctaatcgccattcgtgcacgtgccaggagggatatcgtggggacgggcaggtctgtctgccagtggatccgtgtcagataaactttggaaactgtccgaccaaatcaacggtctgcaagtatgatggccccggccagagccactgtgaatgtaaggagcattaccaaaacttcgtgcccggcgtcggctgttccatgactgatatctgcaagtctgataatccctgccacagaaatgctaattgcacaactgtggctccagggcggactgagtgcatctgccagaaggggtacgtcggcgacgggctcacgtgttacggaaacatcatggagcgcctgagggagctgaatactgagcccaggggtaaatggcagggcaggctgaccagctttattagtctgctggacaaggcatacgcctggcccctaagtaagcttggacccttcaccgtgctacttccgaccgacaaaggactaaaagggtttaacgtcaacgagctcttagtcgacaataaagccgcccagtacttcgtcaaacttcatattatcgcaggtcagatgaatatcgagtacatgaacaacactgacatgttctatacactaacgggcaagtccggagagatattcaactccgacaaggacaatcaaattaaattgaagcttcacggcggaaagaagaaagtaaagattatccaaggcgacattatcgcatctaacggcctcttacacatattagatagagcgatggacaaactcgaacccactttcgaaagcaacaatgaacagacgataatgaccatgctacagcctcggtatagtaaatttcggtccctccttgaggaaaccaatctgggccacgccctggacgaggacggcgtcggaggcccctacactatctttgtgcctaataatgaagcgcttaacaacatgaaggatggcactctggactacctcctgagtcccgaaggatccaggaagttgctcgaactagtccgctaccacatcgttccattcacccaactggaagtggccacacttatttctacaccccacattcgttccatggccaaccaactgattcagtttaataccacagacaacggccagattttagctaacgacgtggcgatggaggagatagagattaccgccaagaatggtcgtatctacactctaaccggagttcttattccaccaagcattgtgcccattctgcctcatcgctgtgacgaaacgaaacgagagatgaaactaggaacctgtgtctcatgctctctggtctactggtcccgttgccctgccaactccgagccaactgcgttattcacacataggtgcgtgtatagcggacgttttggaagtttgaaatcagggtgcgccagatattgtaacgctactgtgaaaataccaaagtgctgtaagggattttacggccctgactgtaaccagtgcccaggaggcttctctaacccctgtagcggaaatgggcagtgtgccgattctttaggcggtaatggaacctgtatttgcgaagagggatttcagggtagtcagtgccagttctgcagcgacccaaataagtacgggcctcgttgtaacaaaaagtgtttatgcgtccatggtacatgcaacaaccgcatagacagcgacggtgcttgcttaactgggacgtgtcgcgacggtagcgccggcaggctgtgcgataaacagacatctgcttgtggaccctacgtccagttttgtcatatccacgctacttgtgagtatagtaacgggacggccagttgcatttgcaaggctgggtacgaaggggacgggacactctgctcagaaatggatccgtgtacaggcttgactcccggcggttgttcgaggaatgccgagtgtatcaagactgggacaggaacccacacatgcgtctgccagcaagggtggaccggcaatgggagagactgcagcgaaattaataactgcctgctcccgtcagccggcggctgccacgacaacgcttcctgcttgtacgttggccccgggcaaaatgagtgcgaatgtaagaagggctttcggggcaacgggatcgactgcgagcctattactagctgccttgagcagacggggaaatgtcacccactcgcatcatgccagagtacctcctctggggtttggtcctgtgtctgtcaagaggggtatgaaggcgacggattcctgtgctacggaaatgccgctgtcgaattatctttcttatcagaggccgcaattttcaacaggtggattaacaacgcctccttgcagcctactctgtctgcaacaagtaatttaactgtgctggtcccatcacagcaggcgacagaggatatggaccaggacgagaaaagcttctggctttctcagagcaacattccggccctcatcaagtaccatatgctcctgggaacctaccgcgtcgccgacctgcagaccctctcttcttctgatatgcttgcaacgtccctgcaagggaattttcttcatctggccaaggtggatgggaatattacgatcgagggcgcatcaatcgtcgacggcgacaatgccgccacaaacggtgtcattcatattataaacaaagtcctagtgccccagagaaggctgaccggcagcctcccaaatctgctgatgcgtctggaacagatgccagactacagcattttcagggggtacattatccaatacaatctagctaatgccattgaagctgcggacgcttatacggtgtttgctcccaacaacaatgctatcgagaattacatccgggagaaaaaagtgctgtccctggaggaagatgtgcttcgctaccatgtcgtgttagaggagaagctgcttaaaaacgatttacataacgggatgcaccgggagactatgctcgggtttagctactttctgtctttttttctgcacaacgaccagttgtacgtcaacgaggcgcctatcaattataccaatgtggctacagataaaggggttattcatggcctcggaaaggttctggagatacagaagaacaggtgtgataacaatgatactaccatcatccgcgggcgatgtagaacatgttcaagcgaactgacctgtccgtttggtaccaaatctctaggcaacgaaaaacggcgttgcatatatacctcttatttcatgggccgcaggaccctgttcattggttgccagcccaaatgtgtgcggaccgtgattactcgggagtgttgtgctggttttttcgggccccagtgccagccttgcccgggaaacgcgcagaatgtttgttttggcaatggaatctgcctcgacggcgtgaatggaacaggggtctgcgagtgtggggagggattcagcggtactgcatgtgaaacatgcaccgaagggaaatacggaatacactgtgatcaggcttgtagctgtgttcacggcaggtgtaaccaagggccactgggcgacgggtcctgcgattgtgatgttgggtggcggggggtgcactgcgataatgccacaacagaggacaactgtaatgggacttgccatacgtcagccaactgcctcactaattctgacggaacagcctcgtgcaagtgtgctgcaggctttcagggtaatggcacaatctgcactgccattaacgcctgcgagatcagcaacggcggctgctcagccaaggcagactgcaaacgaacaactcctgggagaagggtgtgtacttgcaaggctggatatacgggggacggtattgtctgcctcgagataaacccctgcttggaaaaccacggtggctgtgacaaaaatgcagagtgtactcagaccgggccgaatcaggcggcatgcaattgcttgccggcttacactggggatgggaaagtgtgcacacttatcaatgtttgcttgacaaaaaacggaggttgctctgagttcgccatttgcaatcacacaggccaagttgagcgcacttgcacctgtaagccgaattacattggggatggcttcacctgtaggggatcaatttatcaggagctgccaaaaaatcctaaaacaagccagtattttttccagctgcaggaacacttcgttaaggacctcgttggccccggaccttttacggtgtttgccccgctttctgccgcctttgacgaagaagctcgggtaaaggattgggacaagtacggtctgatgccgcaagtactgcggtatcacgtggtggcgtgtcaccagctgttactggagaacctgaagctgattagcaatgcaacttctctgcagggcgaacccatcgtgattagtgtgagtcagtctacagtttatattaacaataaagccaaaatcatctcatctgacattatcagtaccaatggaattgttcacatcatcgacaaactcctgagcccaaagaacctgttgatcacccccaaagacaattccggtcgcatcctgcagaacctcactacactagccactaacaatggctacatcaagttctccaatctcatacaagattccggtcttctcagtgttatcacagaccctattcacacccccgttaccctgttttggcccacagaccaggcccttcatgcgctgcctgctgagcaacaggactttctcttcaatcaagacaataaggacaagctcaaggagtatctgaagtttcatgtaattagggacgcaaaggttctcgcggtggaccttcccacgtctaccgcatggaaaacgctccagggatctgagcttagtgtgaaatgcggagcaggtcgggacattggggacctctttcttaacgggcagacatgccggatcgtccagagggagttactgtttgatctgggagtggcatacggcatcgattgcctgctcatcgaccccacgctcggtggccggtgcgatacttttacaacgtttgacgcctccggagagtgtgggtcttgcgtcaacacaccaagctgccctagatggagcaagccgaaaggcgtgaaacagaagtgtctgtacaatttgccttttaaaaggaacctcgaaggatgtcgcgaacgttgtagtctggtcattcagattccacgctgttgcaaaggctacttcgggcgtgactgtcaggcctgccctggaggacctgacgcgccttgcaataacaggggcgtctgcctcgatcaatatagcgccacaggggagtgcaaatgcaatacaggcttcaatggtaccgcctgcgagatgtgctggccaggcagatttgggccggactgcctgccttgcggctgttcagaccacggccagtgcgacgacggtattactggaagcggtcagtgcctgtgcgagacagggtggaccggccccagctgcgacacacaggcagtccttccagccgtttgcactcccccttgctctgctcacgccacctgcaaggagaataatacgtgtgagtgcaatctggactatgagggtgacggcattacctgcactgtagttgacttctgtaagcaggacaacggcgggtgtgctaaagtggcccgctgtagccaaaaaggcaccaaggtcagctgctcttgccaaaagggctataaaggcgacgggcactcatgtacagaaattgacccatgcgccgacggcctcaacggtggatgtcatgagcacgctacttgcaagatgacagggccagggaagcacaaatgcgagtgtaaatctcattacgtgggggacgggctcaattgcgagcctgagcagcttcctatcgaccggtgtctgcaggataacggccagtgccacgctgatgccaaatgcgttgatctgcatttccaggataccaccgtgggcgtgttccatcttaggtccccactcgggcagtacaagctgaccttcgacaaggccagagaggcctgcgccaacgaagctgccacaatggccacctacaatcaactgagttacgctcagaaggctaagtatcacctctgcagtgcgggatggctcgaaaccggccgtgtggcatatccgactgcctttgctagccagaactgcgggtccggagtggtcggtatcgtagactatggccctagacccaataagtccgaaatgtgggacgtgttctgttaccgcatgaaggacgtgaattgcacctgcaaggtcggctatgttggggacggattctcatgttccggcaatctgctacaggtgctgatgtcatttccctccctgacaaacttcctaacagaggtcctcgcctatagcaacagcagcgcccgaggtcgagcatttctagagcacctgaccgacctgtcaattcgcgggaccctatttgtgcctcagaattctggcctcggggagaatgagacactcagcggcagagatattgaacatcatttggctaacgtttctatgtttttctacaatgatctcgtgaatggcacgactttacagacaaggctaggctctaagttgctgatcacagcctcacaggatccgctccaacctacggagactaggttcgtggacggccgagccattttgcagtgggacatcttcgcttcaaacggcattattcatgtgatcagccgccccctgaaggctccaccagccccggtcaccttaacccacaccgggttaggtgccggaatcttcttcgccatcattctcgttacaggcgcagtggctctggcagcctatagctatttccgcataaatcgcagaacaatcgggttccagcatttcgaatccgaagaggatatcaacgtggccgctcttggaaaacagcagcccgagaatatctcaaatcctctatatgagtccaccacaagtgcacctccggaaccaagctatgacccatttacagatagcgaggagcgacaactagagggtaatgaccccctccggacactgtag

SEQ ID NO: 193802 - DNA, 7655 bp, Artificial Sequence
  derived and/or modified sequence
atgatgctgcaacacttggtgattttttgcttggggttggtggtgcagaacttctgctccccagcagagaccacaggtcaggccaggcggtgtgatagaaaatccctgttgaccattaggacagagtgtaggagctgcgccctgaacctcggggtgaagtgtcctgacggttacaccatgattacatcagggagcgtgggagtcagagactgtaggtatacattcgaggtacgcacatatagtctgtctctccctggttgcagacacatttgtcggaaagactacctgcagccccgatgctgtcctggaagatgggggccagactgcattgaatgtccgggaggagcaggatctccatgtaatgggcgaggaagctgtgcggagggtatggaggggaatggcacatgcagttgccaagagggtttcggtgggaccgcttgcgaaacatgcgctgatgacaatctcttcgggccatcttgtagttcagtttgtaattgcgttcacggcgtctgtaatagcggccttgatggagatggcacgtgtgagtgctatagcgcctacactggtccaaaatgtgacaaacccatccctgagtgcgctgccttgctatgtcctgagaattcacgatgtagtcccagtacagaggacgagaacaagctggaatgtaaatgcctgcccaactacaggggcgatggaaagtactgcgaccctattaatccttgcctgagaaagatttgccatccacatgctcactgcacttaccttggtccgaatcggcattcttgtacatgccaggaggggtatcggggtgacggccaggtgtgtttgcctgttgacccatgccagatcaatttcggaaactgtccgacaaaatcaactgtgtgcaagtacgacggccctggtcaatcacattgtgaatgcaaagagcactatcagaacttcgtacccggtgtgggatgcagcatgactgatatctgcaagtctgacaatccttgtcaccgtaacgcaaactgtacaacagtggctcctggcaggactgagtgtatctgccagaagggctacgtcggagacgggctgacgtgttacggaaatatcatggaaagactgcgtgagctgaatacagagcctcgtggcaagtggcaggggcgattgactagcttcatttcccttctggacaaggcgtacgcctggcccctgagcaagcttggacccttcaccgtgctcttgcccacggacaaaggcctcaaggggttcaacgtcaatgaactcctcgtggataacaaagcagcccagtatttcgtgaagttacatatcatcgcaggccaaatgaacatcgaatacatgaataacactgacatgttctacaccttgacaggaaagtccggagaaattttcaattccgacaaggacaaccagatcaagctgaagctacatggaggcaagaagaaggtgaaaattatccagggagacattatcgcaagtaacggattgcttcacattttagatcgcgctatggataagctggaacctacttttgagagtaataatgaacagacaatcatgaccatgctgcagcccaggtactcaaaattccgcagtctgctggaggagactaatctcggccatgccctggatgaagacggggtggggggtccctacacaatatttgtaccaaacaatgaagccctgaacaatatgaaggacggcacgctggactacctcctgagtccagagggcagtaggaaactcctggagctggttcgctatcacatcgttcctttcactcagctggaagtcgcaacgctgatctccacacctcatatccggtctatggccaaccaattaattcagtttaacactactgataatgggcaaattctggcgaacgacgtggccatggaggagattgagataaccgccaagaacggaaggatctataccctgactggagtgctgattcccccttcaatcgtcccaattctccctcataggtgtgacgaaacaaagcgcgaaatgaaactcggaacctgtgtaagctgcagtctcgtttattggtcacggtgtcccgctaacagcgagcccaccgctctgtttacgcatcgatgtgtgtacagcggacggtttgggtcattgaagtccggatgtgcgagatattgtaacgccacagtgaaaatcccgaagtgctgtaaggggttctatggaccggattgcaatcagtgccccggtggattttccaatccctgtagtgggaacgggcagtgtgccgactctttaggcggtaatggaacctgcatatgtgaggaaggcttccaggggtctcagtgccagttttgctcagaccccaacaaatacgggcctagatgtaataaaaagtgtctgtgcgttcacgggacctgcaacaaccgcatagactcagacggcgcttgtttgactgggacttgtcgggacggaagtgccggacgcctgtgtgataagcagacttcggcttgtgggccttacgttcagttttgccacatccacgctacatgcgagtattcaaatgggacagcatcgtgtatctgtaaggccggatacgaaggagatgggactctgtgctcagagatggacccttgcaccggcttgactccaggtgggtgctcacgcaacgccgagtgtatcaagactggcactggaacccacacatgtgtgtgtcaacagggctggacaggaaacggaagggattgtagcgaaatcaataattgcctacttccctccgccggtggatgccatgacaacgcaagctgcctctacgtgggtcccggacaaaatgagtgcgaatgtaagaagggatttaggggtaacggcatcgattgcgagccaataacgtcatgtctggaacaaacaggcaaatgtcatccattagcttcatgccagtccaccagtagtggcgtatggagctgcgtgtgccaagaaggatatgaaggcgacggattcctgtgttatggtaatgccgcagtggaactgagtttcctgagcgaagccgctatctttaaccgttggatcaacaacgcgagtcttcagccaacgttgtctgctacttctaatctgactgttttggtacccagtcagcaggcaaccgaggacatggatcaggatgagaagtctttctggttaagccagtcaaacataccagctcttataaaataccacatgctcttagggacttatcgcgtggccgacttgcagacgctgtcctcatcagacatgctggccacctctttgcaaggcaactttcttcatcttgctaaagtggacggcaacatcacgatagaaggcgcttctattgtggacggcgataatgcagccaccaacggggtcatacacatcatcaataaggtgttggtccctcagaggagactcacaggatcactcccaaacttgctgatgcgcctggaacagatgcctgactactcaatcttcagaggctacatcattcaatacaatcttgctaacgccatagaggccgctgacgcttacacagtgtttgccccaaataataatgctattgagaattatattagagagaagaaggtgctttcactggaagaggatgtgcttcgctatcatgtggtcctggaggaaaagctgcttaaaaatgatctgcataacggaatgcacagggagaccatgctcggattcagctactttctctcattcttcctccacaatgaccagttatatgtgaatgaggcgccaattaactatactaatgtcgcgaccgacaaaggagtgattcatggcctcggtaaagtgctggagatccagaagaaccgatgtgacaacaacgacaccactattatccgcggacggtgtaggacatgtagttcagagttaacctgcccgttcggaactaagagtctgggaaatgagaaacgccgttgtatttacacaagttactttatggggaggagaaccctgttcatagggtgccagccaaagtgcgtaagaaccgtgattacacgggagtgttgtgcaggtttcttcggcccacaatgtcaaccatgccccggtaatgcccaaaacgtgtgctttggaaatggaatttgcctggacggagtcaatgggactggggtctgcgagtgtggagaaggattttcaggaacagcctgcgaaacttgtaccgaggggaagtatggcatccattgcgaccaggcatgctcgtgcgtacacggcagatgtaaccagggcccattgggcgacggttcgtgtgattgcgacgtgggttggcggggagtccactgtgacaatgctactactgaagataattgtaatggaacctgccacacttcagccaattgcctaacaaacagcgacggcactgcctcctgtaaatgcgctgccggattccagggcaacggaaccatctgtaccgctataaacgcatgcgagattagcaacgggggttgcagtgctaaggcggattgtaagcggaccacaccagggaggcgagtgtgcacctgcaaggcaggttataccggagacggcatagtgtgcctggaaattaacccctgcttggaaaatcatggtgggtgcgataaaaacgcggaatgtacccagacagggccaaatcaggccgcttgtaattgcctgccagcgtacactggggatggaaaggtgtgcacactgattaatgtttgcctgacgaaaaacggaggctgttctgaatttgccatttgcaaccatactggccaggtagaaagaacgtgcacatgcaagccgaattacatcggggatggcttcacttgccgcggatctatatatcaggaactgcctaagaacccaaagaccagtcagtatttttttcagctccaggagcattttgtgaaggacttagtggggcctgggccttttactgtgttcgctcccttaagcgcagcattcgatgaagaagctcgggtgaaggattgggacaaatacgggcttatgcctcaggttctccggtatcatgttgtggcatgtcaccagttgttactggaaaatctcaaattaatttctaatgctactagtcttcagggggagcccatagtcatctcagttagtcaatccactgtttacatcaacaataaagccaaaattatctcatccgacatcatctccactaacggaatagtacacataattgataagcttctgtcaccaaagaatctcctcattacaccgaaggacaacagcgggaggatcctccagaatcttaccactctagcgactaacaatgggtacattaagttctcgaacctcatacaagacagcggtctgctctcagtaataactgatcctatacacactcctgttacgctgttttggcctacggaccaggcactccacgctctgccggcagaacagcaggattttctgtttaaccaggacaataaggataagctcaaagaatatctcaaatttcatgtgatcagagacgccaaggtcttggctgttgatttgccaacctctaccgcatggaagactcttcagggtagcgaactctcagtgaagtgcggagccggtcgagacattggagacctttttctgaatggccagacatgtcgcatcgtgcagcgggagctcttgttcgatctgggtgtggcttacggaattgattgcctcctgatcgatccaaccctgggtggcaggtgcgacacgtttacaaccttcgatgcctctggggaatgcgggtcatgtgtaaacacgccctcatgcccgagatggtcaaagcccaagggagtcaagcagaaatgtctgtataacctccccttcaagcggaatctggagggatgccgggagagatgctctctagtcatccagataccgagatgctgtaagggatactttggccgagactgccaggcctgccctggagggcctgatgcaccctgtaacaataggggggtgtgcctagaccagtatagcgctactggggagtgcaaatgcaacacgggattcaatggcaccgcgtgcgagatgtgttggcctggacgattcggcccagattgcctgccctgcggttgtagcgaccatggtcagtgcgatgacggaatcacggggagcgggcaatgtctgtgcgaaacaggctggacaggcccatcctgtgatactcaggctgtgctcccggctgtgtgtaccccaccgtgcagtgcccatgctacttgtaaagagaataacacgtgcgagtgcaatctggactacgagggagatggcatcacctgtaccgtcgttgacttctgcaaacaggacaacggcggatgtgccaaagtggcgcgttgctcacaaaaaggtacaaaggtgagctgctcatgtcagaagggttataaaggcgacggacactcttgtacagagattgacccctgcgctgacggcttaaatgggggatgtcacgagcatgccacatgtaaaatgaccggcccaggtaaacacaaatgcgaatgtaagtcacattatgtgggagacggactgaattgtgagcccgagcagctccctatcgacaggtgtcttcaggacaatggacaatgtcatgctgacgctaaatgcgtggacctgcacttccaggatacaacagtgggagtgtttcacttgcgctcccctcttggtcagtacaaactgaccttcgacaaagccagggaagcatgtgctaatgaggctgctaccatggccacttacaaccaattatcctatgcccagaaggcaaaatatcacctttgcagtgcagggtggttagagacggggagagtcgcctatcctaccgcctttgcctctcagaactgtggatcgggtgtggtggggatcgttgactacgggccacgcccaaacaaaagtgagatgtgggatgtgttttgttatcgaatgaaagatgtcaactgtacatgcaaagtcggatatgtgggagacggattttcttgcagtgggaaccttctacaggtactaatgtccttcccgtccctgaccaatttcctgaccgaagtgttggcctactcaaactcttcggcgagagggagggctttcctggagcatttgaccgatttaagtatccgtggcactcttttcgtaccgcagaactccggtctcggcgaaaacgagactctctctgggagggatatcgagcaccacctcgccaatgtatccatgttcttttataacgatctcgtgaacgggaccacgttacaaactcggctagggtctaagcttctgataacagccagccaagaccctttacaaccaaccgaaactaggtttgtcgacgggagagctatattgcaatgggatatattcgccagtaatgggataatccacgtcatatctagacccctgaaggcaccgcctgccccagtgacactgacccacactggtttgggcgctggtatcttttttgcgatcatcctggttacaggggctgtggccctcgccgcttattcttacttccgtataaaccgcagaactattggattccaacatttcgagtccgaggaggacatcaatgttgcggctctgggaaaacagcagcctgaaaatatctccaatcctttgtacgaatcaacgacgtctgcaccccctgaaccttcttacgatcctttcactgactctgaagaacgccagctagaaggcaacgatcccttacgaacccttta

SEQ ID NO: 193803 - DNA, 8144 bp, Artificial Sequence
  derived and/or modified sequence
accaagactcctggatttgccatttttcctttctgaaggcaggtctcacctatctcctggttcgatctaggaaaaaggaaaggaagggatttaaaagtaaacagtgaaatgagaaagaattcactgggagtttatcaaactaagttaaaatagctaagtcagcctgacaggtgcttggcacagagaaggagcaaatatttcctcatgatgctacaacatttagtaattttttgtcttggattggttgtacaaaatttctgctccccagctgaaaccacagggcaggcaagaagatgtgataggaagtctcttcttacaattaggaccgagtgccgatcctgcgctctcaaccttggagtcaagtgcccggatggttacaccatgattaccagtggctctgtaggggttcgagattgcaggtacacctttgaggtcagaacatactctctgtctctccccggatgccgccatatttgtaggaaggactatctccaacctcggtgttgtcctggccgctggggcccagactgtatagagtgcccaggtggagcggggtcaccctgcaatggcagaggcagttgtgctgaaggcatggaaggaaatggaacctgctcctgccaagaagggtttggtggaacagcctgtgaaacctgtgctgacgacaacttatttggacccagctgttcatcagtgtgcaactgtgtgcatggggtgtgcaacagtggactagatggcgatggaacctgtgagtgctactctgcgtacactggccccaagtgtgacaagcccatccctgaatgtgcagccttgctctgcccagaaaattccagatgttcgccttccactgaagatgaaaacaaactggaatgcaaatgccttcccaattaccgaggcgatggcaaatactgcgaccccatcaatccatgtttacgaaaaatctgccaccctcatgctcattgtacgtacctgggaccaaatcggcacagttgtacatgccaagaaggctaccgtggggatggccaagtgtgcttgcctgtggacccctgccaaattaactttggaaactgccctacaaagtctacagtgtgcaaatatgatgggcctggacagtctcactgcgagtgtaaggagcattaccagaatttcgtacctggagtggggtgcagtatgactgatatatgtaaatcagataacccgtgtcataggaatgcaaattgcaccaccgtcgcaccaggccgaactgaatgcatttgccagaaaggttacgtgggtgatggcttaacgtgttatggaaacattatggagcgactcagagaattaaatactgaacccagaggaaaatggcaaggaaggctgacctctttcatctcactcctagacaaagcttatgcctggccactgagtaagctgggacccttcacggtgctgttacctacagacaagggactgaaaggattcaatgtaaatgagcttttggtggataataaagctgctcaatactttgtgaaactccacataattgctggtcagatgaacatcgaatatatgaataacacagacatgttctacaccttgactggaaagtcgggggaaatcttcaacagcgataaggacaatcaaataaagcttaaactccatggaggcaaaaagaaggtaaaaattatacaaggggacatcattgcttccaatgggcttctgcacatccttgacagagccatggacaagttagaacccacatttgagagcaacaatgagcaaaccataatgacaatgctacaaccaaggtacagcaagttcagatctttgttagaggaaaccaatttgggacatgccttagatgaggatggagttggtggaccatacaccatttttgttccaaataatgaagcattgaataacatgaaggacggcactctcgattacctcctttctccagagggatctcggaagcttctggaactcgtcagataccacattgtcccatttacccagcttgaagtggccactctcatctccacccctcacatcaggagcatggccaaccagctcatacagttcaacaccaccgacaatggacagattctggcaaatgatgtggcaatggaagaaattgagatcactgccaaaaatggccgaatttacacactgacaggagttctcattcctccctccattgtcccgattctgccccatcgatgtgatgaaacaaagagagagatgaaactgggcacttgtgtgagctgttctctggtgtactggagcagatgtcctgctaactctgagcccacagcactcttcacacacagatgtgtctacagtggcaggtttgggagcctgaagagcggctgtgcccggtactgcaatgccactgtgaagattccaaagtgctgcaaaggcttctatggacctgactgcaaccagtgtccaggaggcttctcaaatccatgctcaggaaatggacagtgtgcagatagcctcggcggcaacgggacatgcatttgtgaggagggcttccaaggctcccagtgtcagttctgctctgatcccaataaatacggacctcggtgtaacaaaaaatgcctgtgcgttcacggaacatgcaataacaggatagacagcgatggggcctgcctcactggcacatgcagagacggctctgccgggagactctgtgataagcagacctcagcctgtgggccctacgtgcagttctgtcacatccacgccacctgtgaatacagcaatgggacagccagttgtatttgcaaagcaggatatgaaggagatggaactctgtgttctgagatggacccttgcacaggactaactccaggaggctgtagccgcaatgcagaatgcatcaaaactggcacgggcacccacacctgcgtgtgtcagcagggttggacagggaatgggagagactgctcggagatcaacaactgcctgctgcccagtgcaggcggctgccacgacaacgcatcctgtttgtatgtgggtcccgggcagaatgagtgtgagtgcaagaaaggatttcgaggaaatgggattgactgtgaaccaataacttcatgcttggaacaaaccgggaaatgtcatccattggcaagctgtcaatctacttcgtctggtgtctggagctgtgtttgtcaagagggctatgaaggagatggctttctgtgctatggaaacgcagcagtggaattgtcatttctctccgaagcagctatatttaaccgatggataaataatgcttctctacaacccacactgtcagccacctcaaacctcactgtcctcgtgccttcccaacaagctactgaggacatggaccaggatgagaaaagcttctggttgtcacagagcaatattccagccctaataaagtaccatatgctactaggcacatacagagtggcagatctgcagaccctgtcttcttctgacatgttggcaacatctttgcagggcaacttccttcacttggcaaaggtggatgggaatatcacaattgaaggggcctccattgtcgatggggacaacgcagccacaaatggagtgatacacatcatcaacaaggtgctggtcccacaaagacgtctaactggctccttaccaaacctgctcatgcggctggaacagatgcctgactattccatcttccggggctacatcattcaatataatctggcgaatgcaattgaggctgccgatgcctacacagtgtttgctccaaacaacaatgccatcgagaattacatcagggagaagaaagtcttgtctctagaggaggacgtcctccggtatcatgtggtcctggaggagaaactcctgaagaatgacctgcacaatggcatgcatcgtgagaccatgctgggtttctcctatttccttagcttctttctccataatgaccagctctatgtaaatgaggctccaataaactacaccaatgtagccactgataagggagtgatccatggcttgggaaaagttctggaaattcagaagaacagatgtgataataatgacactactattatacgaggaagatgtaggacatgctcctcagagctgacctgcccattcggaactaaatctctaggtaatgagaagaggagatgcatctatacctcctatttcatgggaagacgaaccctgtttattgggtgccagccaaaatgtgtgagaaccgtcattacgagagaatgctgtgccggcttctttggcccccaatgccagccctgcccagggaatgcccagaatgtctgctttggtaatggcatctgtttggatggagtgaatggcacaggtgtgtgtgagtgtggggagggcttcagcggcacagcctgcgagacctgcaccgagggcaagtacggcatccactgtgaccaagcatgttcttgtgtccatgggagatgcaaccaaggacccttgggagatggctcctgtgactgtgatgttggctggcgaggagtgcattgtgacaatgcaaccacagaagacaactgcaatgggacatgccataccagcgccaactgcctcaccaactcagatggtacagcttcatgcaagtgtgcagcaggattccaaggaaacgggaccatctgcacagcaatcaatgcctgtgagatcagcaatggaggttgctctgccaaggctgactgtaagagaaccaccccaggaaggcgagtgtgcacgtgcaaagcaggctacacgggtgatggcattgtgtgcctggaaatcaacccgtgtttggagaaccatggtggctgtgacaagaatgcggagtgcacacagacaggacccaaccaggctgcctgtaactgtttgccagcatacactggagatggaaaggtctgcacactcatcaatgtctgcttaactaaaaatggcggctgtagtgaatttgccatctgcaaccacactgggcaagtagaaaggacttgtacttgcaagccaaactacattggagatggatttacctgccgcggcagcatttatcaggagcttcccaagaacccgaaaacttcccagtatttcttccagttgcaggagcatttcgtgaaagatctggtcggcccaggccccttcactgtttttgcacctttatctgcagcctttgatgaggaagctcgggttaaagactgggacaaatacggtttaatgccccaggttcttcggtaccatgtggtcgcctgccaccagctgcttctggaaaacctgaaattgatctcaaatgctacttccctccaaggagagccaatagtcatctccgtctctcagagcacggtgtatataaacaataaggctaagatcatatccagtgatatcatcagtactaatgggattgttcatatcatagacaaattgctatctcccaaaaatttgcttatcactcccaaagacaactctggaagaattctgcaaaatcttacgactttggcaacaaacaatggctacatcaaatttagcaacttaatacaggactcaggtttgctgagtgtcatcaccgatcccatccacaccccagtcactctcttctggcccaccgaccaagccctccatgccctacctgctgaacaacaggacttcctgttcaaccaagacaacaaggacaagctgaaggagtatttgaagtttcatgtgatacgagatgccaaggttttagctgtggatcttcccacatccactgcctggaagaccctgcaaggttcagagctgagtgtgaaatgtggagctggcagggacatcggtgacctctttctgaatggccaaacctgcagaattgtgcagcgggagctcttgtttgacctgggtgtggcctacggcattgactgtctgctgattgatcccaccctggggggccgctgtgacacctttactactttcgatgcctcgggggagtgtgggagctgtgtcaatactcccagctgcccaaggtggagtaaaccaaagggtgtgaagcagaagtgtctctacaacctgcccttcaagaggaacctggaaggctgccgggagcggtgcagcctggtgatacagatccccaggtgctgcaagggctacttcgggcgagactgtcaggcctgccctggaggaccagatgccccgtgtaataaccggggtgtctgccttgatcagtactcggccaccggagagtgtaaatgcaacaccggcttcaatgggacggcgtgtgagatgtgctggccggggagattcgggcctgattgtctgccctgtggctgctcagaccacggacagtgcgatgatggcatcacgggctccgggcagtgcctctgtgaaacggggtggacaggcccctcgtgtgacactcaggcagttttgcctgcagtgtgtacgcctccttgttctgctcatgccacctgtaaggagaacaacacgtgtgagtgtaacctggattatgaaggtgacggaatcacatgcacagttgtggatttctgcaaacaggacaacgggggctgtgcaaaggtggccagatgctcccagaagggcacgaaggtctcctgcagctgccagaagggatacaaaggggacgggcacagctgcacagagatagacccctgtgcagacggccttaacggagggtgtcacgagcacgccacctgtaagatgacaggcccgggcaagcacaagtgtgagtgtaaaagtcactatgtcggagatgggctgaactgtgagccggagcagctgcccattgaccgctgcttacaggacaatgggcagtgccatgcagacgccaaatgtgtcgacctccacttccaggataccactgttggggtgttccatctacgctccccactgggccagtataagctgacctttgacaaagccagagaggcctgtgccaacgaagctgcgaccatggcaacctacaaccagctctcctatgcccagaaggccaagtaccacctgtgctcagcaggctggctggagaccgggcgggttgcctaccccacagccttcgcctcccagaactgtggctctggtgtggttgggatagtggactatggacctagacccaacaagagtgaaatgtgggatgtcttctgctatcggatgaaaggaagtgctggcctattccaacagctcagctcgaggccgtgcatttctagaacacctgactgacctgtccatccgcggcaccctctttgtgccacagaacagtgggctgggggagaatgagaccttgtctgggcgggacatcgagcaccacctcgccaatgtcagcatgtttttctacaatgaccttgtcaatggcaccaccctgcaaacgaggctgggaagcaagctgctcatcactgccagccaggacccactccaaccgacggagaccaggtttgttgatggaagagccattctgcagtgggacatctttgcctccaatgggatcattcatgtcatttccaggcctttaaaagcaccccctgcccccgtgaccttgacccacactggcttgggagcagggatcttctttgccatcatcctggtgactggggctgttgccttggctgcttactcctactttcggataaaccggagaacaatcggcttccagcattttgagtcggaagaggacattaatgttgcagctcttggcaagcagcagcctgagaatatctcgaaccccttgtatgagagcacaacctcagctcccccagaaccttcctacgaccccttcacggactctgaagaacggcagcttgagggcaatgaccccttgaggacactgtgagggcctggacgggagatgccagccatcactcactgccacctgggccatcaactgtgaattctcagcaccagttgccttttaggaacgtaaagtcctttaagcactcagaagccatacctcatctctctggctgatctgggggttgtttctgtgggtgagagatgtgttgctgtgcccacccagtacagcttcctcctctgaccctttggctcttcttcctttgtactcttcagctggcacctgctccattctgccctacatgatgggtaactgtgatctttcttccctgttagattgtaagcctccgtctttgtatcccagcccctagcccagtgcctgacacaggaactgtgcacaataaaggtttatggaacagaaacaaagtcaacag

SEQ ID NO: 193804 - DNA, 8251 bp, Artificial Sequence
  derived and/or modified sequence
accaagactcctggatttgccatttttcctttctgaaggcaggtctcacctatctcctggttcgatctaggaaaaaggaaaggaagggatttaaaagtaaacagtgaaatgagaaagaattcactgggagtttatcaaactaagttaaaatagctaagtcagcctgacaggtgcttggcacagagaaggagcaaatatttcctcatgatgctacaacatttagtaattttttgtcttggattggttgtacaaaatttctgctccccagctgaaaccacagggcaggcaagaagatgtgataggaagtctcttcttacaattaggaccgagtgccgatcctgcgctctcaaccttggagtcaagtgcccggatggttacaccatgattaccagtggctctgtaggggttcgagattgcaggtacacctttgaggtcagaacatactctctgtctctccccggatgccgccatatttgtaggaaggactatctccaacctcggtgttgtcctggccgctggggcccagactgtatagagtgcccaggtggagcggggtcaccctgcaatggcagaggcagttgtgctgaaggcatggaaggaaatggaacctgctcctgccaagaagggtttggtggaacagcctgtgaaacctgtgctgacgacaacttatttggacccagctgttcatcagtgtgcaactgtgtgcatggggtgtgcaacagtggactagatggcgatggaacctgtgagtgctactctgcgtacactggccccaagtgtgacaagcccatccctgaatgtgcagccttgctctgcccagaaaattccagatgttcgccttccactgaagatgaaaacaaactggaatgcaaatgccttcccaattaccgaggcgatggcaaatactgcgaccccatcaatccatgtttacgaaaaatctgccaccctcatgctcattgtacgtacctgggaccaaatcggcacagttgtacatgccaagaaggctaccgtggggatggccaagtgtgcttgcctgtggacccctgccaaattaactttggaaactgccctacaaagtctacagtgtgcaaatatgatgggcctggacagtctcactgcgagtgtaaggagcattaccagaatttcgtacctggagtggggtgcagtatgactgatatatgtaaatcagataacccgtgtcataggaatgcaaattgcaccaccgtcgcaccaggccgaactgaatgcatttgccagaaaggttacgtgggtgatggcttaacgtgttatggaaacattatggagcgactcagagaattaaatactgaacccagaggaaaatggcaaggaaggctgacctctttcatctcactcctagacaaagcttatgcctggccactgagtaagctgggacccttcacggtgctgttacctacagacaagggactgaaaggattcaatgtaaatgagcttttggtggataataaagctgctcaatactttgtgaaactccacataattgctggtcagatgaacatcgaatatatgaataacacagacatgttctacaccttgactggaaagtcgggggaaatcttcaacagcgataaggacaatcaaataaagcttaaactccatggaggcaaaaagaaggtaaaaattatacaaggggacatcattgcttccaatgggcttctgcacatccttgacagagccatggacaagttagaacccacatttgagagcaacaatgagcaaaccataatgacaatgctacaaccaaggtacagcaagttcagatctttgttagaggaaaccaatttgggacatgccttagatgaggatggagttggtggaccatacaccatttttgttccaaataatgaagcattgaataacatgaaggacggcactctcgattacctcctttctccagagggatctcggaagcttctggaactcgtcagataccacattgtcccatttacccagcttgaagtggccactctcatctccacccctcacatcaggagcatggccaaccagctcatacagttcaacaccaccgacaatggacagattctggcaaatgatgtggcaatggaagaaattgagatcactgccaaaaatggccgaatttacacactgacaggagttctcattcctccctccattgtcccgattctgccccatcgatgtgatgaaacaaagagagagatgaaactgggcacttgtgtgagctgttctctggtgtactggagcagatgtcctgctaactctgagcccacagcactcttcacacacagatgtgtctacagtggcaggtttgggagcctgaagagcggctgtgcccggtactgcaatgccactgtgaagattccaaagtgctgcaaaggcttctatggacctgactgcaaccagtgtccaggaggcttctcaaatccatgctcaggaaatggacagtgtgcagatagcctcggcggcaacgggacatgcatttgtgaggagggcttccaaggctcccagtgtcagttctgctctgatcccaataaatacggacctcggtgtaacaaaaaatgcctgtgcgttcacggaacatgcaataacaggatagacagcgatggggcctgcctcactggcacatgcagagacggctctgccgggagactctgtgataagcagacctcagcctgtgggccctacgtgcagttctgtcacatccacgccacctgtgaatacagcaatgggacagccagttgtatttgcaaagcaggatatgaaggagatggaactctgtgttctgagatggacccttgcacaggactaactccaggaggctgtagccgcaatgcagaatgcatcaaaactggcacgggcacccacacctgcgtgtgtcagcagggttggacagggaatgggagagactgctcggagatcaacaactgcctgctgcccagtgcaggcggctgccacgacaacgcatcctgtttgtatgtgggtcccgggcagaatgagtgtgagtgcaagaaaggatttcgaggaaatgggattgactgtgaaccaataacttcatgcttggaacaaaccgggaaatgtcatccattggcaagctgtcaatctacttcgtctggtgtctggagctgtgtttgtcaagagggctatgaaggagatggctttctgtgctatggaaacgcagcagtggaattgtcatttctctccgaagcagctatatttaaccgatggataaataatgcttctctacaacccacactgtcagccacctcaaacctcactgtcctcgtgccttcccaacaagctactgaggacatggaccaggatgagaaaagcttctggttgtcacagagcaatattccagccctaataaagtaccatatgctactaggcacatacagagtggcagatctgcagaccctgtcttcttctgacatgttggcaacatctttgcagggcaacttccttcacttggcaaaggtggatgggaatatcacaattgaaggggcctccattgtcgatggggacaacgcagccacaaatggagtgatacacatcatcaacaaggtgctggtcccacaaagacgtctaactggctccttaccaaacctgctcatgcggctggaacagatgcctgactattccatcttccggggctacatcattcaatataatctggcgaatgcaattgaggctgccgatgcctacacagtgtttgctccaaacaacaatgccatcgagaattacatcagggagaagaaagtcttgtctctagaggaggacgtcctccggtatcatgtggtcctggaggagaaactcctgaagaatgacctgcacaatggcatgcatcgtgagaccatgctgggtttctcctatttccttagcttctttctccataatgaccagctctatgtaaatgaggctccaataaactacaccaatgtagccactgataagggagtgatccatggcttgggaaaagttctggaaattcagaagaacagatgtgataataatgacactactattatacgaggaagatgtaggacatgctcctcagagctgacctgcccattcggaactaaatctctaggtaatgagaagaggagatgcatctatacctcctatttcatgggaagacgaaccctgtttattgggtgccagccaaaatgtgtgagaaccgtcattacgagagaatgctgtgccggcttctttggcccccaatgccagccctgcccagggaatgcccagaatgtctgctttggtaatggcatctgtttggatggagtgaatggcacaggtgtgtgtgagtgtggggagggcttcagcggcacagcctgcgagacctgcaccgagggcaagtacggcatccactgtgaccaagcatgttcttgtgtccatgggagatgcaaccaaggacccttgggagatggctcctgtgactgtgatgttggctggcgaggagtgcattgtgacaatgcaaccacagaagacaactgcaatgggacatgccataccagcgccaactgcctcaccaactcagatggtacagcttcatgcaagtgtgcagcaggattccaaggaaacgggaccatctgcacagcaatcaatgcctgtgagatcagcaatggaggttgctctgccaaggctgactgtaagagaaccaccccaggaaggcgagtgtgcacgtgcaaagcaggctacacgggtgatggcattgtgtgcctggaaatcaacccgtgtttggagaaccatggtggctgtgacaagaatgcggagtgcacacagacaggacccaaccaggctgcctgtaactgtttgccagcatacactggagatggaaaggtctgcacactcatcaatgtctgcttaactaaaaatggcggctgtagtgaatttgccatctgcaaccacactgggcaagtagaaaggacttgtacttgcaagccaaactacattggagatggatttacctgccgcggcagcatttatcaggagcttcccaagaacccgaaaacttcccagtatttcttccagttgcaggagcatttcgtgaaagatctggtcggcccaggccccttcactgtttttgcacctttatctgcagcctttgatgaggaagctcgggttaaagactgggacaaatacggtttaatgccccaggttcttcggtaccatgtggtcgcctgccaccagctgcttctggaaaacctgaaattgatctcaaatgctacttccctccaaggagagccaatagtcatctccgtctctcagagcacggtgtatataaacaataaggctaagatcatatccagtgatatcatcagtactaatgggattgttcatatcatagacaaattgctatctcccaaaaatttgcttatcactcccaaagacaactctggaagaattctgcaaaatcttacgactttggcaacaaacaatggctacatcaaatttagcaacttaatacaggactcaggtttgctgagtgtcatcaccgatcccatccacaccccagtcactctcttctggcccaccgaccaagccctccatgccctacctgctgaacaacaggacttcctgttcaaccaagacaacaaggacaagctgaaggagtatttgaagtttcatgtgatacgagatgccaaggttttagctgtggatcttcccacatccactgcctggaagaccctgcaaggttcagagctgagtgtgaaatgtggagctggcagggacatcggtgacctctttctgaatggccaaacctgcagaattgtgcagcgggagctcttgtttgacctgggtgtggcctacggcattgactgtctgctgattgatcccaccctggggggccgctgtgacacctttactactttcgatgcctcgggggagtgtgggagctgtgtcaatactcccagctgcccaaggtggagtaaaccaaagggtgtgaagcagaagtgtctctacaacctgcccttcaagaggaacctggaaggctgccgggagcggtgcagcctggtgatacagatccccaggtgctgcaagggctacttcgggcgagactgtcaggcctgccctggaggaccagatgccccgtgtaataaccggggtgtctgccttgatcagtactcggccaccggagagtgtaaatgcaacaccggcttcaatgggacggcgtgtgagatgtgctggccggggagattcgggcctgattgtctgccctgtggctgctcagaccacggacagtgcgatgatggcatcacgggctccgggcagtgcctctgtgaaacggggtggacaggcccctcgtgtgacactcaggcagttttgcctgcagtgtgtacgcctccttgttctgctcatgccacctgtaaggagaacaacacgtgtgagtgtaacctggattatgaaggtgacggaatcacatgcacagttgtggatttctgcaaacaggacaacgggggctgtgcaaaggtggccagatgctcccagaagggcacgaaggtctcctgcagctgccagaagggatacaaaggggacgggcacagctgcacagagatagacccctgtgcagacggccttaacggagggtgtcacgagcacgccacctgtaagatgacaggcccgggcaagcacaagtgtgagtgtaaaagtcactatgtcggagatgggctgaactgtgagccggagcagctgcccattgaccgctgcttacaggacaatgggcagtgccatgcagacgccaaatgtgtcgacctccacttccaggataccactgttggggtgttccatctacgctccccactgggccagtataagctgacctttgacaaagccagagaggcctgtgccaacgaagctgcgaccatggcaacctacaaccagctctcctatgcccagaaggccaagtaccacctgtgctcagcaggctggctggagaccgggcgggttgcctaccccacagccttcgcctcccagaactgtggctctggtgtggttgggatagtggactatggacctagacccaacaagagtgaaatgtgggatgtcttctgctatcggatgaaagatgtgaactgcacctgcaaggtgggctatgtgggagatggcttctcatgcagtgggaacctgctgcaggtcctgatgtccttcccctcactcacaaacttcctgacggaagtgctggcctattccaacagctcagctcgaggccgtgcatttctagaacacctgactgacctgtccatccgcggcaccctctttgtgccacagaacagtgggctgggggagaatgagaccttgtctgggcgggacatcgagcaccacctcgccaatgtcagcatgtttttctacaatgaccttgtcaatggcaccaccctgcaaacgaggctgggaagcaagctgctcatcactgccagccaggacccactccaaccgacggagaccaggtttgttgatggaagagccattctgcagtgggacatctttgcctccaatgggatcattcatgtcatttccaggcctttaaaagcaccccctgcccccgtgaccttgacccacactggcttgggagcagggatcttctttgccatcatcctggtgactggggctgttgccttggctgcttactcctactttcggataaaccggagaacaatcggcttccagcattttgagtcggaagaggacattaatgttgcagctcttggcaagcagcagcctgagaatatctcgaaccccttgtatgagagcacaacctcagctcccccagaaccttcctacgaccccttcacggactctgaagaacggcagcttgagggcaatgaccccttgaggacactgtgagggcctggacgggagatgccagccatcactcactgccacctgggccatcaactgtgaattctcagcaccagttgccttttaggaacgtaaagtcctttaagcactcagaagccatacctcatctctctggctgatctgggggttgtttctgtgggtgagagatgtgttgctgtgcccacccagtacagcttcctcctctgaccctttggctcttcttcctttgtactcttcagctggcacctgctccattctgccctacatgatgggtaactgtgatctttcttccctgttagattgtaagcctccgtctttgtatcccagcccctagcccagtgcctgacacaggaactgtgcacaataaaggtttatggaacagaaacaaagtcaacag

SEQ ID NO: 193805 - DNA, 101 bp, Artificial Sequence
  derived and/or modified sequence
taagctgataagcaactttagcaaagtctcaggatacaaaatcaatgtacaaaaatcacaagcattcttatacaccaacaacagacagacggagagccaaa

SEQ ID NO: 193806 - protein, 541 aa, Artificial Sequence
  derived and/or modified sequence
MPGLRRDRLLTLLLLGALLSADLYFHLWPQVQRQLRPRERPRGCPCTGRASSLARDSAAAASDPGTIVHNFSRTEPRTEPAGGSHSGSSSKLQALFAHPLYNVPEEPPLLGAEDSLLASQEALRYYRRKVARWNRRHKMYREQMNLTSLDPPLQLRLEASWVQFHLGINRHGLYSRSSPVVSKLLQDMRHFPTISADYSQDEKALLGACDCTQIVKPSGVHLKLVLRFSDFGKAMFKPMRQQRDEETPVDFFYFIDFQRHNAEIAAFHLDRILDFRRVPPTVGRIVNVTKEILEVTKNEILQSVFFVSPASNVCFFAKCPYMCKTEYAVCGNPHLLEGSLSAFLPSLNLAPRLSVPNPWIRSYTLAGKEEWEVNPLYCDTVKQIYPYNNSQRLLNVIDMAIFDFLIGNMDRHHYEMFTKFGDDGFLIHLDNARGFGRHSHDEISILSPLSQCCMIKKKTLLHLQLLAQADYRLSDVMRESLLEDQLSPVLTEPHLLALDRRLQTILRTVEGCIVAHGQQSVIVDGPVEQLAPDSGQANLTS

SEQ ID NO: 193807 - DNA, 1626 bp, Artificial Sequence
  derived and/or modified sequence
atgcccggcctgagacgggaccgcctgctgaccctgctgcttctgggggcactgctctccgccgacttatattttcacctgtggcctcaggtgcagcgtcaactaaggcctcgtgagaggccacggggatgtccctgcaccgggcgtgcgtcctccctggcgagagatagtgcagcagctgcatcagatcctgggacaatcgtgcacaattttagcagaaccgagccccgcaccgaacccgccggcggaagtcatagtggatcttcttctaagcttcaggccctctttgctcacccgttatacaatgttcccgaagagccacccctcctgggggctgaggactcccttcttgcaagccaggaagctctgaggtactaccgtcgaaaggtcgcccggtggaacagacgacacaaaatgtatcgggagcagatgaacctgaccagcctcgatcctccactgcagcttaggctcgaagcgtcatgggtgcagtttcacttaggcattaataggcacggactgtactctaggagctcaccggtggtgagtaagctgctgcaggacatgcggcatttcccaaccatcagtgctgattacagccaagacgagaaagctctgttgggtgcatgtgactgcacccagattgtgaaaccatcaggcgttcatctaaagcttgtactcagattcagtgatttcggcaaggctatgtttaagcctatgcgccagcagcgtgacgaggagacaccagtggactttttctatttcattgactttcagagacacaatgcagagattgcagcctttcacttggacagaatccttgacttccgtcgtgtaccaccaacagttgggcgcatcgttaacgttaccaaagagatcctcgaagtcacaaagaatgagatactgcaatccgttttttttgtgagcccagctagcaacgtgtgttttttcgcaaaatgcccttatatgtgcaaaactgagtacgccgtgtgcggcaatcctcacctgttggaagggagtctttccgctttcctcccaagcttgaatctggctccccgcctgagcgtacctaacccctggataagatcctataccctcgcagggaaggaagaatgggaggttaacccactgtactgcgacacagtgaaacagatctatccttacaacaacagccagaggctgctgaatgtaattgacatggccattttcgactttttgatagggaatatggacaggcatcattacgagatgttcacaaagttcggagacgatggatttctcattcatctggataatgcccgaggcttcggacgtcatagtcacgatgagataagtatattgtcacccctgagccagtgctgcatgattaaaaaaaagacactacttcatttacagctgttggcgcaggcagactaccggctgtcggatgtgatgagagagtcactgttggaggaccaattatcacctgtgctgacagaacctcaccttttggccctcgatagacgcttgcagactattttgcggacagtggaaggctgcatcgtcgctcacgggcagcaatccgttatcgttgacggaccggtggaacaactggcgcctgattccggccaggcaaaccttaccagttag

SEQ ID NO: 193808 - DNA, 1626 bp, Artificial Sequence
  derived and/or modified sequence
atgcctggcctgcggcgggaccggctgctgaccctgctgctgctgggcgccctgctgtctgctgacctgtacttccacctgtggccccaggtgcagaggcagctgcggccccgggagcggccccggggctgcccctgcaccggccgggccagcagcctggcccgggacagcgctgctgctgccagtgaccccggcaccatcgtgcacaacttcagcaggacagagcccaggacagagcctgctgggggcagccacagcggcagcagcagcaagctgcaggccctgtttgcccaccccctgtacaacgtgcctgaggagccccccctgctgggcgctgaggacagcctgctggccagccaggaggccctgcgctactacagaaggaaggtggcccgctggaacagaagacacaagatgtaccgggagcagatgaacctgaccagcctggacccccccctgcagctgcggctggaggcctcctgggtgcagttccacctgggcatcaacagacatggcctgtacagccgcagcagccctgtggtgtccaagctgctgcaggacatgaggcacttccccaccatctctgctgactacagccaggatgagaaggccctgctgggcgcctgtgactgcacccagatcgtgaagcccagcggcgtgcacctgaagctggtgctgcgcttcagtgactttgggaaggccatgttcaagcccatgaggcagcagagagatgaggagacccctgtggacttcttctacttcatcgacttccagaggcacaatgctgagattgctgccttccacctggaccgcatcctggacttccggcgggtgcccccaacagtgggcagaattgtgaatgtgaccaaggagatcctggaggtgaccaagaatgagatcctgcagagcgtcttctttgtgtccccagccagcaatgtgtgcttctttgccaagtgcccctacatgtgcaagacagaatatgctgtgtgtggcaacccccacctgctggagggcagcctgagcgccttcctgcccagcctgaacctggccccccggctgtctgtgcccaacccctggatccgcagctacaccctggccggcaaggaggagtgggaggtgaaccccctgtactgtgacacagtgaagcagatctacccctacaacaacagccagaggctgctgaatgtgattgacatggccatctttgacttcctgattggcaacatggacagacaccactatgagatgttcaccaagtttggagatgatggcttcctgatccacctggacaatgcccggggcttcggccgccacagccatgatgagatcagcatcctgagccccctgagccagtgctgcatgatcaagaagaagaccctgctgcacctgcagctgctggcccaggccgactaccgcctgagtgatgtgatgagggagagcctgctggaggaccagctgagccctgtgctgacagagccccacctgctggccctggaccggcggctgcagaccatcctgaggacagtggagggctgcatcgtggcccacggccagcagagcgtcatcgtggatggccctgtggagcagctggccccagacagcggccaggccaacctgaccagctag

SEQ ID NO: 193809 - DNA, 1626 bp, Artificial Sequence
  derived and/or modified sequence
atgcccggcctgcggcgggaccggctgctgaccctgctgctgctgggtgctcttctcagcgccgacctgtattttcacctgtggccccaagtacaaaggcagcttcgccccagggaaagaccacggggctgtccatgcaccgggcgcgcctcttctctggctagagactctgccgcagccgccagcgatccaggcacaatcgttcataacttcagcaggaccgagcccaggacggaacccgccggcggcagtcattctggctcatcgtcaaaactccaggcactcttcgcacacccactttacaacgttccagaggagccccctctcctcggcgctgaagattcactcctggcttcacaagaagctctccgctactataggcgcaaggtagcccgatggaaccggagacacaaaatgtacagggaacagatgaacctgacgtcattggatccccctttgcagctccggttagaggcatcatgggtgcagttccatttgggcatcaaccgccatggcttatatagtaggtcatccccagtcgtatctaaacttttacaggacatgaggcacttccctaccataagtgctgattacagccaagatgagaaggccctgctaggcgcttgcgattgcacccagattgtcaagcctagtggcgtccacttgaaacttgtgctgaggttctcagactttggcaaagcaatgtttaaacccatgcggcagcagcgggacgaggaaacccccgtagatttcttctacttcatcgatttccagcgtcacaatgccgaaattgctgctttccatttagacagaatccttgatttccgcagggttccaccaacagtgggtcgcatagttaatgtcaccaaggaaatcctggaggttaccaagaacgaaatcctccagtcagtttttttcgtgagtccagcatcgaacgtgtgtttttttgcaaagtgtccatacatgtgcaagaccgagtatgccgtatgtggtaaccctcacctgctggagggctctctcagcgctttcctgccgtcattgaacctggcgccccggctcagtgttcctaatccctggataagaagctacacactggccggtaaggaagagtgggaggtcaaccccttatattgtgacacggtgaaacaaatttacccttacaacaacagtcagaggctcttgaacgtcatcgacatggccatctttgattttttaattgggaatatggatagacaccactatgaaatgttcacaaagttcggcgacgacgggtttctgatccatctcgacaatgctcgcgggtttggacgacacagtcatgacgagatatcaatcctatcccctcttagccagtgttgtatgattaagaaaaagacccttctccatctgcagttgctggcgcaagccgactatagactctcagacgtcatgagagaaagcctactcgaggatcagctttctccggtcctcaccgagccccacctactcgcactggacaggaggttacagacaatcctgaggacagtcgaggggtgtatcgtggcccacggccagcagagcgtcattgtggatggaccagtcgaacagctggccccagactcagggcaggcaaacttgacatcctag

SEQ ID NO: 193810 - DNA, 1626 bp, Artificial Sequence
  derived and/or modified sequence
atgccagggctgcgccgagacaggctgctgacccttctcttactgggtgcactcctctcagccgacctttattttcacttgtggccccaggtgcagaggcagttgcgccctcgagaaagaccacggggttgcccatgcactggcagggcctcatcactggcaagagatagtgcagccgctgcgagcgatccaggaaccattgtacataacttttctcggaccgaaccacgcacggagcccgcaggtgggtctcactctggttccagttctaagttgcaggccctcttcgcccatccgttgtacaatgtgccggaggagcctcctctgctgggggctgaggactccctgctcgcctctcaggaggcccttagatattaccgccgaaaagttgcaagatggaatcgcagacataaaatgtaccgcgagcagatgaacttgactagcctcgacccccctctgcagctcaggctggaagcttcttgggtgcaattccaccttggcatcaatcgccatggactgtactccagaagttctcctgtggtcagtaaactgctgcaggatatgcggcactttcctacaatctcggccgattatagccaagacgaaaaagctctgttaggagcttgcgactgcactcagatcgtgaaacctagcggcgtccacctgaaacttgttcttcggttttccgattttgggaaggccatgtttaagccaatgcggcaacagcgggatgaagagacacccgtggactttttttactttatagacttccagagacataacgccgaaattgcagctttccacctggataggatcctggatttcaggcgagtgcctccaaccgttgggagaattgtgaatgtgaccaaggaaatcctggaagtaaccaagaacgaaatcctgcagtccgtgttcttcgtttctcccgcttcaaacgtatgtttctttgccaaatgcccttacatgtgtaaaacagaatacgccgtctgcggcaacccccaccttttggaggggagtttgtccgcttttctcccatctctcaatttggctcctagactgagcgtgccaaatccctggattcggagttatactctagccggtaaagaggagtgggaagtgaatcccttgtattgtgatactgtgaagcagatctatccttacaataattcccagcgtctgctgaatgtgatcgatatggcaattttcgattttctgattgggaatatggatcgccatcactatgagatgtttactaagttcggcgatgacggcttcctgatacaccttgacaatgccagagggtttgggagacattcacacgatgaaatctctattctttcaccgctgtcacagtgctgtatgataaagaagaagactcttctgcatctgcagcttcttgcacaggccgactatcgactttccgatgtgatgcgcgagagtcttctggaagaccagctgagtcccgtactgaccgagcctcatctgctcgcactggataggcggttgcaaacaatccttcggacagttgagggctgcattgtagctcacggccaacagagtgtgatagtcgatggccctgtggagcagctggccccagattctggccaagctaatctcacaagctag

SEQ ID NO: 193811 - DNA, 1626 bp, Artificial Sequence
  derived and/or modified sequence
atgcccggcctgagaagagacagactgctgaccctgctgctgctgggcgccctgctgagcgccgacctgtacttccacctgtggccccaggtgcagagacagctgagacccagagagagacccagaggctgcccctgcaccggcagagccagcagcctggccagagacagcgccgccgccgccagcgaccccggcaccatcgtgcacaacttcagcagaaccgagcccagaaccgagcccgccggcggcagccacagcggcagcagcagcaagctgcaggccctgttcgcccaccccctgtacaacgtgcccgaggagccccccctgctgggcgccgaggacagcctgctggccagccaggaggccctgagatactacagaagaaaggtggccagatggaacagaagacacaagatgtacagagagcagatgaacctgaccagcctggacccccccctgcagctgagactggaggccagctgggtgcagttccacctgggcatcaacagacacggcctgtacagcagaagcagccccgtggtgagcaagctgctgcaggacatgagacacttccccaccatcagcgccgactacagccaggacgagaaggccctgctgggcgcctgcgactgcacccagatcgtgaagcccagcggcgtgcacctgaagctggtgctgagattcagcgacttcggcaaggccatgttcaagcccatgagacagcagagagacgaggagacccccgtggacttcttctacttcatcgacttccagagacacaacgccgagatcgccgccttccacctggacagaatcctggacttcagaagagtgccccccaccgtgggcagaatcgtgaacgtgaccaaggagatcctggaggtgaccaagaacgagatcctgcagagcgtgttcttcgtgagccccgccagcaacgtgtgcttcttcgccaagtgcccctacatgtgcaagaccgagtacgccgtgtgcggcaacccccacctgctggagggcagcctgagcgccttcctgcccagcctgaacctggcccccagactgagcgtgcccaacccctggatcagaagctacaccctggccggcaaggaggagtgggaggtgaaccccctgtactgcgacaccgtgaagcagatctacccctacaacaacagccagagactgctgaacgtgatcgacatggccatcttcgacttcctgatcggcaacatggacagacaccactacgagatgttcaccaagttcggcgacgacggcttcctgatccacctggacaacgccagaggcttcggcagacacagccacgacgagatcagcatcctgagccccctgagccagtgctgcatgatcaagaagaagaccctgctgcacctgcagctgctggcccaggccgactacagactgagcgacgtgatgagagagagcctgctggaggaccagctgagccccgtgctgaccgagccccacctgctggccctggacagaagactgcagaccatcctgagaaccgtggagggctgcatcgtggcccacggccagcagagcgtgatcgtggacggccccgtggagcagctggcccccgacagcggccaggccaacctgaccagctag

SEQ ID NO: 193812 - DNA, 2955 bp, Artificial Sequence
  derived and/or modified sequence
gcagcgccggcttcggatcgggagttggccgtcagctgcgccagaggcaggtgccagcggagagtgggtgggggtgccggcgccaggccaggctcggggaggccccgcgctacctctgcctctaggagtccaggcgcacagacaagctccccggagccgctcctgcttcgccaactccccactcgcgccgcccgtgccagccgccggcactggcgtctccgccgcccgcaggaggagtcgcgggagcactagcagccgccgccgagcgacagcatcctcaggagagacgccccgggctttgcagccggcggcctccgtccgccctccgcggtcgccccccgccccgtcgcccgtccgcccgcggtggcagccggcgccggcgccccggggcccttcacctgccgcgagcgtccgggcgggcgggcgcacgggagaaaaggcgcaagaagcgggcaccccgggaaccccattccctcggctcactcggcgcggagaagcgacgcccgctgactccgagagccccggtgctccgtgcacctggtccccaagttgaggagcgacacccctccacaggggactagcccgcgcggggagcattccggtctcactgaccccggcccacccgcgggactccaggcacctcttctgcccgcaccccgcgacccctcccgggaccccggagacagccggcctgcccccggcgtcccccttggccagcacgccatgccggggctgcgccgggaccgcctactgactctgctgctgctgggcgcgctgctctccgccgacctctacttccacctctggccccaagtacagcgccagctgcggcctcgggagcgcccgcgggggtgcccgtgcaccggccgcgcctcctccctggcgcgggactcggccgcagctgcctcggaccccggcacgatcgtgcacaacttttcccgaaccgagccccggactgaaccggctggcggcagccacagcgggtcgagctccaagttgcaggccctcttcgcccacccgctgtacaacgtcccggaggagccgcctctcctgggagccgaggactcgctcctggccagccaggaggcgctgcggtattaccggaggaaggtggcccgctggaacaggcgacacaagatgtacagagagcagatgaaccttacctccctggaccccccactgcagctccgactcgaggccagctgggtccagttccacctgggtattaaccgccatgggctctactcccggtccagccctgttgtcagcaaacttctgcaagacatgaggcactttcccaccatcagtgctgattacagtcaagatgagaaagccttgctgggggcatgtgactgcacccagattgtgaaacccagtggggtccacctcaagctggtgctgaggttctcggatttcgggaaggccatgttcaaacccatgagacagcagcgagatgaggagacaccagtggacttcttctacttcattgactttcagagacacaatgctgagatcgcagctttccatctggacaggattctggacttccgacgggtgccgccaacagtggggaggatagtaaatgtcaccaaggaaatcctagaggtcaccaagaatgaaatcctgcagagtgttttctttgtctctccagcgagcaacgtgtgcttcttcgccaagtgtccatacatgtgcaagacggagtatgctgtctgtggcaacccacacctgctggagggttccctctctgccttcctgccgtccctcaacctggcccccaggctgtctgtgcccaacccctggatccgctcctacacactggcaggaaaagaggagtgggaggtcaatcccctttactgtgacacagtgaaacagatctacccgtacaacaacagccagcggctcctcaatgtcatcgacatggccatcttcgacttcttgatagggaatatggaccggcaccattatgagatgttcaccaagttcggggatgatgggttccttattcaccttgacaacgccagagggttcggacgacactcccatgatgaaatctccatcctctcgcctctctcccagtgctgcatgataaaaaagaaaacacttttgcacctgcagctgctggcccaagctgactacagactcagcgatgtgatgcgagaatcactgctggaagaccagctcagccctgtcctcactgaaccccacctccttgccctggatcgaaggctccaaaccatcctaaggacagtggaggggtgcatagtggcccatggacagcagagtgtcatagtcgacggcccagtggaacagttggccccagactctggccaggctaacttgacaagctaagggctggcagagtccagtttcagaaaatacgcctggagccagagcagtcgactcgagtgccgaccctgcgtcctcactcccacctgttactgctgggagtcaagtcagctaggaaggaagcaggacattttctcaaacagcaagtggggcccatggaactgaatctttactccttggtgcaccgcttctgtcgtgcgttgccttgctccgtttttcccaaaaagcactggcttcatcaaggccaccgacgatctcctgagtgcactgggaaatctgggtataggtcaggcttggcagccttgatcccaggagagtactaatggtaacaagtcaaataaaaggacatcaagtggatacctgacttctcaggatccttattctagctacaagtcaaagataactcctggtccagacaaaacacctggcctatcacaagctgactaaaaatctgcactttgggccagcgcaggcaacagtaactctgacaggttcaaattagacctcacactttctactcatattctagtcactggacccatctgaatcagtaatccctactgcccggtcctggagtaacttcttagagatattataacaagtggcaaa

SEQ ID NO: 193813 - DNA, 4274 bp, Artificial Sequence
  derived and/or modified sequence
aaaggcgcaagaagcgggcaccccgggaaccccattccctcggctcactcggcgcggagaagcgacgcccgctgactccgagagccccggtgctccgtgcacctggtccccaagttgaggagcgacacccctccacaggggactagcccgcgcggggagcattccggtctcactgaccccggcccacccgcgggactccaggcacctcttctgcccgcaccccgcgacccctcccgggaccccggagacagccggcctgcccccggcgtcccccttggccagcacgccatgccggggctgcgccgggaccgcctactgactctgctgctgctgggcgcgctgctctccgccgacctctacttccacctctggccccaagtacagcgccagctgcggcctcgggagcgcccgcgggggtgcccgtgcaccggccgcgcctcctccctggcgcgggactcggccgcagctgcctcggaccccggcacgatcgtgcacaacttttcccgaaccgagccccggactgaaccggctggcggcagccacagcgggtcgagctccaagttgcaggccctcttcgcccacccgctgtacaacgtcccggaggagccgcctctcctgggagccgaggactcgctcctggccagccaggaggcgctgcggtattaccggaggaaggtggcccgctggaacaggcgacacaagatgtacagagagcagatgaaccttacctccctggaccccccactgcagctccgactcgaggccagctgggtccagttccacctgggtattaaccgccatgggctctactcccggtccagccctgttgtcagcaaacttctgcaagacatgaggcactttcccaccatcagtgctgattacagtcaagatgagaaagccttgctgggggcatgtgactgcacccagattgtgaaacccagtggggtccacctcaagctggtgctgaggttctcggatttcgggaaggccatgttcaaacccatgagacagcagcgagatgaggagacaccagtggacttcttctacttcattgactttcagagacacaatgctgagatcgcagctttccatctggacaggattctggacttccgacgggtgccgccaacagtggggaggatagtaaatgtcaccaaggaaatcctagaggtcaccaagaatgaaatcctgcagagtgttttctttgtctctccagcgagcaacgtgtgcttcttcgccaagtgtccatacatgtgcaagacggagtatgctgtctgtggcaacccacacctgctggagggttccctctctgccttcctgccgtccctcaacctggcccccaggctgtctgtgcccaacccctggatccgctcctacacactggcaggaaaagaggagtgggaggtcaatcccctttactgtgacacagtgaaacagatctacccgtacaacaacagccagcggctcctcaatgtcatcgacatggccatcttcgacttcttgatagggaatatggaccggcaccattatgagatgttcaccaagttcggggatgatgggttccttattcaccttgacaacgccagagggttcggacgacactcccatgatgaaatctccatcctctcgcctctctcccagtgctgcatgataaaaaagaaaacacttttgcacctgcagctgctggcccaagctgactacagactcagcgatgtgatgcgagaatcactgctggaagaccagctcagccctgtcctcactgaaccccacctccttgccctggatcgaaggctccaaaccatcctaaggacagtggaggggtgcatagtggcccatggacagcagagtgtcatagtcgacggcccagtggaacagttggccccagactctggccaggctaacttgacaagctaagggctggcagagtccagtttcagaaaatacgcctggagccagagcagtcgactcgagtgccgaccctgcgtcctcactcccacctgttactgctgggagtcaagtcagctaggaaggaagcaggacattttctcaaacagcaagtggggcccatggaactgaatctttactccttggtgcaccgcttctgtcgtgcgttgccttgctccgtttttcccaaaaagcactggcttcatcaaggccaccgacgatctcctgagtgcactgggaaatctgggtataggtcaggcttggcagccttgatcccaggagagtactaatggtaacaagtcaaataaaaggacatcaagtggatacctgacttctcaggatccttattctagctacaagtcaaagataactcctggtccagacaaaacacctggcctatcacaagctgactaaaaatctgcactttgggccagcgcaggcaacagtaactctgacaggttcaaattagacctcacactttctactcatattctagtcactggacccatctgaatcagtaatccctactgcccggtcctggagtaacttcttagagatattataacaagtggcaaaaataaaagagggatttgctaagaatatcagaaaaggagtgttccaatttgaagagtattacaattgaaataacatcaaatatgtcacactaagcagccagtaacagaataaataattacaacgaaggaaaaaaaaaggaaagtcctccaaggtcaggatggcatgggaacaggcctagcagggacacaagcctggagtaaggcaggaaaagagccaaggctgactacagcccaccaaccacaatcttcttccctaagaccccaggattgtccccggcccatccccaaaagaagaaaggggctatgtggaaaggtgaggccctctagatgcccctccctgtgacggctggctcaaaaaagactaagtcaggttttttattgaagcctcccttagaagaaagtgtagtagggattccttgtctcctctaccttctccctgacttgttgatatctgaaactccttttaataggaggctttgtttcttattccataattaatgaccgaaaacacaaaggacagtaaggtcttcattccatggagtgactagtcagtcaacaaaagtaaaaatgcctcatttcatcaaatcaacttttccagtaaaggccagagttcaaatactgtaagcatgagaatagaatggagctgtcactaaagagagtacaaggtcaagaaccagaaatgtctccaagctttctgcagtgtgagcaaagatagcctcgactggacaaataacacttctgaccccgtggtacccccacatgactggtatgctgcccctggactttgtgtctctctaaaatcactaccattcactgagatctgaccaggtgaggcactcaccaacgctacagaagcaacacacaggtttccaatcctctcaaacacagatacaacccccatcctccaatgtgcatggaagaactttaaatctcagagagagtaagcaaaatcacacaatttagtggtttagacctattccaaagtcttcttttcactgtaacacaaaacccaacagtatcccacccaatttatgaagtcaaatttgtttgcttaaaaaaaaaatcagctgggcatgggctcacacctgtaatcccagcactttgggcctaaacaggcagatcgcttggtctcaggagctcgagaccagcctgggtaacatgacaaaaccctgtctctacaaaaaaatacaaaaaaaaaaaaatttttttttaaatcaactctttaacagagaaaccttaatcccaaagatttccttaactgttgtggccctactgcagcatagggctccccacttcattcactgtctctcctgcttcaagatgtttcttccctgtggatgaagaaccaggagatcacacacagaaatgggaaaatatctgggtaaaaacattcaaagaatagcacaaaatggtttgggacttccaaataagactctcaggaaagcaggctacagctctacctcaaaacccgccacctcctataacgaaggactggttttccaatggcctatatacacattttgctgcactctacaaacagaaagcaataggcttgaatttcaccatgatatgtggtacacctaccttattattcacttatctttcaaccttccattactttttgattagtaacaaaattaagactcatttctcaaaaatatcagaaaaccaaccgtttcattcttactcgagttcttccagcatgttcattttgaactgtttacctcccatgaaataaaaagtctcttgactctg

SEQ ID NO: 193814 - DNA, 1626 bp, Artificial Sequence
  derived and/or modified sequence
atgccagggctcaggcgtgatcgcctgctcaccctcttgctcctgggagctctgctctccgcagacctctattttcacctgtggcctcaggtccagcgtcagttgcggccgagagaaaggccgaggggatgtccctgcactgggcgtgcttcttccctggcaagagacagtgcggcagccgcttcggaccctgggactatcgtgcataacttttcgcgcacagaacctagaactgaacccgcaggtgggagtcatagcgggagctcatcgaagctccaggcactcttcgcccatcctctgtacaacgtacccgaagagccccccctcttgggcgctgaagactcacttctcgccagtcaggaggccctcagatactaccgcagaaaggtggccaggtggaaccgaagacacaagatgtatcgtgagcagatgaatctgacctctcttgatccccctctgcagctccgcctcgaggcctcttgggttcagttccatttaggaataaaccgacacggactgtacagtcgctcctccccagtggtttcaaaactgttacaggatatgaggcacttccctaccatctctgctgactactcacaagacgaaaaggcactgttgggagcatgtgactgtacccaaatagtcaaaccaagcggggtgcacctcaaactggtgctgcgctttagtgacttcgggaaggccatgtttaaaccaatgagacagcagcgcgacgaggagacccccgttgactttttctacttcatagattttcagagacacaacgccgagatcgccgcctttcatctagacagaatactggattttaggagggtccccccaacagttggtcggatagtcaatgttacaaaggagattctcgaggtgaccaagaatgaaatccttcagtcagtgttcttcgtgtctccagcttctaatgtttgttttttcgccaaatgtccttacatgtgcaaaacagagtacgccgtttgtgggaaccctcacttgctggaaggcagcttatctgcgtttttgccgtccctgaacttggcgcctagactatctgtaccaaacccttggatcaggagttatactttggctggtaaggaagagtgggaagtgaatcccctctactgcgataccgttaaacagatttacccttataataacagccagaggctactcaatgtaattgatatggcaatatttgactttctcatcggtaatatggaccgccatcactacgaaatgtttacaaaattcggagacgatggtttccttatccacctggacaacgccagagggttcgggagacactcgcacgacgagatcagtatattgagccccctatcccagtgttgtatgataaagaagaaaactctcctacatctgcagctgcttgcacaagccgactaccgactttctgatgtgatgcgcgaaagtctcctcgaggatcagctctcccctgtcctgaccgagcctcacctcctggctctcgataggaggttgcagaccatcctgaggacagtagaaggatgcatcgtggcccacggacagcagtccgtgatcgtagacggcccggtcgagcagcttgctccagattcaggccaggcaaacttgacttcgtag

SEQ ID NO: 193815 - DNA, 1626 bp, Artificial Sequence
  derived and/or modified sequence
atgcccggcctgcggcgggaccggctgctgaccctgctgctgctgggggccttactgagcgctgatctgtatttccacctctggccccaggtgcagcgtcagctgcgaccccgggaaaggccccggggatgcccgtgcactggacgagcctcatctctggctagagactcagctgccgccgcttctgaccctggcacaattgttcataacttttcccgaacggagccacggactgaacccgcaggtggctcacactccgggtccagcagcaaactgcaggccctctttgctcatcctctgtataatgtgcccgaggaaccacccctgctgggagccgaagattcgctcctcgcttcgcaggaagccctccggtactacaggcgcaaagtcgcacgttggaatcggcgtcacaagatgtaccgcgaacagatgaacctcacctcactcgaccctccattgcagttacgcctcgaggcaagctgggttcagttccacttgggtatcaaccgtcatggattgtactccaggagtagtcccgtcgtttcaaagcttctgcaggacatgagacatttccccactatctccgccgattattcccaggatgaaaaggccttattgggcgcctgtgactgtactcaaatagtcaagccgtccggcgtacaccttaagctggtcctgagattctctgactttgggaaagccatgtttaaaccaatgaggcagcagcgggatgaagagacaccggtggatttcttttattttattgacttccagcggcacaacgcagaaatcgccgcattccatcttgacagaattttagattttcggcgcgttccgccgacggtggggcgcatcgtgaatgtcacaaaggaaattctggaggtcaccaaaaatgagatcttacagtccgtcttcttcgttagtcctgccagcaacgtgtgtttcttcgccaagtgtccctatatgtgcaagaccgagtacgcagtctgtgggaatccacatctactggagggttctctaagcgctttcttacccagcctaaatctggctcccagactatcagtgcctaatccatggatccggagctatacattagctggcaaagaggagtgggaggtaaatcctttgtattgtgacacagtaaaacagatatatccctataacaacagtcagcgcctgctgaatgtcatcgatatggctatttttgatttcctcatcggcaatatggatcgtcatcattacgagatgttcacgaagtttggggacgatggatttctaatccatctcgataatgcccggggatttgggcgccactctcacgatgaaatctccattctaagcccactgagccagtgctgcatgatcaagaagaagactctgttgcatcttcaactgttggctcaggccgattatcgactgtcggacgtgatgagggaatcattgttggaggatcagttgagtccggtccttacggagcctcacctcctggcactggaccggaggctgcagacaatcctccgcaccgtggagggatgcatcgtagcgcacggccaacagtctgtcattgtggacggcccagttgaacagctggcccccgactccggacaggcaaatctgacctcttag

SEQ ID NO: 193816 - DNA, 1626 bp, Artificial Sequence
  derived and/or modified sequence
atgcctgggctcagacgagacagactcctgacgctgttgctcctgggggcactgctcagcgcagacctttatttccacctgtggcctcaggtgcagcggcaactccgacctagggaacgtcccagaggttgcccctgtacagggagggcatcttcactggccagggactcggcagcggctgcatcagatcctggtacaatagtgcataattttagccgcaccgagcctcgaactgaaccagcaggaggcagtcactcaggtagctcttctaagctgcaggccttattcgcccatcctctctacaacgtccccgaggagcccccactcttaggcgcagaggactcgctactggcatcccaggaagctctgaggtactacagacgtaaggtggctaggtggaaccggcgacataaaatgtatagagagcagatgaacctcacttcactggacccccctctccagctcagattggaagcctcgtgggtgcagttccacctgggtatcaatagacacggattatacagcagatcctcaccagtggtgagcaagctgttacaggatatgaggcacttccccacaatctccgccgactattcccaagatgagaaagccctcctcggggcttgtgactgcacacagattgttaaacctagcggggtccacctcaagttagtgctacgcttttcagatttcggcaaggccatgttcaagccgatgcggcagcaacgtgacgaggaaacgcccgtggattttttttatttcattgatttccagcgacacaacgcggagatcgccgcatttcatctggaccgcattctggacttccgtcgggtgccccctactgttggtcggatagtcaacgtgaccaaggagatcctcgaagtcactaagaacgaaatcttacagtcagtgttcttcgtgagtcccgcaagcaatgtgtgcttctttgcaaagtgtccgtatatgtgcaagaccgagtacgccgtgtgcggcaatccacatctgctggaaggctcactttccgcctttctaccttctctcaacctagcgcctcgattaagcgtgcctaatccctggatccgtagttacaccctagcagggaaagaggaatgggaggtcaatcccctatactgcgatactgttaagcagatctatccatacaataactcacagaggttgttgaatgtaatcgatatggctatcttcgatttcctgatcggaaacatggatcgacatcattatgagatgtttaccaagttcggggatgacgggtttctcattcatctcgacaatgctaggggctttgggcgacatagccatgacgaaattagtattctgagccctttgtcacagtgttgcatgatcaagaaaaaaacactattgcacctccagttgctcgctcaggccgactataggttgtccgacgttatgagggagtcacttcttgaggaccaactatctccagtgctcactgagccccatctgcttgctctagataggcgcttgcagacaatacttcgcaccgtggagggctgcatagtggcacacggtcagcaatctgtgatcgttgacggaccagttgagcaactggccccagattccggccaggccaatctgacaagctag

SEQ ID NO: 193817 - protein, 344 aa, Artificial Sequence
  derived and/or modified sequence
MAAIYGGVEGGGTRSEVLLVSEDGKILAEADGLSTNHWLIGTDKCVERINEMVNRAKRKAGVDPLVPLRSLGLSLSGGDQEDAGRILIEELRDRFPYLSESYLITTDAAGSIATATPDGGVVLISGTGSNCRLINPDGSESGCGGWGHMMGDEGSAYWIAHQAVKIVFDSIDNLEAAPHDIGYVKQAMFHYFQVPDRLGILTHLYRDFDKCRFAGFCRKIAEGAQQGDPLSRYIFRKAGEMLGRHIVAVLPEIDPVLFQGKIGLPILCVGSVWKSWELLKEGFLLALTQGREIQAQNFFSSFTLMKLRHSSALGGASLGARHIGHLLPMDYSANAIAFYSYTFS

SEQ ID NO: 193818 - protein, 390 aa, Artificial Sequence
  derived and/or modified sequence
MRTRTGSQLAAREVTGSGAVPRQLEGRRCQAGRDANGGTSSDGSSSMAAIYGGVEGGGTRSEVLLVSEDGKILAEADGLSTNHWLIGTDKCVERINEMVNRAKRKAGVDPLVPLRSLGLSLSGGDQEDAGRILIEELRDRFPYLSESYLITTDAAGSIATATPDGGVVLISGTGSNCRLINPDGSESGCGGWGHMMGDEGSAYWIAHQAVKIVFDSIDNLEAAPHDIGYVKQAMFHYFQVPDRLGILTHLYRDFDKCRFAGFCRKIAEGAQQGDPLSRYIFRKAGEMLGRHIVAVLPEIDPVLFQGKIGLPILCVGSVWKSWELLKEGFLLALTQGREIQAQNFFSSFTLMKLRHSSALGGASLGARHIGHLLPMDYSANAIAFYSYTFS

SEQ ID NO: 193819 - DNA, 1035 bp, Artificial Sequence
  derived and/or modified sequence
atggcagcgatctatggcggtgttgagggcggaggcacaaggtctgaagtcttgctggtgtccgaggacgggaaaatcctggccgaggccgacggcctctccacaaaccactggttaataggaacggacaagtgtgtggaaaggatcaatgagatggtgaaccgcgctaagcgaaaggctggcgttgatcccctcgtcccgcttagatctttaggcctttctctatccgggggagaccaggaggacgctggaaggattttgatagaggaactgcgtgaccgatttccgtatcttagcgaatcgtacctaattacaacggatgccgctggatcgattgcgactgcaacccctgatggtggcgttgtgttgatctctgggacaggctcgaattgtagactaattaatcctgatggttcggagtctggttgtggagggtggggtcacatgatgggagatgagggctctgcctattggatagcccaccaggccgtcaagatcgtgtttgattccattgacaatctggaagcagcaccccacgatattggttacgtaaaacaggccatgttccattactttcaggtcccggacagacttggcatcctcacgcacctataccgagacttcgacaagtgccgcttcgctgggttttgtaggaaaatcgcagagggggctcagcaaggagaccctctttctcgatacatcttccgaaaagctggcgagatgctggggagacacatcgtggctgtcctgccggagatcgatccagttctcttccagggcaaaatagggttgcccattctgtgcgttggctccgtgtggaagagttgggaactgctgaaagaaggattcttattggcattaacacagggacgtgaaatccaggctcagaattttttctcctccttcacattgatgaaactgcgtcattccagtgcgctaggcggcgccagtcttggcgctcgtcacataggacacctactgcccatggactacagcgccaacgcaattgccttttatagctatacatttagctag

SEQ ID NO: 193820 - DNA, 1173 bp, Artificial Sequence
  derived and/or modified sequence
atgcggacccgaactgggtcacagctggctgcacgggaagtcactggctcaggcgctgtccctagacagttggaaggtcgacgctgccaggccgggagagacgctaatggcgggacctcctccgacggctcctcctctatggcagcgatctatggcggcgtcgaaggcgggggcacacgatctgaagtattgctggtgagtgaggatgggaaaatactggcagaggcagacggattaagtacgaatcactggctgatcggcacagacaaatgcgtcgagcgcataaacgagatggtgaatagagctaaacggaaggccggtgtggaccctcttgtgcctctgcgctctctcggtctctccctatcagggggcgaccaggaggacgccggccgaatcttaattgaggagctgagagatagattcccatacctgagcgaatcttatctcatcacaaccgacgcggcggggtcgatagctaccgcaacacccgatggaggcgttgtcctgatcagcggaacagggtcaaactgccggttaatcaatccagatggatctgaatcaggctgcggcgggtggggtcatatgatgggcgatgaaggctctgcgtactggatagcccatcaggccgtgaaaatcgtattcgactcaatagataacctggaggcggcccctcatgacatcggttacgtgaaacaggccatgtttcactactttcaagtccctgatcggcttgggatcttaacccacctataccgcgattttgataaatgccgctttgccggcttctgtcgtaaaatcgcggagggggcacagcagggtgacccgctgtcccgctatattttccggaaggccggcgagatgcttggccgacatatcgttgcagtgctgcctgagatcgaccccgtgctctttcagggcaagatcggcctgcccatactgtgtgtcggctctgtttggaagtcttgggagctgctcaaagagggatttttgctcgcacttacccaaggccgtgagatacaggcacagaatttcttctcatcgtttacgctgatgaaattacgccattcaagcgcgctcgggggtgccagtctcggggctcgacatatcggccatctgctgcctatggattattccgcgaatgcaattgccttctactcgtacactttcagttag

SEQ ID NO: 193821 - DNA, 1035 bp, Artificial Sequence
  derived and/or modified sequence
atggccgccatctatggaggagtggagggcggcggcaccaggtctgaggtgctgctggtgtctgaagatggcaagatcctggccgaggctgatggcctgagcaccaaccactggctgattggaacagacaagtgtgtggagcgcatcaatgagatggtgaacagagccaagaggaaggccggcgtggaccccctggtgcccctgcggagcctgggcctgagcctgagcggcggggaccaggaggatgctggccgcatcctgattgaggagctgcgggaccgcttcccctacctgtctgagagctacctgatcaccacagatgctgctggcagcatcgccacagccaccccagatggcggcgtggtgctgatctctggaacaggcagcaactgccgcctcatcaacccagatggcagcgagagcggctgcggcggctggggccacatgatgggagatgagggcagcgcctactggatcgcccaccaggccgtgaagatcgtgtttgacagcattgacaacctggaggccgcccctcatgacatcggctacgtgaagcaggccatgttccactacttccaggtgcctgaccggctgggcatcctgacccacctgtacagagactttgacaagtgccgctttgctggcttctgcaggaagattgctgagggcgcccagcagggcgaccccctgagccgctacatcttcaggaaggccggggagatgctgggccgccacatcgtggccgtgctgcctgagattgatcctgtgctcttccagggcaagattggcctgcccatcctgtgtgtgggctctgtgtggaagtcctgggagctgctgaaggagggcttcctgctggccctgacccagggccgggagatccaggcccagaacttcttcagcagcttcaccctgatgaagctgcggcacagcagcgccctgggcggggccagcctgggcgcccggcacatcggccacctgctgcccatggactacagcgccaatgccatcgccttctacagctacaccttctcctag

SEQ ID NO: 193822 - DNA, 1173 bp, Artificial Sequence
  derived and/or modified sequence
atgaggaccaggacaggcagccagctggccgcccgggaggtgactggaagtggagctgtgccccggcagctggagggccgccgctgccaggccggcagagatgccaacggcggcaccagcagtgatggcagcagctccatggccgccatctatggaggagtggagggcggcggcaccaggtctgaggtgctgctggtgtctgaagatggcaagatcctggccgaggctgatggcctgagcaccaaccactggctgattggaacagacaagtgtgtggagcgcatcaatgagatggtgaacagagccaagaggaaggccggcgtggaccccctggtgcccctgcggagcctgggcctgagcctgagcggcggggaccaggaggatgctggccgcatcctgattgaggagctgcgggaccgcttcccctacctgtctgagagctacctgatcaccacagatgctgctggcagcatcgccacagccaccccagatggcggcgtggtgctgatctctggaacaggcagcaactgccgcctcatcaacccagatggcagcgagagcggctgcggcggctggggccacatgatgggagatgagggcagcgcctactggatcgcccaccaggccgtgaagatcgtgtttgacagcattgacaacctggaggccgcccctcatgacatcggctacgtgaagcaggccatgttccactacttccaggtgcctgaccggctgggcatcctgacccacctgtacagagactttgacaagtgccgctttgctggcttctgcaggaagattgctgagggcgcccagcagggcgaccccctgagccgctacatcttcaggaaggccggggagatgctgggccgccacatcgtggccgtgctgcctgagattgatcctgtgctcttccagggcaagattggcctgcccatcctgtgtgtgggctctgtgtggaagtcctgggagctgctgaaggagggcttcctgctggccctgacccagggccgggagatccaggcccagaacttcttcagcagcttcaccctgatgaagctgcggcacagcagcgccctgggcggggccagcctgggcgcccggcacatcggccacctgctgcccatggactacagcgccaatgccatcgccttctacagctacaccttctcctag

SEQ ID NO: 193823 - DNA, 1801 bp, Artificial Sequence
  derived and/or modified sequence
gcgcacgcgcaacctaacgcgggactgccagcaacttccgggcgtttacaggcaggcaggtcagtgatgtgtcctaagggtccgaccgacctagatacccctctttgattcctcctcttgggattagtgtccatctctggaagcaggatccaggaggacgggaggggccgctgcggaccgcagtcgctccacctggaggagacaccagaaggaagacagcctgagggacgcagccatccccggctcctaccggcgccccgccccgcgcatgcgcacgcgcacagggagtcagctggctgcgcgggaggtcacgggaagtggggcggtgcccagacagctggagggaaggaggtgtcaggcggggagagacgcaaacggcgggaccagcagcgacggtagcagcagcatggccgcgatctatgggggtgtagaggggggaggcacacgatccgaggtccttttagtctcagaggatgggaagatcctggcagaagcagatggactgagcacaaaccactggctgatcgggacagacaagtgtgtggagaggatcaatgagatggtgaacagggccaaacggaaagcaggggtggatcctctggtaccgctgcgaagcttgggcctatctctgagcggtggggaccaggaggacgcggggaggatcctgatcgaggagctgagggaccgatttccctacctgagtgaaagctacttaatcaccaccgatgccgccggctccatcgccacagctacaccggatggtggagttgtgctcatatctggaacaggctccaactgcaggctcatcaaccctgatggctccgagagtggctgcggcggctggggccatatgatgggtgatgagggttcagcctactggatcgcacaccaagcagtgaaaatagtgtttgactccattgacaacctagaggcggctcctcatgatatcggctacgtcaaacaggccatgttccactatttccaggtgccagatcggctagggatactcactcacctgtatagggactttgataaatgcaggtttgctgggttttgccggaaaattgcagaaggtgctcagcagggagaccccctttcccgctatatcttcaggaaggctggggagatgctgggcagacacatcgtagcagtgttgcccgagattgacccggtcttgttccagggcaagattggactccccatcctgtgcgtgggctctgtgtggaagagctgggagctgctgaaggaaggttttcttctggcgctgacccagggcagagagatccaggctcagaacttcttctccagcttcaccctgatgaagctgaggcactcctccgctctgggtggggccagcctaggggccaggcacatcgggcacctcctccccatggactatagcgccaatgccattgccttctattcctacaccttttcctagggggctggtcccggctccaccccctccaagctcagtggacactgggtctgaaaggaaggagtcttttgcttcctttctcctttttacaaaaacaaacatagaagaaaataaatgcactttatccactccccaattggactgcattatcaaacacatgtgctatgtacatcctcagtgcacctgccagcagatatcctggagggctcatgagtgaatttagtccaagatttaaagccctgcccccaggtgctcagcctgtgatctgtatccactcagcatgcacttgggcagatgatttgtctgtgtgctacccttccccccatattaccatacatatgcactgtgtggctgccagttaat

SEQ ID NO: 193824 - DNA, 1778 bp, Artificial Sequence
  derived and/or modified sequence
actgccagcaacttccgggcgtttacaggcaggcaggtcagtgatgtgtcctaagggtccgaccgacctagatacccctctttgattcctcctcttgggattagtgtccatctctggaagcaggatccaggaggacgggaggggccgctgcggaccgcagtcgctccacctggaggagacaccagaaggaagacagcctgagggacgcagccatccccggctcctaccggcgccccgccccgcgcatgcgcacgcgcacagggagtcagctggctgcgcgggaggtcacgggaagtggggcggtgcccagacagctggagggaaggaggtgtcaggcggggagagacgcaaacggcgggaccagcagcgacggtagcagcagcatggccgcgatctatgggggtgtagaggggggaggcacacgatccgaggtccttttagtctcagaggatgggaagatcctggcagaagcagatggactgagcacaaaccactggctgatcgggacagacaagtgtgtggagaggatcaatgagatggtgaacagggccaaacggaaagcaggggtggatcctctggtaccgctgcgaagcttgggcctatctctgagcggtggggaccaggaggacgcggggaggatcctgatcgaggagctgagggaccgatttccctacctgagtgaaagctacttaatcaccaccgatgccgccggctccatcgccacagctacaccggatggtggagttgtgctcatatctggaacaggctccaactgcaggctcatcaaccctgatggctccgagagtggctgcggcggctggggccatatgatgggtgatgagggttcagcctactggatcgcacaccaagcagtgaaaatagtgtttgactccattgacaacctagaggcggctcctcatgatatcggctacgtcaaacaggccatgttccactatttccaggtgccagatcggctagggatactcactcacctgtatagggactttgataaatgcaggtttgctgggttttgccggaaaattgcagaaggtgctcagcagggagaccccctttcccgctatatcttcaggaaggctggggagatgctgggcagacacatcgtagcagtgttgcccgagattgacccggtcttgttccagggcaagattggactccccatcctgtgcgtgggctctgtgtggaagagctgggagctgctgaaggaaggttttcttctggcgctgacccagggcagagagatccaggctcagaacttcttctccagcttcaccctgatgaagctgaggcactcctccgctctgggtggggccagcctaggggccaggcacatcgggcacctcctccccatggactatagcgccaatgccattgccttctattcctacaccttttcctagggggctggtcccggctccaccccctccaagctcagtggacactgggtctgaaaggaaggagtcttttgcttcctttctcctttttacaaaaacaaacatagaagaaaataaatgcactttatccactccccaattggactgcattatcaaacacatgtgctatgtacatcctcagtgcacctgccagcagatatcctggagggctcatgagtgaatttagtccaagatttaaagccctgcccccaggtgctcagcctgtgatctgtatccactcagcatgcacttgggcagatgatttgtctgtgtgctacccttccccccatattaccatacatatgcactgtgtggctgccagttaat

SEQ ID NO: 193825 - DNA, 1035 bp, Artificial Sequence
  derived and/or modified sequence
atggccgccatctacggcggcgtggagggcggcggcacccggagcgaagtactgctggtttcagaggacggcaagattctggctgaggccgacggactgagcaccaatcactggcttatcgggaccgacaagtgcgtggagaggattaacgagatggtcaaccgagcaaaacggaaggctggcgtcgatcccctggtccctctgagaagcctgggactctctctcagtggaggtgaccaggaggatgcaggcaggatcctgattgaggaactacgggatcgcttcccgtacctaagcgagtcctacttgatcacaactgacgccgctggttcgatcgccaccgctacacctgatggtggcgtcgtgctaatttctggaacggggtccaattgcagattgattaacccagacggaagcgaatccggatgcggtgggtggggccacatgatgggggatgagggctcagcatattggatagcacaccaagccgtgaaaatcgtctttgatagcattgataacctggaggctgccccacacgatattggatatgtgaagcaggccatgtttcactactttcaggtacccgacagactaggcatcctgacacatctttaccgagatttcgataagtgccgcttcgccggcttctgccgaaagattgcagagggcgcacagcaaggggatccattatcccggtacatctttaggaaggctggggaaatgttgggtcgccatatcgttgctgtgctgccagagattgaccctgtcctgtttcaaggcaagattggcttgcctattctctgtgtagggagcgtttggaagagctgggaattactgaaagaaggctttctgctggcccttacacaggggagggagatccaggcgcagaacttcttctccagcttcacactaatgaaactccgtcatagcagtgcccttggcggcgcatcactgggcgcccggcacattggacacctactgcccatggactacagcgcaaacgcgattgccttttattcctatactttcagctag

SEQ ID NO: 193826 - DNA, 1173 bp, Artificial Sequence
  derived and/or modified sequence
atgcggacccggaccggcagccagctggccgcccgggaggtgaccgggtcaggtgctgtgcctcgccagttagaagggcggcgatgccaggccggccgagacgccaatggtggaacatctagtgacggttcttcgtcaatggccgccatttacggcggggtggaaggtggaggaacccgctccgaggtgctgctggttagcgaagatggcaaaatcttagctgaggcggacggcttatcaaccaatcattggcttatcggaaccgataagtgtgtagaaagaatcaacgagatggtgaaccgcgcaaaacgaaaagctggggtggatcctttggtccctctgaggtcacttggcttatctctgtccggcggggaccaggaagatgccggtagaattctaattgaagagcttagagatagatttccgtaccttagcgagtcatatttgataaccaccgacgcagccggctccatcgctactgcaacgccagacggcggcgtagtgttgatctctggcactggatctaactgtaggcttattaatcccgacggttctgaatcgggatgtggtgggtggggacacatgatgggggacgaagggagcgcctactggattgcccaccaggcagtcaagatcgtttttgactcaatcgataaccttgaggccgcgccccatgatattggatatgtcaaacaggcaatgtttcactacttccaggtgccggatcgcttgggcatcctcactcacctgtaccgcgattttgataagtgtcgatttgctgggttctgtagaaaaatcgccgaaggcgcccagcagggggaccctctcagccgatacatttttaggaaagccggcgagatgctggggcgccatatcgtggccgttttgcctgagatcgatcctgtcctcttccagggaaaaatcgggctacccatactttgcgtgggaagcgtgtggaagagttgggagctcctaaaggaggggttcctgctagctctgacgcagggcagggagattcaggcccagaactttttttcgagtttcacactcatgaagctgagacactcttcagccctgggcggcgcctcgttaggcgcaaggcacattggccacttgctcccaatggattattctgcaaacgcaatcgctttctatagctatacattttcttag

SEQ ID NO: 193827 - DNA, 1035 bp, Artificial Sequence
  derived and/or modified sequence
atggctgcaatctacggaggggtagaaggcggtggcacaaggagtgaggtcttacttgtttctgaagacgggaagatactcgccgaagccgacggcctgtccacaaaccattggctaataggtaccgacaagtgcgtggagcgaatcaatgagatggtgaatagggcgaagaggaaggctggcgtcgatcccctcgttcccctgagaagcttgggactctcactatcgggtggagatcaagaggatgccggaaggatcctgatcgaggaactgcgagaccggttcccttatcttagcgaaagctatctgatcactacagacgctgctggttcaattgcaactgctacaccggacggcggagtcgtcttgatttcaggcacagggtccaactgtaggctgatcaacccagatggctcagaatctggctgcgggggatggggccacatgatgggagatgaagggagtgcctactggattgcccaccaagctgtgaagattgtgtttgacagcatagataatctggaagcagcccctcatgatattggatatgtgaagcaggcaatgttccactactttcaggtgcccgataggcttgggatcttgacacatctgtaccgggactttgacaaatgccgtttcgccggtttttgccgcaagatcgctgagggcgcacagcagggggaccctctttcccggtatattttccgcaaggctggagagatgctgggcagacacatcgtggctgtgctgccagagatcgatcccgttctgttccagggaaagatcggattgccaatcctgtgtgttggaagtgtttggaaatcctgggaactgctgaaagaggggttcctcctcgctctgacacagggtagggagatccaagcccagaatttctttagcagtttcactttgatgaaactgcgccattcatctgctcttggaggcgcttccctcggggcacggcacatcggccacctgttacctatggattatagcgcaaacgccatagccttctactcttacacatttagctag

SEQ ID NO: 193828 - DNA, 1173 bp, Artificial Sequence
  derived and/or modified sequence
atgcggaccagaaccggctcacagctcgctgcacgcgaggtgaccggatccggggcagtgcctagacagctggaaggtcgccgttgtcaggctggcagagacgctaacggagggacaagctccgacgggagctcctccatggcagcgatttatggaggcgttgagggtgggggtactaggtctgaagtgcttctggtatcggaggatggcaaaatcttggccgaagccgatggcttgagcacaaatcactggctgatcggcactgataaatgcgtcgaaaggatcaatgagatggtgaacagggctaaacgcaaggccggtgtggatcctcttgtgcccttgcgttccctgggcctgtccctgtctggtggtgatcaggaggacgcagggaggatcttgattgaggagctgagagatcgttttccctatctgtccgagtcatacttgattacaaccgatgcggctgggtcaatcgccacggccactccggacggaggcgtcgtcctgataagcggcaccggatccaattgccgactgatcaacccggatgggtccgaatccggttgtggaggatggggacacatgatgggggatgagggctcagcatattggatagcccatcaggcagttaagatcgtgttcgattccatcgataacttggaagcggctccacatgatataggatatgtgaagcaggccatgtttcattattttcaagtgccagatcgtctcggcatcctcacccatctctatcgggactttgataaatgcagatttgctggcttttgtaggaaaatcgcagagggtgcccaacagggggacccactgtcgcggtatatttttcgcaaggccggagagatgttaggcaggcacattgtcgcagtgttacctgaaattgaccccgtgctttttcagggaaaaattggcctgcctatcctctgcgtcggcagcgtatggaagtcatgggagctgcttaaggaagggttcctgctcgcgttgacacagggtcgcgagatccaggctcagaattttttttccagctttacgcttatgaaactgcgacacagctctgctctgggtggcgcatccctgggggcaagacacattggtcacctgctgcctatggactatagcgctaacgccattgctttctactcctacacattctcttag

SEQ ID NO: 193829 - DNA, 1035 bp, Artificial Sequence
  derived and/or modified sequence
atggccgccatctacggcggcgtggagggcggcggcaccagaagcgaggtgctgctggtgagcgaggacggcaagatcctggccgaggccgacggcctgagcaccaaccactggctgatcggcaccgacaagtgcgtggagagaatcaacgagatggtgaacagagccaagagaaaggccggcgtggaccccctggtgcccctgagaagcctgggcctgagcctgagcggcggcgaccaggaggacgccggcagaatcctgatcgaggagctgagagacagattcccctacctgagcgagagctacctgatcaccaccgacgccgccggcagcatcgccaccgccacccccgacggcggcgtggtgctgatcagcggcaccggcagcaactgcagactgatcaaccccgacggcagcgagagcggctgcggcggctggggccacatgatgggcgacgagggcagcgcctactggatcgcccaccaggccgtgaagatcgtgttcgacagcatcgacaacctggaggccgccccccacgacatcggctacgtgaagcaggccatgttccactacttccaggtgcccgacagactgggcatcctgacccacctgtacagagacttcgacaagtgcagattcgccggcttctgcagaaagatcgccgagggcgcccagcagggcgaccccctgagcagatacatcttcagaaaggccggcgagatgctgggcagacacatcgtggccgtgctgcccgagatcgaccccgtgctgttccagggcaagatcggcctgcccatcctgtgcgtgggcagcgtgtggaagagctgggagctgctgaaggagggcttcctgctggccctgacccagggcagagagatccaggcccagaacttcttcagcagcttcaccctgatgaagctgagacacagcagcgccctgggcggcgccagcctgggcgccagacacatcggccacctgctgcccatggactacagcgccaacgccatcgccttctacagctacaccttcagctag

SEQ ID NO: 193830 - DNA, 1173 bp, Artificial Sequence
  derived and/or modified sequence
atgagaaccagaaccggcagccagctggccgccagagaggtgaccggcagcggcgccgtgcccagacagctggagggcagaagatgccaggccggcagagacgccaacggcggcaccagcagcgacggcagcagcagcatggccgccatctacggcggcgtggagggcggcggcaccagaagcgaggtgctgctggtgagcgaggacggcaagatcctggccgaggccgacggcctgagcaccaaccactggctgatcggcaccgacaagtgcgtggagagaatcaacgagatggtgaacagagccaagagaaaggccggcgtggaccccctggtgcccctgagaagcctgggcctgagcctgagcggcggcgaccaggaggacgccggcagaatcctgatcgaggagctgagagacagattcccctacctgagcgagagctacctgatcaccaccgacgccgccggcagcatcgccaccgccacccccgacggcggcgtggtgctgatcagcggcaccggcagcaactgcagactgatcaaccccgacggcagcgagagcggctgcggcggctggggccacatgatgggcgacgagggcagcgcctactggatcgcccaccaggccgtgaagatcgtgttcgacagcatcgacaacctggaggccgccccccacgacatcggctacgtgaagcaggccatgttccactacttccaggtgcccgacagactgggcatcctgacccacctgtacagagacttcgacaagtgcagattcgccggcttctgcagaaagatcgccgagggcgcccagcagggcgaccccctgagcagatacatcttcagaaaggccggcgagatgctgggcagacacatcgtggccgtgctgcccgagatcgaccccgtgctgttccagggcaagatcggcctgcccatcctgtgcgtgggcagcgtgtggaagagctgggagctgctgaaggagggcttcctgctggccctgacccagggcagagagatccaggcccagaacttcttcagcagcttcaccctgatgaagctgagacacagcagcgccctgggcggcgccagcctgggcgccagacacatcggccacctgctgcccatggactacagcgccaacgccatcgccttctacagctacaccttcagctag

SEQ ID NO: 193831 - protein, 733 aa, Artificial Sequence
  derived and/or modified sequence
MQQALELALDRAEYVIESARQRPPKRKYLSSGRKSVFQKLYDLYIEECEKEPEVKQKLRRNVNLLEKLVMQETLSCLVVNLYPGNEGYSLMLRGKNGSDSETIRLPYEEGELLEYLDAEELPPILVDLLEKSQVNIFHCGCVIAEIRDYRQSSNMKSPGYQSRHILLRPTMQTLICDVHSITSDNHKWTQEDKLLLESQLILATAEPLCLDPSIAVTCTANRLLYNKQKMNTRPMKRCFKRYSRSSLNRQQDLSHCPPPPQLRLLDFLQKRKERKAGQHYDLKISKAGNCVDMWKRSPCNLAIPSEVDVEKYAKVEKSIKSDDSQPTVWPAHDVKDDYVFECEAGTQYQKTKLTILQSLGDPLYYGKIQPCKADEESDSQMSPSHSSTDDHSNWFIIGSKTDAERVVNQYQELVQNEAKCPVKMSHSSSGSASLSQVSPGKETDQTETVSVQSSVLGKGVKHRPPPIKLPSSSGNSSSGNYFTPQQTSSFLKSPTPPPSSKPSSIPRKSSVDLNQVSMLSPAALSPASSSQRTTATQVMANSAGLNFINVVGSVCGAQALMSGSNPMLGCNTGAITPAGINLSGLLPSGGLLPNALPSAMQAASQAGVPFGLKNTSSLRPLNLLQLPGGSLIFNTLQQQQQQLSQFTPQQPQQPTTCSPQQPGEQGSEQGSTSQEQALSAQQAAVINLTGVGSFMQSQAAAVAILAASNGYGSSSSTNSSATSSSAYRQPVKK

SEQ ID NO: 193832 - DNA, 2981 bp, Artificial Sequence
  derived and/or modified sequence
tccccgcccctcggcccagcctgccagtcggaagtgcggccgccggaactggctgttggtgggggtgcagcactgagccgccgacggggcgggtgggctttgctgccgagcaggcggcgccgtcttggggcctagcggcgaggcgacccgcacaggtgggcggtggcggtaggtgggtggccagcgactggcaacgcggtggcttagacgcgcgagatccggccagggtcagagtactgtaagattgatgttaaaggcatggtgttcaccccacttcatcagcgtacataagttatctcttcttttggacccttattttatgccataatgcaacaagctttagaactagctttggatcgtgcagagtatgtcattgaaagtgcccgacagagacctcctaaaaggaaatacctatcaagtggaagaaaatctgtatttcaaaaactttatgacttgtatattgaagaatgtgaaaaagaacctgaagttaagcagaaattaagaagaaatgtgaacttgttagagaagcttgttatgcaagagactttgtcatgtttagtggtcaatctatacccaggaaatgagggatattctctgatgctcaggggaaaaaacggatcagattccgagaccattcgactgccctatgaagaaggagagttgcttgaatatttggatgcagaagaattacctcctattttggttgatctcctagaaaaatctcaggttaatatttttcattgcggatgtgtcatagcagaaatacgtgactacaggcagtccagtaacatgaaatctcctggttaccaaagtcggcacattctcttacgtccaacaatgcagactttaatttgtgatgtacattcaataacaagtgataaccacaaatggacccaggaagacaaacttttgcttgagagccagctcatcctagctacagctgaaccactctgtcttgatccttctatagcagtcacctgcactgcaaacagactgctctataacaagcaaaagatgaacactcgcccaatgaaacggtgtttcaagaggtattccagatcctctctgaatcggcagcaagatctatctcattgtccacctcctcctcagctgaggttacttgatttcttacaaaaaagaaaggaaagaaaagcaggtcagcattatgacctcaaaatttctaaggcaggaaattgtgtagatatgtggaaacggagtccctgtaatttggccataccttctgaagtagatgtggagaaatatgctaaagtggaaaagtctatcaaatctgatgactcacagccaacagtctggccagcccatgatgtaaaagatgattatgtatttgaatgtgaagctggtactcagtatcagaaaacaaagctgaccatcttgcagtcgcttggagatccactttactatggtaaaatacagccatgtaaagcagatgaagaaagtgacagccagatgtctccatcacactcgtccacagatgatcattcaaattggttcattattggatcaaagaccgatgctgagagggtagtcaatcagtaccaagaattagtccagaatgaagccaaatgtccggtcaagatgtcacacagctccagtggctcagccagtctgagtcaggtttctccagggaaagaaacagatcaaactgaaaccgtgtcagttcagtcttcggtattggggaagggtgtaaaacatcgacccccaccaatcaaacttccctcaagctcaggaaatagttcctcaggtaactattttacaccacaacagacaagcagctttctcaaatctccaactcctcctccttcttctaagccatcaagtattcctcggaaatcatctgtggatctcaatcaagttagcatgctttctccagctgccctatcacctgccagctcatcacaaagaaccacggccacccaggtcatggcaaactctgctggacttaacttcatcaatgtagtgggctctgtttgtggggcccaggctttgatgagtggttcaaaccccatgctgggctgtaacactggtgccataactcctgcaggaataaacctgagcggccttctaccctcaggaggtctgctaccaaatgcactgcccagtgcaatgcaggcagcttctcaagcaggtgttccatttggtttaaaaaatacttcaagtctcaggcccttaaatctactccagcttccaggtggttcacttatttttaacactctgcagcagcagcaacagcagctctcccagtttacaccacaacaacctcagcagcccacaacttgtagtcctcaacagccaggggagcagggttctgagcaaggttcaaccagtcaagaacaggccttatctgctcagcaagctgctgttattaaccttactggagtaggaagttttatgcagtcacaggcagctgcagttgcgattcttgcagcatcaaatggctatggcagcagcagcagcacaaacagctcagctacatcatcatcggcatacaggcagccagtcaaaaagtaaaatgaagagaggcacgccaaccactccaaaattttgagtcttgcattactttttgttccttttttaaaaacacaagagcactgaatcaaaagaattgagtttctactttttgttttttttaatgtgtcagtattttacattgctagatgtacaaactttatacagaagcacaaccttatcatttttaaataaaaacagggaaatggtttaacaaactagggttggtttgcctaagtcattgctttttaaaaatggtttcactatacataatatatatggaagtgacctaagaaataatagaaacatctttcagaagaatgtagtttgatatttatttagtataaaacgtttgtgcacagtgttaacaaatacaatttttacaaatctgttttgaaaaaaaaaaaaaaaaaaaaaaaaaaaaaaaaaaaaaaaaaaaaaaaaaaaaaaaaaaa

SEQ ID NO: 193833 - DNA, 2681 bp, Artificial Sequence
  derived and/or modified sequence
ggtgcagcactgagccgccgacggggcgggtgggctttgctgccgagcaggcggcgccgtcttggggcctagcggcgaggcgacccgcacaggtgggcggtggcggtaggtgggtggccagcgactggcaacgcggtggcttagacgcgcgagatccggccagggtcagagtactgtaagattgatgttaaaggcatggtgttcaccccacttcatcagcgtacataagttatctcttcttttggacccttattttatgccataatgcaacaagctttagaactagctttggatcgtgcagagtatgtcattgaaagtgcccgacagagacctcctaaaaggaaatacctatcaagtggaagaaaatctgtatttcaaaaactttatgacttgtatattgaagaatgtgaaaaagaacctgaagttaagcagaaattaagaagaaatgtgaacttgttagagaagcttgttatgcaagagactttgtcatgtttagtggtcaatctatacccaggaaatgagggatattctctgatgctcaggggaaaaaacggatcagattccgagaccattcgactgccctatgaagaaggagagttgcttgaatatttggatgcagaagaattacctcctattttggttgatctcctagaaaaatctcaggttaatatttttcattgcggatgtgtcatagcagaaatacgtgactacaggcagtccagtaacatgaaatctcctggttaccaaagtcggcacattctcttacgtccaacaatgcagactttaatttgtgatgtacattcaataacaagtgataaccacaaatggacccaggaagacaaacttttgcttgagagccagctcatcctagctacagctgaaccactctgtcttgatccttctatagcagtcacctgcactgcaaacagactgctctataacaagcaaaagatgaacactcgcccaatgaaacggtgtttcaagaggtattccagatcctctctgaatcggcagcaagatctatctcattgtccacctcctcctcagctgaggttacttgatttcttacaaaaaagaaaggaaagaaaagcaggtcagcattatgacctcaaaatttctaaggcaggaaattgtgtagatatgtggaaacggagtccctgtaatttggccataccttctgaagtagatgtggagaaatatgctaaagtggaaaagtctatcaaatctgatgactcacagccaacagtctggccagcccatgatgtaaaagatgattatgtatttgaatgtgaagctggtactcagtatcagaaaacaaagctgaccatcttgcagtcgcttggagatccactttactatggtaaaatacagccatgtaaagcagatgaagaaagtgacagccagatgtctccatcacactcgtccacagatgatcattcaaattggttcattattggatcaaagaccgatgctgagagggtagtcaatcagtaccaagaattagtccagaatgaagccaaatgtccggtcaagatgtcacacagctccagtggctcagccagtctgagtcaggtttctccagggaaagaaacagatcaaactgaaaccgtgtcagttcagtcttcggtattggggaagggtgtaaaacatcgacccccaccaatcaaacttccctcaagctcaggaaatagttcctcaggtaactattttacaccacaacagacaagcagctttctcaaatctccaactcctcctccttcttctaagccatcaagtattcctcggaaatcatctgtggatctcaatcaagttagcatgctttctccagctgccctatcacctgccagctcatcacaaagaaccacggccacccaggtcatggcaaactctgctggacttaacttcatcaatgtagtgggctctgtttgtggggcccaggctttgatgagtggttcaaaccccatgctgggctgtaacactggtgccataactcctgcaggaataaacctgagcggccttctaccctcaggaggtctgctaccaaatgcactgcccagtgcaatgcaggcagcttctcaagcaggtgttccatttggtttaaaaaatacttcaagtctcaggcccttaaatctactccagcttccaggtggttcacttatttttaacactctgcagcagcagcaacagcagctctcccagtttacaccacaacaacctcagcagcccacaacttgtagtcctcaacagccaggggagcagggttctgagcaaggttcaaccagtcaagaacaggccttatctgctcagcaagctgctgttattaaccttactggagtaggaagttttatgcagtcacaggcagctgcagttgcgattcttgcagcatcaaatggctatggcagcagcagcagcacaaacagctcagctacatcatcatcggcatacaggcagccagtcaaaaagtaaaatgaagagaggcacgccaaccactccaaaattttgagtcttgcattactttttgttccttttttaaaaacacaagagcactgaatcaaaagaattgagtttctactttttgttttttttaatgtgtcagtattttacattgctagatgtacaaactttatacagaagcacaaccttatcatttttaaataaaaacagggaaatggtttaacaaa

SEQ ID NO: 193834 - DNA, 2843 bp, Artificial Sequence
  derived and/or modified sequence
tccccgcccctcggcccagcctgccaatcggaagtgcggccgccggaactggctgttggtgggggtgcagcactgagccgccgacggggcgggtgggctttgctgccgagcaggcggcgccgtcttggggcctagcggcgaggcgacccgcacagtactgtaagattgatgttaaaggcatggtgttcaccccacttcatcagcgtacataagttatctcttcttttggacccttattttatgccataatgcaacaagctttagaactagctttggatcgtgcagagtatgtcattgaaagtgcccgacagagacctcctaaaaggaaatacctatcaagtggaagaaaatctgtatttcaaaaactttatgacttgtatattgaagaatgtgaaaaagaacctgaagttaagcagaaattaagaagaaatgtgaacttgttagagaagcttgttatgcaagagactttgtcatgtttagtggtcaatctatacccaggaaatgagggatattctctgatgctcaggggaaaaaacggatcagattccgagaccattcgactgccctatgaagaaggagagttgcttgaatatttggatgcagaagaattacctcctattttggttgatctcctagaaaaatctcaggttaatatttttcattgcggatgtgtcatagcagaaatacgtgactacaggcagtccagtaacatgaaatctcctggttaccaaagtcggcacattctcttacgtccaacaatgcagactttaatttgtgatgtacattcaataacaagtgataaccacaaatggacccaggaagacaaacttttgcttgagagccagctcatcctagctacagctgaaccactctgtcttgatccttctatagcagtcacctgcactgcaaacagactgctctataacaagcaaaagatgaacactcgcccaatgaaacggtgtttcaagaggtattccagatcctctctgaatcggcagcaagatctatctcattgtccacctcctcctcagctgaggttacttgatttcttacaaaaaagaaaggaaagaaaagcaggtcagcattatgacctcaaaatttctaaggcaggaaattgtgtagatatgtggaaacggagtccctgtaatttggccataccttctgaagtagatgtggagaaatatgctaaagtggaaaagtctatcaaatctgatgactcacagccaacagtctggccagcccatgatgtaaaagatgattatgtatttgaatgtgaagctggtactcagtatcagaaaacaaagctgaccatcttgcagtcgcttggagatccactttactatggtaaaatacagccatgtaaagcagatgaagaaagtgacagccagatgtctccatcacactcgtccacagatgatcattcaaattggttcattattggatcaaagaccgatgctgagagggtagtcaatcagtaccaagaattagtccagaatgaagccaaatgtccggtcaagatgtcacacagctccagtggctcagccagtctgagtcaggtttctccagggaaagaaacagatcaaactgaaaccgtgtcagttcagtcttcggtattggggaagggtgtaaaacatcgacccccaccaatcaaacttccctcaagctcaggaaatagttcctcaggtaactattttacaccacaacagacaagcagctttctcaaatctccaactcctcctccttcttctaagccatcaagtattcctcggaaatcatctgtggatctcaatcaagttagcatgctttctccagctgccctatcacctgccagctcatcacaaagaaccacggccacccaggtcatggcaaactctgctggacttaacttcatcaatgtagtgggctctgtttgtggggcccaggctttgatgagtggttcaaaccccatgctgggctgtaacactggtgccataactcctgcaggaataaacctgagcggccttctaccctcaggaggtctgctaccaaatgcactgcccagtgcaatgcaggcagcttctcaagcaggtgttccatttggtttaaaaaatacttcaagtctcaggcccttaaatctactccagcttccaggtggttcacttatttttaacactctgcagcagcagcaacagcagctctcccagtttacaccacaacaacctcagcagcccacaacttgtagtcctcaacagccaggggagcagggttctgagcaaggttcaaccagtcaagaacaggccttatctgctcagcaagctgctgttattaaccttactggagtaggaagttttatgcagtcacaggcagctgcagttgcgattcttgcagcatcaaatggctatggcagcagcagcagcacaaacagctcagctacatcatcatcggcatacaggcagccagtcaaaaagtaaaatgaagagaggcacgccaaccactccaaaattttgagtcttgcattactttttgttccttttttaaaaacacaagagcactgaatcaaaagaattgagtttctactttttgttttttttaatgtgtcagtattttacattgctagatgtacaaactttatacagaagcacaaccttatcatttttaaataaaaacagggaaatggtttaacaaactagggttggtttgcctaagtcattgctttttaaaaatggtttcactatacataatatatatggaagtgacctaagaaataatagaaacatctttcagaagaatgtagtttgatatttatttagtataaaacgtttgtgcacagtgttaacaaatacaatttttacaaatctgttttg

SEQ ID NO: 193835 - DNA, 2625 bp, Artificial Sequence
  derived and/or modified sequence
agagacccggcaggccggggcggaggttgaggcagctaaactccaggtggacgcctacatcgcctttcgcggtgttgctaagccgaacttttaattttagtttgacttttgggttccagagacgggtatttccggacactggcaagaattttgccttgcgtgtcttcgaaggcggttttcttggtgtccatattgcataaaggcttgtcgctcctctgtggagatgacggttgtacagtactgtaagattgatgttaaaggcatggtgttcaccccacttcatcagcgtacataagttatctcttcttttggacccttattttatgccataatgcaacaagctttagaactagctttggatcgtgcagagtatgtcattgaaagtgcccgacagagacctcctaaaaggaaatacctatcaagtggaagaaaatctgtatttcaaaaactttatgacttgtatattgaagaatgtgaaaaagaacctgaagttaagcagaaattaagaagaaatgtgaacttgttagagaagcttgttatgcaagagactttgtcatgtttagtggtcaatctatacccaggaaatgagggatattctctgatgctcaggggaaaaaacggatcagattccgagaccattcgactgccctatgaagaaggagagttgcttgaatatttggatgcagaagaattacctcctattttggttgatctcctagaaaaatctcaggttaatatttttcattgcggatgtgtcatagcagaaatacgtgactacaggcagtccagtaacatgaaatctcctggttaccaaagtcggcacattctcttacgtccaacaatgcagactttaatttgtgatgtacattcaataacaagtgataaccacaaatggacccaggaagacaaacttttgcttgagagccagctcatcctagctacagctgaaccactctgtcttgatccttctatagcagtcacctgcactgcaaacagactgctctataacaagcaaaagatgaacactcgcccaatgaaacggtgtttcaagaggtattccagatcctctctgaatcggcagcaagatctatctcattgtccacctcctcctcagctgaggttacttgatttcttacaaaaaagaaaggaaagaaaagcaggtcagcattatgacctcaaaatttctaaggcaggaaattgtgtagatatgtggaaacggagtccctgtaatttggccataccttctgaagtagatgtggagaaatatgctaaagtggaaaagtctatcaaatctgatgactcacagccaacagtctggccagcccatgatgtaaaagatgattatgtatttgaatgtgaagctggtactcagtatcagaaaacaaagctgaccatcttgcagtcgcttggagatccactttactatggtaaaatacagccatgtaaagcagatgaagaaagtgacagccagatgtctccatcacactcgtccacagatgatcattcaaattggttcattattggatcaaagaccgatgctgagagggtagtcaatcagtaccaagaattagtccagaatgaagccaaatgtccggtcaagatgtcacacagctccagtggctcagccagtctgagtcaggtttctccagggaaagaaacagatcaaactgaaaccgtgtcagttcagtcttcggtattggggaagggtgtaaaacatcgacccccaccaatcaaacttccctcaagctcaggaaatagttcctcaggtaactattttacaccacaacagacaagcagctttctcaaatctccaactcctcctccttcttctaagccatcaagtattcctcggaaatcatctgtggatctcaatcaagttagcatgctttctccagctgccctatcacctgccagctcatcacaaagaaccacggccacccaggtcatggcaaactctgctggacttaacttcatcaatgtagtgggctctgtttgtggggcccaggctttgatgagtggttcaaaccccatgctgggctgtaacactggtgccataactcctgcaggaataaacctgagcggccttctaccctcaggaggtctgctaccaaatgcactgcccagtgcaatgcaggcagcttctcaagcaggtgttccatttggtttaaaaaatacttcaagtctcaggcccttaaatctactccagcttccaggtggttcacttatttttaacactctgcagcagcagcaacagcagctctcccagtttacaccacaacaacctcagcagcccacaacttgtagtcctcaacagccaggggagcagggttctgagcaaggttcaaccagtcaagaacaggccttatctgctcagcaagctgctgttattaaccttactggagtaggaagttttatgcagtcacaggcagctgcagttgcgattcttgcagcatcaaatggctatggcagcagcagcagcacaaacagctcagctacatcatcatcggcatacaggcagccagtcaaaaagtaaaatgaagagaggcacgccaaccactccaaaattttgagtcttgcattactttttgttccttttttaaaaacacaagagcactgaatcaaaag

SEQ ID NO: 193836 - DNA, 2202 bp, Artificial Sequence
  derived and/or modified sequence
atgcagcaggctctggagctggcccttgatcgagcagaatacgtcatcgaaagcgcgcgccagcgcccaccaaagagaaagtaccttagtagcggccggaagagcgtgttccagaagctgtatgacctgtatatagaggagtgcgaaaaggagcccgaagtaaagcagaagttgcgcaggaacgtaaatctcctcgagaagctggtgatgcaagagacattgagttgcctcgttgtcaacctgtacccaggcaatgagggttatagcctcatgctgcgcggtaagaacgggtcagattccgagacaattaggcttccctacgaggagggcgagctgctcgaatatctggacgctgaagagcttccaccaattctcgtggatttgttggagaagagtcaggtaaatatttttcattgcgggtgtgtgattgcagagatacgcgattataggcagagctctaacatgaagagccccggataccaatccagacatattctgttgcgaccgactatgcagaccctgatttgcgacgtccacagcattacaagcgacaaccacaaatggactcaggaggataaactgctgctagagtcgcagctcattctggccaccgcggagccactgtgtctcgacccctcaatcgctgtcacatgtacggcgaataggctgctgtacaacaaacagaaaatgaacacgcgccccatgaaaagatgtttcaaacggtattcccggtccagcctgaaccggcaacaggacctttctcactgtcccccccctccccagttaagactgctagactttctgcagaaaagaaaggagaggaaagccggccagcattatgacctcaagatcagtaaggcaggtaattgcgtcgatatgtggaagagatctccttgcaatctcgcgatcccctcagaggtggacgtggaaaaatacgctaaagtggagaagtccatcaagtcggatgattcacagcccacggtgtggccagctcatgatgtaaaagacgactatgtctttgagtgtgaagccgggacgcagtaccagaaaacaaagctgaccattctgcagagcctgggcgaccccctgtattatgggaaaattcagccctgcaaagctgacgaagaaagcgatagccagatgagccctagtcatagtagtaccgacgaccacagcaattggtttatcattgggtctaagaccgatgcggaacgggtcgtgaaccaataccaggagttagtgcagaatgaagccaaatgccccgtgaagatgagccacagctctagcggctcagcctctctcagtcaagtttcccccgggaaagagaccgatcagacggagaccgtgtccgtgcagtcctctgtgcttgggaagggagtgaagcatcggccacctccaattaaattacctagctcatctggcaattcaagttcaggcaattattttactcctcagcagacaagcagcttcctcaagtctccaacgccccctccatcaagcaaacccagctccatcccccgcaagagctctgtcgatctgaaccaggtgagcatgcttagtccagccgccctgagcccagccagctcgagccagcgcactaccgctacccaggtgatggcaaactcagccgggctcaactttatcaacgttgtgggctccgtgtgcggagctcaagctttaatgtcgggaagcaatcccatgctgggctgcaacacaggcgctatcacacctgctggaatcaatcttagtggccttcttcctagtggtgggctcctcccaaatgccctgccttcggccatgcaggcagcctctcaggccggcgtgcctttcggactgaagaacacatcaagccttaggccgttgaacctccttcaattgcccggggggtcacttattttcaacactttgcagcagcaacaacagcagctatcacagtttaccccccaacagccacaacagccaacgacgtgctccccgcagcagcctggtgaacagggatccgagcagggaagtacgagccaagagcaggcactgtcggcacagcaggcagcggtgatcaacctaactggagttggaagtttcatgcagagtcaggctgctgcggtcgcgattctcgccgcttctaacggatacggcagttctagttcgaccaacagctctgctacatcatcttccgcctaccgtcagcctgtcaagaagtag

SEQ ID NO: 193837 - DNA, 2202 bp, Artificial Sequence
  derived and/or modified sequence
atgcagcaagcgctggaactggcacttgaccgtgcagaatatgtgattgaatctgcaaggcagagacctcctaagcgaaagtacctgagcagcgggagaaagtccgtgtttcagaagctttatgatttatacattgaggaatgcgagaaagagccagaagtgaaacagaagcttagacgaaacgtcaatctgctggaaaaactggtgatgcaagagacgctgtcctgcctcgtcgttaacctttaccctggcaacgagggttactcccttatgcttcggggaaaaaatggttcggatagcgaaactattcggcttccgtacgaggagggcgagttgttagaatacctagatgctgaagaactcccccccattctcgtcgacctcctagaaaaatcacaggtgaacattttccactgcggatgtgtcatcgccgagattcgggattaccggcagagctccaacatgaagtcccccgggtatcaatccaggcacatcctgctgagacccactatgcaaacactcatctgtgacgttcactctattacttccgataatcataaatggacccaggaagataaactgctgctagaaagtcagcttattctcgctactgcagagccattgtgtcttgatccgtcaatcgccgtgacctgtacagcgaaccgcctcctgtacaacaaacagaagatgaacacaagaccaatgaaaaggtgcttcaaaagatacagcaggagttcgcttaaccgccagcaggacctgagtcactgccctccaccgccccagctgcgactgcttgacttcttgcagaagagaaaggagcgtaaagctggacagcactacgatcttaagatctccaaggccggaaattgcgtagatatgtggaagaggagcccctgtaacttggccatcccaagcgaggtggacgtggagaaatatgcaaaggtggagaagtccataaagagcgacgatagccagccaacggtctggcccgcacatgatgtgaaggatgactatgtttttgaatgcgaggccggcacccaatatcaaaagacaaaactgaccattctgcaatcattaggcgaccctctttactatggtaagattcagccctgcaaagcagacgaagaaagcgattcccaaatgtctccgtcacactcttccaccgatgaccactccaactggttcataattggctcgaagacagatgccgagagagtcgtgaaccagtatcaggagctcgtgcagaacgaagccaaatgcccagtcaagatgagccacagttcaagcggcagcgcttccctgtcccaggtctcccccgggaaggagactgatcagactgaaacggtctctgtgcagtccagtgtactgggtaaaggagtgaagcaccgccctccaccaataaagctccctagtagcagtggcaacagtagttcgggcaactattttaccccgcagcagacatcttcattcctgaagagtcctactcccccaccttcttccaaaccatcgagtatcccgcgcaagtcaagtgttgatttgaatcaggtgtcgatgcttagcccagccgctctgtcacctgcaagcagcagccagcggactacagcaacacaagtgatggccaactcagcaggcctcaacttcattaatgtagtgggatccgtgtgtggcgcacaggctctcatgtctggctccaacccaatgctgggctgcaacaccggagccatcacgccggctgggattaatctatctggtttgctgccgtctgggggcttgctgcccaatgcactgcctagcgccatgcaggcggcgtcccaggccggggttccatttggcctaaaaaatacctcttctcttcgccctctcaaccttctgcagctccctggcgggtcgctgatcttcaatacactgcaacaacagcagcagcaactctctcaatttaccccccagcagccgcaacaacccactacatgctcaccccagcagcccggggaacagggtagtgagcaagggtcgaccagtcaggaacaggccctatccgctcagcaggctgctgtgatcaatcttactggtgtcggatcttttatgcaatcacaggcagcagctgtggccatattagcggcttcaaacggatacggcagcagtagttcaactaatagtagtgcgacatctagcagcgcctaccggcaacccgtaaagaaatag

SEQ ID NO: 193838 - DNA, 2202 bp, Artificial Sequence
  derived and/or modified sequence
atgcaacaggcccttgagctggccctggatcgggccgagtatgttatcgaatccgcaagacaaaggccgccgaaaaggaaatatctgagctcaggcagaaaaagcgtgttccagaagctgtacgatttatacatcgaggagtgcgaaaaagagcccgaagtgaagcaaaagctccgtagaaacgtgaatctcctggaaaagctggtcatgcaggaaacattgagttgcctcgtcgtgaacctgtaccccggcaacgaaggatacagcttaatgctgagaggtaaaaacggttccgactctgaaaccattcgcttgccttacgaggagggtgaattactggagtacttagatgctgaggagctgccccccatcctggtggatctcctcgaaaagagtcaggtgaatatttttcactgtgggtgcgtaattgctgagatacgagactaccgtcagtcgtccaacatgaaaagcccaggttatcagtcgagacacatattgctgcgccccacaatgcagacacttatctgtgatgtgcacagcatcacatctgataaccacaagtggacacaggaggacaaactcctgctcgagagtcagttaatcctcgctacagctgaaccactgtgcctggacccttccattgccgtgacatgcactgccaataggctcctttacaataagcaaaaaatgaatactagaccaatgaaacgctgtttcaagcgctactccaggtccagcctcaatagacaacaggacctgtcccactgtccaccaccaccccaactccgcctgctagacttcttacagaagcgaaaggagcgcaaggcaggccaacattatgacctgaagatctccaaagcgggcaactgtgttgatatgtggaaacgaagtccctgcaacctggctatcccatcggaggtggatgtagaaaagtacgccaaggtggagaaatcaatcaaatctgatgactcccagccaactgtgtggccagcccacgatgttaaagacgactacgtgttcgaatgcgaagcaggcacccagtatcagaaaacgaagcttaccatcctgcagagcctgggtgatccgctctattatggcaagatacagccctgcaaggcggacgaggaaagcgattctcaaatgagtcctagccatagttcgacagacgatcatagcaactggttcataatcggcagcaagaccgatgccgaacgcgtggtgaatcagtaccaggaactggtacaaaacgaagcgaagtgcccagtgaaaatgtctcatagtagctccgggtcagcaagcctctcccaggtctcaccaggtaaagagacagatcaaacagagacagtgagcgtccagagctctgtcctcgggaagggcgtcaagcacagacccccccccattaaattacccagttcatcgggcaactcaagttctggcaactacttcaccccccagcagaccagcagcttccttaagtcccctacgccgcccccatctagtaagccaagctccatccctaggaaatcaagcgttgaccttaatcaggtgagcatgctctctcccgctgcactgagcccagctagtagttcacagaggaccacagctacacaagtgatggccaatagtgctggcttgaacttcattaatgtcgtgggaagcgtttgcggcgcgcaggcactgatgagtggctcgaacccaatgttagggtgcaatacaggcgctataacacccgctggcatcaatttaagcggcctgcttccatccggcggattactccccaacgcactgccgtccgccatgcaggccgcctcccaggcgggagtaccgttcggactgaaaaatacatcttctctcaggcctttaaaccttcttcagctgcctgggggctcattaatcttcaacacactgcagcaacagcaacagcaactgagtcaattcactccacagcagcctcaacagccaaccacgtgcagcccccagcagcccggggaacagggatcagagcaggggagcaccagccaggagcaggcactgtctgctcagcaggccgcagtcattaacctcaccggcgtggggtcatttatgcaatcccaggccgccgctgtcgccatcttggctgcctccaatggatacggaagttcaagctcaacgaattcaagcgcaaccagctcctcagcatacagacaaccagtgaagaaatag

SEQ ID NO: 193839 - DNA, 2202 bp, Artificial Sequence
  derived and/or modified sequence
atgcagcaggccctggagctggccctggacagagcagaatatgtgattgagagcgcccggcagaggcctcccaagaggaagtacctgagcagcggcaggaagtctgtgttccagaagctgtatgacctgtacattgaagaatgtgagaaggagcctgaggtgaagcagaagctgcggagaaatgtgaacctgctggagaagctggtgatgcaggagaccctgagctgcctggtggtgaacctgtacccaggaaatgaaggctacagcctgatgctgcggggcaagaatggaagtgacagcgagaccatccggctgccctatgaggagggggagctgctggagtacctggatgctgaggagctgccccccatcctggtggacctgctggagaagagccaggtgaacatcttccactgcggctgtgtgattgctgagatccgggactaccggcagagcagcaacatgaagagccctggctaccagagccgccacatcctgctgcggcccaccatgcagaccctcatctgtgatgtgcacagcatcaccagtgacaaccacaagtggacccaggaggacaagctgctgctggagagccagctgatcctggccacagctgagcccctgtgcctggaccccagcattgctgtgacctgcacagccaaccggctgctgtacaacaagcagaagatgaacacccggcccatgaagcgctgcttcaagcgctacagccgcagcagcctgaaccggcagcaggacctgagccactgccccccaccaccccagctgcggctgctggacttcctgcagaagaggaaggagaggaaggccggccagcactatgacctgaagatcagcaaggccggcaactgtgtggacatgtggaagaggagcccctgcaacctggccatccccagcgaggtggatgtggagaagtatgccaaggtggagaagagcatcaagagtgatgacagccagcccaccgtgtggccagcccatgatgtgaaggatgattatgtgtttgaatgtgaggccggcacccagtaccagaagaccaagctgaccatcctgcagagcctgggggaccccctgtactacggcaagatccagccctgcaaggcagatgaggagagtgacagccagatgagccccagccacagcagcacagatgaccacagcaactggttcatcatcggcagcaagacagatgctgagcgggtggtgaaccagtaccaggagctggtgcagaatgaggccaagtgccctgtgaagatgagccacagcagcagcggcagcgccagcctgagccaggtgtccccaggcaaggagacagaccagacagagaccgtgtctgtgcagagctctgtgctgggcaagggcgtgaagcaccggcccccacccatcaagctgcccagcagcagcggcaacagcagcagcggcaactacttcaccccccagcagaccagcagcttcctgaagagccccaccccaccacccagcagcaagcccagcagcatccccaggaagagctctgtggacctgaaccaggtgtccatgctgagccctgctgccctgagccctgccagcagcagccagaggaccacagccacccaggtgatggccaacagcgctggcctgaacttcatcaacgtggtgggctctgtgtgtggggcccaggccctgatgagcggcagcaaccccatgctgggctgcaacacaggagccatcaccccagctggcatcaacctgagcggcctgctgcccagcggcggcctgctgcccaatgccctgcccagcgccatgcaggccgccagccaggccggcgtgcccttcggcctgaagaacaccagcagcctgcggcccctgaacctgctgcagctgcccggcggcagcctcatcttcaacaccctgcagcagcagcagcagcagctgagccagttcaccccccagcagccccagcagcccaccacctgcagcccccagcagcccggggagcagggcagcgagcagggcagcaccagccaggagcaggccctgagcgcccagcaggccgccgtcatcaacctgactggagtgggcagcttcatgcagagccaggccgctgctgtggccatcctggccgccagcaatggctacggcagcagcagcagcaccaacagcagcgccaccagcagcagcgcctaccggcagcctgtgaagaagtag

SEQ ID NO: 193840 - DNA, 2202 bp, Artificial Sequence
  derived and/or modified sequence
atgcagcaggccctggagctggccctggaccgggccgagtacgtgatcgaatcagctcgccagcgtcccccaaaaagaaaatatttatcgtcaggccgcaagagtgtgttccaaaaactgtacgacctgtacattgaagaatgcgaaaaggaacccgaggttaagcaaaaactccgcaggaatgtaaatcttttagagaagcttgtaatgcaagagacactcagctgtttggttgttaacttgtacccaggaaatgagggttattctcttatgttgcgaggaaagaacggctctgatagtgagacgatccgactcccatatgaagagggggagttactggagtacttggatgctgaagaattgccgcctatactggttgacctactggagaagtcccaggtgaatatatttcactgtgggtgcgtaattgctgaaatccgcgactaccggcagtcctcaaacatgaagagccctggctaccagtctaggcacatcctgctacgtcccaccatgcagaccctgatatgcgacgtgcacagcattacgagtgacaaccataaatggacacaggaggataaactgctcttggaatctcagctgattcttgcaacggccgaacctttatgccttgacccttccatcgcggttacctgtactgctaataggctgctctacaacaaacaaaagatgaacacccggccaatgaaaagatgttttaagcgctactctcgaagttctcttaataggcagcaagatctcagtcattgtcctccccccccccagctacgcttactagatttcctccagaagagaaaagagcggaaagcaggccagcattacgacctcaagatatctaaggccggcaactgcgtcgacatgtggaaacgctccccctgtaaccttgcaatcccctccgaggtggacgtggagaaatatgccaaagtggagaagtctataaaatctgacgattcccagcctaccgtgtggcctgcgcatgacgtgaaggatgattacgtgttcgagtgcgaggccggtacccagtatcagaaaacaaaactcaccatcctgcaatccctgggcgatcccctctattacggcaaaatccaaccctgtaaggctgatgaagagagcgactctcagatgtcaccatctcatagcagtactgacgaccacagcaactggttcataataggttccaaaactgacgcagaacgcgtggtgaaccagtatcaggagcttgtccaaaacgaggccaaatgccccgtgaaaatgagccacagtagcagcggctcagcttctctgtcccaggtcagtccaggcaaggaaactgaccagaccgagaccgtctccgtgcagagcagtgtactgggtaaaggagtcaaacaccgtccgcccccaatcaagctgccaagctcttcaggaaactctagcagcggcaattacttcactcctcagcagacatcatctttcctgaagagccccactccgccacctagttccaagccatcttcaattccacgcaagagctctgtcgatctgaatcaggtttctatgctgagtcctgctgcattgtccccggcatcctcatctcagaggacaaccgctacccaagtgatggctaattccgccggcctcaatttcatcaatgtagtgggatcggtgtgcggcgcccaggccctaatgtccggaagcaatcctatgctcggatgcaataccggcgcaattaccccagcagggatcaatctgagcgggctcctgccttcaggaggcctcttaccaaacgctctcccctcagctatgcaagctgctagtcaggcaggcgtgccatttggactgaagaacacttccagccttcggcccttgaacctcttgcagctgcctggaggcagtcttatcttcaacacactccagcagcagcagcagcagcttagccagttcacaccacaacagccgcagcagccgaccacctgtagtccacagcaaccgggggagcagggtagtgagcagggaagcacgtctcaggaacaggcactgtcagctcaacaggccgcagttatcaacttgaccggagtcgggtcctttatgcagtcgcaggctgccgccgttgccatcttagcggcgagcaatgggtatgggagcagctcttctactaattcctccgcaacctcatctagcgcttatagacaacccgtgaaaaagtag

SEQ ID NO: 193841 - DNA, 2202 bp, Artificial Sequence
  derived and/or modified sequence
atgcagcaggccctggagctggccctggaccgggccgagtacgtgatcgagtcagcccgacagcggccacccaagcgcaagtacctcagctctggcagaaagtctgtctttcaaaagctgtatgacctgtatatcgaagaatgcgagaaggagcctgaagtgaagcaaaaacttcgtagaaacgtgaatctgctggaaaagctggtgatgcaggagacgctgtcttgcttggtggtgaatctttaccccgggaacgaaggctattccctgatgctgaggggaaagaacggcagcgatagcgagacgattcgcctcccgtatgaggagggagaactgctcgagtacctcgatgctgaagagctccctccgatcctagtggatctgctcgagaaatcacaggtgaatatttttcattgtggttgcgtaattgccgagattcgagactacagacagagctcgaacatgaaaagtccaggctaccagagccggcatatcctgctccgccctaccatgcaaactctcatttgcgatgtccactccattacatctgataaccacaagtggacacaggaggacaagctcttgctggaatctcagctgatcttggctacggctgagccgctgtgcttggacccctcaatcgctgtgacatgcactgcaaacaggttgctgtacaataaacagaaaatgaatacgcggcctatgaagaggtgtttcaaacggtacagccggagctctctcaataggcagcaggatctgtctcactgccctccacctcctcagctgagactgttggactttttgcagaaacggaaggagcgtaaagcgggacagcactatgatctcaagataagtaaggccggtaattgcgtcgacatgtggaagaggagcccctgtaatttggccatccccagtgaggttgacgtggaaaagtacgctaaagtggagaaatccattaagtctgacgactcgcagccaactgtttggcctgcccatgatgtgaaggacgattatgtctttgagtgtgaggcggggacgcagtaccagaagaccaaactgacaattcttcagtctcttggggatcccctgtactacggaaaaatacagccttgcaaggctgacgaagaatctgacagtcagatgagtccgagccactccagcactgatgaccatagcaattggtttatcataggatcaaaaaccgacgccgagcgggtggttaatcagtatcaagagctggttcagaatgaggccaaatgcccagtaaaaatgtcccactcctcttctggaagcgcctcattatctcaggtgtctccaggtaaagagaccgaccagacagagacagtcagtgtccaatcttctgttttgggaaagggagtcaaacacagaccccccccaattaaattgccgagcagctccggaaatagttcctccggcaactacttcacacctcagcaaacttcgagctttctgaagtctccaacaccccccccttccagcaaacccagctccattccacgcaaaagttccgtggacctgaaccaagtttctatgcttagtcctgctgccctatcaccagcaagctcaagccagcgcaccactgcaacccaggtcatggccaacagtgctgggttgaactttataaacgtggtgggatcggtgtgtggggcccaggctctcatgagcgggagtaatccaatgctgggctgtaataccggcgcgattacacccgcagggattaatctgtctggtctcctgcccagcggtggcctgctccctaacgcccttcccagcgcaatgcaggcagcctcacaggccggagtaccatttggcttgaagaatacttcttcattgcgccctttgaatctactccaattgccagggggatctctgatctttaatactctacaacaacaacagcaacaactgtcgcagtttacgccccaacaacctcagcagccaacaacatgctccccccagcaacccggtgaacagggcagcgagcagggatcgacaagccaggaacaagccctgtcagcacagcaggccgctgtgattaacttaacaggcgtgggtagctttatgcagtcccaggccgcagcggtggcaatcctggcagcttccaatggatacgggtcctccagctccaccaattccagtgcaacctcttcgtctgcatacaggcagcctgtcaaaaaatag

SEQ ID NO: 193842 - DNA, 2202 bp, Artificial Sequence
  derived and/or modified sequence
atgcagcaggccctggagctggccctggaccgggccgagtacgtgattgagtctgctagacagcggcccccaaagagaaagtacctaagctccggaaggaaatcagtcttccaaaaactgtacgacctttacatagaggaatgcgagaaagaaccggaagtcaagcagaagcttaggcgcaatgtgaatctcctcgaaaaactggtgatgcaggaaacactgtcctgcctcgttgtgaatctgtaccccggcaatgaggggtattcactgatgctgcgcggcaagaacggcagcgattctgagaccatacgacttccctatgaggagggagagctgctagaatacctagacgcagaagaactgcctccaatcttagttgaccttctggaaaaaagccaggtgaacatcttccattgtggctgcgttatcgctgagatcagagactataggcagagcagcaacatgaaaagcccaggctatcagtctagacacatactgctgcgccctaccatgcagacactgatttgtgacgtgcacagtataacctcagataatcataaatggacacaggaggataagttactgctcgagagccagctcattcttgcgacggccgagccactatgcctagacccgagcattgccgtgacatgcaccgctaaccggctgttatataacaaacagaagatgaatacaaggccaatgaagcgttgctttaagcggtactcacgctctagcctgaatcgccagcaggacctcagccactgcccacctccccctcagctgcggctgttggactttttgcagaagcggaaagaaagaaaagctggccagcactatgatctcaagatttccaaagctggaaattgtgtcgatatgtggaaacgttctccctgcaacctggccatcccaagtgaggttgatgtggagaagtatgcaaaggtagagaagtccatcaaatctgacgactctcaacctactgtgtggcccgcccacgacgtcaaagacgactacgtgttcgaatgtgaggccgggactcagtaccagaaaacaaaactgacaattcttcagagtctcggggatcccttatattatggaaagattcagccctgtaaggccgacgaggagtctgatagccagatgtctccttcgcattcttctactgacgaccattcgaattggttcataattggctcaaaaacggacgcagaaagagtggtaaaccagtatcaagagctggttcagaatgaggccaagtgtcccgtgaaaatgtcacattcttcttccggcagcgcttccctctcacaagtgtcgcctggtaaggaaactgatcagactgagactgtgagcgtgcaatccagcgttttaggcaagggcgtgaagcaccggcctcctcctataaaactgcctagctcgtccggtaattcctctagcggcaattacttcactcctcaacagacatcctctttcttgaaatcccccaccccgcccccctcaagcaagcccagtagcatccccaggaagagctcagtggacttgaatcaagtgagcatgttgagccctgccgctctgtcacctgctagcagcagccaaagaacaactgcaacccaggtgatggctaattccgctggactgaatttcataaacgtggtgggatctgtatgcggagctcaggcattgatgagcgggagcaatcccatgttagggtgtaatacaggagctatcaccccagcggggattaacttatccggccttctgcctagcgggggcctgctgccaaacgccctcccttcagcgatgcaagctgcaagtcaagctggagtccctttcggcctgaagaatacatcttctctgcggcccttgaatctgttgcagctcccaggcgggagtcttatttttaatacccttcagcagcaacagcaacagctgtcccaatttacacctcaacaacctcagcaacccaccacgtgcagcccacagcagccgggagagcagggatcagagcaaggctccacatcacaggaacaggccttaagcgcccagcaagcagcggtgataaacctgactggcgtgggctcgttcatgcaatcccaggccgcagccgttgctattttagctgcgagtaacggctatggaagcagttcctccacaaactcaagtgcgacctctagtagcgcatatagacaacccgtcaagaaatag

SEQ ID NO: 193843 - DNA, 2202 bp, Artificial Sequence
  derived and/or modified sequence
atgcaacaggcgctggaattagcgctggaccgggcagagtatgtcatcgagtcagctcgccagcgccctccaaagcgaaagtacctttcatctgggcgtaaatcagtctttcaaaagctatatgacctgtacatcgaggaatgcgagaaggaaccagaggtcaagcagaagctgcgtcgcaatgtgaaccttctagagaagctggtgatgcaggagacactgagttgcctcgtggtgaacctgtatcctggcaatgagggctactccctaatgctgcgtgggaaaaacggaagtgattcagaaacaattcgcctgccatacgaggaaggtgagctgctggagtaccttgacgcagaagagctccccccaatcctggttgacctgctggaaaagagtcaagtgaacatattccattgtggctgtgtgatcgctgagattagggactaccggcagtcctccaatatgaagagcccaggttatcaaagccgccatatcttactgcggccaaccatgcagacgctgatctgtgacgtgcactcaattacgtctgacaaccataaatggacccaggaagacaagctcctattggagtcacagctgatccttgctacggctgagccactatgcctggacccaagcatcgccgtgacttgtacagcaaataggctcttgtataacaaacagaaaatgaataccaggcccatgaagcgctgttttaagagatattctaggagctccctgaatagacagcaagaccttagccactgtcctcctcccccacagctgcggctgctcgacttcctgcagaagagaaaggaacggaaggcaggacagcactacgatcttaaaataagcaaagccggaaattgtgtcgatatgtggaagagatctccatgtaatcttgccatacccagtgaagtcgacgtagaaaagtatgcgaaggttgaaaagtcgataaagagcgatgactctcagccaacagtgtggcccgctcacgatgtgaaagatgattacgtgttcgagtgtgaggccggtacccagtatcaaaaaacgaagctgaccatcctgcagtctctgggcgaccctctttactacggaaaaatacagccctgtaaagccgacgaggagagtgattctcagatgagtccaagccattctagtaccgatgaccactcaaactggtttattatcgggtcgaaaaccgacgcagagcgcgtcgtgaatcagtatcaggagcttgtgcagaatgaggccaaatgtccagtcaagatgagtcattcttcttccggaagtgctagtttaagtcaggtgtctcctggtaaggaaacagaccaaacagagaccgtctccgtgcagtcgtccgtgctcggcaagggtgttaaacatagaccccctccaataaaactcccttcttcctcaggaaacagcagcagcggaaactacttcaccccccagcagacctcctccttcttgaagagtccaacgcctccgcctagttcaaagccgtcaagcatccctcggaagtcatcagtcgatttgaaccaggtgagcatgctgtccccggctgcccttagcccagcaagctctagtcagagaaccactgccactcaggtgatggcgaactctgccggattgaatttcattaacgtagtcggaagtgtatgtggcgctcaggcattaatgtcagggagcaatccaatgctcgggtgtaatacaggggctattacccccgctgggatcaacctcagtgggctgcttcctagcgggggtctgctgccgaacgctcttccaagtgccatgcaggccgcatctcaggccggtgtaccattcggcttgaagaataccagtagtctgaggcccctaaacctccttcagttaccaggaggcagcctcattttcaatactctgcagcaacagcagcaacagctgagccagtttactccacaacagccccaacagcctaccacatgttcacctcagcagcctggggagcagggatccgagcagggctcaaccagtcaggaacaggccctaagtgcccaacaggcagctgtcataaatcttacaggcgtgggaagtttcatgcagtctcaggccgctgccgtggccatcctggcagcctctaatggttacggttcaagcagcagcacgaacagctccgctacatccagtagtgcatatagacagcctgtcaagaaatag

SEQ ID NO: 193844 - DNA, 2202 bp, Artificial Sequence
  derived and/or modified sequence
atgcagcaggctctggaattagccctcgatagagcagaatatgtaattgaatccgctcggcagaggccacccaaacgtaagtatctcagcagcgggcgtaagagcgtgttccagaagttgtacgatctatacattgaggagtgtgaaaaggaacctgaggttaagcagaagctacggcgaaacgtgaatctgcttgaaaaactcgtcatgcaagaaaccctgtcctgcttggtcgtgaacctgtatccaggtaacgagggatactcactcatgctaagaggcaagaatggttccgacagcgaaactatcagactgccctacgaggaaggagaactgctcgagtatcttgatgccgaggagctgcctccaattctcgttgacctacttgagaagagccaggttaacatttttcattgtggatgtgttattgccgaaatcagagattataggcagtcgtctaacatgaagtcccctggctatcagtcccggcacatcctgttgagaccgactatgcaaacacttatttgtgacgtgcactccattacatccgataatcataagtggacccaggaagataagctgctcctggagagccagctaatcctcgcgacagcggagcccctttgtttggacccatccatagccgttacatgcacagccaatcggctgctctataataaacagaagatgaacacacggccaatgaagaggtgtttcaaacgttattctagatcatcactcaatcggcagcaggacttgagccactgccccccaccccctcagctgaggctactggatttcctccaaaagcgtaaggagaggaaagctggccagcactatgacctcaagataagcaaggccggtaactgcgttgatatgtggaagcgatccccctgcaatctggctattccaagtgaagtggatgttgagaaatatgccaaagttgagaagagtatcaagtccgacgactcccagccgacagtctggccagcacatgatgtgaaagatgattatgttttcgagtgtgaggccggaacgcagtaccagaaaacaaagctcaccatcctgcagtcgctgggagatccattatactatggcaaaatccagccatgtaaagccgacgaggagagtgatagccagatgtccccttcgcattcaagcaccgatgatcattctaattggttcatcattggttcaaagacggatgcagaacgggtcgtaaatcagtatcaggaattggtgcaaaatgaagccaagtgtcctgtcaagatgtcgcacagttcttccggttcagcctccctctctcaggtgtcgccgggaaaggagaccgatcagaccgagaccgtgtcagtacaaagttctgtgttgggaaagggtgttaagcatcgccctccacctattaaactgccttcaagcagtgggaactccagttctgggaattactttactccacagcagacttcgtcgttcctgaaatcgcccaccccaccgcctagtagtaaaccatccagcatcccacgcaagtccagtgtcgacttaaaccaggtctctatgctttcccctgccgctctgtccccagcatcatcttctcagaggaccactgcaacccaggtgatggcaaactctgcaggattaaactttatcaatgtggtcggcagcgtatgcggcgcacaggctctgatgagtggtagcaatccaatgctagggtgtaatacgggcgctataacccctgcgggtatcaacctgtcgggtctgctgccttccggaggcttacttcccaatgcccttcccagtgccatgcaagccgcatcccaggctggggtgccctttggactgaaaaacacatcatcactaagacctttgaatttgctgcagcttcctggtggaagtctgatctttaatacactccagcaacagcagcagcagctttcccagttcactccgcagcaacctcagcaacctacaacttgtagccctcagcagcccggagaacagggcagcgagcaggggtccactagccaggaacaggccctatcagcacagcaggctgccgtgataaatcttaccggggtgggctcttttatgcagagccaggcagctgcagtggcaatcctggctgcatcgaatggctacggatcatcttcgtcaactaatagctccgctacatcctcctccgcttatcggcagcccgtgaaaaagtag

SEQ ID NO: 193845 - DNA, 2202 bp, Artificial Sequence
  derived and/or modified sequence
atgcaacaagctttagagttagctttggatagggctgagtatgttattgagtccgcgaggcagcggcctccgaaacgcaagtatctttctagcggaaggaaaagcgtattccagaagttgtatgatttatacattgaggagtgcgagaaggaacctgaagtgaaacagaaactgcgcagaaacgtgaatctgctggagaaactggtgatgcaggagaccctctcctgtcttgttgtaaatctttacccaggcaatgaaggctacagcctcatgctgagggggaaaaacggaagcgatagtgaaacaattagactcccatatgaggaaggtgaattactcgagtatctggacgcagaggaactaccccctattctggtggacttgctggaaaagtctcaggtcaacatttttcactgtggatgcgttatagcggagattcgcgactacagacagagctctaacatgaagtcccccggatatcaatcacgacatatcttgctgagacctacaatgcagaccctcatctgcgatgtgcactccatcacgagtgacaaccacaagtggactcaggaggataaactgttgcttgagagtcaactaattttagcgaccgctgagccgctgtgcctcgacccttctattgctgtaacatgcactgctaaccgcttgctgtacaacaaacaaaagatgaacacccgacccatgaaaagatgttttaaacgctactctagatctagtttgaacagacaacaggatttgtcccactgcccgcctccgcctcagctgcggctgctagatttcctgcagaagcgcaaggaacgcaaagcgggacagcactacgacttgaagatttccaaggctggcaactgcgttgatatgtggaaaagatcaccctgtaacctggccatccctagtgaggtggatgtcgaaaaatatgccaaagtagaaaagagtatcaaaagcgacgatagtcagccaacagtgtggcccgctcatgatgttaaggatgactatgtgttcgagtgtgaggccggaactcagtatcaaaagaccaagctcacaatcctgcaatccttgggagacccactttattacgggaaaatccagccgtgcaaggctgacgaagagtcagattctcagatgagcccgagccacagctccacagatgatcactccaattggttcatcatagggagtaagaccgatgcagaacgggtcgtgaatcaatatcaagaattggtgcagaacgaggctaaatgcccagtcaagatgagtcattcttcatctggctcagcctctctgagccaggtaagtccagggaaggagacagatcagacggaaacagtcagcgtccaaagctcagtgctcggtaaaggcgtgaaacaccgcccaccacccattaaactcccttcctcctcgggcaacagcagctctggaaattatttcacccctcagcagacctcttcgttcctcaagtcacctaccccgccaccatcctccaaaccgagttccatacccagaaagtccagtgttgacttgaaccaagtctcaatgctatcccccgctgcgctttcaccggcaagcagcagtcagcgaactaccgccacccaggtgatggccaatagcgccggactgaatttcatcaacgtcgtggggagcgtttgcggggcacaggctctaatgagcggtagtaatcccatgctaggctgcaacactggggctatcacaccagcgggaattaacctgtccggtttattaccctctgggggactcctcccgaacgcccttccatcagctatgcaggccgcttctcaggcaggcgtccctttcggccttaagaacacctctagcctccgtcctttaaatctgctgcagctgcctggaggatcactcatttttaacaccctgcagcaacaacaacagcagttgtctcagtttaccccccagcagccccaacaaccaactacctgcagtccccagcagccaggcgagcagggttcagagcagggatctacgagccaagaacaggctttaagcgctcagcaagcagccgtcatcaacctgactggagtcggctcttttatgcagtcgcaggcagcagctgtcgctatcttggcggcatccaatgggtatggttcctcatcctccacaaattcgagtgcaaccagctcttctgcgtaccgccaacctgtcaaaaagtag

SEQ ID NO: 193846 - DNA, 2202 bp, Artificial Sequence
  derived and/or modified sequence
atgcagcaggccctggagctggccctggacagagccgagtacgtgatcgagagcgccagacagagaccccccaagagaaagtacctgagcagcggcagaaagagcgtgttccagaagctgtacgacctgtacatcgaggagtgcgagaaggagcccgaggtgaagcagaagctgagaagaaacgtgaacctgctggagaagctggtgatgcaggagaccctgagctgcctggtggtgaacctgtaccccggcaacgagggctacagcctgatgctgagaggcaagaacggcagcgacagcgagaccatcagactgccctacgaggagggcgagctgctggagtacctggacgccgaggagctgccccccatcctggtggacctgctggagaagagccaggtgaacatcttccactgcggctgcgtgatcgccgagatcagagactacagacagagcagcaacatgaagagccccggctaccagagcagacacatcctgctgagacccaccatgcagaccctgatctgcgacgtgcacagcatcaccagcgacaaccacaagtggacccaggaggacaagctgctgctggagagccagctgatcctggccaccgccgagcccctgtgcctggaccccagcatcgccgtgacctgcaccgccaacagactgctgtacaacaagcagaagatgaacaccagacccatgaagagatgcttcaagagatacagcagaagcagcctgaacagacagcaggacctgagccactgccccccccccccccagctgagactgctggacttcctgcagaagagaaaggagagaaaggccggccagcactacgacctgaagatcagcaaggccggcaactgcgtggacatgtggaagagaagcccctgcaacctggccatccccagcgaggtggacgtggagaagtacgccaaggtggagaagagcatcaagagcgacgacagccagcccaccgtgtggcccgcccacgacgtgaaggacgactacgtgttcgagtgcgaggccggcacccagtaccagaagaccaagctgaccatcctgcagagcctgggcgaccccctgtactacggcaagatccagccctgcaaggccgacgaggagagcgacagccagatgagccccagccacagcagcaccgacgaccacagcaactggttcatcatcggcagcaagaccgacgccgagagagtggtgaaccagtaccaggagctggtgcagaacgaggccaagtgccccgtgaagatgagccacagcagcagcggcagcgccagcctgagccaggtgagccccggcaaggagaccgaccagaccgagaccgtgagcgtgcagagcagcgtgctgggcaagggcgtgaagcacagacccccccccatcaagctgcccagcagcagcggcaacagcagcagcggcaactacttcaccccccagcagaccagcagcttcctgaagagccccacccccccccccagcagcaagcccagcagcatccccagaaagagcagcgtggacctgaaccaggtgagcatgctgagccccgccgccctgagccccgccagcagcagccagagaaccaccgccacccaggtgatggccaacagcgccggcctgaacttcatcaacgtggtgggcagcgtgtgcggcgcccaggccctgatgagcggcagcaaccccatgctgggctgcaacaccggcgccatcacccccgccggcatcaacctgagcggcctgctgcccagcggcggcctgctgcccaacgccctgcccagcgccatgcaggccgccagccaggccggcgtgcccttcggcctgaagaacaccagcagcctgagacccctgaacctgctgcagctgcccggcggcagcctgatcttcaacaccctgcagcagcagcagcagcagctgagccagttcaccccccagcagccccagcagcccaccacctgcagcccccagcagcccggcgagcagggcagcgagcagggcagcaccagccaggagcaggccctgagcgcccagcaggccgccgtgatcaacctgaccggcgtgggcagcttcatgcagagccaggccgccgccgtggccatcctggccgccagcaacggctacggcagcagcagcagcaccaacagcagcgccaccagcagcagcgcctacagacagcccgtgaagaagtag

SEQ ID NO: 193847 - protein, 414 aa, Artificial Sequence
  derived and/or modified sequence
MVQKKPAELQGFHRSFKGQNPFELAFSLDQPDHGDSDFGLQCSARPDMPASQPIDIPDAKKRGKKKKRGRATDSFSGRFEDVYQLQEDVLGEGAHARVQTCINLITSQEYAVKIIEKQPGHIRSRVFREVEMLYQCQGHRNVLELIEFFEEEDRFYLVFEKMRGGSILSHIHKRRHFNELEASVVVQDVASALDFLHNKGIAHRDLKPENILCEHPNQVSPVKICDFDLGSGIKLNGDCSPISTPELLTPCGSAEYMAPEVVEAFSEEASIYDKRCDLWSLGVILYILLSGYPPFVGRCGSDCGWDRGEACPACQNMLFESIQEGKYEFPDKDWAHISCAAKDLISKLLVRDAKQRLSAAQVLQHPWVQGCAPENTLPTPMVLQRWDSHFLLPPHPCRIHVRPGGLVRTVTVNE

SEQ ID NO: 193848 - DNA, 1245 bp, Artificial Sequence
  derived and/or modified sequence
atggtccagaagaaacctgccgaactgcaggggttccacaggtcattcaaggggcagaatccattcgagctggctttctcactcgaccagccggatcacggcgacagcgactttggcctacaatgctcggcgaggccggatatgcccgcctcccagcccattgacatccccgacgccaagaaaagaggtaagaagaaaaagcgggggagagccacagattctttcagcggacgcttcgaggatgtgtatcagctccaagaggacgttcttggagaaggagctcacgccagagtacagacgtgtatcaacttgattactagtcaagagtatgctgtaaagatcatagagaagcaaccgggacacattagatcacgggtgtttcgggaagtggaaatgctgtaccaatgccagggtcacagaaacgtcctagaattaattgagttcttcgaagaagaagatcggttctatctggtcttcgagaagatgcgagggggctccatactaagccatattcataaacgcagacacttcaacgagctcgaggcttctgtagtcgtgcaggatgtcgccagtgctttggattttctgcacaacaagggaatagctcatagagacttaaagcccgagaatatcttatgtgagcacccaaaccaggtgtcccctgtcaagatctgtgactttgatttgggtagtggtattaagctgaacggtgactgctctcctatttccacaccggagctactcacaccctgcggaagtgctgagtacatggctcctgaagtggttgaagcatttagtgaggaggcaagtatttatgacaagcgctgcgacctttggtcacttggagtcatcctttatattctgctgtccggctacccaccgtttgtggggcgatgtggaagcgactgcggttgggatagaggcgaggcgtgtcctgcgtgccagaacatgctgtttgagtccatccaggagggaaagtacgaatttcctgataaggactgggcacacatttcgtgcgccgctaaggatctcatatctaagctgctagtccgagacgccaaacagcggctgagcgcagctcaggtgctgcagcacccctgggtgcagggctgtgcccccgaaaacactctgcccacgcccatggttctccagagatgggattcccacttcttgctgccgccacatccttgtaggatacacgtgcggccaggcggcctggttagaacggtcaccgtaaatgaatag

SEQ ID NO: 193849 - DNA, 1245 bp, Artificial Sequence
  derived and/or modified sequence
atggtgcagaagaagccagctgagctgcagggcttccaccgctccttcaagggccagaacccctttgagctggccttcagcctggaccagcctgaccatggagacagcgactttggcctgcagtgcagcgcccggccagacatgcctgccagccagcccatcgacatcccagatgccaagaagaggggcaagaagaagaagaggggccgggccacagacagcttcagcggccgctttgaagatgtgtaccagctgcaggaggatgtgctgggggagggcgcccacgcccgggtgcagacctgcatcaacctgatcaccagccaggagtatgctgtgaagatcatcgagaagcagcccggccacatccgcagcagggtcttccgggaggtggagatgctgtaccagtgccagggccacagaaatgtgctggagctgattgagttctttgaggaggaggaccgcttctacctggtgtttgagaagatgaggggcggcagcatcctgagccacatccacaagaggaggcacttcaatgagctggaggcctctgtggtggtgcaggatgtggccagcgccctggacttcctgcacaacaagggcatcgcccaccgggacctgaagccagagaacatcctgtgtgagcaccccaaccaggtgtcccctgtgaagatctgtgactttgacctgggcagcggcatcaagctgaatggagactgcagccccatcagcaccccagagctgctgaccccctgtggcagcgctgagtacatggcccctgaggtggtggaggccttcagcgaggaggccagcatctatgacaagagatgtgacctgtggagcctgggcgtcatcctgtacatcctgctgagcggctaccccccatttgtgggccgctgtggcagtgactgtggctgggacagaggagaggcctgcccagcctgccagaacatgctgtttgagagcatccaggagggcaagtatgagttcccagacaaggactgggcccacatcagctgtgccgccaaggacctgatcagcaagctgctggtgagagatgccaagcagaggctgtctgctgcccaggtgctgcagcacccctgggtgcagggctgtgcccctgagaacaccctgcccacccccatggtgctgcagcgctgggacagccacttcctgctgcccccccacccctgccgcatccacgtgcggcctgggggcctggtgaggacagtgacagtgaatgaatag

SEQ ID NO: 193850 - DNA, 1747 bp, Artificial Sequence
  derived and/or modified sequence
cggctcctctcagcggcggtggcccaggtagaggggtccgcgctggcggcggcggcggcgctgttccccgcgcggtccgcggagcggggtccgggctgcgcgacgtggggcggcggcggcactgcggccccggcccaagcccgaccccgggtcccctcctcggccgccccccgcccggccgcccgccctcgggcctccccccgggccctcggtcccctcccccgctggcggggcccggacagaagatggtgcagaagaaaccagccgaacttcagggtttccaccgttcgttcaaggggcagaaccccttcgagctggccttctccctagaccagcccgaccacggagactctgactttggcctgcagtgctcagcccgccctgacatgcccgccagccagcccattgacatcccggacgccaagaagaggggcaagaagaagaagcgcggccgggccaccgacagcttctcgggcaggtttgaagacgtctaccagctgcaggaagatgtgctgggggagggcgctcatgcccgagtgcagacctgcatcaacctgatcaccagccaggagtacgccgtcaagatcattgagaagcagccaggccacattcggagcagggttttcagggaggtggagatgctgtaccagtgccagggacacaggaacgtcctagagctgattgagttcttcgaggaggaggaccgcttctacctggtgtttgagaagatgcggggaggctccatcctgagccacatccacaagcgccggcacttcaacgagctggaggccagcgtggtggtgcaggacgtggccagcgccttggactttctgcataacaaaggcatcgcccacagggacctaaagccggaaaacatcctctgtgagcaccccaaccaggtctcccccgtgaagatctgtgacttcgacctgggcagcggcatcaaactcaacggggactgctcccctatctccaccccggagctgctcactccgtgcggctcggcggagtacatggccccggaggtagtggaggccttcagcgaggaggctagcatctacgacaagcgctgcgacctgtggagcctgggcgtcatcttgtatatcctactcagcggctacccgcccttcgtgggccgctgtggcagcgactgcggctgggaccgcggcgaggcctgccctgcctgccagaacatgctgtttgagagcatccaggagggcaagtacgagttccccgacaaggactgggcccacatctcctgcgctgccaaagacctcatctccaagctgctggtccgtgacgccaagcagaggctgagtgccgcccaagtcctgcagcacccctgggttcaggggtgcgccccggagaacaccttgcccactcccatggtcctgcagaggtgggacagtcacttcctcctccctccccacccctgtcgcatccacgtgcgacctggaggactggtcagaaccgttactgtgaatgagtgaagatcctggaggaccctgggccccaggccagctcccatcgctgggggacggtgaacggccatgtgttaatgttacgatgtttttaaaagacaaaaaaaaaaaaaaaacctcaaaagtttttttaaagtgggggaaaaacatccaagcactttaattccaatgtaccaggtgaactgacggagctcagaagttttcctttacaccaactgtcaatgccggaattttgtattctgttttgtaaagatttaataaaagtc

SEQ ID NO: 193851 - DNA, 1245 bp, Artificial Sequence
  derived and/or modified sequence
atggtgcagaagaagcccgccgagctgcagggcttccaccggagcttcaagggccaaaatccattcgagctggcgttcagtctagaccagccggatcacggcgattctgacttcggtctccaatgttcagctagacccgacatgcccgccagtcagcccattgatatcccagacgctaagaaacgtggaaaaaagaaaaaacgcggtagggccaccgatagcttcagcgggcgatttgaggacgtgtatcagctccaggaggacgtactaggtgaaggagcgcatgcaagagtgcagacctgtatcaatctcatcacaagtcaggagtacgccgtgaagatcatagagaagcagcctggtcacatcagatccagagtgtttcgcgaagtcgaaatgctttatcagtgtcagggacaccgcaacgtgctggagctgattgaattctttgaggaagaagacagattctaccttgtgtttgagaaaatgcgcggcgggtcgatcctctctcacatccacaagaggcgccactttaatgagctcgaagcttcggtcgtcgtgcaggacgtggcgtctgctctggactttctccataataaggggatcgctcatcgggatctgaaacctgagaatatcctgtgtgagcatccaaatcaagtgtctccagtgaagatctgcgactttgatctgggaagtggaatcaagctgaatggcgactgttccccaataagcacccccgagcttctcacaccctgcggcagtgccgagtatatggctcccgaggtcgttgaggcattcagcgaggaggcatccatctacgataaacgctgcgatttatggagcctaggggtcatattgtatattctcctgagcggttaccccccattcgtcggcagatgtgggtctgactgcggttgggaccgcggtgaagcatgccctgcctgtcaaaacatgctgtttgaatcaatccaggaaggcaaatatgaatttccggacaaagactgggctcacataagctgcgccgctaaggacctcatctcaaagctgctggtgcgcgatgcaaaacagcggctcagcgccgcccaggtactgcagcacccttgggtccagggttgcgctccagagaacacacttcccaccccgatggtcctccagagatgggatagtcatttcctgctgcccccccacccttgccgaattcacgtacggccaggaggactggttaggactgtgactgtgaacgagtag

SEQ ID NO: 193852 - DNA, 1245 bp, Artificial Sequence
  derived and/or modified sequence
atggtgcaaaaaaagccggctgaactgcaaggatttcaccggtcctttaaaggccaaaaccctttcgagctcgcgttctctttggaccaacccgaccatggtgattcagacttcggccttcagtgttccgcgagaccggacatgccagcatcacagcctattgatatcccagacgccaaaaagaggggcaagaagaaaaagaggggcagagcaacagacagctttagcggtcgctttgaagacgtctaccagctgcaagaggatgttctgggagaaggggctcacgccagggtgcagacttgtattaatctgatcacaagccaagagtatgcggttaaaatcatagagaaacagccaggacacattcgttcccgcgttttccgggaagtggaaatgttgtatcaatgccagggtcaccgcaacgtgcttgagttaatcgaattcttcgaagaggaggatcggttctatctagtgtttgagaaaatgcggggtggctcaatattgagccacattcataagaggcgacactttaacgaattagaagcctctgtggttgtacaggacgtcgccagcgcactggacttcctccacaataagggcatcgctcacagggacctgaagccagaaaacatattgtgtgaacatcccaaccaggtgagccctgtcaagatctgcgatttcgacctaggctccgggatcaagttgaacggcgattgcagtcctatctctacccccgagcttctcacgccatgcgggtcagcggagtatatggctccagaggtagtggaggctttctctgaagaagcgtctatctatgataagcggtgcgacttatggtctctcggcgtgattctatatatcctgttgagtggctacccaccctttgtgggcaggtgtgggagtgactgtggctgggaccggggtgaagcctgccccgcttgccagaacatgctgttcgagtcaatccaggaaggaaagtatgagtttcccgacaaagattgggcccatatttcttgtgctgccaaggacttgatctcaaagttgctggttagggatgcgaaacagagactgtctgccgcacaggtgcttcagcatccctgggtgcaggggtgcgccccagaaaacacccttcctacccctatggtgctgcagagatgggattcccatttcctgcttccgcctcacccatgtcgcattcacgtcaggccgggaggcctggtgcgtaccgtcaccgtgaatgaatag

SEQ ID NO: 193853 - DNA, 1245 bp, Artificial Sequence
  derived and/or modified sequence
atggtgcagaagaagcccgccgagctgcagggcttccacagaagcttcaagggccagaaccccttcgagctggccttcagcctggaccagcccgaccacggcgacagcgacttcggcctgcagtgcagcgccagacccgacatgcccgccagccagcccatcgacatccccgacgccaagaagagaggcaagaagaagaagagaggcagagccaccgacagcttcagcggcagattcgaggacgtgtaccagctgcaggaggacgtgctgggcgagggcgcccacgccagagtgcagacctgcatcaacctgatcaccagccaggagtacgccgtgaagatcatcgagaagcagcccggccacatcagaagcagagtgttcagagaggtggagatgctgtaccagtgccagggccacagaaacgtgctggagctgatcgagttcttcgaggaggaggacagattctacctggtgttcgagaagatgagaggcggcagcatcctgagccacatccacaagagaagacacttcaacgagctggaggccagcgtggtggtgcaggacgtggccagcgccctggacttcctgcacaacaagggcatcgcccacagagacctgaagcccgagaacatcctgtgcgagcaccccaaccaggtgagccccgtgaagatctgcgacttcgacctgggcagcggcatcaagctgaacggcgactgcagccccatcagcacccccgagctgctgaccccctgcggcagcgccgagtacatggcccccgaggtggtggaggccttcagcgaggaggccagcatctacgacaagagatgcgacctgtggagcctgggcgtgatcctgtacatcctgctgagcggctacccccccttcgtgggcagatgcggcagcgactgcggctgggacagaggcgaggcctgccccgcctgccagaacatgctgttcgagagcatccaggagggcaagtacgagttccccgacaaggactgggcccacatcagctgcgccgccaaggacctgatcagcaagctgctggtgagagacgccaagcagagactgagcgccgcccaggtgctgcagcacccctgggtgcagggctgcgcccccgagaacaccctgcccacccccatggtgctgcagagatgggacagccacttcctgctgcccccccacccctgcagaatccacgtgagacccggcggcctggtgagaaccgtgaccgtgaacgagtag

SEQ ID NO: 193854 - protein, 755 aa, Artificial Sequence
  derived and/or modified sequence
MRPAPIALWLRLVLALALVRPRAVGWAPVRAPIYVSSWAVQVSQGNREVERLARKFGFVNLGPIFPDGQYFHLRHRGVVQQSLTPHWGHRLHLKKNPKVQWFQQQTLQRRVKRSVVVPTDPWFSKQWYMNSEAQPDLSILQAWSQGLSGQGIVVSVLDDGIEKDHPDLWANYDPLASYDFNDYDPDPQPRYTPSKENRHGTRCAGEVAAMANNGFCGVGVAFNARIGGVRMLDGTITDVIEAQSLSLQPQHIHIYSASWGPEDDGRTVDGPGILTREAFRRGVTKGRGGLGTLFIWASGNGGLHYDNCNCDGYTNSIHTLSVGSTTQQGRVPWYSEACASTLTTTYSSGVATDPQIVTTDLHHGCTDQHTGTSASAPLAAGMIALALEANPFLTWRDMQHLVVRASKPAHLQAEDWRTNGVGRQVSHHYGYGLLDAGLLVDTARTWLPTQPQRKCAVRVQSRPTPILPLIYIRENVSACAGLHNSIRSLEHVQAQLTLSYSRRGDLEISLTSPMGTRSTLVAIRPLDVSTEGYNNWVFMSTHFWDENPQGVWTLGLENKGYYFNTGTLYRYTLLLYGTAEDMTARPTGPQVTSSACVQRDTEGLCQACDGPAYILGQLCLAYCPPRFFNHTRLVTAGPGHTAAPALRVCSSCHASCYTCRGGSPRDCTSCPPSSTLDQQQGSCMGPTTPDSRPRLRAAACPHHRCPASAMVLSLLAVTLGGPVLCGMSMDLPLYAWLSRARATPTKPQVWLPAGT

SEQ ID NO: 193855 - DNA, 2268 bp, Artificial Sequence
  derived and/or modified sequence
atgcgcccagcaccaattgccctgtggctgcgactcgtcctggctctggccctggttcgccctagggccgtgggttgggcacccgtacgcgctcccatctacgtctcctcgtgggccgtccaggtctctcagggcaatcgggaggtcgaacgacttgcccgcaagtttggctttgtcaatctaggccctatttttccagacgggcaatatttccatctgcgacatagaggcgtggtacagcagtcactaaccccccactggggacatcgcctgcatttaaaaaaaaaccctaaggttcagtggttccagcagcaaaccctgcagaggcgtgtgaagaggtccgtggttgttcctaccgacccgtggttttctaaacagtggtatatgaactcagaggcccagcccgatttatccatcctccaggcctggtctcaaggccttagtgggcagggcatagttgtgtcagtgctcgatgacggcatcgaaaaagaccatcccgatctctgggctaactacgacccactggcaagctatgactttaatgattatgaccctgacccccagcccagatacaccccctcgaaggaaaatcgtcatgggaccaggtgtgccggagaagtagcagccatggccaacaatggattctgtggtgtaggagtcgcctttaatgcaaggatcggcggagtgcgaatgttagatggcacaattaccgacgtgattgaggcccagtccctgagcctgcagccgcagcacatacatatctattcagcttcttggggccccgaggacgatggtaggacagttgacgggccagggatcctgacacgggaggcatttcgccgcggggtgacaaaggggagagggggcctcggaactttattcatctgggcaagcgggaatggtggtctccattacgacaattgtaattgtgatggttacaccaattccatacacactctttccgtgggctccactacacaacagggacgcgtaccttggtacagtgaggcttgcgctagtactctgaccacaacatattccagcggagtggccactgaccctcaaattgttactactgacttgcaccacgggtgcacggaccagcatacgggcaccagcgcgagcgcgcctttggccgccgggatgatcgcactcgcgctagaggccaatccatttttgacatggagagatatgcagcatcttgtggtccgggcgtcaaaaccagcccaccttcaggcagaggactggcgcacaaatggggtgggacgccaggtgtcccaccactatggctatggcctgctggacgccgggctgctcgtggatactgccagaacctggctgccaactcagcctcagcgtaaatgcgccgtccgcgtgcaatcccgtcccacaccaatccttccgttgatctacatccgagagaacgtcagcgcctgcgcaggacttcacaacagcattcgatcgctcgaacacgtacaggctcagctgacactatcttacagcaggcggggcgaccttgaaatctctctgacctcaccgatgggtaccaggagcacactggttgcaattcggcctttggacgtttcaactgaggggtacaacaattgggtctttatgtcgacccacttctgggacgagaacccgcagggcgtttggacactgggtctggagaacaaaggttattatttcaacacgggcaccctctaccgctatactctattgctgtacgggaccgctgaagacatgaccgcgcgtcccacgggcccccaagtgacttcatccgcctgcgtgcagagggataccgaaggcctatgtcaggcatgtgatggtccggcttatatcctaggacaattatgtctggcctactgccctccacgattttttaaccacacaagactcgtgacggccgggcctggacatactgctgcgcccgcgctgcgcgtttgcagttcatgccacgcctcatgttacacatgtagaggcggtagcccccgggactgcacgtcttgtccaccatcttcaacgctcgatcagcagcagggctcatgtatgggacccacgacacctgactcacggccacgcctgagggcagccgcttgccctcaccatcgatgccctgcgagcgctatggtgctctccctccttgctgtgacactggggggaccggtgctctgcggaatgtctatggacttaccgctgtacgcttggttgagtagagccagggcaacccctacgaaacctcaggtgtggctgcctgctgggacttag

SEQ ID NO: 193856 - DNA, 2268 bp, Artificial Sequence
  derived and/or modified sequence
atgaggcctgcccccatcgccctgtggctgcggctggtgctggccctggccctggtgcggcccagggctgtgggctgggcccctgtgcgggcccccatctacgtgtcctcctgggccgtgcaggtgtcccagggcaaccgggaggtggagcggctggccaggaagtttggatttgtgaacctgggccccatcttcccagatggccagtacttccacctgcggcacagaggagtggtgcagcagagcctgaccccccactggggccaccggctgcacctgaagaagaaccccaaggtgcagtggttccagcagcagaccctgcagaggagagtgaagaggtctgtggtggtgcccacagacccctggttcagcaagcagtggtacatgaacagcgaggcccagcctgacctgagcatcctgcaggcctggagccagggcctgagcggccagggcatcgtggtgtctgtgctggatgatggcatcgagaaggaccacccagacctgtgggccaactatgaccccctggccagctatgacttcaatgactatgaccctgacccccagccccgctacacccccagcaaggagaacagacatggcacccgctgtgccggggaggtggccgccatggccaacaacggcttctgtggggtgggcgtggccttcaatgcccgcatcggcggcgtgaggatgctggatggcaccatcacagatgtgattgaggcccagagcctgagcctgcagccccagcacatccacatctacagcgcctcctggggcccagaagatgatggccgcacagtggatggccctggcatcctgacccgggaggccttccggcggggcgtgaccaagggccggggcggcctgggcaccctcttcatctgggccagcggaaatggaggcctgcactatgacaactgcaactgtgatggctacaccaacagcatccacaccctgtctgtgggcagcaccacccagcagggccgggtgccctggtacagcgaggcctgtgccagcaccctgaccaccacctacagcagcggcgtggccacagacccccagatcgtgaccacagacctgcaccacggctgcacagaccagcacacaggcaccagcgccagcgcccccctggccgccggcatgattgccctggccctggaggccaaccccttcctgacctggagggacatgcagcacctggtggtgcgggccagcaagccagcccacctgcaggccgaggactggaggaccaatggagtgggccggcaggtgagccaccactacggctacggcctgctggatgctggcctgctggtggacacagcccggacctggctgcccacccagccccagaggaaatgtgctgtgcgggtgcagagccggcccacccccatcctgcccctcatctacatccgggagaatgtgtctgcctgtgccggcctgcacaacagcatccgcagcctggagcacgtgcaggcccagctgaccctgagctacagccggcggggggacctggagatcagcctgaccagccccatgggcaccaggagcaccctggtggccatccggcccctggatgtgtccacagagggctacaacaactgggtgttcatgagcacccacttctgggatgagaacccccagggcgtgtggaccctgggcctggagaacaagggctactacttcaacacaggcaccctgtaccgctacaccctgctgctgtatggaacagctgaggacatgacagcccggcccaccggcccccaggtgaccagcagcgcctgtgtgcagagggacacagagggcctgtgccaggcctgtgatggccctgcctacatcctgggccagctgtgcctggcctactgccccccacgcttcttcaaccacacccggctggtgacagctggccctggccacacagctgccccagccctgcgggtgtgcagcagctgccacgccagctgctacacctgccggggcggcagcccccgggactgcaccagctgcccccccagcagcaccctggaccagcagcagggcagctgcatgggccccaccaccccagacagccggccccggctgcgggccgccgcctgcccccaccaccgctgcccagccagcgccatggtgctgagcctgctggccgtgaccctgggcggccctgtgctgtgtggcatgtccatggacctgcccctgtatgcctggctgagccgggcccgggccacccccaccaagccccaggtgtggctgcctgctggcacctag

SEQ ID NO: 193857 - DNA, 2268 bp, Artificial Sequence
  derived and/or modified sequence
atgcggcccgcccccatcgccctgtggctgcggctggtgctggccctagctctcgtgcggccccgggccgtcgggtgggcaccagttcgggcgccaatttacgtctcaagctgggcagtccaggtcagtcaaggcaatcgcgaggtggagcgtcttgcccgtaaattcggttttgtgaatcttgggccaattttccccgatggtcaatattttcacctgcgccataggggggtggtacagcagtcgctaactccgcattgggggcacagactgcacctaaagaagaatcctaaggtgcagtggtttcagcagcagacccttcagagacgggtcaagagatccgtagtagtgccaacagatccgtggtttagtaagcaatggtacatgaactccgaggcccagcctgacctgtcaatcctacaggcctggtcgcaggggctatcaggccagggcatcgtggtttctgttttagacgacggtatcgagaaggatcatccagatttgtgggctaactatgatcccttggcctcctacgacttcaacgactacgacccagatccgcagcctaggtataccccctctaaggaaaaccgacacggaacccgttgcgcaggggaggtcgctgctatggcaaataacggcttctgtggcgtcggcgtcgctttcaatgcccgcatcggcggtgttagaatgctggatggaaccatcaccgacgttatagaggcccagagccttagcctgcagcctcagcatattcatatttacagcgctagttgggggcccgaagacgacggcagaaccgttgacggaccaggtattcttactagagaggcctttcgccgaggcgtaactaaaggacgggggggattagggaccctgtttatttgggcttcaggcaatgggggacttcattatgataattgcaattgcgacgggtacacaaacagcattcataccctgtccgtcggatctacaactcagcaaggaagggtcccttggtactctgaggcgtgcgcatccacccttaccacaacctactcctcaggggttgctaccgatccacaaatcgtcaccaccgacctgcaccacggttgtactgaccaacacacaggaactagcgcctctgcacctctggcggcaggcatgatagctctggccctagaagcaaatcctttcctcacatggagagatatgcagcatctcgttgtgcgggctagcaagccggcccaccttcaagccgaggattggaggaccaacggcgtcggacgacaggtgtcacatcactatggctatgggttgctagacgccgggctgctcgtcgatacggctaggacatggctgcctacccaacctcagcgaaagtgcgctgttagagttcagagccggcccaccccgatccttccccttatttatattagggaaaacgttagtgcctgcgccggccttcataattccatacggagcctggagcacgtacaagctcagctcactttatcttactccaggaggggggacctcgaaattagcttgacctcacctatgggtacccgctctacattggtcgccatcagaccgctcgacgtgagcactgagggatataataattgggttttcatgagtacacatttttgggacgagaatccacagggggtttggacccttggcctagaaaacaaaggctactattttaatacgggtaccctctatagatataccctgctgctctatggcacagccgaggatatgactgctcggcccaccggaccccaggtgactagctccgcgtgcgtacagagggatactgagggcttgtgtcaggcctgcgacgggcccgcctacattctgggacaactatgtctggcttattgtccacctaggttttttaaccatacgcgccttgtaactgccggtcccggacataccgcagctcccgctcttcgcgtatgtagctcttgccatgctagctgctatacttgtagaggtggcagcccgcgtgactgtacaagctgtccccccagttcaacactcgaccagcaacaggggagctgcatgggcccgaccacacccgattcacgaccccgcctccgtgccgctgcgtgcccacaccaccggtgcccagcttcagccatggtgttgtctctgctcgccgtcacgctgggggggcctgtactttgtggaatgtccatggatctgcccctttacgcttggttgtcaagagctcgcgcaactcccacaaagcctcaagtgtggctgcccgcaggaacgtag

SEQ ID NO: 193858 - DNA, 2268 bp, Artificial Sequence
  derived and/or modified sequence
atgcggcctgccccaattgctctgtggctgaggctggtgcttgctctggctctagtgaggcccagggccgtagggtgggctcctgtcagggcacccatttacgtgagctcttgggctgtgcaagtaagtcagggcaaccgagaagtggagaggctggcccgaaaattcggatttgtcaatctgggcccaatctttccagatggccaatacttccacttacggcacagaggcgtggtccaacagagcctcacaccacactggggccacaggctgcatctgaaaaagaatccgaaggtccagtggtttcagcagcagaccttgcagaggcgagtgaagcgcagcgttgtcgtgcctaccgatccctggttctctaaacaatggtatatgaattctgaagctcagcctgacctctccatactgcaggcttggtcccagggtctatcgggacagggtatcgttgtgtcagttctggacgatgggatagaaaaggaccaccctgatctgtgggctaactatgatcccttggcttcatatgacttcaacgattatgaccccgacccccagccgaggtatacccccagtaaagagaaccgtcatgggacaaggtgcgccggagaggtggcagctatggccaacaacggattctgtggtgtgggcgtcgctttcaatgcaaggattgggggagtgcgcatgctagatggtacaataacagacgtgattgaggcccagagtctgagtctccagccgcagcatattcacatatactccgcgtcatggggccctgaggacgatgggaggactgtggatggtcccggtattctgactagggaggcctttcgtcgcggagtcactaagggacgtgggggactggggacactgtttatttgggctagcgggaatggtggtctccattacgacaactgcaactgcgatggatacaccaactctatacacaccctgtctgtgggcagtaccacccagcaaggtcgagtcccctggtattcggaggcatgtgctagcacactgactacaacatattcaagcggggttgctaccgatccgcagatagtgaccactgacctgcaccatggatgcaccgatcagcacacaggaacatccgccagtgccccactcgcggctgggatgattgctctcgcgctggaagcaaatcctttcctgacgtggagagatatgcagcacctggttgtaagggcgagtaaaccagcccatctgcaagcagaggattggcggacaaatggggttgggcgacaggtaagtcatcattacggttatggtctccttgatgccggattgttggtcgataccgctaggacgtggttaccaacccagccacagcggaagtgcgccgtcagagtgcagagccggcctacaccgatccttcccctgatctatatcagggagaatgtcagtgcctgcgccggtttacacaacagcatacggagtctcgaacacgtccaggcgcagcttaccctttcatacagtagacgcggagatttggagattagcctcacgtcacctatgggaactcggtctacgttggttgcaatccggcctctagacgtgagtacagagggctataataattgggtcttcatgtctacccacttctgggatgagaacccccagggcgtatggacgctcggcctggagaacaaggggtattacttcaacacagggactctgtatcgatacacactcctgctgtacggtacagctgaagacatgacagcacgtcccacaggccctcaggttaccagctccgcctgtgtgcagcgggacacagagggactgtgccaagcttgcgacggccctgcgtatatactgggacagctctgcctagcatattgccctcctagattcttcaaccacacgcgcctcgtgaccgctgggccaggccataccgcggctcctgccctaagagtttgctcaagctgccacgctagttgttacacatgccgcggaggcagccctagggactgtacctcctgtccccctagctcaacccttgatcagcagcaaggaagttgtatgggcccaaccacgcccgatagtcgacccagactgagggccgcagcctgcccacaccatcgatgtccggctagcgccatggtgctgtcgctcctggccgttacactgggaggacctgtcctatgtggcatgtctatggatctcccactgtacgcctggttgtctagggctcgcgcaactcccaccaagccccaagtatggttaccggcaggtacctag

SEQ ID NO: 193859 - DNA, 2661 bp, Artificial Sequence
  derived and/or modified sequence
cccactcggcggtttggcgggagggaggggatttgcgcaggccccgctcccgccccgcctccatgcggcccgccccgattgcgctgtggctgcgcctggtcttggccctggcccttgtccgcccccgggctgtggggtgggccccggtccgagcccccatctatgtcagcagctgggccgtccaggtgtcccagggtaaccgggaggtcgagcgcctggcacgcaaattcggcttcgtcaacctggggccgatcttccctgacgggcagtactttcacctgcggcaccggggcgtggtccagcagtccctgaccccgcactggggccaccgcctgcacctgaagaaaaaccccaaggtgcagtggttccagcagcagacgctgcagcggcgggtgaaacgctctgtcgtggtgcccacggacccctggttctccaagcagtggtacatgaacagcgaggcccaaccagacctgagcatcctgcaggcctggagtcaggggctgtcaggccagggcatcgtggtctctgtgctggacgatggcatcgagaaggaccacccggacctctgggccaactacgaccccctggccagctatgacttcaatgactacgacccggacccccagccccgctacacccccagcaaagagaaccggcacgggacccgctgtgctggggaggtggccgcgatggccaacaatggcttctgtggtgtgggggtcgctttcaacgcccgaatcggaggcgtacggatgctggacggtaccatcaccgatgtcatcgaggcccagtcgctgagcctgcagccgcagcacatccacatttacagcgccagctggggtcccgaggacgacggccgcacggtggacggccccggcatcctcacccgcgaggccttccggcgtggtgtgaccaagggccgcggcgggctgggcacgctcttcatctgggcctcgggcaacggcggcctgcactacgacaactgcaactgcgacggctacaccaacagcatccacacgctttccgtgggcagcaccacccagcagggccgcgtgccctggtacagcgaagcctgcgcctccaccctcaccaccacctacagcagcggcgtggccaccgacccccagatcgtcaccacggacctgcatcacgggtgcacagaccagcacacgggcacctcggcctcagccccactggcggccggcatgatcgccctagcgctggaggccaacccgttcctgacgtggagagacatgcagcacctggtggtccgcgcgtccaagccggcgcacctgcaggccgaggactggaggaccaacggcgtggggcgccaagtgagccatcactacggatacgggctgctggacgccgggctgctggtggacaccgcccgcacctggctgcccacccagccgcagaggaagtgcgccgtccgggtccagagccgccccacccccatcctgccgctgatctacatcagggaaaacgtatcggcctgcgccggcctccacaactccatccgctcgctggagcacgtgcaggcgcagctgacgctgtcctacagccggcgcggagacctggagatctcgctcaccagccccatgggcacgcgctccacactcgtggccatacgacccttggacgtcagcactgaaggctacaacaactgggtcttcatgtccacccacttctgggatgagaacccacagggcgtgtggaccctgggcctagagaacaagggctactatttcaacacggggacgttgtaccgctacacgctgctgctctatgggacggccgaggacatgacagcgcggcctacaggcccccaggtgaccagcagcgcgtgtgtgcagcgggacacagaggggctgtgccaggcgtgtgacggccccgcctacatcctgggacagctctgcctggcctactgccccccgcggttcttcaaccacacaaggctggtgaccgctgggcctgggcacacggcggcgcccgcgctgagggtctgctccagctgccatgcctcctgctacacctgccgcggcggctccccgagggactgcacctcctgtcccccatcctccacgctggaccagcagcagggctcctgcatgggacccaccacccccgacagccgcccccggcttagagctgccgcctgtccccaccaccgctgcccagcctcggccatggtgctgagcctcctggccgtgaccctcggaggccccgtcctctgcggcatgtccatggacctcccactatacgcctggctctcccgtgccagggccacccccaccaaaccccaggtctggctgccagctggaacctgaagttgtcagctcagaaagcgaccttgcccccgcctgggtccctgacaggcactgctgccatgctgcctccccaggctggccccagaggagcgagcaccagcacccgacgcctggcctgccagggatgggccccgtggaaccccgaagcctggcgggagagagagagagagaagtctcctctgcattttgggtttgggcgggagtgggctggggggagaggctggagcaccccaaaagccaggggaaagtggagggagagaaacgtgacactgtccgcctcgggcaccgcgtccaacctcagagtttgcaaataaaggttgcttagaaggtg

SEQ ID NO: 193860 - DNA, 2268 bp, Artificial Sequence
  derived and/or modified sequence
atgagacccgcccccatcgccctgtggctgagactggtgctggccctggccctggtgagacccagagccgtgggctgggcccccgtgagagcccccatctacgtgagcagctgggccgtgcaggtgagccagggcaacagagaggtggagagactggccagaaagttcggcttcgtgaacctgggccccatcttccccgacggccagtacttccacctgagacacagaggcgtggtgcagcagagcctgaccccccactggggccacagactgcacctgaagaagaaccccaaggtgcagtggttccagcagcagaccctgcagagaagagtgaagagaagcgtggtggtgcccaccgacccctggttcagcaagcagtggtacatgaacagcgaggcccagcccgacctgagcatcctgcaggcctggagccagggcctgagcggccagggcatcgtggtgagcgtgctggacgacggcatcgagaaggaccaccccgacctgtgggccaactacgaccccctggccagctacgacttcaacgactacgaccccgacccccagcccagatacacccccagcaaggagaacagacacggcaccagatgcgccggcgaggtggccgccatggccaacaacggcttctgcggcgtgggcgtggccttcaacgccagaatcggcggcgtgagaatgctggacggcaccatcaccgacgtgatcgaggcccagagcctgagcctgcagccccagcacatccacatctacagcgccagctggggccccgaggacgacggcagaaccgtggacggccccggcatcctgaccagagaggccttcagaagaggcgtgaccaagggcagaggcggcctgggcaccctgttcatctgggccagcggcaacggcggcctgcactacgacaactgcaactgcgacggctacaccaacagcatccacaccctgagcgtgggcagcaccacccagcagggcagagtgccctggtacagcgaggcctgcgccagcaccctgaccaccacctacagcagcggcgtggccaccgacccccagatcgtgaccaccgacctgcaccacggctgcaccgaccagcacaccggcaccagcgccagcgcccccctggccgccggcatgatcgccctggccctggaggccaaccccttcctgacctggagagacatgcagcacctggtggtgagagccagcaagcccgcccacctgcaggccgaggactggagaaccaacggcgtgggcagacaggtgagccaccactacggctacggcctgctggacgccggcctgctggtggacaccgccagaacctggctgcccacccagccccagagaaagtgcgccgtgagagtgcagagcagacccacccccatcctgcccctgatctacatcagagagaacgtgagcgcctgcgccggcctgcacaacagcatcagaagcctggagcacgtgcaggcccagctgaccctgagctacagcagaagaggcgacctggagatcagcctgaccagccccatgggcaccagaagcaccctggtggccatcagacccctggacgtgagcaccgagggctacaacaactgggtgttcatgagcacccacttctgggacgagaacccccagggcgtgtggaccctgggcctggagaacaagggctactacttcaacaccggcaccctgtacagatacaccctgctgctgtacggcaccgccgaggacatgaccgccagacccaccggcccccaggtgaccagcagcgcctgcgtgcagagagacaccgagggcctgtgccaggcctgcgacggccccgcctacatcctgggccagctgtgcctggcctactgcccccccagattcttcaaccacaccagactggtgaccgccggccccggccacaccgccgcccccgccctgagagtgtgcagcagctgccacgccagctgctacacctgcagaggcggcagccccagagactgcaccagctgcccccccagcagcaccctggaccagcagcagggcagctgcatgggccccaccacccccgacagcagacccagactgagagccgccgcctgcccccaccacagatgccccgccagcgccatggtgctgagcctgctggccgtgaccctgggcggccccgtgctgtgcggcatgagcatggacctgcccctgtacgcctggctgagcagagccagagccacccccaccaagccccaggtgtggctgcccgccggcacctag

SEQ ID NO: 193861 - protein, 93 aa, Artificial Sequence
  derived and/or modified sequence
MSTKIFVLFALMCFVQVMAAPEPINWRKVGRRSWKITREALPVVKDGVEIYTLLNQQQPYYPYQQPPPPYYYGYPYPNPQGYQYGPPVHNYGY

SEQ ID NO: 193862 - protein, 1419 aa, Artificial Sequence
  derived and/or modified sequence
MAEGLERVRISASELRGILATLAPQAGSRENMKELKEARPRKDNRRPDLEIYKPGLSRLRNKPKIKEPPGSEEFKDEIVNDRDCSAVENGTQPVKDVCKELNNQEQNGPIDPENNRGQESFPRTAGQEDRSLKIIKRTKKPDLQIYQPGRRLQTVSKESASRVEEEEVLNQVEQLRVEEDECRGNVAKEEVANKPDRAEIEKSPGGGRVGAAKGEKGKRMGKGEGVRETHDDPARGRPGSAKRYSRSDKRRNRYRTRSTSSAGSNNSAEGAGLTDNGCRRRRQDRTKERPRLKKQVSVSSTDSLDEDRIDEPDGLGPRRSSERKRHLERNWSGRGEGEQKNSAKEYRGTLRVTFDAEAMNKESPMVRSARDDMDRGKPDKGLSSGGKGSEKQESKNPKQELRGRGRGILILPAHTTLSVNSAGSPESAPLGPRLLFGSGSKGSRSWGRGGTTRRLWDPNNPDQKPALKTQTPQLHFLDTDDEVSPTSWGDSRQAQASYYKFQNSDNPYYYPRTPGPASQYPYTGYNPLQYPVGPTNGVYPGPYYPGYPTPSGQYVCSPLPTSTMSPEEVEQHMRNLQQQELHRLLRVADNQELQLSNLLSRDRISPEGLEKMAQLRAELLQLYERCILLDIEFSDNQNVDQILWKNAFYQVIEKFRQLVKDPNVENPEQIRNRLLELLDEGSDFFDSLLQKLQVTYKFKLEDYMDGLAIRSKPLRKTVKYALISAQRCMICQGDIARYREQASDTANYGKARSWYLKAQHIAPKNGRPYNQLALLAVYTRRKLDAVYYYMRSLAASNPILTAKESLMSLFEETKRKAEQMEKKQHEEFDLSPDQWRKGKKSTFRHVGDDTTRLEIWIHPSHPRSSQGTESGKDSEQENGLGSLSPSDLNKRFILSFLHAHGKLFTRIGMETFPAVAEKVLKEFQVLLQHSPSPIGSTRMLQLMTINMFAVHNSQLKDCFSEECRSVIQEQAAALGLAMFSLLVRRCTCLLKESAKAQLSSPEDQDDQDDIKVSSFVPDLKELLPSVKVWSDWMLGYPDTWNPPPTSLDLPSHVAVDVWSTLADFCNILTAVNQSEVPLYKDPDDDLTLLILEEDRLLSGFVPLLAAPQDPCYVEKTSDKVIAADCKRVTVLKYFLEALCGQEEPLLAFKGGKYVSVAPVPDTMGKEMGSQEGTRLEDEEEDVVIEDFEEDSEAEGSGGEDDIRELRAKKLALARKIAEQQRRQEKIQAVLEDHSQMRQMELEIRPLFLVPDTNGFIDHLASLARLLESRKYILVVPLIVINELDGLAKGQETDHRAGGYARVVQEKARKSIEFLEQRFESRDSCLRALTSRGNELESIAFRSEDITGQLGNNDDLILSCCLHYCKDKAKDFMPASKEEPIRLLREVVLLTDDRNLRVKALTRNVPVRDIPAFLTWAQVG

SEQ ID NO: 193863 - protein, 511 aa, Artificial Sequence
  derived and/or modified sequence
METFPAVAEKVLKEFQVLLQHSPSPIGSTRMLQLMTINMFAVHNSQLKDCFSEECRSVIQEQAAALGLAMFSLLVRRCTCLLKESAKAQLSSPEDQDDQDDIKVSSFVPDLKELLPSVKVWSDWMLGYPDTWNPPPTSLDLPSHVAVDVWSTLADFCNILTAVNQSEVPLYKDPDDDLTLLILEEDRLLSGFVPLLAAPQDPCYVEKTSDKVIAADCKRVTVLKYFLEALCGQEEPLLAFKGGKYVSVAPVPDTMGKEMGSQEGTRLEDEEEDVVIEDFEEDSEAEGSGGEDDIRELRAKKLALARKIAEQQRRQEKIQAVLEDHSQMRQMELEIRPLFLVPDTNGFIDHLASLARLLESRKYILVVPLIVINELDGLAKGQETDHRAGGYARVVQEKARKSIEFLEQRFESRDSCLRALTSRGNELESIAFRSEDITGQLGNNDDLILSCCLHYCKDKAKDFMPASKEEPIRLLREVVLLTDDRNLRVKALTRNVPVRDIPAFLTWAQVG

SEQ ID NO: 193864 - protein, 1388 aa, Artificial Sequence
  derived and/or modified sequence
MKELKEARPRKDNRRPDLEIYKPGLSRLRNKPKIKEPPGSEEFKDEIVNDRDCSAVENGTQPVKDVCKELNNQEQNGPIDPENNRGQESFPRTAGQEDRSLKIIKRTKKPDLQIYQPGRRLQTVSKESASRVEEEEVLNQVEQLRVEEDECRGNVAKEEVANKPDRAEIEKSPGGGRVGAAKGEKGKRMGKGEGVRETHDDPARGRPGSAKRYSRSDKRRNRYRTRSTSSAGSNNSAEGAGLTDNGCRRRRQDRTKERPRLKKQVSVSSTDSLDEDRIDEPDGLGPRRSSERKRHLERNWSGRGEGEQKNSAKEYRGTLRVTFDAEAMNKESPMVRSARDDMDRGKPDKGLSSGGKGSEKQESKNPKQELRGRGRGILILPAHTTLSVNSAGSPESAPLGPRLLFGSGSKGSRSWGRGGTTRRLWDPNNPDQKPALKTQTPQLHFLDTDDEVSPTSWGDSRQAQASYYKFQNSDNPYYYPRTPGPASQYPYTGYNPLQYPVGPTNGVYPGPYYPGYPTPSGQYVCSPLPTSTMSPEEVEQHMRNLQQQELHRLLRVADNQELQLSNLLSRDRISPEGLEKMAQLRAELLQLYERCILLDIEFSDNQNVDQILWKNAFYQVIEKFRQLVKDPNVENPEQIRNRLLELLDEGSDFFDSLLQKLQVTYKFKLEDYMDGLAIRSKPLRKTVKYALISAQRCMICQGDIARYREQASDTANYGKARSWYLKAQHIAPKNGRPYNQLALLAVYTRRKLDAVYYYMRSLAASNPILTAKESLMSLFEETKRKAEQMEKKQHEEFDLSPDQWRKGKKSTFRHVGDDTTRLEIWIHPSHPRSSQGTESGKDSEQENGLGSLSPSDLNKRFILSFLHAHGKLFTRIGMETFPAVAEKVLKEFQVLLQHSPSPIGSTRMLQLMTINMFAVHNSQLKDCFSEECRSVIQEQAAALGLAMFSLLVRRCTCLLKESAKAQLSSPEDQDDQDDIKVSSFVPDLKELLPSVKVWSDWMLGYPDTWNPPPTSLDLPSHVAVDVWSTLADFCNILTAVNQSEVPLYKDPDDDLTLLILEEDRLLSGFVPLLAAPQDPCYVEKTSDKVIAADCKRVTVLKYFLEALCGQEEPLLAFKGGKYVSVAPVPDTMGKEMGSQEGTRLEDEEEDVVIEDFEEDSEAEGSGGEDDIRELRAKKLALARKIAEQQRRQEKIQAVLEDHSQMRQMELEIRPLFLVPDTNGFIDHLASLARLLESRKYILVVPLIVINELDGLAKGQETDHRAGGYARVVQEKARKSIEFLEQRFESRDSCLRALTSRGNELESIAFRSEDITGQLGNNDDLILSCCLHYCKDKAKDFMPASKEEPIRLLREVVLLTDDRNLRVKALTRNVPVRDIPAFLTWAQVG

SEQ ID NO: 193865 - DNA, 4260 bp, Artificial Sequence
  derived and/or modified sequence
atggccgagggcctggagagagtgagaatcagcgccagcgagctgagaggcatcctggccaccctggccccccaggccggcagcagagagaacatgaaggagctgaaggaggccagacccagaaaggacaacagaagacccgacctggagatctacaagcccggcctgagcagactgagaaacaagcccaagatcaaggagccccccggcagcgaggagttcaaggacgagatcgtgaacgacagagactgcagcgccgtggagaacggcacccagcccgtgaaggacgtgtgcaaggagctgaacaaccaggagcagaacggccccatcgaccccgagaacaacagaggccaggagagcttccccagaaccgccggccaggaggacagaagcctgaagatcatcaagagaaccaagaagcccgacctgcagatctaccagcccggcagaagactgcagaccgtgagcaaggagagcgccagcagagtggaggaggaggaggtgctgaaccaggtggagcagctgagagtggaggaggacgagtgcagaggcaacgtggccaaggaggaggtggccaacaagcccgacagagccgagatcgagaagagccccggcggcggcagagtgggcgccgccaagggcgagaagggcaagagaatgggcaagggcgagggcgtgagagagacccacgacgaccccgccagaggcagacccggcagcgccaagagatacagcagaagcgacaagagaagaaacagatacagaaccagaagcaccagcagcgccggcagcaacaacagcgccgagggcgccggcctgaccgacaacggctgcagaagaagaagacaggacagaaccaaggagagacccagactgaagaagcaggtgagcgtgagcagcaccgacagcctggacgaggacagaatcgacgagcccgacggcctgggccccagaagaagcagcgagagaaagagacacctggagagaaactggagcggcagaggcgagggcgagcagaagaacagcgccaaggagtacagaggcaccctgagagtgaccttcgacgccgaggccatgaacaaggagagccccatggtgagaagcgccagagacgacatggacagaggcaagcccgacaagggcctgagcagcggcggcaagggcagcgagaagcaggagagcaagaaccccaagcaggagctgagaggcagaggcagaggcatcctgatcctgcccgcccacaccaccctgagcgtgaacagcgccggcagccccgagagcgcccccctgggccccagactgctgttcggcagcggcagcaagggcagcagaagctggggcagaggcggcaccaccagaagactgtgggaccccaacaaccccgaccagaagcccgccctgaagacccagaccccccagctgcacttcctggacaccgacgacgaggtgagccccaccagctggggcgacagcagacaggcccaggccagctactacaagttccagaacagcgacaacccctactactaccccagaacccccggccccgccagccagtacccctacaccggctacaaccccctgcagtaccccgtgggccccaccaacggcgtgtaccccggcccctactaccccggctaccccacccccagcggccagtacgtgtgcagccccctgcccaccagcaccatgagccccgaggaggtggagcagcacatgagaaacctgcagcagcaggagctgcacagactgctgagagtggccgacaaccaggagctgcagctgagcaacctgctgagcagagacagaatcagccccgagggcctggagaagatggcccagctgagagccgagctgctgcagctgtacgagagatgcatcctgctggacatcgagttcagcgacaaccagaacgtggaccagatcctgtggaagaacgccttctaccaggtgatcgagaagttcagacagctggtgaaggaccccaacgtggagaaccccgagcagatcagaaacagactgctggagctgctggacgagggcagcgacttcttcgacagcctgctgcagaagctgcaggtgacctacaagttcaagctggaggactacatggacggcctggccatcagaagcaagcccctgagaaagaccgtgaagtacgccctgatcagcgcccagagatgcatgatctgccagggcgacatcgccagatacagagagcaggccagcgacaccgccaactacggcaaggccagaagctggtacctgaaggcccagcacatcgcccccaagaacggcagaccctacaaccagctggccctgctggccgtgtacaccagaagaaagctggacgccgtgtactactacatgagaagcctggccgccagcaaccccatcctgaccgccaaggagagcctgatgagcctgttcgaggagaccaagagaaaggccgagcagatggagaagaagcagcacgaggagttcgacctgagccccgaccagtggagaaagggcaagaagagcaccttcagacacgtgggcgacgacaccaccagactggagatctggatccaccccagccaccccagaagcagccagggcaccgagagcggcaaggacagcgagcaggagaacggcctgggcagcctgagccccagcgacctgaacaagagattcatcctgagcttcctgcacgcccacggcaagctgttcaccagaatcggcatggagaccttccccgccgtggccgagaaggtgctgaaggagttccaggtgctgctgcagcacagccccagccccatcggcagcaccagaatgctgcagctgatgaccatcaacatgttcgccgtgcacaacagccagctgaaggactgcttcagcgaggagtgcagaagcgtgatccaggagcaggccgccgccctgggcctggccatgttcagcctgctggtgagaagatgcacctgcctgctgaaggagagcgccaaggcccagctgagcagccccgaggaccaggacgaccaggacgacatcaaggtgagcagcttcgtgcccgacctgaaggagctgctgcccagcgtgaaggtgtggagcgactggatgctgggctaccccgacacctggaaccccccccccaccagcctggacctgcccagccacgtggccgtggacgtgtggagcaccctggccgacttctgcaacatcctgaccgccgtgaaccagagcgaggtgcccctgtacaaggaccccgacgacgacctgaccctgctgatcctggaggaggacagactgctgagcggcttcgtgcccctgctggccgccccccaggacccctgctacgtggagaagaccagcgacaaggtgatcgccgccgactgcaagagagtgaccgtgctgaagtacttcctggaggccctgtgcggccaggaggagcccctgctggccttcaagggcggcaagtacgtgagcgtggcccccgtgcccgacaccatgggcaaggagatgggcagccaggagggcaccagactggaggacgaggaggaggacgtggtgatcgaggacttcgaggaggacagcgaggccgagggcagcggcggcgaggacgacatcagagagctgagagccaagaagctggccctggccagaaagatcgccgagcagcagagaagacaggagaagatccaggccgtgctggaggaccacagccagatgagacagatggagctggagatcagacccctgttcctggtgcccgacaccaacggcttcatcgaccacctggccagcctggccagactgctggagagcagaaagtacatcctggtggtgcccctgatcgtgatcaacgagctggacggcctggccaagggccaggagaccgaccacagagccggcggctacgccagagtggtgcaggagaaggccagaaagagcatcgagttcctggagcagagattcgagagcagagacagctgcctgagagccctgaccagcagaggcaacgagctggagagcatcgccttcagaagcgaggacatcaccggccagctgggcaacaacgacgacctgatcctgagctgctgcctgcactactgcaaggacaaggccaaggacttcatgcccgccagcaaggaggagcccatcagactgctgagagaggtggtgctgctgaccgacgacagaaacctgagagtgaaggccctgaccagaaacgtgcccgtgagagacatccccgccttcctgacctgggcccaggtgggctag

SEQ ID NO: 193866 - DNA, 4167 bp, Artificial Sequence
  derived and/or modified sequence
atgaaggagctgaaggaggccagacccagaaaggacaacagaagacccgacctggagatctacaagcccggcctgagcagactgagaaacaagcccaagatcaaggagccccccggcagcgaggagttcaaggacgagatcgtgaacgacagagactgcagcgccgtggagaacggcacccagcccgtgaaggacgtgtgcaaggagctgaacaaccaggagcagaacggccccatcgaccccgagaacaacagaggccaggagagcttccccagaaccgccggccaggaggacagaagcctgaagatcatcaagagaaccaagaagcccgacctgcagatctaccagcccggcagaagactgcagaccgtgagcaaggagagcgccagcagagtggaggaggaggaggtgctgaaccaggtggagcagctgagagtggaggaggacgagtgcagaggcaacgtggccaaggaggaggtggccaacaagcccgacagagccgagatcgagaagagccccggcggcggcagagtgggcgccgccaagggcgagaagggcaagagaatgggcaagggcgagggcgtgagagagacccacgacgaccccgccagaggcagacccggcagcgccaagagatacagcagaagcgacaagagaagaaacagatacagaaccagaagcaccagcagcgccggcagcaacaacagcgccgagggcgccggcctgaccgacaacggctgcagaagaagaagacaggacagaaccaaggagagacccagactgaagaagcaggtgagcgtgagcagcaccgacagcctggacgaggacagaatcgacgagcccgacggcctgggccccagaagaagcagcgagagaaagagacacctggagagaaactggagcggcagaggcgagggcgagcagaagaacagcgccaaggagtacagaggcaccctgagagtgaccttcgacgccgaggccatgaacaaggagagccccatggtgagaagcgccagagacgacatggacagaggcaagcccgacaagggcctgagcagcggcggcaagggcagcgagaagcaggagagcaagaaccccaagcaggagctgagaggcagaggcagaggcatcctgatcctgcccgcccacaccaccctgagcgtgaacagcgccggcagccccgagagcgcccccctgggccccagactgctgttcggcagcggcagcaagggcagcagaagctggggcagaggcggcaccaccagaagactgtgggaccccaacaaccccgaccagaagcccgccctgaagacccagaccccccagctgcacttcctggacaccgacgacgaggtgagccccaccagctggggcgacagcagacaggcccaggccagctactacaagttccagaacagcgacaacccctactactaccccagaacccccggccccgccagccagtacccctacaccggctacaaccccctgcagtaccccgtgggccccaccaacggcgtgtaccccggcccctactaccccggctaccccacccccagcggccagtacgtgtgcagccccctgcccaccagcaccatgagccccgaggaggtggagcagcacatgagaaacctgcagcagcaggagctgcacagactgctgagagtggccgacaaccaggagctgcagctgagcaacctgctgagcagagacagaatcagccccgagggcctggagaagatggcccagctgagagccgagctgctgcagctgtacgagagatgcatcctgctggacatcgagttcagcgacaaccagaacgtggaccagatcctgtggaagaacgccttctaccaggtgatcgagaagttcagacagctggtgaaggaccccaacgtggagaaccccgagcagatcagaaacagactgctggagctgctggacgagggcagcgacttcttcgacagcctgctgcagaagctgcaggtgacctacaagttcaagctggaggactacatggacggcctggccatcagaagcaagcccctgagaaagaccgtgaagtacgccctgatcagcgcccagagatgcatgatctgccagggcgacatcgccagatacagagagcaggccagcgacaccgccaactacggcaaggccagaagctggtacctgaaggcccagcacatcgcccccaagaacggcagaccctacaaccagctggccctgctggccgtgtacaccagaagaaagctggacgccgtgtactactacatgagaagcctggccgccagcaaccccatcctgaccgccaaggagagcctgatgagcctgttcgaggagaccaagagaaaggccgagcagatggagaagaagcagcacgaggagttcgacctgagccccgaccagtggagaaagggcaagaagagcaccttcagacacgtgggcgacgacaccaccagactggagatctggatccaccccagccaccccagaagcagccagggcaccgagagcggcaaggacagcgagcaggagaacggcctgggcagcctgagccccagcgacctgaacaagagattcatcctgagcttcctgcacgcccacggcaagctgttcaccagaatcggcatggagaccttccccgccgtggccgagaaggtgctgaaggagttccaggtgctgctgcagcacagccccagccccatcggcagcaccagaatgctgcagctgatgaccatcaacatgttcgccgtgcacaacagccagctgaaggactgcttcagcgaggagtgcagaagcgtgatccaggagcaggccgccgccctgggcctggccatgttcagcctgctggtgagaagatgcacctgcctgctgaaggagagcgccaaggcccagctgagcagccccgaggaccaggacgaccaggacgacatcaaggtgagcagcttcgtgcccgacctgaaggagctgctgcccagcgtgaaggtgtggagcgactggatgctgggctaccccgacacctggaaccccccccccaccagcctggacctgcccagccacgtggccgtggacgtgtggagcaccctggccgacttctgcaacatcctgaccgccgtgaaccagagcgaggtgcccctgtacaaggaccccgacgacgacctgaccctgctgatcctggaggaggacagactgctgagcggcttcgtgcccctgctggccgccccccaggacccctgctacgtggagaagaccagcgacaaggtgatcgccgccgactgcaagagagtgaccgtgctgaagtacttcctggaggccctgtgcggccaggaggagcccctgctggccttcaagggcggcaagtacgtgagcgtggcccccgtgcccgacaccatgggcaaggagatgggcagccaggagggcaccagactggaggacgaggaggaggacgtggtgatcgaggacttcgaggaggacagcgaggccgagggcagcggcggcgaggacgacatcagagagctgagagccaagaagctggccctggccagaaagatcgccgagcagcagagaagacaggagaagatccaggccgtgctggaggaccacagccagatgagacagatggagctggagatcagacccctgttcctggtgcccgacaccaacggcttcatcgaccacctggccagcctggccagactgctggagagcagaaagtacatcctggtggtgcccctgatcgtgatcaacgagctggacggcctggccaagggccaggagaccgaccacagagccggcggctacgccagagtggtgcaggagaaggccagaaagagcatcgagttcctggagcagagattcgagagcagagacagctgcctgagagccctgaccagcagaggcaacgagctggagagcatcgccttcagaagcgaggacatcaccggccagctgggcaacaacgacgacctgatcctgagctgctgcctgcactactgcaaggacaaggccaaggacttcatgcccgccagcaaggaggagcccatcagactgctgagagaggtggtgctgctgaccgacgacagaaacctgagagtgaaggccctgaccagaaacgtgcccgtgagagacatccccgccttcctgacctgggcccaggtgggctag

SEQ ID NO: 193867 - DNA, 4260 bp, Artificial Sequence
  derived and/or modified sequence
atggccgagggactggagcgggttcgaattagtgcttccgaattgcgtggcatccttgcaactttagctccccaggctggaagccgggaaaacatgaaggaactcaaagaagcccgcccacgcaaagataacaggaggcccgaccttgagatatacaagccaggattgtcccgtcttcgaaataagccaaagatcaaggagcctccagggtctgaagaattcaaagatgagattgtcaatgaccgtgactgtagcgctgtggagaacggtactcagcctgtgaaagacgtttgcaaggagttaaataatcaggagcagaatgggccaatcgatccagagaacaatcgcggccaagagagtttcccacggacagccggccaggaggacagatccctgaagataattaagcgaactaagaagcccgacttacagatttatcagccaggccggcggctgcagacagtgagtaaggaatccgcttccagggtcgaagaggaggaggtgctcaatcaagttgaacaactgagagtcgaagaggatgagtgcagagggaatgtcgccaaggaagaggtcgctaataagccagaccgagcagaaatagagaaatcacccggtgggggccgcgtcggtgccgccaaaggagagaagggaaagcggatgggcaagggagagggggttcgtgaaacccatgatgatccagctcgcgggcggccaggctccgctaaaaggtactctaggtctgacaaaagacgcaaccggtaccggacccgctctactagtagtgccggtagcaataacagcgccgaaggagcaggactgaccgacaatggatgtcggcgacgtcggcaggatagaactaaagaacgcccaagacttaagaagcaggtgtccgtctcctccacagacagcctggatgaagatagaatcgatgaaccagatggactgggaccgcggcgcagctctgaaagaaagcgccatctggaacgcaattggtccggcaggggcgagggcgagcagaaaaactctgccaaggaataccgtgggacattacgcgtcacatttgatgccgaggccatgaacaaagagtctccaatggtccgctcggctagagatgacatggaccgggggaagccggataaaggcctgagtagtggcggtaaggggtccgagaagcaagagtccaagaaccccaaacaggagctgcgaggcaggggacgagggatcctgattcttcccgcccacactaccctctctgtaaattctgccggaagccctgagtcagctccgctaggcccccgcctgctctttggtagcgggagcaaaggaagtcgttcctggggccgtggaggaacaacaaggaggctgtgggatcccaataatccagatcagaaacctgctttgaaaacccagaccccacagctgcacttcttagataccgacgatgaagttagccccacctcttggggggactcgcggcaggctcaggcctcatactacaaatttcagaatagtgataacccatattactatcctagaacccccggtccagccagccagtacccttacactgggtacaatcccctccaataccccgtcggcccaaccaacggcgtgtacccaggcccctactatcctggctatccgactcctagtggccaatacgtctgctctccccttccaaccagcactatgagtcctgaagaagtggaacagcacatgaggaacctgcagcagcaggagctgcacagactattgcgcgtggccgataaccaggagctccagctatccaacctcctgtctagagatcgcatctcccccgaagggctggaaaagatggcccagctgcgggctgagttactgcagctgtacgaaaggtgtatactgctggacatcgaattctccgataatcagaatgtggaccagatcctgtggaaaaatgcattctaccaggtgatagaaaagtttaggcagttggtgaaggatccaaatgtcgaaaacccagagcagatcaggaaccgtctcttggaactgctcgatgaggggtctgacttcttcgacagccttctgcagaagctccaggtgacttacaaatttaagctggaggattacatggatggtctggctattaggtctaagccactccgaaaaacggtcaaatacgccctgattagcgctcagagatgcatgatctgccagggcgacattgccagatatagagagcaggcctcagatactgccaactatggaaaagcaagatcctggtacctgaaagctcagcatattgctcccaaaaacgggcgtccatacaaccagctggcgctccttgccgtgtatacccgccgaaaacttgatgcggtgtattactacatgcggagcctggcggcctccaaccctatccttaccgcgaaggaaagcctcatgtccttgttcgaggagacgaagcggaaggcagaacaaatggagaagaagcagcatgaagaattcgatctcagccctgatcaatggcgtaaggggaaaaaaagcaccttcagacacgtgggagatgatactactcgactggagatctggattcatccttcgcatcctcggtctagccaggggacagagtccggcaaggattctgaacaggagaacggattgggctcattgagtccttccgacttaaacaagaggttcatcctgagttttctgcacgcccacggcaagcttttcactcgaatcggaatggaaacctttcccgccgtggctgagaaagtactgaaagagttccaggtgctattgcagcattccccatctcctatcgggagcacccgcatgttgcagttgatgacaatcaatatgttcgccgtgcacaactcccagttaaaagactgtttctccgaggagtgcaggagtgtcatccaggagcaagcagctgcattggggctggctatgttttctttgttggtgaggaggtgcacttgtctgcttaaagaatccgccaaggctcagctctcctcccccgaagaccaagatgatcaggatgacatcaaagttagctcattcgtcccagacttgaaagagctcttgccctcggtgaaggtgtggtcagattggatgctcggttacccggatacgtggaatcccccccccacatccctcgacttgccttctcacgtggctgtggacgtctggagcacccttgcagacttctgcaacattttgacagctgtgaatcagagcgaagtccctctctacaaagaccccgacgatgacctcacactcctaatcctcgaggaggaccgcctcctgtctgggttcgtgcccctcctcgctgcgcctcaggacccttgctacgtggaaaagacaagtgataaggtgatcgccgccgattgtaaacgggtcacggtgctcaagtattttttagaagctctatgtgggcaagaagagcctcttttggcatttaagggcggaaagtacgtttctgtagcccctgtgccggacacaatgggtaaggaaatggggtcacaagagggcacacgactggaagacgaggaagaggacgtggtgatcgaagactttgaggaagattctgaagcagagggcagtggtggcgaggatgacattagagagcttagggcaaaaaaattagcgcttgctcgcaaaattgccgaacagcagcgaagacaggaaaagatccaagccgttctggaagaccattctcagatgcgtcagatggaactggaaattcgaccgctgttcctggtgcccgacaccaacggtttcattgatcacctcgcaagcctggcacgtcttctcgagtctcggaagtatatccttgtggtaccattaattgtgataaacgaacttgatggattggccaagggccaggaaaccgaccacagagccggcggctatgctcgcgtggtccaggagaaggcccgtaaatctatagagtttctcgaacaaaggtttgaatcccgcgactcctgcctgcgcgccctaacatccaggggtaatgaattggagtccatagcattcaggagcgaagacattaccggtcagttgggtaataacgacgaccttatactgagttgctgcttgcattattgtaaggataaagccaaggattttatgccagccagcaaagaggaaccgataaggctgctgcgcgaggtcgttctgctcaccgacgatagaaacctcagggtgaaagcattgactcgaaacgttcccgtgcgcgatatacctgcatttcttacatgggctcaggtcggatag

SEQ ID NO: 193868 - DNA, 4167 bp, Artificial Sequence
  derived and/or modified sequence
atgaaagagcttaaagaggctcggccccgaaaggataaccgacgacctgatctcgagatttacaaacccggcctaagtcgcttgaggaacaaacccaagattaaagagccgccaggcagcgaggaattcaaagacgaaatcgtcaacgaccgcgactgcagcgcggttgagaatggaacccagccagtcaaagatgtctgtaaggaattaaataaccaggagcagaacggaccaattgacccagagaataaccgcggccaggaaagctttcccagaactgcaggccaggaggacagaagtctgaaaataatcaagcgcacaaagaaaccggacctccaaatataccagcctggcaggaggctacagacagtaagcaaggagagcgccagccgcgtcgaagaagaagaagttctcaaccaggtggaacaactcagggttgaagaagatgagtgtcgggggaacgtggccaaagaggaggtcgcaaataagccagaccgcgccgagatcgaaaagtccccgggcggcggtcgggtgggggctgctaaaggagaaaaaggtaagcggatgggcaagggtgagggtgtccgcgagacacacgatgacccagccagagggcggccagggtctgccaagagatactcaagaagtgataagcgcaggaataggtataggacccgaagcacatctagtgccgggtctaacaatagtgctgaaggcgccgggctgacagacaacggatgccggcgccgccggcaagaccggactaaggagaggccacgactcaagaagcaggtctccgtgtcttcaactgacagtttagacgaggacagaattgacgagcctgacggcttgggaccaagaaggtcttccgagcggaagaggcatctcgaaagaaactggagcggcagaggtgagggggagcagaagaactccgctaaagagtaccgggggacgctgagggtgaccttcgacgcagaggcgatgaacaaggaaagtccaatggtgagatcagccagagacgatatggaccgtggaaaacctgacaagggtctgtcctccggcggcaaaggcagcgaaaagcaggagtcaaagaaccctaaacaggagcttcggggcaggggccgggggatcttgatcctacccgcccacacaactctctctgtgaactctgctggttcccctgagtccgcaccactcggcccccggttgttattcgggtcgggttctaaaggttcaagatcatggggcagagggggtactacgcgcaggctttgggaccccaataatccagaccagaagccggccctgaagacacagacccctcaacttcatttcctcgataccgacgatgaggtctctcctacatcttggggggatagtcggcaggcacaggcttcatattacaaatttcagaatagtgataacccctattactatccgaggaccccggggcctgcttcccaatatccttatactggctacaatccactccagtaccccgtcggacctacaaacggcgtctaccccggaccatactatcctgggtatcctaccccctcaggtcagtatgtgtgtagcccgttgcctacctctaccatgtcccctgaggaagtagagcagcacatgaggaacctccagcagcaggaactgcaccgcctgttgcgggtggctgataaccaggagttgcagctttccaacctcctgagccgagacagaattagcccggagggattggagaaaatggcgcaactacgggctgaactcttgcagctgtacgagagatgcatccttctagatatagaattttctgataaccagaacgtggatcagatcttgtggaagaacgccttttaccaggtgatcgagaaattcaggcagctcgtgaaagacccaaacgtcgagaacccagaacaaatccgcaacagactgctggagctgctggatgaaggtagtgatttttttgattccctgctgcagaagctccaggtgacttacaaattcaaactggaggactacatggatggcctggccatcagatcaaagccgctccggaaaacagtcaagtatgcactgatttccgctcaaaggtgcatgatatgtcaaggtgacatcgccagataccgagaacaagcgtctgatactgccaattatggtaaggcaaggagttggtacctaaaggcccagcacatcgcaccaaagaatggcaggccttacaaccagctggctctgttggctgtgtatacacgccgtaagctcgacgctgtgtattattatatgcggtcactggccgcatctaaccctatcttaaccgccaaagagtcgctgatgtccctcttcgaggaaacaaaacgcaaagccgagcagatggaaaaaaaacagcacgaggagttcgacctcagccccgaccagtggcgcaaagggaaaaagtcaacctttcgtcatgttggggacgatacaacccgcctggaaatttggattcaccccagccacccccggagtagccaaggcaccgaatctggtaaagactccgaacaagagaacgggttgggctcgctctcgccaagtgacttgaacaaacggttcatcctgagcttcttgcatgcccacggaaagttattcacgcggattggtatggaaacattcccggccgtggctgagaaagtgttaaaagaattccaagtgttgttgcagcactctccttcccctattggcagcacacggatgctacagctgatgacaattaatatgtttgccgtgcacaactcacaactgaaggactgcttcagcgaagagtgtaggtccgtgattcaggaacaggccgcagcccttggtttagcaatgtttagcctcctggtgagacgatgcacttgcctcctaaaggagagcgccaaagcccagcttagctcacctgaggaccaggacgaccaagacgacataaaggtgtcctccttcgttcctgatctgaaggagttgttacccagcgtcaaggtgtggtccgattggatgttgggctaccccgatacttggaaccccccccctaccagcctcgacctgccttcccatgtggctgtcgatgtctggtctaccttggcggacttttgcaatattcttactgccgtgaatcagtcagaagtgccactctacaaggacccggacgatgacctgacgctgctaattctggaggaagaccggttattatcaggcttcgtccctctcctggccgctcctcaagatccctgttacgttgaaaaaaccagcgacaaagtaattgctgctgactgtaaaagagtgacagtgctgaagtatttcctggaggccctgtgcggccaggaagaacctctcctcgctttcaaaggtggtaaatacgtttctgttgcccccgtgccagacaccatggggaaagaaatgggtagccaagaaggaacccgtctggaagacgaagaagaggacgtcgtgatcgaggattttgaagaggactccgaagcagaagggtctggcggagaggatgacatccgggagttacgggcaaagaagctagctctcgcccgaaaaatcgcagagcagcagcgaaggcaggaaaagatccaggctgtcctggaagatcattcacagatgaggcagatggaactcgagatccgcccccttttcctcgttcctgacacgaatgggtttatagatcatctcgcttccctagcccgccttttggagtcacggaagtatatcttggttgttccgttgatagtcattaatgaactggacggactggccaaggggcaggagaccgatcacagggcgggcggatatgcacgcgtggtgcaggagaaagctcggaaatcaatcgaattcctggagcagcgattcgaatccagggactcatgtctgagagccttaacgtctcgggggaatgaactggaatctatcgccttccggtccgaggatataaccggccagctcggcaataacgatgacctcattttgtcctgctgtctccattactgtaaggataaagcaaaggactttatgcctgctagcaaggaggagcctatcagacttttgagggaagtggtcctgttaaccgatgatcggaatttacgcgttaaagccctcaccaggaatgttccagttcgtgatattccggcctttctgacctgggcgcaggtcggctag

SEQ ID NO: 193869 - DNA, 4260 bp, Artificial Sequence
  derived and/or modified sequence
atggccgagggcctggagcgggtgcgcatcagcgccagcgagctgcggggcatcctggccaccctggccccccaggccggcagccgggagaacatgaaggagctgaaggaggcccggcccaggaaggacaacagaagaccagacctggagatctacaagccaggcctgagccggctgaggaacaagcccaagatcaaggagcccccaggcagcgaggagttcaaggatgagatcgtgaatgaccgggactgcagcgctgtggagaatggcacccagcctgtgaaggatgtgtgcaaggagctgaacaaccaggagcagaatggccccatcgaccctgagaacaacagaggccaggagagcttccccaggacagctggccaggaggacaggagcctgaagatcatcaagaggaccaagaagccagacctgcagatctaccagcccggccggcggctgcagacagtgtccaaggagagcgccagccgggtggaggaggaggaggtgctgaaccaggtggagcagctgcgggtggaggaggatgaatgtagaggaaatgtggccaaggaggaggtggccaacaagccagacagagctgagattgagaagagccctgggggcggccgggtgggcgccgccaagggggagaagggcaagaggatgggcaagggggagggcgtgcgggagacccatgatgatcctgcccggggccggcccggcagcgccaagcgctacagcagaagtgacaagagaagaaaccgctaccgcaccaggagcaccagcagcgctggcagcaacaacagcgctgagggcgccggcctgacagacaatggctgcagaagaagacggcaggacaggaccaaggagcggccccggctgaagaagcaggtgtctgtgagcagcacagacagcctggatgaggacagaattgatgagccagatggcctgggcccccggcgcagcagcgagaggaagaggcacctggagaggaactggagcggccgcggggagggggagcagaagaacagcgccaaggagtaccggggcaccctgcgggtgacctttgatgctgaggccatgaacaaggagagccccatggtgcgcagcgccagagatgacatggaccggggcaagccagacaagggcctgagcagcggcggcaaaggaagtgagaagcaggagagcaagaaccccaagcaggagctgcggggccggggccggggcatcctgatcctgcctgcccacaccaccctgtctgtgaacagcgctggcagccctgagagcgcccccctgggcccccggctgctgtttggcagcggcagcaagggcagccgctcctggggccggggcggcaccacccggcggctgtgggaccccaacaacccagaccagaagccagccctgaagacccagaccccccagctgcacttcctggacacagatgatgaggtgagccccacctcctggggagacagccggcaggcccaggccagctactacaagttccagaacagcgacaacccctactactaccccaggaccccaggccctgccagccagtacccctacacaggctacaaccccctgcagtaccctgtgggccccaccaacggggtgtacccaggcccctactacccaggctaccccaccccatctggccagtatgtgtgcagccccctgcccaccagcaccatgagccctgaggaggtggagcagcacatgaggaacctgcagcagcaggagctgcaccggctgctgcgggtggccgacaaccaggagctgcagctgagcaacctgctgagccgggaccgcatcagccctgagggcctggagaagatggcccagctgcgggcagagctgctgcagctgtatgagcgctgcatcctgctggacatcgagttcagtgacaaccagaatgtggaccagatcctgtggaagaatgccttctaccaggtgattgagaagttccggcagctggtgaaggaccccaacgtggagaaccctgagcagatccggaaccggctgctggagctgctggatgagggcagtgacttctttgacagcctgctgcagaagctgcaggtgacctacaagttcaagctggaggactacatggatggcctggccatccgcagcaagcccctgaggaagacagtgaagtatgccctgatcagcgcccagcgctgcatgatctgccagggcgacatcgcccgctaccgggagcaggccagtgacacagccaactacggcaaggcccgctcctggtacctgaaggcccagcacatcgcccccaagaatggccggccctacaaccagctggccctgctggccgtgtacaccaggaggaagctggatgctgtgtactactacatgaggagcctggccgccagcaaccccatcctgacagccaaggagagcctgatgagcctgtttgaggagaccaagaggaaggccgagcagatggagaagaagcagcacgaggagtttgacctgagcccagaccagtggaggaagggcaagaagagcaccttcagacatgtgggagatgacaccacccggctggagatctggatccaccccagccaccccaggagcagccagggcacagagagcggcaaggacagcgagcaggagaatggcctgggcagcctgagccccagcgacctgaacaagcgcttcatcctgtccttcctgcacgcccacggcaagctgttcaccagaattggcatggagaccttccctgctgtggccgagaaggtgctgaaggagttccaggtgctgctgcagcacagccccagccccatcggcagcaccaggatgctgcagctgatgaccatcaacatgtttgctgtgcacaacagccagctgaaggactgcttcagcgaggagtgccgcagcgtcatccaggagcaggccgccgccctgggcctggccatgttcagcctgctggtgcggcgctgcacctgcctgctgaaggagagcgccaaggcccagctgagcagccctgaggaccaggatgaccaggatgacatcaaggtgagcagctttgtgcctgacctgaaggagctgctgcccagcgtgaaggtgtggagcgactggatgctgggctacccagacacctggaaccccccacccaccagcctggacctgcccagccacgtggccgtggatgtgtggagcaccctggccgacttctgcaacatcctgacagctgtgaaccagagcgaggtgcccctgtacaaggaccctgatgatgacctgaccctgctgatcctggaggaggaccggctgctgagcggctttgtgcccctgctggccgccccccaggacccctgctacgtggagaagaccagtgacaaggtgattgctgctgactgcaagagggtgacagtgctgaagtacttcctggaggccctgtgtggccaggaggagcccctgctggccttcaagggcggcaagtatgtgtctgtggcccctgtgcctgacaccatgggcaaggagatgggcagccaggagggcacccggctggaggatgaggaggaggatgtggtgattgaagattttgaagaagattctgaggccgagggcagcggaggagaagatgacatccgggagctgcgggccaagaagctggccctggccaggaagattgctgagcagcagaggcggcaggagaagatccaggccgtgctggaggaccacagccagatgaggcagatggagctggagatccggcccctcttcctggtgcctgacaccaacggcttcatcgaccacctggccagcctggcccggctgctggagagcaggaagtacatcctggtggtgcccctcatcgtcatcaatgagctggatggcctggccaagggccaggagacagaccaccgggccggcggctacgcccgggtggtgcaggagaaggccaggaagagcattgagttcctggagcagagatttgagagccgggacagctgcctgcgggccctgaccagcagaggaaatgagctggagagcatcgccttccgctctgaggacatcaccggccagctgggcaacaatgatgacctgatcctgagctgctgcctgcactactgcaaggacaaggccaaggacttcatgcctgccagcaaggaggagcccatccggctgctgcgggaggtggtgctgctgacagatgacaggaacctgcgggtgaaggccctgaccagaaatgtgcctgtgcgggacatcccagccttcctgacctgggcccaggtgggctag

SEQ ID NO: 193870 - DNA, 4167 bp, Artificial Sequence
  derived and/or modified sequence
atgaaggagctgaaggaggcccggcccaggaaggacaacagaagaccagacctggagatctacaagccaggcctgagccggctgaggaacaagcccaagatcaaggagcccccaggcagcgaggagttcaaggatgaaattgtgaatgaccgggactgcagcgctgtggagaatggcacccagcctgtgaaggatgtgtgcaaggagctgaacaaccaggagcagaatggccccattgatcctgagaacaacagaggccaggagagcttccccaggacagctggccaggaggacaggagcctgaagatcatcaagaggaccaagaagccagacctgcagatctaccagcctggaagaaggctgcagacagtgtccaaggagagcgccagccgggtggaggaggaggaggtgctgaaccaggtggagcagctgcgggtggaggaggatgagtgcagaggaaatgtggccaaggaggaggtggccaacaagccagacagagctgagattgagaagagccctgggggcggccgggtgggcgccgccaagggggagaagggcaagaggatgggcaaaggagagggcgtgcgggagacccatgatgatcctgcccggggccggcccggcagcgccaagcgctacagcagaagtgacaagagaagaaaccgctaccgcaccaggagcaccagcagcgctggcagcaacaacagcgctgagggcgccggcctgacagacaatggctgcagaagaagacggcaggacaggaccaaggagcggccccggctgaagaagcaggtgtctgtgagcagcacagacagcctggatgaagatagaattgatgagccagatggcctgggccccaggaggagcagcgagaggaagaggcacctggagaggaactggagcggccgcggggagggggagcagaagaacagcgccaaggagtaccggggcaccctgcgggtgacctttgatgctgaggccatgaacaaggagagccccatggtgcgcagcgccagagatgacatggaccggggcaagccagacaagggcctgagcagcggcggcaagggcagcgagaagcaggagagcaagaaccccaagcaggagctgcggggccggggccggggcatcctgatcctgcctgcccacaccaccctgtctgtgaacagcgctggcagccctgagagcgcccccctgggcccccggctgctgtttggaagtggcagcaagggcagccgctcctggggccggggcggcaccacccggcggctgtgggaccccaacaacccagaccagaagccagccctgaagacccagaccccccagctgcacttcctggacacagatgatgaggtgagccccacctcctggggagacagccggcaggcccaggccagctactacaagttccagaacagcgacaacccctactactaccccaggaccccaggccctgccagccagtacccctacacaggctacaaccccctgcagtaccctgtgggccccaccaatggagtgtacccaggcccctactacccaggctaccccacccccagcggccagtatgtgtgcagccccctgcccaccagcaccatgagccctgaggaggtggagcagcacatgaggaacctgcagcagcaggagctgcaccggctgctgcgggtggccgacaaccaggagctgcagctgagcaacctgctgagccgggaccgcatcagccctgagggcctggagaagatggcccagctgcgggcagagctgctgcagctgtatgagcgctgcatcctgctggacatcgagttcagtgacaaccagaatgtggaccagatcctgtggaagaatgccttctaccaggtgattgagaagttccggcagctggtgaaggaccccaacgtggagaaccctgagcagatccggaaccggctgctggagctgctggatgagggcagtgacttctttgacagcctgctgcagaagctgcaggtgacctacaagttcaagctggaggactacatggatggcctggccatccgcagcaagcccctgaggaagacagtgaagtatgccctgatcagcgcccagcgctgcatgatctgccagggcgacatcgcccgctaccgggagcaggccagtgacacagccaactacggcaaggcccgctcctggtacctgaaggcccagcacatcgcccccaagaatggccggccctacaaccagctggccctgctggccgtgtacaccaggaggaagctggatgctgtgtactactacatgaggagcctggccgccagcaaccccatcctgacagccaaggagagcctgatgagcctgtttgaggagaccaagaggaaggccgagcagatggagaagaagcagcacgaggagtttgacctgagcccagaccagtggaggaagggcaagaagagcaccttccgccacgtgggagatgacaccacccggctggagatctggatccaccccagccaccccaggagcagccagggcacagaaagtggcaaggacagcgagcaggagaatggcctgggcagcctgagccccagcgacctgaacaagcgcttcatcctgtccttcctgcacgcccacggcaagctgttcacccgcatcggcatggagaccttccctgctgtggccgagaaggtgctgaaggagttccaggtgctgctgcagcacagccccagccccatcggcagcaccaggatgctgcagctgatgaccatcaacatgtttgctgtgcacaacagccagctgaaggactgcttctctgaagaatgtcgcagcgtcatccaggagcaggccgccgccctgggcctggccatgttcagcctgctggtgcggcgctgcacctgcctgctgaaggagagcgccaaggcccagctgagcagccctgaggaccaggatgaccaggatgacatcaaggtgtcctcctttgtgcctgacctgaaggagctgctgcccagcgtgaaggtgtggagcgactggatgctgggctacccagacacctggaaccccccacccaccagcctggacctgcccagccacgtggccgtggatgtgtggagcaccctggccgacttctgcaacatcctgacagctgtgaaccagagcgaggtgcccctgtacaaggaccctgatgatgacctgaccctgctgatcctggaggaggaccggctgctgagcggctttgtgcccctgctggccgccccccaggacccctgctacgtggagaagaccagtgacaaggtgattgctgctgactgcaagagggtgacagtgctgaagtacttcctggaggccctgtgtggccaggaggagcccctgctggccttcaagggcggcaagtatgtgtctgtggcccctgtgcctgacaccatgggcaaggagatgggcagccaggagggcacccggctggaggatgaggaggaggatgtggtgattgaggactttgaggaggacagcgaggccgagggcagcggcggggaggatgacatccgggagctgcgggccaagaagctggccctggccaggaagattgctgagcagcagaggcggcaggagaagatccaggccgtgctggaggaccacagccagatgaggcagatggagctggagatccggcccctcttcctggtgcctgacaccaacggcttcatcgaccacctggccagcctggcccggctgctggagagcaggaagtacatcctggtggtgcccctgattgtcatcaatgagctggatggcctggccaagggccaggagacagaccacagagctgggggctacgcccgggtggtgcaggagaaggccaggaagagcattgagttcctggagcagagatttgagagccgggacagctgcctgcgggccctgaccagcagaggaaatgagctggagagcatcgccttccgctctgaggacatcaccggccagctgggcaacaatgatgacctgatcctgagctgctgcctgcactactgcaaggacaaggccaaggacttcatgcctgccagcaaggaggagcccatccggctgctgcgggaggtggtgctgctgacagatgacaggaacctgcgggtgaaggccctgaccagaaatgtgcctgtgcgggacatcccagccttcctgacctgggcccaggtgggctag

SEQ ID NO: 193871 - DNA, 4260 bp, Artificial Sequence
  derived and/or modified sequence
atggccgagggcctggagcgggtgcggatcagcgccagcgagctgcgcgggattctagcgaccttagcgcctcaggctgggtcacgggagaatatgaaagaacttaaagaggctcgccctaggaaagacaacagacgcccagacctggaaatctataagcccggcttaagccgcctaagaaataaacctaaaatcaaggaaccccctggtagtgaggaattcaaggatgagattgtaaatgatcgcgattgtagcgccgttgagaatggaacccaaccagtgaaagatgtatgcaaggagctgaataaccaggagcaaaatggccccatcgaccccgagaataaccgagggcaggagtctttcccgcggaccgcagggcaggaagatcgtagcctgaaaattatcaaaagaactaagaagccggatctgcagatatatcagcccggtcgcaggctccaaaccgttagcaaagagagtgccagccgcgtcgaagaagaggaggtacttaaccaggttgaacagctgcgcgtcgaggaggacgaatgtcgcggcaatgtggcgaaagaggaagtggcaaataagccagaccgtgccgagatcgagaagtctccaggcggaggacgggtgggcgccgcaaaaggtgaaaaggggaagcggatgggaaagggcgagggagtgcgagagactcacgatgatccggcccgcggcaggcccggcagtgccaaaagatattctagatctgataaaaggcggaaccgatacagaacgcgctccactagcagcgccggttccaacaactcagcggagggagctggactcacagataatggttgtcgcagacggaggcaggatcgaactaaggaaagacctagactgaagaaacaagtatccgtgagctcgacagacagccttgacgaagaccgaatcgatgagcctgatggcctgggcccgcggcggagctcagagcgtaagagacacctagagcgcaattggagtggtagaggcgagggggagcagaaaaattctgcaaaggaatatcgaggaacgcttagagtaaccttcgatgctgaggctatgaacaaggagagccctatggttagaagcgccagggatgatatggaccgcggcaaaccggataagggattaagcagcggtggtaaagggtctgagaagcaggagtcaaagaatccaaagcaggaactgagaggacgcggccgtggcatactgatccttccagcacacacgactttgtcagtgaactccgctggcagtcccgagtcagccccacttgggccaagactgttgtttggcagcggcagcaagggttccagaagttgggggcgcgggggcaccaccagaagactctgggatcccaataatcctgatcagaagcccgctctcaagacacagacacctcaactccatttccttgatactgatgacgaggtgagccctacttcttggggcgactcaagacaggcacaggctagctattataagttccagaacagcgacaatccctattattatcccaggactcccgggcccgcgtcacaatatccttacaccggatataaccctcttcagtaccctgtgggacctaccaatggcgtgtaccccggaccatattaccctgggtatcccactcccagcgggcaatacgtttgtagccccctgcccacgagcacaatgtcacccgaggaggtggagcagcatatgaggaatctccaacaacaggaactgcatcgccttctgcgcgtggctgacaatcaggagctgcaactttcgaatcttcttagtcgcgatcgcatctccccagaaggtctggagaagatggctcagcttcgtgcagaactcctgcagctgtacgagaggtgtatcttgctcgatatcgagttctctgacaatcaaaacgtcgaccaaattctgtggaaaaacgcattctatcaggtcattgaaaaattcagacagctggttaaggatccaaatgtggaaaatccggaacagatcaggaatcgcctgctggagttgctagatgagggctctgatttttttgattccctgctgcaaaaactgcaggtcacatataagttcaagcttgaagactacatggatggcctggcaatcaggtctaaaccgctgcggaagaccgtaaagtatgcactgatttccgcccaacggtgcatgatatgccaaggcgacatcgccaggtatcgagagcaagcatccgatactgcaaactatggtaaggccagaagttggtacctgaaggctcagcacatcgcccccaagaatggccggccttacaatcagttagcgcttctggcagtgtatacccgaagaaagctggatgctgtgtactactacatgcggtccttagccgcttcaaatccaattttgacagccaaggaatccttaatgtcacttttcgaagagactaaacgtaaggccgaacagatggagaaaaagcagcatgaggagttcgacttgtcaccagatcaatggcgtaagggcaagaagtcaacatttcgccatgtaggagatgacactacccgactcgaaatctggattcatccatcacatccgaggagtagccagggaacggaatcgggaaaagactcggagcaggagaacggcttaggctccctgtcaccatccgacctgaacaagcggttcatcctgagctttttgcatgcccacggcaagctctttacccgcatagggatggagacgtttcctgccgtcgcagaaaaagtgttaaaggagtttcaggtgctcttgcaacactccccatcgcctatcggctctactagaatgctacaactaatgacgatcaacatgttcgctgtgcacaatagtcagttaaaggactgcttcagtgaagagtgccggagtgtaatccaggagcaggcagctgctctgggattagctatgttctcattactggtacggcgttgcacctgcctcctaaaggagagcgctaaggctcagctgtcttctcctgaggatcaggatgaccaagatgatattaaagtgagcagtttcgtgccagacttgaaagagctcctaccttccgtgaaagtgtggtctgattggatgctgggctatccagatacttggaacccccccccaacaagtctcgaccttcctagtcatgttgcggtcgatgtatggtctacactcgctgacttctgcaacattctgacagcggttaatcaaagcgaagttcccttgtacaaggatcctgatgacgacctcaccctcctgatcctggaagaggatcgactgttgagtggatttgttccattgctcgccgccccacaagatccttgttacgtagaaaagacctctgacaaggtaattgctgcggattgcaaaagagtaactgtgctaaaatactttctcgaggccctgtgcggccaggaggagcccctcctggctttcaaaggagggaagtacgtcagcgttgctcccgtccccgacactatgggaaaagagatgggctctcaggaaggcactaggctcgaggacgaagaggaagatgtcgttattgaggattttgaggaggatagtgaggcagagggttccggcggcgaggatgacataagggaattacgtgctaaaaagctcgccctcgcccgcaaaattgctgaacagcaacgccgtcaggagaagattcaggcagtgctggaagaccactcgcagatgcggcaaatggagctggagatcagacctctgtttctggtcccagacacaaatggctttattgatcacctggcctcactggctcgcctgctagaaagcagaaagtatattttggtggtacccctcatagtgataaatgagctggatggcctcgctaaaggccaggaaacggatcaccgggctggcggctacgctagagtggtgcaggaaaaagccaggaaatctatcgagttcctggaacagcggttcgagtcgagagactcctgtctgcgggcccttacatcgcgcggcaacgaactagagtccatcgcttttcgttctgaggatattactggacagctgggtaataacgatgatctcattctatcttgttgcctgcattactgcaaggacaaagcgaaggacttcatgccagcatcaaaggaggagcctatacggctgttaagagaagtggtccttctcacagacgatcgtaacctgcgcgtgaaggcgttgacgagaaacgtgcccgttcgcgacatcccggcttttcttacatgggctcaggtaggctag

SEQ ID NO: 193872 - DNA, 4167 bp, Artificial Sequence
  derived and/or modified sequence
atgaaggagctgaaggaggcccggccccggaaggacaaccggcggccggatctcgaaatctacaaacccggtctgagtcggctccggaataaacccaagatcaaggagccccccggctccgaggagttcaaagacgagatcgtcaatgacagagattgtagtgccgtggaaaatgggacacagcccgttaaagatgtctgtaaggagttaaataaccaagagcagaatggccctatcgatccagagaataacaggggacaggagtctttcccaagaacagcaggtcaggaagatcgttccctcaagatcattaagcgcacgaaaaaacccgaccttcagatttatcagccggggagaagattgcaaactgtgagcaaggagtccgcctctagagtcgaagaggaagaggtgttaaaccaagtcgagcaattgcgagtagaggaagacgagtgtagggggaatgtggcaaaggaggaagtagccaataaaccggatagggcggagatcgagaaatctcctggcgggggcagggtgggggctgctaagggagagaaggggaagagaatgggtaagggggagggggtgagagagacacacgacgaccccgctaggggtagacccggttcagcaaagaggtattcgaggagcgacaagcgcaggaaccgctatcgcactcggagtacttcatcagcaggaagtaacaactctgccgagggagcaggactgacagacaacggctgtcgtagaagacggcaagatcgcaccaaggaacgccctagactgaaaaagcaggtgtcggtctcttccactgatagcctggatgaagaccgcattgatgagccagatgggctcgggccgagaaggagcagtgagcgtaagaggcacctggaaagaaactggagtggccggggggagggagaacagaagaattcagcgaaggaatatcgtggaacccttagggttactttcgacgcagaggcgatgaataaggagagcccgatggtacgtagcgcacgcgatgatatggaccggggaaaacctgataaagggctgagttcaggtggaaaagggtcagaaaagcaagagtctaaaaaccctaagcaagaacttagaggaaggggccgtggcattctgatccttccagcgcacacaaccctctctgtgaatagcgctggctcccctgagtctgcccctctgggaccccggcttctgtttggatctggctcaaaagggagccgttcatggggcagagggggaacaactcgacgtctgtgggatcctaataatcccgaccagaagcctgcattgaagactcaaacccctcagctgcacttcctggatacagacgacgaagtgtcgccaacttcctggggcgacagccgccaggctcaggcctcgtattacaaattccaaaactccgataatccctattactaccctaggactccaggccctgccagtcagtacccgtacacaggctacaaccctcttcagtatcctgtaggaccaaccaacggcgtgtaccccggcccttactatccagggtacccaaccccgtccgggcagtacgtgtgttctccgctgccaacatcaaccatgagcccggaggaagtggaacaacacatgcgcaacttgcagcaacaggagctgcatagactgctccgggtagccgataatcaggagcttcagctgtctaatctcttgagtcgggaccgcatcagccccgaaggacttgagaaaatggctcaactgagggctgaactgctgcaattatacgagagatgcattctgctggatatagagttctcagacaaccagaatgtggatcagatcctgtggaaaaacgccttttatcaagtcatcgaaaagtttcgtcagttggtgaaggaccccaacgtggaaaaccccgagcagattaggaaccgcttacttgaactgcttgacgaaggaagcgacttttttgatagcctactgcagaaactgcaggtgacctacaaattcaagctagaagactatatggacggtctggcaattcgctccaagccgctgcggaaaactgtgaaatatgccctgatcagcgctcagcgctgtatgatctgccaaggcgatatcgcacgttaccgcgagcaggcatctgatactgctaattacggcaaggctagaagttggtacttgaaggcgcagcatatcgcacctaagaacggtagaccttacaatcagctggccttgctggctgtgtacactagacggaagcttgacgccgtctattactacatgagaagcctggctgcaagtaacccgatcctaactgcaaaggagagcctcatgagcctattcgaagagaccaagaggaaagcggaacagatggaaaaaaagcagcacgaagaatttgatctgagtccagatcaatggaggaagggcaaaaagtcgacattccgacacgtgggggatgatacgacccgactcgagatctggatccatccctcacacccacgtagtagccagggcaccgagagtggaaaagatagcgaacaggaaaatggtctggggagcctttccccgtctgatctgaacaagaggtttatcctcagcttcctgcacgctcacgggaagctgttcactaggattgggatggagaccttccccgccgtggctgagaaggtgctgaaagagttccaggtattgctgcaacactccccatcccccataggctctacaagaatgctgcagctgatgactatcaacatgttcgccgtgcataattctcagctgaaggactgtttttccgaagaatgccgctcggtgatccaggagcaagccgctgcacttggcctcgccatgttcagcttgttggttcgtaggtgcacgtgtctccttaaagagtcagctaaagcgcagttgagtagccctgaggatcaggacgaccaggatgatattaaagtctccagcttcgtgccagatctcaaggaactgttgccttctgtaaaggtctggagtgattggatgcttggctatcctgatacatggaaccctcctcccacttccctggaccttccgtctcatgtggcagttgatgtttggagtaccctggccgatttttgtaatattttaaccgcagtcaaccagtcggaggtgcccttatataaggaccctgacgatgatttaactttattgatcttggaagaagaccgcctcctcagtggatttgttcctctgctcgccgctccacaggatccttgctacgtagagaaaaccagtgacaaggttattgctgccgactgcaaacgggtcaccgtgcttaagtacttcctggaggctctatgcggacaggaagagcctttgctcgcatttaaaggcggcaaatacgtctcagtcgctcctgtgccagacacaatggggaaggaaatggggagccaggaaggcacccgcttggaggacgaagaggaggacgtggttattgaggatttcgaagaggacagcgaggccgaagggagcggaggcgaagacgatattcgcgagctccgagcgaaaaagctggctctcgcgcgaaagatcgccgagcaacagcgccgccaggaaaaaatccaagccgtgctggaggatcacagtcagatgaggcagatggagctggaaatcagacctctcttcctggtgcctgataccaatggtttcatagatcacctcgcgtctctggcacggctcctggagtctcggaaatacatcctagtggtgccacttatcgttattaacgaactggacggtctggctaagggacaggagaccgatcatcgggcaggcggttacgcgcgggtagtacaggagaaggccaggaaatcaatagagtttcttgaacagcgcttcgagtctcgggacagttgcttgagagcactcaccagccgcgggaacgagctggagtccatcgccttcaggtccgaggacattacagggcaactcggtaacaatgacgacctcatactgagctgttgcctacattattgtaaagataaggccaaggattttatgcccgccagtaaggaggaacccatcagactcctgagggaagtggtgctgctgacagacgataggaacctgcgcgtaaaagccttaacaagaaacgtcccagtgagagacattcctgcctttctgacatgggctcaagtcggatag

SEQ ID NO: 193873 - DNA, 4260 bp, Artificial Sequence
  derived and/or modified sequence
atggcagaaggtttggaaagggtccgaattagcgcgtccgaactgcgcggaatcctagcaactctagcacctcaggctggcagcagagagaatatgaaggagctgaaagaggctcgaccgaggaaggacaatcggagacccgacttggaaatctataaaccgggtttgtcacggttgcggaacaaaccaaaaatcaaggaacctcccggttctgaagagttcaaggatgaaattgttaatgatcgagattgttctgccgttgagaatggaacccagcccgtaaaagacgtctgtaaagagctgaacaatcaagagcagaatgggcctatcgatcctgaaaataatagaggccaagagtccttcccccgtactgcgggacaagaagaccgtagcctaaagatcattaaaaggactaagaaaccggatctccagatatatcagcccggaaggcggttacaaacggtatctaaagagtcagctagtcgtgtggaagaagaggaagtgcttaatcaggtcgagcagctgagagtggaagaggacgagtgcaggggaaacgtcgcaaaggaggaggttgccaacaaacctgacagggccgagatcgaaaaatccccaggcggagggcgtgtgggtgctgccaagggggaaaaaggcaagagaatgggaaaaggtgagggagttcgggagacgcatgatgatccggctcgcggaaggccagggtctgcgaaaagatatagtcgttccgacaagaggcgaaatagataccgcactagatctacctccagcgcagggtctaataacagcgctgagggcgcaggccttaccgacaacggctgtcgtcgccgaagacaggacagaacaaaagaacgcccacggctgaaaaaacaagtcagtgttagctcgacagactctctcgatgaggacagaatagatgagcctgacggtctcggacctaggcggagctccgagaggaagcgacacctggagcgaaattggtcagggcgaggagagggcgaacaaaaaaactccgctaaagaatatagaggaactttgcgcgttacttttgatgccgaagcaatgaataaggaaagtcctatggtgaggtcggctagagacgatatggatagaggtaagcccgacaagggcctcagctctgggggaaaaggtagcgaaaagcaggaaagcaagaaccccaagcaagaactgagagggcgagggaggggaattctgatcctgcctgcccataccactctttctgtgaacagcgcgggatcaccagaaagtgcccctctaggcccaaggctgctgttcggatcgggatctaaaggcagccgaagctggggccgtgggggaacaacccggagactgtgggatccaaacaaccccgatcagaaacctgctctcaaaacgcagacgccacaactgcactttctcgacacagacgatgaggtctcgcccacgagttggggagacagcaggcaagcccaggccagctactacaagttccagaactcggacaacccatactattatcctcggacacccggacccgcatcccagtacccatatacaggctataacccattgcaatatccagtggggcctacaaatggagtttatccgggtccatactaccctgggtacccgacaccaagcggacagtatgtgtgttcaccactgcccacatccacaatgagccccgaagaggtggagcagcatatgaggaatttacagcagcaggagcttcaccggctccttagggtcgctgataaccaggaactgcaactgtccaacttgttaagccgcgatcggatttctcctgagggactggagaagatggcccaactccgggctgagctactgcagctctacgagagatgtattctgttagatattgaattttccgacaaccagaatgtggaccagatcttgtggaagaatgctttctatcaggtgattgaaaaattcagacaactggtgaaagaccccaatgtcgagaacccggagcagattcggaaccggctgttggaactgctggacgaaggatcagattttttcgattctctcctgcagaaattgcaggtgacttataaatttaagctggaggattacatggacggactcgctatccgctcgaaacccctgagaaagaccgtgaaatacgcgctaatctctgcccagagatgcatgatctgccagggagacattgcacgttaccgggaacaggcgagtgacaccgcgaattacggaaaagccagatcttggtacctcaaagctcaacatatagctcccaagaacgggaggccctacaaccaactcgctctccttgctgtgtacactcggcgtaaactcgacgccgtctactattatatgaggtcactcgccgcatcgaaccctatcctgaccgcgaaagaaagcctcatgtcattatttgaggagaccaagcgcaaggccgaacaaatggagaagaagcagcatgaagaatttgatctctccccagaccaatggagaaagggcaagaagtctaccttccggcatgtgggtgacgatacaacacggttggaaatatggattcatccgagtcaccccaggtcctcccaggggacagagagtggtaaggactccgagcaggagaacggcctcggtagtttatccccatccgaccttaacaagagattcatccttagcttcctgcatgctcacggtaagttgtttacccgcatcggtatggagacttttccggctgtggctgaaaaagtgctcaaagagtttcaggtcctactgcaacacagcccatctccaattggttctacaagaatgctccagttaatgacaataaacatgtttgcagtgcataatagtcagctgaaagattgttttagcgaagagtgtaggtctgtgatccaggaacaagcggctgccttggggttagcaatgttttcactgcttgtccgtcggtgcacgtgtctgttaaaagaaagcgcaaaagcccagctaagctcccctgaggaccaggatgaccaggacgacattaaggttagttctttcgtgccagacctgaaagagctcctgccgtccgtcaaagtgtggtcagactggatgctggggtacccagatacctggaatccccctcccacaagcctggatctgccctcacacgtggcggtggacgtctggtcaacactcgccgacttttgcaacatcctgaccgcagtcaatcagtcagaagtgccgctgtataaggatccagatgacgacttaactctgctcattctggaagaggaccgcctgttatccggcttcgtgccccttctggcggcacctcaggatccatgttacgtcgagaaaacttcagacaaagtgatcgctgcggattgtaagagagtgacagtgttaaaatattttctggaggccctgtgtgggcaggaggagcctcttctcgcttttaaaggcggaaaatatgtgtctgtggcacccgtgcccgataccatgggcaaagagatggggagccaggagggcaccagactggaagacgaggaggaagatgtggtgatagaggactttgaggaggatagcgaagccgaagggagcggcggagaggatgatatcagggagctccgagcaaaaaagctggcgctggcgcgaaagattgcggaacagcagagacggcaggaaaagatacaggcggtcttagaagaccactcacagatgcggcagatggaactcgaaataagacctctattcttggtgcctgacaccaatgggttcatcgaccatctcgcttccctcgcacggctcctggaatctcggaagtatatcctcgtcgttccccttattgtcatcaacgaattggatgggttagcgaagggccaggagactgatcatcgggctggcggttacgcgagggtggtgcaggagaaggcaagaaagagcatcgaatttctggagcagcgctttgagagcagggacagttgcctccgcgcacttaccagccggggtaacgaactagagagcattgcattccgatcagaagacattaccggacagctgggtaacaacgatgacctgatcctgtcctgctgcctccattactgcaaagacaaggcgaaagactttatgcctgccagcaaggaggagccaattagactcctgcgagaggtagtccttctgacggatgatagaaacctccgggtgaaggccctgacaaggaatgtgccggtccgggacatacctgctttcttgacatgggcccaggtaggatag

SEQ ID NO: 193874 - DNA, 4167 bp, Artificial Sequence
  derived and/or modified sequence
atgaaagaactgaaagaagcaaggccaaggaaggataaccgacggcctgaccttgaaatttacaagcccggattgtcccgcttgagaaataagcctaaaatcaaagaaccacccggatctgaggaattcaaggatgagatcgtcaacgatcgtgattgctctgccgttgaaaacggcacgcagccagtgaaggacgtgtgcaaggagctgaacaaccaggagcagaacggccctatcgatcctgaaaataaccgcggtcaggagagcttccctaggaccgcaggccaagaagatcggtctcttaaaattatcaagcggacaaagaaacctgatctccagatctaccagcctggtaggagacttcagaccgtgtccaaagaatctgctagccgcgtggaggaagaggaagtgctgaatcaggttgaacagctccgcgttgaagaagacgaatgccggggaaacgtggctaaagaggaggtcgctaacaagcccgacagggcagaaatcgagaaatccccaggtggtggacgcgtcggcgctgcgaagggagagaagggcaagcggatggggaaaggggagggcgtgagggagactcatgatgacccagcaaggggtaggccagggagcgcgaagcgatactctcggagcgacaaaagaagaaacagataccgcactcggtccacctccagcgctggaagcaataactccgcggaaggtgctggcctgacagataatggctgtcgacggagacggcaggacaggacaaaagagaggccccgtctaaagaagcaggttagcgtctccagcaccgactctctcgacgaagacaggatcgacgaaccagacggcctggggcctagaaggagttctgaacggaagcgtcacctggaacggaactggtcgggacgtggggagggagaacagaagaactctgctaaggaatataggggcaccctgcgcgtgactttcgacgcggaagcgatgaacaaagaatcaccaatggtccggtccgctcgcgatgacatggatcgcggaaaaccggacaagggcctttcttctggaggcaagggatccgagaaacaagagtcaaaaaatccaaagcaggagctgaggggacgaggtcgtgggatcctgatcttgcctgcccatacgacgttatccgtcaattccgccggtagcccagagtcggcccctctgggccctaggctgctgtttggatccggtagcaagggtagtagaagctggggacgcggaggcaccacccgaaggctatgggatccaaacaaccccgatcagaaaccggcattgaagactcagaccccccaactacacttcttggacacggatgatgaagtgtcgccaacctcttggggtgactcaagacaggcgcaggctagctactataagtttcagaattccgataacccttactactatcctaggaccccaggtccggctagtcaatatccctacaccggctacaatcccctgcagtaccctgtaggccctaccaatggggtgtatcccggaccctattacccagggtaccctactccaagcgggcagtatgtgtgcagtcctctgccaacatctactatgagccccgaggaagtcgagcagcacatgcggaatctccagcagcaggagctgcaccggctcctccgcgtggccgataatcaggagttgcaactgtctaacctgctatcacgcgatagaatctcgcccgaaggactggagaaaatggcccagctccgcgcagagctgcttcagctgtacgagcggtgtattctgctggatatagaattctccgacaatcagaatgttgaccagatattgtggaagaatgccttctatcaagtaatcgaaaaatttcgacaactagtcaaagacccaaacgtcgaaaaccctgagcagataagaaaccgcctcctggaattgttggacgagggttcagacttcttcgactccttacttcagaaactgcaggtgacttacaaattcaaactcgaggactacatggacggtctcgcaatcagatccaagcccctacgcaagacagtcaaatacgcactgatttccgcccagcgatgcatgatttgccaaggagatattgctaggtacagagagcaggcgtccgatacagcaaactatgggaaggctaggtcctggtacttaaaagcccagcatatcgcgcctaagaatgggcgaccttacaaccaactggccttgcttgccgtgtacaccaggaggaagctcgatgccgtgtactattatatgcggtcactggccgctagcaatcccatcctgacagctaaggaaagcctgatgtccttgttcgaggaaacaaaaaggaaggccgaacagatggagaagaagcaacatgaggagtttgacctcagcccggaccaatggcggaaaggcaaaaaaagcacttttcgacatgtgggagacgataccacacgtctggagatatggattcacccctctcacccaaggtccagccaaggtacagaatcagggaaagactccgagcaagagaatgggctcgggtctcttagtccgagtgatctgaataaaaggttcatcttgagttttcttcacgcacatgggaagctatttacaaggatcggaatggagacatttcccgcagtagcagagaaagtcttaaaggagtttcaggtcttgttgcagcactctccgtcccctattggctcaacgagaatgctgcagctgatgacaataaatatgtttgccgtccataacagtcagcttaaggattgcttctccgaagaatgccgaagcgttattcaggaacaagccgctgcactaggcctcgctatgttctccctgcttgttagaaggtgcacctgcctactgaaggagagcgctaaggcacagctgagcagtcctgaggaccaggatgaccaagatgacatcaaagtttcctcgtttgtgcccgatctgaaggagctgttgccatcagttaaagtgtggagcgattggatgttaggctacccagatacctggaatccaccaccgacatctttggacctgccaagccatgtggctgtggatgtgtggtcgactcttgccgacttttgtaatatcctgacggcagtgaaccagtctgaggtccccctgtacaaggaccctgacgatgaccttactttactgatcctcgaggaagatcggctgctgtctgggtttgttccccttcttgcagccccacaggatccgtgctacgtcgaaaaaacttctgataaagtcatcgctgctgactgcaagagggttaccgtactgaagtactttctggaggccctctgcggccaggaggagccacttctggctttcaagggcggtaaatatgtgtccgtcgcacctgtgccggacactatgggcaaagagatgggcagccaggagggcaccaggctggaagacgaagaggaggacgtggtgattgaggatttcgaagaagactctgaagcagagggatctgggggagaggatgatatcagagagctgcgagctaagaaactggctcttgctagaaagatcgccgaacagcagagacgccaggagaagatccaggcagtgttagaggaccactctcaaatgcgccaaatggagctagaaattcggccactttttttggtgccagacaccaatggcttcattgaccacctggcatccttggccagactgctggagtcaaggaagtacatcttggtggtcccgttaatagtgattaatgagctggacggcttggccaaagggcaagaaacagatcaccgcgcaggcggttacgcacgcgtcgtccaggagaaggctcggaaatctattgagttcctggaacagcggttcgagtcgagagactcatgtctccgcgcactgacgtctcgcggaaatgagctggaatccatagcctttaggtccgaagatattacaggccagttaggaaacaatgacgatctgatcctgtcttgttgtctgcactattgcaaggacaaagcgaaggacttcatgcccgcatctaaggaggaaccaatccgattgctgagggaagtagtgcttttaaccgatgatagaaacctgagagtaaaagccctaacgcgtaatgtccctgttcgtgatatacccgctttcctgacctgggctcaggttggatag

SEQ ID NO: 193875 - DNA, 5968 bp, Artificial Sequence
  derived and/or modified sequence
cctggctgcgcgcggcggtggcggagccgctacggctgtagcagcagccgcgaagatggcggaagggctggagcgtgtgcggatctccgcgtcggagctgcgcgggatcctggctactctggccccgcaggccgggagcagagaaaacatgaaggaattaaaggaggccaggccgcgcaaagataacaggcgtccagatctggaaatctataagcctggcctttctcggctaaggaacaagcccaaaatcaaggaaccccctgggagtgaggaattcaaagatgaaattgttaatgaccgagattgctctgctgttgaaaatggtacacagcccgttaaagatgtctgcaaggaactgaacaaccaagagcagaatggtcctatagacccagaaaataatcggggacaagaatcctttcctaggactgctggacaagaggatcgtagtctaaaaattatcaaaagaacaaagaaacccgacctgcagatctatcagcctggacgacgtttgcagactgttagcaaagaatccgccagtcgggtggaggaggaagaagtcctcaaccaggtagaacaactgagagtagaggaagatgagtgtaggggaaatgttgcgaaggaggaagttgcgaataaaccagacagggctgagatagaaaagagcccaggtggtgggagagtaggggctgcaaaaggagaaaaaggaaagaggatgggaaaaggggagggggtgagggaaacccacgacgacccagcccgcgggaggccgggctccgcaaagcgctactcccgctcagacaaacgaaggaatcgctaccgcacgcgcagcaccagctcagctggcagcaacaacagcgctgagggagctggcctgacggataatggatgtcgccgccgccgacaggataggaccaaggagaggccacgactgaagaagcaagtgtctgtgtcctcaaccgattccttagacgaggacagaattgatgagcctgatggattaggacccaggagaagttcagaaaggaagagacatttagaaagaaactggtctggccgtggggagggtgagcagaaaaacagtgctaaagaatatcgaggcactcttcgtgtcactttcgatgcagaagccatgaacaaagagtctcccatggtgaggtcagccagggatgatatggatagaggaaagcctgacaaaggcttgagcagtgggggcaaaggctctgagaagcaggagtccaaaaacccgaaacaagaacttcggggtcgtggtcgtggcattctgattttgcctgcccataccaccctatctgtcaattcagcaggttctccagagtccgcgcctttgggacctcggcttttgtttggatctggtagtaagggatctcggagttggggccgtggaggcaccacacgccgattgtgggacccaaacaatcctgatcagaaacctgctctaaagactcagacgccccagctacatttcttggacactgatgatgaagtcagccctacatcttggggtgactcacgccaggctcaggcatcttactataagtttcaaaactctgacaacccctattattacccccggacaccaggccctgcctcccagtatccctatacgggctataaccctctacagtacccagtgggccctacgaatggtgtgtacccagggccttactacccaggctacccgactccgtcaggacagtatgtgtgtagccctctacctaccagcaccatgagtcccgaggaggtagagcagcacatgaggaacctgcagcaacaggagctgcacaggcttctccgggtggctgacaaccaggaactgcagctcagcaacctgctctccagggaccgcatcagtccggagggcctggagaagatggcgcaactcagagctgaactgctgcagctatatgagcgctgtattctattagatattgagttctctgataatcagaatgtggatcagatcctgtggaagaatgctttctatcaggtgattgagaagttcaggcaacttgtcaaggatccgaatgttgagaacccagaacagattcggaacagacttttggagctcttggatgagggtagtgacttctttgatagtttgcttcagaagctgcaggttacttacaagttcaaactggaagactacatggatggtcttgccattcgcagcaagccattacgcaagacagtaaaatatgccttgatcagtgcccagcgatgcatgatatgccaaggagatattgctaggtaccgggagcaagccagtgatacagcgaattatgggaaagcacgcagttggtacctgaaggcccagcacattgctcccaagaatgggcgcccctataaccagttggctttgctggcagtgtatacgaggaggaagcttgacgctgtctattactatatgcgcagtttagctgccagcaaccctatcctgactgccaaggagagtctcatgagcttgtttgaagagaccaagcggaaggcagaacagatggaaaagaagcaacatgaggaatttgacctgagccctgaccagtggcggaaaggaaagaagtctactttccggcatgttggagatgacaccactcgcctggagatctggattcatccatcccatccacggtcttcccagggcactgagtctgggaaggattctgagcaagagaatgggctgggcagcctgagtcccagtgatctgaacaaaaggttcatcctcagttttctccatgcccatgggaagctgtttacccggattgggatggagacattccctgcagtggctgagaaggtcctcaaggagttccaggtgttactgcagcacagcccctctcccattggaagtacccgcatgctgcagcttatgaccatcaatatgtttgcagtacacaactcccagctgaaagactgcttctcggaggagtgccgctctgtgatccaggaacaagccgcagctctgggcttggccatgttttctctactggtccgccgctgcacctgcttacttaaggagtccgccaaagctcagctgtcctctcctgaggaccaggatgaccaagacgacatcaaggtgtcttcctttgtcccggacctgaaggagctgctccccagtgtcaaagtctggtcagattggatgctcggctacccggacacctggaatcctcctcccacatccctggatctgccctcgcatgttgctgtggatgtatggtcgacgctggctgatttctgtaacatactgactgcagtgaatcagtctgaggtgccactgtacaaggacccggatgatgacctcacccttcttatcctggaagaggatcggcttctctcgggctttgtccccttgctggctgcccctcaggacccctgctacgtggagaaaacctcggataaggttattgcagctgactgcaaaagggtcacagtgctgaagtattttctggaagccctttgtggacaagaagagcctctgctggcattcaagggtggaaagtatgtgtcagtggcacccgtcccagacaccatgggaaaggaaatgggaagccaagagggaacacgactggaagatgaggaggaggatgtggtgattgaagactttgaggaagattcagaggctgaaggcagcggaggcgaggatgacatcagggagcttcgggccaagaagctggctctggccaggaagatagctgagcagcagcgtcgccaggaaaagatccaggctgtcctggaggaccacagtcagatgaggcagatggagctcgaaatcagacctttgttcctcgtaccagacaccaacggcttcattgaccacctggccagtctggcgcggctgctggagagcaggaagtacatcctggtggtgcccctcatcgtgatcaatgagctggacggcctggccaaggggcaggagacagaccaccgggctgggggctacgcccgtgtggtacaagagaaggcccgcaagtccatcgagttcctcgagcagcgattcgagagtcgggactcttgcctgcgagccctgaccagccgtggcaatgaactcgaatccatcgccttccgcagtgaggacatcactggccagctgggtaacaacgatgatctcatcctgtcctgctgcctccactactgcaaagacaaggctaaggacttcatgcccgccagcaaagaggagccaatccggctactgcgggaggtggtgctgttgacggatgaccggaacctgcgtgtgaaggcgctcacaaggaatgttcctgtacgggacatcccagccttcctcacgtgggcccaggtgggctgagggagccacactggggccccccccccgtggaaccgttcctgaaaggccaccaggcgcccagtgtagcacggaagatgcccacgtgcctgagccaccaatccacccagacaataaaccatcctcttccaacccacgccacggccatgctgtgggggacctgctcctcacagagcccctcccaaggatcgggcggaagctgctgggaccctcctgggctgccaggatttagcagggaggtggctggctacagcaacagcagctgggcaagccagataggccgcccatgctctcagcctttctccctcccccgtctcattccaaggctgagggagggccttctcgcctggggacgcagccactttctccagtggagacagggcaggggttctgagtttccgtcagatgcagtgaaatcacagttccctttcatcttcagaacctctgtcgtgaatgtgttcaagaggctttggttaagtcaggaagaagtgcccagggtgtgtgtccccagtctccctgaggcctggactcgcccatgaacccaagtcggcttctagacagcatgtccctaacagcagccctgggcccccacctcttctaccatccaccccagacttaccacacacccttcctgctgctcctcttcctgcccttatcaacctgggtccctcacacttcgccagttgcgtccccgtggacagtcatgagtctagaggaaaggggcatctggtctcaggcccgtgctctcgggtggcctccacctgctccctctctcctcactggcctttctttccgtctagcttcctcttcaggaaatgtcctgactcccctcagctcccccttcacccctccttgcccgcctaccctccctccagaatagcccctcacccttcttccccttctagttgatccttttcacctccctgatccccttcatttcttcaccgcggttcctcgtcataggggttctcactctgaactttccctctctactacccatggcaggaacctagtacaggtctcccacccagggccttccaccctcggctcctgtgctgggagaaacttccaggcgtggacagcccagcctgaggcattccagtgctggggcaccgtcgcctaacctggtttctagctttgccctcactccccggaaaaactgacactgacacaggggccctttccttgcccctttagctggtacctcagtggggaggcttccttaccaagaatgagttcctgaaacccagggccagagacaaggacaacttaggggaagacggggttttcggtggagccaggggcaaatcttaatgggaccagtgggggataccccagagcccatggcctgactgcacagcctgcctggaggatgggtgcgcagctctgccctccctgaggcccaggactatgccagaagcgatggggtaccgtgtaggggagccaaggccagtagtttgggggtaggagtcccctagagtctcagaagactgggctctttggagtacagggtccccggcctctcctttaagattctctccccagctggaaggccgatgactgggtggtcgggagggagacccagctctcctttctgtcccgtttgcagcactggttttgtttccttaataaatttttagttatgaaacatacctg

SEQ ID NO: 193876 - DNA, 6331 bp, Artificial Sequence
  derived and/or modified sequence
agcagtaggcgctggggccgcggcggaccctcgctgccctacctctctcgcgggttagtgcggggtcgggctcggccagtcctggccagctccgggagagcctggcccgaattcctgcctccaccctctttctcgccgcgaaggtgactgttccttttgccccagccctctcagacccgccccggattcccaggcatcgggagacgcggaaaggagtggggtctggtggaggccccgggcgtatcgctctccaggccgccctccgcgggcctgccccggccaccgctttaacgtcggagagaaggaattggggagaaaggtttaagagcctgcgacttcgttgctgaacttttcccccccaagacaggcttccgaaagctgcgccactggagggatccgggacctcagactactcgggtttggccctggcatgtgtgggagcagtttttattagagagaatgctcaatttgcaagttaatttcaagtctccagccacgtcaggaaaaaaacatgaaggaattaaaggaggccaggccgcgcaaagataacaggcgtccagatctggaaatctataagcctggcctttctcggctaaggaacaagcccaaaatcaaggaaccccctgggagtgaggaattcaaagatgaaattgttaatgaccgagattgctctgctgttgaaaatggtacacagcccgttaaagatgtctgcaaggaactgaacaaccaagagcagaatggtcctatagacccagaaaataatcggggacaagaatcctttcctaggactgctggacaagaggatcgtagtctaaaaattatcaaaagaacaaagaaacccgacctgcagatctatcagcctggacgacgtttgcagactgttagcaaagaatccgccagtcgggtggaggaggaagaagtcctcaaccaggtagaacaactgagagtagaggaagatgagtgtaggggaaatgttgcgaaggaggaagttgcgaataaaccagacagggctgagatagaaaagagcccaggtggtgggagagtaggggctgcaaaaggagaaaaaggaaagaggatgggaaaaggggagggggtgagggaaacccacgacgacccagcccgcgggaggccgggctccgcaaagcgctactcccgctcagacaaacgaaggaatcgctaccgcacgcgcagcaccagctcagctggcagcaacaacagcgctgagggagctggcctgacggataatggatgtcgccgccgccgacaggataggaccaaggagaggccacgactgaagaagcaagtgtctgtgtcctcaaccgattccttagacgaggacagaattgatgagcctgatggattaggacccaggagaagttcagaaaggaagagacatttagaaagaaactggtctggccgtggggagggtgagcagaaaaacagtgctaaagaatatcgaggcactcttcgtgtcactttcgatgcagaagccatgaacaaagagtctcccatggtgaggtcagccagggatgatatggatagaggaaagcctgacaaaggcttgagcagtgggggcaaaggctctgagaagcaggagtccaaaaacccgaaacaagaacttcggggtcgtggtcgtggcattctgattttgcctgcccataccaccctatctgtcaattcagcaggttctccagagtccgcgcctttgggacctcggcttttgtttggatctggtagtaagggatctcggagttggggccgtggaggcaccacacgccgattgtgggacccaaacaatcctgatcagaaacctgctctaaagactcagacgccccagctacatttcttggacactgatgatgaagtcagccctacatcttggggtgactcacgccaggctcaggcatcttactataagtttcaaaactctgacaacccctattattacccccggacaccaggccctgcctcccagtatccctatacgggctataaccctctacagtacccagtgggccctacgaatggtgtgtacccagggccttactacccaggctacccgactccgtcaggacagtatgtgtgtagccctctacctaccagcaccatgagtcccgaggaggtagagcagcacatgaggaacctgcagcaacaggagctgcacaggcttctccgggtggctgacaaccaggaactgcagctcagcaacctgctctccagggaccgcatcagtccggagggcctggagaagatggcgcaactcagagctgaactgctgcagctatatgagcgctgtattctattagatattgagttctctgataatcagaatgtggatcagatcctgtggaagaatgctttctatcaggtgattgagaagttcaggcaacttgtcaaggatccgaatgttgagaacccagaacagattcggaacagacttttggagctcttggatgagggtagtgacttctttgatagtttgcttcagaagctgcaggttacttacaagttcaaactggaagactacatggatggtcttgccattcgcagcaagccattacgcaagacagtaaaatatgccttgatcagtgcccagcgatgcatgatatgccaaggagatattgctaggtaccgggagcaagccagtgatacagcgaattatgggaaagcacgcagttggtacctgaaggcccagcacattgctcccaagaatgggcgcccctataaccagttggctttgctggcagtgtatacgaggaggaagcttgacgctgtctattactatatgcgcagtttagctgccagcaaccctatcctgactgccaaggagagtctcatgagcttgtttgaagagaccaagcggaaggcagaacagatggaaaagaagcaacatgaggaatttgacctgagccctgaccagtggcggaaaggaaagaagtctactttccggcatgttggagatgacaccactcgcctggagatctggattcatccatcccatccacggtcttcccagggcactgagtctgggaaggattctgagcaagagaatgggctgggcagcctgagtcccagtgatctgaacaaaaggttcatcctcagttttctccatgcccatgggaagctgtttacccggattgggatggagacattccctgcagtggctgagaaggtcctcaaggagttccaggtgttactgcagcacagcccctctcccattggaagtacccgcatgctgcagcttatgaccatcaatatgtttgcagtacacaactcccagctgaaagactgcttctcggaggagtgccgctctgtgatccaggaacaagccgcagctctgggcttggccatgttttctctactggtccgccgctgcacctgcttacttaaggagtccgccaaagctcagctgtcctctcctgaggaccaggatgaccaagacgacatcaaggtgtcttcctttgtcccggacctgaaggagctgctccccagtgtcaaagtctggtcagattggatgctcggctacccggacacctggaatcctcctcccacatccctggatctgccctcgcatgttgctgtggatgtatggtcgacgctggctgatttctgtaacatactgactgcagtgaatcagtctgaggtgccactgtacaaggacccggatgatgacctcacccttcttatcctggaagaggatcggcttctctcgggctttgtccccttgctggctgcccctcaggacccctgctacgtggagaaaacctcggataaggttattgcagctgactgcaaaagggtcacagtgctgaagtattttctggaagccctttgtggacaagaagagcctctgctggcattcaagggtggaaagtatgtgtcagtggcacccgtcccagacaccatgggaaaggaaatgggaagccaagagggaacacgactggaagatgaggaggaggatgtggtgattgaagactttgaggaagattcagaggctgaaggcagcggaggcgaggatgacatcagggagcttcgggccaagaagctggctctggccaggaagatagctgagcagcagcgtcgccaggaaaagatccaggctgtcctggaggaccacagtcagatgaggcagatggagctcgaaatcagacctttgttcctcgtaccagacaccaacggcttcattgaccacctggccagtctggcgcggctgctggagagcaggaagtacatcctggtggtgcccctcatcgtgatcaatgagctggacggcctggccaaggggcaggagacagaccaccgggctgggggctacgcccgtgtggtacaagagaaggcccgcaagtccatcgagttcctcgagcagcgattcgagagtcgggactcttgcctgcgagccctgaccagccgtggcaatgaactcgaatccatcgccttccgcagtgaggacatcactggccagctgggtaacaacgatgatctcatcctgtcctgctgcctccactactgcaaagacaaggctaaggacttcatgcccgccagcaaagaggagccaatccggctactgcgggaggtggtgctgttgacggatgaccggaacctgcgtgtgaaggcgctcacaaggaatgttcctgtacgggacatcccagccttcctcacgtgggcccaggtgggctgagggagccacactggggccccccccccgtggaaccgttcctgaaaggccaccaggcgcccagtgtagcacggaagatgcccacgtgcctgagccaccaatccacccagacaataaaccatcctcttccaacccacgccacggccatgctgtgggggacctgctcctcacagagcccctcccaaggatcgggcggaagctgctgggaccctcctgggctgccaggatttagcagggaggtggctggctacagcaacagcagctgggcaagccagataggccgcccatgctctcagcctttctccctcccccgtctcattccaaggctgagggagggccttctcgcctggggacgcagccactttctccagtggagacagggcaggggttctgagtttccgtcagatgcagtgaaatcacagttccctttcatcttcagaacctctgtcgtgaatgtgttcaagaggctttggttaagtcaggaagaagtgcccagggtgtgtgtccccagtctccctgaggcctggactcgcccatgaacccaagtcggcttctagacagcatgtccctaacagcagccctgggcccccacctcttctaccatccaccccagacttaccacacacccttcctgctgctcctcttcctgcccttatcaacctgggtccctcacacttcgccagttgcgtccccgtggacagtcatgagtctagaggaaaggggcatctggtctcaggcccgtgctctcgggtggcctccacctgctccctctctcctcactggcctttctttccgtctagcttcctcttcaggaaatgtcctgactcccctcagctcccccttcacccctccttgcccgcctaccctccctccagaatagcccctcacccttcttccccttctagttgatccttttcacctccctgatccccttcatttcttcaccgcggttcctcgtcataggggttctcactctgaactttccctctctactacccatggcaggaacctagtacaggtctcccacccagggccttccaccctcggctcctgtgctgggagaaacttccaggcgtggacagcccagcctgaggcattccagtgctggggcaccgtcgcctaacctggtttctagctttgccctcactccccggaaaaactgacactgacacaggggccctttccttgcccctttagctggtacctcagtggggaggcttccttaccaagaatgagttcctgaaacccagggccagagacaaggacaacttaggggaagacggggttttcggtggagccaggggcaaatcttaatgggaccagtgggggataccccagagcccatggcctgactgcacagcctgcctggaggatgggtgcgcagctctgccctccctgaggcccaggactatgccagaagcgatggggtaccgtgtaggggagccaaggccagtagtttgggggtaggagtcccctagagtctcagaagactgggctctttggagtacagggtccccggcctctcctttaagattctctccccagctggaaggccgatgactgggtggtcgggagggagacccagctctcctttctgtcccgtttgcagcactggttttgtttccttaataaatttttagttatgaaacatacctg

SEQ ID NO: 193877 - protein, 2403 aa, Artificial Sequence
  derived and/or modified sequence
MGISTVILEMCLLWGQVLSTGGWIPRTTDYASLIPSEVPLDPTVAEGSPFPSESTLESTVAEGSPISLESTLESTVAEGSLIPSESTLESTVAEGSDSGLALRLVNGDGRCQGRVEILYRGSWGTVCDDSWDTNDANVVCRQLGCGWAMSAPGNAWFGQGSGPIALDDVRCSGHESYLWSCPHNGWLSHNCGHGEDAGVICSAAQPQSTLRPESWPVRISPPVPTEGSESSLALRLVNGGDRCRGRVEVLYRGSWGTVCDDYWDTNDANVVCRQLGCGWAMSAPGNAQFGQGSGPIVLDDVRCSGHESYLWSCPHNGWLTHNCGHSEDAGVICSAPQSRPTPSPDTWPTSHASTAGPESSLALRLVNGGDRCQGRVEVLYRGSWGTVCDDSWDTSDANVVCRQLGCGWATSAPGNARFGQGSGPIVLDDVRCSGYESYLWSCPHNGWLSHNCQHSEDAGVICSDTLPTITLPASTVGSESSLALRLVNGGDRCQGRVEVLYRGSWGTVCDDSWDTNDANVVCRQLGCGWAMLAPGNARFGQGSGPIVLDDVRCSGNESYLWSCPHNGWLSHNCGHSEDAGVICSGPESSLALRLVNGGDRCQGRVEVLYRGSWGTVCDDSWDTNDANVVCRQLGCGWATSAPGNARFGQGSGPIVLDDVRCSGHESYLWSCPNNGWLSHNCGHHEDAGVICSAAQSRSTPRPDTLSTITLPPSTVGSESSLTLRLVNGSDRCQGRVEVLYRGSWGTVCDDSWDTNDANVVCRQLGCGWATSAPGNARFGQGSGPIVLDDVRCSGHESYLWSCPHNGWLSHNCGHHEDAGVICSVSQSRPTPSPDTWPTSHASTAGPESSLALRLVNGGDRCQGRVEVLYRGSWGTVCDDSWDTSDANVVCRQLGCGWATSAPGNARFGQGSGPIVLDDVRCSGYESYLWSCPHNGWLSHNCQHSEDAGVICSAAHSWSTPSPDTLPTITLPASTVGSESSLALRLVNGGDRCQGRVEVLYQGSWGTVCDDSWDTNDANVVCRQLGCGWAMSAPGNARFGQGSGPIVLDDVRCSGHESYLWSCPHNGWLSHNCGHSEDAGVICSASQSRPTPSPDTWPTSHASTAGSESSLALRLVNGGDRCQGRVEVLYRGSWGTVCDDYWDTNDANVVCRQLGCGWAMSAPGNARFGQGSGPIVLDDVRCSGHESYLWSCPHNGWLSHNCGHHEDAGVICSASQSQPTPSPDTWPTSHASTAGSESSLALRLVNGGDRCQGRVEVLYRGSWGTVCDDYWDTNDANVVCRQLGCGWATSAPGNARFGQGSGPIVLDDVRCSGHESYLWSCPHNGWLSHNCGHHEDAGVICSASQSQPTPSPDTWPTSHASTAGSESSLALRLVNGGDRCQGRVEVLYRGSWGTVCDDYWDTNDANVVCRQLGCGWATSAPGNARFGQGSGPIVLDDVRCSGHESYLWSCPHNGWLSHNCGHHEDAGVICSASQSQPTPSPDTWPTSRASTAGSESTLALRLVNGGDRCRGRVEVLYQGSWGTVCDDYWDTNDANVVCRQLGCGWAMSAPGNAQFGQGSGPIVLDDVRCSGHESYLWSCPHNGWLSHNCGHHEDAGVICSAAQSQSTPRPDTWLTTNLPALTVGSESSLALRLVNGGDRCRGRVEVLYRGSWGTVCDDSWDTNDANVVCRQLGCGWAMSAPGNARFGQGSGPIVLDDVRCSGNESYLWSCPHKGWLTHNCGHHEDAGVICSATQINSTTTDWWHPTTTTTARPSSNCGGFLFYASGTFSSPSYPAYYPNNAKCVWEIEVNSGYRINLGFSNLKLEAHHNCSFDYVEIFDGSLNSSLLLGKICNDTRQIFTSSYNRMTIHFRSDISFQNTGFLAWYNSFPSDATLRLVNLNSSYGLCAGRVEIYHGGTWGTVCDDSWTIQEAEVVCRQLGCGRAVSALGNAYFGSGSGPITLDDVECSGTESTLWQCRNRGWFSHNCNHREDAGVICSGNHLSTPAPFLNITRPNTDYSCGGFLSQPSGDFSSPFYPGNYPNNAKCVWDIEVQNNYRVTVIFRDVQLEGGCNYDYIEVFDGPYRSSPLIARVCDGARGSFTSSSNFMSIRFISDHSITRRGFRAEYYSSPSNDSTNLLCLPNHMQASVSRSYLQSLGFSASDLVISTWNGYYECRPQITPNLVIFTIPYSGCGTFKQADNDTIDYSNFLTAAVSGGIIKRRTDLRIHVSCRMLQNTWVDTMYIANDTIHVANNTIQVEEVQYGNFDVNISFYTSSSFLYPVTSRPYYVDLNQDLYVQAEILHSDAVLTLFVDTCVASPYSNDFTSLTYDLIRSGCVRDDTYGPYSSPSLRIARFRFRAFHFLNRFPSVYLRCKMVVCRAYDPSSRCYRGCVLRSKRDVGSYQEKVDVVLGPIQLQTPPRREEEPR

SEQ ID NO: 193878 - DNA, 7212 bp, Artificial Sequence
  derived and/or modified sequence
atgggcatcagcaccgtgatcctggagatgtgcctgctgtggggccaggtgctgagcaccggcggctggatccccagaaccaccgactacgccagcctgatccccagcgaggtgcccctggaccccaccgtggccgagggcagccccttccccagcgagagcaccctggagagcaccgtggccgagggcagccccatcagcctggagagcaccctggagagcaccgtggccgagggcagcctgatccccagcgagagcaccctggagagcaccgtggccgagggcagcgacagcggcctggccctgagactggtgaacggcgacggcagatgccagggcagagtggagatcctgtacagaggcagctggggcaccgtgtgcgacgacagctgggacaccaacgacgccaacgtggtgtgcagacagctgggctgcggctgggccatgagcgcccccggcaacgcctggttcggccagggcagcggccccatcgccctggacgacgtgagatgcagcggccacgagagctacctgtggagctgcccccacaacggctggctgagccacaactgcggccacggcgaggacgccggcgtgatctgcagcgccgcccagccccagagcaccctgagacccgagagctggcccgtgagaatcagcccccccgtgcccaccgagggcagcgagagcagcctggccctgagactggtgaacggcggcgacagatgcagaggcagagtggaggtgctgtacagaggcagctggggcaccgtgtgcgacgactactgggacaccaacgacgccaacgtggtgtgcagacagctgggctgcggctgggccatgagcgcccccggcaacgcccagttcggccagggcagcggccccatcgtgctggacgacgtgagatgcagcggccacgagagctacctgtggagctgcccccacaacggctggctgacccacaactgcggccacagcgaggacgccggcgtgatctgcagcgccccccagagcagacccacccccagccccgacacctggcccaccagccacgccagcaccgccggccccgagagcagcctggccctgagactggtgaacggcggcgacagatgccagggcagagtggaggtgctgtacagaggcagctggggcaccgtgtgcgacgacagctgggacaccagcgacgccaacgtggtgtgcagacagctgggctgcggctgggccaccagcgcccccggcaacgccagattcggccagggcagcggccccatcgtgctggacgacgtgagatgcagcggctacgagagctacctgtggagctgcccccacaacggctggctgagccacaactgccagcacagcgaggacgccggcgtgatctgcagcgacaccctgcccaccatcaccctgcccgccagcaccgtgggcagcgagagcagcctggccctgagactggtgaacggcggcgacagatgccagggcagagtggaggtgctgtacagaggcagctggggcaccgtgtgcgacgacagctgggacaccaacgacgccaacgtggtgtgcagacagctgggctgcggctgggccatgctggcccccggcaacgccagattcggccagggcagcggccccatcgtgctggacgacgtgagatgcagcggcaacgagagctacctgtggagctgcccccacaacggctggctgagccacaactgcggccacagcgaggacgccggcgtgatctgcagcggccccgagagcagcctggccctgagactggtgaacggcggcgacagatgccagggcagagtggaggtgctgtacagaggcagctggggcaccgtgtgcgacgacagctgggacaccaacgacgccaacgtggtgtgcagacagctgggctgcggctgggccaccagcgcccccggcaacgccagattcggccagggcagcggccccatcgtgctggacgacgtgagatgcagcggccacgagagctacctgtggagctgccccaacaacggctggctgagccacaactgcggccaccacgaggacgccggcgtgatctgcagcgccgcccagagcagaagcacccccagacccgacaccctgagcaccatcaccctgccccccagcaccgtgggcagcgagagcagcctgaccctgagactggtgaacggcagcgacagatgccagggcagagtggaggtgctgtacagaggcagctggggcaccgtgtgcgacgacagctgggacaccaacgacgccaacgtggtgtgcagacagctgggctgcggctgggccaccagcgcccccggcaacgccagattcggccagggcagcggccccatcgtgctggacgacgtgagatgcagcggccacgagagctacctgtggagctgcccccacaacggctggctgagccacaactgcggccaccacgaggacgccggcgtgatctgcagcgtgagccagagcagacccacccccagccccgacacctggcccaccagccacgccagcaccgccggccccgagagcagcctggccctgagactggtgaacggcggcgacagatgccagggcagagtggaggtgctgtacagaggcagctggggcaccgtgtgcgacgacagctgggacaccagcgacgccaacgtggtgtgcagacagctgggctgcggctgggccaccagcgcccccggcaacgccagattcggccagggcagcggccccatcgtgctggacgacgtgagatgcagcggctacgagagctacctgtggagctgcccccacaacggctggctgagccacaactgccagcacagcgaggacgccggcgtgatctgcagcgccgcccacagctggagcacccccagccccgacaccctgcccaccatcaccctgcccgccagcaccgtgggcagcgagagcagcctggccctgagactggtgaacggcggcgacagatgccagggcagagtggaggtgctgtaccagggcagctggggcaccgtgtgcgacgacagctgggacaccaacgacgccaacgtggtgtgcagacagctgggctgcggctgggccatgagcgcccccggcaacgccagattcggccagggcagcggccccatcgtgctggacgacgtgagatgcagcggccacgagagctacctgtggagctgcccccacaacggctggctgagccacaactgcggccacagcgaggacgccggcgtgatctgcagcgccagccagagcagacccacccccagccccgacacctggcccaccagccacgccagcaccgccggcagcgagagcagcctggccctgagactggtgaacggcggcgacagatgccagggcagagtggaggtgctgtacagaggcagctggggcaccgtgtgcgacgactactgggacaccaacgacgccaacgtggtgtgcagacagctgggctgcggctgggccatgagcgcccccggcaacgccagattcggccagggcagcggccccatcgtgctggacgacgtgagatgcagcggccacgagagctacctgtggagctgcccccacaacggctggctgagccacaactgcggccaccacgaggacgccggcgtgatctgcagcgccagccagagccagcccacccccagccccgacacctggcccaccagccacgccagcaccgccggcagcgagagcagcctggccctgagactggtgaacggcggcgacagatgccagggcagagtggaggtgctgtacagaggcagctggggcaccgtgtgcgacgactactgggacaccaacgacgccaacgtggtgtgcagacagctgggctgcggctgggccaccagcgcccccggcaacgccagattcggccagggcagcggccccatcgtgctggacgacgtgagatgcagcggccacgagagctacctgtggagctgcccccacaacggctggctgagccacaactgcggccaccacgaggacgccggcgtgatctgcagcgccagccagagccagcccacccccagccccgacacctggcccaccagccacgccagcaccgccggcagcgagagcagcctggccctgagactggtgaacggcggcgacagatgccagggcagagtggaggtgctgtacagaggcagctggggcaccgtgtgcgacgactactgggacaccaacgacgccaacgtggtgtgcagacagctgggctgcggctgggccaccagcgcccccggcaacgccagattcggccagggcagcggccccatcgtgctggacgacgtgagatgcagcggccacgagagctacctgtggagctgcccccacaacggctggctgagccacaactgcggccaccacgaggacgccggcgtgatctgcagcgccagccagagccagcccacccccagccccgacacctggcccaccagcagagccagcaccgccggcagcgagagcaccctggccctgagactggtgaacggcggcgacagatgcagaggcagagtggaggtgctgtaccagggcagctggggcaccgtgtgcgacgactactgggacaccaacgacgccaacgtggtgtgcagacagctgggctgcggctgggccatgagcgcccccggcaacgcccagttcggccagggcagcggccccatcgtgctggacgacgtgagatgcagcggccacgagagctacctgtggagctgcccccacaacggctggctgagccacaactgcggccaccacgaggacgccggcgtgatctgcagcgccgcccagagccagagcacccccagacccgacacctggctgaccaccaacctgcccgccctgaccgtgggcagcgagagcagcctggccctgagactggtgaacggcggcgacagatgcagaggcagagtggaggtgctgtacagaggcagctggggcaccgtgtgcgacgacagctgggacaccaacgacgccaacgtggtgtgcagacagctgggctgcggctgggccatgagcgcccccggcaacgccagattcggccagggcagcggccccatcgtgctggacgacgtgagatgcagcggcaacgagagctacctgtggagctgcccccacaagggctggctgacccacaactgcggccaccacgaggacgccggcgtgatctgcagcgccacccagatcaacagcaccaccaccgactggtggcaccccaccaccaccaccaccgccagacccagcagcaactgcggcggcttcctgttctacgccagcggcaccttcagcagccccagctaccccgcctactaccccaacaacgccaagtgcgtgtgggagatcgaggtgaacagcggctacagaatcaacctgggcttcagcaacctgaagctggaggcccaccacaactgcagcttcgactacgtggagatcttcgacggcagcctgaacagcagcctgctgctgggcaagatctgcaacgacaccagacagatcttcaccagcagctacaacagaatgaccatccacttcagaagcgacatcagcttccagaacaccggcttcctggcctggtacaacagcttccccagcgacgccaccctgagactggtgaacctgaacagcagctacggcctgtgcgccggcagagtggagatctaccacggcggcacctggggcaccgtgtgcgacgacagctggaccatccaggaggccgaggtggtgtgcagacagctgggctgcggcagagccgtgagcgccctgggcaacgcctacttcggcagcggcagcggccccatcaccctggacgacgtggagtgcagcggcaccgagagcaccctgtggcagtgcagaaacagaggctggttcagccacaactgcaaccacagagaggacgccggcgtgatctgcagcggcaaccacctgagcacccccgcccccttcctgaacatcaccagacccaacaccgactacagctgcggcggcttcctgagccagcccagcggcgacttcagcagccccttctaccccggcaactaccccaacaacgccaagtgcgtgtgggacatcgaggtgcagaacaactacagagtgaccgtgatcttcagagacgtgcagctggagggcggctgcaactacgactacatcgaggtgttcgacggcccctacagaagcagccccctgatcgccagagtgtgcgacggcgccagaggcagcttcaccagcagcagcaacttcatgagcatcagattcatcagcgaccacagcatcaccagaagaggcttcagagccgagtactacagcagccccagcaacgacagcaccaacctgctgtgcctgcccaaccacatgcaggccagcgtgagcagaagctacctgcagagcctgggcttcagcgccagcgacctggtgatcagcacctggaacggctactacgagtgcagaccccagatcacccccaacctggtgatcttcaccatcccctacagcggctgcggcaccttcaagcaggccgacaacgacaccatcgactacagcaacttcctgaccgccgccgtgagcggcggcatcatcaagagaagaaccgacctgagaatccacgtgagctgcagaatgctgcagaacacctgggtggacaccatgtacatcgccaacgacaccatccacgtggccaacaacaccatccaggtggaggaggtgcagtacggcaacttcgacgtgaacatcagcttctacaccagcagcagcttcctgtaccccgtgaccagcagaccctactacgtggacctgaaccaggacctgtacgtgcaggccgagatcctgcacagcgacgccgtgctgaccctgttcgtggacacctgcgtggccagcccctacagcaacgacttcaccagcctgacctacgacctgatcagaagcggctgcgtgagagacgacacctacggcccctacagcagccccagcctgagaatcgccagattcagattcagagccttccacttcctgaacagattccccagcgtgtacctgagatgcaagatggtggtgtgcagagcctacgaccccagcagcagatgctacagaggctgcgtgctgagaagcaagagagacgtgggcagctaccaggagaaggtggacgtggtgctgggccccatccagctgcagaccccccccagaagagaggaggagcccagatag

SEQ ID NO: 193879 - DNA, 7656 bp, Artificial Sequence
  derived and/or modified sequence
tttatagcagcagtagaaatataccaccctagaggacacacctccttttagctaggtacctataaatgtccaggattttctattcaattgagaagaacccagcaaaatggggatctccacagtcatccttgaaatgtgtcttttatggggacaagttctatctacaggtgggtggatcccaaggactacagactacgcttcactgattccctcggaggtgcccttggatccaactgtagcagaaggttctccatttccctcggagtcgaccctggagtcaactgtagcagaaggttctccgatttccttggagtcaaccctggagtcaaccgtagcagaaggttctctgattccctcagagtcaaccctggagtcaactgtagcagaaggatctgattctggtttggccctgaggctggtgaatggagatggcaggtgtcagggccgagtggagatcctataccgaggctcctggggcaccgtgtgtgatgacagctgggacaccaatgatgccaacgtggtctgtaggcagctgggttgtggctgggccatgtcagctccaggaaatgcctggtttggccagggctcaggacccattgccctggatgatgtgcgctgctcaggacacgaatcctacctgtggagctgcccccacaatggctggctctcccataactgtggccatggtgaagatgctggtgttatctgctcagctgcccagcctcagtcaacactcaggccagaaagttggcctgtcaggatatcaccacctgtacccacagaaggatctgaatccagtttggccctgaggctggtgaatggaggcgacaggtgtcgaggccgagtggaggtcctataccgaggctcctggggcaccgtgtgtgatgactactgggacaccaatgatgccaatgtggtctgcaggcagctgggctgtggctgggccatgtcagccccaggaaatgcccagtttggccagggctcaggacccattgtcctggatgatgtgcgctgctcaggacatgagtcctacctgtggagctgcccccacaatggctggctcacccacaactgtggccatagtgaagacgctggtgtcatctgctcagctccccagtcccggccgacacccagcccagatacttggccgacctcacatgcatcaacagcaggacctgaatccagtttggccctgaggctggtgaatggaggtgacaggtgtcagggccgagtggaggtcctataccgaggctcctggggcaccgtgtgtgatgatagctgggacaccagtgacgccaatgtggtctgccggcagctgggctgtggctgggccacgtcagccccaggaaatgcccggtttggccagggttcaggacccattgtcctggatgacgtgcgctgctcaggctatgagtcctacctgtggagctgcccccacaatggctggctctcccataactgtcagcacagtgaagacgctggtgtcatctgctcagacacgttgccgaccatcaccttacctgcatcgacagtaggatctgaatccagtttggccctgaggctggtgaatggaggtgacaggtgtcagggccgagtggaggtcctataccgaggctcctggggcaccgtgtgtgatgacagctgggacaccaatgatgccaatgtggtctgcaggcagctgggctgtggctgggccatgttggccccaggaaatgcccggtttggtcagggctcaggacccattgtcctggatgacgtgcgctgctcagggaatgagtcctacttgtggagctgcccccacaatggctggctctcccataactgtggccatagtgaagacgctggtgtcatctgctcaggacctgaatccagtttggccctgaggctggtgaatggaggtgacaggtgtcagggccgagtggaggtcctataccgaggctcttggggcaccgtgtgtgatgacagctgggacaccaatgatgccaatgtggtctgcaggcagctgggctgtggctgggccacgtcagccccaggaaatgcccggtttggtcagggctcaggacccattgtcctggatgatgtgcgctgctcaggacatgagtcctacctgtggagctgccccaacaatggctggctctcccacaactgtggccatcatgaagatgctggtgtcatctgctcagctgcccagtcccggtcgacgcccaggccagacacgttgtcgaccatcacgttacctccatcgacagtaggatctgaatccagtttgaccctgaggctggtgaatggaagtgacaggtgtcagggccgagtagaggtcctataccgaggctcctggggcaccgtgtgtgatgacagctgggataccaatgatgccaatgtggtctgcaggcagctgggctgtggctgggccacgtcggccccaggaaatgcccggtttggccagggctcaggacccattgttctggatgatgtgcgctgctcaggacacgagtcctacctgtggagctgcccccacaatggctggctctcccacaactgtggccatcatgaagatgctggtgtcatctgctcagtttcccagtcccggccgacacccagtccagatacttggccgacctcacatgcatcaacagcaggacctgaatccagtttggccctgaggctggtgaatggaggtgacaggtgtcagggccgagtggaggtcctataccgaggctcctggggcaccgtgtgtgatgatagctgggacaccagtgacgccaatgtggtctgccggcagctgggctgtggctgggccacgtcagccccaggaaatgcccggtttggccagggttcaggacccattgtcctggatgacgtgcgctgctcaggctatgagtcctacctgtggagctgcccccacaatggctggctctcccataactgtcagcacagtgaagacgctggtgtcatctgctcagctgcccactcctggtcgacgcccagtccagacacattgccgaccatcaccttgcctgcatcgacagtaggatctgaatccagtttggccctgaggctggtgaatggaggtgacaggtgtcagggccgagtggaggtcctataccaaggctcctggggcaccgtgtgcgatgacagctgggacaccaatgatgccaatgtcgtctgcaggcaactgggctgtggctgggccatgtcagccccaggaaatgcccggtttggtcagggctcaggacccattgtcctggatgatgtgcgctgctcaggacacgagtcttacctgtggagctgcccccacaatggctggctctcccacaactgtggccatagtgaagacgctggtgtcatctgctcagcttcccagtcccggccaacacctagtccagacacttggccaacctcacatgcatcaacagcaggatctgaatccagtttggccctgaggctggtgaatggaggtgacaggtgtcagggccgagtggaggtcctataccgaggctcctggggcaccgtgtgtgatgactactgggacaccaatgatgccaatgtggtttgcaggcagctgggctgtggctgggccatgtcagccccaggaaatgcccggtttggccagggttcaggacccattgtcctggatgatgtgcgctgctcaggacatgagtcctatctgtggagctgcccccacaatggctggctctcccacaactgtggccatcatgaagacgctggtgtcatctgctcagcttcccagtcccagccgacacccagcccagacacttggccaacctcacatgcatcaacagcaggatctgaatccagtttggccctgaggctggtgaatggaggtgacaggtgtcagggccgagtggaggtcctataccgaggctcctggggcaccgtgtgtgatgactactgggacaccaatgatgccaatgtggtttgcaggcagctgggctgtggctgggccacgtcagccccaggaaatgcccggtttggccagggttcaggacccattgtcctggatgatgtgcgctgctcaggacatgagtcctatctgtggagctgcccccacaatggctggctctcccacaactgtggccatcatgaagacgctggtgtcatctgctcagcttcccagtcccagccgacacccagcccagacacttggccaacctcacatgcatcaacagcaggatctgaatccagtttggccctgaggctggtgaatggaggtgacaggtgtcagggccgagtggaggtcctataccgaggctcctggggcaccgtgtgtgatgactactgggacaccaatgatgccaatgtggtttgcaggcagctgggctgtggctgggccacgtcagccccaggaaatgcccggtttggccagggttcaggacccattgtcctggatgatgtgcgctgctcaggacatgagtcctatctgtggagctgcccccacaatggctggctctcccacaactgtggccatcatgaagacgctggtgtcatctgctcagcttcccagtcccagccgacacccagcccagacacttggccaacctctcgtgcatcaacagcaggatctgaatccactttggccctgagactggtgaatggaggtgacaggtgtcgaggccgagtggaggtcctataccaaggctcctggggcaccgtgtgtgatgactactgggacaccaatgatgccaacgtggtctgcaggcagctgggctgtggctgggccatgtcagccccaggaaatgcccagtttggccagggctcaggacccattgtcctggatgatgtgcgctgctcaggacacgagtcttacctgtggagctgcccccacaatggctggctctcccacaactgtggccatcatgaagatgctggtgtcatctgctcagctgctcagtcccagtcaacgcccaggccagatacttggctgaccaccaacttaccggcattgacagtaggatctgaatccagtttggctctgaggctggtgaatggaggtgacaggtgtcgaggccgagtggaggtcctgtatcgaggctcctggggaaccgtgtgtgatgacagctgggacaccaatgatgccaatgtggtctgcaggcagctgggctgtggctgggccatgtcggccccaggaaatgcccggtttggccagggctcaggacccattgtcctggatgatgtgcgctgctcagggaatgagtcctacctgtggagctgcccccacaaaggctggctcacccacaactgtggccatcacgaagacgctggtgtcatctgctcagccacccaaataaattctactacgacagattggtggcatccaacaactacaaccactgcaagaccctcttcaaattgtggtggcttcttattctatgccagtgggacattctccagcccatcctaccctgcatactaccccaacaatgctaagtgtgtttgggaaatagaagtgaattctggttatcgcataaacctgggcttcagtaatctgaaattggaggcacaccataactgcagttttgattatgttgaaatctttgatggatcattgaatagcagtctcctgctggggaaaatctgtaatgataccaggcaaatatttacatcttcttacaaccgaatgaccattcactttcgaagtgacatcagtttccaaaacactggctttttggcttggtataactccttcccaagcgatgccaccttgaggttggtcaatttaaattcatcctatggtctatgtgccgggcgtgtagaaatttaccatggtggcacctgggggacagtttgtgatgactcctggaccattcaggaagctgaggtggtctgcagacagctagggtgtggacgtgcagtttcagcccttggaaatgcatattttggctctggctctggccccatcaccctggacgatgtagagtgctcagggacggaatccactctctggcagtgccggaaccgaggctggttctcccacaactgtaatcatcgtgaagatgctggtgtcatctgctcaggaaaccatctatcgacacctgctccttttctcaacatcacccgtccaaacacagattattcctgcggaggcttcctatcccaaccatcaggggacttttccagcccattctatcccgggaactatccaaacaatgccaagtgtgtgtgggacattgaggtgcaaaacaactaccgtgtgactgtgatcttcagagatgtccagcttgaaggtggctgcaactatgattatattgaagttttcgatggcccctaccgcagttcccctctcattgctcgagtttgtgatggggccagaggctccttcacttcttcctccaacttcatgtccattcgcttcatcagtgaccacagcatcacaaggagagggttccgggctgagtactactccagtccctccaatgacagcaccaacctgctctgtctgccaaatcacatgcaagccagtgtgagcaggagctatctccaatccttgggcttttctgccagtgaccttgtcatttccacctggaatggatactacgagtgtcggccccagataacgccgaacctggtgatattcacaattccctactcaggctgcggcaccttcaagcaggcagacaatgacaccatcgactattccaacttcctcacagcagctgtctcaggtggcatcatcaagaggaggacagacctccgtattcacgtcagctgcagaatgcttcagaacacctgggtcgacaccatgtacattgctaatgacaccatccacgttgctaataacaccatccaggtcgaggaagtccagtatggcaattttgacgtgaacatttccttttatacttcctcatctttcttgtatcctgtgaccagccgcccttactacgtggacctgaaccaggacttgtacgttcaggctgaaatcctccattctgatgctgtactgaccttgtttgtggacacctgcgtggcatcaccatactccaatgacttcacgtctttgacttatgatctaatccggagtggatgcgtgagggatgacacctacggaccctactcctcgccatctcttcgcattgcccgcttccggttcagggccttccacttcctgaaccgcttcccctccgtgtacctgcgttgtaaaatggtggtgtgcagagcgtatgacccctcttcccgctgctaccgaggctgtgtgttgaggtcgaagagggatgtgggctcctaccaggaaaaggtggacgtcgtcctgggtcccatccagctgcagacccccccacgccgagaagaggagcctcggtaggtggtcgctctcagaccccactgtccaccggggcgcagacccctgactcggggacttgggatgttcctcttggtgtcatattccaactcagattgagccctacattgtgctgcacctggtcatacggagttgaatcagacctggttcccgcctcccccaaggctcatggtccttggaggacccgttgcagggtgaggtcaagagagttctgacctggatggcccatagacctgacgtcccagaatccatgcttctcatctgcaaaatgaaaatgtcaatacttacttcttagcactgttgagagggttacttacataaaggaattttggtgaaactgc

SEQ ID NO: 193880 - DNA, 7212 bp, Artificial Sequence
  derived and/or modified sequence
atgggaatttccactgtgattctggaaatgtgcctcctttggggacaagtcctgtccaccggtggttggatccctcgcacgactgattatgcttcgctaatcccctctgaggtgccgctggatcccacggtagcagaaggctctccctttccctcggaaagcacactggaatcaactgtggccgaaggaagccccatcagcctcgagtccaccctggagtctacggtcgctgaaggatccttaatcccctcagagtccacgctcgaatccaccgtggccgaagggagtgattcagggctggcactccgactggtcaacggagacgggcgttgtcaagggcgcgtggagatcctgtataggggatcttggggcactgtctgcgatgactcatgggacacaaacgacgccaatgtcgtctgtcggcagctgggctgtggctgggcaatgtctgcacccggaaacgcctggttcggacagggatctggccctatcgctctggacgacgtcaggtgttctggccacgaaagctatctatggagctgccctcataacgggtggctgtctcataactgtgggcacggggaggacgccggcgtaatctgcagcgcggctcaaccccagtcaacccttagacccgaatcctggcccgttcgcataagcccgcccgtgcctactgagggaagcgaaagctcactggccctgcggctggttaatgggggggaccgttgcagaggcagggtggaagttctctataggggctcttggggcaccgtgtgcgatgactactgggataccaacgatgctaatgtggtctgtcggcaactcggatgtggatgggctatgagtgcaccagggaatgcccagttcggccaggggagcggcccaattgtgttggacgatgtcaggtgttcaggacacgagtcatatctgtggagctgcccgcataatggctggcttactcacaattgtgggcactccgaggatgcaggggtgatttgtagcgcacctcagagtcggcccactccaagccccgacacctggcccacctctcacgcctccacagccggccctgagtcctccctcgccctgagattggtgaatggaggcgacagatgtcagggaagagtggaagtgctctaccgcgggtcctggggaaccgtgtgcgacgattcttgggacacctcagacgctaacgtggtgtgtagacagctgggctgtggctgggctacatccgctccaggaaatgctcggttcgggcagggtagtggtcctattgtcctagacgatgtgcgatgcagtgggtacgagtcttacctgtggtcatgcccacacaatggatggttaagtcacaattgtcagcatagcgaagatgccggcgtgatttgttccgacaccctgccaaccatcacgttaccagccagtaccgtgggttcggaatctagtctcgcacttcgattagttaacggtggcgacaggtgtcagggtagagtagaagtactctaccgcggatcctggggcacggtctgtgatgactcctgggacacgaatgatgccaacgtggtgtgcaggcagctgggctgtggatgggcaatgctggcccccggcaatgctcggttcggtcagggaagtggacccatcgtgctggacgacgtgaggtgttcaggtaacgaaagctacttatggagctgccctcataacggatggctgagtcataactgtggtcattctgaggacgctggggttatttgttctggacccgaaagctccttagcactcagattggtgaatgggggagacagatgccaaggaagggtcgaagtgctgtatcgaggttcttgggggaccgtgtgtgacgatagctgggacactaatgatgctaacgtggtgtgcagacagttggggtgtggctgggccactagtgcgcccggcaacgcacgctttggccaaggctccgggccaatcgttttggatgatgtacggtgcagtgggcacgaaagctatttatggagctgtcccaataacggctggctcagtcacaattgcggccaccatgaggacgcaggcgtcatctgctccgcagcacagagtcggagcaccccacgtccagacaccctctcaaccatcacactgcccccaagcacagtcggctcagagagcagtctaacactgcggctagtgaacggatccgataggtgccagggtagggtagaggtgctgtatcggggtagctggggcaccgtgtgcgatgattcttgggatactaatgacgctaatgtggtgtgtagacagttgggctgtggctgggcgacatccgccccaggaaacgcacgctttggccagggcagcggcccgattgtgttggatgacgtacggtgctctgggcatgaatcttatctgtggagctgcccccataacggctggctgtcacacaattgtggacaccatgaggatgcgggggtgatttgctccgtgtcgcagagcaggccgacccccagtcctgatacctggcctacttctcacgcaagcactgccggtccagaaagctcactggcgttgaggttggtcaatggaggcgatcgctgtcaggggagagtcgaagtgctctatagagggtcatggggtacggtctgcgacgattcctgggatacctctgacgctaatgtggtctgtcggcagctgggatgcggttgggccacttcagcaccggggaatgctaggttcggacagggaagcggtcctatcgtgctagacgatgttagatgttccggatacgaatcctatctatggagttgtccacacaacggttggctgagtcacaattgtcaacacagcgaggatgcaggtgtaatttgctctgcagcccattcttggtccactccatctcctgacacgctccctaccattactctccccgcctccacagtggggtccgaatcctcactcgccctccggctggtcaacggaggtgatcgatgccagggcagggtggaggtgctctaccagggatcttgggggactgtgtgcgacgatagctgggatacaaatgatgcaaacgtggtgtgcagacaactcggttgcgggtgggctatgagtgctccggggaacgcaagatttggtcagggttcaggacccattgtgctggacgacgtccgctgcagcgggcacgagagctacctttggtcgtgtccccacaacggttggttgagccataattgcggccattcggaggacgcaggagtcatctgcagcgcaagtcagtcccgcccgactcctagtcctgacacctggcctaccagccacgcctccactgctggttcagaaagtagcctggccctgaggctcgtcaatggcggagatagatgccaaggacgagtggaggttctttaccgggggagttggggcactgtctgcgatgattattgggacacgaatgatgcaaacgtggtgtgtcgccagctgggatgtggctgggccatgagtgctccaggtaacgctcgcttcgggcagggctcagggcccattgtgcttgacgacgtgcggtgcagcgggcacgagtcttatctctggtcatgccctcacaacggatggttaagccataattgtggacatcacgaagacgcaggcgttatctgttctgcaagccagagtcaaccgacaccgagccctgacacttggccaaccagccacgccagcacagctggaagtgagagttcgctggccctcaggcttgtgaacggcggcgatcggtgccagggtcgagtggaagtgttgtataggggttcttggggaacagtctgtgatgattattgggacaccaatgacgccaatgtagtctgccgtcagttaggctgcggctgggctaccagcgcaccgggaaatgcccggtttggacagggaagcggaccaattgtgttggacgatgtgcgttgctccgggcacgaatcttacctttggtcgtgtccccacaatgggtggcttagccacaattgtgggcatcatgaagatgccggggtcatctgttcggccagtcagagccagccgaccccctcccctgatacctggccgacatcccatgcctccacagccggaagcgagtccagtttagctctgcggctggtgaatggtggcgaccggtgtcaagggcgtgtggaagttttgtaccgggggtcatggggcaccgtgtgtgacgactactgggatactaatgacgctaacgtcgtgtgcaggcaactggggtgcggctgggccacatctgcaccaggtaacgcccggtttggtcaagggagcggccccatcgtcctcgatgacgtgagatgcagcggacacgaatcatacctgtggtcctgcccgcataacggctggctttctcataattgtggacatcacgaggacgcaggagtgatctgcagcgcctcccaatcacagcctaccccatcaccagacacgtggccaacatcccgcgcctccactgctgggagtgaatccaccctggcacttcgccttgtgaatgggggtgatagatgtagggggcgggtggaggtgctgtaccaaggcagttggggtactgtttgtgatgattattgggataccaacgatgccaatgtggtctgtcgtcagctgggatgcgggtgggccatgtccgccccagggaacgctcagttcggtcagggttccgggccaatcgtccttgatgatgtccgttgctcaggacacgagagttacctgtggagctgcccccacaacggatggctttcacacaactgtggacaccacgaggacgccggtgtgatttgctccgccgcccaaagccaatctactccgcggccggacacatggctgactacgaatctccctgcgctgaccgtgggttctgaatcttccctggcattaagactggtcaacgggggcgacaggtgtagaggccgcgtggaggtgctttaccgcggaagctggggcaccgtttgcgacgactcatgggacactaacgatgcgaacgtcgtctgtcggcagctcggctgtggttgggctatgtcagcccccggcaatgccaggttcggccagggtagcggccccatcgttttggatgatgttaggtgctcgggcaacgaaagctacctatggagttgccctcataagggatggctaactcacaactgtggccatcacgaggatgctggcgttatctgctccgcaacacaaattaattctacaacaacggactggtggcatcctaccaccaccactacagcccgtccttcatccaactgcggggggtttcttttttatgccagtgggacatttagttctccatcttatcccgcttattaccctaataacgcaaagtgcgtgtgggaaatagaagtcaacagcgggtacagaatcaacctggggttctccaacttgaagctggaagctcatcacaactgctcgtttgattacgtcgaaatcttcgacggcagtctgaacagctctctactgttaggcaaaatctgtaacgacacccgccagatattcacctcatcatataaccggatgacaattcactttagatccgatatttctttccagaacacagggtttcttgcttggtacaactcctttccttctgacgctactctgcgtttggtgaacctgaattcgagctatggcctttgcgccggcagagtcgaaatctatcatggcggcacttggggcaccgtttgcgatgacagctggaccatccaggaagccgaggtagtctgtcggcagcttggctgcggaagggctgtaagcgccctcgggaacgcttactttgggtcgggttcaggtccgataactttagacgacgtggagtgtagtggcaccgaaagcactctgtggcagtgccggaatcggggctggtttagccacaattgtaaccaccgggaggatgcgggtgtgatctgctcaggaaatcacttgtctacaccagcgccctttttgaacattactagaccaaacactgactattcctgtggggggttcctcagccaacctagcggtgacttctcctccccattctatccgggaaactatcctaataacgctaagtgcgtgtgggacatcgaagtgcagaataactatcgggtgaccgtcatctttagagatgttcagctggaaggtggatgtaactacgactatattgaggtgtttgatggtccctataggtcctctccgcttatagcccgggtgtgtgacggcgcccgcggttcattcacgagctcctccaactttatgtcaattcgcttcatttctgatcacagtattacgaggagaggattcagggccgagtactattctagtcccagcaacgactctactaaccttctctgcctgcctaaccacatgcaagctagcgtgtcaaggtcatatctgcagagcctaggattttctgcaagtgatctcgtgatctcgacctggaacggttattacgagtgtcgccctcagataaccccaaacctcgtgatatttacaataccgtacagcggatgtgggacattcaagcaagcggataacgacacaatagattactctaatttcctgaccgccgcggtcagcggcggcataatcaagcgccgcactgatttaaggatccacgttagctgtcgcatgctccagaatacctgggtagacactatgtacatagcaaacgacacaatccatgtggctaacaacacaatacaagtcgaagaggttcagtatggcaattttgacgtgaacatttcattctacacctcttcatcatttctttacccagtaacatctaggccctattacgtggatctgaatcaggacctttacgtgcaggctgagatccttcatagcgacgcagtgttgacactgttcgttgatacatgcgtggcttctccgtacagcaatgacttcacctccctgacttatgatctgatccgatccggatgtgtgcgagatgatacctacgggccctattcttctccatctctccgaattgccaggtttcggttcagggctttccatttcttgaacaggtttccctctgtctatttgagatgtaagatggtggtctgccgcgcgtatgacccaagttctcggtgttaccggggctgcgtattgaggtccaagagggacgtcgggtcctaccaggaaaaagtagacgtcgtcctcggccccattcagctccaaactccaccccgccgggaggaggagccgaggtag

SEQ ID NO: 193881 - DNA, 7212 bp, Artificial Sequence
  derived and/or modified sequence
atggggatctcaactgttatcctggagatgtgcctgctatggggccaggtgctgtcaactggaggatggatcccccggaccacagactacgcttccttgatcccctccgaggtccccctggatcccaccgtcgctgaaggatctccattcccctcagagagtacacttgaaagcacagtcgcagagggctctccaatctctttggaatccacactcgagagtacggttgccgaaggcagcctgatacctagcgagtccaccctggaaagtaccgttgcggaggggtccgactccggcctcgcactcaggctggtgaacggagatggccgctgccagggtagagtggagattctttatcgcgggtcatggggaactgtatgtgatgattcatgggatactaacgacgcgaacgttgtctgtagacaacttgggtgtgggtgggccatgtccgctcccgggaacgcctggtttggtcaggggagcggacctattgcccttgatgatgtgcggtgttccggccacgagagttacctgtggagctgccctcataacggatggctgtcccataactgcgggcatggtgaagacgccggggtcatttgcagcgccgctcaaccacagtcgactctgcgccccgagagctggccggtgagaatctcaccgcctgtcccaaccgagggatcggagagttccctcgcccttcgcctcgtgaacggtggggatcgttgtagagggcgtgtcgaggttctgtataggggcagttggggcactgtgtgtgatgactattgggatactaatgacgccaatgttgtatgtaggcagcttgggtgtggatgggccatgtcagcgccaggtaatgctcagttcggacagggtagcggccctatcgtgctcgatgatgtgaggtgttctggacacgagagttacctctggtcctgtccccacaatggatggttgacccataactgtgggcacagtgaggacgcgggagttatttgttccgcacctcagtcacggcccaccccgtcccccgatacttggccaacctcacacgcctctaccgcaggaccagaaagctctctggctctgaggctggtaaatggcggagaccggtgccaggggcgggtcgaagtcctttatagagggtcttggggaactgtgtgcgatgactcctgggacaccagcgatgccaacgtagtatgtcgacagttgggatgtggttgggctacctccgctccagggaatgctaggtttggacagggttcaggccctatcgtgctggatgatgtgcgctgctcaggttatgagtcatatctgtggagttgtcctcacaatggatggctaagccataactgccagcactcggaggacgctggagtcatatgctcagataccctgcccactattacactcccagcatccactgtgggctcggagtcctcccttgccctgaggctagtgaacggaggggatagatgtcaaggacgcgtggaagtcttatatcgcggaagctgggggacagtgtgtgacgactcatgggatactaacgacgccaacgtcgtttgccgccaactgggctgtggctgggccatgctggcccctgggaatgcccggttcggacagggctctgggcctatcgttctagacgacgtccggtgttctggaaacgaatcctacctttggtcttgtccgcacaacgggtggctcagccacaactgtgggcactcggaggacgcaggcgttatttgttcgggacccgagtcctctctcgcacttcgcttagtgaacggtggtgaccgttgccagggacgcgttgaggtactttaccggggaagctggggaactgtctgtgacgattcctgggacaccaatgacgcaaacgtcgtttgccgacagctggggtgtgggtgggccacaagtgcaccaggcaatgctcggttcggccagggtagtggacctattgttcttgacgatgtacggtgttcaggccacgagagctatctctggtcttgtcccaacaatgggtggctctcccacaactgtggtcatcacgaagacgctggcgtgatatgtagcgctgcccagagcagatcaacccccaggcctgacactctttctaccatcacattgccaccgtccacagttgggtcagagagtagccttacccttagactggtcaatggatccgacagatgtcagggaagggtcgaagttctttatcgagggagctgggggactgtctgtgacgactcatgggatactaacgatgcaaatgtggtgtgccggcagctgggatgtggttgggctacctctgctccaggcaatgcgaggtttggccagggtagcggtccaatcgttctcgacgacgtaagatgcagcggtcacgagagctacctgtggagctgtccacacaacggttggttgtcccacaactgcggccatcacgaagatgcaggcgttatatgctctgtcagccagagccgcccgacaccttccccagatacatggcccacgtctcacgctagcacagccggaccagagagctctctcgccctgagactggtcaacgggggagaccggtgccaaggacgggttgaagtgctgtatcgtggatcttggggtactgtatgtgatgattcatgggataccagcgatgcgaacgtggtgtgcaggcagctgggttgtggatgggccacctcggcaccaggcaacgcacgcttcggccagggctctggtccaatcgttttagacgacgtgcgctgctcgggttacgagagctacctctggtcgtgcccgcataatgggtggctgtcacacaattgccagcactcggaggacgcaggagtgatatgcagtgcagcacattcttggtctaccccttctcccgacacattgcctacaatcacattaccggcttcaactgtggggtcggagtccagcttagcccttaggctagtgaatggtggtgaccgctgccaaggccgggtcgaggtgctctatcagggtagctggggcactgtgtgcgacgattcctgggacacaaacgacgctaatgtcgtgtgccgccagctcggctgcggttgggctatgtcagctcccggaaacgcccgctttggccaggggtccggccctatcgttctggatgatgtgaggtgtagtggccacgagagttatctctggtcctgcccccacaatggatggctgtcccacaactgtgggcacagcgaagacgcgggcgtaatctgcagcgcttcacaatctcgccccacgccatcccctgatacctggcccaccagtcatgccagcactgctggatcggaatcttccctggcactccgcttggtgaatggaggagaccgatgccagggccgggtcgaagttttgtatagagggagctggggtaccgtgtgtgatgactactgggacacaaatgacgcaaatgttgtttgcagacagctcggatgtggctgggctatgtctgcccctggcaacgcccggtttggtcagggctcgggaccaattgtactggacgacgtgcggtgttctgggcatgaatcatacctctggtcatgtccccataatggctggctgtcacataactgtggacaccacgaggacgccggagtcatctgttctgcatctcagtcacagcctacacctagtccggacacttggccaacatcacacgccagtacagcgggttctgagagctctctggccctgcggttagttaacggtggcgacaggtgccagggaagggttgaagtgctatacaggggtagctggggtacagtgtgtgatgactattgggatactaacgatgcaaatgtcgtgtgtaggcagctggggtgtggatgggcaacaagtgccccgggaaatgccagatttggtcagggctctggtcccatcgtcttggatgatgtgcgttgttctggccatgaatcctacctgtggtcttgtcctcacaacggctggctttcccacaactgcgggcatcacgaagacgctggtgtcatttgttctgcttctcagtcgcagccaaccccaagtccggacacttggcctacttctcacgccagtaccgccggctccgagtcaagtctcgcactccgcctggtgaacggaggagatcgatgtcaaggcagggtagaggtgctgtatcgtggcagttggggaaccgtttgtgacgattactgggacaccaacgatgcgaacgtagtctgtcggcagttgggctgcggctgggcaacaagtgccccaggtaatgcccgcttcggccagggaagcggtccaatcgtgcttgacgacgtgcgctgtagcgggcatgaatcatatttatggtcatgcccccataacgggtggctctcacataactgcggccaccatgaagacgctggggtcatctgttcagcatctcagtcccagcccacgccttcacccgacacctggccaaccagtcgtgcttcgactgcaggctctgagagtacactcgcattgaggctggtaaatggcggcgatcgctgtaggggacgggttgaggtcctctatcagggaagctgggggacagtctgtgatgattattgggacactaatgatgccaatgtggtctgccgccagttaggttgcggctgggccatgagtgctcccggtaatgcacagttcgggcagggcagcgggcccatcgtgctcgatgatgtccgatgttctggccatgagtcatatttatggtcctgccctcacaacggctggctgagccataattgtggacaccacgaagatgcaggtgtcatctgttcggccgctcaaagccagtccacccccaggcccgacacctggctgactaccaacctgcccgccctcactgttggttcagagtctagcttggccctccggctggtgaacgggggggaccggtgccgtggccgggttgaggtcctgtatagaggaagttgggggacggtttgtgacgactcctgggataccaacgatgcaaatgtggtgtgccgccagctcgggtgtggatgggcgatgagcgctccaggaaacgctaggttcggacagggcagcggtccgatcgttcttgatgatgttaggtgcagtggcaacgaaagctatttatggtcttgtccccataaggggtggctgacacataattgcggacaccacgaggacgcaggtgtgatttgttccgcaacgcaaattaactccactactacggattggtggcatccgacaactaccacgaccgctcgcccttcctccaattgcggagggttcctgttctacgcgtctggcactttttcttccccctcctatcccgcctactaccccaacaatgccaagtgtgtgtgggagatcgaggtgaattcagggtatcggattaatctgggattttcgaatctgaaattagaggcccaccataactgcagctttgactacgtggagattttcgacggaagcctcaattcgtccctccttcttggaaagatttgtaatgatacaaggcagatctttacctcctcatataaccggatgaccatacattttcggagtgacatatcctttcaaaacactggatttcttgcatggtataatagttttccatctgacgcaacattacgtcttgttaatctgaactcgagctacggcttgtgcgccggacgagtggagatataccatggggggacctggggcacagtctgtgacgactcatggacaatccaggaggcggaggtggtttgcagacagctcggatgcggtagggcagtgagtgccctgggcaatgcgtattttggaagcggcagcggcccaataactctggacgacgtagaatgcagcggcaccgagagcactctctggcagtgtaggaacaggggctggttcagccacaattgcaatcatcgggaagacgctggcgttatttgctccggcaatcatctgagcacccccgcccccttcctcaacatcacgaggcccaataccgattactcttgtggaggattcctgtcccaaccttcaggggatttctctagtcccttctatcccggaaactatccaaataatgccaagtgtgtttgggacatcgaagtgcagaacaattacagagtcacagtgattttccgcgacgtccagctggaaggcggctgcaactacgattacatcgaggtattcgacggcccctataggtcttcacctctgatcgctcgggtctgcgatggggcccggggaagcttcacgtcctcttccaactttatgagcatccgtttcatatcagatcattcaatcacccggagaggcttcagagctgagtactattcttcaccatcaaacgattctacaaatctgctttgcttgccaaatcacatgcaggcaagcgtatcacgtagctacctccagagccttggcttctctgcttctgatttagtgatcagcacctggaatggttactacgaatgtcggccccagattacacctaatttagtgatttttactattccatattctgggtgtggcaccttcaaacaggcagataatgacaccattgactacagcaatttcctcaccgccgcagtgagtggaggaattatcaaaaggcgcaccgacctgcgaattcacgtgtcctgtaggatgctgcaaaatacatgggttgacaccatgtatatcgccaatgatacaatccatgtcgccaacaatacgatccaggtggaggaagtgcagtacggcaactttgacgttaacatcagcttttatacctcttctagcttcttgtacccagtgactagccgtccgtactacgtggacttgaatcaggatctgtatgtgcaggcagagatcctccacagcgatgcggtccttactctcttcgtggatacatgtgtggctagcccttatagcaatgactttacctcactcacctatgatctcattcgttcaggatgtgttcgggacgacacgtatggcccctactcatccccttctctgcgaatcgcacgctttagattccgcgcctttcacttcttaaatagattcccgtcggtgtacttgcgctgtaaaatggtcgtgtgcagagcctacgacccctcctcacgctgttacaggggttgcgtgttgcgcagtaaaagagatgttgggagttaccaagagaaggtcgacgtcgtcctgggccccatccagctgcagacgccacctcgccgggaagaagagcctaggtag

SEQ ID NO: 193882 - DNA, 7212 bp, Artificial Sequence
  derived and/or modified sequence
atgggcatcagcaccgtcatcctggagatgtgcctgctgtggggccaggtgctgagcactggaggctggatccccaggaccacagattatgccagcctcatccccagcgaggtgcccctggaccccaccgtggccgagggcagccccttccccagcgagagcaccctggagagcacagtggccgagggcagccccatcagcctggagagcaccctggagagcacagtggccgagggcagcctcatccccagcgagagcaccctggagagcacagtggccgagggcagtgacagcggcctggccctgcggctggtgaatggagatggccgctgccagggccgggtggagatcctgtaccggggctcctggggcaccgtgtgtgatgacagctgggacaccaatgatgccaacgtggtgtgccggcagctgggctgcggctgggccatgtctgcccctggaaatgcctggtttggccagggcagcggccccatcgccctggatgatgtgcgctgcagcggccacgagagctacctgtggagctgcccccacaacggctggctgagccacaactgtggccatggagaagatgctggggtcatctgcagcgctgcccagccccagagcaccctgcggcctgagagctggcctgtgcgcatcagcccccctgtgcccacagagggcagcgagagcagcctggccctgcggctggtgaatggaggagaccgctgccggggccgggtggaggtgctgtaccggggctcctggggcaccgtgtgtgatgactactgggacaccaatgatgccaacgtggtgtgccggcagctgggctgcggctgggccatgtctgcccctggaaatgcccagtttggccagggcagcggccccatcgtgctggatgatgtgcgctgcagcggccacgagagctacctgtggagctgcccccacaacggctggctgacccacaactgtggccacagtgaagatgctggggtcatctgcagcgccccccagagccggcccacccccagcccagacacctggcccaccagccacgccagcacagctggccctgagagcagcctggccctgcggctggtgaatggaggagaccgctgccagggccgggtggaggtgctgtaccggggctcctggggcaccgtgtgtgatgacagctgggacaccagtgatgccaacgtggtgtgccggcagctgggctgcggctgggccaccagcgcccctggaaatgcccgcttcggccagggcagcggccccatcgtgctggatgatgtgcgctgcagcggctatgagagctacctgtggagctgcccccacaacggctggctgagccacaactgccagcacagtgaagatgctggggtcatctgcagcgacaccctgcccaccatcaccctgcctgccagcacagtgggcagcgagagcagcctggccctgcggctggtgaatggaggagaccgctgccagggccgggtggaggtgctgtaccggggctcctggggcaccgtgtgtgatgacagctgggacaccaatgatgccaacgtggtgtgccggcagctgggctgcggctgggccatgctggcccctggaaatgccaggtttggccagggcagcggccccatcgtgctggatgatgtgcgctgcagcggaaatgaaagctacctgtggagctgcccccacaacggctggctgagccacaactgtggccacagtgaagatgctggggtcatctgcagcggccctgagagcagcctggccctgcggctggtgaatggaggagaccgctgccagggccgggtggaggtgctgtaccggggctcctggggcaccgtgtgtgatgacagctgggacaccaatgatgccaacgtggtgtgccggcagctgggctgcggctgggccaccagcgcccctggaaatgccaggtttggccagggcagcggccccatcgtgctggatgatgtgcgctgcagcggccacgagagctacctgtggagctgccccaacaacggctggctgagccacaactgtggccaccatgaagatgctggggtcatctgcagcgctgcccagagccgcagcacccccaggccagacaccctgagcaccatcaccctgccccccagcacagtgggcagcgagagcagcctgaccctgcggctggtgaatggaagtgaccgctgccagggccgggtggaggtgctgtaccggggctcctggggcaccgtgtgtgatgacagctgggacaccaatgatgccaacgtggtgtgccggcagctgggctgcggctgggccaccagcgcccctggaaatgcccgcttcggccagggcagcggccccatcgtgctggatgatgtgcgctgcagcggccacgagagctacctgtggagctgcccccacaacggctggctgagccacaactgtggccaccatgaagatgctggggtcatctgcagcgtgtcccagagccggcccacccccagcccagacacctggcccaccagccacgccagcacagctggccctgagagcagcctggccctgcggctggtgaatggaggagaccgctgccagggccgggtggaggtgctgtaccggggctcctggggcaccgtgtgtgatgacagctgggacaccagtgatgccaacgtggtgtgccggcagctgggctgcggctgggccaccagcgcccctggaaatgccaggtttggccagggcagcggccccatcgtgctggatgatgtgcgctgcagcggctatgagagctacctgtggagctgcccccacaacggctggctgagccacaactgccagcacagtgaagatgctggggtcatctgcagcgctgcccacagctggagcacccccagcccagacaccctgcccaccatcaccctgcctgccagcacagtgggcagcgagagcagcctggccctgcggctggtgaatggaggagaccgctgccagggccgggtggaggtgctgtaccagggctcctggggcaccgtgtgtgatgacagctgggacaccaatgatgccaacgtggtgtgccggcagctgggctgcggctgggccatgtctgcccctggaaatgcccgcttcggccagggcagcggccccatcgtgctggatgatgtgcgctgcagcggccacgagagctacctgtggagctgcccccacaacggctggctgagccacaactgtggccacagtgaagatgctggggtcatctgcagcgccagccagagccggcccacccccagcccagacacctggcccaccagccacgccagcacagctggcagcgagagcagcctggccctgcggctggtgaatggaggagaccgctgccagggccgggtggaggtgctgtaccggggctcctggggcaccgtgtgtgatgactactgggacaccaatgatgccaacgtggtgtgccggcagctgggctgcggctgggccatgtctgcccctggaaatgccaggtttggccagggcagcggccccatcgtgctggatgatgtgcgctgcagcggccacgagagctacctgtggagctgcccccacaacggctggctgagccacaactgtggccaccatgaagatgctggggtcatctgcagcgccagccagagccagcccacccccagcccagacacctggcccaccagccacgccagcacagctggcagcgagagcagcctggccctgcggctggtgaatggaggagaccgctgccagggccgggtggaggtgctgtaccggggctcctggggcaccgtgtgtgatgactactgggacaccaatgatgccaacgtggtgtgccggcagctgggctgcggctgggccaccagcgcccctggaaatgcccgcttcggccagggcagcggccccatcgtgctggatgatgtgcgctgcagcggccacgagagctacctgtggagctgcccccacaacggctggctgagccacaactgtggccaccatgaagatgctggggtcatctgcagcgccagccagagccagcccacccccagcccagacacctggcccaccagccacgccagcacagctggcagcgagagcagcctggccctgcggctggtgaatggaggagaccgctgccagggccgggtggaggtgctgtaccggggctcctggggcaccgtgtgtgatgactactgggacaccaatgatgccaacgtggtgtgccggcagctgggctgcggctgggccaccagcgcccctggaaatgccaggtttggccagggcagcggccccatcgtgctggatgatgtgcgctgcagcggccacgagagctacctgtggagctgcccccacaacggctggctgagccacaactgtggccaccatgaagatgctggggtcatctgcagcgccagccagagccagcccacccccagcccagacacctggcccaccagccgggccagcacagctggcagcgagagcaccctggccctgcggctggtgaatggaggagaccgctgccggggccgggtggaggtgctgtaccagggctcctggggcaccgtgtgtgatgactactgggacaccaatgatgccaacgtggtgtgccggcagctgggctgcggctgggccatgtctgcccctggaaatgcccagtttggccagggcagcggccccatcgtgctggatgatgtgcgctgcagcggccacgagagctacctgtggagctgcccccacaacggctggctgagccacaactgtggccaccatgaagatgctggggtcatctgcagcgctgcccagagccagagcacccccaggccagacacctggctgaccaccaacctgcctgccctgactgtgggcagcgagagcagcctggccctgcggctggtgaatggaggagaccgctgccggggccgggtggaggtgctgtaccggggctcctggggcaccgtgtgtgatgacagctgggacaccaatgatgccaacgtggtgtgccggcagctgggctgcggctgggccatgtctgcccctggaaatgccaggtttggccagggcagcggccccatcgtgctggatgatgtgcgctgcagcggaaatgaaagctacctgtggagctgcccccacaagggctggctgacccacaactgtggccaccatgaagatgctggggtcatctgcagcgccacccagatcaacagcaccaccacagactggtggcaccccaccaccaccaccacagcccggcccagcagcaactgtggcggcttcctgttctacgccagcggcaccttcagcagccccagctacccagcctactaccccaacaatgccaagtgtgtgtgggagattgaggtgaacagcggctaccgcatcaacctgggcttcagcaacctgaagctggaggcccaccacaactgcagctttgattatgtggagatctttgatggcagcctgaacagcagcctgctgctgggcaagatctgcaatgacacccggcagatcttcaccagcagctacaacaggatgaccatccacttcagaagtgacatctccttccagaacacaggcttcctggcctggtacaacagcttccccagtgatgccaccctgcggctggtgaacctgaacagcagctatggcctgtgtgccggccgggtggagatctaccatggaggcacctggggcaccgtgtgtgatgacagctggaccatccaggaggccgaggtggtgtgccggcagctgggctgcggccgggctgtgtctgccctgggcaatgcctactttggaagtggcagcggccccatcaccctggatgatgtggagtgcagcggcacagagagcaccctgtggcagtgcaggaacagaggctggttcagccacaactgcaaccacagagaagatgctggggtcatctgcagcggcaaccacctgagcaccccagcccccttcctgaacatcacccggcccaacacagactacagctgtggcggcttcctgagccagcccagcggggacttcagcagccccttctacccaggcaactaccccaacaatgccaagtgtgtgtgggacatcgaggtgcagaacaactacagagtgaccgtcatcttcagagatgtgcagctggagggcggctgcaactatgactacatcgaggtgtttgatggcccctaccgcagcagccccctgattgcccgggtgtgtgatggagcccggggcagcttcaccagcagcagcaacttcatgagcatccgcttcatcagtgaccacagcatcacccggcggggcttccgggcagagtactacagcagccccagcaatgacagcaccaacctgctgtgcctgcccaaccacatgcaggcctctgtgagccgcagctacctgcagagcctgggcttcagcgccagtgacctggtgatcagcacctggaatggctactatgaatgtcggccccagatcacccccaacctggtgatcttcaccatcccctacagcggctgcggcaccttcaagcaggccgacaatgacaccatcgactacagcaacttcctgacagctgctgtgtctgggggcatcatcaagagaagaacagacctgcgcatccacgtgtcctgcaggatgctgcagaacacctgggtggacaccatgtacatcgccaatgacaccatccacgtggccaacaacaccatccaggtggaggaggtgcagtatggcaactttgatgtgaacatctccttctacaccagcagcagcttcctgtaccctgtgaccagccggccctactacgtggacctgaaccaggacctgtatgtgcaggccgagatcctgcacagtgatgctgtgctgaccctgtttgtggacacctgtgtggccagcccctacagcaatgacttcaccagcctgacctatgacctgatccgcagcggctgtgtgagagatgacacctacggcccctacagcagccccagcctgagaattgcccgcttccgcttccgggccttccacttcctgaaccgcttccccagcgtgtacctgcgctgcaagatggtggtgtgccgggcctatgaccccagcagccgctgctaccggggctgtgtgctgcggagcaagagagatgtgggcagctaccaggagaaggtggatgtggtgctgggccccatccagctgcagaccccaccaagaagagaggaggagcccaggtag

SEQ ID NO: 193883 - DNA, 7212 bp, Artificial Sequence
  derived and/or modified sequence
atgggcatcagcaccgtgatcctggagatgtgcctgctgtggggccaagtgctcagcacaggtggttggattccaaggacaactgattacgcctcccttatacccagcgaggtccccctggaccctaccgtggccgaaggctctcctttccctagcgagtctactcttgagtccaccgtagccgaaggctcccccatatcattagagagcaccctagaatctaccgtcgctgaggggagcctgatcccttcagaatctaccctggagagcactgtggccgagggtagcgattctggcctggcgcttcggcttgtcaatggggacggacgctgccaggggagagtggagattctctaccgtggttcctggggaaccgtttgtgacgacagctgggacaccaacgacgctaatgttgtttgcaggcaattagggtgtggctgggcaatgtctgcgcccggtaatgcatggttcggacagggatccggaccaatcgccctggatgatgtcagatgctccggccacgagagttatctttggagctgtccccacaatggttggttgtcccataactgcgggcacggggaggatgcaggcgtgatctgctccgctgcgcagccccagagcactctaagaccagaatcctggccagttaggataagtccccccgtgcccaccgagggaagtgaaagcagcctggcccttcgactagtgaatggaggggatcgatgcaggggtcgcgtagaggtgctgtaccgagggtcctgggggacagtttgcgatgattattgggacacgaatgacgccaacgtagtctgtcggcagcttgggtgcgggtgggctatgagcgccccaggcaacgcccagtttgggcagggatccggtccaatagttctcgatgacgtcagatgtagtggacacgaatcatatctttggtcgtgtcctcataatggatggttaacccacaattgtggtcatagtgaggatgcaggggttatctgtagtgcgccacagtcaaggcctacgccatcacccgacacatggcctactagtcatgccagcaccgcaggaccagaaagttctctggctctgaggttagttaacggaggagatcgttgtcaaggccgcgtagaggtgctttatcgcggtagctggggtaccgtatgcgacgactcttgggacacgtccgacgccaacgtcgtatgtcgccagctcgggtgcggctgggccacttcagcgcctggcaacgccaggtttggacagggtagcgggcccatagtcctggatgatgtgagatgcagcggatacgagtcttacctttggtcttgccctcacaacgggtggctgtctcacaattgccaacattccgaagatgctggggttatctgcagtgacacattgcctacaataactctgcctgcttccactgtcgggagtgaatccagtttagctctacgactggtgaacggaggcgatcggtgtcaaggccgtgtggaagttctgtataggggcagttgggggaccgtctgcgacgactcttgggacactaacgatgcaaatgtcgtctgccggcagttgggatgcgggtgggccatgctcgccccaggaaatgcgcggttcggccaggggtcaggacctatcgtgttggacgacgtgaggtgtagtggcaacgaatcgtatttgtggagctgcccccacaatggctggctgagccacaactgcggtcactcagaggatgcaggtgtgatatgttccgggccagagtcttctctggctctccgcctggttaatggaggcgaccgctgccagggcagggtcgaagttttatatcgtggctcgtggggaacagtctgcgacgactcttgggatacgaatgacgccaacgtggtctgtcgccagctcggctgcgggtgggccacgtccgcccctggcaacgcacgctttggtcagggctcagggccgatcgtgctggatgatgtgagatgttctggccacgaaagttacctgtggtcatgtccaaataatggttggctgagtcacaactgcgggcatcatgaggacgccggtgttatttgctccgccgcgcagagccgatcgacccctcggcctgacactcttagtacaattacgctccctccctctacagtgggatctgagtcatctctgaccctgagacttgtgaacggcagcgataggtgccagggtagagttgaggtgctgtaccgcggcagttggggaacagtttgcgacgactcctgggatactaatgacgcaaatgtagtgtgtagacaactgggctgcggatgggctacctctgctcctggcaacgcccgttttggacaggggtcagggcctatcgtgctggacgatgtacgatgcagcggacacgaatcttatctatggtcgtgcccccataacggctggctaagccataattgtggtcaccacgaggatgccggggtaatatgtagcgtgtcgcagagcagaccaacaccatctcctgacacctggccaacctctcacgcttcaacagcagggccagagtctagtctggcccttaggctggttaatggtggcgatcgttgtcagggaagagtggaggtcctttatcggggtagctggggcacagtttgcgatgatagctgggatacaagtgacgccaatgttgtgtgccggcaactggggtgtgggtgggcaacgtccgcacccgggaacgctcggttcggccaagggagcggtcccatcgtccttgacgacgtgagatgttcaggctacgaaagctacctgtggtcctgtccgcacaatgggtggctctcacataattgccagcattcggaagacgccggagtgatctgcagcgcagctcattcctggtcgactccaagcccagacaccctgcccaccattactctgcctgctagtacggtgggcagtgagtcttccctggctcttagactagtgaacggcggcgacagatgtcaggggcgcgtagaggtgttgtatcagggcagctggggaaccgtctgcgacgattcgtgggacacaaatgacgccaatgtggtatgtcgacagcttggatgcggctgggccatgtctgcccctgggaacgcccggtttgggcagggctccggccctattgttctcgatgatgtgcggtgtagcgggcacgaatcctacctctggtcctgcccccacaatggatggctgagccacaattgtgggcacagcgaagacgccggagtcatttgcagtgcaagtcaatctcggcccacccccagtccggacacatggcccacctcacacgcctctacagccgggtccgagagctctcttgcactccgtttggttaacgggggggatagatgccagggcagggtggaggttctttacagagggtcctggggcaccgtgtgcgatgattattgggacaccaacgacgccaacgtcgtgtgcaggcagttgggttgtgggtgggccatgagcgctcccggcaacgcaagatttggccaggggtccggccctatcgtactagacgatgtccgatgctcaggtcacgaatcatacctatggtcatgcccccataacggctggctgagtcacaattgcgggcaccacgaggacgccggagtaatttgtagcgcaagtcagtcccagcccacgccctctcctgatacgtggcctaccagccatgccagcactgccgggtctgagtcctctttggcgttgaggctcgtcaacgggggcgatcggtgtcaaggaagagtggaagtgctgtaccggggctcgtggggcactgtttgcgacgactactgggataccaatgatgccaacgtagtgtgcaggcaacttggttgtggctgggcaacttcagctccaggaaacgctagatttggccaggggtccggccccatcgttctcgatgacgtgcgctgctcagggcacgaatcctacctatggtcatgtccacacaacggctggctcagccacaactgtggtcaccacgaagacgcgggagtgatctgttctgcctctcaaagccagcctacccccagcccagacacctggccaaccagccacgcaagtactgcaggctctgaaagcagcctcgcgctaagactagtaaatggtggagatcgctgccaaggccgcgtcgaggtactgtaccgcgggagctggggcactgtgtgtgacgattactgggacactaacgatgctaacgttgtgtgtcgccaactgggctgcggttgggccaccagtgctccaggaaacgcgagattcggccaaggatcaggccccatcgtcctggatgacgtcaggtgctctggccatgagagctacctgtggtcttgtccccacaatggctggctctcacataattgcggacaccacgaggatgcgggggtgatttgctcagcttctcagagccagcccaccccatccccagacacgtggcccaccagccgcgcgtcaacggctggctctgaatcaaccctcgcactcaggctggtcaacggaggcgatcggtgcaggggccgcgttgaagtattgtatcaaggctcctggggcactgtttgtgatgactactgggatacaaacgacgcaaatgtcgtttgtcgccagctcggatgtggatgggctatgtcagcccccggcaacgcgcagtttggccagggctctggccccatcgttctcgatgacgtaagatgtagcggccacgagagttatctctggtcctgcccacacaatggctggctgagtcacaattgcgggcaccacgaagatgcaggcgttatttgcagcgcagcacagtctcagagcacaccccgaccagatacctggctgacaacaaacttaccagcactaaccgtcggaagcgagtcctctctagccctgaggctggtcaatggaggcgacagatgtaggggaagagttgaagtgctctaccgcggatcgtggggcactgtttgtgatgactcttgggacacaaacgatgctaatgtggtgtgcaggcagcttggctgcgggtgggccatgtcggcccctgggaatgcccgattcggccaggggagcggccctattgttttagatgacgtcagatgtagtgggaacgagagttacttatggtcatgccctcacaagggttggcttacgcacaattgcggtcatcacgaagatgccggcgtgatttgctctgctactcagattaactccaccacaaccgactggtggcaccccaccaccaccacaacggctcggccatccagcaactgcgggggctttctattttatgctagcggtaccttcagctcaccttcctacccagcttactatccaaacaatgctaaatgtgtatgggagatcgaagtcaactccggctatcggattaatctgggttttagtaaccttaagctggaagcccatcacaattgcagctttgactacgttgaaatctttgatgggagcctgaacagtagcctgttactcggcaagatctgcaacgatacccgccaaattttcacttccagctataacaggatgaccattcactttcggtctgacatttccttccaaaacaccgggttcttagcatggtataatagcttcccatctgacgcaactttaagactggtgaatttgaacagtagttatggcctgtgcgcgggccgcgtggagatctatcacggtgggacgtgggggacggtgtgtgacgattcatggactatccaggaagctgaggtcgtgtgcagacaactgggctgtggaagagctgtttcggccctgggcaacgcctattttggttccggatccggccccatcacactagatgatgtggagtgtagcggaactgaaagtaccctgtggcagtgcagaaacaggggatggttcagccacaattgcaatcacagggaagacgccggggttatttgctctgggaaccacctgagtacacctgctccgttcttgaacatcacacgtcccaataccgactattcttgcggaggattcctctctcagccgagcggcgacttttcatccccattttaccctggtaattacccaaacaacgccaagtgtgtgtgggatatcgaggtgcagaacaactatcgcgtgacagtcatctttagggatgtacaactggaagggggctgcaactatgactacatagaggtgtttgacgggccttatcggtcttctcccctgatcgcaagagtttgcgatggagcgagagggtctttcactagttcatccaatttcatgagcatccgctttatttctgaccactcgataactcggcgaggctttcgcgctgagtactactcttcaccctccaacgatagcactaatctgctttgtctgcccaaccacatgcaggcttcagtgagccggtcttatctgcagagcctgggcttcagcgccagtgatctggtcatcagcacatggaacggctactatgagtgccggcctcaaatcacccccaacctcgtgatttttactataccctactcaggatgcggcacattcaagcaggcagataatgacaccatcgactacagtaacttcctgacagctgctgtctctgggggcattattaaaaggcggaccgacttgcgcattcacgtgtcgtgtcgcatgctccagaacacatgggtagacacaatgtatatagctaatgatacaattcacgtagcaaacaatacaatacaggtcgaagaagtgcagtacggtaatttcgacgtgaacatctctttttacactagctcctccttcctgtatccagtgaccagtaggccgtattacgtggacctaaaccaggatctgtatgtgcaggcagaaattctgcatagtgacgcagttttgactctgttcgtggatacctgcgtggcttccccctattctaatgacttcacctctctgacatacgaccttattagaagcgggtgcgtacgggacgatacatacggtccttattcttcaccctctctgagaattgcacgctttcgcttcagggctttccattttttgaataggttccccagtgtctacttgcggtgcaaaatggtcgtctgtagagcgtacgatccctctagtaggtgctatcgggggtgcgtgctccggtctaagcgtgatgttgggtcatatcaagaaaaagtggatgtggttctggggcctattcagctgcagactccccctaggcgcgaggaagaaccgcgttag

SEQ ID NO: 193884 - DNA, 7212 bp, Artificial Sequence
  derived and/or modified sequence
atgggcatcagcaccgtgatcctggagatgtgcctgctgtggggccaggttctgagcaccggaggatggatcccccgcactacagactatgcctccctgattcctagcgaggtgcctctcgatcccacggtggcggagggcagcccgttcccaagtgagtcaactttggagagcactgtggcagagggaagccccatctccctagaaagcaccctggagtcaacagtcgctgaggggagtctcatcccgtccgagtcgacactggagagcacagtggctgagggatctgattctggactcgctttgcggctggtgaacggggacggacggtgccaggggagagtagagatcctgtatcgaggaagctggggaacggtctgtgacgactcctgggacaccaatgacgccaatgttgtctgcagacagctgggctgtgggtgggcaatgagcgcgccaggcaacgcgtggtttggccaaggctccggccctatagccctcgacgacgtgagatgcagtggacacgaaagttatttgtggtcatgtccccacaacggatggctgtcccataactgtgggcatggggaggacgccggggttatttgctctgctgcgcaaccccagtcaacactccgacccgaatcatggcccgtacgcatctctccgcctgtccctacagagggaagtgagtccagcttggcactgagattggtcaacggaggggatcgatgtcggggaagggtggaagtgctgtaccgagggagttggggaacagtgtgcgacgattattgggacactaacgatgcaaatgtcgtgtgtcggcagttgggttgcggctgggccatgagcgccccaggaaatgcgcagtttggccaaggaagtgggcccatcgtgctggacgatgtgagatgctccggtcacgaatcatatctttggagttgtccacacaatggctggcttacccacaactgcggccactctgaagatgcaggtgtgatttgtagtgctccacaaagtcggcccacccctagcccagacacctggcccactagccacgccagtacggcggggccagagtcttcacttgccctccgtcttgttaacggtggcgaccggtgccagggtcgcgtggaggtgctgtaccggggctcatggggaacagtgtgtgacgactcctgggatacctctgacgcgaacgtagtatgtcgccaattaggctgcggatgggccacatcggccccaggcaacgctcgctttggacaggggtctggtcccatcgtgctcgatgatgtgcgatgcagcggttatgaatcctacctgtggtcttgcccccacaacggttggctttcccataattgtcaacattccgaggacgcgggcgttatctgttctgacacactccctaccattacacttccggccagcacagttggctcagaatcttccctggctctccgactggtgaacggcggggataggtgtcaaggccgggtggaggtgctgtatcggggatcttggggaactgtgtgcgacgactcctgggatacaaacgacgccaatgtagtctgtcgccaactggggtgcgggtgggctatgctagcacctggcaatgcgaggtttggccagggttcaggcccaatcgtgctggacgatgtgagatgttctgggaacgagtcctatctatggagttgtcctcacaatggttggctctcgcataactgtggccattcagaagatgcaggtgtaatttgttctggaccagaatcttcactagcactgcggctggtgaacggcggggatcgttgtcaagggcgagttgaggtactctatcgaggcagctgggggactgtgtgtgatgactcatgggataccaatgacgcaaacgtcgtgtgtcggcaattaggatgtggttgggctacgtcagcccctggaaatgcccgtttcggccagggctccgggcccatcgtcttagatgatgttcggtgctcaggccatgagtcctatttgtggtcgtgccctaataacgggtggttgagtcataactgcggccatcacgaagacgccggcgttatttgttccgccgcccagagccgcagtaccccccgacctgataccctcagtactataacgctacccccttctacggttgggagtgaatcgtctcttactttacgacttgtgaatggctcagatcgttgccagggacgagttgaggtgctatacagagggtcatgggggaccgtttgtgatgatagttgggataccaacgacgctaatgtcgtatgtaggcaattaggctgtggttgggcaacaagtgcgccaggcaacgccaggtttggtcagggctcaggcccgatcgtgctggacgatgtgagatgcagtggacatgaaagctatctctggtcctgtccccacaacggttggcttagccataattgtgggcaccacgaggacgcaggagtaatatgctctgttagtcaatcccgtccaactccctctcccgatacctggccaacttcccacgcaagcacagctggccctgagagcagtctggctttgcggcttgtgaatggaggagacaggtgccaggggcgggtagaggtgttgtataggggctcatggggaacagtgtgcgatgactcttgggacacaagtgatgctaatgtggtgtgccgccagctgggatgtggctgggcaacatcagcacccggcaacgcccggttcgggcaggggtctggtccaatagtgctggacgatgttaggtgctccgggtatgaatcctatctgtggagttgcccacataacgggtggctgagtcataattgccaacacagcgaggatgctggtgtgatatgctcggctgcgcacagttggtccactccatcaccagacacactgcctactatcactttgccagcaagcaccgtggggtccgaaagctctctggctctgcgtttagtgaacggcggagaccgatgccagggtcgagtggaggtgctttaccaaggatcttggggaacagtatgcgacgattcgtgggacaccaacgatgcaaacgtggtgtgcaggcagcttgggtgtggttgggccatgagtgccccgggcaatgccagattcggccagggctcaggaccaattgtgctagatgatgtcagatgttctgggcacgaatcttacttgtggtcatgtccacacaatggctggctctcacataattgcggacacagcgaagacgccggagtgatttgttcagctagccagtcgagacctacccccagtccggatacgtggcctaccagccatgctagtacggccggaagtgagagctccttagcgttacggttggtgaacgggggggatcggtgccaggggagggtggaggtgctctacagagggagttggggcacagtatgcgatgactactgggacaccaacgacgccaacgtagtctgccgccagctgggctgcggttgggctatgtctgcccctggtaacgcacggtttggacaggggagcgggcctatcgtgttggatgatgtgaggtgcagcggccatgagagctacctttggtcatgtccccataacggttggctttcgcataattgtgggcatcacgaagacgccggcgtgatttgcagcgcctcacaaagccagccaacacctagtccagatacgtggcctacttcgcacgctagtaccgccggcagcgaaagcagcctggctctgcgactagtaaacgggggtgaccgctgccagggcagagttgaagtactgtaccgcggtagctggggtactgtgtgtgatgattactgggacacgaatgacgccaacgttgtttgtaggcagctgggatgtggctgggctacttctgcccccggtaatgcaaggttcggacaaggctctggccccattgtactcgacgatgttcggtgctctggccacgagtcttatctgtggtcttgtccccataacgggtggttgtctcacaactgcgggcatcatgaggacgctggcgtgatctgttctgccagtcagagccagcctaccccctcaccggatacgtggccaacttcacacgccagcacggccggctcggagtcctctttggcactaagactggtgaacggcggagaccgctgtcagggaagagtggaagtcttatacagaggctcttggggaaccgtgtgtgatgactattgggataccaatgacgctaatgtagtgtgcagacaacttggatgcgggtgggctacatccgcccccgggaacgcacgtttcgggcagggctctggtccgatagtgctggatgatgtgaggtgctccggacacgaatcctatctgtggagttgtccacacaatggctggctgtcacataattgcggccaccatgaagacgccggtgtgatctgtagcgcaagtcagtctcagccaaccccttcacctgatacatggcccacctcacgggctagtactgccggctccgaatcaacactcgctctacgcctggtgaacgggggggaccgttgcaggggccgagtggaggtgctgtatcagggcagctggggtaccgtgtgcgacgactactgggacacaaacgatgccaatgttgtgtgcagacagcttggttgcggctgggctatgagcgcccccggcaatgcgcagtttggccaagggagtggaccaattgtgttggacgatgtgcgttgttcgggtcacgagtcctatctttggtcctgcccccacaatggctggttatcccacaactgtggtcaccacgaggacgcgggcgttatttgtagtgccgctcagtcccagtcaacccctcgacccgacacttggttgactacgaatttacctgcgctcacagtcggatctgaaagtagcctggctctaagacttgtcaacggaggggatcgctgtcgcggcagggtagaagtgctgtataggggatcttggggcacagtctgcgatgactcctgggataccaatgacgccaatgtcgtttgccggcaacttggatgtgggtgggcaatgagtgccccagggaacgcccgcttcggccaaggcagcggtcccatagtcctggatgacgtacgctgctcaggcaatgagtcttacctgtggagctgcccccacaaaggctggctgacacataactgcggacatcacgaagatgcaggcgtaatctgctcggcaactcaaattaatagcacaacgaccgattggtggcatcctaccaccactacgacagcccggccttccagtaattgtggcggatttctcttttatgccagcggcaccttttcttcaccgtcatacccagcgtattacccaaataatgccaagtgcgtgtgggagatcgaggttaacagtggatacagaattaacttgggtttttcaaatctcaagctggaggcacatcataactgctcatttgactacgtggagatattcgatggcagtctgaacagcagcctgcttctcggcaaaatctgcaacgacacacggcagatcttcacctccagctacaaccggatgactatccacttcaggtctgatatctctttccagaataccggcttcctcgcctggtacaattccttcccaagcgatgctacactgcgactggtaaatctcaacagtagttacggactatgtgcaggaagagtcgagatttatcatggcggcacgtgggggacagtgtgcgacgattcctggaccattcaggaagctgaggtcgtgtgtagacagttgggctgcggccgagccgtaagcgctctgggcaacgcatattttggctctggctctggcccaatcacgttggacgacgttgaatgctcaggaaccgagtcaactctttggcagtgcagaaatagaggctggttctcccataactgcaaccaccgcgaagacgccggcgttatctgctctggtaatcacctctccacccctgccccttttctcaacatcaccagaccgaacaccgattactcttgtggaggcttcctgtcccagcctagtggagacttctctagccccttttaccccggaaactaccctaataatgcaaagtgtgtctgggacattgaagtccaaaataactaccgtgtgacagtgatttttagagacgttcagctggagggcggatgtaactacgattatatagaggtgttcgacgggccttacaggtcctctcctctgattgccagagtttgcgacggcgctagagggtcctttacctcgtccagcaattttatgtcgatccggttcatctctgatcactctatcactagacgaggtttcagagctgaatactattcctccccctctaacgattctacaaacttgctgtgcctgcccaaccacatgcaggcatccgtgagccggtcctatctgcagtccttgggcttttcagcctccgatttagtcatctctacttggaacggttattacgaatgtcgcccccagatcaccccaaaccttgtcatcttcacaatcccgtactctgggtgtggcacctttaaacaggccgacaacgataccatcgattatagcaactttttgacggcggccgtttcaggcgggatcatcaagcggaggacagacctgcgcatacacgtatcttgtcgaatgcttcagaatacttgggtcgatacgatgtatatagcgaacgacaccatccatgttgccaataacactatacaagttgaggaagtccagtatggaaattttgatgtgaatattagcttttatacatctagtagttttctttaccccgtcacctctcgaccctactacgtcgacttgaatcaggacctttatgtccaggccgagattctgcactccgacgctgtgcttacactcttcgtggatacttgtgtggccagcccatatagtaatgacttcacctccttgacgtacgatctaattcgatctggctgcgtgagagacgatacttatggtccttactcttctccttcgctgcgcattgctcgcttccggtttagagctttccactttctgaatcggtttccatccgtttatttacggtgcaaaatggtggtgtgcagggcatatgacccttcaagcaggtgctacaggggctgcgtattgaggtccaaacgagatgtggggagctatcaggagaaggtagatgttgtgttaggccctatccaacttcagacaccaccacgacgggaagaggagcctcggtag

SEQ ID NO: 193885 - DNA, 7211 bp, Artificial Sequence
  derived and/or modified sequence
atggggatcagcacagttatccttgaaatgtgccttctttggggccaggtcctgtctaccggagggtggattccacggaccaccgattacgccagcctcataccctcagaggtgccactggaccctacagtggccgagggatcccctttcccatctgagtcaactcttgaatctacggtcgccgaaggcagccctatctcactggagtcaaccttggagtccaccgtagctgaaggttctctgataccaagcgaatccacactggagtctacagtggccgaaggaagcgactccggattggctttgcgactcgtcaatggcgacggtcgctgccagggacgcgtggagattttgtaccggggttcctggggaaccgtttgcgacgacagctgggatacaaacgatgcaaatgtggtctgccgccaattaggctgtggatgggccatgtctgccccaggtaatgcctggttcggccaaggctcaggacccattgccctcgatgacgtgagatgttcaggccacgaaagttacctgtggtcatgcccccacaacggttggctgtcccataactgtgggcatggtgaagatgctggcgtgatctgttccgctgctcaaccacaatccaccctgcgccctgaatcctggcctgtccgaattagcccccctgtgcccaccgaggggagtgagtcctctctagccctgcggcttgtaaacgggggagaccgctgtcggggacgtgttgaggtactctatcgtggatcgtgggggactgtgtgtgatgactactgggacacgaacgatgcgaacgtggtgtgcaggcagctggggtgcggctgggccatgagcgcccctgggaacgctcagttcggccagggaagcgggcctattgtactcgacgatgtgcggtgctctggccacgaatcttatctgtggagctgcccacacaatggctggctgactcacaattgtggccattccgaggatgctggagtgatttgcagcgcccctcagagcagacctactccctctcccgatacatggcccactagtcacgcctctacggccggacccgagtcatccctagcgttgcgactcgtgaacgggggtgaccgatgccaggggcgtgtggaggtcctgtataggggatcttgggggacagtgtgcgatgattcctgggataccagcgatgctaatgtggtgtgtagacagcttggctgtggatgggctacttcagcaccaggcaatgcaaggtttggacaaggttctggccctatcgtgctcgacgacgtgcgatgttcgggctatgagtcgtatctgtggtcctgcccacataacggatggctgagtcataactgccagcactcagaggatgccggagtgatttgctctgacacattgcccactattacactgcccgcttcgacagttgggagtgagagttccctggcacttcggttggtgaacggaggtgataggtgccaaggaagggtggaggtgctatatcggggatcatggggtactgtgtgcgatgatagttgggatacaaacgatgcgaacgtggtttgcagacaactgggctgtggatgggctatgctcgccccagggaatgcaagattcgggcagggaagtggtccaatagtcctggacgacgtcagatgttctggcaacgagtcctatctctggagctgtccccacaatggctggctgagtcacaattgcggccacagtgaagacgcaggcgttatctgctctggaccagaatctagcctcgcattgcgactggtgaacggcggagaccggtgtcagggtcgggtcgaagtgttatatagagggtcttggggcacagtatgcgatgatagttgggacaccaacgacgccaacgtagtatgtcgccagttaggatgtggctgggccacaagcgccccaggcaatgccagattcggacaagggtccggccctatcgtgctcgacgacgtgcggtgtagcggtcatgagtcctatctgtggtcttgcccaaacaacggctggctcagccataattgcggacatcacgaagacgcaggagttatctgctcggccgcacagtctcgaagcactcccagacccgatacgctgagcacaatcactctgcctccctctaccgttggaagtgagagctccctaaccctgaggctagtgaacggatcagaccgctgccaggggcgagtggaagttctctaccgcggatcttggggaaccgtatgtgacgacagctgggacacgaacgatgccaacgttgtttgccgacaactcgggtgcgggtgggccacctcagcacctggaaatgccaggttcggacagggttctgggccaatagttctagatgatgtgcgttgcagcgggcatgaaagctatttatggagttgtccacacaacgggtggctgtcacataactgcggccatcatgaggacgctggtgtcatctgtagtgtctctcagagtagacctacaccctctcctgacacctggcccacaagccacgcctccacagctggaccagagagctccttggcactgcggttggttaatggcggtgatagatgccagggcagggtggaagttctctaccgagggtcttggggaactgtgtgcgacgatagctgggacactagtgacgcaaacgtggtttgccgtcagcttggttgcggctgggccacctcagcccctggaaacgccagatttgggcaaggctcgggtcctattgtgctcgacgacgtgcgatgctctgggtacgaatcctacctgtggtcttgtcctcacaatgggtggctgagccacaactgtcagcactctgaagacgcaggagtgatctgcagcgcagcacactcttggagcacaccctcaccagatacactgcctacgattacactacccgctagcaccgttggctccgagtcctctctcgcactaaggctggttaatggaggggaccggtgtcaaggccgagtggaggtactctaccaaggttcatggggcaccgtgtgtgatgattcatgggatacaaacgatgccaatgtcgtgtgccggcagctgggatgcggttgggctatgagcgctcccggaaacgcacgttttggccaagggtccggtccaatcgtcttagatgacgttaggtgcagtggccatgagagctacctttggagttgcccccacaatggctggctgagtcataattgtgggcatagtgaggatgccggagtaatttgttctgccagtcagagcagacccactcccagtcccgatacatggcctacctcacacgcttcaacagctggaagcgagagtagtctggcactacgcctggtgaacggcggagataggtgtcagggcagggttgaggttctctaccgcggatcttggggtaccgtttgtgacgactattgggacaccaacgacgcgaacgtggtgtgccgccagctgggatgtggatgggcgatgtcagcccctggcaatgcacgctttggacaagggtccggaccgatcgtgttagacgacgtccgctgctccggccatgagagctatctgtggagctgcccacataatggatggttgagtcacaattgtgggcaccacgaggacgccggagtgatttgttctgccagccagtcccagcccactccgtccccagacacgtggcctaccagtcacgcttccacagccggaagcgagtccagtctcgccctccgcctcgtgaacggcggagataggtgccagggtcgagtagaagttctctatcggggtagctggggaacagtttgcgatgactactgggatacgaatgatgcgaatgtagtgtgtcggcagctgggctgtggctgggctacgtccgcgccaggcaatgcgcgatttggacagggcagcgggcctatcgtcctcgatgacgtgaggtgcagcgggcatgagtcctacctttggagctgcccccacaatggctggttgagtcacaactgtggacaccatgaagacgccggtgtgatctgctcagctagtcaatctcagccgaccccttctccagacacttggcccacaagccatgcatccacagccggaagtgaatctagtctggccctgcggctggtgaacggtggcgacaggtgtcagggtagggtggaggtgttgtatcggggatcctggggcacagtatgtgacgattactgggacacaaacgatgccaacgtggtttgtcggcagctgggttgcgggtgggcaacaagcgccccaggtaatgcaaggttcgggcagggttctggaccgatcgtgctggatgacgttagatgttccggccacgaaagctacctttggagttgccctcataatggttggctcagccataattgcggccatcacgaggacgccggagtgatttgtagcgcaagtcagtcccagccgactcccagccccgacacttggcctacgagccgcgcaagcacagccggaagcgaatccaccctcgcgttacggttagtgaacggcggagatcgctgtcgaggcagggttgaggtgctctatcagggatcttggggcacggtttgcgatgactactgggatacaaacgatgctaatgtggtttgccgtcagcttggctgcggatgggcaatgagcgcccctggcaatgcccagttcggccaggggagtggaccgattgtgttagacgatgtccgctgttccggacacgaatcctatttatggtcctgtccgcacaacgggtggctgtcacacaactgcggccaccacgaagatgcgggtgttatctgttcagctgcacagagtcagagcactcccaggcccgatacttggctcactacaaatctccccgcattgactgtgggctcagagtccagtttagcactgcgcctggtcaacggcggtgaccggtgtcggggtcgtgtcgaagttctctatcggggttcatggggcaccgtgtgcgacgatagctgggatacgaacgatgcgaatgtagtgtgtcggcagctcggatgcggatgggcaatgtctgcaccaggcaacgcacgcttcggacaggggtctggtcccatcgtgctggatgacgttcgctgttccggcaacgaaagctacctgtggagttgccctcataagggatggttgacccacaactgcggacaccacgaggatgcaggggtgatctgctcggccacccagataaacagtactactactgattggtggcacccaacaacaactaccactgcgcgtccatcttccaactgcggaggctttctcttctatgctagtggcacattctccagtccctcttaccctgcttattatccgaataatgcgaaatgtgtctgggagatcgaagttaactccggttaccgcatcaatttgggtttttctaacctcaaattggaagcccaccacaattgcagctttgactatgtggaaattttcgatggcagtctcaactctagtctgctgctcggaaaaatttgcaatgatactcggcagatcttcactagttcgtataaccggatgactatccacttcaggtctgacatctcttttcagaataccgggttcctggcgtggtataactcctttccgtcagatgccacccttcgcctggtcaacctgaacagctcttatggcctgtgcgccggacgggtggaaatttatcacggcggaacgtgggggactgtgtgcgatgattcttggacgattcaggaagcagaagttgtgtgcagacaactcggttgcgggcgagccgtatccgccttgggaaacgcctactttggctccggcagtggacctataacccttgacgatgttgaatgctcgggcaccgaaagtacactatggcaatgccggaacagaggctggttctctcacaattgcaaccatcgggaagacgcaggcgtgatttgctccggcaaccacctgagcacacctgcaccctttctgaacatcacgcgccctaacacagattatagttgtgggggatttctgtcccaacccagtggggacttttcttccccattttacccgggaaattaccccaacaacgcaaaatgcgtgtgggacatcgaggttcagaacaactatagggtcaccgtcattttcagggacgtccaattagaggggggttgcaattatgattacattgaagttttcgacggtccttaccggagttctcctctcattgctcgggtgtgtgatggagcaagaggcagctttacttcgagctcaaattttatgtctatccggtttatatccgaccacagtatcacacggaggggcttccgcgcagagtattacagctctccatctaatgattccaccaatctattatgcctgccaaaccatatgcaagcgtccgtgtcaaggagttacctgcaatcgctgggattctccgcctccgacttggtcatctcaacttggaatggatactacgaatgccggccacagatcacacctaacctggtgatttttacaattccgtattccggctgtggaacatttaagcaagctgacaacgacactatcgactactccaatttcctgaccgctgctgtcagtgggggaattatcaaaaggaggactgacctcaggattcacgtcagttgtcggatgcttcagaatacctgggtggacacaatgtacattgcgaacgacaccatccacgttgccaacaataccatccaggtcgaggaggtccaatacggcaattttgacgtcaacatatctttctacacctcttccagctttctgtatcccgtcaccagcaggccatactatgtggatttgaatcaagatttgtatgttcaggctgagattctgcactccgacgcagtgctgacgctatttgttgacacttgcgtcgcctccccatactccaacgatttcacctctcttacgtacgacctgattcggagtgggtgcgtcagagacgatacctatggcccttactctagcccatccctgagaattgctcgatttcggtttcgggctttccatttcctcaacagattcccaagcgtgtatctaaggtgcaagatggtcgtctgcagggcctatgacccttcatctcgctgctatcggggttgcgtcctgagatctaagcgggacgtagggagctatcaggaaaaagtggacgtggtgctcggtcctatccaactgcagacacctcctaggcgggaagaggaacctcgata

SEQ ID NO: 193886 - DNA, 7212 bp, Artificial Sequence
  derived and/or modified sequence
atggggatttcaaccgttatactagagatgtgcctcctgtgggggcaggtgttaagtaccggagggtggattccgagaacaacagattacgccagcttgattcccagcgaggtgcctttggaccctacggtcgctgaaggaagcccgttccccagcgaatcgactctcgaaagtaccgtagccgaagggtcacctatctcactggagtcaactctcgagtccactgtcgcagagggatccctgatcccaagcgaatcaaccctcgagagcacagtagctgagggcagcgatagcgggctggcactgcggctggtgaacggagacgggaggtgccaggggcgagtggaaatactgtacaggggtagttggggcactgtatgtgacgacagctgggatactaacgacgctaacgtggtttgtaggcagctcgggtgtgggtgggcaatgagcgcaccaggaaacgcgtggtttgggcaggggtccggtccaatcgccctcgacgacgtccggtgtagcggacacgagtcttatctatggtcatgcccgcacaatggctggctttctcataactgtggtcacggcgaagatgcaggagtaatatgtagcgccgctcagccacagtccacactgcggcctgaatcctggcctgtgaggatctcccccccagtgccaacagaggggtctgaatccagcttggctctgcgtcttgttaacggaggcgaccgatgtcgagggcgtgttgaggtgttgtacagggggagctggggcacagtgtgcgatgactactgggatactaacgatgcaaatgtggtctgccgccagttggggtgcggttgggccatgagcgccccagggaatgcccaatttgggcagggttcagggccaatcgttttggatgacgtccgttgcagtggtcacgagagttacctttggagctgtccacataacgggtggctgacccacaattgtggacacagtgaagatgcgggagtgatctgcagtgcgccacagtctaggcccacgccttcccctgacacgtggcccacctctcacgcttctacagccggtcctgagagctccctcgcgcttcgcctggtgaatgggggagaccgatgccagggtagggttgaggtgttataccgaggatcttggggaacagtctgtgatgactcttgggacacatctgacgcaaatgttgtctgtcgacagttagggtgcgggtgggccacatctgctccgggaaatgcgaggtttggccaggggtctgggcctatcgtgcttgatgacgtccgttgcagcggctacgagagctatctgtggagttgcccccacaatggttggctgagccataactgtcaacatagtgaggatgctggcgtgatttgcagtgataccctccctacaataactcttccggcatcgacagtgggctcagagtcttctttggcattaagattagtgaacggcggtgatcgctgccagggcagggtcgaagttctttaccgcggatcttggggcacagtatgcgacgattcttgggacactaacgatgcaaatgtggtctgtcggcagctgggctgtgggtgggctatgctggcacctggaaacgctcggtttgggcaggggagcgggcctatagtacttgacgacgtccgttgctcaggaaatgagagctatctctggagttgccctcacaacggctggctttcccacaactgtggacactccgaggacgccggagtaatctgtagcggccctgagagctccctcgccctaagactggtgaatggcggagacagatgccaaggtagagttgaagtgctctatcggggtagctggggaaccgtttgcgatgactcttgggacaccaacgacgctaatgttgtgtgcaggcaactaggctgcgggtgggcaactagcgcgcctggcaatgctcgcttcggccagggtagcggaccgattgtcttagacgatgtcagatgctctggtcacgagagctatctatggtcatgtcctaataatggctggctgtctcacaattgtggacaccatgaggacgcaggagtgatctgttctgcagcgcagtctcgctccactccacgacccgacaccctctccacaataaccctgccaccctccacggttggttctgaatcctccctgaccctccggctggtcaatggctcagaccggtgccagggtcgggtggaagtgctctatcgtggcagctggggcactgtgtgtgacgattcttgggacactaatgacgcaaacgtcgtgtgcaggcagctgggatgtggatgggctacatccgcacccggtaacgcacgctttggccaaggctcaggtcccatcgtgctcgacgatgtgcgatgcagtggccacgagagttacctctggtcttgtcctcacaatgggtggctctcgcataactgcggccaccacgaagacgctggggtgatttgtagcgtgtcccaatcacggccaacaccttccccagatacatggcctactagtcatgccagtacggctggaccagagtcctcattagctctgcggctggtgaatgggggtgaccggtgtcagggaagagtagaagttctgtacagaggcagctggggtacggtatgcgacgattcttgggatactagtgacgcgaatgtcgtgtgtaggcaattgggatgcggctgggctaccagtgcccctggtaacgcccgttttggacagggaagtgggcctatcgtactggacgatgtgaggtgctcgggctacgagagctacctgtggagctgtcctcacaacggttggctatctcacaactgtcagcatagcgaagatgccggagtgatatgcagcgctgctcactcctggagcacgcccagccccgacaccttgcctaccatcaccctgcccgcttctaccgttggcagcgaatcttctctcgcactgaggctggtcaacggaggcgataggtgtcagggcagagtcgaggtactgtaccagggatcatggggaacggtttgcgacgacagctgggataccaacgatgccaatgtcgtctgtcggcaactgggctgtggctgggcaatgagcgcacccggaaacgcccgatttgggcaaggatccggaccaattgtgctagatgacgtgcgctgcagtggacatgagtcctatctctggtcctgtccacacaatgggtggctgtcacacaactgcggccactctgaggatgcgggagtgatttgttccgccagccagtccagacctacaccgagtccggacacttggccgacctcccacgcttctaccgccggttccgaaagttcactcgctttgcgattggttaatggcggtgatcggtgccaagggagagttgaggtcctctatcgcggaagctggggcacagtatgcgatgattactgggatacaaacgacgccaatgtggtttgcaggcagttagggtgcgggtgggctatgtctgcccctggcaacgcgagattcggacagggcagcggtcccattgtactggacgacgtgcgctgttccggccatgagtcgtacttgtggtcatgcccccacaacgggtggctctctcacaactgcggacatcatgaggatgccggtgtgatctgctcagcctcccagagccagcctacaccttcaccagacacatggccaacaagtcacgcttcaacagcaggttccgagtcctcactcgctttacggctggtgaacggaggggatcggtgccaaggaagagtagaagtgctctacaggggttcttggggcaccgtttgcgacgactactgggacaccaacgacgctaatgtcgtgtgtagacagctgggctgcggctgggccacatcagcgccaggcaacgcacgattcggccagggatccggtccgattgtgcttgacgatgttcgatgttccggccacgaatcctatctctggagctgcccacacaatggatggctgtctcataactgcggccaccatgaagacgccggagttatttgctcagcctcccagtctcagccgactcccagtcccgatacatggccaacttcccatgccagtactgctggctccgagtcatcactggctttacggctcgtcaacggaggagatcgttgccagggcagggtggaggtactctacaggggttcctgggggactgtgtgtgacgattactgggatactaacgacgccaacgtagtctgtcggcaactcggttgcggctgggctacgagcgcacctggcaatgccagattcgggcagggatctgggccaattgttctggacgatgtgagatgttcaggacatgaaagttacttatggtcttgcccccataacgggtggttaagccataactgcgggcatcacgaggacgctggggtcatatgcagtgcaagtcagtcccagccaactccaagcccggacacgtggcccactagcagggcttccactgctggaagtgaatctacccttgccctgcgacttgtgaatggcggtgatcggtgccggggacgcgtcgaagtgttgtatcagggaagctgggggacagtgtgcgatgattactgggacaccaatgacgctaatgtcgtgtgtcgacagctgggctgtggttgggccatgagtgccccaggcaatgcccagttcggtcagggctcaggtcctatcgtcctagatgacgttagatgctctggacatgagtcttacttatggtcatgcccgcacaatggatggttatcccacaactgcggccaccatgaagacgcaggcgttatctgtagtgccgctcaatcccagtccacaccccgaccggatacctggctcacaacgaatctacccgcattaacggttggaagcgaatcatctttggcattgcgcttggtcaacggcggagaccgctgccggggtcgcgtggaggtgttgtatagaggctcttggggaactgtgtgcgatgactcgtgggacaccaatgatgcaaatgtggtgtgcagacagttagggtgcggctgggccatgtccgccccagggaatgctcggttcgggcaggggagcgggccaattgttctcgacgacgtgcgatgctccggcaacgaatcctatctttggtcttgcccgcacaagggatggctcacccacaactgcggacaccacgaggatgctggagtgatttgctcggctactcagatcaattccacaactaccgattggtggcatccgacaacaactacaaccgccagaccttcttccaactgcgggggttttctattttacgcttctggtaccttttcttcacctagttatcctgcatactaccctaataatgccaaatgtgtgtgggaaatcgaggttaattccggctaccgaattaacctcgggttctcaaatctgaaattagaggcacatcacaattgctctttcgactacgtggagatcttcgatggttctctcaattcgagtctgctgttggggaaaatctgtaacgacactaggcagatcttcacgtcaagttataatagaatgacaatccacttccggtctgacatttcatttcaaaacaccggattcctcgcctggtataattcattcccttctgatgctacccttagactagtcaatcttaactctagttatggcctgtgtgctgggagagtggagatctatcatggagggacctgggggacagtgtgcgatgacagctggactatccaagaagcagaagttgtttgtaggcagcttgggtgcggcagggccgtgagtgccctcgggaatgcttacttcggatctggatcaggccctattaccctggacgacgttgagtgctcgggaaccgaatccacactttggcagtgcagaaacaggggatggttcagtcacaattgtaatcatcgtgaagatgctggggtgatatgtagtggcaatcacctgtcaacaccagcaccatttctgaatattacaaggcccaatacagactactcctgcggaggctttttgtcccaaccctcaggcgatttttccagtccattctatcccggaaactatcctaataacgccaaatgcgtttgggacatcgaggttcagaataattacagagtgaccgtgatctttcgggatgtccaactggaggggggttgcaattatgactatatcgaagtgttcgacgggccatatcggtcgagcccacttattgcccgtgtgtgtgatggcgcacggggaagcttcacatcaagctcaaacttcatgtctatacgcttcatatcagatcacagtattaccaggcgcggtttccgcgcagaatactattcaagcccgagcaacgactctactaacttactctgtctgccaaatcacatgcaggccagcgtctcaagatcttacctgcaaagcttgggtttttccgctagcgacctggttatctcaacatggaatgggtactacgagtgtcggcctcaaatcacccccaacctcgtgatttttacgataccctatagcggatgcggtacttttaagcaggccgataatgataccatcgactatagtaactttctgacggccgctgtgagcggcggaatcatcaagcgcaggactgaccttaggattcatgtcagttgtagaatgctccagaacacctgggtggacaccatgtacatcgcaaatgatacaattcatgtggcaaataataccatccaagtggaagaagtacagtacggtaatttcgatgtgaacatttccttttatacttcgagtagtttcctttatcctgtaacgtcacggccttattacgtagatcttaaccaagatctgtatgtgcaggccgaaatcttacatagtgacgccgtcctcacgctgtttgtggacacgtgtgttgccagtccttactccaacgactttaccagcctgacgtatgatctaatccgatccggatgtgtgagggacgacacctacgggccttattcctccccatccttgcgtatcgcgcgttttaggtttcgggcttttcacttccttaaccggtttccctcagtgtatttgagatgtaagatggttgtttgcagagcatatgacccttctagtagatgttatcgaggttgtgtgctccgttcaaagcgggatgtggggagttaccaggagaaagtggacgtcgttttggggcctatccagctacagactcccccaagacgggaagaagagccaaggtaa

SEQ ID NO: 193887 - protein, 344 aa, Artificial Sequence
  derived and/or modified sequence
MASGVGAAFEELPHDGTCDECEPDEAPGAEEVCRECGFCYCRRHAEAHRQKFLSHHLAEYVHGSQAWTPPADGEGAGKEEAEVKVEQEREIESEAGEESESEEESESEEESETEEESEDESDEESEEDSEEEMEDEQESEAEEDNQEEGESEAEGETEAESEFDPEIEMEAERVAKRKCPDHGLDLSTYCQEDRQLICVLCPVIGAHQGHQLSTLDEAFEELRSKDSGGLKAAMIELVERLKFKSSDPKVTRDQMKMFIQQEFKKVQKVIADEEQKALHLVDIQEAMATAHVTEILADIQSHMDRLMTQMAQAKEQLDTSNESAEPKAEGDEEGPSGASEEEDT

SEQ ID NO: 193888 - DNA, 1035 bp, Artificial Sequence
  derived and/or modified sequence
atggccagcggcgtgggcgccgccttcgaggagctgccccacgacggcacctgcgacgagtgcgagcccgacgaggcccccggcgccgaggaggtgtgcagagagtgcggcttctgctactgcagaagacacgccgaggcccacagacagaagttcctgagccaccacctggccgagtacgtgcacggcagccaggcctggaccccccccgccgacggcgagggcgccggcaaggaggaggccgaggtgaaggtggagcaggagagagagatcgagagcgaggccggcgaggagagcgagagcgaggaggagagcgagagcgaggaggagagcgagaccgaggaggagagcgaggacgagagcgacgaggagagcgaggaggacagcgaggaggagatggaggacgagcaggagagcgaggccgaggaggacaaccaggaggagggcgagagcgaggccgagggcgagaccgaggccgagagcgagttcgaccccgagatcgagatggaggccgagagagtggccaagagaaagtgccccgaccacggcctggacctgagcacctactgccaggaggacagacagctgatctgcgtgctgtgccccgtgatcggcgcccaccagggccaccagctgagcaccctggacgaggccttcgaggagctgagaagcaaggacagcggcggcctgaaggccgccatgatcgagctggtggagagactgaagttcaagagcagcgaccccaaggtgaccagagaccagatgaagatgttcatccagcaggagttcaagaaggtgcagaaggtgatcgccgacgaggagcagaaggccctgcacctggtggacatccaggaggccatggccaccgcccacgtgaccgagatcctggccgacatccagagccacatggacagactgatgacccagatggcccaggccaaggagcagctggacaccagcaacgagagcgccgagcccaaggccgagggcgacgaggagggccccagcggcgccagcgaggaggaggacacctag

SEQ ID NO: 193889 - DNA, 1035 bp, Artificial Sequence
  derived and/or modified sequence
atggcttctggagtgggggccgcttttgaagagctcccgcacgacggcacctgtgacgagtgcgagcctgatgaggctcccggggctgaggaggtgtgccgcgaatgcgggttttgctattgcaggcgacacgctgaggcccatcgacagaagttcctgagccatcacctcgccgagtacgtgcacggcagccaggcctggacacctcctgccgacggcgagggggctggaaaggaagaagctgaggtgaaagttgagcaagagagggagattgagagcgaggcaggagaggagtctgagagtgaggaggagagcgagtctgaagaggaaagcgaaactgaagaggagtccgaggacgagagcgacgaggaatccgaagaggatagcgaggaagagatggaggacgagcaggagtcagaagcggaggaggataaccaggaagaaggggagtccgaggctgagggggaaacagaggccgagagtgagtttgacccagagattgagatggaagccgagagagtggccaagcggaagtgccccgatcacggcttggacttgagcacatactgtcaagaagatcgacagcttatctgcgtgctgtgccccgtaatcggggcccaccaaggtcaccagctaagcactcttgacgaggccttcgaggagttaaggtctaaggatagtggggggttgaaagcggctatgattgagctggtggagcggttaaaattcaagagctctgaccccaaggtaacacgcgatcaaatgaagatgttcatccagcaggaattcaagaaggttcagaaggtgatagccgacgaggaacagaaagccctgcatttagtggatatccaagaggcaatggccaccgctcacgtgaccgagatacttgccgacatccagagccacatggaccgattgatgacccaaatggcacaagctaaggaacagcttgatacatctaacgaatcggccgagccaaaggccgagggtgatgaggaaggcccaagtggggcttcagaggaggaggacacatag

SEQ ID NO: 193890 - DNA, 1035 bp, Artificial Sequence
  derived and/or modified sequence
atggccagcggcgtgggcgccgcctttgaggagctgccccatgatggcacctgtgatgaatgtgagccagatgaggcccctggagctgaggaggtgtgcagagaatgtggcttctgctactgcagaagacatgctgaggcccaccggcagaagttcctgagccaccacctggccgagtatgtgcacggcagccaggcctggaccccaccagcagatggagagggcgctgggaaggaggaggccgaggtgaaggtggagcaggagcgggagattgaaagtgaagctggggaggagagcgagagcgaggaggagagcgagagcgaggaggagagcgagacagaggaggagagtgaagatgaaagtgatgaggagagtgaagaagattctgaggaggagatggaggatgagcaggagagcgaggccgaggaggacaaccaggaggagggggagagcgaggccgagggggagacagaagctgagagcgagtttgatcctgagattgagatggaggccgagcgggtggccaagaggaagtgcccagaccacggcctggacctgagcacctactgccaggaggaccggcagctgatctgtgtgctgtgccctgtgattggagcccaccagggccaccagctgagcaccctggatgaggcctttgaggagctgcggagcaaggacagcggcggcctgaaggccgccatgattgagctggtggagcggctgaagttcaagagcagtgaccccaaggtgacccgggaccagatgaagatgttcatccagcaggagttcaagaaggtgcagaaggtgattgctgatgaggagcagaaggccctgcacctggtggacatccaggaggccatggccacagcccacgtgacagagatcctggccgacatccagagccacatggaccggctgatgacccagatggcccaggccaaggagcagctggacaccagcaatgaatctgctgagcccaaggccgagggagatgaggagggccccagcggggccagcgaggaggaggacacctag

SEQ ID NO: 193891 - DNA, 1035 bp, Artificial Sequence
  derived and/or modified sequence
atggccagcggcgtgggcgccgccttcgaggagctgccccacgacgggacatgtgacgaatgtgagccagatgaagcaccaggtgccgaggaagtttgccgagagtgtgggttctgctactgtaggcggcacgctgaggctcatagacagaagtttctaagccaccatctcgcagagtatgtacacgggagccaagcgtggacaccccctgcggacggagagggcgccgggaaagaagaagcagaggtgaaggtggaacaggagcgggagattgaaagcgaggccggagaggagtccgaatcagaggaagagtccgagtctgaagaagaatctgaaacagaggaagagagcgaagatgagagtgatgaagaaagcgaggaggattctgaagaggaaatggaggatgagcaagagagtgaagctgaagaggataatcaggaagagggagaatctgaggccgagggtgagacagaggcagaaagtgagttcgacccggagatcgagatggaggccgaacgagttgccaaaaggaagtgtcctgatcacggtctggatcttagtacttactgtcaggaagaccggcaactgatatgcgtgctctgtcccgtgattggcgcacatcagggacaccaactctctaccctggatgaagctttcgaagagttgcgatccaaggactcgggcggactcaaggccgctatgattgaactcgtcgagcggttaaaatttaagtccagcgatccgaaggtcacacgagaccaaatgaagatgtttatccagcaagagtttaagaaagtacaaaaagtgattgccgacgaagaacagaaggccctccatctcgtcgacattcaggaggcaatggcaactgctcacgttaccgaaatcctcgccgacatccagagtcacatggatagactgatgacacagatggcccaagctaaagagcaactagacactagcaatgagtccgcagagccaaaggcagaaggggacgaggaaggcccctctggcgcctccgaagaggaggacacgtag

SEQ ID NO: 193892 - DNA, 1035 bp, Artificial Sequence
  derived and/or modified sequence
atggcctcaggggtgggagcagccttcgaagagttacctcacgacggtacgtgtgacgaatgcgagcctgacgaggccccaggcgctgaggaggtgtgcagagaatgtgggttctgctattgcaggcgacacgccgaggcccatcggcaaaagttcctttctcaccacttggccgagtacgtgcacggctcgcaagcctggaccccacctgccgatggtgagggtgctggcaaagaggaggcggaggtaaaagtggagcaggagcgggagattgagtccgaagcaggagaggaatcggagtccgaagaggagagcgagtctgaggaggagtcagagacagaagaggagtcagaagacgagagtgatgaggaatcagaagaggattccgaagaggagatggaggatgaacaggaaagtgaggcagaagaggacaaccaggaggaaggagaatctgaagccgagggtgaaacagaagccgagagtgaatttgacccagagattgagatggaggcggaacgggtcgccaagcggaagtgccctgaccacggacttgatttatcgacttattgccaagaggatcgacaactaatttgtgttctgtgcccggtgatcggcgcacatcagggacatcagctgtcgacactcgatgaagcattcgaagagctccgcagcaaggattcgggcggactgaaggccgctatgatagaactcgtggagagactcaaattcaagagctccgacccaaaagtgacaagagatcagatgaaaatgtttatccagcaggaatttaaaaaggtccaaaaggttatcgcggacgaggagcagaaagcccttcatctcgtggacatccaggaggcaatggccactgcgcatgttaccgaaatcttggctgatattcagtcgcacatggacagactgatgactcaaatggcccaggccaaggagcagttagacacgagtaacgaatcagcagaacccaaggctgagggagatgaggaggggcctagtggcgcatccgaggaggaagacacatag

SEQ ID NO: 193893 - DNA, 3182 bp, Artificial Sequence
  derived and/or modified sequence
ggaggctgagcgggcggcgcgacgcgggggccgacgggggcgccgggtggccgcgccggaagtgccttgcgcggcagaggaagcgcagggacagagcggagcaggccgagccggcggaaagggtctttgctgctgcgcccgggcaggggctgccgcggccccaggtcccgcttcgagacgcggcgcggtccaggcgggaggcgactccctaggaagggacccggggcgggaggaggaagtgaggccgcgcggaaggaaggcggcgagccccggggccccgaggccttggccgcgtcacagcacccacatggcctctggagtgggcgcggccttcgaggaactgcctcacgacggcacgtgtgacgagtgcgagcccgacgaggctccgggggccgaggaagtgtgccgagaatgcggcttctgctactgccgccgccatgccgaggcgcacaggcagaagttcctcagtcaccatctggccgaatacgtccacggctcccaggcctggaccccgccagctgacggagagggggcggggaaggaagaagcggaggtcaaggtggagcaggagagggagatagaaagcgaggcaggggaagagagtgagtcggaggaagagagcgagtcagaggaagagagcgagacagaggaagagagtgaggatgagagcgatgaggagagtgaagaagacagcgaggaagaaatggaggatgagcaagaaagcgaggccgaagaagacaaccaagaagaaggggaatccgaggcggagggagaaactgaggcagaaagtgaatttgacccagaaatagaaatggaagcagagagagtggccaagaggaagtgtccggaccatgggcttgatttgagtacctattgccaggaagataggcagctcatctgtgtcctgtgtccagtcattggggctcaccagggccaccaactctccaccctagacgaagcctttgaagaattaagaagcaaagactcaggtggactgaaggccgctatgatcgaattggtggaaaggttgaagttcaagagctcagaccctaaagtaactcgggaccaaatgaagatgtttatacagcaggaatttaagaaagttcagaaagtgattgctgatgaggagcagaaggcccttcatctagtggacatccaagaggcaatggccacagctcatgtgactgagatactggcagacatccaatcccacatggataggttgatgactcagatggcccaagccaaggaacaacttgatacctctaatgaatcagctgagccaaaggcagagggcgatgaggaaggacccagtggtgccagtgaagaagaggacacatgaaggcttgctacccccagtggaaaatcatcccctccccttgtgtgtatgtgacagcgtgtatgtaacggcttctgatttctgtgaaagctgctcagcaacaaacgtacttccaccagatgtgtccccagatccacagcaggcacatatctctccaagggatgaccagttttatgcttactgtgtgcttctcatcccctggttgtggtaggtcaaggaaaagagcccctttgatccaccaggagcaattaagaaaggtccttcaggtaatccctcaatggctgctttgaacttactcaggaaagccagcccccataatattgtattaccaaacagtatcgctttgttaggaaggatctggaataatcttgaagggaagtcagagttttctccctgcctattaacaaaaacccaattttgttcatattgaagcatgaaataaatgagagcaaggtagggccaaattaactcttgtggacagtccctaaaagtccagttctacatttgtgaaaattgtggtgccatgaattaagatggatgactggaaaaaggtgttggagaaagagttaaagatgaggaagagatatttttagtatatgaagttatccaggacttgatattcataattcagtgctgtggaaatgaaaaaaatgattgaagaggtggaacggaaatgaccttagggggaaaaaaaaggaccaaagaagtctgattaaaagttgaaatcagtatttctgaattcaaattgcttgaatttccaaaatagtcagtaaaggatctaatagaaccagaattatttgggtgaattctgcaggttttatgggcttgtcacaacgtgaagggctggaatgtatattaccaaatgggaatttccattgtaggtttttgctagtcccacccccattttagcctaatttggcttaaacgcagtatggggagaattgttcccattccatgtgttctgaattcagctcatctcccagcatatagatatatcctcctttaactccgaccagaacccttcttcctgtggcactccccacccatagaccttcagatcatctcccacaccctggatctcactctcctcttagtaacagagacactcctgaggttggacttccttgcttttctctacttccaaatcacaatttcttacaaccaagctttgtgctcccgagtaagcagggatgtactaggggaatgtaaaactgcaaacttaaaaacctgcatcttcttgaagcatcagttttacttaccaaatggtttagagtcataagatgacctatttttatataaaagttatattatagaataaaatgttcatacgcatagactgttaagataaaaaaataggaatcttgcaaggtaattcttatttgcaagtgggttatgtgttcactctcctctacctttatggtattttggtgttcacttacgaagcatacaactagaaccatatccaagcagactctgggttgctgttaacccagggcctagacttctagtgcctctgaggcagaaccaaaggagcctgcactgggggaaatcccttttcctgcctgcctgtctgcctgtgacctgtgtacgtattacaggctttaggaccagctgattgttatgcttgcaggatggttttgaaacagaaacaatacttgtttactgtaggaatcctatttatattatttttcagtcctgtgaatgctgtgaaaagatttattcctttgaggccaggaagctcccaggcatatatgcttctaggttaggattgtcctgactcactaaagatgccaggatattggggctgaggggagtttgaggtgttaaaaaaaaaaaaaaaaaa

SEQ ID NO: 193894 - protein, 285 aa, Artificial Sequence
  derived and/or modified sequence
MKVTVGPDPSLVYRPDVDPEVAKDKASFRNYTSGPLLDRVFTTYKLMHTHQTVDFVRSKHAQFGGFSYKKMTVMEAVDLLDGLVDESDPDVDFPNSFHAFQTAEGIRKAHPDKDWFHLVGLLHDLGKVLALFGEPQWAVVGDTFPVGCRPQASVVFCDSTFQDNPDLQDPRYSTELGMYQPHCGLDRVLMSWGHDEYMYQVMKFNKFSLPPEAFYMIRFHSFYPWHTGRDYQQLCSQQDLAMLPWVREFNKFDLYTKCPDLPDVDKLRPYYQGLIDKYCPGILSW

SEQ ID NO: 193895 - protein, 270 aa, Artificial Sequence
  derived and/or modified sequence
MKVTVGPDPSLVYRPDVDPEVAKDKASFRNYTSGPLLDRVFTTYKLMHTHQTVDFVRSKHAQFGGFSYKKMTVMEAVDLLDGLVDESDPDVDFPNSFHAFQTAEGIRKAHPDKDWFHLVGLLHDLGKVLALFGEPQWAVVGDTFPVGCRPQASVVFCDSTFQDNPDLQDPRYSTELGMYQPHCGLDRVLMSWGHDEYMYQVMKFNKFSLPPEAFYMIRFHSFYPWHTGRDYQQLCSQQDLAMLPWQVRPLHQVPGPAGRGQAAALLPGAH

SEQ ID NO: 193896 - protein, 265 aa, Artificial Sequence
  derived and/or modified sequence
GPDPSLVYRPDVDPEVAKDKASFRNYTSGPLLDRVFTTYKLMHTHQTVDFVRSKHAQFGGFSYKKMTVMEAVDLLDGLVDESDPDVDFPNSFHAFQTAEGIRKAHPDKDWFHLVGLLHDLGKVLALFGEPQASVVFCDSTFQDNPDLQDPRYSTELGMYQPHCGLDRVLMSWGHDEYMYQVMKFNKFSLPPEAFYMIRFHSFYPWHTGRDYQQLCSQQDLAMLPWVREFNKFDLYTKCPDLPDVDKLRPYYQGLIDKYCPGILSW

SEQ ID NO: 193897 - DNA, 858 bp, Artificial Sequence
  derived and/or modified sequence
atgaaggtgaccgtgggccccgaccccagcctggtgtacagacccgacgtggaccccgaggtggccaaggacaaggccagcttcagaaactacaccagcggccccctgctggacagagtgttcaccacctacaagctgatgcacacccaccagaccgtggacttcgtgagaagcaagcacgcccagttcggcggcttcagctacaagaagatgaccgtgatggaggccgtggacctgctggacggcctggtggacgagagcgaccccgacgtggacttccccaacagcttccacgccttccagaccgccgagggcatcagaaaggcccaccccgacaaggactggttccacctggtgggcctgctgcacgacctgggcaaggtgctggccctgttcggcgagccccagtgggccgtggtgggcgacaccttccccgtgggctgcagaccccaggccagcgtggtgttctgcgacagcaccttccaggacaaccccgacctgcaggaccccagatacagcaccgagctgggcatgtaccagccccactgcggcctggacagagtgctgatgagctggggccacgacgagtacatgtaccaggtgatgaagttcaacaagttcagcctgccccccgaggccttctacatgatcagattccacagcttctacccctggcacaccggcagagactaccagcagctgtgcagccagcaggacctggccatgctgccctgggtgagagagttcaacaagttcgacctgtacaccaagtgccccgacctgcccgacgtggacaagctgagaccctactaccagggcctgatcgacaagtactgccccggcatcctgagctggtag

SEQ ID NO: 193898 - DNA, 813 bp, Artificial Sequence
  derived and/or modified sequence
atgaaggtgaccgtgggccccgaccccagcctggtgtacagacccgacgtggaccccgaggtggccaaggacaaggccagcttcagaaactacaccagcggccccctgctggacagagtgttcaccacctacaagctgatgcacacccaccagaccgtggacttcgtgagaagcaagcacgcccagttcggcggcttcagctacaagaagatgaccgtgatggaggccgtggacctgctggacggcctggtggacgagagcgaccccgacgtggacttccccaacagcttccacgccttccagaccgccgagggcatcagaaaggcccaccccgacaaggactggttccacctggtgggcctgctgcacgacctgggcaaggtgctggccctgttcggcgagccccagtgggccgtggtgggcgacaccttccccgtgggctgcagaccccaggccagcgtggtgttctgcgacagcaccttccaggacaaccccgacctgcaggaccccagatacagcaccgagctgggcatgtaccagccccactgcggcctggacagagtgctgatgagctggggccacgacgagtacatgtaccaggtgatgaagttcaacaagttcagcctgccccccgaggccttctacatgatcagattccacagcttctacccctggcacaccggcagagactaccagcagctgtgcagccagcaggacctggccatgctgccctggcaggtgagacccctgcaccaggtgcccggccccgccggcagaggccaggccgccgccctgctgcccggcgcccactag

SEQ ID NO: 193899 - DNA, 798 bp, Artificial Sequence
  derived and/or modified sequence
ggccccgaccccagcctggtgtacagacccgacgtggaccccgaggtggccaaggacaaggccagcttcagaaactacaccagcggccccctgctggacagagtgttcaccacctacaagctgatgcacacccaccagaccgtggacttcgtgagaagcaagcacgcccagttcggcggcttcagctacaagaagatgaccgtgatggaggccgtggacctgctggacggcctggtggacgagagcgaccccgacgtggacttccccaacagcttccacgccttccagaccgccgagggcatcagaaaggcccaccccgacaaggactggttccacctggtgggcctgctgcacgacctgggcaaggtgctggccctgttcggcgagccccaggccagcgtggtgttctgcgacagcaccttccaggacaaccccgacctgcaggaccccagatacagcaccgagctgggcatgtaccagccccactgcggcctggacagagtgctgatgagctggggccacgacgagtacatgtaccaggtgatgaagttcaacaagttcagcctgccccccgaggccttctacatgatcagattccacagcttctacccctggcacaccggcagagactaccagcagctgtgcagccagcaggacctggccatgctgccctgggtgagagagttcaacaagttcgacctgtacaccaagtgccccgacctgcccgacgtggacaagctgagaccctactaccagggcctgatcgacaagtactgccccggcatcctgagctggtag

SEQ ID NO: 193900 - DNA, 858 bp, Artificial Sequence
  derived and/or modified sequence
atgaaggtgaccgtgggccctgatccgtcactcgtttacaggcccgatgtcgatcctgaggtggctaaggacaaggcatcctttcggaattacacaagcggtccactgcttgatcgggtgttcacaacttataagctgatgcatacacaccagacagtagactttgtgagatcgaaacacgcccagtttggtggtttttcatataagaagatgacggtaatggaagccgtagatctccttgatggtctggtcgacgagagcgatccagatgtggattttcctaattcgtttcacgctttccagaccgctgagggcattaggaaagctcatccagacaaagactggttccacctagtgggattgcttcatgacctcggaaaggtcctggccttatttggcgaaccgcagtgggccgtcgtgggtgatacctttccggtgggctgccggcctcaggccagcgtcgtattctgtgattcgacatttcaggacaaccctgatctccaggaccctcgctacagtaccgaattggggatgtatcagccacactgcgggctggaccgggtgttgatgtcatgggggcatgatgaatatatgtatcaggtgatgaagttcaataaattttccttaccccctgaggccttttatatgatcagattccattccttctatccctggcatacaggcagagactatcagcagttatgctcccaacaggacttagccatgctgccctgggtccgcgagtttaataagttcgatttatacactaagtgccctgatcttccagacgttgacaagctgaggccctactaccaggggttaattgacaagtactgccctggcatcctaagttggtag

SEQ ID NO: 193901 - DNA, 813 bp, Artificial Sequence
  derived and/or modified sequence
atgaaggtgactgtaggtcccgacccttccttagtgtaccggcccgatgttgaccccgaggtggccaaagataaagccagcttcaggaactacacttccgggcccctgctggaccgcgtgtttacgacgtacaaactgatgcatacccatcagaccgttgactttgtgcgcagtaagcatgcccaatttggtggatttagctataagaaaatgaccgttatggaggccgtggacttgttagacggactcgtagacgagagcgatcccgacgtggacttccctaactcctttcatgcattccaaaccgccgagggaattcgcaaggcacacccggataaagattggtttcatctggtggggttactccatgatctgggcaaagtgctggcgctttttggcgagccacagtgggctgtggtcggagatactttcccagttggttgcaggccccaggctagcgtggtgttttgcgatagtacttttcaggacaacccggatcttcaggaccctaggtactctactgagttggggatgtaccagcctcactgcggcctggatagagtcttgatgtcctggggacatgatgagtatatgtatcaggtgatgaagttcaacaagttttccttacctcctgaagccttctatatgattcgctttcatagtttctacccatggcacaccgggagggactaccagcagctgtgtagtcagcaagatttggctatgttgccgtggcaggtgagaccattgcatcaggttcctggtccagctggacggggacaagccgccgccctcttacccggtgctcactag

SEQ ID NO: 193902 - DNA, 798 bp, Artificial Sequence
  derived and/or modified sequence
ggtccagacccttcactggtgtacaggcctgacgtggatccggaggtggcgaaggataaggcttcctttaggaattacacctcaggtccgcttttagaccgggtattcaccacgtacaaactaatgcatacccatcagaccgtggattttgtccgatcaaaacacgcccaattcggaggcttttcttacaagaaaatgactgtaatggaggcagtggacctgctggatggtctggtagatgagtctgatcccgacgtcgactttccaaactctttccatgccttccagaccgctgaaggaatcagaaaagctcatccagacaaagactggttccatctcgtaggtctgcttcatgatctgggtaaggtactggctttgttcggggagccccaagcttccgtggtcttctgtgattccaccttccaagacaacccagacctgcaggaccctcgatattccactgaactgggcatgtatcaaccacactgtggcctcgatagggtgctcatgtcctgggggcacgatgaatacatgtaccaagttatgaagttcaacaagttctcccttccaccagaggccttttacatgatcaggtttcatagcttttatccttggcacactggcagggattaccagcaactgtgtagccagcaagacttggcgatgctgccatgggtgcgagaatttaacaagttcgacctctatacgaagtgtcctgatctgcccgacgtcgataaactgcgcccatactaccaggggctcatcgacaagtactgccccggaatcctgtcctggtag

SEQ ID NO: 193903 - DNA, 858 bp, Artificial Sequence
  derived and/or modified sequence
atgaaggtgacagtgggccctgaccccagcctggtgtacagaccagatgtggaccctgaggtggccaaggacaaggccagcttcaggaactacaccagcggccccctgctggacagagtcttcaccacctacaagctgatgcacacccaccagacagtggactttgtgcgcagcaagcacgcccagtttggaggcttctcctacaagaagatgacagtgatggaggccgtggacctgctggatggcctggtggatgaaagtgaccctgatgtggacttccccaacagcttccacgccttccagacagctgagggcatcaggaaggcccacccagacaaggactggttccacctggtgggcctgctgcatgacctgggcaaggtgctggccctgtttggagagccccagtgggccgtggtgggggacaccttccctgtgggctgccggccccaggcctctgtggtgttctgtgacagcaccttccaggacaacccagacctgcaggacccccgctacagcacagagctgggcatgtaccagccccactgcggcctggacagagtgctgatgtcctggggccatgatgagtacatgtaccaggtgatgaagttcaacaagttcagcctgcccccagaggccttctacatgatccgcttccacagcttctacccctggcacacaggccgggactaccagcagctgtgcagccagcaggacctggccatgctgccctgggtgcgggagttcaacaagtttgacctgtacaccaagtgcccagacctgcctgatgtggacaagctgcggccctactaccagggcctgattgacaagtactgccccggcatcctgtcctggtag

SEQ ID NO: 193904 - DNA, 813 bp, Artificial Sequence
  derived and/or modified sequence
atgaaggtgacagtgggccctgaccccagcctggtgtacagaccagatgtggaccctgaggtggccaaggacaaggccagcttcaggaactacaccagcggccccctgctggacagagtcttcaccacctacaagctgatgcacacccaccagacagtggactttgtgcgcagcaagcacgcccagtttggaggcttctcctacaagaagatgacagtgatggaggccgtggacctgctggatggcctggtggatgaaagtgaccctgatgtggacttccccaacagcttccacgccttccagacagctgagggcatcaggaaggcccacccagacaaggactggttccacctggtgggcctgctgcatgacctgggcaaggtgctggccctgtttggagagccccagtgggccgtggtgggggacaccttccctgtgggctgccggccccaggcctctgtggtgttctgtgacagcaccttccaggacaacccagacctgcaggacccccgctacagcacagagctgggcatgtaccagccccactgcggcctggacagagtgctgatgtcctggggccatgatgagtacatgtaccaggtgatgaagttcaacaagttcagcctgcccccagaggccttctacatgatccgcttccacagcttctacccctggcacacaggccgggactaccagcagctgtgcagccagcaggacctggccatgctgccctggcaggtgcggcccctgcaccaggtgcccggccctgctggccggggccaggccgccgccctgctgcccggggcccactag

SEQ ID NO: 193905 - DNA, 798 bp, Artificial Sequence
  derived and/or modified sequence
ggccctgaccccagcctggtgtacagaccagatgtggaccctgaggtggccaaggacaaggccagcttcaggaactacaccagcggccccctgctggacagagtcttcaccacctacaagctgatgcacacccaccagacagtggactttgtgcgcagcaagcacgcccagtttggaggcttctcctacaagaagatgacagtgatggaggccgtggacctgctggatggcctggtggatgaaagtgaccctgatgtggacttccccaacagcttccacgccttccagacagctgagggcatcaggaaggcccacccagacaaggactggttccacctggtgggcctgctgcatgacctgggcaaggtgctggccctgtttggagagccccaggcctctgtggtgttctgtgacagcaccttccaggacaacccagacctgcaggacccccgctacagcacagagctgggcatgtaccagccccactgcggcctggacagagtgctgatgtcctggggccatgatgagtacatgtaccaggtgatgaagttcaacaagttcagcctgcccccagaggccttctacatgatccgcttccacagcttctacccctggcacacaggccgggactaccagcagctgtgcagccagcaggacctggccatgctgccctgggtgcgggagttcaacaagtttgacctgtacaccaagtgcccagacctgcctgatgtggacaagctgcggccctactaccagggcctgattgacaagtactgccccggcatcctgtcctggtag

SEQ ID NO: 193906 - DNA, 1130 bp, Artificial Sequence
  derived and/or modified sequence
gtgtatataggagcctggctgaggacacactcgccagcctgtgctttgccacctgagcgccgctccctctcaggatgaaggtgacggtgggcccagacccttccctggtctaccgacctgatgtggacccagaggtggccaaagacaaggccagcttccggaactacacgtcaggtcccctcctggaccgtgtcttcaccacctacaagctcatgcacacgcaccagacagtggacttcgtcaggagcaagcatgcccagtttgggggcttctcctacaagaaaatgacagtcatggaggccgtggacctgctggatgggctggtggatgagtcggacccggacgtagatttccccaactccttccatgccttccagacagcggagggcatccggaaggcccacccagacaaggactggttccacctcgtcgggctcctgcacgacctggggaaggtcctggccctgttcggggagccccagtgggctgtcgtcggcgacaccttccccgtcggatgccgtccgcaggcctccgtggttttctgcgactccaccttccaggacaaccctgacctccaggatcctcgatacagcacagagctcgggatgtatcagccccactgtgggctcgacagggtcctcatgtcctggggccatgatgagtacatgtaccaggtgatgaagtttaacaagttctcactgccccctgaggctttctacatgatccggttccactccttctacccctggcacacgggccgcgactaccagcagctgtgcagccagcaggacctggccatgctgccctgggtgcgggagttcaacaagttcgacctctacaccaagtgcccggacctgccggacgtggacaagctgcggccctactaccaggggctcattgacaagtactgccctggcatcctgagctggtgaccctcctgccacccaagctgctgctggacctaggcctggccctccgcctgcctggagaggcctggccctgggcaaacagccgccatcagggttcacctcggtgggggaccccactcacccccttagggtcgccacccctcacggcaacttgtgcctggcgtcaataaagacctggaaggatgttgtgcttctgaagcc

SEQ ID NO: 193907 - DNA, 1658 bp, Artificial Sequence
  derived and/or modified sequence
ctgagcgccgctccctctcaggatgaaggtgacggtgggcccagacccttccctggtctaccgacctgatgtggacccagaggtggccaaagacaaggccagcttccggaactacacgtcaggtcccctcctggaccgtgtcttcaccacctacaagctcatgcacacgcaccagacagtggacttcgtcaggagcaagcatgcccagtttgggggcttctcctacaagaaaatgacagtcatggaggccgtggacctgctggatgggctggtggatgagtcggacccggacgtagatttccccaactccttccatgccttccagacagcggagggcatccggaaggcccacccagacaaggactggttccacctcgtcgggctcctgcacgacctggggaaggtcctggccctgttcggggagccccagtgggctgtcgtcggcgacaccttccccgtcggatgccgtccgcaggcctccgtggttttctgcgactccaccttccaggacaaccctgacctccaggatcctcgatacagcacagagctcgggatgtatcagccccactgtgggctcgacagggtcctcatgtcctggggccatgatgagtacatgtaccaggtgatgaagtttaacaagttctcactgccccctgaggctttctacatgatccggttccactccttctacccctggcacacgggccgcgactaccagcagctgtgcagccagcaggacctggccatgctgccctggcaagttcgacctctacaccaagtgcccggacctgccggacgtggacaagctgcggccctactaccaggggctcattgacaagtactgccctggcatcctgagctggtgaccctcctgccacccaagctgctgctggacctaggcctggccctccgcctgcctggagaggcctggccctgggcaaacagccgccatcagggttcacctcggtgggggaccccactcacccccttagggtcgccacccctcacggcaacttgtgcctggcgtcaataaagacctggaaggatgttgtgcttctgaagccccactgggtgttactgcagcagggcgtggcccaggccgagggatggtgccagcagggtggaggccaagtcccaggctttcaggtgtgtgtgtcccaccacactggccgtggtaaacatctgcccatcctcccagctcctgtgtcagagcctgggggacgagtcacccagctcacccccacatgctcaaaacagtcaccaagtcctctgggctccgtccccttaaaaaataccccaatagctaaaataatacattcatagaaaacaacaaaaaacaaatgcaggctgggcacagcggctcacacctataatcccagcactttgggagggcgaggtgggcggatcacctgaggtcaggggttcaagaccagcctggccaacatggtgaaaccccgtctctactaaaaatacaaaaattagccgggcgtggtggtgggcgcctgtaatcccagctattcaggaggctaaggcaggagaatcgcttgaacccgggagacaggggttgccgtgagtcaagattgtgccactgcactccaacctgggtatcaagagtgaaattccatctcaaaaaaaataaataaaataaaataaaacaa

SEQ ID NO: 193908 - DNA, 1021 bp, Artificial Sequence
  derived and/or modified sequence
ggatggtcatttattactgcggacacttatgtaacctggggtgtatataggagcctggctgaggacacactcgccagcctgtgctttgccacctgagcgccgctccctctcaggatgaaggtgacggtgggcccagacccttccctggtctaccgacctgatgtggacccagaggtggccaaagacaaggccagcttccggaactacacgtcaggtcccctcctggaccgtgtcttcaccacctacaagctcatgcacacgcaccagacagtggacttcgtcaggagcaagcatgcccagtttgggggcttctcctacaagaaaatgacagtcatggaggccgtggacctgctggatgggctggtggatgagtcggacccggacgtagatttccccaactccttccatgccttccagacagcggagggcatccggaaggcccacccagacaaggtccccaacctgccctgtccatccccctcccagactggttccacctcgtcgggctcctgcacgacctggggaaggtcctggccctgttcggggagccccagtgggctgtcgtcggcgacaccttccccgtcggatgccgtccgcaggcctccgtggttttctgcgactccaccttccaggacaaccctgacctccaggatcctcgatacagcacagagctcgggatgtatcagccccactgtgggctcgacagggtcctcatgtcctggggccatgatgcaagttcgacctctacaccaagtgcccggacctgccggacgtggacaagctgcggccctactaccaggggctcattgacaagtactgccctggcatcctgagctggtgaccctcctgccacccaagctgctgctggacctaggcctggccctccgcctgcctggagaggcctggccctgggcaaacagccgccatcagggttcacctcggtgggggaccccactcacccccttagggtcgccacccctcacggcaacttgtgcctggcgtcaataaagacctggaagga

SEQ ID NO: 193909 - DNA, 918 bp, Artificial Sequence
  derived and/or modified sequence
ggcccagacccttccctggtctaccgacctgatgtggacccagaggtggccaaagacaaggccagcttccggaactacacgtcaggtcccctcctggaccgtgtcttcaccacctacaagctcatgcacacgcaccagacagtggacttcgtcaggagcaagcatgcccagtttgggggcttctcctacaagaaaatgacagtcatggaggccgtggacctgctggatgggctggtggatgagtcggacccggacgtagatttccccaactccttccatgccttccagacagcggagggcatccggaaggcccacccagacaaggactggttccacctcgtcgggctcctgcacgacctggggaaggtcctggccctgttcggggagccccaggcctccgtggttttctgcgactccaccttccaggacaaccctgacctccaggatcctcgatacagcacagagctcgggatgtatcagccccactgtgggctcgacagggtcctcatgtcctggggccatgatgagtacatgtaccaggtgatgaagtttaacaagttctcactgccccctgaggctttctacatgatccggttccactccttctacccctggcacacgggccgcgactaccagcagctgtgcagccagcaggacctggccatgctgccctgggtgcgggagttcaacaagttcgacctctacaccaagtgcccggacctgccggacgtggacaagctgcggccctactaccaggggctcattgacaagtactgccctggcatcctgagctggtgaccctcctgccacccaagctgctgctggacctaggcctggccctccgcctgcctggagaggcctggccctgggcaaacagccgccatcagggttcacctcggtgggggaccccactcaccc

SEQ ID NO: 193910 - DNA, 858 bp, Artificial Sequence
  derived and/or modified sequence
atgaaggtgaccgtgggccccgaccccagcctggtgtaccggcccgacgtcgaccctgaggtcgcaaaagacaaggccagttttcgcaactatacaagcggcccattgcttgacagggtctttaccacctataaactgatgcatacacaccagaccgttgacttcgtacgcagcaagcatgctcagtttggcggcttctcgtacaaaaagatgaccgtgatggaagcggtcgaccttctagacggattagtcgatgaaagcgatcccgacgtggacttcccaaactcgtttcacgctttccaaaccgctgaggggatcagaaaggctcacccggataaagattggttccacttagtaggtctgcttcatgatctgggcaaagtgctggccctgtttggcgaaccgcagtgggcagttgttggggataccttcccagttggctgtcgcccccaagcatcggttgtcttctgcgatagcacttttcaggacaacccggatcttcaggacccccggtattcaaccgaacttggtatgtaccagccccattgcggcttagaccgtgtcctgatgtcctggggccatgatgagtatatgtatcaggtgatgaaattcaataagttcagccttcctccggaagcattttatatgattagattccactccttttacccctggcacacaggccgggactaccagcagctgtgcagtcaacaggatctggcgatgcttccctgggtgcgagagtttaacaagttcgacctgtacactaagtgcccagacttgcccgatgtcgacaagttgagaccatactatcagggactgattgacaagtattgccctggcatcctgtcctggtag

SEQ ID NO: 193911 - DNA, 813 bp, Artificial Sequence
  derived and/or modified sequence
atgaaggtgaccgtgggccccgaccccagcctggtgtaccggcccgacgttgaccctgaagtggccaaagataaagcaagctttcgaaactatacctctgggcctctgcttgatcgcgtgtttaccacatacaagctgatgcacacacatcagactgtagactttgtaagatctaaacatgcacagttcggggggttcagctacaaaaagatgacagttatggaggccgtcgatctgctggatggactcgtcgatgaatccgaccctgatgtcgatttcccaaattcttttcacgctttccaaactgctgaaggaatcaggaaggcacatccagacaaggattggttccatctggtcggactgttgcacgatctcgggaaggtccttgctcttttcggggagccgcaatgggcagtagtgggcgacacctttcctgtggggtgtaggccccaagccagcgtagtattctgtgattcaacctttcaggataatcccgatctgcaagatcctaggtacagcacagagctcggtatgtaccagcctcactgtgggcttgacagggtgctgatgtcctgggggcatgacgaatatatgtatcaagtcatgaagtttaataaatttagtttaccgcctgaggctttttacatgatacgtttccatagcttttacccatggcacacgggccgggattatcagcagctgtgttcgcagcaggacctggccatgctaccatggcaggtacgacccttgcatcaggttccaggtcccgctggccgaggccaggcagcagctctgctccccggtgctcactag

SEQ ID NO: 193912 - DNA, 798 bp, Artificial Sequence
  derived and/or modified sequence
ggccccgaccccagcctggtgtaccggcccgacgtggaccccgaggttgccaaagataaagcttcatttagaaattacactagcggtcccttgctcgatagggtgttcacaacttacaagttgatgcatacccatcagactgttgattttgtgcgcagcaagcatgcacagttcggcggctttagctataaaaaaatgaccgtgatggaggcagtcgacctgcttgacgggcttgtagatgagagtgaccccgatgtcgacttcccgaactcgttccacgcattccagaccgcagagggcattaggaaggcacaccccgataaagactggtttcatttagtgggcctgttacacgatctcggtaaggttctagcactttttggcgagcctcaagctagtgttgttttctgtgattcaacttttcaggataacccggacctgcaggatccacgctattcgacagagttgggcatgtatcagcctcattgtggattggacagggtcctgatgtcgtggggtcatgacgagtatatgtatcaggttatgaaattcaataaattctccctgccacccgaggccttctacatgatccggttccactcattctatccctggcacacaggccgggattaccagcaactatgcagccaacaggaccttgctatgcttccgtgggtcagagaatttaataagtttgacctgtacaccaagtgcccagacttgccagacgtggacaagctgaggccttattaccaaggcctcatcgacaagtactgccccggcattctgtcttggtag

SEQ ID NO: 193913 - DNA, 858 bp, Artificial Sequence
  derived and/or modified sequence
atgaaggtgaccgtaggacccgatccctccctggtctaccgtccagatgtggatccagaagtcgctaaggacaaggcctcgttcaggaactataccagcgggcctttgcttgatagggtgtttaccacatacaagcttatgcatacacaccaaaccgtcgacttcgtccggtcaaagcacgcacagttcggcggtttttcctacaaaaagatgacagtcatggaggccgtagatctcttggacggattagtggacgagtccgatcccgacgtcgacttcccaaatagcttccacgccttccagactgccgaaggaattcggaaagctcaccccgataaggattggtttcacctagtcgggctgctccatgacctgggcaaagtcctggcactgttcggcgagccccaatgggcagttgttggggacacctttccggtaggctgcaggccacaggcttcagttgtgttttgcgactccactttccaggataatcccgacttacaggatcctaggtatagcacagaactggggatgtaccaaccacactgcggactagatcgagtccttatgtcttggggccatgacgagtacatgtatcaggtgatgaagttcaacaaattttctttgcccccagaggccttttatatgatccgatttcattctttctatccatggcatactggcagagactatcagcaactttgctcacagcaggatttagcaatgcttccttgggtgcgggagtttaacaaatttgacctttacaccaagtgtccagacctgccggatgtcgataaactgagaccatactaccaggggctgatcgataagtactgccctggtatcctgtcttggtag

SEQ ID NO: 193914 - DNA, 813 bp, Artificial Sequence
  derived and/or modified sequence
atgaaggtcacggtgggtcccgatccctccttggtatatcggccagacgtggaccccgaagtcgctaaggacaaggctagctttcggaactacacgagtggtcctctgctggaccgggttttcaccacatacaaacttatgcatactcaccagacagttgacttcgtccggagtaaacacgcccagttcggcggattcagctacaaaaagatgacggtgatggaggccgtagatctgctggacggcctggtggatgagagtgatccggacgtggatttccctaactccttccacgcctttcagacagctgagggtattcgaaaagctcacccagacaaggactggtttcaccttgtcggcctgctacacgacctggggaaagtactggcgctgttcggggagccccagtgggccgttgtcggcgatacgtttcccgtcggctgccgccctcaggcgagcgtcgtgttctgtgactccaccttccaggataatccggacttgcaagatccgcgttactcaaccgagctggggatgtaccagcctcactgcggactcgaccgggtgctgatgtcatggggccatgacgagtacatgtaccaagtcatgaaatttaataaattctcacttccacctgaggccttctacatgatccggtttcacagcttttacccgtggcatacaggacgcgactatcagcagctgtgcagccagcaggacctagcgatgcttccttggcaagtccgacctcttcatcaagtccctggcccagccggacgcggtcaagctgccgcactgctgcccggtgctcactag

SEQ ID NO: 193915 - DNA, 798 bp, Artificial Sequence
  derived and/or modified sequence
ggtcctgatccctcactcgtgtatagaccagacgtagaccctgaggtcgctaaagacaaggccagcttcaggaactacacttcgggccctctgctggatcgggtgtttaccacatataagttaatgcacacccaccagaccgtggatttcgtaagaagtaagcacgcacagtttggagggttctcttataagaagatgacagttatggaagcagtggacctgctggatggcctagtcgacgaatccgatcctgacgtagactttcctaacagctttcacgccttccagacggcagagggtatccgcaaggcccatccagacaaggactggtttcacctagtaggcttactgcacgacctgggcaaggttctggcactctttggggaaccacaggccagtgtcgtgttttgtgattcgacctttcaggataatccagatctgcaagatccgaggtatagcactgagcttggaatgtatcagccccactgcggtctggatagggtactgatgagttggggccacgatgaatacatgtaccaggtcatgaaatttaacaagttcagcctcccacctgaagccttctacatgataaggttccattcgttctacccgtggcacaccggtcgggattaccagcaactgtgtagtcagcaggacctagcaatgctaccctgggtgagagagtttaataaatttgacctttatacaaagtgcccagatttgcctgacgtggacaaactgcgcccatattatcaggggctaatagataagtactgcccgggaatactgtcttggtag

SEQ ID NO: 193916 - protein, 507 aa, Artificial Sequence
  derived and/or modified sequence
MQEPLLGAEGPDYDTFPEKPPPSPGDRARVGTLQNKRVFLATFAAVLGNFSFGYALVYTSPVIPALERSLDPDLHLTKSQASWFGSVFTLGAAAGGLSAMILNDLLGRKLSIMFSAVPSAAGYALMAGAHGLWMLLLGRTLTGFAGGLTAACIPVYVSEIAPPGVRGALGATPQLMAVFGSLSLYALGLLLPWRWLAVAGEAPVLIMILLLSFMPNSPRFLLSRGRDEEALRALAWLRGTDVDVHWEFEQIQDNVRRQSSRVSWAEARAPHVCRPITVALLMRLLQQLTGITPILVYLQSIFDSTAVLLPPKDDAAIVGAVRLLSVLIAALTMDLAGRKVLLFVSAAIMFAANLTLGLYIHFGPRPLSPNSTAGLESESWGDLAQPLAAPAGYLTLVPLLATMLFIMGYAVGWGPITWLLMSEVLPLRARGVASGLCVLASWLTAFVLTKSFLPVVSTFGLQVPFFFFAAICLVSLVFTGCCVPETKGRSLEQIESFFRTGRRSFLR

SEQ ID NO: 193917 - protein, 146 aa, Artificial Sequence
  derived and/or modified sequence
MILNDLLGRKLSIMFSAVPSAAGYALMAGAHGLWMLLLGRTLTGFAGGLTAACIPGLTLPSRPGLGTSIFSKTWCGGCVLQVYVSEIAPPGVRGALGATPQLMAVFGSLSLYALGKDEEALRALAWLRGTDVDVHWEFEQIQDNVR

SEQ ID NO: 193918 - DNA, 1524 bp, Artificial Sequence
  derived and/or modified sequence
atgcaagagccattgctgggagcggaaggtccagattacgacacctttcctgagaagcccccacccagtccgggtgacagggcacgggtggggaccttacagaacaaaagagtgttcctggccaccttcgccgctgtcttaggtaacttctcttttggttatgctctggtttacacctctcctgtgattcctgccttagagcgtagcctcgaccccgaccttcacctaacgaagtcacaagcttcatggttcggtagtgtcttcactcttggcgctgctgccggcgggctgtctgccatgatcctgaacgatctcctgggaagaaagctctcaataatgtttagcgctgtccctagcgctgccggttatgctctgatggccggtgcacacggactctggatgctgctgctaggcaggaccctcactgggtttgccggcggactgacagctgcctgcatcccagtgtacgtgtcagagatcgcaccgcctggcgtacggggcgctttgggggccaccccacagcttatggccgtgttcggatcactgtctctctatgcactcggcttactgcttccctggcgctggctggctgttgcaggagaagcacctgtgttgattatgattttgctgctctcgttcatgcccaactctcctcgcttcctattatcaagaggcagagatgaggaggccctccgggccctggcctggctgagaggtaccgacgtggacgtgcattgggaatttgaacaaattcaggataacgtgcggcgtcaatcttctagagtgtcctgggctgaggcccgagctccacatgtatgtagacctatcacagtggcactgctaatgcggctgttgcagcagctcacgggtataactcctatcctcgtgtatctccagagtatcttcgacagtacggctgtcctgctccctcccaaagatgatgccgccattgtcggcgccgtgcgccttctcagtgtgctgattgccgccctaaccatggatctggcaggaagaaaggtgctcctatttgtttcagctgccatcatgttcgccgccaatctaactcttgggttatacatccacttcggtcccaggcccctgtcccccaactcaaccgccggacttgagtccgaaagctggggggacctcgcccaacctttagccgcacctgctggttacttgaccttagtgcctcttctggcaacaatgctgtttatcatgggttacgccgtagggtggggcccaattacatggctcctcatgtctgaggttctgccgctgcgggccaggggcgtcgccagtggcctatgtgttctggcctcttggctaactgcctttgtgttgaccaagtccttcctgccggtggtgtcaaccttcggcctgcaggtgccattcttcttttttgccgccatctgccttgtaagccttgtgttcacaggatgctgcgtgcccgagaccaaaggacggtctctcgagcaaatcgagagcttcttcaggactggccgcagaagctttctcaggtag

SEQ ID NO: 193919 - DNA, 1524 bp, Artificial Sequence
  derived and/or modified sequence
atgcaggagcccctgctgggcgctgagggccctgactatgacaccttccctgagaagcccccacccagccctggggaccgggcccgggtgggcaccctgcagaacaagagggtcttcctggccacctttgctgctgtgctgggcaacttctcctttggctacgccctggtgtacaccagccctgtgatcccagccctggagaggagcctggaccctgacctgcacctgaccaagagccaggcctcctggtttggcagcgtcttcaccctgggcgctgctgctgggggcctgagcgccatgatcctgaatgacctgctgggcaggaagctgagcatcatgttttctgctgtgcccagcgctgctggctacgccctgatggccggggcccacggcctgtggatgctgctgctgggccgcaccctgaccggctttgctgggggcctgacagctgcctgcatccctgtgtatgtgtctgagatcgcccctcctggggtgcggggggccctgggcgccaccccccagctgatggctgtgtttggcagcctgagcctgtatgccctgggcctgctgctgccctggcgctggctggccgtggccggggaggcccctgtgctgatcatgatcctgctgctgtccttcatgcccaacagcccccgcttcctgctgagccggggcagagatgaggaggccctgcgggccctggcctggctgcggggcacagatgtggatgtgcactgggagtttgagcagatccaggacaacgtgcggcggcagagcagccgggtgtcctgggccgaggcccgggcccctcatgtgtgccggcccatcaccgtggccctgctgatgaggctgctgcagcagctgaccggcatcacccccatcctggtgtacctgcagagcatctttgacagcacagctgtgctgctgccccccaaggatgatgctgccatcgtgggcgctgtgcggctgctgtctgtgctgattgctgccctgaccatggacctggccggcaggaaggtgctgctgtttgtgtctgctgccatcatgtttgctgccaacctgaccctgggcctgtacatccacttcggcccccggcccctgagccccaacagcacagctggcctggagagcgagagctggggagacctggcccagcccctggccgccccagctggctacctgaccctggtgcccctgctggccaccatgctgttcatcatgggctatgctgtgggctggggccccatcacctggctgctgatgtctgaggtgctgcccctgcgggcccggggcgtggccagcggcctgtgtgtgctggcctcctggctgacagcctttgtgctgaccaagagcttcctgcctgtggtgtccaccttcggcctgcaggtgcccttcttcttctttgctgccatctgcctggtgtccctggtgttcaccggctgctgcgtgcctgagaccaagggccgcagcctggagcagatcgagagcttcttcagaacaggccgccgctccttcctgaggtag

SEQ ID NO: 193920 - DNA, 1524 bp, Artificial Sequence
  derived and/or modified sequence
atgcaggagcccctgctgggcgccgagggccccgactacgacacctttcctgagaaaccgcctccctctccgggcgacagggcacgagttgggaccctgcagaataaacgtgtcttcctggctaccttcgctgcagtgctcggtaacttttcattcggctacgctctagtttacacttcacctgtgattcccgctctagagaggtcgcttgaccctgaccttcacctaacgaagagccaggctagttggtttgggagcgtgtttacacttggcgcggcggccgggggcctcagtgcaatgattctgaacgatttgctgggccgtaagctttccatcatgttttccgctgtgccttccgcagcaggctacgctttgatggcgggtgcacatggtctgtggatgctactcctggggaggactttaaccggattcgccggcggtcttactgctgcatgtatacccgtatacgtgtccgagatcgctccacccggcgtccggggtgccctgggggctaccccccagctaatggctgtgtttggaagcttaagcttatacgctttgggacttctcctcccttggaggtggcttgcagtcgctggggaagcccctgtcctgattatgatcctcctgttgtcttttatgcccaactctccacggtttcttctcagtcgcggaagagacgaagaggctctgcgggccctggcatggctccgggggacagatgtagacgttcactgggaattcgagcaaattcaggataatgtgaggaggcaatccagcagggttagctgggctgaggcccgggccccccatgtttgcagaccaattaccgtggcgcttctgatgcgcctacttcagcagttgaccggtattacccccattcttgtttatttacagagcatcttcgacagcaccgcggtgctgctgcccccgaaggatgacgcagccatcgtcggcgctgtgcggctgctctcagtgctgatcgccgccctgacgatggatctggccggcagaaaggtgctcctgtttgtgagcgccgcaatcatgttcgctgccaaccttacactcggactgtacatccactttggtcctagacccctcagccccaactcgaccgccggcctggagtctgaaagctggggggatctggcccagcccttggcggctcctgcaggatacctcactctcgtcccattgctggctacgatgctctttatcatgggctatgcggtcgggtgggggcctatcacttggctgttgatgtctgaggttcttccactgcgcgctagaggtgtcgcctccggtctgtgcgtgctggcttcatggttgactgcatttgttctgacaaaaagcttcttaccagtggtttccacgttcggactccaggtgcctttttttttttttgccgccatttgcctcgtttctcttgtgttcaccggttgctgcgtacctgaaacaaaaggaaggagtctggaacagatcgaaagcttcttccgcaccggccggaggagcttcttgagatag

SEQ ID NO: 193921 - DNA, 1524 bp, Artificial Sequence
  derived and/or modified sequence
atgcaagaacccctcctcggagcggaaggccctgactatgatacttttcctgagaagccccctcctagccctggcgaccgggctcgtgtagggacgctgcagaataaacgcgtgtttcttgccacttttgctgcagttctcggaaacttctcctttggctacgctctggtgtacaccagccctgtgattcctgcactggaacgctccctggaccctgacctgcacttaactaagtcccaggcgagttggttcggctcggtttttacccttggcgctgctgcgggtggactgtctgcaatgattctaaatgatttgcttggaagaaaattgtcaatcatgttctcggctgtgcctagcgcggctggttacgctctaatggccggagcccatggactgtggatgctcttgctgggaagaactctgactggatttgccggtggactgactgccgcttgcatccccgtgtatgtaagcgaaattgctcctccaggcgtgaggggcgctttgggagctacacctcagctcatggctgtgttcggctccctatctctgtatgccctgggcctcctcctgccctggaggtggctcgcagtggccggagaagcccctgtccttataatgattttattacttagctttatgcccaacagcccacggtttctcctctcaaggggacgcgacgaggaggctctgcgcgcactcgcctggctacgagggaccgatgtggatgtgcattgggagttcgaacagattcaggacaacgtacggaggcagtcttccagagtgtcatgggcggaggctagagcaccgcatgtatgtaggccaattaccgtcgccttgctgatgcgcctgttacagcagctgactgggataacccctatactggtctacttacagagtatcttcgacagtactgcggttctgctccccccaaaagatgacgcggcaatcgtgggcgctgtgcgcctgctttccgtcttgattgctgcactgactatggacctggccggaaggaaagtgttgctttttgtgagcgcagcaatcatgtttgctgccaatctaaccttgggcctgtacatccactttggaccaagacccctgtcccccaattcgaccgcgggactggaaagtgaatcctggggagacctggcccaacctcttgccgcacccgctggctacctgaccctcgtgccgttgctggccacgatgctgtttatcatgggatatgccgtgggatgggggcctatcacctggctactgatgagcgaggtgctgccacttcgcgcaagaggcgtggcatccggcctgtgcgttcttgcgagttggctgacagccttcgtgctgacaaaatcgtttttacctgtcgtaagcacgttcggcctgcaggtgccttttttttttttcgctgctatctgcttggtctcattagtgtttaccggatgttgcgtgcctgagaccaagggccgttccttggaacaaatagaaagcttcttccggaccgggaggcgttcctttcttaggtag

SEQ ID NO: 193922 - DNA, 2528 bp, Artificial Sequence
  derived and/or modified sequence
cggtgccctcggagctgctggccccgggcggctgctccagtctgagcgccctccgctcgccccgagagagacccggccatgcaggagccgctgctgggagccgagggcccggactacgacaccttccccgagaagccgcccccgtcgccaggggacagggcgcgggtcgggaccctgcagaacaaaagggtgttcctggccaccttcgccgcagtgctcggcaatttcagctttgggtatgccctggtctacacatcccctgtcatcccagccctggagcgctccttggatcctgacctgcatctgaccaaatcccaggcatcctggtttgggtccgtgttcaccctgggagcagcggccggaggcctgagtgccatgatcctcaacgacctcctgggccggaagctgagcatcatgttctcagctgtgccgtcggcggccggctatgcgctcatggcgggtgcgcacggcctctggatgctgctgctcggaaggacgctgacgggcttcgccggggggctcacagctgcctgcatcccggtgtacgtgtctgagattgctcccccaggcgttcgtggggctctgggggccacaccccagctcatggcagtgttcggatccctgtccctctacgcccttggcctcctgctgccgtggcgctggctggctgtggccggggaggcgcctgtgctcatcatgatcctgctgctcagcttcatgcccaactcgccgcgcttcctgctctctcggggcagggacgaagaggccctgcgggcgctggcctggctgcgtgggacggacgtcgatgtccactgggagttcgagcagatccaggacaacgtccggagacagagcagccgagtatcgtgggctgaggcacgggccccacacgtgtgccggcccatcaccgtggccttgctgatgcgcctcctgcagcagctgacgggcatcacgcccatcctggtctacctgcagtccatcttcgacagcaccgctgtcctgctgccccccaaggacgacgcagccatcgttggggccgtgcggctcctgtccgtgctgatcgccgccctcaccatggacctcgcaggccgcaaggtgctgctcttcgtctcagcggccatcatgtttgctgccaacctgactctggggctgtacatccactttggccccaggcctctgagccccaacagcactgcgggcctggaaagcgagtcctggggggacttggcgcagcccctggcagcacccgctggctacctcaccctggtgcccctgctggccaccatgctcttcatcatgggctacgccgtgggctggggtcccatcacctggctgctcatgtctgaggtcctgcccctgcgtgcccgtggcgtggcctcagggctctgcgtgctggccagctggctcaccgccttcgtcctcaccaagtccttcctgccagtggtgagcaccttcggcctccaggtgcctttcttcttcttcgcggccatctgcttggtgagcctggtgttcacaggctgctgtgtgcccgagaccaagggacggtccctggagcagatcgagtccttcttccgcacggggagaaggtccttcttgcgctaggtcaaggtccccgcctggagggggccaaacccccagtggctgggcctctgtgttggctacaaacctgcaccctgggaccaagaggcagcagtcatccctgccaccagccagagcacaggaagagcagtgtgatggggcctcagcagcgggtgcccctggctcgggacaggtagcactgctgtccagccacagccccagcccaggcagcccacagtgctgcacgtagccatgggccgcaggagtgcatacaaccctgcatccagggacacggccctgctgggtgacctcaggcctagtccctttcccttgcgtgaaggacacgccccacagaaggctacggggaggactgagaggacagggctggaggcagccaagtaacgtagtcatatcatcgcgctctgatctggtggcatctggctgtgcaaggaagacccggctttgccctcacaagtcttatgggcaccacagggaacatcctggacttaaaaagccagggcaggccgggcacagtggctcacgcctgtaatcccagcactttgggaggccaaagcaggtggattacccaaggccaggagttcaagaccagcctggccaacatggtgaaaccccgtctctactaaaaaatacaaaaaagctgggtgtggtggcacacacccgtagttccagctacttgggaggctgaggcagcattgcttgaacccgggaggtggaggctgcaatgagctgagatcatgccattgcactccagcctgggcaacgagagtgaaactccgtccccaccccctgccaaaaaaaaaaaaaaaaaagccagggcaaaggacctggcgtggccacttcctcctgccccagcccaacctctgggaacaggcagctcctatctgcaaactgtgttcacccttttgtaaaaataaaggaactggacctgt

SEQ ID NO: 193923 - DNA, 1524 bp, Artificial Sequence
  derived and/or modified sequence
atgcaggagcccctgctgggcgccgagggccccgactacgacaccttccccgagaagcccccccccagccccggcgacagagccagagtgggcaccctgcagaacaagagagtgttcctggccaccttcgccgccgtgctgggcaacttcagcttcggctacgccctggtgtacaccagccccgtgatccccgccctggagagaagcctggaccccgacctgcacctgaccaagagccaggccagctggttcggcagcgtgttcaccctgggcgccgccgccggcggcctgagcgccatgatcctgaacgacctgctgggcagaaagctgagcatcatgttcagcgccgtgcccagcgccgccggctacgccctgatggccggcgcccacggcctgtggatgctgctgctgggcagaaccctgaccggcttcgccggcggcctgaccgccgcctgcatccccgtgtacgtgagcgagatcgccccccccggcgtgagaggcgccctgggcgccaccccccagctgatggccgtgttcggcagcctgagcctgtacgccctgggcctgctgctgccctggagatggctggccgtggccggcgaggcccccgtgctgatcatgatcctgctgctgagcttcatgcccaacagccccagattcctgctgagcagaggcagagacgaggaggccctgagagccctggcctggctgagaggcaccgacgtggacgtgcactgggagttcgagcagatccaggacaacgtgagaagacagagcagcagagtgagctgggccgaggccagagccccccacgtgtgcagacccatcaccgtggccctgctgatgagactgctgcagcagctgaccggcatcacccccatcctggtgtacctgcagagcatcttcgacagcaccgccgtgctgctgccccccaaggacgacgccgccatcgtgggcgccgtgagactgctgagcgtgctgatcgccgccctgaccatggacctggccggcagaaaggtgctgctgttcgtgagcgccgccatcatgttcgccgccaacctgaccctgggcctgtacatccacttcggccccagacccctgagccccaacagcaccgccggcctggagagcgagagctggggcgacctggcccagcccctggccgcccccgccggctacctgaccctggtgcccctgctggccaccatgctgttcatcatgggctacgccgtgggctggggccccatcacctggctgctgatgagcgaggtgctgcccctgagagccagaggcgtggccagcggcctgtgcgtgctggccagctggctgaccgccttcgtgctgaccaagagcttcctgcccgtggtgagcaccttcggcctgcaggtgcccttcttcttcttcgccgccatctgcctggtgagcctggtgttcaccggctgctgcgtgcccgagaccaagggcagaagcctggagcagatcgagagcttcttcagaaccggcagaagaagcttcctgagatag

SEQ ID NO: 193924 - protein, 223 aa, Artificial Sequence
  derived and/or modified sequence
MRDEIATTVFFVTRLVKKHDKLSKQQIEDFAEKLMTILFETYRSHWHSDCPSKGQAFRCIRINNNQNKDPILERACVESNVDFSHLGLPKEMTIWVDPFEVCCRYGEKNHPFTVASFKGRWEEWELYQQISYAVSRASSDVSSGTSCDEESCSKEPRVIPKVSNPKSIYQVENLKQPFQSWLQIPRKKNVVDGRVGLLGNTYHGSQKHPKCYRPAMHRLDRIL

SEQ ID NO: 193925 - DNA, 672 bp, Artificial Sequence
  derived and/or modified sequence
atgagggacgaaattgcaacaaccgtctttttcgtgaccagactcgtcaagaaacacgataaactgtcaaagcagcaaattgaggattttgccgaaaagctcatgactattctgttcgaaacataccgctcccattggcatagtgactgcccctctaagggtcaggcattccggtgtattcgcatcaacaataaccagaataaggatcccattctggagcgggcctgtgtcgaatcaaacgtggatttcagccaccttgggctgccaaaggagatgaccatctgggtggatcccttcgaggtgtgctgcagatacggcgagaaaaatcatccatttacagtcgcaagtttcaagggaaggtgggaagaatgggaactctaccagcagatttcttacgcagtttcccgtgccagttccgacgtcagctccggaactagttgcgatgaggagagctgcagcaaggaacctagggtaatcccaaaggtatcaaacccaaaaagcatctatcaggttgaaaatttaaaacagccctttcagtcttggctgcagatccccagaaagaaaaatgtcgttgacggaagagtagggctcttgggcaatacttaccacgggtctcagaagcaccctaagtgttatcgtccagcaatgcaccggctcgatcgaattctctag

SEQ ID NO: 193926 - DNA, 483 bp, Artificial Sequence
  derived and/or modified sequence
atgcgggatgagatagccacaactgtgtttttcgtgacacgcctggtgaaaaaacacgacaaactgtctaagcagcaaatcgaggatttcgctgagaagttgatgacaatacttttcgagacataccgatctcattggcactcagactgcccttctaagggtcaggctttccgctgtattcgaattaacaataatcagaataaagaccccatcttggagcgggcatgcgtggagtcaaacgttgacttcagtcacctcggcctccctaaggaaatgactatttgggtggatccatttgaggtgtgctgtagatacggcgagaaaaatcatcctttcacagttgctagcttcaagggccggtgggaggaatgggaattgtatcaacagatttcatacgccgtttccagggccagcagcgacgtgagcagcgggacatcgtgtgatgaagagtcttgctctaaggaacccagagtgatcccctag

SEQ ID NO: 193927 - DNA, 672 bp, Artificial Sequence
  derived and/or modified sequence
atgagagatgaaattgccaccaccgtcttctttgtgacccggctggtgaagaagcatgacaagctgagcaagcagcagatcgaggactttgctgagaagctgatgaccatcctgtttgagacctaccgcagccactggcacagcgactgccccagcaagggccaggccttccgctgcatccgcatcaacaacaaccagaacaaggaccccatcctggagcgggcctgtgtggagagcaatgtggacttcagccacctgggcctgcccaaggagatgaccatctgggtggacccctttgaggtgtgctgccgctatggagagaagaaccaccccttcaccgtggccagcttcaagggccgctgggaggagtgggagctgtaccagcagatctcctatgctgtgtcccgggccagcagtgatgtgagcagcggcaccagctgtgatgaggagagctgcagcaaggagcccagggtcatccccaaggtgagcaaccccaagagcatctaccaggtggagaacctgaagcagcccttccagagctggctgcagatccccaggaagaagaatgtggtggatggccgggtgggcctgctgggcaacacctaccacggcagccagaagcaccccaagtgctacagacctgccatgcaccggctggaccgcatcctgtag

SEQ ID NO: 193928 - DNA, 483 bp, Artificial Sequence
  derived and/or modified sequence
atgagagatgaaattgccaccaccgtcttctttgtgacccggctggtgaagaagcatgacaagctgagcaagcagcagatcgaggactttgctgagaagctgatgaccatcctgtttgagacctaccgcagccactggcacagcgactgccccagcaagggccaggccttccgctgcatccgcatcaacaacaaccagaacaaggaccccatcctggagcgggcctgtgtggagagcaatgtggacttcagccacctgggcctgcccaaggagatgaccatctgggtggacccctttgaggtgtgctgccgctatggagagaagaaccaccccttcaccgtggccagcttcaagggccgctgggaggagtgggagctgtaccagcagatctcctatgctgtgtcccgggccagcagtgatgtgagcagcggcaccagctgtgatgaggagagctgcagcaaggagcccagggtcatcccctag

SEQ ID NO: 193929 - DNA, 672 bp, Artificial Sequence
  derived and/or modified sequence
atgcgggacgagatcgccaccaccgtgttcttcgtgacccggctggtcaaaaaacacgataaactgagcaaacagcagatcgaggacttcgctgagaagctgatgaccattctcttcgagacctatagatcacactggcacagcgactgcccaagtaagggacaggccttccgttgcatacgcattaacaacaatcaaaacaaggatcccattttggagcgggcatgtgtagagagcaacgtggacttcagccatcttggtctgccaaaagagatgaccatctgggtcgaccctttcgaagtgtgttgccgatacggtgagaagaatcatccgttcactgtcgccagcttcaaggggcggtgggaggagtgggaattatatcagcagatcagttatgccgtaagtcgggcttccagtgacgtgtcttccggaacgtcctgcgacgaagaaagctgtagcaaggaaccccgagtgatccctaaagtatccaatccgaagtccatctatcaggtggaaaacctgaaacagcctttccagtcttggctgcagatccctcgaaagaagaatgttgtggatgggcgagtggggttactgggaaatacttaccacggaagtcagaagcatccgaaatgctaccgaccagcgatgcacaggcttgacaggatactgtag

SEQ ID NO: 193930 - DNA, 483 bp, Artificial Sequence
  derived and/or modified sequence
atgcgggacgagatcgccaccaccgtgttcttcgtgacccggctggtgaagaagcacgacaagctaagcaagcagcagatagaagattttgcggaaaaacttatgaccatactgtttgagacctatagatcccactggcactctgattgcccctccaaaggacaagcgtttcgatgtatcaggatcaacaataaccaaaataaagaccccatcctggagagggcctgtgtagaatctaacgtggactttagccatttaggtctacctaaagaaatgaccatatgggtggacccctttgaagtgtgctgtaggtacggcgagaaaaatcatccctttactgtggcatcatttaaggggcggtgggaggaatgggagctgtaccagcagatttcctatgcagtctcgcgtgcaagctccgacgtcagtagtggaacatcctgcgacgaagagagctgtagtaaggagccaagggtgattccatag

SEQ ID NO: 193931 - DNA, 672 bp, Artificial Sequence
  derived and/or modified sequence
atgcgagatgaaatagcaacaacggtgtttttcgtgacacgtctggtaaagaagcatgacaaattaagtaagcagcagattgaagacttcgcggagaaattgatgacaatcttattcgagacttatcggtctcattggcacagcgattgtccgagcaaagggcaagcattcaggtgcatacgaattaacaataatcagaacaaagaccccatactagagcgagcctgcgtggagtccaacgttgatttcagccacctgggactgcctaaggagatgaccatttgggtcgaccctttcgaggtatgctgtagatacggggagaagaaccacccttttactgtggcttctttcaagggtcggtgggaagagtgggaactgtaccaacaaatatcttatgccgttagcagggcaagtagtgatgtgagctccggcacttcatgtgatgaggaaagctgttcaaaagaaccaagagtaattcccaaagtgtctaatccaaaatcaatatatcaggtggagaaccttaagcagccctttcagagctggctacagatcccacgcaaaaagaacgtggtggacggcagggtaggacttttaggcaatacctaccacgggagccagaagcatcctaagtgttaccgacccgcaatgcatcgccttgatcgaatcctctag

SEQ ID NO: 193932 - DNA, 483 bp, Artificial Sequence
  derived and/or modified sequence
atgcgggatgagattgcgaccaccgtattctttgtgactcgtttggtcaagaaacacgataagctcagcaaacagcagatcgaggattttgctgagaaactaatgacgatactctttgaaacttacagatcgcactggcattctgattgccctagtaaaggccaggccttccgttgtatcagaattaataacaaccagaataaggatcctattttagaacgcgcatgcgttgagtctaacgtcgatttttcccatctggggctaccaaaggaaatgactatctgggtggacccatttgaggtgtgctgcagatacggggagaaaaatcatcccttcacagtagcgagctttaagggtcggtgggaggagtgggaattgtaccagcagatctcttacgctgtctcgagggcatcctcagacgtaagctctggaacatcctgcgatgaggaatcctgctcaaaagaacctcgtgtgattccctag

SEQ ID NO: 193933 - DNA, 1018 bp, Artificial Sequence
  derived and/or modified sequence
cctgaagggcctccaagggagacgcctagaagatggaggcccagattcttgagacgtttctctttctgatctagcaggagggacaaagagctcctccactccctcattccccaagaaggcccccagcctacccagtttccgtgaccattccgccctgggaaagcggcttcccagacctccttatctatttttcttgaatcatgagagatgaaattgcaacaacagttttctttgtcacaagattggtgaaaaaacatgataaactaagtaaacagcaaatagaagactttgcagaaaagctgatgacgatcttgtttgaaacatacagaagtcactggcactctgattgcccttctaaagggcaagccttcaggtgcatcaggataaacaacaatcagaataaagatcccattctagaaagggcatgtgtggaaagtaatgtagatttttctcacctgggacttccgaaggagatgaccatatgggtagatccctttgaagtatgctgtaggtatggtgagaaaaaccatccatttacagttgcttcttttaaaggcagatgggaggaatgggaactatatcaacaaatcagttatgccgttagtagagcctcatcagacgtttcctctggcacttcctgcgatgaagaaagttgtagcaaggaacctcgtgtcattcctaaagtcagcaatccgaagagtatttatcaggttgaaaacttgaaacagccctttcaatcttggttacaaatcccccgcaaaaagaatgtggtggacggccgtgttggcctcctgggaaacacttaccatggctcgcagaagcatcctaagtgttacaggcctgctatgcaccggctggacagaattttataacccacatctgggaatgaatttgcagcacctggtagaagaaggcaccttggaaggcactgccttgggcttccatggcaggaagatgagaagaaatcttcagggtgatttctggagcctgaaaagaataaaaaacaaaaccaaaccta

SEQ ID NO: 193934 - DNA, 754 bp, Artificial Sequence
  derived and/or modified sequence
ccaagggagacgcctagaagatggaggcccagattcttgagacgtttctctttctgatctagcaggagggacaaagagctcctccactccctcattccccaagaaggcccccagcctacccagtttccgtgaccattccgccctgggaaagcggcttcccagttgaagtcacgaggagttctccaagaaaggtctgctggctgattcttcattgacctaccagtccctgctatcaaggacactagaacctccttatctatttttcttgaatcatgagagatgaaattgcaacaacagttttctttgtcacaagattggtgaaaaaacatgataaactaagtaaacagcaaatagaagactttgcagaaaagctgatgacgatcttgtttgaaacatacagaagtcactggcactctgattgcccttctaaagggcaagccttcaggtgcatcaggataaacaacaatcagaataaagatcccattctagaaagggcatgtgtggaaagtaatgtagatttttctcacctgggacttccgaaggagatgaccatatgggtagatccctttgaagtatgctgtaggtatggtgagaaaaaccatccatttacagttgcttcttttaaaggcagatgggaggaatgggaactatatcaacaaatcagttatgccgttagtagagcctcatcagacgtttcctctggcacttcctgcgatgaagaaagttgtagcaaggaacctcgtgtcattcctaa

SEQ ID NO: 193935 - DNA, 672 bp, Artificial Sequence
  derived and/or modified sequence
atgagagacgagatcgccaccaccgtgttcttcgtgaccagactggtgaagaagcacgacaagctgagcaagcagcagatcgaggacttcgccgagaagctgatgaccatcctgttcgagacctacagaagccactggcacagcgactgccccagcaagggccaggccttcagatgcatcagaatcaacaacaaccagaacaaggaccccatcctggagagagcctgcgtggagagcaacgtggacttcagccacctgggcctgcccaaggagatgaccatctgggtggaccccttcgaggtgtgctgcagatacggcgagaagaaccaccccttcaccgtggccagcttcaagggcagatgggaggagtgggagctgtaccagcagatcagctacgccgtgagcagagccagcagcgacgtgagcagcggcaccagctgcgacgaggagagctgcagcaaggagcccagagtgatccccaaggtgagcaaccccaagagcatctaccaggtggagaacctgaagcagcccttccagagctggctgcagatccccagaaagaagaacgtggtggacggcagagtgggcctgctgggcaacacctaccacggcagccagaagcaccccaagtgctacagacccgccatgcacagactggacagaatcctgtag

SEQ ID NO: 193936 - DNA, 483 bp, Artificial Sequence
  derived and/or modified sequence
atgagagacgagatcgccaccaccgtgttcttcgtgaccagactggtgaagaagcacgacaagctgagcaagcagcagatcgaggacttcgccgagaagctgatgaccatcctgttcgagacctacagaagccactggcacagcgactgccccagcaagggccaggccttcagatgcatcagaatcaacaacaaccagaacaaggaccccatcctggagagagcctgcgtggagagcaacgtggacttcagccacctgggcctgcccaaggagatgaccatctgggtggaccccttcgaggtgtgctgcagatacggcgagaagaaccaccccttcaccgtggccagcttcaagggcagatgggaggagtgggagctgtaccagcagatcagctacgccgtgagcagagccagcagcgacgtgagcagcggcaccagctgcgacgaggagagctgcagcaaggagcccagagtgatcccctag

SEQ ID NO: 193937 - protein, 977 aa, Artificial Sequence
  derived and/or modified sequence
MERQKRKADIEKGLQFIQSTLPLKQEEYEAFLLKLVQNLFAEGNDLFREKDYKQALVQYMEGLNVADYAASDQVALPRELLCKLHVNRAACYFTMGLYEKALEDSEKALGLDSESIRALFRKARALNELGRHKEAYECSSRCSLALPHDESVTQLGQELAQKLGLRVRKAYKRPQELETFSLLSNGTAAGVADQGTSNGLGSIDDIETDCYVDPRGSPALLPSTPTMPLFPHVLDLLAPLDSSRTLPSTDSLDDFSDGDVFGPELDTLLDSLSLVQGGLSGSGVPSELPQLIPVFPGGTPLLPPVVGGSIPVSSPLPPASFGLVMDPSKKLAASVLDALDPPGPTLDPLDLLPYSETRLDALDSFGSTRGSLDKPDSFMEETNSQDHRPPSGAQKPAPSPEPCMPNTALLIKNPLAATHEFKQACQLCYPKTGPRAGDYTYREGLEHKCKRDILLGRLRSSEDQTWKRIRPRPTKTSFVGSYYLCKDMINKQDCKYGDNCTFAYHQEEIDVWTEERKGTLNRDLLFDPLGGVKRGSLTIAKLLKEHQGIFTFLCEICFDSKPRIISKGTKDSPSVCSNLAAKHSFYNNKCLVHIVRSTSLKYSKIRQFQEHFQFDVCRHEVRYGCLREDSCHFAHSFIELKVWLLQQYSGMTHEDIVQESKKYWQQMEAHAGKASSSMGAPRTHGPSTFDLQMKFVCGQCWRNGQVVEPDKDLKYCSAKARHCWTKERRVLLVMSKAKRKWVSVRPLPSIRNFPQQYDLCIHAQNGRKCQYVGNCSFAHSPEERDMWTFMKENKILDMQQTYDMWLKKHNPGKPGEGTPISSREGEKQIQMPTDYADIMMGYHCWLCGKNSNSKKQWQQHIQSEKHKEKVFTSDSDASGWAFRFPMGEFRLCDRLQKGKACPDGDKCRCAHGQEELNEWLDRREVLKQKLAKARKDMLLCPRDDDFGKYNFLLQEDGDLAGATPEAPAAAATATTGE

SEQ ID NO: 193938 - DNA, 2934 bp, Artificial Sequence
  derived and/or modified sequence
atggagagacagaagagaaaggccgacatcgagaagggcctgcagttcatccagagcaccctgcccctgaagcaggaggagtacgaggccttcctgctgaagctggtgcagaacctgttcgccgagggcaacgacctgttcagagagaaggactacaagcaggccctggtgcagtacatggagggcctgaacgtggccgactacgccgccagcgaccaggtggccctgcccagagagctgctgtgcaagctgcacgtgaacagagccgcctgctacttcaccatgggcctgtacgagaaggccctggaggacagcgagaaggccctgggcctggacagcgagagcatcagagccctgttcagaaaggccagagccctgaacgagctgggcagacacaaggaggcctacgagtgcagcagcagatgcagcctggccctgccccacgacgagagcgtgacccagctgggccaggagctggcccagaagctgggcctgagagtgagaaaggcctacaagagaccccaggagctggagaccttcagcctgctgagcaacggcaccgccgccggcgtggccgaccagggcaccagcaacggcctgggcagcatcgacgacatcgagaccgactgctacgtggaccccagaggcagccccgccctgctgcccagcacccccaccatgcccctgttcccccacgtgctggacctgctggcccccctggacagcagcagaaccctgcccagcaccgacagcctggacgacttcagcgacggcgacgtgttcggccccgagctggacaccctgctggacagcctgagcctggtgcagggcggcctgagcggcagcggcgtgcccagcgagctgccccagctgatccccgtgttccccggcggcacccccctgctgccccccgtggtgggcggcagcatccccgtgagcagccccctgccccccgccagcttcggcctggtgatggaccccagcaagaagctggccgccagcgtgctggacgccctggacccccccggccccaccctggaccccctggacctgctgccctacagcgagaccagactggacgccctggacagcttcggcagcaccagaggcagcctggacaagcccgacagcttcatggaggagaccaacagccaggaccacagaccccccagcggcgcccagaagcccgcccccagccccgagccctgcatgcccaacaccgccctgctgatcaagaaccccctggccgccacccacgagttcaagcaggcctgccagctgtgctaccccaagaccggccccagagccggcgactacacctacagagagggcctggagcacaagtgcaagagagacatcctgctgggcagactgagaagcagcgaggaccagacctggaagagaatcagacccagacccaccaagaccagcttcgtgggcagctactacctgtgcaaggacatgatcaacaagcaggactgcaagtacggcgacaactgcaccttcgcctaccaccaggaggagatcgacgtgtggaccgaggagagaaagggcaccctgaacagagacctgctgttcgaccccctgggcggcgtgaagagaggcagcctgaccatcgccaagctgctgaaggagcaccagggcatcttcaccttcctgtgcgagatctgcttcgacagcaagcccagaatcatcagcaagggcaccaaggacagccccagcgtgtgcagcaacctggccgccaagcacagcttctacaacaacaagtgcctggtgcacatcgtgagaagcaccagcctgaagtacagcaagatcagacagttccaggagcacttccagttcgacgtgtgcagacacgaggtgagatacggctgcctgagagaggacagctgccacttcgcccacagcttcatcgagctgaaggtgtggctgctgcagcagtacagcggcatgacccacgaggacatcgtgcaggagagcaagaagtactggcagcagatggaggcccacgccggcaaggccagcagcagcatgggcgcccccagaacccacggccccagcaccttcgacctgcagatgaagttcgtgtgcggccagtgctggagaaacggccaggtggtggagcccgacaaggacctgaagtactgcagcgccaaggccagacactgctggaccaaggagagaagagtgctgctggtgatgagcaaggccaagagaaagtgggtgagcgtgagacccctgcccagcatcagaaacttcccccagcagtacgacctgtgcatccacgcccagaacggcagaaagtgccagtacgtgggcaactgcagcttcgcccacagccccgaggagagagacatgtggaccttcatgaaggagaacaagatcctggacatgcagcagacctacgacatgtggctgaagaagcacaaccccggcaagcccggcgagggcacccccatcagcagcagagagggcgagaagcagatccagatgcccaccgactacgccgacatcatgatgggctaccactgctggctgtgcggcaagaacagcaacagcaagaagcagtggcagcagcacatccagagcgagaagcacaaggagaaggtgttcaccagcgacagcgacgccagcggctgggccttcagattccccatgggcgagttcagactgtgcgacagactgcagaagggcaaggcctgccccgacggcgacaagtgcagatgcgcccacggccaggaggagctgaacgagtggctggacagaagagaggtgctgaagcagaagctggccaaggccagaaaggacatgctgctgtgccccagagacgacgacttcggcaagtacaacttcctgctgcaggaggacggcgacctggccggcgccacccccgaggcccccgccgccgccgccaccgccaccaccggcgagtag

SEQ ID NO: 193939 - DNA, 2934 bp, Artificial Sequence
  derived and/or modified sequence
atggaacgccagaaacgtaaggccgatattgagaagggactgcagttcatccagagcaccttgccattaaaacaggaagagtacgaggcttttctgcttaagctcgtccaaaacttgtttgcggagggcaacgaccttttccgggagaaggattacaagcaggccttggtgcagtatatggagggcctgaatgtggccgattatgcagccagcgatcaggtggccctgcctcgcgaactgctatgcaagcttcacgttaatagagccgcatgctactttacaatggggctgtatgagaaggctttagaggattccgagaaggctctgggcttggactccgagtctatccgggccctgttccgcaaggcgcgggctttgaatgagttaggccgacacaaagaagcctatgagtgctcttcgagatgtagtctagcattgccccatgatgagagtgtgacccagctgggacaggaactggcacaaaagctagggctgagagtacggaaggcctataaacgcccgcaggaactcgaaactttctctctgttaagcaacggaactgctgcaggtgtggcagaccagggcacttcgaatggactggggtcaatcgacgatatcgagactgattgctatgtggacccacgaggttccccggcacttcttccatctacccccaccatgcctttgtttccccacgtactcgatctgctggcgcctctagatagcagccggacacttccctccaccgattcactagatgacttctccgacggagatgtttttggccccgaactcgatacgctgctggacagcttgtcccttgtgcagggtggactcagtgggagcggggtccctagtgaactgccccagctgattccggtttttcctgggggcaccccgttgcttcccccagtcgtcgggggcagcattcccgtttcctctcctcttccccccgcgagctttggtctcgtgatggatccttccaaaaagctggctgcgtccgttctggacgctttagatccacctggacccactctggatcctctggacctgctgccttattccgaaacacggctggacgccctagattcattcggttccacacgagggagtcttgacaagcctgacagcttcatggaagagactaattcacaggatcatagaccaccctcaggcgcgcaaaaacccgcaccgtctccagaaccttgcatgccaaacacagcattactgattaagaatcccttggccgccacccacgaattcaaacaagcctgtcaactctgctatcccaaaactggaccaagggcgggggactacacctatcgcgaaggactcgaacacaaatgcaagagggacattcttctgggtcgcctgagatcaagcgaggaccagacctggaagcggattcggccaagaccaaccaagacgagcttcgtgggatcttattacctctgcaaagatatgattaacaagcaggactgcaaatacggcgacaactgcacattcgcataccatcaagaggagatcgatgtatggaccgaggaaaggaagggcactctgaacagggacctcctgtttgatccactggggggcgtgaaacgggggtctctaactatcgcgaagctccttaaagagcatcaaggaatttttactttcctctgcgagatttgcttcgactctaagcccaggatcatctccaagggtaccaaagacagcccatcagtatgcagtaatctggctgccaaacacagtttttataataataaatgcttagtgcatatcgtcaggagtacttctcttaagtactcaaagatccgtcaatttcaggaacacttccaatttgacgtgtgcagacacgaggtgcgctatggctgcctacgggaggactcctgccatttcgctcactcttttatagaattgaaggtgtggctgctccagcaatattcaggcatgacacatgaagacatcgtgcaggagagtaagaaatattggcaacagatggaggcgcacgctggaaaggcaagcagttcaatgggggcccccagaacacacgggcctagcactttcgacctgcagatgaagttcgtgtgtggccagtgttggcggaacggccaggtcgttgagccagacaaagacctgaaatactgctcagccaaagcgcgtcactgctggacgaaagagcgccgtgttctgctggtgatgagcaaggcaaagcgcaagtgggtttccgttcggcccctgccttccatcagaaacttccctcagcaatatgatctttgtatccatgcacagaacggtaggaagtgccagtatgttggcaactgttccttcgctcactctccagaagagagagacatgtggacttttatgaaagagaacaagatcctggatatgcagcagacctacgacatgtggctgaaaaaacataatcccggtaaacccggggaaggcaccccaatttcaagtcgagaaggggagaaacagatccagatgcccaccgactatgcggatatcatgatggggtaccactgttggctgtgtggcaaaaacagcaattctaaaaagcagtggcaacagcacattcagtcggagaagcataaagaaaaagtctttacaagcgactctgacgccagtggttgggccttccgattccctatgggagaattcaggttgtgcgacagactgcagaaggggaaggcctgccccgatggggacaagtgtagatgcgcacacggccaggaggagctgaatgagtggctcgatcgacgcgaagtgctcaagcagaagctggctaaggcaaggaaagacatgctcctgtgccctagggatgatgatttcggcaagtacaacttcctcctgcaggaggatggggatcttgcaggtgctaccccagaggcgccggctgctgcggcaactgctacaacaggcgagtag

SEQ ID NO: 193940 - DNA, 2934 bp, Artificial Sequence
  derived and/or modified sequence
atggagcgccagaagcggaaggctgatatcgaaaagggattgcaattcatacagagcaccctgccccttaaacaagaggaatacgaggcctttctcctgaaactcgtgcaaaatctattcgctgaggggaatgacctgttccgcgaaaaggactacaaacaggcacttgtacagtatatggaaggacttaatgttgctgactatgccgcatccgaccaggtcgctctcccgagagagttgttatgcaaattacacgttaatcgcgcggcgtgctattttacaatggggttgtacgagaaggctctggaggattcagaaaaggcactcggcctggacagtgaatcgattcgcgcactttttcggaaagccagagcattgaacgagttgggccgacataaggaggcctacgagtgctccagtcgctgctccctcgcccttccacatgatgagagcgtgacacagcttggtcaagagttagctcaaaagctaggacttcgcgttaggaaagcttataagcgcccgcaggagctggaaacgtttagcctgttaagcaatggaactgctgctggggttgctgaccagggaacttccaatgggctggggagtattgatgatatcgagactgactgttatgtcgatcccagggggtcccccgcccttctgcccagtactcccacgatgccccttttcccccatgttttggatctactggctcctctggactcatcccgaacccttccctctaccgattcattggacgattttagcgatggcgacgttttcgggccggaactggatacgttgctggattctttgagtctggttcaaggaggtctctccggcagcggggtaccaagtgagctgccccagttgattcccgtttttccaggcggtacgccattgctacctccagttgtgggaggctccatcccagtgtccagtccactgccgcctgcctcttttggcttagtcatggatccttctaaaaaactggccgcctcggtgctcgacgccctggacccaccaggcccaacactggacccactggatctcttgccttacagtgagacaaggctggacgccctcgactctttcggcagtactcggggctccctcgacaaacctgacagtttcatggaggaaacaaattcacaggatcacaggcctccctctggagctcagaagcctgctcctagtcccgagccatgtatgcctaatacagccttactgatcaaaaaccctcttgcagcaacccacgagtttaaacaggcctgccagctgtgctaccctaagaccggacctcgggcaggagattatacatacagagagggtctcgagcataagtgcaaacgggacattcttctgggaagactgagatcctctgaagatcagacctggaagcggattcggccgaggcctacgaagacctccttcgttggcagctactatctgtgtaaggacatgattaataaacaagactgtaaatacggagacaactgtacttttgcctatcaccaggaggaaatcgacgtgtggaccgaagagaggaaaggcaccctgaaccgcgatttactgttcgatcctctcggcggggtcaagcgaggatcactaaccattgcgaaactgcttaaggagcaccagggcatttttacatttctttgcgagatctgctttgattcaaagccacgcatcattagtaaaggcaccaaagactcacccagtgtttgcagtaatttagcggcaaagcattcattctacaacaataaatgtcttgtgcacatcgtacggtctaccagtctaaagtattcaaaaattaggcagtttcaagagcatttccagttcgatgtttgcaggcacgaggtaaggtatggctgcctcagggaagactcttgccatttcgcacactccttcatcgaacttaaggtttggctactccaacagtactcgggtatgacccacgaggatatagtgcaggaaagtaaaaagtattggcaacagatggaggcacatgctggaaaagcctcctcaagtatgggagctccccggacacatggtccaagcacattcgacttacagatgaagtttgtgtgtggccagtgttggagaaatggccaagtcgttgagccagacaaagacctgaaatactgctctgctaaggccagacactgctggactaaagagagacgggttctactggtgatgtcaaaggctaaaaggaaatgggtgagtgtaagaccactcccatcgattaggaattttccccaacagtatgacctatgcatacacgcccagaatggccgaaaatgtcaatacgttgggaactgttctttcgcacactcacccgaggagcgggacatgtggacttttatgaaggagaacaaaatcttggatatgcagcagacttatgatatgtggctgaagaaacataatccgggcaagcccggagaaggaactccaattagttcaagggagggcgaaaaacagatccagatgcctaccgactacgcggacatcatgatgggctatcactgttggctctgtgggaagaactccaacagtaagaaacagtggcagcagcatatacagtcagaaaagcacaaagaaaaggtcttcacatctgactccgacgcttcagggtgggccttccgcttcccgatgggggagttcaggctgtgcgaccggctgcaaaagggaaaggcgtgccccgacggcgacaaatgtaggtgtgcacatggacaggaggagctgaacgaatggctggaccgaagagaggtgctcaagcaaaaacttgcaaaagcacgtaaagatatgctcctctgccctcgggacgatgattttggaaagtataatttcctcctacaagaagatggggatctggcaggcgccactccagaggcccccgccgccgccgccacagccacaactggggaatag

SEQ ID NO: 193941 - DNA, 2934 bp, Artificial Sequence
  derived and/or modified sequence
atggagcggcagaagaggaaggctgacatcgagaagggcctgcagttcatccagagcaccctgcccctgaagcaggaggagtatgaggccttcctgctgaagctggtgcagaacctgtttgctgagggcaatgacctcttccgggagaaggactacaagcaggccctggtgcagtacatggagggcctgaatgtggccgactatgctgccagtgaccaggtggccctgccccgggagctgctgtgcaagctgcacgtgaacagagctgcctgctacttcaccatgggcctgtatgagaaggccctggaggacagcgagaaggccctgggcctggacagcgagagcatccgggccctcttcaggaaggcccgggccctgaatgagctgggccgccacaaggaggcctatgaatgtagcagccgctgcagcctggccctgccccatgatgaatctgtgacccagctgggccaggagctggcccagaagctgggcctgcgggtgaggaaggcctacaagaggccccaggagctggagaccttcagcctgctgagcaatggaacagctgctggggtggccgaccagggcaccagcaatggcctgggcagcattgatgacatcgagacagactgctacgtggacccccggggcagccctgccctgctgcccagcacccccaccatgcccctcttcccccacgtgctggacctgctggcccccctggacagcagcaggaccctgcccagcacagacagcctggatgacttcagtgatggagatgtgtttggacctgagctggacaccctgctggacagcctgagcctggtgcagggcggcctgagcggcagcggcgtgcccagcgagctgccccagctgatccctgtgtttcctgggggcacccccctgctgccccctgtggtgggcggcagcatccctgtgagcagccccctgcccccagccagctttggcctggtgatggaccccagcaagaagctggccgcctctgtgctggatgccctggaccccccaggccccaccctggaccccctggacctgctgccctacagcgagacccggctggatgccctggacagctttggcagcacccggggcagcctggacaagccagacagcttcatggaggagaccaacagccaggaccacaggcctccttctggggcccagaagccagcccccagccctgagccctgcatgcccaacacagccctgctgatcaagaaccccctggccgccacccatgagttcaagcaggcctgccagctgtgctaccccaagacaggcccccgggccggggactacacctaccgggagggcctggagcacaagtgcaagagggacatcctgctgggccgcctgcggagcagcgaggaccagacctggaagaggatccggccccggcccaccaagaccagctttgtgggcagctactacctgtgcaaggacatgatcaacaagcaggactgcaagtacggggacaactgcacctttgcctaccaccaggaggagattgatgtgtggacagaggagaggaagggcaccctgaacagagacctgctgtttgaccccctgggcggcgtgaagaggggcagcctgaccatcgccaagctgctgaaggagcaccagggcatcttcaccttcctgtgtgagatctgctttgacagcaagccccgcatcatcagcaagggcaccaaggacagccccagcgtgtgcagcaacctggccgccaagcacagcttctacaacaacaagtgcctggtgcacatcgtgcgcagcaccagcctgaagtacagcaagatccggcagttccaggagcacttccagtttgatgtgtgcagacatgaggtgcgctatggctgcctgcgggaggacagctgccactttgcccacagcttcatcgagctgaaggtgtggctgctgcagcagtacagcggcatgacccatgaggacatcgtgcaggagagcaagaagtactggcagcagatggaggcccatgctgggaaggccagcagctccatgggcgcccccaggacccacggccccagcacctttgacctgcagatgaagtttgtgtgtggccagtgctggagaaatggccaggtggtggagccagacaaggacctgaagtactgcagcgccaaggcccggcactgctggaccaaggagcggcgggtgctgctggtgatgagcaaggccaagaggaagtgggtgtctgtgcggcccctgcccagcatccggaacttcccccagcagtatgacctgtgcatccacgcccagaatggaaggaagtgccagtatgtgggcaactgcagctttgcccacagccctgaggagcgggacatgtggaccttcatgaaggagaacaagatcctggacatgcagcagacctatgacatgtggctgaagaagcacaaccctgggaagccaggagagggcacccccatcagcagccgggagggggagaagcagatccagatgcccacagattatgctgacatcatgatgggctaccactgctggctgtgtgggaagaacagcaacagcaagaagcagtggcagcagcacatccagagcgagaagcacaaggagaaggtgttcaccagtgacagtgatgccagcggctgggccttccgcttccccatgggagagttccggctgtgtgaccggctgcagaagggcaaggcctgcccagatggagacaagtgccgctgtgcccacggccaggaggagctgaatgagtggctggaccggcgggaggtgctgaagcagaagctggccaaggccaggaaggacatgctgctgtgccccagagatgatgactttgggaagtacaacttcctgctgcaggaggatggagacctggccggggccaccccagaggccccagctgctgctgccacagccaccactggagagtag

SEQ ID NO: 193942 - DNA, 2934 bp, Artificial Sequence
  derived and/or modified sequence
atggagcggcagaagcggaaggccgacatcgagaagggcctgcagttcatacagagcacattaccgttgaaacaagaggaatatgaggccttcttactgaagctggtccagaatctttttgcagagggaaacgatcttttccgcgagaaagactacaagcaggccttagttcagtatatggagggcctgaatgtggccgattatgccgcctccgaccaggttgccctccctcgagagctgctgtgtaagctgcacgtgaaccgagcggcctgctacttcaccatgggactctatgaaaaggccttggaagattcagaaaaagcactgggccttgacagcgagagtattagagcgctcttcaggaaagctcgggctctgaatgaacttggccggcacaaagaggcctacgagtgttcttcccggtgttccttagctttgccccatgacgagtccgtgactcagttaggccaggagttggcgcagaaactcgggctcagagttagaaaggcctacaagcgtccacaggaactagaaacctttagcctactttccaacggaacagccgcaggggtcgctgatcagggaacttctaatggcctgggcagcatcgatgacatcgagactgactgctatgtcgacccgcgcgggtcaccagctttactcccatccacccccaccatgcccttgttcccccacgttttagatctgctcgcgcccctggacagctccagaacactccccagcaccgattctctggacgactttagtgacggcgacgtctttggacctgaactggatacccttctcgacagcctttcccttgtccaaggcggactaagtggcagcggggtcccctccgagctgccacagctgatccccgtgttcccgggtggcacgcctctgctgccaccggtggtcgggggctctattcccgtgtccagcccccttccccccgctagcttcggccttgtcatggatccttcaaaaaagctggctgcctccgttctcgatgcgctggacccacctggcccgacgctggaccctctcgatctcctcccatactctgagacaaggttggatgctttggactccttcggctcaacccgtggcagcttggacaaacctgatagctttatggaagaaactaattctcaggatcacagaccccccagtggggctcaaaaacccgcacccagcccagaaccttgtatgcctaataccgctctcctaataaagaacccactcgccgcgactcacgaattcaaacaggcctgccagctgtgttatccaaagacgggcccaagggctggggattacacttatcgggaagggttggaacataagtgtaaaagggacatcttactgggccgcctgcgctcctccgaggatcagacctggaaaaggatcagaccccggccgaccaaaacgagcttcgtgggcagctactatctttgtaaggacatgatcaataagcaggattgtaagtatggcgacaattgcacgtttgcttatcaccaagaggaaattgacgtctggaccgaggagcggaaagggaccctcaaccgcgacctcctgttcgatcccttgggtggggtcaagagaggaagcttgaccatagctaaactcctgaaagagcaccaagggatctttaccttcctgtgtgaaatttgcttcgactctaagccacgaatcatctctaagggaaccaaagattcgcccagcgtgtgtagtaatttggcagccaagcatagcttctataacaataagtgcctggtccacatcgtgaggtctaccagtcttaagtactcgaagatcagacaatttcaggagcattttcaattcgacgtgtgtcggcatgaagtcaggtacggttgcctgagagaagatagttgtcatttcgctcacagcttcattgagctgaaagtgtggctgttacagcagtactccggaatgacccacgaggacatagtgcaggaatccaagaagtactggcaacagatggaggcccacgctggcaaagcaagcagttcgatgggtgctccacggacgcatggaccatctacattcgatcttcagatgaagttcgtctgtgggcagtgctggcgtaacgggcaggttgtggagcctgataaggatttgaagtactgctccgccaaggctagacactgttggacaaaagaacggagggttctgctggttatgtccaaggcaaagagaaagtgggtatctgttagacctctcccatcgatccgtaacttccctcagcagtatgacctgtgtatccacgcccaaaatggtaggaaatgccagtatgtcggaaattgctccttcgctcactcaccggaggaacgagacatgtggacatttatgaaggaaaacaaaatcctggacatgcagcagacatacgatatgtggctgaaaaagcataatcctgggaaacccggagagggtacccccatctctagtcgggagggggaaaagcagattcagatgccaaccgactacgcagatattatgatggggtatcactgctggctgtgtggtaagaacagtaactctaagaagcagtggcagcaacacatccagtccgaaaaacataaagaaaaagtcttcaccagtgatagtgacgcatcgggatgggcgttcagatttcctatgggggaattcaggctttgcgaccgacttcagaaaggaaaagcctgccccgacggcgataaatgccgctgtgcacacggccaagaagagctgaacgagtggctggacaggcgggaggtgctgaagcaaaagctcgccaaagctcgaaaggatatgctgctgtgtccccgagacgacgattttggtaaatacaatttccttctgcaggaggatggtgacctggcgggtgccacccccgaagctcccgcggcggctgccaccgcaaccacgggcgagtag

SEQ ID NO: 193943 - DNA, 2934 bp, Artificial Sequence
  derived and/or modified sequence
atggagcggcagaagcggaaggccgacatcgagaagggcctgcagttcatccaatcaacgctacccctgaagcaggaagagtacgaggcattcttgctgaagctcgtccagaatctgttcgccgaaggcaacgatctgttcagagagaaggactataaacaagccttggtccaatacatggaggggctcaatgttgcagactacgctgcttcagatcaagttgcccttcctcgggagctcttgtgcaaattacacgtaaatagggctgcttgctacttcacaatggggctgtacgagaaggcactcgaggatagtgagaaagctctgggccttgacagcgaaagtattcgagctttatttcggaaggcacgggctctgaacgagctcgggcgccataaggaggcatacgagtgttccagtaggtgcagcctggctttaccacatgacgagtctgtcacgcagttgggccaggagctggcccagaagttagggcttcgcgtgcgtaaggcctacaaaaggccacaggagttagagacattctctctgctgtcgaacgggactgcagccggagtggctgatcaagggacatccaacgggctcggatccattgacgacattgaaaccgactgttacgtggacccaagaggaagccccgccctccttccctccacgcccacaatgcctctgttccctcacgtattagacctacttgctccccttgatagttcccgcactctgccctccaccgactccctcgacgatttcagcgatggggatgtctttggccctgaactggataccctgctcgacagcttgagcctggtacaggggggtctgagtgggagcggagtaccttctgagttgcctcagctgattccagtgttccccggcgggacccccctgttaccacctgtggtggggggaagcatacccgttagttctcctctgccgccggccagttttggccttgttatggacccaagcaagaaactggccgccagcgtgttagacgctctggatccccccggacccaccctcgaccctctggatttgttgccctattctgaaacccgccttgacgcgctggattcgtttgggtcaacgcgagggagtttagataaacctgacagcttcatggaagagacgaacagtcaggatcatcgccctccctcaggagcacaaaagccagccccatctccagaaccttgtatgcccaataccgctctcctgattaaaaaccccctcgccgctacacatgagtttaagcaggcctgtcaactgtgctaccccaaaacagggcccagggccggagactatacgtatagagaaggcctggaacacaagtgcaagagggatatcctcctgggacggctccgttcctcggaagatcagacatggaaacggattaggccccgaccaacgaagacttcatttgttggatcttactacctctgtaaagatatgatcaataaacaggactgtaaatatggagacaattgtactttcgcataccaccaggaagaaattgatgtgtggaccgaagagagaaagggaacgctgaatcgcgacctgttatttgatcctctcgggggagtgaaacgtggatcactgacaattgcaaagctgttgaaagagcaccagggaatattcacatttttgtgtgagatctgctttgacagcaaacctcgcataatttctaagggaacaaaagactctccctccgtttgctccaacctggccgccaagcactctttctataataacaaatgtttggttcacatcgtccgatccacttcattgaaatactccaagatcaggcagttccaggagcatttccagtttgatgtgtgccgtcacgaggtgcggtacgggtgcctcagagaggactcttgccactttgcccactccttcatcgaattgaaagtttggttactgcagcagtactccggcatgacacacgaggatatcgtgcaggagtctaaaaagtactggcagcagatggaagcgcacgctggcaaggcttctagcagtatgggcgctcccagaacacatggtccctctacctttgatctgcagatgaagttcgtctgcggtcaatgctggaggaatggacaggtggttgagcctgataaagatcttaagtactgcagcgcgaaagcccggcactgttggaccaaagagcgtagagtgctgctcgtcatgtctaaggctaagcgcaaatgggtgtctgttcgcccattgccaagcattaggaatttcccgcagcagtatgacctgtgcatccatgcgcagaatggccgcaaatgtcagtacgttggcaactgcagcttcgcccattcacccgaggagagggacatgtggacattcatgaaggagaataaaatcctagacatgcaacagacgtatgatatgtggctgaagaagcataatccaggaaagccaggcgagggaacgcctatctctagccgggagggagagaaacagattcagatgcctacggactatgccgacatcatgatgggataccactgctggctgtgtgggaaaaacagcaacagcaagaagcagtggcagcagcacatccagagcgagaagcacaaagaaaaagtttttaccagcgactcagacgcatctgggtgggcctttagatttcccatgggtgagtttaggctctgcgatcgcttacagaaaggaaaagcgtgtcccgacggagacaagtgtcgttgcgctcatggacaagaagagctgaacgaatggcttgaccgaagagaagtccttaagcaaaagcttgccaaggcaaggaaagatatgctgttatgcccgcgggatgatgatttcggcaagtacaatttcctactgcaggaggatggtgacctagcaggcgctacccccgaggcccccgcggcggcagctaccgcaactactggcgagtag

SEQ ID NO: 193944 - DNA, 2934 bp, Artificial Sequence
  derived and/or modified sequence
atggaaaggcaaaagcgcaaagccgatatcgaaaagggactgcagttcatccaatctaccttaccactgaaacaggaagaatatgaagcctttctactgaaactggtccagaacttattcgcggaaggcaacgacctttttcgcgagaaggactataagcaggccctggtgcagtacatggaggggctcaacgtggccgactacgctgcctccgaccaggtggctttgcctcgggaattactatgtaagctccatgtgaatcgcgcagcatgctatttcactatgggtttatacgaaaaggcccttgaggacagtgaaaaagccctgggacttgattctgagtccatcagggcattatttcgcaaagctagagccttgaatgagctagggaggcacaaggaggcttacgaatgcagctcacgctgctcgctggctctgccacacgatgaaagcgtgacccagctgggccaagagctcgcacagaagctcggtctccgcgttcgcaaggcatacaagcggccacaggagctggaaacgttcagcctgctttccaatggaaccgccgcaggggtcgccgaccaggggacctccaatggactggggagcatcgacgatatagagaccgactgttatgtggaccccaggggaagccccgctctcctgccaagcactcccaccatgcccttattcccacacgtattggaccttctggccccactcgactccagcagaacacttcccagcacagatagtctcgatgatttctccgatggggatgttttcgggcctgagcttgacactctactggactcgctgtccctggttcagggtggtctctccgggtctggtgtccccagcgaactcccccagttgatccctgtgttcccaggcggaaccccactgttgccccctgtcgtagggggatccatccccgtctccagtccactgccacctgcgtccttcggactcgtgatggatccttcaaagaagctagcagcatccgtgctcgacgcccttgacccacctgggcctacgctggacccgctggacctccttccatacagtgaaacacgcctggatgccctggactccttcgggagcactcgcggatccttagataagcccgattctttcatggaagagaccaactcccaagatcataggcccccaagcggcgcacagaagcccgcaccatcaccagagccgtgtatgcctaataccgccctcctcatcaagaaccccctcgcggcaacccatgagttcaagcaggcttgccagttgtgctaccctaaaacggggccacgggcaggggactatacgtatagggaaggcttggagcataaatgtaagcgcgacattctactcggtaggttgcgcagttcggaggatcaaacctggaaaagaatccgaccccgaccaacgaaaacctccttcgtaggttcgtattatctttgtaaggatatgattaataaacaagattgtaaatacggcgataattgtacctttgcgtaccaccaggaagagatcgacgtgtggacagaggaaaggaaaggaactctgaatagggatctgcttttcgatcccctcgggggagtcaaaaggggttccctcacgattgcaaagttactcaaagagcaccaaggtatctttacctttttatgcgaaatctgctttgatagtaaacctcgaatcatttcaaaaggaacaaaggattctcccagtgtgtgctcaaacctggctgccaagcattccttctacaataataagtgtttggtgcatatcgtgcgctctacaagtctcaaatactctaaaatcaggcagtttcaggagcacttccagtttgacgtgtgtaggcatgaggtgagatatggttgtttacgagaagattcctgtcacttcgcgcattccttcatcgagctgaaggtgtggctcctgcagcagtactccgggatgacccatgaagatatagtccaggagagcaagaaatactggcaacagatggaagcccatgctggaaaggcaagttccagtatgggggctccgcgaacccatggcccttctacatttgacctacaaatgaagtttgtgtgcggccaatgctggcgaaatgggcaagtggtcgaacccgacaaagatctgaaatactgtagcgccaaagcacgccattgttggacaaaggagcgcagggttttgctggtcatgtctaaagctaagaggaaatgggtctccgttcgccctctgccgagtattagaaattttccacagcaatacgacctctgtatccatgcccagaatggccgtaaatgccagtacgtagggaactgctctttcgcccactccccagaggagcgtgacatgtggacatttatgaaagagaacaaaatactcgatatgcagcagacatacgatatgtggttgaaaaagcataacccgggaaagccaggagagggtacccccatcagtagcagagaaggagagaagcagatacagatgccaacagattatgcagatatcatgatggggtaccactgctggctttgtggaaagaatagcaactctaaaaagcagtggcaacagcatatacagtcggagaaacataaggagaaagtctttacatcagacagcgacgcttccggatgggctttcagattccctatgggggagttccgtctgtgcgatagacttcagaaaggaaaagcatgccctgacggcgacaagtgccgttgtgcacacggccaggaggagttgaatgagtggctggacaggagggaggtccttaagcagaaactggccaaggctcgaaaagacatgctgctctgtccacgagatgatgacttcgggaagtacaacttcctgctccaggaggatggagacctcgccggtgcgacacctgaggcgcctgccgcagctgctaccgcaactacaggggaatag

SEQ ID NO: 193945 - DNA, 2934 bp, Artificial Sequence
  derived and/or modified sequence
atggagcgccagaaaagaaaagccgatatcgagaaaggtctgcagttcatccaatccactcttcccctgaaacaagaggagtatgaggcttttttgttgaaactcgtacagaacctctttgccgagggcaatgatctcttccgcgaaaaggattacaagcaagccctcgtccagtacatggaaggattgaacgtcgctgattatgcggcaagcgaccaggttgcgctaccgcgagaattattatgcaaactgcacgtgaatcgcgctgcctgctacttcactatggggttgtacgagaaggcgttggaggattcagagaaggcattggggctagatagcgaatctatccgggcactttttcgcaaagcccgagcactgaacgagctgggtcgccataaggaggcatatgagtgtagtagcagatgttccttggccctccctcacgacgagagtgtcacacagctggggcaggagctcgcacagaaattagggctccgagtcaggaaagcttacaagcgccctcaggaacttgagacattttcactgctctccaatggtactgcagcgggagttgccgatcaaggcactagtaatgggctgggaagcatcgatgatatcgaaacagactgctatgtagatcccaggggttctcccgctctgctgccctctacaccaaccatgcccctttttccacatgttctggatctcctcgccccactcgattcatcgagaacactcccatcaaccgactcattggatgatttttcggacggcgacgtcttcggcccagaactggatacccttcttgactccctgagccttgtgcagggcggactgagcggaagcggagtgcccagcgagcttccgcaactgataccagttttccctgggggtaccccactgcttccacctgttgttggtggtagtatccccgttagtagccccctgccacccgcatccttcggccttgtgatggacccgagcaagaagcttgctgctagtgtgcttgatgccctagatcctcccggacctaccctggatcccctcgatctgctcccttattctgagacaaggctggacgccctggacagctttggcagtaccagggggtccctggataaaccggattctttcatggaggagacaaattctcaagaccatcgcccaccatcaggtgcccagaagcccgcaccttcccccgagccttgcatgccaaataccgctttgctcattaaaaaccctctcgctgcaactcatgagtttaaacaggcatgccagctttgctaccctaagacgggaccgcgagccggagattacacctatagggaaggtctcgaacacaagtgtaaaagggacatcctattgggaaggctgagatcttcagaagatcagacctggaagaggattaggccacgaccaaccaagacatcttttgtcggttcttactacctttgtaaagacatgatcaataaacaggactgtaagtacggggataattgcacttttgcgtaccaccaggaggagatcgacgtctggaccgaagaacggaaaggcacgctcaacagagatctgctgttcgaccccttgggtggtgtgaaacgcggaagcctgaccatcgccaagcttctgaaggaacaccaaggcatttttacttttctctgcgagatatgttttgacagcaagcccaggatcatctctaaagggactaaggactccccatctgtttgttctaatctggccgcaaagcacagtttttacaataacaagtgtttagttcatatagttaggtctacatccctgaaatattcaaagataagacagttccaggagcacttccagttcgatgtctgccggcacgaggtgcgctatggctgtctgcgagaagattcctgccacttcgcccattccttcatcgaactgaaggtttggctgctccagcagtactctggaatgacccacgaagacatcgtccaggagtctaagaaatactggcagcagatggaggcacacgccggtaaagcatcatcaagtatgggtgcacctcggacgcacggtccctccacttttgacttgcagatgaagttcgtgtgtggtcagtgctggcgaaacgggcaagtggtagagcctgacaaagacctgaagtactgttctgcaaaggcaagacattgttggaccaaggagaggcgggttctcctcgtgatgagtaaggccaaacggaagtgggtgagcgtccggccactgccctctattcgcaactttccacagcaatatgatctgtgcatacacgctcagaatggcaggaagtgccagtacgtgggcaattgctccttcgcccactctccggaggagagagacatgtggacctttatgaaggaaaataagattctcgatatgcaacaaacctatgacatgtggctgaagaagcacaatcctggcaaacctggagaggggaccccaatctctagccgggagggagaaaagcagatacagatgccgacggattatgctgatattatgatggggtatcactgctggctctgtggaaaaaattctaattccaagaagcagtggcagcagcacattcaatccgagaaacataaggaaaaagtcttcacgagcgatagcgatgcctctggctgggccttccgatttccaatgggagagtttcgcttatgcgaccgcttgcaaaagggtaaagcttgccctgacggagataagtgccgctgcgcccacgggcaagaagaactcaatgagtggctagaccgaagagaggttctgaaacagaaacttgctaaagcgcgaaaggatatgctgctctgtcccagagatgacgacttcggaaaatataatttcctgctccaggaggatggcgacctcgccggagcaactcccgaggccccagccgctgccgcaacagctactaccggagagtag

SEQ ID NO: 193946 - DNA, 5608 bp, Artificial Sequence
  derived and/or modified sequence
atggagaggcagaaacggaaggcggacatcgagaaagggctgcagttcattcagtcgacactacccctaaagcaagaagaatatgaggcctttctgctcaagctggtgcagaatctgtttgctgagggcaatgatctgttccgggagaaggactataagcaggctctggtgcagtacatggaagggctgaacgtggccgactacgctgcctctgaccaggtggccctgccccgggagctgctgtgcaagctgcatgtcaatagggccgcctgctacttcaccatgggcctgtatgagaaggcgctggaggacagcgagaaggcgctgggcctggacagtgagagtatccgggcgttgttccgcaaggcacgcgctctcaatgaactgggacgccacaaggaggcctacgagtgcagcagccggtgttccctcgccctgccccacgatgaaagcgtgactcagcttggtcaggagctggcccagaaactggggctgcgagttcgcaaggcgtataagaggccccaggaattggaaaccttttctctgctcagtaacggcactgcggctggcgtggcagatcagggaacttctaatggattggggtccatagatgacatcgaaacagactgctacgtggaccctcgaggctccccagcccttctcccctccacgcccacgatgcccctgttccctcacgttctggacctgctggcccccctggacagcagcaggaccctccccagcaccgacagcctggatgacttctcagacggggatgtctttggcccagagctggacaccctcctggactcgctgtctctggtccagggtggcctgtctggcagcggcgtgcctagtgagttgccccagctgatacccgtgttccccggcgggaccccactgctaccacctgtggtgggtggctccatccctgtctccagcccactgccccccgcctccttcggcttggtcatggacccctccaagaagctggccgcctctgtgctggatgccctcgatcccccgggccccacgctggaccccctggacctgctgccgtactcggagacccggctggatgcactcgacagctttgggtcgacacgaggctccctggacaaacctgactccttcatggaggagaccaactcacaggaccaccgtccccctagcggtgctcagaaaccagccccctcgccagagccctgcatgcccaacactgccttgctcatcaagaaccccttggctgccacccacgagttcaagcaggcctgccagctctgctaccccaagacaggcccccgggctggcgactacacctaccgtgagggccttgagcacaagtgcaagcgggacatcctgctcggccggctccggagctcggaggaccagacctggaagcggatccggccccggcccactaagaccagcttcgtgggctcctactacctgtgcaaagacatgattaacaagcaggactgtaagtacggggataactgcaccttcgcctaccatcaggaggagatcgacgtgtggaccgaggagcggaagggcaccctcaaccgcgacctgctcttcgacccgctggggggtgttaagcgcggcagcctcaccatcgccaagctcctgaaggagcaccagggcatcttcaccttcctctgcgagatctgctttgacagtaaaccccggatcatcagcaaaggcaccaaggactctccgtctgtctgctccaacctggctgccaagcacagcttctacaacaacaagtgcctggtgcacatcgtccgctccacctccctcaagtactccaagatccgccagttccaggagcacttccagttcgacgtgtgccgccatgaggtgcgctacggctgcctgcgggaggacagctgccacttcgcccacagcttcatcgagctcaaggtctggctgctgcagcagtactcaggcatgacccacgaagacatcgttcaggagtctaagaagtactggcagcagatggaggcgcatgcggggaaggccagcagcagcatgggtgctccgaggacacatgggcccagcacctttgacctgcagatgaagtttgtatgtggccagtgctggagaaacgggcaggtggtggagcctgacaaggacctcaagtactgtagtgccaaggcccggcactgctggaccaaggagcggcgggtccttctggtgatgtccaaggccaagaggaaatgggtgtcagtgaggccactgccatccattcgtaacttcccacagcaatacgatctctgcatccatgcacagaacggccgcaagtgccaatatgtggggaactgctccttcgcacacagcccggaggagagggacatgtggaccttcatgaaggagaacaagatcctggacatgcagcagacctatgacatgtggctgaaaaaacacaacccaggaaagcctggagaagggacccccatcagttctcgggaaggggagaagcagatccagatgcccacggactacgcggacatcatgatgggctaccactgctggctctgcggcaagaacagcaacagcaagaagcagtggcagcagcacatccagtccgagaagcacaaggagaaggtcttcacgtccgacagtgacgccagcggctgggccttccgcttccccatgggcgagttccggctctgcgacaggctccagaagggcaaagcctgcccagatggggacaagtgccgctgcgcccatggacaggaggagctcaacgagtggctggaccggcgcgaggtgctgaagcagaagttggccaaggctcgcaaggacatgctgctgtgcccacgggacgacgactttggcaaatacaacttcctgctgcaagaggacggggaccttgccggtgccaccccagaagcccctgctgctgctgccaccgccaccactggggagtagggccaggtgttggccgtgggtgaagtcctggggtcagggggtggggtggggccagaaggcctgatagaagggtcagggcaggccaggggggtggggggccgccctcatcaggcagcccccagccccctgaggccctgtccatcttctccccaccaccgccccggtgtgcgtacccaggcgcacgtgctgcagcccccggaggccccgctgaaacctgggctgcccttcccccacccccacggctctcctggttgaggagggaggggcctggctgacccctccagcttcagcctccagctttaacttctgtctgctcctaatgggggcccaaagctcagggctggggagcctggggtccccacttgaatctccagcaggagggtccttctctccctggcccgtcctcctcccaccccctccccctgggggcaaatcaggacacaacagagggcagaggccccattagctttaaaatgtagccccaggttggagctgggaacactgtactggccacttaccctctggggcctcagctttccctccggaaggctgggaggaggtgggctagatgatctttggagcttaaggagtcccagccctttctctgatgccaccacctgaaccctgctccctcgtgggccagtgaaaatagactgtaggtcctcagagccttcagagatgatccagcccaaaccccattttgcagagaggaaaactgaggcctagaagggaggagtggtccacccacggtcccagcacaaggcagagctgggatgaaaacagggctgaaaagactcagggccaattattggctgagcccacggtcccctcagcagggatgcgatggtctctgaatcagtgtgcagctggggtcccaggcagcgctgcctgggggctggggaggggaggcccagaggagggctggccatgtgagcaccccatgaagggaccgccccctcccaaggatggtccctttgggtgcagcagcagaggtcacctcctgacatgcgctctgggaaaggtggcagagggcaggacaccatgagctcaggatctgtgtgaggtgtgggaggtgggaagggtgagggtctgggggaatgcggagaaaagggaggcttgaccccgggcaccatgggccactccaggatgggacacggcccctctttcttggggacccagtatgtcctctcctctagacccagacatacagttataaccgtctgtcctagcccctccctaatccctggccctcccagctgtctgggacttcagtggacccccagcccctgcccccactcaccaaggcctcgctcgtccctctcgtctgacatgtctgtgtgcacccccctcctctccaccctaccttccatcaaccagggcagatccaccgtgccctggttccccagacattccagaatgccccacatcattggcacaggagtggggcagccccggaaggaaccagggattaggctgtaggggggtgagaaggagagaagggaccaccccattcttctcaagcaaggattgccagcgcgcgctgacacagtgatgggctgcccagggctggaggggacgctgttcctcccgccgccactgcccaacctttcctgataatcgtggcatgcgccctttcctcttccctgccccaccccctggccgcagcaggccagcactgcagagtttgggtgctggtggtgtggctgtaggggaggggagaccacacccaaggtgggggctgtggccatgtgtggccgtgatgtcgatgatactcgttttccctgatccgtggtgttgcagtccgttgtcaccagccttgtttctagtgtgtatatatgtcgcccccgtgatgcatatatacacaggtattaaatatatcgctctatataatattatatatgtgtgtggtatccaaggaatcacttttatgagggctaaagataaagaatttggccagaaaatgcagccatccttgtgtgattaggagggtttcaggggccactggactatttgcaaggtgacagggactggagccatggctcagaggtgattcgggcagccagggacaggagccaccctccccaggcccaactctgctagcttcccagaccacccccatcgagtgcggagagagtgggagtgctcagggaaagaaggtgatttgtatttgtctccccgctgaaaagaacaggattcaagtccagagttttcatcttcagcctgtgatctgtccagggacccttgggatctggggcttcctggcctggccagagctggagcccccacagggtaaggaagagagagtgggaggcagagtgtgatggggaggagggacaggaagacccttttaatgatgagggtaactatttcagttgtgagccttctagggccccaggctgggaggctcagaggactgaatctgggacctgtgttccccccggcaggcagggacaagatggcatggcaagcatgggggcggggtgggtggggagggatgctgcatttctcagctgggcagtaatcaatttaatggtcctttaaaatgtctgtgtattaaaaatttaagaataccacactttaatattaaatattcataaggtctagtatcttgataataatgtagatgttttaataacaatttttgtccttcttaaaataaaatgaaagaaacttg

SEQ ID NO: 193947 - DNA, 5909 bp, Artificial Sequence
  derived and/or modified sequence
agggagacagtgcctccagcgggtgctgccgcgagcggccagccgaggggctggaaatgaaagtaaagcgctccagagccacatggacggagctgccggggcggcggcgccgggagcaggatgcggccgcccgtaattaaatagcatttactcttattattactaataataataacgtaatcatacctctagtcatagcataccatttatcgggctcggcgcaggcccgcggggagcgcagcccggcggagagactgatggagaggcagaaacggaaggcggacatcgagaaagggctgcagttcattcagtcgacactacccctaaagcaagaagaatatgaggcctttctgctcaagctggtgcagaatctgtttgctgagggcaatgatctgttccgggagaaggactataagcaggctctggtgcagtacatggaagggctgaacgtggccgactacgctgcctctgaccaggtggccctgccccgggagctgctgtgcaagctgcatgtcaatagggccgcctgctacttcaccatgggcctgtatgagaaggcgctggaggacagcgagaaggcgctgggcctggacagtgagagtatccgggcgttgttccgcaaggcacgcgctctcaatgaactgggacgccacaaggaggcctacgagtgcagcagccggtgttccctcgccctgccccacgatgaaagcgtgactcagcttggtcaggagctggcccagaaactggggctgcgagttcgcaaggcgtataagaggccccaggaattggaaaccttttctctgctcagtaacggcactgcggctggcgtggcagatcagggaacttctaatggattggggtccatagatgacatcgaaacagactgctacgtggaccctcgaggctccccagcccttctcccctccacgcccacgatgcccctgttccctcacgttctggacctgctggcccccctggacagcagcaggaccctccccagcaccgacagcctggatgacttctcagacggggatgtctttggcccagagctggacaccctcctggactcgctgtctctggtccagggtggcctgtctggcagcggcgtgcctagtgagttgccccagctgatacccgtgttccccggcgggaccccactgctaccacctgtggtgggtggctccatccctgtctccagcccactgccccccgcctccttcggcttggtcatggacccctccaagaagctggccgcctctgtgctggatgccctcgatcccccgggccccacgctggaccccctggacctgctgccgtactcggagacccggctggatgcactcgacagctttgggtcgacacgaggctccctggacaaacctgactccttcatggaggagaccaactcacaggaccaccgtccccctagcggtgctcagaaaccagccccctcgccagagccctgcatgcccaacactgccttgctcatcaagaaccccttggctgccacccacgagttcaagcaggcctgccagctctgctaccccaagacaggcccccgggctggcgactacacctaccgtgagggccttgagcacaagtgcaagcgggacatcctgctcggccggctccggagctcggaggaccagacctggaagcggatccggccccggcccactaagaccagcttcgtgggctcctactacctgtgcaaagacatgattaacaagcaggactgtaagtacggggataactgcaccttcgcctaccatcaggaggagatcgacgtgtggaccgaggagcggaagggcaccctcaaccgcgacctgctcttcgacccgctggggggtgttaagcgcggcagcctcaccatcgccaagctcctgaaggagcaccagggcatcttcaccttcctctgcgagatctgctttgacagtaaaccccggatcatcagcaaaggcaccaaggactctccgtctgtctgctccaacctggctgccaagcacagcttctacaacaacaagtgcctggtgcacatcgtccgctccacctccctcaagtactccaagatccgccagttccaggagcacttccagttcgacgtgtgccgccatgaggtgcgctacggctgcctgcgggaggacagctgccacttcgcccacagcttcatcgagctcaaggtctggctgctgcagcagtactcaggcatgacccacgaagacatcgttcaggagtctaagaagtactggcagcagatggaggcgcatgcggggaaggccagcagcagcatgggtgctccgaggacacatgggcccagcacctttgacctgcagatgaagtttgtatgtggccagtgctggagaaacgggcaggtggtggagcctgacaaggacctcaagtactgtagtgccaaggcccggcactgctggaccaaggagcggcgggtccttctggtgatgtccaaggccaagaggaaatgggtgtcagtgaggccactgccatccattcgtaacttcccacagcaatacgatctctgcatccatgcacagaacggccgcaagtgccaatatgtggggaactgctccttcgcacacagcccggaggagagggacatgtggaccttcatgaaggagaacaagatcctggacatgcagcagacctatgacatgtggctgaaaaaacacaacccaggaaagcctggagaagggacccccatcagttctcgggaaggggagaagcagatccagatgcccacggactacgcggacatcatgatgggctaccactgctggctctgcggcaagaacagcaacagcaagaagcagtggcagcagcacatccagtccgagaagcacaaggagaaggtcttcacgtccgacagtgacgccagcggctgggccttccgcttccccatgggcgagttccggctctgcgacaggctccagaagggcaaagcctgcccagatggggacaagtgccgctgcgcccatggacaggaggagctcaacgagtggctggaccggcgcgaggtgctgaagcagaagttggccaaggctcgcaaggacatgctgctgtgcccacgggacgacgactttggcaaatacaacttcctgctgcaagaggacggggaccttgccggtgccaccccagaagcccctgctgctgctgccaccgccaccactggggagtagggccaggtgttggccgtgggtgaagtcctggggtcagggggtggggtggggccagaaggcctgatagaagggtcagggcaggccaggggggtggggggccgccctcatcaggcagcccccagccccctgaggccctgtccatcttctccccaccaccgccccggtgtgcgtacccaggcgcacgtgctgcagcccccggaggccccgctgaaacctgggctgcccttcccccacccccacggctctcctggttgaggagggaggggcctggctgacccctccagcttcagcctccagctttaacttctgtctgctcctaatgggggcccaaagctcagggctggggagcctggggtccccacttgaatctccagcaggagggtccttctctccctggcccgtcctcctcccaccccctccccctgggggcaaatcaggacacaacagagggcagaggccccattagctttaaaatgtagccccaggttggagctgggaacactgtactggccacttaccctctggggcctcagctttccctccggaaggctgggaggaggtgggctagatgatctttggagcttaaggagtcccagccctttctctgatgccaccacctgaaccctgctccctcgtgggccagtgaaaatagactgtaggtcctcagagccttcagagatgatccagcccaaaccccattttgcagagaggaaaactgaggcctagaagggaggagtggtccacccacggtcccagcacaaggcagagctgggatgaaaacagggctgaaaagactcagggccaattattggctgagcccacggtcccctcagcagggatgcgatggtctctgaatcagtgtgcagctggggtcccaggcagcgctgcctgggggctggggaggggaggcccagaggagggctggccatgtgagcaccccatgaagggaccgccccctcccaaggatggtccctttgggtgcagcagcagaggtcacctcctgacatgcgctctgggaaaggtggcagagggcaggacaccatgagctcaggatctgtgtgaggtgtgggaggtgggaagggtgagggtctgggggaatgcggagaaaagggaggcttgaccccgggcaccatgggccactccaggatgggacacggcccctctttcttggggacccagtatgtcctctcctctagacccagacatacagttataaccgtctgtcctagcccctccctaatccctggccctcccagctgtctgggacttcagtggacccccagcccctgcccccactcaccaaggcctcgctcgtccctctcgtctgacatgtctgtgtgcacccccctcctctccaccctaccttccatcaaccagggcagatccaccgtgccctggttccccagacattccagaatgccccacatcattggcacaggagtggggcagccccggaaggaaccagggattaggctgtaggggggtgagaaggagagaagggaccaccccattcttctcaagcaaggattgccagcgcgcgctgacacagtgatgggctgcccagggctggaggggacgctgttcctcccgccgccactgcccaacctttcctgataatcgtggcatgcgccctttcctcttccctgccccaccccctggccgcagcaggccagcactgcagagtttgggtgctggtggtgtggctgtaggggaggggagaccacacccaaggtgggggctgtggccatgtgtggccgtgatgtcgatgatactcgttttccctgatccgtggtgttgcagtccgttgtcaccagccttgtttctagtgtgtatatatgtcgcccccgtgatgcatatatacacaggtattaaatatatcgctctatataatattatatatgtgtgtggtatccaaggaatcacttttatgagggctaaagataaagaatttggccagaaaatgcagccatccttgtgtgattaggagggtttcaggggccactggactatttgcaaggtgacagggactggagccatggctcagaggtgattcgggcagccagggacaggagccaccctccccaggcccaactctgctagcttcccagaccacccccatcgagtgcggagagagtgggagtgctcagggaaagaaggtgatttgtatttgtctccccgctgaaaagaacaggattcaagtccagagttttcatcttcagcctgtgatctgtccagggacccttgggatctggggcttcctggcctggccagagctggagcccccacagggtaaggaagagagagtgggaggcagagtgtgatggggaggagggacaggaagacccttttaatgatgagggtaactatttcagttgtgagccttctagggccccaggctgggaggctcagaggactgaatctgggacctgtgttccccccggcaggcagggacaagatggcatggcaagcatgggggcggggtgggtggggagggatgctgcatttctcagctgggcagtaatcaatttaatggtcctttaaaatgtctgtgtattaaaaatttaagaataccacactttaatattaaatattcataaggtctagtatcttgataataatgtagatgttttaataacaatttttgtccttcttaaaataaaatgaaagaaacttgcttcccttagcctttgttctagaaaataaacttgtgcactttga

SEQ ID NO: 193948 - protein, 221 aa, Artificial Sequence
  derived and/or modified sequence
MLKSNGERRSRNALPAVYARKMAASQQQASAASSAAGVSGPSSAGGPGPQQQPQPPAQLVGPAQSGLLQQQQQDFDPVQRYKMLIPQLKESLQTLMKVAAQNLIQNTNIDNGQKSSDGPIQRFDKCLEEFYALCDQLELCLRLAHECLSQSCDSAKHSPTLVPTATKPDAVQPDSLPYPQYLAVIKAQISCAKDIHTALLDCANKVTGKTPAPPAGPGGTL

SEQ ID NO: 193949 - protein, 139 aa, Artificial Sequence
  derived and/or modified sequence
MLIPQLKESLQTLMKVAAQNLIQNTNIDNGQKSSDGPIQRFDKCLEEFYALCDQLELCLRLAHECLSQSCDSAKHSPTLVPTATKPDAVQPDSLPYPQYLAVIKAQISCAKDIHTALLDCANKVTGKTPAPPAGPGGTL

SEQ ID NO: 193950 - DNA, 666 bp, Artificial Sequence
  derived and/or modified sequence
atgctcaagtctaatggcgaaaggcggtcgaggaacgctctccctgctgtgtacgcaagaaaaatggctgcctcccagcagcaggccagcgcggcctctagtgccgcaggcgtttccggcccgtcatctgccggcggacccgggcctcaacagcagccccaaccacccgcacaactcgttggcccagctcagtccggcctactccaacagcagcagcaggatttcgatcccgtccaacgttacaagatgctcattccacagttaaaagaatctctgcagaccttgatgaaggttgcggcccagaatctcattcagaacaccaatatagacaacgggcagaagagttccgatggacccattcagcgcttcgacaaatgcctcgaagagttctacgccctatgtgaccagcttgagctttgccttcggctggcgcacgagtgcctttcgcagagctgtgattctgcaaagcacagtcctactctggtcccaacagcaaccaagcccgacgctgtgcagccagacagtttaccatacccccaatacttagctgtaattaaggcccagattagctgtgcaaaggacatacacactgcgcttctggattgtgctaacaaggtgactggaaagacccctgctccgcccgctgggcccgggggtaccctctag

SEQ ID NO: 193951 - DNA, 420 bp, Artificial Sequence
  derived and/or modified sequence
atgctgatccctcaacttaaggaaagtcttcagaccctcatgaaggttgccgcgcaaaatctgatccagaatactaacatcgataacggacagaaatcttctgacgggcctattcaacgcttcgacaaatgtctggaggaattttatgccctttgtgatcagttagaactctgtctgcggttggcgcatgaatgtctctcccagagttgcgacagcgctaaacactctcccaccctggtcccaaccgccacgaagcctgacgcagtccagcccgactcattaccctacccacaatacctggccgtgatcaaggcgcagatttcctgcgcgaaagatatccatactgcccttctggactgtgctaacaaagtgaccgggaaaacgccagctcctcctgctggccccgggggaaccctgtag

SEQ ID NO: 193952 - DNA, 666 bp, Artificial Sequence
  derived and/or modified sequence
atgctgaagagcaatggagagcggcgcagcagaaatgccctgcctgctgtgtatgccaggaagatggccgccagccagcagcaggccagcgctgccagcagcgctgctggggtgtctggccccagcagcgctgggggccctggcccccagcagcagccccagcccccagcccagctggtgggccctgcccagagcggcctgctgcagcagcagcagcaggactttgatcctgtgcagcgctacaagatgctgatcccccagctgaaggagagcctgcagaccctgatgaaggtggccgcccagaacctgatccagaacaccaacatcgacaatggccagaagagcagtgatggccccatccagagatttgacaagtgcctggaggagttctacgccctgtgtgaccagctggagctgtgcctgcggctggcccacgagtgcctgagccagagctgtgacagcgccaagcacagccccaccctggtgcccacagccaccaagccagatgctgtgcagcctgacagcctgccctacccccagtacctggccgtcatcaaggcccagatcagctgtgccaaggacatccacacagccctgctggactgtgccaacaaggtgacaggcaagaccccagcccctcctgctggccctgggggcaccctgtag

SEQ ID NO: 193953 - DNA, 420 bp, Artificial Sequence
  derived and/or modified sequence
atgctgatcccccagctgaaggagagcctgcagaccctgatgaaggtggccgcccagaacctgatccagaacaccaacatcgacaatggccagaagagcagtgatggccccatccagagatttgacaagtgcctggaggagttctacgccctgtgtgaccagctggagctgtgcctgcggctggcccacgagtgcctgagccagagctgtgacagcgccaagcacagccccaccctggtgcccacagccaccaagccagatgctgtgcagcctgacagcctgccctacccccagtacctggccgtcatcaaggcccagatcagctgtgccaaggacatccacacagccctgctggactgtgccaacaaggtgacaggcaagaccccagcccctcctgctggccctgggggcaccctgtag

SEQ ID NO: 193954 - DNA, 3565 bp, Artificial Sequence
  derived and/or modified sequence
ggcgggactaactagcaaacggggactagaaatagggatgctgaaaagcaacggggagagacgcagtcgtaacgcacttccggcggtctacgcgaggaagatggctgcatcccagcagcaagcttcagcggcttcctcagctgctggtgtatcgggtcctagttcggctggcggcccgggtccccagcagcagccgcaaccgccagcacaactggtgggccctgcccagagcggcctcctgcagcaacagcaacaggacttcgatcctgtgcagcgttataagatgctcatcccgcagctgaaggagagtctacagaccttgatgaaggttgcggcccaaaacttgattcagaacactaacatcgacaatggacaaaagagcagtgatggacccatacagcgctttgacaagtgcctggaagagttctatgcactctgtgaccagctggagctgtgcctgcgcctggcgcatgagtgcctgtcacagagttgtgacagtgccaagcactctccaacgttggtgcccacagccaccaagcccgacgcagtgcagcctgacagcctcccctacccacagtacctggcggtcatcaaagcccagatttcctgtgccaaggacattcacaccgccctgctggactgtgccaacaaggtcacgggcaagacacccgcaccacctgctggccctgggggcactctgtgaagtgggggacagggagtggggcaggcagtggttggtgggtggtgtgcaaagggaatgaagagcgtcctgggcctaaacacagcagcctcctctcttcctgcctgagcaccgcagcgggagccagcagggggcagcagaggccaacagggagctcgcaggccgggcccctgcgtccctgccccttcttcctgctccccctcctagcctagggtagactttgaactgtgtgtgttgatgacttctctgttccacaggccctcccccattcttgcctgggtgtggagccctggctgtcccctctccctcagtccttcctgactgtctccagctgggaggtggtctctgtgtgccactcctctgtgtctctattacagttgtgtctctctcatcctgtctctttttcccttgtttctctgttcctgttaatgtgtttctccccatggtcctatttctctcactctgacctctctctcttagtcccctttagctgtcttctatccccagctcctaactgggactctgtgtctatgcagggggccagcacccctgggttatctggggctaagggaagggacttcatttccaggggccacagccaagcccagagtcccccagcggctcgcatgtcagcccagaccccagggtccttggcctaggagaggagcagtggaggggcccaggctctgagctccacaggtctgagcagggagcaactcaggcccccacccaagcctgcgtcagcggaacttgagtgaggggcgttgtgcaatttgtggcaaggctggcccagctggatgcctgggtcccagtatttttagccccaaaggagaagtgaaaaggccccagccggggtgaatcatcagtcctggggaagaacccaggcgcctgagccccagctccgggaagcaggcactggggagggggcttcaaggagggagtgccccctcagactccctgcttccctggaagcttcaggaagctcagcctcagccttcaggcctgagcaagtgcagggcggagctaccagcccaggctcagatgttggggtgtgaaagcctcaagtgactcagcctggttggagaactgccccacccagtatcttctgtgccatggttcccacattcgcactccatggcctcctgtcctggaccccacgtctgcaaggaaaccctaggaccatggatacctctgtgattcacgctgagcccaagtccccacactggaaaactgggaaatggccagctgtgtgtcccaggaaattcctccccttattcttccttgaagtgcccgagcatgtagggcaagaaggaaggctgaagcgctgtccctaggaggaatttctccttcaggggagcctcagttttgcccatttatctaattgaatcagttttttacccaatcccccgattttgtaggataatctcccttatctaaagtcaactgattatggactttaatcacatctacaaaacacttccatggcgacagctagatgagtgtttgaataactgggactgtagcccgtccaagttgacacataaaactgaccatcgggccgggggcggtggctcacgcctgtaatcccaacactttgggagcccgaggcgggcggatcacaaggtcaggagttcgagaccagcctggccaacacggtgaaaccccgactctactaaaaatacaaaaaattagccgggtgtggtggcacacacctgtagtcccagctactcgggaggctgaggcaggagaatcgtttgaacctgggaggcagaggttgcagtgagccaagatcacactattgcactccagcctgggcgacagggcaagactctgtctcaaaaaaaataaaaaactgaccatctagtccttgtcatctgggcaccctcacacatctccttaaccacacttaatctccaaataagtacgataacatagtcatagtcccacccaacatgatgcagttatcttgcatacaactgaagacaactaaccctttccccaacagagcccaccagcagtggtggagatgtcggtccatgagcgcacacacaagactgagggactgtcggccctcccaggtggtgtcaacacaacatcacacacaggtgggggggcctgatagcccagcacccatgatacagggcctaccaatgcttaaaaccacacccagggagcccacagaggcactcagtgggtggtggggtgatggatacacatctatcaggcacagggcggaggtgggcaccactgagttgcactcagcaaacacattgggtatcttgtgcccaaggcctgtatttgtggagctgatgttctagtgagagacagtaaatgtgacaaaagtaaaatatatcagatggtgagaaaacagaaaaatgagatcagaagtggagatgttggggccaggcacagtggcccaggcctgtaatcccatcactttgggaggtgcaggcaggcagatggcttgagcccaggaattcaagaccagtccgagcaacatagcaaaagcccttatctgcaaaaaattcaaaaattagccaggtgtggtggtgcgtgcccaggttcccaggtactcggaggctgagaggtgggaggatgccttgagcttgagaggttgaagctgcagtgagctgtgatcgcaccactgcactccagcttggttcatggagaccctgtttttttaaaaaaagaagtggaggtgtttacaccagcaaaatactcattttttaagtgtaattaagttgaagatcaaaaaatggaaatgtataattaaatcatacttagcaaatctaacacatgaaatgtaacatctgcatatggagaatcgtgttactttattgaaaaacattaaaagtttgagaactt

SEQ ID NO: 193955 - DNA, 1482 bp, Artificial Sequence
  derived and/or modified sequence
ctacgcgaggaagatggctgcatcccagcagcaagcttcagcagccgcaaccgccagcacaactggtgggccctgcccagagcggcctcctgcagcaacagcaacaggacttcgatcctgtgcagcgttataagatgctcatcccgcagctgaaggagagtctacagaccttgatgaaggttgcggcccaaaacttgattcagaacactaacatcgacaatggacaaaagagcagtgatggacccatacagcgctttgacaagtgcctggaagagttctatgcactctgtgaccagctggagctgtgcctgcgcctggcgcatgagtgcctgtcacagagttgtgacagtgccaagcactctccaacgttggtgcccacagccaccaagcccgacgcagtgcagcctgacagcctcccctacccacagtacctggcggtcatcaaagcccagatttcctgtgccaaggacattcacaccgccctgctggactgtgccaacaaggtcacgggcaagacacccgcaccacctgctggccctgggggcactctgtgaagtgggggacagggagtggggcaggcagtggttggtgggtggtgtgcaaagggaatgaagagcgtcctgggcctaaacacagcagcctcctctcttcctgcctgagcaccgcagcgggagccagcagggggcagcagaggccaacagggagctcgcaggccgggcccctgcgtccctgccccttcttcctgctccccctcctagcctagggtagactttgaactgtgtgtgttgatgacttctctgttccacaggccctcccccattcttgcctgggtgtggagccctggctgtcccctctccctcagtccttcctgactgtctccagctgggaggtggtctctgtgtgccactcctctgtgtctctattacagttgtgtctctctcatcctgtctctttttcccttgtttctctgttcctgttaatgtgtttctccccatggtcctatttctctcactctgacctctctctcttagtcccctttagctgtcttctatccccagctcctaactgggactctgtgtctatgcagggggccagcacccctgggttatctggggctaagggaagggacttcatttccaggggccacagccaagcccagagtcccccagcggctcgcatgtcagcccagaccccagggtccttggcctaggagaggagcagtggaggggcccaggctctgagctccacaggtctgagcagggagcaactcaggcccccacccaagcctgcgtcagcggaacttgagtgaggggcgttgtgcaatttgtggcaaggctggcccagctggatgcctgggtcccagtatttttagccccaaaggagaagtgaaaaggccccagccggggtgaatcatcagtcctggggaagaacccaggcgcctgagccccagctccgggaagcaggcactggggagggggcttc

SEQ ID NO: 193956 - DNA, 666 bp, Artificial Sequence
  derived and/or modified sequence
atgctgaagagcaacggcgagcggcggagccggaacgccctgcccgcagtctatgcaagaaagatggccgcatcacagcaacaggcttcagcagcatccagcgccgctggagtttccggcccctcgtcagcaggcggccctgggcctcaacaacagcctcagcctccagcccagcttgtcgggcccgcacagagtggccttttgcaacagcagcagcaggacttcgaccctgtgcagcggtacaagatgctcatccctcaactgaaggagtctcttcagactcttatgaaggtagcagcccagaacttaattcagaacaccaatatagacaatggccagaaatcaagcgatggccccatccagagattcgacaagtgtttggaggaattctatgccctttgcgatcagctggaactttgcctccggttggcacacgagtgtctcagccagtcatgcgattctgctaagcacagtccaactttagtccctactgccactaaaccggacgccgttcagccggactcgctcccatatcctcagtatctcgccgtgattaaggcacaaataagctgtgcaaaagacattcacaccgctcttcttgactgcgccaataaggtgactggcaagacgcctgcaccacctgcaggacctggaggcacactgtag

SEQ ID NO: 193957 - DNA, 420 bp, Artificial Sequence
  derived and/or modified sequence
atgctgatcccccagctgaaggagagcctgcagaccctgatgaaggtcgccgcccagaaccttatccagaatacaaatatagacaacggacagaagagtagtgatggccctatccaacgattcgacaaatgcctggaggaattctacgccctgtgcgaccaactggagttgtgcctccgactggcccacgagtgtctcagccagtcttgtgattctgccaagcattccccgactctcgtgccaacagccactaaacctgatgctgtacagcctgatagcttgccatacccacaatacttagcagtgatcaaggcccagatttcttgcgcaaaagatatacataccgctcttctcgattgtgctaataaggtcacgggcaagacaccggcccccccggctggccctggaggtactttgtag

SEQ ID NO: 193958 - DNA, 666 bp, Artificial Sequence
  derived and/or modified sequence
atgcttaagtcaaatggcgagagacgcagccggaacgccctgcctgctgtttacgcaagaaagatggcagcctcccaacagcaagctagtgcggcatcgtccgctgccggtgtcagcggaccttcttccgccggaggcccagggcctcaacaacagccgcagccccctgcccagctggtggggcctgcccaaagcggcttgctccagcaacagcaacaggatttcgatccggtgcaacgttacaaaatgctcattcctcaactgaaagaatctttgcagactctgatgaaagtggctgcccaaaacctgatccaaaatacgaatatagacaatggccagaagtccagtgacgggcctattcaaaggtttgacaagtgcctggaagagttctatgccctctgcgatcagctggagctgtgcttacggttggcacatgaatgcctgtcccagtcttgtgatagcgctaaacatagtcccaccttggtacctacagctacgaagcccgatgcagtacagcccgatagtctgccatatccacagtatctcgcagtgatcaaggctcagatttcatgtgccaaggacattcacaccgctttgctcgactgcgctaataaggttaccggcaagacgcctgcccctcctgctgggccaggcggtactctgtag

SEQ ID NO: 193959 - DNA, 420 bp, Artificial Sequence
  derived and/or modified sequence
atgttaattccacaactgaaggaatctctgcagacgcttatgaaggttgcggcacagaacctgattcagaacacaaacatagataatgggcaaaaatcttccgacgggccaattcaacgattcgacaagtgccttgaagagttttatgccctgtgtgaccagttggagctttgtttgcgtctggcccatgagtgcttatcacagtcctgcgattccgctaagcactcacccaccctggtgcctactgcaactaagcccgacgccgtgcagcccgacagtctgccttaccctcagtatttggccgttatcaaggctcaaatcagctgtgcaaaggatatccacacagcgctcttggattgcgctaataaggtgaccggaaagacccctgcgcctcctgctggccctgggggtaccctttag

SEQ ID NO: 193960 - DNA, 666 bp, Artificial Sequence
  derived and/or modified sequence
atgctgaagagcaacggcgagagaagaagcagaaacgccctgcccgccgtgtacgccagaaagatggccgccagccagcagcaggccagcgccgccagcagcgccgccggcgtgagcggccccagcagcgccggcggccccggcccccagcagcagccccagccccccgcccagctggtgggccccgcccagagcggcctgctgcagcagcagcagcaggacttcgaccccgtgcagagatacaagatgctgatcccccagctgaaggagagcctgcagaccctgatgaaggtggccgcccagaacctgatccagaacaccaacatcgacaacggccagaagagcagcgacggccccatccagagattcgacaagtgcctggaggagttctacgccctgtgcgaccagctggagctgtgcctgagactggcccacgagtgcctgagccagagctgcgacagcgccaagcacagccccaccctggtgcccaccgccaccaagcccgacgccgtgcagcccgacagcctgccctacccccagtacctggccgtgatcaaggcccagatcagctgcgccaaggacatccacaccgccctgctggactgcgccaacaaggtgaccggcaagacccccgccccccccgccggccccggcggcaccctgtag

SEQ ID NO: 193961 - DNA, 420 bp, Artificial Sequence
  derived and/or modified sequence
atgctgatcccccagctgaaggagagcctgcagaccctgatgaaggtggccgcccagaacctgatccagaacaccaacatcgacaacggccagaagagcagcgacggccccatccagagattcgacaagtgcctggaggagttctacgccctgtgcgaccagctggagctgtgcctgagactggcccacgagtgcctgagccagagctgcgacagcgccaagcacagccccaccctggtgcccaccgccaccaagcccgacgccgtgcagcccgacagcctgccctacccccagtacctggccgtgatcaaggcccagatcagctgcgccaaggacatccacaccgccctgctggactgcgccaacaaggtgaccggcaagacccccgccccccccgccggccccggcggcaccctgtag

SEQ ID NO: 193962 - protein, 676 aa, Artificial Sequence
  derived and/or modified sequence
MKKFSRMPKSEGGSGGGAAGGGAGGAGAGAGCGSGGSSVGVRVFAVGRHQVTLEESLAEGGFSTVFLVRTHGGIRCALKRMYVNNMPDLNVCKREITIMKELSGHKNIVGYLDCAVNSISDNVWEVLILMEYCRAGQVVNQMNKKLQTGFTEPEVLQIFCDTCEAVARLHQCKTPIIHRDLKVENILLNDGGNYVLCDFGSATNKFLNPQKDGVNVVEEEIKKYTTLSYRAPEMINLYGGKPITTKADIWALGCLLYKLCFFTLPFGESQVAICDGNFTIPDNSRYSRNIHCLIRFMLEPDPEHRPDIFQVSYFAFKFAKKDCPVSNINKCCKQLLRHGALLTEILLFLQLFLNMTASEAAARKSQIKARITDTIGPTETSIAPRQRPKANSATTATPSVLTIQSSATPVKVLAPGEFGNHRPKGALRPGNGPEILLGQGPPQQPPQQHRVLQQLQQGDWRLQQLHLQHRHPHQQQQQQQQQQQQQQQQQQQQQQQQQQQHHHHHHHHLLQDAYMQQYQHATQQQQMLQQQFLMHSVYQPQPSASQYPTMMPQYQQAFFQQQMLAQHQPSQQQASPEYLTSPQEFSPALVSYTSSLPAQVGTIMDSSYSANRSVADKEAIANFTNQKNISNPPDMSGWNPFGEDNFSKLTEEELLDREFDLLRSSKGHLKAYFASQ

SEQ ID NO: 193963 - protein, 662 aa, Artificial Sequence
  derived and/or modified sequence
MKKFSRMPKSEGGSGGGAAGGGAGGAGAGAGCGSGGSSVGVRVFAVGRHQVTLEESLAEGGFSTVFLVRTHGGIRCALKRMYVNNMPDLNVCKREITIMKELSGHKNIVGYLDCAVNSISDNVWEVLILMEYCRAGQVVNQMNKKLQTGFTEPEVLQIFCDTCEAVARLHQCKTPIIHRDLKVENILLNDGGNYVLCDFGSATNKFLNPQKDGVNVVEEEIKKYTTLSYRAPEMINLYGGKPITTKADIWALGCLLYKLCFFTLPFGESQVAICDGNFTIPDNSRYSRNIHCLIRFMLEPDPEHRPDIFQVSYFAFKFAKKDCPVSNINNSSIPSALPEPMTASEAAARKSQIKARITDTIGPTETSIAPRQRPKANSATTATPSVLTIQSSATPVKVLAPGEFGNHRPKGALRPGNGPEILLGQGPPQQPPQQHRVLQQLQQGDWRLQQLHLQHRHPHQQQQQQQQQQQQQQQQQQQQQQQQQQQHHHHHHHHLLQDAYMQQYQHATQQQQMLQQQFLMHSVYQPQPSASQYPTMMPQYQQAFFQQQMLAQHQPSQQQASPEYLTSPQEFSPALVSYTSSLPAQVGTIMDSSYSANRSVADKEAIANFTNQKNISNPPDMSGWNPFGEDNFSKLTEEELLDREFDLLRSSKGHLKAYFASQ

SEQ ID NO: 193964 - DNA, 2031 bp, Artificial Sequence
  derived and/or modified sequence
atgaagaaattctctaggatgcctaaatctgagggggggagcggcgggggcgccgcagggggtggggcgggcggtgccggagcaggtgctggctgcgggtcgggagggtcttctgtaggcgttcgagtttttgccgtgggcagacaccaggtgacgctcgaggagagcctcgcggagggcggattctctacggttttcctggtccggacccacggcgggatccggtgtgcccttaaacgtatgtacgtgaataatatgcccgatctaaatgtgtgcaagagggagataacaattatgaaagagctatctggacacaagaacatagtcggctatttggactgcgccgtaaattctatttccgacaatgtctgggaggtgctgatcttgatggaatactgcagggctggacaggtcgtgaatcagatgaacaagaagctgcagacaggcttcacagagccggaggtcctccagattttctgcgatacatgcgaagctgttgccagactgcatcagtgcaagactcctatcatccatcgcgatctgaaagttgagaatatccttctgaacgatggcgggaactacgtgctgtgcgactttggaagtgcaacaaataaattcttaaatccccagaaggacggcgtgaatgtagtcgaggaggagataaagaagtacacaaccctctcctatagagctcccgagatgattaatctgtacggcgggaagcctatcaccaccaaagccgatatttgggcgttgggctgcctattatacaaactgtgctttttcaccctcccatttggagaatcacaggtcgccatttgtgacgggaacttcaccatcccagataacagccgatattctagaaacatccattgcttgataagatttatgttggagccagatcccgagcaccggcctgacatctttcaggtgtcttacttcgccttcaaatttgccaagaaagactgccctgttagtaacattaataaatgttgtaaacagctgttgcgacacggtgctcttctgactgagatcctgctttttctccagctttttctgaacatgacggcttctgaggccgctgcgcgcaaaagccagatcaaagcacgtattaccgacacaatcggcccaactgagacctctatcgccccccgtcaaagacctaaggccaactctgcgacgaccgccacgccgagcgttttgaccattcagtcatcagctacacctgttaaggttcttgcccccggtgagtttgggaaccatcggcccaaaggggctctccgcccaggaaatggaccggagattctcctcggacagggacccccccagcagcccccccagcaacatcgcgtgctccagcaattgcagcagggagactggcggctccaacaactgcatctgcagcacaggcatccacatcagcagcaacagcagcagcagcagcaacaacagcagcagcagcagcaacaacaacagcagcaacagcagcagcagcagcagcatcatcatcaccaccatcatcatctgctgcaggatgcatatatgcagcagtatcagcacgccacccagcagcagcaaatgctgcagcagcaattcctgatgcactccgtgtaccagccacagccctcagcctctcagtatccaactatgatgccccagtatcaacaggctttctttcaacagcaaatgctggctcagcatcagccgtcacaacagcaggcttccccagaatatttaacctctcctcaagagttcagcccagcattagtatcctatacctcaagtctccccgctcaggttggaaccatcatggatagcagctatagcgctaataggtccgtggccgacaaggaagcgatcgccaattttaccaaccagaaaaacatttcaaacccccccgacatgtccgggtggaatccattcggcgaggacaactttagtaagctcacagaagaggaactgctcgaccgcgaattcgatttactgcggagttctaaaggtcacctcaaagcatattttgctagccagtag

SEQ ID NO: 193965 - DNA, 1989 bp, Artificial Sequence
  derived and/or modified sequence
atgaagaagtttagtcggatgccgaagagtgagggggggagcggaggaggcgcagcagggggaggggctggcggggccggggcaggcgcggggtgtgggagtggcggcagcagcgtgggtgtgagggtatttgccgtcggccgccaccaggtgaccctggaagagagcctcgcagagggaggctttagcacggtcttcctggtgcggacgcatggcggcatcaggtgtgccctcaaaaggatgtacgttaataatatgcctgatttgaatgtgtgtaaacgagaaattaccatcatgaaagaactcagcggtcacaagaatatcgtgggctatctggactgtgccgtgaacagcatcagtgataatgtgtgggaggtcctcatcctgatggaatattgtagagctgggcaggtggtaaatcaaatgaataagaagctgcagacagggtttacagaacccgaggtcctgcaaatcttctgcgatacgtgcgaggcggtggctaggcttcatcagtgcaagacacccataattcatcgggaccttaaggtggagaatatactactgaacgatgggggtaattatgtgctgtgtgactttggttctgcgactaataagtttctgaatcctcagaaagatggcgtgaatgtggttgaggaggagatcaagaagtacactaccttgtcttatagggctccagaaatgatcaatctgtacggtggcaaaccaatcaccaccaaagcagatatttgggcactgggctgcctactctacaagctgtgtttttttacgcttcctttcggggagtctcaggtggccatctgtgatggaaacttcactatcccagataactcacgatactctcgcaacattcattgtctgatcaggtttatgttggagcctgatccagaacaccggccagacatcttccaggtctcctactttgcctttaaattcgcgaaaaaggattgcccggtttccaacattaacaattcctccataccttctgcacttccagagcccatgacggcaagcgaggctgccgcacgaaagtcacaaataaaggccaggataactgatacaatcggaccgacagaaacctctatcgcccctcgccagcgccctaaagccaactccgctacaaccgcaaccccttccgtgctgaccatccagtcatccgcaacgcctgtgaaagtcctcgcacccggcgaatttggtaaccataggcccaaaggagccctccgcccgggcaatggccccgaaatccttctgggacaaggtcctccgcaacagcctccgcaacagcaccgggtcttgcagcagctccagcagggcgactggaggttacaacagctccatctgcaacacagacacccccaccaacagcaacaacagcagcagcaacaacagcagcagcagcagcagcaacagcaacaacagcagcagcaacagcagcagcaacaccaccaccaccaccatcatcatcttctgcaggacgcatatatgcagcaataccagcacgccacacagcaacagcagatgttgcagcagcagtttctcatgcactcggtgtaccaaccgcagccatcagccagccagtatcccaccatgatgccacagtatcagcaggctttttttcagcagcagatgctggcccaacatcagccaagccaacagcaagcatcccccgagtacctgacaagcccgcaagagttttcacccgctctcgtctcttatactagctccctgcctgcacaggtgggaacaatcatggattccagctattcagccaatcgcagcgtcgccgacaaggaagcaatagccaatttcaccaatcagaaaaacatcagtaaccctccagacatgtcagggtggaatccattcggcgaggataacttctccaagttgaccgaagaggaattactggaccgggagtttgatctgcttcgctcatctaagggccatctgaaagcttactttgcttcccagtag

SEQ ID NO: 193966 - DNA, 2031 bp, Artificial Sequence
  derived and/or modified sequence
atgaagaagttcagcaggatgcccaagtctgagggcggcagcggcggcggcgctgctgggggcggggccggcggggccggggccggggccggctgcggcagcggcggcagctctgtgggcgtgcgggtgtttgctgtgggccgccaccaggtgaccctggaggagagcctggccgagggcggcttcagcaccgtcttcctggtgaggacccatggaggcatccgctgtgccctgaagaggatgtatgtgaacaacatgccagacctgaatgtgtgcaagcgggagatcaccatcatgaaggagctgagcggccacaagaacatcgtgggctacctggactgtgctgtgaacagcatcagtgacaacgtgtgggaggtgctgatcctgatggagtactgcagagctggccaggtggtgaaccagatgaacaagaagctgcagacaggcttcacagagcctgaggtgctgcagatcttctgtgacacctgtgaggccgtggcccggctgcaccagtgcaagacccccatcatccaccgggacctgaaggtggagaacatcctgctgaatgatggcggcaactacgtgctgtgtgactttggaagtgccaccaacaagttcctgaacccccagaaggatggagtgaatgtggtggaggaggagatcaagaagtacaccaccctgagctaccgggcccctgagatgatcaacctgtatggaggcaagcccatcaccaccaaggctgacatctgggccctgggctgcctgctgtacaagctgtgcttcttcaccctgccctttggagagagccaggtggccatctgtgatggcaacttcaccatcccagacaacagccgctacagcaggaacatccactgcctgatccgcttcatgctggagccagaccctgagcacaggccagacatcttccaggtgtcctactttgccttcaagtttgccaagaaggactgccctgtgagcaacatcaacaagtgctgcaagcagctgctgcggcacggggccctgctgacagagatcctgctcttcctgcagctgttcctgaacatgacagccagcgaggccgccgccaggaagagccagatcaaggcccgcatcacagacaccatcggccccacagagaccagcatcgccccccggcagaggcccaaggccaacagcgccaccacagccaccccatctgtgctgaccatccagagcagcgccacccctgtgaaggtgctggcccctggagaatttggaaaccaccggcccaagggggccctgcggcctggaaatggacctgagatcctgctgggccagggccccccccagcagcccccccagcagcaccgggtgctgcagcagctgcagcagggcgactggaggctgcagcagctgcacctgcagcaccgccacccccaccagcagcagcagcagcagcagcagcagcagcagcagcagcagcagcagcagcagcagcagcagcagcagcagcagcagcagcaccaccaccaccaccaccaccacctgctgcaggatgcctacatgcagcagtaccagcacgccacccagcagcagcagatgctgcagcagcagttcctgatgcacagcgtgtaccagccccagcccagcgccagccagtaccccaccatgatgccccagtaccagcaggccttcttccagcagcagatgctggcccagcaccagcccagccagcagcaggccagccctgagtacctgaccagcccccaggagttctccccagccctggtgtcctacaccagcagcctgcctgcccaggtgggcaccatcatggacagcagctacagcgccaacagatctgtggccgacaaggaggccatcgccaacttcaccaaccagaagaacatcagcaaccccccagacatgagcggctggaacccctttggagaggacaacttcagcaagctgacagaggaggagctgctggaccgggagtttgacctgctgcggagcagcaagggccacctgaaggcctactttgccagccagtag

SEQ ID NO: 193967 - DNA, 1989 bp, Artificial Sequence
  derived and/or modified sequence
atgaagaagttcagcaggatgcccaagtctgagggcggcagcggcggcggcgctgctgggggcggggccggcggggccggggccggggccggctgcggcagcggcggcagctctgtgggcgtgcgggtgtttgctgtgggccgccaccaggtgaccctggaggagagcctggccgagggcggcttcagcaccgtcttcctggtgaggacccatggaggcatccgctgtgccctgaagaggatgtatgtgaacaacatgccagacctgaatgtgtgcaagcgggagatcaccatcatgaaggagctgagcggccacaagaacatcgtgggctacctggactgtgctgtgaacagcatcagtgacaacgtgtgggaggtgctgatcctgatggagtactgcagagctggccaggtggtgaaccagatgaacaagaagctgcagacaggcttcacagagcctgaggtgctgcagatcttctgtgacacctgtgaggccgtggcccggctgcaccagtgcaagacccccatcatccaccgggacctgaaggtggagaacatcctgctgaatgatggcggcaactacgtgctgtgtgactttggaagtgccaccaacaagttcctgaacccccagaaggatggagtgaatgtggtggaggaggagatcaagaagtacaccaccctgagctaccgggcccctgagatgatcaacctgtatggaggcaagcccatcaccaccaaggctgacatctgggccctgggctgcctgctgtacaagctgtgcttcttcaccctgccctttggagagagccaggtggccatctgtgatggcaacttcaccatcccagacaacagccgctacagcaggaacatccactgcctgatccgcttcatgctggagccagaccctgagcacaggccagacatcttccaggtgtcctactttgccttcaagtttgccaagaaggactgccctgtgagcaacatcaacaacagcagcatccccagcgccctgcctgagcccatgacagccagcgaggccgccgccaggaagagccagatcaaggcccgcatcacagacaccatcggccccacagagaccagcatcgccccccggcagaggcccaaggccaacagcgccaccacagccaccccatctgtgctgaccatccagagcagcgccacccctgtgaaggtgctggcccctggagaatttggaaaccaccggcccaagggggccctgcggcctggaaatggacctgagatcctgctgggccagggccccccccagcagcccccccagcagcaccgggtgctgcagcagctgcagcagggcgactggaggctgcagcagctgcacctgcagcaccgccacccccaccagcagcagcagcagcagcagcagcagcagcagcagcagcagcagcagcagcagcagcagcagcagcagcagcagcagcagcaccaccaccaccaccaccaccacctgctgcaggatgcctacatgcagcagtaccagcacgccacccagcagcagcagatgctgcagcagcagttcctgatgcacagcgtgtaccagccccagcccagcgccagccagtaccccaccatgatgccccagtaccagcaggccttcttccagcagcagatgctggcccagcaccagcccagccagcagcaggccagccctgagtacctgaccagcccccaggagttctccccagccctggtgtcctacaccagcagcctgcctgcccaggtgggcaccatcatggacagcagctacagcgccaacagatctgtggccgacaaggaggccatcgccaacttcaccaaccagaagaacatcagcaaccccccagacatgagcggctggaacccctttggagaggacaacttcagcaagctgacagaggaggagctgctggaccgggagtttgacctgctgcggagcagcaagggccacctgaaggcctactttgccagccagtag

SEQ ID NO: 193968 - DNA, 2031 bp, Artificial Sequence
  derived and/or modified sequence
atgaagaagttcagccggatgcccaagagcgagggcggcagcggcggaggcgctgcaggagggggagctgggggggcgggcgccggagctggttgtggatcaggcggtagcagcgttggcgtgcgggtctttgcggtgggccgacatcaggtcaccctggaagaatccctggccgaagggggcttcagcacggtgttcctagtgcggacccatgggggtattcggtgcgccctgaagaggatgtatgtaaataatatgcccgatctcaatgtttgtaagagggaaattacaatcatgaaagagctttctggtcataaaaacattgtcggttatctggattgcgccgtgaatagtattagcgacaacgtgtgggaagtgctcatcctcatggaatactgtcgcgctggccaggtcgtcaatcagatgaacaaaaagctccagacagggttcaccgagcctgaagtgcttcagatattttgtgacacctgtgaagcagtagcacggttgcatcagtgcaaaaccccgatcatccacagagatctgaaagtcgaaaacattctgctgaatgacggtgggaactacgtgctctgtgacttcgggtcggcaaccaacaaatttttaaacccacagaaagatggggtgaacgtcgtagaagaggagattaaaaaatacaccacacttagttaccgggctccagaaatgattaatctctacggaggaaaaccaatcactactaaagctgacatatgggcgctgggatgcctgttatacaagttgtgcttctttacattacccttcggcgaatctcaggtggcaatttgcgatggcaattttacgattcccgataactctaggtactcgcgaaatattcattgtttgattagatttatgttggaacctgacccggagcatagacctgacatttttcaggtctcatacttcgctttcaaattcgctaagaaggattgccctgtctccaatatcaacaagtgctgcaagcagcttctcaggcacggtgccctactaacagagattctgctgttcttgcagctttttttgaacatgacggctagtgaagcggctgccagaaaaagccagatcaaagctagaattactgacaccatcggtccgaccgagacatcaatcgcccctcggcaacgtccaaaggcaaactccgcaactaccgccacacctagtgttcttacaattcagagtagcgcaacccccgttaaggtcctcgcgcctggtgaatttggcaatcacagacctaagggagctttgcgacccgggaacgggcctgagatacttctcggacaggggccccctcagcaaccaccgcagcagcatcgcgtattgcaacagttacagcagggcgactggagattgcagcagctgcatctacagcaccgccaccctcatcagcaacaacagcaacagcagcaacagcaacaacagcagcagcagcagcaacaacagcagcagcagcagcagcagcagcagcaccaccaccaccatcaccaccacctactgcaggacgcctatatgcaacagtaccaacacgccacccagcaacagcagatgttacagcagcagttcttgatgcacagcgtataccagcctcagccaagtgcgagccagtaccctaccatgatgccgcagtaccagcaggcatttttccaacagcagatgttagcacagcatcaaccttcgcagcaacaggcctcacccgaataccttacaagcccgcaggagttttctcctgcactagttagctataccagttctttgcccgcacaggtcgggacaataatggactcctcttattctgcaaacaggagcgtcgcagacaaggaggcaattgcgaatttcactaatcagaaaaatatcagtaatccgcctgacatgtccggatggaacccgttcggcgaggataatttcagcaagttgactgaggaagagcttctcgaccgtgagtttgacttgttgcgcagcagtaagggacacttaaaagcttacttcgcgtcccagtag

SEQ ID NO: 193969 - DNA, 1989 bp, Artificial Sequence
  derived and/or modified sequence
atgaagaagttcagccggatgcccaagagcgagggcggcagcggcggcggagccgccggcggcggggccgggggggctggcgctggggccggatgtggttctgggggaagcagcgtgggggttagagtctttgcggtgggcagacaccaggttacactggaggagagcttagccgaaggcggtttcagtaccgtctttttggtgcggacccacggagggatccggtgcgctctcaagagaatgtatgtcaataatatgcctgatctcaatgtgtgtaagcgtgaaatcacaatcatgaaagagctgagtggccacaaaaacatagtcgggtatctggattgtgctgttaattcaattagtgataatgtatgggaggtgctgattctcatggagtattgtagagccgggcaggtagtgaaccagatgaataaaaaacttcaaaccggattcaccgagcccgaagtgctacagatcttctgtgacacatgtgaggccgttgcgaggctacaccaatgcaaaacacctattatacacagagatttgaaagtggaaaatatcctgcttaacgacgggggaaactacgtcctatgcgactttggctccgccacaaataaattcctcaatccccaaaaagacggcgtcaatgtggtcgaggaagaaataaaaaagtacacaacactgagttaccgcgcccctgagatgataaatctctatgggggcaagccaatcacaaccaaggccgacatctgggctctgggttgcctcttgtacaagctttgcttcttcactcttccattcggcgagtcccaggtagctatctgcgatggaaactttacgatccccgacaacagcaggtactccaggaatatccattgcctgattcgatttatgctggaacctgatcccgagcataggccggatatctttcaagtcagctactttgcattcaagttcgccaagaaagattgtcccgtttccaacattaacaactcctctatcccttcagcattgcctgaacccatgacagctagtgaagctgccgctaggaaaagtcagatcaaggcacgtattacggatacaatcgggcccaccgaaacttccatcgcgcctcgtcagcggcccaaagcaaactccgctaccacagctacgccaagcgtcttgaccatccagagcagcgccacaccggtgaaagtgctcgccccaggggaatttggtaatcacagaccgaagggggcactcagaccaggaaatggaccggaaattctgcttggacagggaccccctcagcagcctccccagcagcacagggtcctccagcagcttcagcaaggagattggaggttgcagcagttgcatctgcaacaccggcaccctcatcaacagcagcagcagcagcaacagcaacagcagcagcagcagcagcagcagcagcagcagcaacagcagcagcagcagcaacaccatcatcatcaccaccatcatcttctgcaagatgcctatatgcaacagtaccaacatgccacacaacagcagcaaatgttacagcaacagttcttaatgcatagtgtctaccagccccagccctctgctagccaatatccaaccatgatgccccagtaccagcaagctttttttcagcagcagatgcttgcgcagcaccagccttcccagcagcaggcttcaccggaatacttgacaagtccccaggagttttcaccagcccttgtaagctatacaagcagcctgcccgcccaggtaggtaccattatggattccagttacagcgcaaacagatcggttgctgataaggaggctatcgccaattttaccaatcagaaaaatatcagcaaccctccagatatgtctggatggaacccctttggcgaggacaactttagcaagctgacagaagaggaactactggacagggagtttgatctcctgagatccagcaagggccacctcaaggcttattttgcatcgcaatag

SEQ ID NO: 193970 - DNA, 2031 bp, Artificial Sequence
  derived and/or modified sequence
atgaaaaaattctctagaatgccgaagtccgaaggaggcagcggcggaggcgctgcaggcggtggggcaggaggtgccggtgccggtgcaggatgtggatcggggggttcctcagttggtgttagggtgtttgcagttggtagacaccaggtcacccttgaagagagtctagcagaaggtgggttttccactgtattcttggtaaggacacatggcggaatcaggtgcgccctgaagaggatgtacgttaataatatgcctgacctaaacgtctgtaaacgagagatcaccattatgaaggagttatcagggcataaaaacatcgtcggatacctcgattgcgccgttaattcgatctctgataatgtttgggaggtcctgatcttgatggaatactgccgggctggtcaagtggttaatcagatgaacaagaagcttcagaccggctttaccgagcccgaggtactccagatcttctgcgatacctgtgaggccgtcgcacgcttacatcagtgcaaaacgccaattatacacagggacttgaaagtcgaaaacattcttctgaacgacggcggaaactacgtgttatgcgacttcggctctgcgactaataagttcctgaaccctcagaaggacggcgtcaacgtggtggaggaggagatcaagaaatacaccacattatcctatagagcccctgagatgatcaatctgtatggtgggaaaccaattacaacaaaggcagacatatgggcccttggatgtttattgtacaagttgtgtttctttacactacccttcggtgagagccaggtggccatatgtgatgggaattttaccatccccgataactccaggtactcccgaaatatccactgcctcattagatttatgctggagcctgatccggagcatcgccctgatattttccaggtttcatacttcgcatttaagttcgcaaaaaaggattgtcctgtaagtaacatcaataaatgttgcaaacagctgctgagacacggagcactcctgactgagattctgcttttcctgcagctgttcctgaacatgactgcctctgaggccgcagcacgcaaaagccaaatcaaggcccgaatcaccgataccattggtcccaccgaaacatccatcgctcccaggcagagacctaaggctaatagcgccactacggccacccccagtgttctgactatccaaagtagtgctacacctgtgaaggtgcttgcccctggagaattcgggaaccaccgtccaaaaggtgcattgcgcccaggaaacggccctgaaattctgctcggacaggggcctccccagcagcctccccagcagcaccgggtgcttcagcagctgcaacagggggattggagactccagcaactgcacctgcaacaccggcatccccaccagcagcaacagcaacagcagcagcaacaacagcagcagcagcaacagcagcaacagcaacagcagcagcaacaacaacagcatcaccaccatcaccaccaccacctcttgcaagatgcttatatgcagcagtaccaacacgcaacacaacagcagcaaatgttgcaacagcagtttttgatgcactcagtgtatcaaccgcagccttccgcttctcaatatcccaccatgatgcctcagtaccagcaggcgttcttccagcagcagatgcttgctcagcatcagccttcccagcagcaggcttcccccgagtacctcacatcccctcaggagtttagccccgctctcgtttcttacaccagcagtcttcctgcccaagtgggcacaataatggattcgtcgtactccgctaatcgttcagtggccgacaaagaggccattgccaacttcacaaaccaaaaaaacatctcaaaccctcccgatatgagtggctggaacccgtttggggaagataacttctcaaaattgaccgaggaagagcttcttgatcgggaatttgacctgctccggtcatcaaaggggcatctgaaagcttacttcgcaagccagtag

SEQ ID NO: 193971 - DNA, 1989 bp, Artificial Sequence
  derived and/or modified sequence
atgaaaaagttttccagaatgcctaagagcgaagggggtagcggcggaggtgccgcaggaggcggtgctggcggagctggagctggggcaggctgcggatctggagggtcatccgtgggcgtccgcgttttcgccgtgggtcgccaccaggtaacactcgaggagtctctcgcagaggggggatttagcacagtctttctggtacgcacccatggcggtatccggtgcgcactgaaaaggatgtatgttaataacatgcctgacttgaatgtgtgcaaacgggagatcacaattatgaaagaactgtccggacacaaaaacatagtcgggtacctcgattgcgctgttaacagcatctctgacaacgtatgggaggttctcatccttatggaatactgccgagccggacaggtggtgaaccagatgaacaagaagttgcagactggtttcaccgagccggaagtgttgcagatattctgtgatacctgtgaagcagtcgccaggctccaccaatgtaaaactcccattatacatcgtgatttgaaggttgagaatatcttactgaacgacggcggaaattatgtcttatgtgatttcggctctgcgaccaacaagttcctgaacccccaaaaagatggggtgaatgttgtggaagaagagatcaaaaaatacactacactcagctaccgcgcacccgagatgatcaacctgtacggcggaaaaccaattacgacaaaagccgacatctgggccctaggttgtctactttataagctctgcttttttacccttccattcggggagagccaggtggcaatctgcgatggtaacttcacgatccccgacaattcaaggtacagccggaacatacactgtcttataagattcatgctggaaccagatcccgagcaccgccctgatatctttcaagtgtcatacttcgccttcaaatttgccaaaaaggactgcccagtgagcaacatcaataattcatccattcccagcgcgctgccggaacctatgacagcctccgaggcagccgcaagaaaatcgcagatcaaagcccgaatcactgatacaattgggcctacagaaaccagtattgctcccaggcagcgccctaaggccaattccgccaccaccgccacaccaagtgtgcttaccatccagtcttcggcaactcctgtgaaggtcttagctcccggagagtttggcaaccatcgtcccaagggggcattgcgcccaggcaacggcccagagattctgctgggacagggacctcctcagcagccacctcagcaacaccgggtgctgcaacagctgcagcagggggattggaggttgcagcagctgcacttgcaacaccgccacccccaccagcagcagcagcagcagcagcagcaacagcagcagcagcagcaacaacagcagcagcagcaacaacaacagcagcagcagcatcaccatcatcaccaccaccacctactacaggatgcctatatgcagcagtaccaacacgctactcagcagcaacagatgctccagcagcagttcctgatgcattccgtctatcagcctcagccaagcgcttctcagtatcccaccatgatgcctcaatatcagcaggccttttttcagcagcaaatgcttgcgcagcaccaaccctctcagcagcaggcaagccctgagtatctcactagcccccaggagttttcgcccgctctggtttcctatacctcatcactgccagcccaggtcggtaccatcatggatagtagctactcggctaatcgcagcgtggcagataaagaagcgatcgccaacttcacaaatcaaaaaaacatcagcaacccacccgatatgtccggttggaaccctttcggcgaggataatttctcaaaactgacggaggaagagctcctggatcgcgaattcgatttgctacggagtagcaagggccatctgaaagcctatttcgcgagtcagtag

SEQ ID NO: 193972 - DNA, 2705 bp, Artificial Sequence
  derived and/or modified sequence
cggggcccaggctgtgcgcttggggagcgcggaatgtgaggcttggcgggccgcagcacgctcggacgggccaggggcggcgacccctcgcggacgcccggctgcgcgccgggccggggacttgcccttgcacgctccctgcgccctccagctcgccggcgggaccatgaagaagttctctcggatgcccaagtcggagggcggcagcggcggcggagcggcgggtggcggggctggcggggccggggccggggccggctgcggctccggcggctcgtccgtgggggtccgggtgttcgcggtcggccgccaccaggtcaccctggaagagtcgctggccgaaggtggattctccacagttttcctcgtgcgtactcacggtggaatccgatgtgcattgaagcgaatgtatgtcaataacatgccagacctcaatgtttgtaaaagggaaattacaattatgaaagagctatctggtcacaaaaatattgtgggctatttggactgtgctgttaattcaattagtgataatgtatgggaagtccttatcttaatggaatattgtcgagctggacaggtagtgaatcaaatgaataagaagctacagacgggttttacagaaccagaagtgttacagatattctgtgatacctgtgaagctgttgcaaggttgcatcagtgtaagactccaataattcaccgggatctgaaggtagaaaatattttgttgaatgatggtgggaactatgtactttgtgactttggcagtgccactaataaatttcttaatcctcaaaaagatggagttaatgtagtagaagaagaaattaaaaagtatacaactctgtcatacagagcccctgaaatgatcaacctttatggagggaaacccatcaccaccaaggctgatatctgggcactgggatgtctactctataaactttgtttcttcactcttccttttggtgagagtcaggttgctatctgtgatggcaacttcaccatcccagacaattctcgttactcccgtaacatacattgcttaataaggttcatgcttgaaccagatccggaacatagacctgatatatttcaagtgtcatattttgcatttaaatttgccaaaaaggattgtccagtctccaacatcaataagtgttgtaaacaattactgagacacggagcactgttaactgaaattcttctattccttcagctcttcctgaacatgactgctagtgaagcagctgctaggaaaagccaaataaaagccagaataacagataccattggaccaacagaaacctcaattgcaccaagacaaagaccaaaggccaactctgctactactgccactcccagtgtgctgaccattcaaagttcagcaacacctgttaaagtccttgctcctggtgaattcggtaaccatagaccaaaaggggcactaagacctggaaatggccctgaaattttattgggtcagggacctcctcagcagccgccacagcagcatagagtactccagcaactacagcagggagattggagattacagcaactccatttacagcatcgtcatcctcaccagcagcagcagcagcagcagcagcaacagcaacagcagcagcagcaacagcaacagcagcagcagcagcagcagcagcagcaccaccaccaccaccaccaccacctacttcaagatgcttatatgcagcagtatcaacatgcaacacagcagcaacagatgcttcaacaacaatttttaatgcattcggtatatcaaccacaaccttctgcatcacagtatcctacaatgatgccgcagtatcagcaggctttctttcaacagcagatgctagctcaacatcagccgtctcaacaacaggcatcacctgaatatcttacctcccctcaagagttctcaccagccttagtttcctacacttcatcacttccagctcaggttggaaccataatggactcctcctatagtgccaataggtcagttgctgataaagaggccattgcaaatttcacaaatcagaagaacatcagcaatccacctgatatgtcagggtggaatccttttggagaggataatttctctaagttaacagaagaggaactattggacagagaatttgaccttctaagatcaagtaagggacacttgaaggcttattttgcttcacagtaaaataacagctctattattattcagcaaggccaaagacttttgagaatgtgtatggaaaattctttttgtgcatttgagggcaaaattcaggccatcttcttatacatatactatcaaattatgttgtgtgcattagaaatcagttgcttgatagtagctattaaacccaatattgctgatagtatgctaatatcctaaaacttaaatattgcatatctatgaatgttaaattcagaatatctctaaaacatggaaaattgatgtttcaataaaaagggagacattttattattttgccttactaatgattttgcagctctgtttttctgcacactcaatagaaaatattgtgggtctgagatgccctttgaaaatgcctgaaagaaaacatgggctactacattatgttaatgttttgtaatgtccttttaatgagtggtgacataaaagggctgctttgttgtcctgatatggcaaaaattaaataaattctttttcactttaaatc

SEQ ID NO: 193973 - DNA, 3195 bp, Artificial Sequence
  derived and/or modified sequence
cggggcccaggctgtgcgcttggggagcgcggaatgtgaggcttggcgggccgcagcacgctcggacgggccaggggcggcgacccctcgcggacgcccggctgcgcgccgggccggggacttgcccttgcacgctccctgcgccctccagctcgccggcgggaccatgaagaagttctctcggatgcccaagtcggagggcggcagcggcggcggagcggcgggtggcggggctggcggggccggggccggggccggctgcggctccggcggctcgtccgtgggggtccgggtgttcgcggtcggccgccaccaggtcaccctggaagagtcgctggccgaaggtggattctccacagttttcctcgtgcgtactcacggtggaatccgatgtgcattgaagcgaatgtatgtcaataacatgccagacctcaatgtttgtaaaagggaaattacaattatgaaagagctatctggtcacaaaaatattgtgggctatttggactgtgctgttaattcaattagtgataatgtatgggaagtccttatcttaatggaatattgtcgagctggacaggtagtgaatcaaatgaataagaagctacagacgggttttacagaaccagaagtgttacagatattctgtgatacctgtgaagctgttgcaaggttgcatcagtgtaagactccaataattcaccgggatctgaaggtagaaaatattttgttgaatgatggtgggaactatgtactttgtgactttggcagtgccactaataaatttcttaatcctcaaaaagatggagttaatgtagtagaagaagaaattaaaaagtatacaactctgtcatacagagcccctgaaatgatcaacctttatggagggaaacccatcaccaccaaggctgatatctgggcactgggatgtctactctataaactttgtttcttcactcttccttttggtgagagtcaggttgctatctgtgatggcaacttcaccatcccagacaattctcgttactcccgtaacatacattgcttaataaggttcatgcttgaaccagatccggaacatagacctgatatatttcaagtgtcatattttgcatttaaatttgccaaaaaggattgtccagtctccaacatcaataattcttctattccttcagctcttcctgaaccgatgactgctagtgaagcagctgctaggaaaagccaaataaaagccagaataacagataccattggaccaacagaaacctcaattgcaccaagacaaagaccaaaggccaactctgctactactgccactcccagtgtgctgaccattcaaagttcagcaacacctgttaaagtccttgctcctggtgaattcggtaaccatagaccaaaaggggcactaagacctggaaatggccctgaaattttattgggtcagggacctcctcagcagccgccacagcagcatagagtactccagcaactacagcagggagattggagattacagcaactccatttacagcatcgtcatcctcaccagcagcagcagcagcagcagcagcaacagcaacagcagcagcagcaacagcaacagcagcagcagcagcagcagcagcagcaccaccaccaccaccaccaccacctacttcaagatgcttatatgcagcagtatcaacatgcaacacagcagcaacagatgcttcaacaacaatttttaatgcattcggtatatcaaccacaaccttctgcatcacagtatcctacaatgatgccgcagtatcagcaggctttctttcaacagcagatgctagctcaacatcagccgtctcaacaacaggcatcacctgaatatcttacctcccctcaagagttctcaccagccttagtttcctacacttcatcacttccagctcaggttggaaccataatggactcctcctatagtgccaataggtcagttgctgataaagaggccattgcaaatttcacaaatcagaagaacatcagcaatccacctgatatgtcagggtggaatccttttggagaggataatttctctaagttaacagaagaggaactattggacagagaatttgaccttctaagatcaagtaagggacacttgaaggcttattttgcttcacagtaaaataacagctctattattattcagcaaggccaaagacttttgagaatgtgtatggaaaattctttttgtgcatttgagggcaaaattcaggccatcttcttatacatatactatcaaattatgttgtgtgcattagaaatcagttgcttgatagtagctattaaacccaatattgctgatagtatgctaatatcctaaaacttaaatattgcatatctatgaatgttaaattcagaatatctctaaaacatggaaaattgatgtttcaataaaaagggagacattttattattttgccttactaatgattttgcagctctgtttttctgcacactcaatagaaaatattgtgggtctgagatgccctttgaaaatgcctgaaagaaaacatgggctactacattatgttaatgttttgtaatgtccttttaatgagtggtgacataaaagggctgctttgttgtcctgatatggcaaaaattaaataaattctttttcactttaaatcagatatctcaatgtttttacttggaatcattgcttttctttgaactacctaatatatgtcaagcttcgccacacatattttagaaatgtcctttttgaaagaatgatgtgagtgttttgagtaggttgccaaataggagcaaaaagctcacttctagagtatgtagataattttcaggtttctgaggctttgtgtgtgtgtgtgtgtgtgcacgcgcatgtgtgtgcaggtgtgcacacaaaacaagtgtgttttccccttttgcatgtgaaaagaaggtcttaataatccctagtttatagttcctagttcctatttcatttaggtaattggccttatgagaatgtttaatagatgaaatgctttgttctgaattggtatatattttatgtaaaattcctgtaagaatagtttgggatttaaatttgtattttatatattggttatatgattatgaaaattaaattgatgattaaatgcagatataaaaataagttctgagccgttaataaaggtttctaaataaaaccga

SEQ ID NO: 193974 - DNA, 2031 bp, Artificial Sequence
  derived and/or modified sequence
atgaagaagttcagcagaatgcccaagagcgagggcggcagcggcggcggcgccgccggcggcggcgccggcggcgccggcgccggcgccggctgcggcagcggcggcagcagcgtgggcgtgagagtgttcgccgtgggcagacaccaggtgaccctggaggagagcctggccgagggcggcttcagcaccgtgttcctggtgagaacccacggcggcatcagatgcgccctgaagagaatgtacgtgaacaacatgcccgacctgaacgtgtgcaagagagagatcaccatcatgaaggagctgagcggccacaagaacatcgtgggctacctggactgcgccgtgaacagcatcagcgacaacgtgtgggaggtgctgatcctgatggagtactgcagagccggccaggtggtgaaccagatgaacaagaagctgcagaccggcttcaccgagcccgaggtgctgcagatcttctgcgacacctgcgaggccgtggccagactgcaccagtgcaagacccccatcatccacagagacctgaaggtggagaacatcctgctgaacgacggcggcaactacgtgctgtgcgacttcggcagcgccaccaacaagttcctgaacccccagaaggacggcgtgaacgtggtggaggaggagatcaagaagtacaccaccctgagctacagagcccccgagatgatcaacctgtacggcggcaagcccatcaccaccaaggccgacatctgggccctgggctgcctgctgtacaagctgtgcttcttcaccctgcccttcggcgagagccaggtggccatctgcgacggcaacttcaccatccccgacaacagcagatacagcagaaacatccactgcctgatcagattcatgctggagcccgaccccgagcacagacccgacatcttccaggtgagctacttcgccttcaagttcgccaagaaggactgccccgtgagcaacatcaacaagtgctgcaagcagctgctgagacacggcgccctgctgaccgagatcctgctgttcctgcagctgttcctgaacatgaccgccagcgaggccgccgccagaaagagccagatcaaggccagaatcaccgacaccatcggccccaccgagaccagcatcgcccccagacagagacccaaggccaacagcgccaccaccgccacccccagcgtgctgaccatccagagcagcgccacccccgtgaaggtgctggcccccggcgagttcggcaaccacagacccaagggcgccctgagacccggcaacggccccgagatcctgctgggccagggccccccccagcagcccccccagcagcacagagtgctgcagcagctgcagcagggcgactggagactgcagcagctgcacctgcagcacagacacccccaccagcagcagcagcagcagcagcagcagcagcagcagcagcagcagcagcagcagcagcagcagcagcagcagcagcagcagcaccaccaccaccaccaccaccacctgctgcaggacgcctacatgcagcagtaccagcacgccacccagcagcagcagatgctgcagcagcagttcctgatgcacagcgtgtaccagccccagcccagcgccagccagtaccccaccatgatgccccagtaccagcaggccttcttccagcagcagatgctggcccagcaccagcccagccagcagcaggccagccccgagtacctgaccagcccccaggagttcagccccgccctggtgagctacaccagcagcctgcccgcccaggtgggcaccatcatggacagcagctacagcgccaacagaagcgtggccgacaaggaggccatcgccaacttcaccaaccagaagaacatcagcaacccccccgacatgagcggctggaaccccttcggcgaggacaacttcagcaagctgaccgaggaggagctgctggacagagagttcgacctgctgagaagcagcaagggccacctgaaggcctacttcgccagccagtag

SEQ ID NO: 193975 - DNA, 1989 bp, Artificial Sequence
  derived and/or modified sequence
atgaagaagttcagcagaatgcccaagagcgagggcggcagcggcggcggcgccgccggcggcggcgccggcggcgccggcgccggcgccggctgcggcagcggcggcagcagcgtgggcgtgagagtgttcgccgtgggcagacaccaggtgaccctggaggagagcctggccgagggcggcttcagcaccgtgttcctggtgagaacccacggcggcatcagatgcgccctgaagagaatgtacgtgaacaacatgcccgacctgaacgtgtgcaagagagagatcaccatcatgaaggagctgagcggccacaagaacatcgtgggctacctggactgcgccgtgaacagcatcagcgacaacgtgtgggaggtgctgatcctgatggagtactgcagagccggccaggtggtgaaccagatgaacaagaagctgcagaccggcttcaccgagcccgaggtgctgcagatcttctgcgacacctgcgaggccgtggccagactgcaccagtgcaagacccccatcatccacagagacctgaaggtggagaacatcctgctgaacgacggcggcaactacgtgctgtgcgacttcggcagcgccaccaacaagttcctgaacccccagaaggacggcgtgaacgtggtggaggaggagatcaagaagtacaccaccctgagctacagagcccccgagatgatcaacctgtacggcggcaagcccatcaccaccaaggccgacatctgggccctgggctgcctgctgtacaagctgtgcttcttcaccctgcccttcggcgagagccaggtggccatctgcgacggcaacttcaccatccccgacaacagcagatacagcagaaacatccactgcctgatcagattcatgctggagcccgaccccgagcacagacccgacatcttccaggtgagctacttcgccttcaagttcgccaagaaggactgccccgtgagcaacatcaacaacagcagcatccccagcgccctgcccgagcccatgaccgccagcgaggccgccgccagaaagagccagatcaaggccagaatcaccgacaccatcggccccaccgagaccagcatcgcccccagacagagacccaaggccaacagcgccaccaccgccacccccagcgtgctgaccatccagagcagcgccacccccgtgaaggtgctggcccccggcgagttcggcaaccacagacccaagggcgccctgagacccggcaacggccccgagatcctgctgggccagggccccccccagcagcccccccagcagcacagagtgctgcagcagctgcagcagggcgactggagactgcagcagctgcacctgcagcacagacacccccaccagcagcagcagcagcagcagcagcagcagcagcagcagcagcagcagcagcagcagcagcagcagcagcagcagcagcagcaccaccaccaccaccaccaccacctgctgcaggacgcctacatgcagcagtaccagcacgccacccagcagcagcagatgctgcagcagcagttcctgatgcacagcgtgtaccagccccagcccagcgccagccagtaccccaccatgatgccccagtaccagcaggccttcttccagcagcagatgctggcccagcaccagcccagccagcagcaggccagccccgagtacctgaccagcccccaggagttcagccccgccctggtgagctacaccagcagcctgcccgcccaggtgggcaccatcatggacagcagctacagcgccaacagaagcgtggccgacaaggaggccatcgccaacttcaccaaccagaagaacatcagcaacccccccgacatgagcggctggaaccccttcggcgaggacaacttcagcaagctgaccgaggaggagctgctggacagagagttcgacctgctgagaagcagcaagggccacctgaaggcctacttcgccagccagtag

SEQ ID NO: 193976 - protein, 199 aa, Artificial Sequence
  derived and/or modified sequence
MPEQSNDYRVAVFGAGGVGKSSLVLRFVKGTFRESYIPTVEDTYRQVISCDKSICTLQITDTTGSHQFPAMQRLSISKGHAFILVYSITSRQSLEELKPIYEQICEIKGDVESIPIMLVGNKCDESPSREVQSSEAEALARTWKCAFMETSAKLNHNVKELFQELLNLEKRRTVSLQIDGKKSKQQKRKEKLKGKCVIM

SEQ ID NO: 193977 - DNA, 600 bp, Artificial Sequence
  derived and/or modified sequence
atgcccgagcagagcaacgactacagagtggccgtgttcggcgccggcggcgtgggcaagagcagcctggtgctgagattcgtgaagggcaccttcagagagagctacatccccaccgtggaggacacctacagacaggtgatcagctgcgacaagagcatctgcaccctgcagatcaccgacaccaccggcagccaccagttccccgccatgcagagactgagcatcagcaagggccacgccttcatcctggtgtacagcatcaccagcagacagagcctggaggagctgaagcccatctacgagcagatctgcgagatcaagggcgacgtggagagcatccccatcatgctggtgggcaacaagtgcgacgagagccccagcagagaggtgcagagcagcgaggccgaggccctggccagaacctggaagtgcgccttcatggagaccagcgccaagctgaaccacaacgtgaaggagctgttccaggagctgctgaacctggagaagagaagaaccgtgagcctgcagatcgacggcaagaagagcaagcagcagaagagaaaggagaagctgaagggcaagtgcgtgatcatgtag

SEQ ID NO: 193978 - DNA, 4385 bp, Artificial Sequence
  derived and/or modified sequence
tttaagcaggagcagcagcctctgcagcagttggcacatctgagaaggcagagattgaagagagtaggaggagcgtgcagcggcggtgacagtgccaggccggagcggctcaggccagcgcaggtgcaggggctgcgagcgggtggagcgcgagggcgctgggcgcagggagcacggccggtgggcggtgcagggcgcacggcgggcgagcagctgacagcatcgtcacggcggcgggagggagtgcgctgcgcctgcctccgggaggagccgcatccacacaccctgcgctgccctgtcctgcgcgagtggagctctgaagaagctctgagcggagttgtgttcttccccaggtgcgtcctggctgagagttggagctctccagcaacatgcctgagcagagtaacgattaccgggtggccgtgtttggggctggcggtgttggcaagagctccctggtgttgaggtttgtgaaaggcacattccgggagagctacatcccgacggtggaagacacctaccggcaagtgatcagctgtgacaagagcatatgcacattgcagatcaccgacacgacggggagccaccagttcccggccatgcagcggctgtccatctccaaagggcacgccttcatcctggtgtactccattaccagccgacagtccttggaggagctcaagcccatctacgaacaaatctgcgagatcaaaggggacgtggagagcatccccatcatgctggtggggaacaagtgtgatgagagccccagccgcgaggtgcagagcagcgaggcggaggccttggcccgcacatggaagtgtgccttcatggagacctcagccaagctcaaccataacgtgaaggagcttttccaggagctgctcaacctggagaagcgcaggaccgtgagtctccagatcgacgggaaaaagagcaagcagcagaaaaggaaagagaagctcaaaggcaagtgcgtgatcatgtgaaggcccttcctgcgggaggagcagctgtgtgtccccggcacctcactcccccaaaatgacacccaccgtcgtcagggtagcatgtataatgcccacgtgttaaacattgcatttaatcgagatgcgtcctattgtccttaagagggcgtttcacaccaccaacagtaagccacccactctggagtcacagaatctgccaggcggttcaagtgaaaaccaacacactcagcatccctgggaactgagaggtgccagcaattgctgaaggtggcgatgaacacccgaaggtgggagggaggactggtacccacaaagcaacatgtaccgagaggactaaatgtcatctacgtgcatgtgagagcgtgttaacctagagttacctgcaccaaccccagacagaagccaatcacatctttgggggaggggaggggcaggaagaggtgagaagatcagatggtccaaagtggaccacacttggtccattttacacttttttaaaggggattaaaaaacacagcctctcccccaaagggtgtccgttcttaattcccacctggcctgttaggagccttgctaccctgaggggatgtgttcaccttacctagacctagttaggaagtatcattttaagctattagagtatttatcttcatgtgcagggataagtgcactaacagtgtgctgctctgtcggaagttcttcagtttttaagtgaggatatcgtgacagtattaaaacatcgcaataatgttcctgtgtgttatacatcgagggttttagaaatgtgattttcttcttttgacctgtgaggagtataacttctttcagccctcagattttaaatacaagcaaataaactcactatttttagacgtttttttcctccaaggtggttttcttctcttaaataactcgatctgtacccagctgggtagcagccagcaaaggccatcagacaaccagaagcacatccatttttgtagtgtcacaaacatgtatatgccacactttgcaccttaatgaaatactttgaaacagaagttattcactgtgtttttgatgatctatctgtattggaaatatgttcctggaaaatgcatttaaataatagtaaattctcttgcatgttccattatacgtgtcttctaagagctgttcaatacagtattcactctagaaacaattatctttttctcttaatgattttgtgtgcatctttaatctttcaagccaaattacagctatttcaggtttcctgtgttagcttggggataggatggtggctggagacaggcaggcttctctgccctgggaagagcccactcagcttaattgctctgccatcgtagagcctggttggacttggcttcctgaaaactcccactgatagtgcctgttagatctcctgtttgtttcagttggcagaacatttactggccccaactgtggcatcatcctctcagcagtcttcctgtcacccgcctggcaggcagaaggagctgcagtcccacgtgggcctgcctgggggggtgggggctgcatggctgttgggtggcagtgtcagcacagggagggcttaagttggggatgtttgaccaggccacctcctgcaactgctgtttctcctgtccctcctatgcagggcttgcagcagcagcagtgtggccatctccatcccccaaagcacacttgctctctcaatatgtcctagttttcttcagccttttctggttcagttcccttgtcctgatctcatcctctctggtctcccaataactcacccttgggatgtgtttagagcgtgggaggtgcctttgagaactgcttgactccatgatctcctagaacaaaaccgccctgactttacagggggaacactcatgctgagctgagaaagcagagaagtggcgtgggagccagctgggggtgaagagcatttgggccagtcccgtggcccccttcagattcctcaagcaggattgttctgttctaaaaagctgttgcacagcattcgcaatgagatctttagttggcggattttctggaacatttgtttttcaacttgtcccgacattttttttctgtttctattctgagagagagatgatcaagttttaatttgggtataggttaaatggaagaagaaacagaacttcatggccaaagtagacctatagattttgattgggttctttgttaacagtagaatgcgatctttgccactgactgtagtattaataaggttttaatgtgagatattcctgcaaaccatcccatttctactgattgtaagtcagaatttcttttatccctttcaaatcagtttctacatgtttaagtgttcagggcttcatcagcatgagaagtttgtaattactgaaagtctgatttcattcaggacacattttttccttcatattttttctgtgaatttataggctaggaaggctattgaagcctcaattatgggtcttcattttgagatcgttttctatgagctgaactgaggatatcaatggttatctcaaaatcgtcttttaggagatccccaattgactcagagtttgaggagttagtatcacagaattagatttttttaaagcatttgtacgtttccattcccaaatatgtagctgtggttcttgaaaacacatcctacattgcatatgggcatagcagtttttgacccaggcagaataagttaatatttaattaaatattgctttgaagatggcgctctgggcatgagcatggggctccatgacttcccttctatccccatgagcccctcctccatccagcgacaagccatgggcatgcatacaatgcagcaagaccaacacaagagcaatattgaattgttcattctatctaaaattacatgtatataaaatatataatttatcttcctgcatttttgaagtataaagtcataaattgtacatatctgtaagctagtatatttgtttcactgtttgtaatatttaagaaatgctcattctttgtagaacaaaaatgtattaaatattttaaaaattgctctgtgatacttaatttttttccccaaaatttgtaatgtgttgcttctacataagttctctggaaatatctacaactaataggacacatgtaaatccttgaagacacatcctggaattcataccccacaaggacagtgtgtatacaaagtatttgcagagcatgacttttatatgtgtgggatatcaatgtgtatatttatatttaaagtgtatttattgttacaagtctattctctattatattttatttactctgcggttataaaaatcacccttgcatacaagtttctagttgccagtgatgttctggaaataatgggagatattacaataaagctacagttatgacaccctg

SEQ ID NO: 193979 - DNA, 600 bp, Artificial Sequence
  derived and/or modified sequence
atgccggaacagtccaatgactacagagtggctgtctttggtgctggcggagtcggtaagtcttcactcgtcttgcgattcgtaaaaggaacattccgagagtcgtacatcccaaccgtcgaggatacctataggcaggtgatctcatgcgacaaaagcatctgtactctgcagatcactgacacaactggctcccatcaattccctgccatgcagcggctctcgatatcaaaagggcacgcattcatcctggtatacagcattacttcccgccaatccctggaggagctgaaacctatctatgaacagatctgtgaaatcaagggcgacgttgagagtattcctatcatgctggttggaaataaatgcgatgaaagcccctcacgcgaagtgcagtctagcgaggccgaagccctcgcccgaacctggaaatgtgcttttatggagacctcggccaaactgaaccataatgtgaaagagcttttccaggagctcctcaacctggaaaaaaggagaactgtttctctgcagatagatggcaaaaaaagtaagcagcagaagagaaaagaaaaactgaaggggaagtgcgttatcatgtag

SEQ ID NO: 193980 - DNA, 600 bp, Artificial Sequence
  derived and/or modified sequence
atgcctgagcagagcaatgactacagagtggccgtgtttggagctggaggagtgggcaagagcagcctggtgctgcgctttgtgaagggcaccttccgggagagctacatccccaccgtggaggacacctaccggcaggtgatcagctgtgacaagagcatctgcaccctgcagatcacagacaccaccggcagccaccagtttcctgccatgcagaggctgagcatcagcaagggccacgccttcatcctggtgtacagcatcaccagccggcagagcctggaggagctgaagcccatctatgagcagatctgtgagatcaagggagatgtggagagcatccccatcatgctggtgggcaacaagtgtgatgagagccccagccgggaggtgcagagcagcgaggccgaggccctggcccggacctggaagtgtgccttcatggagaccagcgccaagctgaaccacaacgtgaaggagctgttccaggagctgctgaacctggagaagagaagaacagtgtccctgcagattgatggcaagaagagcaagcagcagaagaggaaggagaagctgaagggcaaatgtgtgatcatgtag

SEQ ID NO: 193981 - DNA, 600 bp, Artificial Sequence
  derived and/or modified sequence
atgcccgagcagagcaacgactaccgggtggccgtgttcggcgccggaggcgtgggaaagtctagtcttgtcctgcgatttgttaagggtacttttcgagagtcatatattcccacagtggaggatacctacagacaagtaataagctgcgataagtcaatttgtaccctccagatcacagacacgaccggatcacatcagttccctgcaatgcagcgactgagcatttctaaaggccacgccttcatactggtatattccattacgtccaggcaatctctggaagagcttaagccaatctacgagcagatctgcgagattaaaggcgacgtagagtcaattcctatcatgttggtggggaacaagtgcgacgagagtcccagtagagaggttcagtcctcagaagccgaggctcttgcgaggacctggaagtgcgcttttatggaaacatcagcaaaactgaatcataatgtaaaggagctttttcaggagttactcaatctggagaaacgtaggactgtgagtttacaaattgatggaaagaaatctaaacagcagaagagaaaagagaagttaaaggggaagtgcgtgattatgtag

SEQ ID NO: 193982 - DNA, 600 bp, Artificial Sequence
  derived and/or modified sequence
atgcctgagcagtctaatgattaccgtgtggctgtgttcggtgccggtggtgtcggaaaatcttcactggtgcttcggttcgttaagggcactttccgggagtcttacatccccactgtcgaagacacatatagacaggtgattagctgtgacaagtctatctgcacactgcaaattactgacactacagggtcacatcaattcccagccatgcagcggctctctatcagtaaggggcacgcttttatccttgtttatagcattacctcaagacagtcactagaggagcttaaacccatatatgagcagatctgcgaaatcaagggtgacgtggaatccattccgattatgctggtgggcaataaatgtgacgagtcaccttcacgagaagtgcagagcagtgaagctgaggctctggctcgcacatggaagtgcgcttttatggaaacgagtgccaagctcaaccacaatgtgaaagaattgttccaggagttgttgaacttggaaaagaggcggaccgtctccctgcagatcgatggcaaaaagtccaagcagcagaagagaaaggagaagttaaaaggtaagtgtgtgattatgtag

SEQ ID NO: 193983 - protein, 191 aa, Artificial Sequence
  derived and/or modified sequence
MGKSCKVVVCGQASVGKTSILEQLLYGNHVVGSEMIETQEDIYVGSIETDRGVREQVRFYDTRGLRDGAELPRHCFSCTDGYVLVYSTDSRESFQRVELLKKEIDKSKDKKEVTIVVLGNKCDLQEQRRVDPDVAQHWAKSEKVKLWEVSVADRRSLLEPFVYLASKMTQPQSKSAFPLSRKNKGSGSLDG

SEQ ID NO: 193984 - protein, 229 aa, Artificial Sequence
  derived and/or modified sequence
MGKSCKVVVCGQASVGKTSILEQLLYGNHVVGSEMIETQEDIYVGSIETDRGVREQVRFYDTRGLRDGAELPRHCFSCTDGYVLVYSTDSRESFQRVELLKKEIDKSKDKKEGLTLPPRLECSGMITAHCSLNLPRLRWSSCLSPLLRLQVTIVVLGNKCDLQEQRRVDPDVAQHWAKSEKVKLWEVSVADRRSLLEPFVYLASKMTQPQSKSAFPLSRKNKGSGSLDG

SEQ ID NO: 193985 - protein, 189 aa, Artificial Sequence
  derived and/or modified sequence
MGKSCKVVVCGQASVGKTSILEQLLYGNHVVAMIETQEDIYVGSIETDRGVREQVRFYDTRGLRDGAELPRHCFSCTDGYVLVYSTDSRESFQRVELLKKEIDKSKDKKEVTIVVLGNKCDLQEQRRVDPDVAQHWAKSEKVKLWEVSVADRRSLLEPFVYLASKMTQPQSKSAFPLSRKNKGSGSLDG

SEQ ID NO: 193986 - DNA, 570 bp, Artificial Sequence
  derived and/or modified sequence
atgggcaagagctgcaaggtggtggtgtgcggccaggccagcgtgggcaagaccagcatcctggagcagctgctgtacggcaaccacgtggtggccatgatcgagacccaggaggacatctacgtgggcagcatcgagaccgacagaggcgtgagagagcaggtgagattctacgacaccagaggcctgagagacggcgccgagctgcccagacactgcttcagctgcaccgacggctacgtgctggtgtacagcaccgacagcagagagagcttccagagagtggagctgctgaagaaggagatcgacaagagcaaggacaagaaggaggtgaccatcgtggtgctgggcaacaagtgcgacctgcaggagcagagaagagtggaccccgacgtggcccagcactgggccaagagcgagaaggtgaagctgtgggaggtgagcgtggccgacagaagaagcctgctggagcccttcgtgtacctggccagcaagatgacccagccccagagcaagagcgccttccccctgagcagaaagaacaagggcagcggcagcctggacggctag

SEQ ID NO: 193987 - DNA, 576 bp, Artificial Sequence
  derived and/or modified sequence
atgggaaagagctgtaaggtagtggtgtgtgggcaggcatccgtcggcaagacatctatactagaacagttgctttacgggaatcacgtggtgggttcggaaatgattgaaacccaagaagacatttacgtggggtccatagaaactgatcgaggcgttagagaacaggtgaggttttatgacacccgtgggttgcgcgacggcgcagagctgccccgacattgcttctcctgcacggatggctacgtgctggtgtattcaactgatagcagggaatcattccaaagagtcgagctgcttaaaaaggagatcgacaaatcaaaggataaaaaagaggtcacaatcgtggtcctgggtaacaaatgtgaccttcaggaacagcggcgcgtggaccctgatgtcgcccagcactgggctaagagcgagaaggtgaaactctgggaagtgagtgtcgctgataggcggtcattactcgagccattcgtgtacctggcttccaaaatgacccagccacagagcaagagcgcatttcccttatctcggaagaataagggatctggaagtttggatggatag

SEQ ID NO: 193988 - DNA, 690 bp, Artificial Sequence
  derived and/or modified sequence
atgggcaaatcctgtaaggtggtggtttgcgggcaggcatccgtggggaaaacctccatacttgaacagttactctacgggaaccacgttgtcggctccgagatgatcgaaacacaggaggacatttacgtcgggagcattgaaacagatagaggtgtgcgggagcaggtgcggttttacgacacaaggggcctgcgagatggcgcagaactccctcgtcactgtttttcttgtacggacgggtatgtgctggtgtattccactgatagcagagagtcatttcagcgtgtggagctgctaaaaaaggaaatcgacaagtcaaaggataagaaagaagggctgactctccccccgcgacttgagtgctctggcatgatcacggcacattgttccctgaacctgccacggttgcgctggagtagctgccttagccctttgctgaggctgcaagtcacaatcgtggtcctcggtaacaaatgcgacctccaggagcagaggcgagtcgacccagacgtggcccaacattgggccaagagcgagaaggttaagctgtgggaggtctctgttgcagaccggaggtcgctgctcgagccttttgtatatttggcaagcaagatgacacaacctcagagtaagtccgcattcccgctcagtcgtaagaacaagggcagcggctcactcgatggctag

SEQ ID NO: 193989 - DNA, 576 bp, Artificial Sequence
  derived and/or modified sequence
atggggaagagttgcaaagtcgtggtctgtggccaggccagcgtcggtaagacttccattctggagcagctgttatatggcaatcacgtcgtaggatccgaaatgatcgaaactcaggaggatatctacgtggggagtatcgagaccgatcgcggcgtacgagaacaggtaaggttttatgataccagaggactcagggacggcgctgaactgcccaggcattgcttttcgtgtacagacgggtatgttctcgtttacagcacggactctcgggagagcttccagagggtggaactccttaaaaaggagatcgacaagagcaaagacaagaaagaagtgaccattgtcgtccttggcaataaatgtgacctgcaggaacagcggagagtggatccagacgtggcccagcactgggcaaagagtgagaaggtgaaactatgggaggtcagtgtagccgacagaaggagtttgcttgaaccatttgtctatctggccagcaagatgacccagccccagtctaaatccgcatttccgctctctcgcaagaataagggaagtggttccctcgacggctag

SEQ ID NO: 193990 - DNA, 576 bp, Artificial Sequence
  derived and/or modified sequence
atgggcaaatcctgtaaagttgtggtgtgcgggcaggcgagcgtcggaaaaacatctatcctcgaacaacttctgtacgggaatcatgtggtgggctcagaaatgatagagactcaggaagacatttatgttggaagcattgagactgaccgcggagtgagagagcaggtacgtttctatgacacccgcggcttaagggatggcgccgaactgcccaggcattgcttctcctgcaccgacggctacgttcttgtttactcaactgattccagggaaagttttcagcgggtcgaactgctgaagaaagagatcgataagagtaaagataaaaaagaagtgaccatcgtggtgctggggaacaaatgcgacctccaagagcagaggcgggtggatccagacgtcgcacagcattgggccaagagcgaaaaggtcaaattgtgggaggtatctgtagctgatcggcgatccctgctcgagccttttgtgtacctagcctccaagatgacccagccccagtcaaaatccgcattccccctaagccgcaagaataaaggctcaggcagtctggatgggtag

SEQ ID NO: 193991 - DNA, 570 bp, Artificial Sequence
  derived and/or modified sequence
atgggcaaaagctgcaaggtagtggtatgcggacaagctagcgtcgggaaaacatccatcctggaacagttgctgtatggaaaccacgttgtggctatgatagagacccaggaggatatttacgtgggctcgattgaaacggaccgcggtgtccgggagcaggtgaggttttatgatacgaggggcttgagggacggggcagagctgccccggcattgtttttcgtgcacggatggctacgtccttgtctactccacggattcacgcgagtcatttcaacgagttgagttgcttaaaaaggaaattgacaagtctaaggataagaaggaggttaccattgtcgtgctcggcaataagtgcgatcttcaggagcagaggagggtagaccctgacgtcgcccaacattgggccaaaagtgagaaggtgaaactgtgggaggtatctgtggcggataggcgatctctcctcgagccctttgtgtacctcgcttctaaaatgactcagccccagtccaagagtgcctttccgttgtcaaggaaaaataaaggctcaggctccctagacggctag

SEQ ID NO: 193992 - DNA, 576 bp, Artificial Sequence
  derived and/or modified sequence
atggggaagtcgtgcaaggttgtcgtgtgtggacaggcctccgtcggcaagacctcaatcttagagcagctgctgtatggtaatcacgtggttggttctgaaatgatcgaaactcaggaagatatttacgtagggagcatcgagacagaccgtggcgtgcgggagcaggtgagattttacgacacaaggggcctgcgtgacggcgccgagcttccccgccattgtttctcttgcacggatggctatgtactggtgtattctactgattcacgtgaatcttttcagagagtggagttgctcaagaaggagattgataaatccaaggataagaaggaagtaaccatcgtggtacttgggaacaaatgtgatctgcaggagcaaagacgtgtggaccccgatgtggcccagcactgggctaagtccgaaaaggtcaagctctgggaggtttcagtcgcagacaggcggagtctgcttgaaccatttgtatacctggctagtaaaatgacacagccccagtcgaagagcgcatttccactcagccggaagaacaagggaagcggctctctggacgggtag

SEQ ID NO: 193993 - DNA, 576 bp, Artificial Sequence
  derived and/or modified sequence
atgggcaagagctgcaaggtggtggtgtgtggccaggcctctgtgggcaagaccagcatcctggagcagctgctgtatggcaaccacgtggtgggcagcgagatgattgagacccaggaggacatctacgtgggcagcattgaaacagaccggggcgtgcgggagcaggtgcgcttctatgacacccggggcctgagagatggagctgagctgcccaggcactgcttcagctgcacagatggctacgtgctggtgtacagcacagacagccgggagagcttccagagggtggagctgctgaagaaggagattgacaagagcaaggacaagaaggaggtgaccatcgtggtgctgggcaacaagtgtgacctgcaggagcagaggagagtggaccctgatgtggcccagcactgggccaagtctgagaaggtgaagctgtgggaggtgtctgtggccgaccggcgcagcctgctggagccctttgtgtacctggccagcaagatgacccagccccagagcaagagcgccttccccctgagcaggaagaacaagggcagcggcagcctggatggatag

SEQ ID NO: 193994 - DNA, 690 bp, Artificial Sequence
  derived and/or modified sequence
atgggcaagagctgcaaggtggtggtgtgtggccaggcctctgtgggcaagaccagcatcctggagcagctgctgtatggcaaccacgtggtgggcagcgagatgattgagacccaggaggacatctacgtgggcagcattgaaacagaccggggcgtgcgggagcaggtgcgcttctatgacacccggggcctgagagatggagctgagctgcccaggcactgcttcagctgcacagatggctacgtgctggtgtacagcacagacagccgggagagcttccagagggtggagctgctgaagaaggagattgacaagagcaaggacaagaaggagggcctgaccctgcccccccggctggagtgcagcggcatgatcacagcccactgcagcctgaacctgccccggctgcgctggagcagctgcctgagccccctgctgcggctgcaggtgaccatcgtggtgctgggcaacaagtgtgacctgcaggagcagaggagagtggaccctgatgtggcccagcactgggccaagtctgagaaggtgaagctgtgggaggtgtctgtggccgaccggcgcagcctgctggagccctttgtgtacctggccagcaagatgacccagccccagagcaagagcgccttccccctgagcaggaagaacaagggcagcggcagcctggatggatag

SEQ ID NO: 193995 - DNA, 570 bp, Artificial Sequence
  derived and/or modified sequence
atgggcaagagctgcaaggtggtggtgtgtggccaggcctctgtgggcaagaccagcatcctggagcagctgctgtatggcaaccacgtggtggccatgattgagacccaggaggacatctacgtgggcagcattgaaacagaccggggcgtgcgggagcaggtgcgcttctatgacacccggggcctgagagatggagctgagctgcccaggcactgcttcagctgcacagatggctacgtgctggtgtacagcacagacagccgggagagcttccagagggtggagctgctgaagaaggagattgacaagagcaaggacaagaaggaggtgaccatcgtggtgctgggcaacaagtgtgacctgcaggagcagaggagagtggaccctgatgtggcccagcactgggccaagtctgagaaggtgaagctgtgggaggtgtctgtggccgaccggcgcagcctgctggagccctttgtgtacctggccagcaagatgacccagccccagagcaagagcgccttccccctgagcaggaagaacaagggcagcggcagcctggatggatag

SEQ ID NO: 193996 - DNA, 1644 bp, Artificial Sequence
  derived and/or modified sequence
agcctacaccgactctggaggaagactggagcctttgcggcggcgctgcccctcccctggtccccgcgagctcggagggcccggctggtgctgcgggggccccgggaggtacggacctgggaggcgaggctcgtccggcgctaggatcggcctccgcctccgggccgctttaggttgaaaactaagcatggggaagagctgcaaggtggtcgtgtgtggccaggcgtctgtgggcaaaacttcaatcctggagcagcttctgtatgggaaccatgtagtgggttcggagatgatcgagacgcaggaggacatctacgtgggctccattgagacagaccggggggtgcgagagcaggtgcgtttctatgacacccgggggctccgagatggggccgaactgccccgacactgcttctcttgcactgatggctacgtcctggtctatagcacagatagcagagagtcttttcagcgtgtggagctgctcaagaaggagattgacaaatccaaggacaagaaggaggtcaccatcgtggtccttggcaacaagtgtgacttacaggagcagcggcgtgtagacccagatgtggctcagcactgggccaagtcagagaaggtgaagctgtgggaggtgtcagtggcggaccggcgctccctcctggagccctttgtctacttggccagcaagatgacgcaaccccagagcaagtctgccttccccctcagccggaagaacaagggcagcggctccttggatggctgaagagctgccgttcctctttcacgatcccagccccatttcagtgtctggggctctggtagatgtgttgagggcaaagtagaggacaagctgtctttcccagtcagccagggagctccccgccaggccacgccccagccactttgctccctctcacctctgggaagtgcaaatactcttggttgacatccccttcctcagccctcccagcctactccccatcccagcttttagaggatctgctccactgtctcctggggcagttgtgggtcactgtcccttccagctgccccagacaggaagcagagtcaccacgcagcagtgtcccttcttgggtctgagttcctattataggtaggggccccaccctctgggcttcccatcagcgacacacacacacttatggcaccagcctggactccagaaaaagggtgtccaggtattgtgtgtatgcatttagttgtgcacacacaaatatgctcctatactggcattaggcgtctcctcatccctcaccctgacctttctcctgtccttttcttggctggaagaagttggcctcctgggagtgtagttttctgttttaaatcccccacccctggctgggctcagtggctcacccctgtaatcccagcactttgggaggccaaggcgggtcgattacttgaggtcaggagttcacgaccagcctggccaacattgtgaaaccccatctctgccaaaaatacaaaagttagccgggcgtagtggcacatgcctgtaatcccagctacccggggaggctgaggcaggagaattgcttgaactcagaaggcggaggctgcagtgagccgagatcgtgccactgcactccagcctggtcaacagagcaagactccatctcg

SEQ ID NO: 193997 - DNA, 1598 bp, Artificial Sequence
  derived and/or modified sequence
agcctacaccgactctggaggaagactggagcctttgcggcggcgctgcccctcccctggtccccgcgagctcggagggcccggctggtgctgcgggggccccgggagcgtgcttctgttcttcaaggttgaaaactaagcatggggaagagctgcaaggtggtcgtgtgtggccaggcgtctgtgggcaaaacttcaatcctggagcagcttctgtatgggaaccatgtagtgggttcggagatgatcgagacgcaggaggacatctacgtgggctccattgagacagaccggggggtgcgagagcaggtgcgtttctatgacacccgggggctccgagatggggccgaactgccccgacactgcttctcttgcactgatggctacgtcctggtctatagcacagatagcagagagtcttttcagcgtgtggagctgctcaagaaggagattgacaaatccaaggacaagaaggaggtcaccatcgtggtccttggcaacaagtgtgacttacaggagcagcggcgtgtagacccagatgtggctcagcactgggccaagtcagagaaggtgaagctgtgggaggtgtcagtggcggaccggcgctccctcctggagccctttgtctacttggccagcaagatgacgcaaccccagagcaagtctgccttccccctcagccggaagaacaagggcagcggctccttggatggctgaagagctgccgttcctctttcacgatcccagccccatttcagtgtctggggctctggtagatgtgttgagggcaaagtagaggacaagctgtctttcccagtcagccagggagctccccgccaggccacgccccagccactttgctccctctcacctctgggaagtgcaaatactcttggttgacatccccttcctcagccctcccagcctactccccatcccagcttttagaggatctgctccactgtctcctggggcagttgtgggtcactgtcccttccagctgccccagacaggaagcagagtcaccacgcagcagtgtcccttcttgggtctgagttcctattataggtaggggccccaccctctgggcttcccatcagcgacacacacacacttatggcaccagcctggactccagaaaaagggtgtccaggtattgtgtgtatgcatttagttgtgcacacacaaatatgctcctatactggcattaggcgtctcctcatccctcaccctgacctttctcctgtccttttcttggctggaagaagttggcctcctgggagtgtagttttctgttttaaatcccccacccctggctgggctcagtggctcacccctgtaatcccagcactttgggaggccaaggcgggtcgattacttgaggtcaggagttcacgaccagcctggccaacattgtgaaaccccatctctgccaaaaatacaaaagttagccgggcgtagtggcacatgcctgtaatcccagctacccggggaggctgaggcaggagaattgcttgaactcagaaggcggaggctgcagtgagccgagatcgtgccactgcactccagcctggtcaacagagcaagactccatctcg

SEQ ID NO: 193998 - DNA, 2463 bp, Artificial Sequence
  derived and/or modified sequence
ggcaggcggcgggggcggggcctggaggagcctacaccgactctggaggaagactggagcctttgcggcggcgctgcccctcccctggtccccgcgagctcggagggcccggctggtgctgcgggggccccgggaggttgaaaactaagcatggggaagagctgcaaggtggtcgtgtgtggccaggcgtctgtgggcaaaacttcaatcctggagcagcttctgtatgggaaccatgtagtggctatgatcgagacgcaggaggacatctacgtgggctccattgagacagaccggggggtgcgagagcaggtgcgtttctatgacacccgggggctccgagatggggccgaactgccccgacactgcttctcttgcactgatggctacgtcctggtctatagcacagatagcagagagtcttttcagcgtgtggagctgctcaagaaggagattgacaaatccaaggacaagaaggaggtcaccatcgtggtccttggcaacaagtgtgacttacaggagcagcggcgtgtagacccagatgtggctcagcactgggccaagtcagagaaggtgaagctgtgggaggtgtcagtggcggaccggcgctccctcctggagccctttgtctacttggccagcaagatgacgcaaccccagagcaagtctgccttccccctcagccggaagaacaagggcagcggctccttggatggctgaagagctgccgttcctctttcacgatcccagccccatttcagtgtctggggctctggtagatgtgttgagggcaaagtagaggacaagctgtctttcccagtcagccagggagctccccgccaggccacgccccagccactttgctccctctcacctctgggaagtgcaaatactcttggttgacatccccttcctcagccctcccagcctactccccatcccagcttttagaggatctgctccactgtctcctggggcagttgtgggtcactgtcccttccagctgccccagacaggaagcagagtcaccacgcagcagtgtcccttcttgggtctgagttcctattataggtaggggccccaccctctgggcttcccatcagcgacacacacacacttatggcaccagcctggactccagaaaaagggtgtccaggtattgtgtgtatgcatttagttgtgcacacacaaatatgctcctatactggcattaggcgtctcctcatccctcaccctgacctttctcctgtccttttcttggctggaagaagttggcctcctgggagtgtagttttctgttttaaatcccccacccctggctgggctcagtggctcacccctgtaatcccagcactttgggaggccaaggcgggtcgattacttgaggtcaggagttcacgaccagcctggccaacattgtgaaaccccatctctgccaaaaatacaaaagttagccgggcgtagtggcacatgcctgtaatcccagctacccggggaggctgaggcaggagaattgcttgaactcagaaggcggaggctgcagtgagccgagatcgtgccactgcactccagcctggtcaacagagcaagactccatctcgaagaaaaaaaaaaaaaattccccacccctaccaattgttttacttcctcttcctgctcagggagcagatgggcctcactggttgagatggaatagaataactgggctatgagtcaccagcccactttgtgacccagcaagacctttcccctctctgggcatcagtttctcatctgtaagatgaccagagttgcttagatgatctcctagatcctttccagttctcttgatttcgtaaagccaatggcttctccctctttaaggtgctatgccaaccagccctggaggctgggatctgccgctccctccagccaccagggggcaggagtgcactacctgctgtcagtcaccagagtggccgctcagtgcccagcccgccagcctcgctcttggaggctgctctttatcctgcctgtggttttcagctcagagctggacttctatttataagttacctgtatttatatttatatgcccgctctcatggtgaaggctggacaaggtgctcctctggcccctccttcttacctcagatgcctgaacagaacaaggcaaacccgtagcagcctctcaggagctgacaggtcctctttcggggctcaggagggtgggcacacacccagcggcctgcagagtaagcttattacccacaactgtgcccgctttgtgcttctaaggtgcacacctagcctaggtgagacactgcagccaggcaaccaccgacacacgccccttctcaaagccagaggtgagtggggcaggtgcccggggctgggtgagtggaattaggacacacacaggcttgggcttcaagttcatttattgatgcattggttggacacaataaaaccacaattgttatc

SEQ ID NO: 193999 - DNA, 1863 bp, Artificial Sequence
  derived and/or modified sequence
agcctacaccgactctggaggaagactggagcctttgcggcggcgctgcccctcccctggtccccgcgagctcggagggcccggctggtgctgcgggggccccgggaggttgaaaactaagcatggggaagagctgcaaggtggtcgtgtgtggccaggcgtctgtgggcaaaacttcaatcctggagcagcttctgtatgggaaccatgtagtgggttcggagatgatcgagacgcaggaggacatctacgtgggctccattgagacagaccggggggtgcgagagcaggtgcgtttctatgacacccgggggctccgagatggggccgaactgccccgacactgcttctcttgcactgatggctacgtcctggtctatagcacagatagcagagagtcttttcagcgtgtggagctgctcaagaaggagattgacaaatccaaggacaagaaggaggtcaccatcgtggtccttggcaacaagtgtgacttacaggagcagcggcgtgtagacccagatgtggctcagcactgggccaagtcagagaaggtgaagctgtgggaggtgtcagtggcggaccggcgctccctcctggagccctttgtctacttggccagcaagatgacgcaaccccagagcaagtctgccttccccctcagccggaagaacaagggcagcggctccttggatggctgaagagctgccgttcctctttcacgatcccagccccatttcagtgtctggggctctggtagatgtgttgagggcaaagtagaggacaagctgtctttcccagtcagccagggagctccccgccaggccacgccccagccactttgctccctctcacctctgggaagtgcaaatactcttggttgacatccccttcctcagccctcccagcctactccccatcccagcttttagaggatctgctccactgtctcctggggcagttgtgggtcactgtcccttccagctgccccagacaggaagcagagtcaccacgcagcagtgtcccttcttgggtctgagttcctattataggtaggggccccaccctctgggcttcccatcagcgacacacacacacttatggcaccagcctggactccagaaaaagggtgtccaggtattgtgtgtatgcatttagttgtgcacacacaaatatgctcctatactggcattaggcgtctcctcatccctcaccctgacctttctcctgtccttttcttggctggaagaagttggcctcctgggagtgtagttttctgttttaaatcccccacccctggctgggctcagtggctcacccctgtaatcccagcactttgggaggccaaggcgggtcgattacttgaggtcaggagttcacgaccagcctggccaacattgtgaaaccccatctctgccaaaaatacaaaagttagccgggcgtagtggcacatgcctgtaatcccagctacccggggaggctgaggcaggagaattgcttgaactcagaaggcggaggctgcagtgagccgagatcgtgccactgcactccagcctggtcaacagagcaagactccatctcgaagaaaaaaaaaaaaaattccccacccctaccaattgttttacttcctcttcctgctcagggagcagatgggcctcactggttgagatggaatagaataactgggctatgagtcaccagcccactttgtgacccagcaagacctttcccctctctgggcatcagtttctcatctgtaagatgaccagagttgcttagatgatctcctagatcctttccagttctcttgatttcgtaaagccaatggcttctccctctttaaggtgctatgccaaccagccctgg

SEQ ID NO: 194000 - DNA, 576 bp, Artificial Sequence
  derived and/or modified sequence
atgggcaagagctgcaaggtggtggtgtgcggccaggccagcgtgggcaagacctcaatcctcgagcagcttctctatggtaatcatgttgtggggagcgaaatgatagagactcaggaagacatttatgtgggctccatcgaaacagataggggggtgcgtgagcaggtccgcttctacgacactagaggtctgcgagatggagccgagttgcccaggcattgtttttcttgcaccgatgggtacgtcctcgtctactctacagacagcagagagtcatttcagagagtggaactgttaaaaaaggagatagacaaatccaaggataaaaaagaagtgacgattgtggttctgggaaataaatgcgatctgcaggagcagaggagggtggatcctgacgtcgctcagcactgggctaaaagtgagaaggtgaaattgtgggaggtgtctgtcgccgataggcggtctctgctggaaccctttgtatatcttgccagcaaaatgacgcagcctcaatctaaatctgcattccctctgagtagaaaaaataaagggtcaggttcattggacggatag

SEQ ID NO: 194001 - DNA, 690 bp, Artificial Sequence
  derived and/or modified sequence
atgggcaagagctgcaaggtggtggtgtgcggccaggccagcgtgggcaagacaagcattctggagcagctgctgtacggaaatcatgtagttggaagtgagatgatagaaactcaagaggatatctacgtgggatctatcgagactgatcggggtgtgcgtgagcaggttcgcttctatgacacccgcggactgagagatggcgcagagttgccccggcactgcttctcttgcaccgatggatatgtattggtgtacagcaccgattcccgcgaatcgttccaaagagtggagctgttgaagaaagaaatcgataagtctaaagacaagaaggaagggctcacgttgccaccacgattagagtgtagcggcatgataaccgcacactgctcactcaatctcccccggttgcggtggtcttcttgcctctccccacttcttagactacaggtcaccatcgtcgtgctcggaaataagtgtgatcttcaagaacagcggcgcgtggaccccgatgtggcccagcactgggctaagagcgagaaagtgaagctatgggaagtaagtgttgctgacaggcgatcattgctcgagcccttcgtgtacctggccagtaagatgacacagccccagagtaaaagtgcatttcccttgagtcggaagaataagggatctggctcattggatggttag

SEQ ID NO: 194002 - DNA, 576 bp, Artificial Sequence
  derived and/or modified sequence
atgggcaagagctgcaaggtggtggtgtgcggccaggccagcgtgggaaaaacctcaatcctggagcagcttttgtatggaaatcacgtggtaggaagtgaaatgatcgagacacaagaggacatttatgtggggtcgattgagaccgaccggggcgtgcgggaacaggtaagattctatgatactagaggactaagggatggagccgagctgccacgccactgtttctcatgcaccgacgggtatgtccttgtatattctaccgattccagggaaagcttccagcgggttgaactcttaaagaaggagatcgataagagtaaggacaagaaggaggtgacgatagtcgtcctggggaacaaatgtgaccttcaagagcagcgccgagtcgaccccgatgtggcacagcactgggctaagtcagagaaagtgaagttgtgggaggtttccgtggcagatcgaagaagccttctagaaccttttgtctacctcgcctcaaaaatgactcagcctcagtccaagagcgccttccccctctccagaaagaataaggggtccggctctctcgatggatag

SEQ ID NO: 194003 - DNA, 576 bp, Artificial Sequence
  derived and/or modified sequence
atgggcaagagctgcaaggtggtggtgtgcggccaggccagcgtgggaaagacctccattcttgagcagttattgtacggaaaccatgtggtgggctcggagatgatcgagactcaagaagacatctacgtgggctcgatcgagactgaccggggagtgagagagcaggtccggttctatgacactcgggggcttagagacggcgcggagctgccgagacattgcttcagctgtactgacggatacgtcctcgtttacagcaccgactcccgtgaatcctttcagcgggtggagctcctcaaaaaagagattgacaagtcaaaggacaagaaggaggtgaccattgtagtgctgggtaacaaatgcgatctgcaggaacagagacgagttgacccagatgtggcccagcactgggccaagagtgagaaagtgaagttgtgggaagttagtgtggccgatagaaggtctctgctggaacccttcgtgtacctggcgagtaagatgacccagccacaatccaagagtgccttccccctgtctaggaaaaacaaaggctcgggaagtcttgacggctag

SEQ ID NO: 194004 - DNA, 570 bp, Artificial Sequence
  derived and/or modified sequence
atgggcaagagctgcaaggtggtggtgtgcggccaggccagcgtgggaaagactagcattctcgagcaattgttgtacggaaaccacgttgtcgcaatgatcgaaacacaggaagatatctatgtcggctcaatagagaccgaccgcggggttcgtgaacaggtgcggttttacgatacacggggattgagagatggagcagaactgccccgccactgcttctcgtgtacggacggatacgtcttagtctattcgacagactcccgcgaatcctttcagagggtggagctgctgaagaaagaaatagataagtctaaagacaaaaaggaggtcaccatcgttgtgcttggaaataaatgcgatctccaggaacagaggagggtggaccccgatgtggcacagcattgggcaaaatcagaaaaggtcaagctgtgggaggtgagtgtggccgataggaggagcctgctagagccattcgtttacctggccagcaaaatgacccagccgcagtccaagtctgcttttcccctgtccaggaagaacaaaggctcaggctccctggacggctag

SEQ ID NO: 194005 - DNA, 576 bp, Artificial Sequence
  derived and/or modified sequence
atgggcaagagctgcaaggtggtggtgtgcggccaggccagcgtgggtaagacaagtattctggagcaactcttatatggcaaccacgttgtcggaagcgagatgatagagacacaggaggatatttacgtgggatcaattgagactgacagaggtgttcgggagcaggtgcggttctatgatacgaggggcctccgagacggtgcggagcttccgcgtcactgcttttcatgcaccgacgggtatgtgttggtttacagtacagattctcgcgagtccttccagagagtagagttattaaaaaaggagatcgacaagagcaaggacaaaaaagaggtgacaattgtcgtgttaggcaacaagtgcgacctgcaagagcaaagacgcgtcgaccccgatgtggctcaacactgggccaagtccgagaaagtcaaactctgggaggtgtcagttgccgaccggaggtcactgcttgaacccttcgtctatctggcctcaaagatgacccagcctcagtctaagagtgcctttcctctctctagaaaaaataaaggctccggctcattggatggctag

SEQ ID NO: 194006 - DNA, 576 bp, Artificial Sequence
  derived and/or modified sequence
atggggaagagctgtaaggtcgttgtatgcggacaggcctctgtgggaaagacctcaattttagaacagctgctttacggaaaccacgtagtcggttccgagatgatcgagacccaagaggatatctacgtggggtctattgaaacggaccggggagtgagagaacaggttagattctatgatacacgcggattgcgcgacggagcggaactcccccgtcactgcttttcctgtaccgatggctacgtgttggtgtattccacagatagcagagaatcatttcagcgggtggagcttctgaaaaaggaaattgacaaatccaaggataaaaaggaagtgacaatcgtcgtattgggcaataagtgtgacctccaggaacagagacgtgtggaccccgacgtggcccaacattgggcgaagtccgaaaaagtgaaactgtgggaggtatcagtcgctgatcggaggtcactgctcgaaccttttgtgtatctagcatctaaaatgactcagccgcagagcaaaagtgccttcccactgtcccggaagaataagggctccggatcacttgatggatag

SEQ ID NO: 194007 - DNA, 690 bp, Artificial Sequence
  derived and/or modified sequence
atgggtaaaagttgtaaagtggttgtgtgtggacaggcaagtgtaggcaagaccagtatcctggaacagttactctatggcaatcacgtggtgggaagcgaaatgatcgaaactcaggaagatatctacgtagggagtattgagaccgatcggggagtccgggaacaggtgagattctacgacaccagaggcctgcgtgacggtgctgagttaccacggcactgcttcagttgcactgacggctatgttctggtgtactcgacggacagtcgggaaagttttcagagggtggaattgctcaaaaaagagatcgacaaaagtaaggacaaaaaggaagggcttacgctccccccaagactcgagtgctctggaatgattactgctcattgtagcttaaacctgccaaggctcagatggagctcttgtctgtctccactgctccgcctgcaggtgacgatcgtcgtgctgggtaacaagtgcgatttacaggagcaaaggcgcgtggatcctgacgtggcacagcactgggccaagagcgagaaagtgaaactgtgggaagtgagcgtcgctgaccggaggtcattgctcgagcctttcgtgtatctggcctctaaaatgacccagccccaatcaaaatctgcattcccactgtcgcgcaaaaataaaggtagtgggtcacttgatgggtag

SEQ ID NO: 194008 - DNA, 576 bp, Artificial Sequence
  derived and/or modified sequence
atggggaagagctgtaaggtggttgtgtgtggacaggcctccgttgggaaaacgagcattttggagcaacttctctatggtaatcatgtggtggggagcgaaatgatcgaaacccaagaagacatttatgtaggaagtatcgaaaccgaccgtggtgttagagagcaggtgcgtttctacgacactcgagggcttcgcgatggcgctgagctgcctcgacactgtttttcatgcacggacgggtatgtcttggtttattctactgattcacgagagtcctttcagagggtcgaactgctgaagaaggagattgacaagagcaaggataagaaggaagtaaccatcgttgtactcggaaacaagtgcgacctacaggagcaaagaagggtggacccagatgtagcacaacactgggctaagtctgaaaaggtgaagctgtgggaggtgagcgtggccgaccgccgaagcctgcttgagcccttcgtgtaccttgcttccaaaatgacccagccgcagtccaagtccgcatttcctcttagccggaagaataagggaagtggctctttggatggatag

SEQ ID NO: 194009 - DNA, 576 bp, Artificial Sequence
  derived and/or modified sequence
atgggcaaatcttgtaaagtggtggtgtgtgggcaagccagtgtcggaaagactagcatactggaacagcttctgtatggcaatcacgtagttgggtcagagatgatcgaaactcaggaagacatttacgttggttcgattgaaaccgatagaggggtccgcgaacaggtcaggttttatgatactcgtggactcagggatggagccgagctacccagacattgcttttcatgcaccgacggttacgtacttgtgtattctacggactccagggagagctttcagcgcgtcgaactgctaaagaaagaaatcgacaagtctaaagacaagaaagaagtgaccattgtagtattggggaataagtgcgacctgcaagaacagcgtcgtgtggatccagacgtagctcaacactgggcaaaatccgagaaggtcaaactgtgggaggtgtcagtcgcagatcgacgatctctcctggaacccttcgtgtatttagcatctaagatgacacagccccagagcaaatcagcttttccccttagcagaaagaataaaggcagcggatccttggatggctag

SEQ ID NO: 194010 - DNA, 570 bp, Artificial Sequence
  derived and/or modified sequence
atggggaaatcctgtaaggtggtcgtgtgtgggcaggccagtgtgggaaaaacctctatactggagcagctactgtacggcaaccacgtcgtggccatgatcgaaacgcaggaggatatctatgtgggaagtatcgagaccgaccggggtgtgcgcgaacaggttcgcttttacgacacacgagggttacgcgatggggctgagctgcctcggcattgtttctcatgcaccgacggatacgtactagtttatagcaccgacagtcgtgaatctttccaacgggtggagcttctaaagaaagagatcgataaaagtaaagacaagaaggaggtcacaatcgttgtgttgggcaataaatgcgacctgcaggaacaaagaagagtagacccggacgtcgcccaacattgggctaaatccgagaaagtcaagctctgggaggtttcggtcgccgacaggcggagcctcctcgagccgtttgtttaccttgcttctaaaatgacccagccacagagtaagtctgcctttccactgtcacgcaaaaacaaaggaagcggttccctagatggctag

SEQ ID NO: 194011 - DNA, 576 bp, Artificial Sequence
  derived and/or modified sequence
atggggaagagctgcaaggtggtggtgtgcgggcaagcctctgttggcaagactagtatcttggagcagctgctctatggaaatcacgtggttggatctgaaatgattgaaacccaggaggacatatatgtgggttcaattgagactgatcgtggcgtgagggagcaagtgagattctatgacacacggggtctcagagacggggcagaactgccccgacactgctttagctgtaccgatgggtacgtcctggtctactccacagactccagggagagcttccaacgtgtggaactgctcaagaaagaaatcgacaaatccaaggacaaaaaggaggtgaccatagtagtgctgggaaataagtgcgaccttcaagagcagcgccgagttgaccccgacgtcgcccagcactgggcaaaaagtgaaaaagtaaaattgtgggaggtctccgtggccgatcgcaggtccctgcttgaaccgttcgtttatctcgctagtaagatgactcagcctcaaagcaagagcgcctttcctcttagtagaaagaacaagggaagcggctccctcgacggatag

SEQ ID NO: 194012 - DNA, 2372 bp, Artificial Sequence
  derived and/or modified sequence
ggcaggcggcgggggcggggcctggaggagcctacaccgactctggaggaagactggagcctttgcggcggcgctgcccctcccctggtccccgcgagctcggagggcccggctggtgctgcgggggccccgggaggttgaaaactaagcatggggaagagctgcaaggtggtcgtgtgtggccaggcgtctgtgggcaaaacttcaatcctggagcagcttctgtatgggaaccatgtagtgggttcggagatgatcgagacgcaggaggacatctacgtgggctccattgagacagaccggggggtgcgagagcagatagcagagagtcttttcagcgtgtggagctgctcaagaaggagattgacaaatccaaggacaagaaggaggtcaccatcgtggtccttggcaacaagtgtgacttacaggagcagcggcgtgtagacccagatgtggctcagcactgggccaagtcagagaaggtgaagctgtgggaggtgtcagtggcggaccggcgctccctcctggagccctttgtctacttggccagcaagatgacgcaaccccagagcaagtctgccttccccctcagccggaagaacaagggcagcggctccttggatggctgaagagctgccgttcctctttcacgatcccagccccatttcagtgtctggggctctggtagatgtgttgagggcaaagtagaggacaagctgtctttcccagtcagccagggagctccccgccaggccacgccccagccactttgctccctctcacctctgggaagtgcaaatactcttggttgacatccccttcctcagccctcccagcctactccccatcccagcttttagaggatctgctccactgtctcctggggcagttgtgggtcactgtcccttccagctgccccagacaggaagcagagtcaccacgcagcagtgtcccttcttgggtctgagttcctattataggtaggggccccaccctctgggcttcccatcagcgacacacacacacttatggcaccagcctggactccagaaaaagggtgtccaggtattgtgtgtatgcatttagttgtgcacacacaaatatgctcctatactggcattaggcgtctcctcatccctcaccctgacctttctcctgtccttttcttggctggaagaagttggcctcctgggagtgtagttttctgttttaaatcccccacccctggctgggctcagtggctcacccctgtaatcccagcactttgggaggccaaggcgggtcgattacttgaggtcaggagttcacgaccagcctggccaacattgtgaaaccccatctctgccaaaaatacaaaagttagccgggcgtagtggcacatgcctgtaatcccagctacccggggaggctgaggcaggagaattgcttgaactcagaaggcggaggctgcagtgagccgagatcgtgccactgcactccagcctggtcaacagagcaagactccatctcgaagaaaaaaaaaaaaaattccccacccctaccaattgttttacttcctcttcctgctcagggagcagatgggcctcactggttgagatggaatagaataactgggctatgagtcaccagcccactttgtgacccagcaagacctttcccctctctgggcatcagtttctcatctgtaagatgaccagagttgcttagatgatctcctagatcctttccagttctcttgatttcgtaaagccaatggcttctccctctttaaggtgctatgccaaccagccctggaggctgggatctgccgctccctccagccaccagggggcaggagtgcactacctgctgtcagtcaccagagtggccgctcagtgcccagcccgccagcctcgctcttggaggctgctctttatcctgcctgtggttttcagctcagagctggacttctatttataagttacctgtatttatatttatatgcccgctctcatggtgaaggctggacaaggtgctcctctggcccctccttcttacctcagatgcctgaacagaacaaggcaaacccgtagcagcctctcaggagctgacaggtcctctttcggggctcaggagggtgggcacacacccagcggcctgcagagtaagcttattacccacaactgtgcccgctttgtgcttctaaggtgcacacctagcctaggtgagacactgcagccaggcaaccaccgacacacgccccttctcaaagccagaggtgagtggggcaggtgcccggggctgggtgagtggaattaggacacacacaggcttgggcttcaagttcatttattgatgcattggttggacacaataaaaccacaattgttatc

SEQ ID NO: 194013 - DNA, 2945 bp, Artificial Sequence
  derived and/or modified sequence
cgccgcgccgcttcccccacctcgcaccagacctctgaaattgccctcggagactcggcctctcctataaggacgatcgtcctctcagctggagaacaaggccatgcctcagctcctacgccaggcggaagcgggagaggaaggccgacccccaagagcgccccttcagggggtccatccggccttgatctcagatgggggggtgtttgcggagggcggggcatcgcctcaacagctgggggctgcatcatggcaggaacgagtttccctgagccacggagctgcaggtcgcctcctctactaccctgctacccggttacctcttcgcctcttggtcgtcgagcagctccggctcggtcgccgccattaccacatcgcactccgcggcagccgccatcttaccgccgggaccagagagctgggtgggaggccggcggtgaagagcacttccggttggagcatagagcagctccgcggcgccgcgcccagaagggctccctcgggctcgtctaccagagagaggctccgcttggggccagagcggcctcccgcccccggatgtccacggtggtctccgcgccggggcgggagcccaggggctgtgccggttgaaaactaagcatggggaagagctgcaaggtggtcgtgtgtggccaggcgtctgtgggcaaaacttcaatcctggagcagcttctgtatgggaaccatgtagtgggttcggagatgatcgagacgcaggaggacatctacgtgggctccattgagacagaccggggggtgcgagagcaggtgcgtttctatgacacccgggggctccgagatggggccgaactgccccgacactgcttctcttgcactgatggctacgtcctggtctatagcacagatagcagagagtcttttcagcgtgtggagctgctcaagaaggagattgacaaatccaaggacaagaaggaggtcaccatcgtggtccttggcaacaagtgtgacttacaggagcagcggcgtgtagacccagatgtggctcagcactgggccaagtcagagaaggtgaagctgtgggaggtgtcagtggcggaccggcgctccctcctggagccctttgtctacttggccagcaagatgacgcaaccccagagcaagtctgccttccccctcagccggaagaacaagggcagcggctccttggatggctgaagagctgccgttcctctttcacgatcccagccccatttcagtgtctggggctctggtagatgtgttgagggcaaagtagaggacaagctgtctttcccagtcagccagggagctccccgccaggccacgccccagccactttgctccctctcacctctgggaagtgcaaatactcttggttgacatccccttcctcagccctcccagcctactccccatcccagcttttagaggatctgctccactgtctcctggggcagttgtgggtcactgtcccttccagctgccccagacaggaagcagagtcaccacgcagcagtgtcccttcttgggtctgagttcctattataggtaggggccccaccctctgggcttcccatcagcgacacacacacacttatggcaccagcctggactccagaaaaagggtgtccaggtattgtgtgtatgcatttagttgtgcacacacaaatatgctcctatactggcattaggcgtctcctcatccctcaccctgacctttctcctgtccttttcttggctggaagaagttggcctcctgggagtgtagttttctgttttaaatcccccacccctggctgggctcagtggctcacccctgtaatcccagcactttgggaggccaaggcgggtcgattacttgaggtcaggagttcacgaccagcctggccaacattgtgaaaccccatctctgccaaaaatacaaaagttagccgggcgtagtggcacatgcctgtaatcccagctacccggggaggctgaggcaggagaattgcttgaactcagaaggcggaggctgcagtgagccgagatcgtgccactgcactccagcctggtcaacagagcaagactccatctcgaagaaaaaaaaaaaaaattccccacccctaccaattgttttacttcctcttcctgctcagggagcagatgggcctcactggttgagatggaatagaataactgggctatgagtcaccagcccactttgtgacccagcaagacctttcccctctctgggcatcagtttctcatctgtaagatgaccagagttgcttagatgatctcctagatcctttccagttctcttgatttcgtaaagccaatggcttctccctctttaaggtgctatgccaaccagccctggaggctgggatctgccgctccctccagccaccagggggcaggagtgcactacctgctgtcagtcaccagagtggccgctcagtgcccagcccgccagcctcgctcttggaggctgctctttatcctgcctgtggttttcagctcagagctggacttctatttataagttacctgtatttatatttatatgcccgctctcatggtgaaggctggacaaggtgctcctctggcccctccttcttacctcagatgcctgaacagaacaaggcaaacccgtagcagcctctcaggagctgacaggtcctctttcggggctcaggagggtgggcacacacccagcggcctgcagagtaagcttattacccacaactgtgcccgctttgtgcttctaaggtgcacacctagcctaggtgagacactgcagccaggcaaccaccgacacacgccccttctcaaagccagaggtgagtggggcaggtgcccggggctgggtgagtggaattaggacacacacaggcttgggcttcaagttcatttattgatgcattggttggacacaataaaaccacaattgttatcaaaaa

SEQ ID NO: 194014 - DNA, 833 bp, Artificial Sequence
  derived and/or modified sequence
tggagcctttgcggcggcgctgcccctcccctggtccccgcgagctcggagggcccggctggtgctgcgggggccccgggaggttgaaaactaagcatggggaagagctgcaaggtggtcgtgtgtggccaggcgtctgtgggcaaaacttcaatcctggagcagcttctgtatgggaaccatgtagtgggttcggagatgatcgagacgcaggaggacatctacgtgggctccattgagacagaccggggggtgcgagagcaggtgcgtttctatgacacccgggggctccgagatggggccgaactgccccgacactgcttctcttgcactgatggctacgtcctggtctatagcacagatagcagagagtcttttcagcgtgtggagctgctcaagaaggagattgacaaatccaaggacaagaaggagggtctcactctgccacccaggctggagtgcagtggcatgatcacagctcactgcagcctcaacctcccaaggcttaggtggtcctcctgcctcagccccctgctaagactacaggtcaccatcgtggtccttggcaacaagtgtgacttacaggagcagcggcgtgtagacccagatgtggctcagcactgggccaagtcagagaaggtgaagctgtgggaggtgtcagtggcggaccggcgctccctcctggagccctttgtctacttggccagcaagatgacgcaaccccagagcaagtctgccttccccctcagccggaagaacaagggcagcggctccttggatggctgaagagctgccgttcctctttcacgatcccagccccatttcagtgtctg

SEQ ID NO: 194015 - DNA, 576 bp, Artificial Sequence
  derived and/or modified sequence
atgggcaagagctgcaaggtggtggtgtgcggccaggccagcgtgggcaagaccagcatcctggagcagctgctgtacggcaaccacgtggtgggcagcgagatgatcgagacccaggaggacatctacgtgggcagcatcgagaccgacagaggcgtgagagagcaggtgagattctacgacaccagaggcctgagagacggcgccgagctgcccagacactgcttcagctgcaccgacggctacgtgctggtgtacagcaccgacagcagagagagcttccagagagtggagctgctgaagaaggagatcgacaagagcaaggacaagaaggaggtgaccatcgtggtgctgggcaacaagtgcgacctgcaggagcagagaagagtggaccccgacgtggcccagcactgggccaagagcgagaaggtgaagctgtgggaggtgagcgtggccgacagaagaagcctgctggagcccttcgtgtacctggccagcaagatgacccagccccagagcaagagcgccttccccctgagcagaaagaacaagggcagcggcagcctggacggctag

SEQ ID NO: 194016 - DNA, 690 bp, Artificial Sequence
  derived and/or modified sequence
atgggcaagagctgcaaggtggtggtgtgcggccaggccagcgtgggcaagaccagcatcctggagcagctgctgtacggcaaccacgtggtgggcagcgagatgatcgagacccaggaggacatctacgtgggcagcatcgagaccgacagaggcgtgagagagcaggtgagattctacgacaccagaggcctgagagacggcgccgagctgcccagacactgcttcagctgcaccgacggctacgtgctggtgtacagcaccgacagcagagagagcttccagagagtggagctgctgaagaaggagatcgacaagagcaaggacaagaaggagggcctgaccctgccccccagactggagtgcagcggcatgatcaccgcccactgcagcctgaacctgcccagactgagatggagcagctgcctgagccccctgctgagactgcaggtgaccatcgtggtgctgggcaacaagtgcgacctgcaggagcagagaagagtggaccccgacgtggcccagcactgggccaagagcgagaaggtgaagctgtgggaggtgagcgtggccgacagaagaagcctgctggagcccttcgtgtacctggccagcaagatgacccagccccagagcaagagcgccttccccctgagcagaaagaacaagggcagcggcagcctggacggctag

SEQ ID NO: 194017 - DNA, 576 bp, Artificial Sequence
  derived and/or modified sequence
atgggaaagagttgtaaagtggtggtctgtggtcaggcctctgtaggaaaaacatcgattcttgaacagttgctgtatgggaatcatgtggtcggaagcgaaatgattgaaacccaagaagatatctacgtcggatccatcgaaacggaccggggagttagagaacaggttcgattctacgacactcgagggttgcgggatggcgccgagctcccccgccattgcttctcctgcactgatggctacgtcttggtttatagcacagatagtcgcgagtcattccagcgggtggaactgctgaagaaggaaattgacaaaagtaaggataagaaggaggtcacaatcgtggtcctgggaaataaatgcgaccttcaggaacagagaagggtggacccagacgtggcgcagcattgggccaagtccgaaaaagtgaagctgtgggaggtgtccgtcgccgatcgacgctcgctccttgagccatttgtttacctggcaagcaagatgacccaaccccagtctaaaagtgccttccctctgtcccggaagaataaaggatctggttcattggacggatag

SEQ ID NO: 194018 - DNA, 576 bp, Artificial Sequence
  derived and/or modified sequence
atgggcaagagctgcaaggtggtggtgtgcggccaggccagcgtgggtaaaacctctatcctcgagcaactcttatatgggaaccacgtcgtgggctctgagatgatcgaaacccaggaggacatttatgtcggcagcatcgagaccgacaggggggttagagaacaggtgaggttctatgacacgcgaggactaagagacggggccgagctgcccaggcactgcttcagttgtactgatggatatgttcttgtctatagtactgacagtagggaatcttttcagcgggtggagttgttgaagaaagagatcgataaaagcaaagacaagaaggaggtcaccattgtcgtgctgggtaacaaatgtgatcttcaggaacagcggagggtggatccagacgtagctcagcactgggccaagtcggagaaggtcaaactctgggaagtgtcggtggcggacagaaggagcctgctcgaaccttttgtgtatcttgcgtctaagatgacacagccacagagcaaatctgctttccccctgagtcgaaaaaacaagggatcaggctcactggatggctag

SEQ ID NO: 194019 - DNA, 576 bp, Artificial Sequence
  derived and/or modified sequence
atggggaagagctgcaaggtcgtggtttgcggtcaggcatctgtcgggaaaacgtcgatcctcgagcagctgctttacggtaaccatgttgtcggcagtgagatgatcgaaacccaggaggatatatacgtggggagtatcgagactgaccgcggtgtaagggaacaagtccgcttctacgataccagaggacttagggacggagctgagctgccacggcattgcttcagttgtactgacggatacgtactcgtgtactctaccgattcccgggagtctttccagcgcgtcgagctgttgaagaaggagattgacaagagtaaagataaaaaagaggtgacaatcgtcgtattgggtaacaagtgtgacttgcaagaacaaagacgcgtggacccggacgtggctcagcactgggccaagtctgagaaggtgaaactttgggaggtatcggtcgcggacagacggtccctgctggagccctttgtttaccttgcctccaagatgacacagccccagtccaagagtgccttccccctgtcacggaaaaacaagggctccggttccctggacggctag

SEQ ID NO: 194020 - protein, 1624 aa, Artificial Sequence
  derived and/or modified sequence
MAGQGDCCVKVAVRIRPQLSKEKIEGCHICTSVTPGEPQVLLGKDKAFTYDFVFDLDTWQEQIYSTCVSKLIEGCFEGYNATVLAYGQTGAGKTYTMGTGFDMATSEEEQGIIPRAIAHLFGGIAERKRRAQEQGVAGPEFKVSAQFLELYNEEILDLFDSTRDPDTRHRRSNIKIHEDANGGIYTTGVTSRLIHSQEELIQCLKQGALSRTTASTQMNVQSSRSHAIFTIHLCQMRMCTQPDLVNEAVTGLPDGTPPSSEYETLTAKFHFVDLAGSERLKRTGATGERAKEGISINCGLLALGNVISALGDQSKKVVHVPYRDSKLTRLLQDSLGGNSQTIMIACVSPSDRDFMETLNTLKYANRARNIKNKVVVNQDKTSQQISALRAEIARLQMELMEYKAGKRVIGEDGAEGYSDLFRENAMLQKENGALRLRVKAMQEAIDAINNRVTQLMSQEANLLLAKAGDGNEAIGALIQNYIREIEELRTKLLESEAMNESLRRSLSRASARSPYSLGASPAAPAFGGSPASSMEDASEVIRRAKQDLERLKKKEVRQRRKSPEKEAFKKRAKLQQENSEETDENEAEEEEEERDESGCEEEEGREDEDEDSGSEESLVDSDSDPEEKEVNFQADLADLTCEIEIKQKLIDELENSQRRLQTLKHQYEEKLILLQNKIRDTQLERDRVLQNLSTMECYTEEKANKIKADYEKRLREMNRDLQKLQAAQKEHARLLKNQSRYERELKKLQAEVAEMKKAKVALMKQMREEQQRRRLVETKRNREIAQLKKEQRRQEFQIRALESQKRQQEMVLRRKTQEVSALRRLAKPMSERVAGRAGLKPPMLDSGAEVSASTTSSEAESGARSVSSIVRQWNRKINHFLGDHPAPTVNGTRPARKKFQKKGASQSFSKAARLKWQSLERRIIDIVMQRMTIVNLEADMERLIKKREELFLLQEALRRKRERLQAESPEEEKGLQELAEEIEVLAANIDYINDGITDCQATIVQLEETKEELDSTDTSVVISSCSLAEARLLLDNFLKASIDKGLQVAQKEAQIRLLEGRLRQTDMAGSSQNHLLLDALREKAEAHPELQALIYNVQQENGYASTDEEISEFSEGSFSQSFTMKGSTSHDDFKFKSEPKLSAQMKAVSAECLGPPLDISTKNITKSLASLVEIKEDGVGFSVRDPYYRDRVSRTVSLPTRGSTFPRQSRATETSPLTRRKSYDRGQPIRSTDVGFTPPSSPPTRPRNDRNVFSRLTSNQSQGSALDKGIISPVGGAKGARTAPLQCVSMAEGHTKPILCLDATDELLFTGSKDRSCKMWNLVTGQEIAALKGHPNNVVSIKYCSHSGLVFSVSTSYIKVWDIRDSAKCIRTLTSSGQVISGDACAATSTRAITSAQGEHQINQIALSPSGTMLYAASGNAVRIWELSRFQPVGKLTGHIGPVMCLTVTQTASQHDLVVTGSKDHYVKMFELGECVTGTIGPTHNFEPPHYDGIECLAIQGDILFSGSRDNGIKKWDLDQQELIQQIPNAHKDWVCALAFIPGRPMLLSACRAGVIKVWNVDNFTPIGEIKGHDSPINAICTNAKHIFTASSDCRVKLWNYVPGLTPCLPRRVLAIKGRATTLP

SEQ ID NO: 194021 - DNA, 4875 bp, Artificial Sequence
  derived and/or modified sequence
atggctggccagggtgattgctgtgtcaaggtggctgtccggattaggcctcagctaagcaaggaaaaaatcgaaggatgtcacatctgcactagcgttacgcccggtgagcctcaagtactcctcggcaaagataaggccttcacatatgacttcgtttttgacctcgacacatggcaagaacaaatatatagcacatgtgtttccaagcttatcgagggttgtttcgagggctataacgccacagttctggcctacggacagactggcgccggtaaaacctatacgatgggtactgggttcgatatggccacttccgaagaagaacaaggaatcatccctagggcaattgcccacctgtttggaggcattgcagagcgcaaacgccgggcacaagaacagggggtggcggggcctgaatttaaagtttccgcccagttcctggaactttacaacgaagagatcttggacctgtttgacagtacacgcgaccctgatactcggcatcgccggagtaacataaaaattcatgaagacgctaacggcggcatttacacaacgggagtcacttccaggctgatccacagtcaagaggaactgatacaatgcctcaagcagggcgctctgagccggacaacagcctctactcagatgaacgtccagagttcaaggtcacacgccatctttaccattcatctctgccagatgcggatgtgtacacagcccgacctagtcaacgaggctgtcactggactccctgacggaactcccccatcctctgaatatgaaactttgacggcaaagtttcatttcgtggacctcgccggctcggaacggctgaagcgaacaggcgccaccggcgagagagcgaaggaaggcatctctatcaactgtggcctgttagctcttgggaatgtcatttcggcactgggagaccagagcaaaaaggtggtccacgtgccataccgagattcaaagctgacacggctgctgcaggatagcctgggggggaattctcagaccattatgatcgcgtgcgtctcaccgagtgatcgcgacttcatggagaccttgaacacgctcaaatatgccaaccgggcccggaacataaagaataaagtggtggtgaaccaggataagacatcccagcaaatctccgccctgagggccgagattgcccggcttcaaatggaattaatggaatataaagcaggtaaacgggtgattggcgaagatggggctgagggctactctgacctgttcagggagaatgccatgcttcagaaggaaaatggagcattgaggctcagggtgaaagctatgcaggaggctatcgacgctattaacaaccgcgtaactcagctgatgtcacaggaggcaaacctgctcctggcaaaggccggtgacggcaacgaggctattggggctctcatacagaattatattcgcgagattgaggagctgcgcacaaaattgctggaatcagaggcaatgaatgaatcactgcgcaggtcactctccagggcttcagcgcgatccccttattcacttggcgctagccctgctgcccccgctttcggcggttctcccgctagtagcatggaggacgcgtctgaggtcattaggcgagctaagcaagacctcgaacgactgaaaaagaaggaagtgcgacagagacggaagtcacctgagaaagaagcctttaagaagcgagccaagctgcagcaggagaatagcgaagagactgacgagaatgaggcagaggaggaggaagaagagcgtgacgagagcggctgcgaggaggaagaaggccgagaggacgaggacgaagattccggttccgaggagtcattggtggactcagattcagaccctgaggaaaaggaggtgaacttccaagctgacctagcagatttgacttgtgagattgagatcaagcaaaagctgatagatgaacttgaaaattcccaacgaagactgcagaccttaaagcaccagtacgaagaaaagcttatcctgctgcagaacaagataagagacacccaactagaacgggatcgggtgcttcaaaacctcagcacaatggagtgttacactgaggaaaaggctaataaaattaaagctgattacgagaaaagactccgtgagatgaatcgcgacctacagaagctgcaggctgcccagaaggaacatgcccgtctgctgaagaatcagtcacgttacgagcgtgagttgaagaagcttcaagctgaagttgccgaaatgaagaaagcgaaagtggccctcatgaaacagatgagggaggaacagcagaggaggcgtctggtggagaccaaacgcaatagggagatagcccaactgaagaaagagcagagacgtcaggagttccaaatcagagcacttgaatcacagaagagacagcaggagatggtgttaaggagaaaaactcaagaagttagcgccttgcgtcgccttgccaagccaatgagcgagcgggtggcgggacgggcaggactgaaaccccccatgctggattcaggagccgaggtatctgcatctacaacctcatccgaagccgagtccggagctcgtagtgtgtccagtatcgtacgtcagtggaataggaaaattaaccattttctgggcgatcatccagccccaactgtcaatggtactcggccggcgcggaaaaaattccaaaagaaaggggctagtcagtcgttcagcaaggcagccaggcttaaatggcaatccctggagagacgcatcatcgatatcgtgatgcagcgcatgactatcgtgaacttggaggctgatatggaaaggctgattaaaaagcgggaggagttgtttctgctgcaagaggccttacggagaaaacgagaacggctacaggccgagtcacctgaagaggagaaggggctgcaggaactggcggaggagattgaggtgctggccgccaacatagactatatcaatgatggaatcaccgattgccaagctaccattgtgcaactagaagaaaccaaagaagaattggactctactgatacctcggtagtgatcagtagttgcagccttgctgaggccagactgctgcttgataatttcttaaaggcctcaattgacaagggcttgcaagtagcccagaaggaagcccaaatccgcctgctagaaggacggctgaggcagacggatatggcaggtagctcccagaaccaccttctactcgacgctctgcgggagaaagctgaggcccatccagaactccaagcgttaatttacaacgtccagcaagagaacggatatgcctcgactgatgaggagatatccgagtttagcgaaggcagtttctctcagtctttcacgatgaaaggctccacaagtcatgatgattttaaatttaagagtgagcctaaactgagtgcgcagatgaaggccgtgtccgcagagtgcctgggaccccctttagacatatccactaagaacatcaccaagtccttggccagcctagtcgaaataaaggaagacggcgtgggtttcagtgtgcgcgatccttactaccgggaccgcgtcagcaggacagttagtctaccaaccaggggatcaacttttcccagacaatctagggctaccgaaacatctcccttgactaggcgtaagtcctatgataggggtcagccgatccgttctaccgatgtgggcttcacaccaccctcttcgcctccaacgcggcctagaaatgataggaacgtgttttctcgcctcacttcgaaccagtcccaagggagcgctctggataagggtatcatctctccagtcggaggagccaagggcgctcgcactgctccattgcagtgcgtgtctatggctgaggggcatacaaaaccaatactttgtttagacgccaccgacgagctgctgttcaccggatccaaggatcggtcctgtaagatgtggaacttggtgaccgggcaggagatagccgccctgaaggggcaccctaataacgtggtgagcattaagtactgttcccacagcgggttggtgtttagcgtaagtacaagctacattaaagtatgggatattcgggactccgctaaatgcatccgtaccctgacttcgtctggccaggtcatttccggggacgcatgcgcggctaccagcacccgggccatcacaagcgcacagggcgagcaccagatcaaccaaattgccctgtccccaagcgggacaatgttatatgctgcctccggaaatgcggtgaggatctgggaattgtctaggttccagccagttgggaagctgacagggcatatcgggccagtgatgtgtctgaccgtgactcagaccgcatcacagcacgacttggtcgtcactggatccaaagaccactacgtcaagatgttcgagttgggagaatgcgtaacagggaccatagggccgacacataattttgaacccccacactatgacggcatcgagtgcctcgctatccagggcgacattttgttcagtggatccagagacaatggtatcaagaaatgggatctagatcagcaggaactaattcagcagatacctaacgcccataaggactgggtgtgtgctctggcttttattcccgggagaccaatgttgctatccgcctgccgcgcaggtgtcataaaagtctggaatgttgacaatttcactcccatcggggagatcaagggccacgacagtcctatcaacgcgatttgcaccaacgcgaagcatatttttaccgcgtcatcggactgtcgggtgaagttgtggaactacgtgcctgggctcaccccttgcctgccgagaagggtgctcgctatcaaaggtcgcgccacaaccctgccatag

SEQ ID NO: 194022 - DNA, 9895 bp, Artificial Sequence
  derived and/or modified sequence
gggaggtggctgccgggtgggaggtgtgtgcgcgtgtgccgcgccgtagggagcggcgggtcgcgccgccggctgtcagctagctccgcgccgccgcccgatggcgcgaggaggcgcgcgggcccagccccggggggccggccgcgggtgagcccctcggcctgccgcccgcgagcatgtcacctccagccgccgccgccgcagcctccgccagccgcgcccgcgcccccgcctcccgcagccgcagccgctgcctcgggcattggcccccagacccccgcctctgatccacgcccagaccctagctccagagggccatggccggccagggggactgctgcgtcaaggtggccgtcaggatccggccccagctgtcgaaggagaagattgagggctgtcacatctgtacctctgttaccccgggagagccccaggtcctgctggggaaggacaaggccttcacctatgactttgtcttcgacctggacacctggcaagaacagatctattccacctgtgtgagcaagctcatcgagggctgcttcgagggctataatgccacggtgctggcctatgggcagacgggggccgggaagacgtacaccatgggcactggctttgacatggcaacgtcggaggaggagcagggcatcatcccgagggccatcgcacacctctttgggggcattgccgagcgcaagcgccgggcacaggagcagggcgtggctggacctgagttcaaagtcagcgcccagtttctggagctctacaacgaggagatccttgacctgtttgacagcacccgtgaccctgacacccgccaccgcaggtccaacatcaagatccacgaggacgcaaacggtggcatctacaccactggcgtcacttctcgcctcatccactcccaggaggagctgatccagtgcctgaagcagggggccctgtcccgcaccacagccagcacccagatgaacgtgcagagctcacgctcccacgccatcttcaccatccacctgtgccagatgcgcatgtgcacccagcccgacctggtgaatgaggcggtgactgggcttcctgatggtacacctccctcgagtgagtatgagacactcactgctaagtttcactttgtggacctggccggctcagagcggctgaagcggacaggggctactggcgagcgggccaaggagggcatctccatcaactgtggcctgctggccttgggcaatgtgatcagcgccttaggggaccagagcaagaaggtggtgcacgttccctacagggactccaagctcactcggctcctccaggattcgctggggggcaacagccagaccatcatgatcgcctgtgtgagcccctcagaccgagatttcatggagaccctcaacacactcaaatatgccaatcgggcccgcaacatcaagaacaaggtggtagtgaaccaggacaagaccagccagcaaatcagtgcactgcgggctgagattgctcggctgcagatggagctgatggagtataaggcgggcaagcgagtgataggagaggatggcgctgagggctatagtgatctgttccgagagaatgccatgctacagaaggagaatggggccctgcggctgcgggtgaaagccatgcaggaggccatcgatgccatcaacaaccgcgtcacccagctcatgagccaggaggccaacctgctgctagccaaggccggcgatggcaatgaggccattggtgcgctgatccagaactacatccgggagatcgaggagctacggactaagcttctagagagtgaagccatgaacgagtccctgcgccgcagcctctcacgggcctcggctaggagcccctactccctgggtgcttctccagccgccccggccttcgggggcagccctgccagctccatggaggatgcctcggaggtgatccgcagggccaagcaggacctggagcggctaaagaagaaggaggtcaggcagcggaggaagagccccgagaaggaagccttcaaaaagagggcaaaactccaacaggagaacagcgaggagacggatgagaacgaggcggaggaggaggaggaagagcgagacgagagtggctgtgaggaggaggaagggcgcgaggatgaagatgaggactcgggcagtgaagagagcctggtggactcagactcagaccccgaggagaaggaggtgaacttccaggcggacctggccgacctgacttgtgagatcgaaatcaagcagaagctgatcgacgagctggagaacagccagcggcggttgcagacgctcaagcaccagtatgaggaaaagctgattctgctgcagaacaagatccgagacacacagctggagcgcgaccgtgtgctgcagaacctcagcaccatggagtgctatactgaggagaaggccaacaagatcaaggcagactatgagaagaggctgcgggagatgaaccgggacctgcagaagctgcaggccgcccagaaagagcacgcccggctgcttaagaaccagtcgcgctacgagagggagctgaagaagctacaggccgaggtggctgagatgaagaaggccaaggtggccctgatgaagcagatgcgtgaggagcaacagcggcggcggctagtggagaccaagaggaaccgggagatcgcacagctcaagaaggagcagcggcgacaggagtttcagatccgagctctggagtcccagaagcggcagcaggagatggtcctgaggaggaagacccaggaggtttctgcactgaggcgcctggccaagcccatgtctgagcgggtggcagggcgtgcaggactaaagccacccatgctggactctggggctgaggtgtcggccagcactacctcatctgaggctgaatcaggggcccgctctgtctccagcatcgtgcgccagtggaaccgcaaaatcaaccacttcttgggggaccatcctgcgcccactgtcaatggcacccgtcctgcccgaaagaagttccagaagaagggggccagccagagcttcagtaaggcggcaaggctcaagtggcagtccctggagcgacggatcattgacatcgtcatgcagagaatgaccattgtcaacctggaggctgacatggagcggctcatcaagaaaagggaggagctgttcctcctgcaggaggcactgcggaggaagcgggagcggctgcaggctgagagccccgaggaagagaaggggctgcaggagctggctgaggagatcgaggtgctggcagccaacattgactacatcaatgacggcatcaccgactgccaggccaccatcgtgcagctggaggagaccaaggaggagctggactccacagacacatccgtggtcatcagctcctgctccctggctgaagcccgcctcctgctagacaacttcctcaaggcatccattgacaaggggctgcaagtggcacaaaaggaagcccagatccggctgttggagggccgactgaggcagacggatatggcaggctcctcccagaaccatctgctcctggacgccctgcgtgagaaggctgaagctcaccccgagctgcaggccctcatctacaatgtgcagcaggagaatggctacgccagcacagatgaggagatctcagagttctctgagggcagcttctcccagtcattcaccatgaaaggctccaccagccatgacgatttcaagttcaagagcgagcccaaactgtctgcccaaatgaaagctgtgtcggctgagtgcctgggccccccactggatatctccaccaagaacatcaccaagtccctggcctccctcgttgagatcaaagaggacggagtgggcttctctgtccgagacccctattaccgggacagggtctcgcgcaccgtcagtctgcctacccggggcagcactttccctaggcaatctcgagccacagagacgtccccgctgacgagaaggaagtcctacgaccgagggcagcccattaggtccacagatgtgggattcacacccccatcatcccctcccactcggccccgcaatgaccgcaatgtcttctctcgtctcaccagtaatcagagccaggggtcagcgctggacaagggcatcatctccccggttggaggagccaagggtgcacggacggccccactgcagtgtgtctccatggccgaaggccacaccaagcccatcctctgcctggatgccacagatgagttgctattcacagggtccaaagaccgaagctgcaagatgtggaacttggttacgggacaggagatcgcagctctaaagggccaccccaacaacgtggtctccatcaagtactgcagccactcggggcttgtgttctccgtgtccacctcctacatcaaggtgtgggacatccgggactcagccaagtgcattcggactctcacgtcctcgggccaggtgatctcaggggatgcctgtgccgccacatccacccgtgccatcaccagtgctcagggcgagcatcagatcaaccagatcgccctcagcccttcgggcaccatgctgtacgccgcctcgggcaatgccgtccgcatctgggagcttagcaggttccagcctgtcggcaagctgactggccacatcggccctgtgatgtgcctgacggtcacccagacggccagccagcatgacctcgtggtgactggctccaaggaccactacgttaagatgttcgagctgggcgagtgtgtgacgggcaccatcggccccactcacaacttcgagcccccgcactacgatggcatcgagtgtctcgccatccagggagacatcctgttcagtggctcccgagataacggcatcaagaagtgggacctagaccagcaggagctcatccagcaaatccccaatgcgcacaaggactgggtgtgcgccctggccttcatcccgggccgccccatgctgctcagcgcctgccgtgcgggtgtcatcaaggtctggaacgtggacaacttcacacccatcggtgagatcaagggccacgacagtcccatcaatgccatctgcaccaatgccaagcatatcttcacagcctccagtgactgccgggtaaagttgtggaattacgtccctggactcaccccctgccttcctcgccgagtcctggccataaagggccgcgccaccaccctgccctgaccctccccaactctccctgtctcctctttcattcttcccctctttccttttccctctctttccccacttcgatctgagctgcttcttaacggtatgagattattttactccttcttcttcctttcccttcctgtcctgcctggcctagagaggtgccctgcctgtccctcctgcacccaccgtccttttccaagcatgaacagtgggacaggccccaggagatgggtgccagggagcagaagggggagccttcaggcctggacaaaacgaaacacccccccaaaaaaagaaaacccatgacaaagctcccctgggggcctctgagtgcacaggcctctccatctgcccagcaccccaccacctgcagtccacctccccgtaagccatgcttgcctcccagccccaaccacatttggggagtttggggaatccagttcatcctctacttttgggggcagccagccaagcccactgcaagagctgaccggcacccctccactttgtcctccaccccagtgacctgacggtgaagttctggagtgtccggcggttaccccacagcggcccaccctaggagtgaggtcagagggatgcccccggaccctcgaccccagcagcctggacaccatggaagggaagctgtgacccggccgatggggccagctgctctggggacagagggcgtggccccctctcctgccctcctccctctcccttggccttcccacaggacactgttccctcatccctcccctgcctctcaggagcctctgggtgagagagaggctggggaggaaattaagctgtgaagccaaagggcattatcccttcttgttcccctcctggcagtcgtggccacattgtctcctgctgaaccggctctgcccctttctcaggcctttggcccagtggtggagccctgtggggaggtgcagcagcctggccccatcccacccttccgaggagctggcctccccgcttctcccagcccagcctctagagccactgcacctgcctctgagcccaaaaagataagtcctcaggtagctaaggaaaccaggtgtgggcggctgggccttgcagctaacccttaaccctctggcaacccgcagatagccccaactggccccaacagttccctggggtcccttttggatggggccaaggtggagctgctagaaagattcctttggggagatggtcagaaatacttcagttatttattattttgttatttttattttttgctgttgcctcctggaaacggacttgaagtttcttcccctatattctttccctcagctcttgggggccagaaatcccaaagggagtccgctgccccggccctccagggccgcctcctctgtttgctttgcagaggagggaactgctccttcgactctgcagctcaggcctgtccccgacacagcccccagggagtcttctagctacccctggcctctaggccgcctgacgctcagtgccttcctccgttccggggcctggcacccgtgccgggcagccttacaccagccatgcccgcggcaccacatgtgtcttctcactcgcgaggtcttgtgcccagcgcccccgggaaggcgggggcgctcaccccacagcccaggccccggggttctgccccacagtcctgcgtgggccacgtaggaagcagcatgggggctgtgtctgctgggaggtggcttggatggggaggacagcccggcaccctgacccccgcccctccccagccctgcagtcccccactgggccggggagtctctccagcttctctctctctggttattcaggagacacattttcggccttaaaactggcatggagcgcaggccctcccttgcagaaaattatcaaggaagagggagttggcagagtttctctgccccggggctggggacgcggagctccggggaaattgttaaatcagtgttctggcgccccctgttgggggaactctggaattacaggagtgggccttgggggggactgagctccatccctctcccccgccccacccccacccaaagttgcccaccctgtttttccgttgcatcgctggtcttgtgcttcccgcttcagtctgggagccaagagccagccccacctcccttcagaggacgcagtgacttttggactttccagaggtggttctgtgtttctgcccttggctcctctccgtcttgggctggggcacttggagccctctccatgtggcgcccagtgttggggggaggcaggctccagtggaggctgagtgaggcctggtcccttccccgtgccctcctcggagctgccacagaggctaagacggctgtcctgctggtgctggccctgctggatgtggtattgaagtctggggcagctgatagcaggaaggagacccccttggatgctggtctcctgggacctgaacagtctgtcagcaatggctggaaatccttcttcctctggccaccccgggggtgccgggcaacccccttagctctaagatgtggccacaaatctcttcccactcctccccgccaacctgaacagaaagttttgaccttgcaacctgtaagaaagaatccgtccgcatgactgtttacaagcgatagaaacacgtaagactctgtccccttgagctcccacccccgggccggggatgccccacctggggtgactgcactgtagctgcaaggcgtgttcttgcacgaagtgtgatcttatggccctgcgagaggtgctcatcatcatgcccattttctgctgtttctgatgggtcagctacctcacggcggggccagctctgctgtcctggcaagtgtcattgactctctaaacttgaagtccttcaggagccctgagcccaacatccatgagacaccccgagttgtgcttcatgagagttggattctctgcccactctttcagggatgtccaaggtccatgttagggggcaggcccccagctccactcactgcacaagcaccctaaatgttggaagcacaaaatggttgtgatttgagcacaatggcagggtcccgcaggcagacttgacaggcccaggcccgggaggatccccccacgttggctctgtccaaagtgagattgggggtgcctgtgtctgggacagggggctgcccttgctcagaccaggccttggctcatggcttgtcctaattctgggactcgtcatcttacttcttgcccttctgtgcccatcttaagactggaggctgagccttgtcaggcccagccacatctttacgccatgggaccaggagtaaagcgctctctaaaccccgcaccccaaatctctaaacgcctgagttcaggctgagtcctagccctagtgagcctgaagagcttggactgattcccagtctcctgggtcaagccccactttgtgctttcgaagcttatgagcgggttccctggatagaaggagtcttccatccccactgcccttgggcctcttcagcatagtcctgtgccagggccctgtcctcactatcagtcagttcagtatttgctttcacgtgagtggcggactcttctgaagcagccagaactctcaaaggcagcgcatggagttgccttgcgagatttccaaggaaggaggaaagattaacaggcggagcctggcacacccaagcctttgaggtggtcagagtgccaccttcagccccttgggaagggacagcggtgggtctgggagtggcctcaccctggattcagcctaggaatctcttcaccctcagctgtccagccctgctgcctgtctggggatgtgtggcctgggcagagggcagtttaaagcacaaaaccacatggggaaaacacaaggttgcggggactttctcatgtgcctgatgtggtggagggagacaccagcaggtggctgcagtgacgttagggaacataacacttctttgccctgctagctctcagctctggggggcatcccccgatgtggtctgggctgggagcaggcatatcccctggttgttgcctgtgcctggtctgttcaccatcgtgtttgtgtgggcagagcctgccctgcaggagcagtgactttcttcccactgtgtgtcccggacctgtggtatgtgtccctttgccatcccaaacaggcaactgcttgctgctctccttgcttggcatagcctcctggtcagtggccaatgccccacaggccttcctgggcctggccctcctctcctgactcccagatccttccctgccctcttgtgtgcaaggacagattttgcagggaaagttctgtttcttctttgatacctttgttctgtcccctgccccatccccagcactcatgatcttgaagcccctatcacactctagttcagtcctgtgaaccatgtcctgagggccttgcagggaagtaggaaatagaaactcctccacaaagagccgaggatcagagaagacccctgagatgaatcagggccctgccctgcccaccaactcttttctagcaatcatgtcctgcccaggctgcaggcttcattaggctcctgctgtcctccatgatgtgactagcacaaggtgtatatatgttttgtacctctgccgatggctgtacatagtgtatgaaagttatttaagccccatgttgtacatttctgttcctagattggatgtgtgtgttctaagaagttgtcataaataaaacctgaatgacc

SEQ ID NO: 194023 - DNA, 4875 bp, Artificial Sequence
  derived and/or modified sequence
atggccggccagggcgactgctgcgtgaaggtggccgtgcgcatccggccccagctgagcaaggagaagattgagggctgccacatctgcacctctgtgaccccaggagagccccaggtgctgctgggcaaggacaaggccttcacctatgactttgtgtttgacctggacacctggcaggagcagatctacagcacctgtgtgtccaagctgattgagggctgctttgagggctacaatgccaccgtgctggcctacggccagacaggagctgggaagacctacaccatgggcactggatttgacatggccaccagcgaggaggagcagggcatcatcccccgggccatcgcccacctgtttggaggcattgctgagaggaagagaagagcccaggagcagggcgtggccggccctgagttcaaggtgtctgcccagttcctggagctgtacaatgaggagatcctggacctgtttgacagcacccgggaccctgacaccaggcaccggcgcagcaacatcaagatccatgaagatgccaatggaggcatctacaccactggagtgaccagccgcctcatccacagccaggaggagctgatccagtgcctgaagcagggcgccctgagcaggaccacagccagcacccagatgaatgtgcagagcagccgcagccacgccatcttcaccatccacctgtgccagatgaggatgtgcacccagcctgacctggtgaatgaggccgtgacaggcctgcctgatggcaccccacccagcagtgaatatgagaccctgacagccaagttccactttgtggacctggccggcagcgagcggctgaagaggactggagccaccggggagcgggccaaggagggcatcagcatcaactgtggcctgctggccctgggcaatgtcatcagcgccctgggggaccagagcaagaaggtggtgcacgtgccctacagagacagcaagctgacccggctgctgcaggacagcctgggcggcaacagccagaccatcatgattgcctgtgtgagccccagcgaccgggacttcatggagaccctgaacaccctgaagtatgccaacagagccaggaacatcaagaacaaggtggtggtgaaccaggacaagaccagccagcagatcagcgccctgcgggcagagatcgcccggctgcagatggagctgatggagtacaaggccggcaagagggtgattggagaagatggagctgagggctacagcgacctcttcagagaaaatgccatgctgcagaaggaaaatggagccctgcggctgcgggtgaaggccatgcaggaggccattgatgccatcaacaacagagtgacccagctgatgagccaggaggccaacctgctgctggccaaggctggagatggaaatgaggccatcggggccctgatccagaactacatccgggagattgaggagctgcggaccaagctgctggagagcgaggccatgaatgaaagcctgcggcgcagcctgagccgggccagcgcccggagcccctacagcctgggcgccagccctgctgccccagccttcggcggcagccctgccagctccatggaggatgccagcgaggtgatccggcgggccaagcaggacctggagcggctgaagaagaaggaggtgcggcagaggaggaagagccctgagaaggaggccttcaagaagagggccaagctgcagcaggagaacagcgaggagacagatgaaaatgaagctgaggaggaggaggaggagagagatgaaagtggctgtgaggaggaggagggccgggaggatgaagatgaggacagcggcagcgaggagagcctggtggacagcgacagcgaccctgaggagaaggaggtgaacttccaggccgacctggccgacctgacctgtgaaattgagatcaagcagaagctgattgatgagctggagaacagccagaggcggctgcagaccctgaagcaccagtatgaggagaagctgatcctgctgcagaacaagatccgggacacccagctggagcgggacagagtgctgcagaacctgagcaccatggagtgctacacagaggagaaggccaacaagatcaaggctgactatgagaagaggctgcgggagatgaacagagacctgcagaagctgcaggccgcccagaaggagcacgcccggctgctgaagaaccagagccgctatgagcgggagctgaagaagctgcaggccgaggtggccgagatgaagaaggccaaggtggccctgatgaagcagatgagggaggagcagcagaggcggcggctggtggagaccaagaggaaccgggagatcgcccagctgaagaaggagcagaggcggcaggagttccagatccgggccctggagagccagaagaggcagcaggagatggtgctgcggaggaagacccaggaggtgtctgccctgcggcggctggccaagcccatgtctgagcgggtggccggccgggccggcctgaagccacccatgctggacagcggggctgaggtgtctgccagcaccaccagcagcgaggccgagagcggggcccggtctgtgagcagcatcgtgcggcagtggaacaggaagatcaaccacttcctgggggaccacccagcccccaccgtgaatggcaccaggcctgccaggaagaagttccagaagaagggggccagccagagcttcagcaaggccgcccggctgaagtggcagagcctggagcggcgcatcatcgacatcgtgatgcagaggatgaccatcgtgaacctggaggccgacatggagcggctcatcaagaagcgggaggagctgttcctgctgcaggaggccctgcggaggaagcgggagcggctgcaggccgagagccctgaggaggagaagggcctgcaggagctggccgaggagattgaggtgctggccgccaacatcgactacatcaatgatggcatcacagactgccaggccaccatcgtgcagctggaggagaccaaggaggagctggacagcacagacacctctgtggtgatcagcagctgcagcctggccgaggcccggctgctgctggacaacttcctgaaggccagcattgacaagggcctgcaggtggcccagaaggaggcccagatccggctgctggagggccgcctgcggcagacagacatggccggcagcagccagaaccacctgctgctggatgccctgcgggagaaggccgaggcccaccctgagctgcaggccctgatctacaacgtgcagcaggagaatggctacgccagcacagatgaggagatcagcgagttcagcgagggcagcttcagccagagcttcaccatgaagggcagcaccagccatgatgacttcaagttcaagtctgagcccaagctgagcgcccagatgaaggctgtgtctgcagaatgtctgggcccccccctggacatcagcaccaagaacatcaccaagagcctggccagcctggtggagatcaaggaggatggagtgggcttctctgtgcgggacccctactacagagacagagtgtccaggacagtgtccctgcccacccggggcagcaccttcccccggcagagccgggccacagagaccagccccctgaccaggaggaagagctatgaccggggccagcccatccgcagcacagatgtgggcttcaccccacccagcagcccccccacccggcccagaaatgacagaaatgtgttcagccggctgaccagcaaccagagccagggcagcgccctggacaagggcatcatcagccctgtgggcggggccaagggggccaggacagcccccctgcagtgtgtgtccatggccgagggccacaccaagcccatcctgtgcctggatgccacagatgagctgctcttcaccggcagcaaggacaggagctgcaagatgtggaacctggtgacaggccaggagattgctgccctgaagggccaccccaacaacgtggtgtccatcaagtactgcagccacagcggcctggtgttttctgtgtccaccagctacatcaaggtgtgggacatccgggacagcgccaagtgcatccgcaccctgaccagcagcggccaggtgatctctggagatgcctgtgccgccaccagcacccgggccatcaccagcgcccagggcgagcaccagatcaaccagatcgccctgagccccagcggcaccatgctgtatgctgccagcggaaatgctgtgcgcatctgggagctgagccgcttccagcctgtgggcaagctgaccggccacatcggccctgtgatgtgcctgactgtgacccagacagccagccagcacgacctggtggtgacaggcagcaaggaccactacgtgaagatgtttgagctgggggagtgtgtgacaggcaccatcggccccacccacaactttgagcccccccactatgatggcattgaatgtctggccatccagggcgacatcctcttcagcggcagccgggacaatggcatcaagaagtgggacctggaccagcaggagctgatccagcagatccccaatgcccacaaggactgggtgtgtgccctggccttcatccctggccggcccatgctgctgagcgcctgcagagctggggtcatcaaggtgtggaatgtggacaacttcacccccatcggggagatcaagggccatgacagccccatcaatgccatctgcaccaatgccaagcacatcttcaccgccagcagtgactgccgggtgaagctgtggaactacgtgcccggcctgaccccctgcctgcccaggagagtgctggccatcaagggccgggccaccaccctgccctag

SEQ ID NO: 194024 - DNA, 4875 bp, Artificial Sequence
  derived and/or modified sequence
atggccggccagggcgactgctgcgtgaaggtggccgtgcggatccgcccccagctaagcaaagaaaagattgaaggctgtcacatttgcaccagcgtaaccccaggcgagcctcaggtccttttggggaaggataaggcctttacttacgattttgtatttgacttggatacctggcaagaacagatctatagcacatgtgtgagtaagctaatagaaggttgctttgaggggtacaacgccactgtcctcgcttacgggcagaccggcgctggtaaaacttataccatgggcacaggcttcgatatggcgacatccgaagaggaacagggcatcatccccagggccatcgcacacctcttcggaggaatcgcggagcgcaagagacgggcccaagaacaaggagttgcaggacctgaattcaaggtgtccgcacagttcttagaactgtacaatgaagaaatcttggacttatttgactcgacaagggatcccgacacacgccataggcgctccaacatcaaaattcacgaggatgccaacggtggaatttacaccacaggagtaaccagtcgcctgattcattcacaagaggagctgatccagtgtcttaagcaaggcgccctgtcccgcacgactgcgagcacccagatgaatgtgcaaagctccagaagccacgctatttttaccattcacttatgccagatgcgtatgtgtactcagcccgatctagtgaacgaggcagttacaggtctcccagatggcacaccaccgtcctcagaatacgaaactcttactgctaagtttcattttgtcgatctggcgggctcagaaagattgaagagaacaggtgctacgggggagagagctaaagagggcattagcataaattgcggcctactagccctgggaaatgttatatctgccttaggtgaccagtccaaaaaggtggtccatgttccttatagagacagtaagctgacccggttacttcaggactctctcggcggaaacagtcaaaccattatgatcgcctgcgtgagcccctctgaccgggatttcatggaaacgctgaatacactaaagtacgctaatagggcaaggaacatcaagaataaagtcgtagtgaatcaggacaaaacatctcaacagatttctgcactgcgcgccgaaattgctcgcttgcagatggaactgatggaatacaaagccgggaagagggtcatcggcgaggatggggctgaggggtactccgatctctttagagagaacgcaatgctccagaaagagaatggggccctgaggctccgcgtgaaggctatgcaggaggcaatcgacgcaattaataaccgggtgacccaactaatgtcccaggaagccaacttgctcttagccaaagcgggggacggtaacgaggcgatcggcgcgctgatccagaactacattcgcgagatcgaagaattaagaaccaaacttctcgagagtgaagccatgaacgagtcacttcggcggagcctctcaagagcttctgcaagaagcccatatagcctgggcgccagcccagccgctcctgcgtttgggggcagtccagcttcatcgatggaggacgcgagcgaggtgatccgtcgagctaaacaggacctggagcggctgaaaaagaaagaggtacggcagcgccggaaaagtcctgagaaggaggcattcaagaagagggccaaactccaacaggaaaacagtgaggagaccgatgaaaatgaagccgaagaggaggaggaagagagggacgagtcaggatgcgaagaggaagaggggagagaggatgaggacgaggattcaggcagtgaggagtcgcttgtcgactctgatagcgacccagaagagaaggaagtaaactttcaagcagacctggcagacctgacctgtgagatcgagattaaacaaaaattgatcgatgaactggagaacagccagcgcaggttgcagacacttaaacaccaatatgaggagaagcttattctattgcaaaacaagatcagagacacgcagctggaaagggatcgggtactgcaaaacctttccacaatggagtgttacacggaagagaaggctaacaaaataaaggccgactatgagaagagactgcgcgagatgaaccgcgatctgcagaaattacaagctgcccagaaggaacacgcacgcttattaaaaaatcagtccaggtacgagagagagctgaagaaacttcaggctgaagttgccgaaatgaagaaggctaaggtggccctgatgaaacaaatgagagaggagcagcagcgtcgccgtctcgtggagacaaagaggaatagagaaattgctcagctgaagaaagagcagagacgacaggagttccagatacgagcccttgaatcccaaaagagacagcaggaaatggttctgcggaggaaaacccaggaggtatcagccctacgcaggttagcgaaacccatgagcgaaagggtagctggacgagctggattgaagccaccaatgcttgattccggtgctgaagtttctgccagtaccacctcgagtgaagcagagtctggtgcccggtcagtgtctagtattgtccggcagtggaaccgcaagatcaatcatttcctgggagaccaccctgcaccaactgtgaatgggacccggccggcacggaagaaatttcagaaaaaaggggcaagccagagctttagtaaggctgctagactgaaatggcagtctctcgaaagaagaataatcgatatcgtgatgcaacgcatgaccatcgtgaatctggaggccgatatggaacgactaataaaaaaacgggaggagctttttttgctccaggaggccctgcgccgcaagagagagaggcttcaggccgagtcccccgaagaagagaaggggctgcaggaactggcagaggagattgaggttctggcagccaacatcgactatattaatgacggcattacagattgccaggccaccattgtccagctggaagagacaaaggaggagctggactccaccgatacctcggtggtcatttcatcctgctctctcgctgaggccagactgcttctggataacttcctgaaggcctccatcgataaaggacttcaggtggcgcagaaagaggctcagatcaggttacttgaggggcggctacgacagactgatatggcaggatcgagccaaaatcaccttctcttagatgcactgcgtgaaaaagcagaggcacaccccgagctgcaggctctcatctataacgtccaacaagagaatggctatgcctctactgacgaagagatctccgagtttagcgagggcagcttctcccaaagctttactatgaagggttctacgtcacacgatgatttcaaattcaaaagtgaacccaagctttctgcacagatgaaggcagtgagtgctgagtgcctgggcccccctttagacatctccaccaagaacatcacaaagtccctggcaagtttagttgagatcaaagaagacggagttgggtttagcgtgagagatccgtactaccgcgatcgggtgtctagaaccgtcagtctgccgacacgcgggtccacctttccgaggcagtctagggccacggaaacaagtcctttgacccggcgtaaaagttacgatagaggccagccaatccgaagtacggatgtgggattcactcctccatcatccccccctactagacccagaaacgaccggaacgtcttctctagactgactagcaatcagtcacagggctccgccctcgacaaaggaattatcagtccggttggcggtgctaaaggagctcgtactgcgcctttacagtgcgttagcatggctgagggacacaccaagcccatactgtgtctcgacgccaccgatgagctcttgttcaccggatctaaagaccggtcgtgcaagatgtggaatctggtgaccggacaggagatagcagccttgaagggccacccgaataatgttgtctctattaagtattgttcccactctggcctagtgttctctgtatccacctcgtacattaaggtctgggacattagagactcggcgaaatgcattaggaccctcacgtcaagcggacaagtcattagcggcgacgcttgtgccgctacaagcaccagagccatcacgagcgcccagggggagcaccagattaatcagatcgctctgagtccgtctggcactatgctgtacgcagcatcaggaaatgcggtccgcatctgggagctaagtaggttccagcccgttggcaagctcacaggacatattggacctgttatgtgcctgaccgttacacagacagcctcccagcatgatttagtggttaccgggtccaaggatcattacgtgaaaatgtttgaactgggcgagtgtgtcactgggacgatcgggccaacccacaactttgagccccctcactacgatggaatagaatgcctggctattcagggcgacatcctgttcagtggctcacgagacaacgggatcaagaaatgggatctagaccagcaggaactgattcagcaaatacccaatgcacacaaagattgggtctgcgccctggccttcatacccggcaggccaatgctgctgtctgcttgccgtgccggggtaatcaaagtatggaacgtggacaatttcactcccatcggagaaatcaaggggcacgactctcctatcaatgccatctgtactaacgcgaaacatattttcactgcatcctcagattgccgagtcaagctttggaactacgtgcctggattgaccccatgcctgcctcgtcgcgtgctggcaatcaaaggcagagccaccactctgccatag

SEQ ID NO: 194025 - DNA, 4874 bp, Artificial Sequence
  derived and/or modified sequence
atggctggccagggtgactgctgtgtcaaagtggcggtgcggatcagacctcagctgtccaaggagaagatcgagggctgccacatttgcacctctgtcacccctggcgaaccccaggtgttgttgggtaaggacaaagcctttacatatgactttgtgttcgatcttgacacatggcaggaacagatttacagcacgtgcgtttccaagctcattgaaggatgcttcgagggctacaacgccaccgtcctcgcgtacggtcaaaccggcgcaggaaaaacgtacacaatgggaaccggattcgatatggccacttcagaggaggaacagggaatcattccgagagccatagcccatctcttcggcggaatcgcagaacgcaagcgcagagcgcaggaacagggcgttgctggcccagagttcaaggtgagtgcccagttcctggagctgtataatgaggagattctggacctgtttgacagtacaagagacccggacacaaggcaccgcagaagtaacattaagatccacgaggacgcaaatggtggcatctacactactggtgtaactagtcgcttgatccattctcaggaggaattgattcagtgtttaaagcaaggcgctctctcccgaaccacagctagcactcagatgaatgtgcagagctctaggtctcatgcgatcttcacgatccacctttgccagatgaggatgtgcacccaacccgacctggtcaacgaagccgtgaccggccttcctgatggcacgcctcctagtagtgagtacgagaccttgaccgccaagttccatttcgtggatctggccggatcagaaagactcaaaaggactggtgctacaggggaaagggctaaagagggaattagcatcaattgtgggctgcttgccctgggtaacgtgatctccgcactgggagatcagagcaaaaaagtcgtccatgtgccgtaccgcgattctaaactgacgagattacttcaagattccctgggaggcaacagccagactatcatgatagcgtgcgtgtctccaagtgaccgggatttcatggagactttaaacaccctgaagtatgctaatcgagcaaggaacataaaaaataaggtcgtcgttaatcaggacaagacctcccagcagatcagcgcccttcgcgcagaaatcgctagactccagatggaactcatggagtataaggccggaaagcgtgtaattggcgaagatggagcggaggggtattcggacctctttagggaaaacgccatgctgcaaaaggagaacggagcgctgagactgagggttaaagcaatgcaggaggccatcgacgccataaacaatcgggtgacacagctcatgtcacaggaagcaaacctgttactggccaaagcaggggacggaaacgaagcaataggtgccttgattcaaaactatattagagagatcgaggaactgcgcaccaagttgcttgagtcagaggcaatgaacgagtctctcaggcgctctctttcccgggcaagtgcaagatcaccatacagtttgggcgctagtccagctgccccagcctttgggggatctcctgcatcaagcatggaagatgcgtccgaagtgattaggagggcgaaacaggatctagagaggttgaagaagaaagaagttcgccagcgaagaaagtccccagaaaaggaggccttcaagaagcgagccaaacttcagcaggagaactctgaagaaactgatgagaacgaagcagaagaagaggaggaagaaagagatgaaagcgggtgcgaagaggaggagggaagggaggatgaggacgaggactccgggagcgaggaaagtttggtcgacagtgattccgacccagaagagaaagaggtcaactttcaggcagacctcgctgatctgacgtgtgaaatcgagattaagcagaagttgatcgacgaactggaaaattctcaaaggcgactccagacgttgaaacaccaatatgaggagaagcttattctgctccagaacaaaattcgggatactcaattagaacgggaccgcgtgctacagaacctgagcaccatggaatgttatacggaagaaaaagccaacaaaatcaaggcagattatgagaaacgactgagggagatgaatagggacttgcagaaactgcaagctgctcaaaaggagcacgctaggctgctgaagaaccaatcccgatacgagcgtgagttgaaaaaactgcaggcagaggtggccgagatgaaaaaggctaaagtggccctgatgaagcagatgcgggaggaacaacagcgaaggagattggtggagacaaagaggaacagagagattgcgcagttgaagaaagaacagaggaggcaagaatttcagatcagggcgctggagagccagaagcgccagcaagaaatggtgctgcgcagaaagacccaagaggtcagcgcccttaggaggctcgctaaaccgatgagcgaacgcgtggcagggagggccggactgaagccacctatgcttgactccggtgccgaagtcagtgcttccactacttcatcggaagccgagagcggcgcacgctctgtgagctctattgtaagacagtggaaccgaaaaatcaatcatttcctcggcgatcatccagcccctacagtaaacggcaccaggccagctcgaaagaagttccagaagaagggtgcctcccagtcttttagtaaagcagcacgcctcaagtggcagtctctggagagacggatcattgacatagtaatgcagcgcatgacaatcgttaacctggaggcagacatggagagacttatcaagaaacgggaggaactgtttcttctccaggaagctctcaggagaaaaagagagaggctgcaagccgaaagtcctgaagaagagaagggcctgcaggaactggccgaggaaatcgaggttctcgctgctaacatagattatattaacgacggaatcaccgattgccaggccaccattgtgcagctggaggagacaaaggaggagctggattccacagataccagcgtggtgatctcatcatgctctttggctgaggcgagactgctgctggacaacttccttaaagcatcaattgacaaaggtttacaggtagcacaaaaagaagctcagattcgcctgcttgagggacgcctacgacagaccgatatggcaggcagcagccagaaccacttactcttggacgccctacgcgagaaggcagaggcgcatccagaactacaggccttgatttacaacgttcaacaggaaaacggatatgcctctacggatgaagagatcagcgagttctccgagggctccttctcccaatcatttactatgaaaggaagcacctcacacgatgactttaaatttaagagcgagcctaagttgtctgcgcagatgaaggcagtcagcgctgaatgcctggggccacccttggacatctctacaaagaacataacaaaatccctagcaagtttagtggagatcaaagaggacggcgtaggattttccgtgagggacccatactacagagacagagtgtctaggacggtgtctctgcctaccagaggaagcacttttcccagacagtctcgtgcaactgaaacgtccccgctgacccgcaggaagagctacgaccgtggccaaccaatccgctctacagacgtgggcttcacaccgccttcttcacctcccactagaccaaggaacgacaggaatgtgttcagccgccttaccagtaatcagtctcaaggctctgcattggacaaaggcattatctcgcccgtagggggtgccaagggggctagaaccgcaccactccagtgtgtgtctatggctgaaggacatacgaaacccatactgtgtcttgacgcaactgatgagctattgttcaccggcagtaaagataggagttgtaaaatgtggaacttagtcacgggccaggaaatagccgctttgaaaggtcaccctaacaatgtggtgtcaataaagtactgtagtcactccggactggtcttctctgtgagcaccagctacattaaggtatgggatatccgcgatagcgcgaagtgtatcaggaccctaacatctagcggccaggtgatatcaggtgacgcatgcgcagccacatccaccagagctataaccagcgctcagggggaacaccagattaatcaaatagccctgtctcctagcggcaccatgctctatgcggcttcaggaaacgcagtgcgaatatgggaactatccaggttccagccggtgggtaagcttacaggccacattggaccagtgatgtgcctcaccgtgacacagactgcctcgcagcacgacctggtggtcacaggttccaaagaccactacgtgaaaatgttcgagctgggcgaatgcgtgacaggtaccataggtcctactcataattttgaaccaccacactatgatgggatagaatgcctggctattcaaggggacattctgttttcggggtcacgtgacaacggaataaaaaagtgggatcttgatcagcaggagttgatacagcagattccaaacgcccacaaagactgggtatgtgccctcgcatttattcccggtcgtccgatgttactgtccgcctgccgagctggggtgatcaaagtgtggaatgtggataatttcacccccattggcgagataaagggacatgacagcccaatcaacgccatctgtaccaacgctaaacatatttttaccgcgtcaagcgactgccgggtcaaactgtggaattacgtgcccggattgactccttgtttgcctcgacgtgtgctggcaatcaaaggacgcgcaactaccctacccta

SEQ ID NO: 194026 - DNA, 4875 bp, Artificial Sequence
  derived and/or modified sequence
atggccggccagggcgactgctgcgtgaaggtggccgtgagaatcagaccccagctgagcaaggagaagatcgagggctgccacatctgcaccagcgtgacccccggcgagccccaggtgctgctgggcaaggacaaggccttcacctacgacttcgtgttcgacctggacacctggcaggagcagatctacagcacctgcgtgagcaagctgatcgagggctgcttcgagggctacaacgccaccgtgctggcctacggccagaccggcgccggcaagacctacaccatgggcaccggcttcgacatggccaccagcgaggaggagcagggcatcatccccagagccatcgcccacctgttcggcggcatcgccgagagaaagagaagagcccaggagcagggcgtggccggccccgagttcaaggtgagcgcccagttcctggagctgtacaacgaggagatcctggacctgttcgacagcaccagagaccccgacaccagacacagaagaagcaacatcaagatccacgaggacgccaacggcggcatctacaccaccggcgtgaccagcagactgatccacagccaggaggagctgatccagtgcctgaagcagggcgccctgagcagaaccaccgccagcacccagatgaacgtgcagagcagcagaagccacgccatcttcaccatccacctgtgccagatgagaatgtgcacccagcccgacctggtgaacgaggccgtgaccggcctgcccgacggcaccccccccagcagcgagtacgagaccctgaccgccaagttccacttcgtggacctggccggcagcgagagactgaagagaaccggcgccaccggcgagagagccaaggagggcatcagcatcaactgcggcctgctggccctgggcaacgtgatcagcgccctgggcgaccagagcaagaaggtggtgcacgtgccctacagagacagcaagctgaccagactgctgcaggacagcctgggcggcaacagccagaccatcatgatcgcctgcgtgagccccagcgacagagacttcatggagaccctgaacaccctgaagtacgccaacagagccagaaacatcaagaacaaggtggtggtgaaccaggacaagaccagccagcagatcagcgccctgagagccgagatcgccagactgcagatggagctgatggagtacaaggccggcaagagagtgatcggcgaggacggcgccgagggctacagcgacctgttcagagagaacgccatgctgcagaaggagaacggcgccctgagactgagagtgaaggccatgcaggaggccatcgacgccatcaacaacagagtgacccagctgatgagccaggaggccaacctgctgctggccaaggccggcgacggcaacgaggccatcggcgccctgatccagaactacatcagagagatcgaggagctgagaaccaagctgctggagagcgaggccatgaacgagagcctgagaagaagcctgagcagagccagcgccagaagcccctacagcctgggcgccagccccgccgcccccgccttcggcggcagccccgccagcagcatggaggacgccagcgaggtgatcagaagagccaagcaggacctggagagactgaagaagaaggaggtgagacagagaagaaagagccccgagaaggaggccttcaagaagagagccaagctgcagcaggagaacagcgaggagaccgacgagaacgaggccgaggaggaggaggaggagagagacgagagcggctgcgaggaggaggagggcagagaggacgaggacgaggacagcggcagcgaggagagcctggtggacagcgacagcgaccccgaggagaaggaggtgaacttccaggccgacctggccgacctgacctgcgagatcgagatcaagcagaagctgatcgacgagctggagaacagccagagaagactgcagaccctgaagcaccagtacgaggagaagctgatcctgctgcagaacaagatcagagacacccagctggagagagacagagtgctgcagaacctgagcaccatggagtgctacaccgaggagaaggccaacaagatcaaggccgactacgagaagagactgagagagatgaacagagacctgcagaagctgcaggccgcccagaaggagcacgccagactgctgaagaaccagagcagatacgagagagagctgaagaagctgcaggccgaggtggccgagatgaagaaggccaaggtggccctgatgaagcagatgagagaggagcagcagagaagaagactggtggagaccaagagaaacagagagatcgcccagctgaagaaggagcagagaagacaggagttccagatcagagccctggagagccagaagagacagcaggagatggtgctgagaagaaagacccaggaggtgagcgccctgagaagactggccaagcccatgagcgagagagtggccggcagagccggcctgaagccccccatgctggacagcggcgccgaggtgagcgccagcaccaccagcagcgaggccgagagcggcgccagaagcgtgagcagcatcgtgagacagtggaacagaaagatcaaccacttcctgggcgaccaccccgcccccaccgtgaacggcaccagacccgccagaaagaagttccagaagaagggcgccagccagagcttcagcaaggccgccagactgaagtggcagagcctggagagaagaatcatcgacatcgtgatgcagagaatgaccatcgtgaacctggaggccgacatggagagactgatcaagaagagagaggagctgttcctgctgcaggaggccctgagaagaaagagagagagactgcaggccgagagccccgaggaggagaagggcctgcaggagctggccgaggagatcgaggtgctggccgccaacatcgactacatcaacgacggcatcaccgactgccaggccaccatcgtgcagctggaggagaccaaggaggagctggacagcaccgacaccagcgtggtgatcagcagctgcagcctggccgaggccagactgctgctggacaacttcctgaaggccagcatcgacaagggcctgcaggtggcccagaaggaggcccagatcagactgctggagggcagactgagacagaccgacatggccggcagcagccagaaccacctgctgctggacgccctgagagagaaggccgaggcccaccccgagctgcaggccctgatctacaacgtgcagcaggagaacggctacgccagcaccgacgaggagatcagcgagttcagcgagggcagcttcagccagagcttcaccatgaagggcagcaccagccacgacgacttcaagttcaagagcgagcccaagctgagcgcccagatgaaggccgtgagcgccgagtgcctgggcccccccctggacatcagcaccaagaacatcaccaagagcctggccagcctggtggagatcaaggaggacggcgtgggcttcagcgtgagagacccctactacagagacagagtgagcagaaccgtgagcctgcccaccagaggcagcaccttccccagacagagcagagccaccgagaccagccccctgaccagaagaaagagctacgacagaggccagcccatcagaagcaccgacgtgggcttcaccccccccagcagcccccccaccagacccagaaacgacagaaacgtgttcagcagactgaccagcaaccagagccagggcagcgccctggacaagggcatcatcagccccgtgggcggcgccaagggcgccagaaccgcccccctgcagtgcgtgagcatggccgagggccacaccaagcccatcctgtgcctggacgccaccgacgagctgctgttcaccggcagcaaggacagaagctgcaagatgtggaacctggtgaccggccaggagatcgccgccctgaagggccaccccaacaacgtggtgagcatcaagtactgcagccacagcggcctggtgttcagcgtgagcaccagctacatcaaggtgtgggacatcagagacagcgccaagtgcatcagaaccctgaccagcagcggccaggtgatcagcggcgacgcctgcgccgccaccagcaccagagccatcaccagcgcccagggcgagcaccagatcaaccagatcgccctgagccccagcggcaccatgctgtacgccgccagcggcaacgccgtgagaatctgggagctgagcagattccagcccgtgggcaagctgaccggccacatcggccccgtgatgtgcctgaccgtgacccagaccgccagccagcacgacctggtggtgaccggcagcaaggaccactacgtgaagatgttcgagctgggcgagtgcgtgaccggcaccatcggccccacccacaacttcgagcccccccactacgacggcatcgagtgcctggccatccagggcgacatcctgttcagcggcagcagagacaacggcatcaagaagtgggacctggaccagcaggagctgatccagcagatccccaacgcccacaaggactgggtgtgcgccctggccttcatccccggcagacccatgctgctgagcgcctgcagagccggcgtgatcaaggtgtggaacgtggacaacttcacccccatcggcgagatcaagggccacgacagccccatcaacgccatctgcaccaacgccaagcacatcttcaccgccagcagcgactgcagagtgaagctgtggaactacgtgcccggcctgaccccctgcctgcccagaagagtgctggccatcaagggcagagccaccaccctgccctag

SEQ ID NO: 194027 - protein, 731 aa, Artificial Sequence
  derived and/or modified sequence
MLKEWAIKQGILLKVAETIKSWIFFSQCNKKDDLLHKLDIGFRLDSLHTILQQEVLLQEDVELIELLDPSILSAGQSQQQENGHLPTLCSLATPNIWDLSMLFAFISLLVMLPTWWIVSSWLVWGVILFVYLVIRALRLWRTAKLQVTLKKYSVHLEDMATNSRAFTNLVRKALRLIQETEVISRGFTLVSAACPFNKAGQHPSQHLIGLRKAVYRTLRANFQAARLATLYMLKNYPLNSESDNVTNYICVVPFKELGLGLSEEQISEEEAHNFTDGFSLPALKVLFQLWVAQSSEFFRRLALLLSTANSPPGPLLTPALLPHRILSDVTQGLPHAHSACLEELKRSYEFYRYFETQHQSVPQCLSKTQQKSRELNNVHTAVRSLQLHLKALLNEVIILEDELEKLVCTKETQELVSEAYPILEQKLKLIQPHVQASNNCWEEAISQVDKLLRRNTDKKGKPEIACENPHCTVVPLKQPTLHIADKDPIPEEQELEAYVDDIDIDSDFRKDDFYYLSQEDKERQKREHEESKRVLQELKSVLGFKASEAERQKWKQLLFSDHAVLKSLSPVDPVEPISNSEPSMNSDMGKVSKNDTEEESNKSATTDNEISRTEYLCENSLEGKNKDNSSNEVFPQGAEERMCYQCESEDEPQADGSGLTTAPPTPRDSLQPSIKQRLARLQLSPDFTFTAGLAAEVAARSLSFTTMQEQTFGGEEEEQIIEENKNEIEEK

SEQ ID NO: 194028 - protein, 779 aa, Artificial Sequence
  derived and/or modified sequence
MLPDMEDVHLFQNSPLYQYLQDLGHTDFEICSSLSPKTEKCTTEGQQKPPTRVLPKQGILLKVAETIKSWIFFSQCNKKDDLLHKLDIGFRLDSLHTILQQEVLLQEDVELIELLDPSILSAGQSQQQENGHLPTLCSLATPNIWDLSMLFAFISLLVMLPTWWIVSSWLVWGVILFVYLVIRALRLWRTAKLQVTLKKYSVHLEDMATNSRAFTNLVRKALRLIQETEVISRGFTLVSAACPFNKAGQHPSQHLIGLRKAVYRTLRANFQAARLATLYMLKNYPLNSESDNVTNYICVVPFKELGLGLSEEQISEEEAHNFTDGFSLPALKVLFQLWVAQSSEFFRRLALLLSTANSPPGPLLTPALLPHRILSDVTQGLPHAHSACLEELKRSYEFYRYFETQHQSVPQCLSKTQQKSRELNNVHTAVRSLQLHLKALLNEVIILEDELEKLVCTKETQELVSEAYPILEQKLKLIQPHVQASNNCWEEAISQVDKLLRRNTDKKGKPEIACENPHCTVVPLKQPTLHIADKDPIPEEQELEAYVDDIDIDSDFRKDDFYYLSQEDKERQKREHEESKRVLQELKSVLGFKASEAERQKWKQLLFSDHAVLKSLSPVDPVEPISNSEPSMNSDMGKVSKNDTEEESNKSATTDNEISRTEYLCENSLEGKNKDNSSNEVFPQGAEERMCYQCESEDEPQADGSGLTTAPPTPRDSLQPSIKQRLARLQLSPDFTFTAGLAAEVAARSLSFTTMQEQTFGGEEEEQIIEENKNEIEEK

SEQ ID NO: 194029 - protein, 779 aa, Artificial Sequence
  derived and/or modified sequence
MTPEFDEEVVFENSPLYQYLQDLGHTDFEICSSLSPKTEKCTTEGQQKPPTRVLPKQGILLKVAETIKSWIFFSQCNKKDDLLHKLDIGFRLDSLHTILQQEVLLQEDVELIELLDPSILSAGQSQQQENGHLPTLCSLATPNIWDLSMLFAFISLLVMLPTWWIVSSWLVWGVILFVYLVIRALRLWRTAKLQVTLKKYSVHLEDMATNSRAFTNLVRKALRLIQETEVISRGFTLVSAACPFNKAGQHPSQHLIGLRKAVYRTLRANFQAARLATLYMLKNYPLNSESDNVTNYICVVPFKELGLGLSEEQISEEEAHNFTDGFSLPALKVLFQLWVAQSSEFFRRLALLLSTANSPPGPLLTPALLPHRILSDVTQGLPHAHSACLEELKRSYEFYRYFETQHQSVPQCLSKTQQKSRELNNVHTAVRSLQLHLKALLNEVIILEDELEKLVCTKETQELVSEAYPILEQKLKLIQPHVQASNNCWEEAISQVDKLLRRNTDKKGKPEIACENPHCTVVPLKQPTLHIADKDPIPEEQELEAYVDDIDIDSDFRKDDFYYLSQEDKERQKREHEESKRVLQELKSVLGFKASEAERQKWKQLLFSDHAVLKSLSPVDPVEPISNSEPSMNSDMGKVSKNDTEEESNKSATTDNEISRTEYLCENSLEGKNKDNSSNEVFPQGAEERMCYQCESEDEPQADGSGLTTAPPTPRDSLQPSIKQRLARLQLSPDFTFTAGLAAEVAARSLSFTTMQEQTFGGEEEEQIIEENKNEIEEK

SEQ ID NO: 194030 - DNA, 2340 bp, Artificial Sequence
  derived and/or modified sequence
atgctgcccgacatggaggacgtgcacctgttccagaacagccccctgtaccagtacctgcaggacctgggccacaccgacttcgagatctgcagcagcctgagccccaagaccgagaagtgcaccaccgagggccagcagaagccccccaccagagtgctgcccaagcagggcatcctgctgaaggtggccgagaccatcaagagctggatcttcttcagccagtgcaacaagaaggacgacctgctgcacaagctggacatcggcttcagactggacagcctgcacaccatcctgcagcaggaggtgctgctgcaggaggacgtggagctgatcgagctgctggaccccagcatcctgagcgccggccagagccagcagcaggagaacggccacctgcccaccctgtgcagcctggccacccccaacatctgggacctgagcatgctgttcgccttcatcagcctgctggtgatgctgcccacctggtggatcgtgagcagctggctggtgtggggcgtgatcctgttcgtgtacctggtgatcagagccctgagactgtggagaaccgccaagctgcaggtgaccctgaagaagtacagcgtgcacctggaggacatggccaccaacagcagagccttcaccaacctggtgagaaaggccctgagactgatccaggagaccgaggtgatcagcagaggcttcaccctggtgagcgccgcctgccccttcaacaaggccggccagcaccccagccagcacctgatcggcctgagaaaggccgtgtacagaaccctgagagccaacttccaggccgccagactggccaccctgtacatgctgaagaactaccccctgaacagcgagagcgacaacgtgaccaactacatctgcgtggtgcccttcaaggagctgggcctgggcctgagcgaggagcagatcagcgaggaggaggcccacaacttcaccgacggcttcagcctgcccgccctgaaggtgctgttccagctgtgggtggcccagagcagcgagttcttcagaagactggccctgctgctgagcaccgccaacagcccccccggccccctgctgacccccgccctgctgccccacagaatcctgagcgacgtgacccagggcctgccccacgcccacagcgcctgcctggaggagctgaagagaagctacgagttctacagatacttcgagacccagcaccagagcgtgccccagtgcctgagcaagacccagcagaagagcagagagctgaacaacgtgcacaccgccgtgagaagcctgcagctgcacctgaaggccctgctgaacgaggtgatcatcctggaggacgagctggagaagctggtgtgcaccaaggagacccaggagctggtgagcgaggcctaccccatcctggagcagaagctgaagctgatccagccccacgtgcaggccagcaacaactgctgggaggaggccatcagccaggtggacaagctgctgagaagaaacaccgacaagaagggcaagcccgagatcgcctgcgagaacccccactgcaccgtggtgcccctgaagcagcccaccctgcacatcgccgacaaggaccccatccccgaggagcaggagctggaggcctacgtggacgacatcgacatcgacagcgacttcagaaaggacgacttctactacctgagccaggaggacaaggagagacagaagagagagcacgaggagagcaagagagtgctgcaggagctgaagagcgtgctgggcttcaaggccagcgaggccgagagacagaagtggaagcagctgctgttcagcgaccacgccgtgctgaagagcctgagccccgtggaccccgtggagcccatcagcaacagcgagcccagcatgaacagcgacatgggcaaggtgagcaagaacgacaccgaggaggagagcaacaagagcgccaccaccgacaacgagatcagcagaaccgagtacctgtgcgagaacagcctggagggcaagaacaaggacaacagcagcaacgaggtgttcccccagggcgccgaggagagaatgtgctaccagtgcgagagcgaggacgagccccaggccgacggcagcggcctgaccaccgccccccccacccccagagacagcctgcagcccagcatcaagcagagactggccagactgcagctgagccccgacttcaccttcaccgccggcctggccgccgaggtggccgccagaagcctgagcttcaccaccatgcaggagcagaccttcggcggcgaggaggaggagcagatcatcgaggagaacaagaacgagatcgaggagaagtag

SEQ ID NO: 194031 - DNA, 2340 bp, Artificial Sequence
  derived and/or modified sequence
atgacccccgagttcgacgaggaggtggtgttcgagaacagccccctgtaccagtacctgcaggacctgggccacaccgacttcgagatctgcagcagcctgagccccaagaccgagaagtgcaccaccgagggccagcagaagccccccaccagagtgctgcccaagcagggcatcctgctgaaggtggccgagaccatcaagagctggatcttcttcagccagtgcaacaagaaggacgacctgctgcacaagctggacatcggcttcagactggacagcctgcacaccatcctgcagcaggaggtgctgctgcaggaggacgtggagctgatcgagctgctggaccccagcatcctgagcgccggccagagccagcagcaggagaacggccacctgcccaccctgtgcagcctggccacccccaacatctgggacctgagcatgctgttcgccttcatcagcctgctggtgatgctgcccacctggtggatcgtgagcagctggctggtgtggggcgtgatcctgttcgtgtacctggtgatcagagccctgagactgtggagaaccgccaagctgcaggtgaccctgaagaagtacagcgtgcacctggaggacatggccaccaacagcagagccttcaccaacctggtgagaaaggccctgagactgatccaggagaccgaggtgatcagcagaggcttcaccctggtgagcgccgcctgccccttcaacaaggccggccagcaccccagccagcacctgatcggcctgagaaaggccgtgtacagaaccctgagagccaacttccaggccgccagactggccaccctgtacatgctgaagaactaccccctgaacagcgagagcgacaacgtgaccaactacatctgcgtggtgcccttcaaggagctgggcctgggcctgagcgaggagcagatcagcgaggaggaggcccacaacttcaccgacggcttcagcctgcccgccctgaaggtgctgttccagctgtgggtggcccagagcagcgagttcttcagaagactggccctgctgctgagcaccgccaacagcccccccggccccctgctgacccccgccctgctgccccacagaatcctgagcgacgtgacccagggcctgccccacgcccacagcgcctgcctggaggagctgaagagaagctacgagttctacagatacttcgagacccagcaccagagcgtgccccagtgcctgagcaagacccagcagaagagcagagagctgaacaacgtgcacaccgccgtgagaagcctgcagctgcacctgaaggccctgctgaacgaggtgatcatcctggaggacgagctggagaagctggtgtgcaccaaggagacccaggagctggtgagcgaggcctaccccatcctggagcagaagctgaagctgatccagccccacgtgcaggccagcaacaactgctgggaggaggccatcagccaggtggacaagctgctgagaagaaacaccgacaagaagggcaagcccgagatcgcctgcgagaacccccactgcaccgtggtgcccctgaagcagcccaccctgcacatcgccgacaaggaccccatccccgaggagcaggagctggaggcctacgtggacgacatcgacatcgacagcgacttcagaaaggacgacttctactacctgagccaggaggacaaggagagacagaagagagagcacgaggagagcaagagagtgctgcaggagctgaagagcgtgctgggcttcaaggccagcgaggccgagagacagaagtggaagcagctgctgttcagcgaccacgccgtgctgaagagcctgagccccgtggaccccgtggagcccatcagcaacagcgagcccagcatgaacagcgacatgggcaaggtgagcaagaacgacaccgaggaggagagcaacaagagcgccaccaccgacaacgagatcagcagaaccgagtacctgtgcgagaacagcctggagggcaagaacaaggacaacagcagcaacgaggtgttcccccagggcgccgaggagagaatgtgctaccagtgcgagagcgaggacgagccccaggccgacggcagcggcctgaccaccgccccccccacccccagagacagcctgcagcccagcatcaagcagagactggccagactgcagctgagccccgacttcaccttcaccgccggcctggccgccgaggtggccgccagaagcctgagcttcaccaccatgcaggagcagaccttcggcggcgaggaggaggagcagatcatcgaggagaacaagaacgagatcgaggagaagtag

SEQ ID NO: 194032 - DNA, 2340 bp, Artificial Sequence
  derived and/or modified sequence
atgctgccggatatggaggacgtgcacctattccaaaattccccgttgtatcaatatttgcaggatttgggccatacagattttgaaatttgctccagtctgagtcccaagactgagaaatgtactaccgagggacaacagaaacccccaacaagggttctgccaaaacaaggcattctgctgaaagtcgccgagaccatcaaaagctggatctttttcagccaatgtaataagaaagacgatctactccacaaattagacataggattccgactggacagcctccacacaattttacaacaagaggtcctgctgcaggaagatgtggagctcatcgagctgctggacccctcaatcctgagcgctggccaatcccagcagcaggagaatgggcacttacccaccttgtgctcactcgcaacgcccaatatctgggatctctcgatgctgtttgcctttatctccctgcttgtcatgctacctacttggtggatagttagcagttggctggtgtggggagtcatactgtttgtttatctggtgattcgagccctgcggctgtggaggactgccaagcttcaggtcacgttgaagaagtactcagtgcatttagaagacatggctactaactctagggccttcaccaacttggtccggaaggcactgcgccttattcaagagaccgaggtgatctctcgggggttcactctcgtgagcgccgcttgtccctttaacaaggccgggcaacacccctcacagcaccttatcggcctgcgcaaggcagtttatagaacattgcgggcaaactttcaggctgctagactggcaaccctgtatatgcttaagaactaccccctaaactctgagtcagacaacgtgactaattacatatgcgtggtccctttcaaggagcttggactaggactctctgaagagcagatctcggaggaagaggctcacaactttaccgacggcttttctctccccgcactgaaggttcttttccagctttgggtcgcacaatcatctgaattttttcgaaggctagccctgctgctcagcacagctaactcccctcctggtccactgctcaccccggcactgctgccgcaccgtatcctttcagacgtgactcagggcctgcctcacgcacactctgcctgtcttgaggagttaaaaagatcttacgaattctaccggtattttgaaacccagcaccaatccgtgccccagtgcctctccaagacccagcagaagtccagggagctcaataatgtgcacactgccgtgcggtctttacagctgcatctcaaagcattgctaaatgaggtgattatcctggaagacgagctggaaaaattggtctgcaccaaggagacccaggagttggtctccgaagcctatcctattcttgagcagaagctcaagctgatccagccacatgtgcaggctagcaacaactgttgggaagaagcaatcagtcaggtcgataagctcctgagacggaacacagacaagaaggggaaaccagaaatagcctgcgagaatccccattgtactgtggtccctctcaagcaacccacactgcacatcgctgacaaagaccctattcctgaagagcaagagcttgaggcatacgttgacgatatcgacatcgactccgacttcaggaaggatgatttttactacttgtctcaggaagacaaggaaagacagaagcgcgaacacgaggaatcaaaaagggtgcttcaggaattgaaaagcgtgcttggcttcaaggcctcagaagctgaacgccagaagtggaaacagctgttattttccgatcacgcagtcctgaagagcttaagtccagtagacccagtcgagccgatttcaaattccgaaccatctatgaatagtgatatggggaaggtgagtaaaaatgatacggaggaagaatctaataaatcagccacgactgacaacgagatcagcaggacagagtacctgtgcgaaaacagcctggagggcaagaacaaagataactccagcaacgaggttttcccacagggtgccgaagaacgcatgtgctaccagtgtgagtctgaggacgagcctcaggcagacggcagcggcctcaccaccgctcctcctacccctcgagactcccttcagccatccattaagcagagactcgcccggttgcagctcagccctgacttcacttttaccgcaggcctcgccgcagaagtggcagcacggagcctgtcattcactaccatgcaagaacagacattcggtggcgaggaggaggagcagatcatcgaggaaaacaaaaacgagatcgaggaaaagtag

SEQ ID NO: 194033 - DNA, 2340 bp, Artificial Sequence
  derived and/or modified sequence
atgacgccagagtttgacgaggaggtcgtgttcgagaattcccccctgtatcaatatctgcaggatttggggcacactgattttgagatttgttcctctttgtctccaaagactgaaaaatgcactacggaaggacagcaaaagccaccgacaagggtgctgccgaagcaggggatcctccttaaagttgccgagacaattaaatcatggatctttttttcacaatgcaataagaaggatgacctgctccacaagttagacatcggtttcaggttagacagtctgcacactatactccagcaggaagtgctgcttcaagaggacgtggagctgattgagttgctggatccttccattctctcagccgggcagagccaacaacaggagaacggacatcttcctactctgtgtagccttgctacacctaacatttgggatctctccatgctctttgccttcatttccctcctggtgatgctgcccacgtggtggatcgttagttcatggctggtttggggggtaatcctatttgtctatctcgtgatccgggccctgcggttatggcgaacggccaagctgcaggtgactctgaaaaaatacagcgtccacctagaggacatggccactaatagccgagctttcaccaatctcgtgagaaaggcacttagacttattcaggagacagaggtgataagcagaggttttacacttgtgagcgccgcttgtccgttcaataaggctggtcagcatccctcccagcacctcatcggtttgcggaaagcggtgtatagaacgctgagagccaatttccaggccgctaggctcgcgactctctatatgttaaagaactatccactgaatagtgaatccgataacgtcaccaactatatttgcgttgtcccattcaaggaacttggcttggggctgtctgaagagcaaatctccgaggaagaggcccataactttaccgatggcttctccttaccagccttaaaagtgctgtttcaactgtgggtggcacaatccagtgagttcttcaggcggctggcgctgcttttaagtactgcaaattccccccccggcccgctgctgacgccagctctgttaccccaccgaattctgagtgatgtcacccagggcctgccacacgcgcacagcgcgtgcctggaggagcttaagcgctcttatgaattctaccgttacttcgagacacagcaccagtccgttccccagtgtctgagcaagacccaacagaaaagtcgagagttgaataatgtacatacagctgttcggtctttgcagctgcatctgaaagccctcctcaatgaggtgattatactggaggatgagctggaaaagttggtgtgcactaaggagactcaggagcttgtctccgaggcttaccccatactggagcaaaaattgaaactcatccagcctcatgtgcaggctagcaacaactgttgggaggaggctattagtcaggttgacaagctgctgcggcggaacaccgataaaaagggtaaacctgagattgcttgcgaaaacccacattgcactgtcgtgccactgaaacagccaactttgcatattgctgacaaggatcctatccccgaggaacaggagctggaggcctatgtcgatgacattgatatcgactccgatttcagaaaagacgacttctactacctttcccaggaagataaagagcggcagaagcgggaacacgaggaatccaaacgcgtgttgcaggaacttaaatccgtgctaggattcaaggcgagtgaggcggaacggcagaagtggaaacagttactcttttcagatcatgctgtattgaagagcctgtcacctgtcgaccctgtggaacccatctcaaattccgagcctagcatgaacagcgacatgggaaaggtgtctaagaatgacactgaagaggagtctaacaaatccgctacaactgacaacgagattagtcgcacagaatacctgtgcgagaactccttagaagggaagaacaaggacaactccagcaacgaagtgttccctcagggagccgaagagagaatgtgctaccaatgtgagtcagaagacgagccccaagctgacggctctggactgacaacggctccacctacaccacgcgactcgctccagcctagcattaagcagcgcctggcccgcctccagctgagccctgacttcacctttacagctggactcgctgcagaggtggccgcaaggagcctcagctttaccaccatgcaggaacagacattcgggggggaggaagaagaacagataatcgaagagaacaaaaatgaaatagaggaaaagtag

SEQ ID NO: 194034 - DNA, 2340 bp, Artificial Sequence
  derived and/or modified sequence
atgctgcctgacatggaggatgtgcacctgttccagaacagccccctgtaccagtacctgcaggacctgggccacacagactttgagatctgcagcagcctgagccccaagacagagaagtgcaccacagagggccagcagaagccacccaccagggtgctgcccaagcagggcatcctgctgaaggtggccgagaccatcaagtcctggatcttcttcagccagtgcaacaagaaggatgacctgctgcacaagctggacatcggcttccggctggacagcctgcacaccatcctgcagcaggaggtgctgctgcaggaggatgtggagctgattgagctgctggaccccagcatcctgtctgctggccagagccagcagcaggagaatggccacctgcccaccctgtgcagcctggccacccccaacatctgggacctgtccatgctgtttgccttcatcagcctgctggtgatgctgcccacctggtggatcgtgtcctcctggctggtgtggggcgtcatcctgtttgtgtacctggtgatccgggccctgcggctgtggaggacagccaagctgcaggtgaccctgaagaagtacagcgtgcacctggaggacatggccaccaacagccgggccttcaccaacctggtgaggaaggccctgcggctcatccaggagacagaggtgatcagccggggcttcaccctggtgtctgctgcctgccccttcaacaaggccggccagcaccccagccagcacctgattggcctgaggaaggctgtgtaccgcaccctgcgggccaacttccaggccgcccggctggccaccctgtacatgctgaagaactaccccctgaacagcgagagtgacaacgtgaccaactacatctgtgtggtgcccttcaaggagctgggcctgggcctgtctgaggagcagatcagcgaggaggaggcccacaacttcacagatggcttcagcctgcctgccctgaaggtgctcttccagctgtgggtggcccagagcagcgagttcttccggcggctggccctgctgctgagcacagccaacagccccccaggccccctgctgaccccagccctgctgccccaccgcatcctgagtgatgtgacccagggcctgccccacgcccacagcgcctgcctggaggagctgaagaggagctatgagttctaccgctactttgagacccagcaccagagcgtgccccagtgcctgagcaagacccagcagaagagccgggagctgaacaacgtgcacacagctgtgcgcagcctgcagctgcacctgaaggccctgctgaatgaggtgatcatcctggaggatgagctggagaagctggtgtgcaccaaggagacccaggagctggtgtctgaggcctaccccatcctggagcagaagctgaagctgatccagccccacgtgcaggccagcaacaactgctgggaggaggccatcagccaggtggacaagctgctgcggaggaacacagacaagaagggcaagccagagatcgcctgtgagaacccccactgcaccgtggtgcccctgaagcagcccaccctgcacatcgctgacaaggaccccatccctgaggagcaggagctggaggcctacgtggatgacatcgacatcgacagcgacttcaggaaggatgacttctactacctgagccaggaggacaaggagcggcagaagcgggagcacgaggagagcaagagggtgctgcaggagctgaagtctgtgctgggcttcaaggccagcgaggccgagcggcagaagtggaagcagctgctcttcagtgaccatgctgtgctgaagagcctgagccctgtggaccctgtggagcccatcagcaacagcgagcccagcatgaacagcgacatgggcaaggtgtccaagaatgacacagaggaggagagcaacaagagcgccaccacagacaatgagatcagcaggacagagtacctgtgtgagaacagcctggagggcaagaacaaggacaacagcagcaatgaggtgttcccccagggcgctgaggagaggatgtgctaccagtgtgagagtgaagatgagccccaggctgatggcagcggcctgaccacagccccacccaccccccgggacagcctgcagcccagcatcaagcagaggctggcccggctgcagctgagcccagacttcaccttcaccgctggcctggccgctgaggtggccgcccggagcctgtccttcaccaccatgcaggagcagaccttcggcggggaggaggaggagcagatcatcgaggagaacaagaatgaaattgaggagaagtag

SEQ ID NO: 194035 - DNA, 2340 bp, Artificial Sequence
  derived and/or modified sequence
atgaccccagagtttgatgaggaggtggtgtttgagaacagccccctgtaccagtacctgcaggacctgggccacacagactttgagatctgcagcagcctgagccccaagacagagaagtgcaccacagagggccagcagaagccacccaccagggtgctgcccaagcagggcatcctgctgaaggtggccgagaccatcaagtcctggatcttcttcagccagtgcaacaagaaggatgacctgctgcacaagctggacatcggcttccggctggacagcctgcacaccatcctgcagcaggaggtgctgctgcaggaggatgtggagctgattgagctgctggaccccagcatcctgtctgctggccagagccagcagcaggagaatggccacctgcccaccctgtgcagcctggccacccccaacatctgggacctgtccatgctgtttgccttcatcagcctgctggtgatgctgcccacctggtggatcgtgtcctcctggctggtgtggggcgtcatcctgtttgtgtacctggtgatccgggccctgcggctgtggaggacagccaagctgcaggtgaccctgaagaagtacagcgtgcacctggaggacatggccaccaacagccgggccttcaccaacctggtgaggaaggccctgcggctcatccaggagacagaggtgatcagccggggcttcaccctggtgtctgctgcctgccccttcaacaaggccggccagcaccccagccagcacctgattggcctgaggaaggctgtgtaccgcaccctgcgggccaacttccaggccgcccggctggccaccctgtacatgctgaagaactaccccctgaacagcgagagtgacaacgtgaccaactacatctgtgtggtgcccttcaaggagctgggcctgggcctgtctgaggagcagatcagcgaggaggaggcccacaacttcacagatggcttcagcctgcctgccctgaaggtgctcttccagctgtgggtggcccagagcagcgagttcttccggcggctggccctgctgctgagcacagccaacagccccccaggccccctgctgaccccagccctgctgccccaccgcatcctgagtgatgtgacccagggcctgccccacgcccacagcgcctgcctggaggagctgaagaggagctatgagttctaccgctactttgagacccagcaccagagcgtgccccagtgcctgagcaagacccagcagaagagccgggagctgaacaacgtgcacacagctgtgcgcagcctgcagctgcacctgaaggccctgctgaatgaggtgatcatcctggaggatgagctggagaagctggtgtgcaccaaggagacccaggagctggtgtctgaggcctaccccatcctggagcagaagctgaagctgatccagccccacgtgcaggccagcaacaactgctgggaggaggccatcagccaggtggacaagctgctgcggaggaacacagacaagaagggcaagccagagatcgcctgtgagaacccccactgcaccgtggtgcccctgaagcagcccaccctgcacatcgctgacaaggaccccatccctgaggagcaggagctggaggcctacgtggatgacatcgacatcgacagcgacttcaggaaggatgacttctactacctgagccaggaggacaaggagcggcagaagcgggagcacgaggagagcaagagggtgctgcaggagctgaagtctgtgctgggcttcaaggccagcgaggccgagcggcagaagtggaagcagctgctcttcagtgaccatgctgtgctgaagagcctgagccctgtggaccctgtggagcccatcagcaacagcgagcccagcatgaacagcgacatgggcaaggtgtccaagaatgacacagaggaggagagcaacaagagcgccaccacagacaatgagatcagcaggacagagtacctgtgtgagaacagcctggagggcaagaacaaggacaacagcagcaatgaggtgttcccccagggcgctgaggagaggatgtgctaccagtgtgagagtgaagatgagccccaggctgatggcagcggcctgaccacagccccacccaccccccgggacagcctgcagcccagcatcaagcagaggctggcccggctgcagctgagcccagacttcaccttcaccgctggcctggccgctgaggtggccgcccggagcctgtccttcaccaccatgcaggagcagaccttcggcggggaggaggaggagcagatcatcgaggagaacaagaatgaaattgaggagaagtag

SEQ ID NO: 194036 - DNA, 2340 bp, Artificial Sequence
  derived and/or modified sequence
atgctgcccgacatggaggacgtgcacctgttccagaacagccccctgtaccagtacctacaggatttgggtcatactgattttgaaatatgcagctccctgtcaccaaaaactgagaaatgcactacagaaggtcaacaaaaaccccccacccgggtactgcccaaacagggaattttactgaaggtggccgagactatcaaaagttggatcttttttagtcagtgtaataaaaaagacgacttgctccacaagctggacataggttttaggctcgacagtctgcatactatcctgcagcaggaggtgctgttgcaggaagacgtagagctgatcgaactcctggatccaagtattctctccgctggacagagtcagcagcaggagaatggccacctacctactctttgttcactggcaacacctaacatttgggacctcagcatgctattcgctttcatctctttgctggtgatgctgcctacatggtggattgtgagctcttggctcgtatggggggtgatactcttcgtctatcttgttatcagagcattgaggctgtggcggactgccaaactgcaggttactctgaagaaatattctgttcatctcgaagacatggctaccaacagccgcgcctttacgaaccttgttcgcaaagccctgaggctgattcaggagaccgaagtgattagtcggggatttacactggtgagcgccgcctgtccatttaataaagcaggtcagcatccttcgcagcacctgatcgggctgagaaaagcagtgtaccgcacactccgtgctaacttccaagcggctcgattggctactctgtacatgctgaagaattatccactcaacagcgagtctgataacgtgacaaattatatctgcgtcgtccctttcaaagagctggggctcggcctctccgaagaacagatttctgaagaagaagcccacaacttcacagatggattctcattgccagcactcaaagtattgttccagctgtgggtggctcagtcttctgagttttttcgccggcttgcactgctgctcagcaccgcaaactcacctccggggcccctgctaacacctgccctcctaccacatcgcatcctctccgatgtcacacagggcctgccacacgctcattctgcgtgtctggaggaactgaaacgctcctatgagttttatcgttactttgaaacacagcaccaaagcgtcccgcagtgtctttccaagacacaacagaaatcacgcgaactaaataacgtgcacaccgccgtcagaagtttacagctgcacttgaaggccctgttgaacgaggtgatcatcctggaggacgaacttgagaaactagtctgcaccaaagagacacaggagctggtaagtgaagcgtacccgatcttggaacagaaacttaagcttatccagccccacgtgcaggctagtaacaactgctgggaggaggctatttctcaggtcgacaaactgttgaggaggaatacagacaaaaagggtaaacccgaaattgcctgcgaaaatccccactgcacagttgttccgctgaagcagcctactctgcacatcgctgacaaagaccccatcccagaagagcaggaactggaagcctacgttgacgacatagatatcgacagcgattttagaaaagatgatttctactacctgtctcaggaggataaggagaggcaaaagagagagcacgaagaaagcaagcgtgtactccaggagctgaaatccgttctgggttttaaagcatccgaagcagagcgccagaaatggaagcagctcttgtttagcgaccacgcagttctcaaaagcctttctccagtcgatcctgtcgaaccgatctcaaatagcgagccctccatgaattcagatatgggcaaagttagtaaaaacgacaccgaagaagagtccaataagagtgcaaccaccgacaacgagatatcccggacagagtatctctgtgaaaattccctcgaaggcaaaaataaggacaattcctctaatgaggtatttccgcagggagccgaggaaaggatgtgctaccagtgtgagagtgaagatgaaccgcaggccgacggttccggcctgacaacggcccctcccacccctagagatagtctgcaacccagtataaaacaaaggctggctcggctgcaactcagccccgattttactttcaccgctggcctggccgcagaggtggctgctcggagcctctcctttaccaccatgcaggaacagacattcggaggcgaagaggaggaacagatcatcgaggagaataaaaatgaaattgaggaaaaatag

SEQ ID NO: 194037 - DNA, 2340 bp, Artificial Sequence
  derived and/or modified sequence
atgacccccgagttcgacgaggaggtggtgttcgagaacagccccctgtatcagtacctgcaggacttgggacataccgacttcgaaatctgctcttcactgtctccgaagaccgagaaatgcacaacagagggacaacagaagccgcctactcgggtgttgcccaagcagggaatccttctgaaggtcgccgaaaccataaagtcgtggatattttttagtcagtgtaacaagaaagatgatttactccataagctagacattgggtttagattagactcactgcatacaattctgcagcaggaggtcctcctgcaggaggatgtggaactcatagagcttctggaccctagcattttgagtgcgggccagagccagcagcaggaaaatgggcatctgcctaccctatgcagcttggcaacacccaacatctgggacctgtcgatgctattcgccttcatcagcttgttggtaatgttgcctacctggtggattgtctcttcttggctggtgtggggcgtaattctcttcgtctaccttgtcatccgggccctgagattatggcgtacggccaaacttcaggtgacattgaagaagtacagcgttcatctggaggacatggccacaaactctagagcattcacaaacttagtgcgcaaggcactccggctgatacaggaaactgaagtgatctcccgaggatttaccttagtctccgcggcctgcccttttaataaggcgggccagcacccctcacagcacttgatcggcctcaggaaggccgtataccgcacactgagggctaacttccaggccgctcgtctggccactctctacatgttgaaaaattatcctctgaattcagaaagtgacaacgtcacgaattatatatgcgtggtcccgtttaaggagttgggcctgggcctttcggaagaacagatcagcgaagaggaggcccataacttcactgatggatttagcctaccagctctgaaagttctctttcaactctgggtagcacagtcatcagaattttttagacggctagcactgttgctctctacagcaaatagtccacctgggcccctcctaacccccgcactcctgccacatcgcatactctccgatgtcacacagggccttccacatgcacactcggcctgcctggaagagcttaagaggtcctatgaattctaccgatactttgaaacccagcaccagagtgttccacaatgcctgtctaaaacccagcagaaaagccgagagctgaataacgtgcacacagctgtccggtctttgcagcttcacctgaaggccttactgaacgaagttatcattctcgaagacgaactggaaaaactggtctgcacgaaagagacccaggaactggtgtcagaggcttatcctattttggagcagaaattgaaattgattcagccgcacgtgcaggcaagtaacaattgttgggaggaagcgatctctcaggttgacaagctgttacgaagaaataccgataaaaaaggaaagcctgaaattgcctgcgaaaaccctcattgcaccgtcgtacccctgaaacagcccacattgcacatcgctgacaaggacccaattcctgaagaacaggagctcgaagcctacgttgacgacattgatatcgatagcgatttcaggaaggatgacttttactatctgtcccaggaggataaggaaagacaaaagcgggaacatgaggagtccaagcgggtcctccaggagctgaagtcagtattggggtttaaggcaagcgaggccgagcggcaaaagtggaagcagctgttgttctccgatcacgccgtcttgaagtccctgtctcctgttgaccccgttgaacccattagtaattccgagccttctatgaatagcgacatgggcaaggtcagtaaaaatgacacagaagaagaatcaaacaagtctgccacaactgataatgagatctctaggaccgagtatctatgcgaaaatagtctggagggaaagaataaggacaacagctcaaatgaggtgttcccccagggagcagaggagcgcatgtgctatcagtgtgagagcgaggatgagccacaggcagatggtagcggattgacaaccgcccccccaacgccccgcgactccctccagcctagcattaaacagcgattggctagactgcaactgtcccccgacttcacgtttacagccggactcgcagccgaagtagccgccaggtctctgagtttcacaacgatgcaggagcagacctttggcggcgaagaagaagagcagattattgaggaaaacaaaaatgaaatcgaagaaaaatag

SEQ ID NO: 194038 - DNA, 2340 bp, Artificial Sequence
  derived and/or modified sequence
atgctgccagacatggaagacgttcacctttttcagaacagccctctgtatcagtacctgcaggatctgggtcatacagatttcgaaatttgctccagcctcagcccaaagactgagaagtgcacaactgagggccagcagaaaccccctaccagggtcctgcccaagcaaggcattcttttgaaggtagccgagaccatcaagtcttggatctttttttcacaatgtaataaaaaggacgacctcctccataagctggatatcggttttagactagatagtcttcataccatcttgcagcaggaggtccttctccaggaagacgtcgagctcatcgagctcttggacccaagcattctgagtgctggtcagtctcagcagcaggagaacgggcatttaccaaccctgtgttccttagcgacgccgaatatttgggacctttccatgctcttcgcattcatttctcttctggtgatgttgccaacttggtggattgtgtcttcgtggctcgtatggggtgtcattctgtttgtttacttggtgattcgcgcactccggctgtggcgcactgctaagcttcaagtgactcttaaaaagtattccgtacacctcgaggatatggccaccaatagcagggccttcacaaacctcgtccggaaggcactccgcctcattcaggagaccgaggtgataagtagggggtttacactcgtgtccgcagcttgcccgtttaataaggcaggtcaacatccgtctcagcaccttatcggactcaggaaggcggtctataggacactgagggctaacttccaggccgcaagactggcgaccctatacatgctaaagaattaccccctcaactcagagtcagacaatgtcacgaattacatttgcgtggttccctttaaggaactgggtttaggcctgagtgaggagcaaatctccgaggaggaagcacacaacttcaccgatggcttctccctgcccgctctgaaggtactgtttcaactctgggtcgcgcaatcctcagagttcttccgcaggctcgcactccttttgtccactgccaactctcctccaggtcctctgttgacccccgcattacttccccacaggattctttcagacgtgacgcagggcctaccacatgcccatagtgcctgcctcgaagagctgaagagatcttacgagttctatcggtactttgaaacccagcatcagagcgttccacagtgtctatcaaagactcaacagaagtcccgggagctgaataatgttcatacagcagtgcggagcctccagcttcatttaaaagccctgcttaatgaagtgattatcttggaagatgagttggagaagctggtttgtaccaaggagacccaggaactggtgtcagaggcctatccgatcctggagcaaaagttaaagctgatccaacctcatgtgcaagcctccaataactgctgggaggaggcgatcagtcaagtcgataagctgttgaggcggaacacggacaagaaagggaagccggagattgcctgtgagaaccctcattgcaccgtggtgccgctgaaacagcccacattgcacatcgcagataaggatccaattccagaggagcaggagttggaagcctacgtggatgatattgatatagacagcgatttcagaaaggatgatttttactacctatcccaagaagataaggagcgacagaagcgggaacatgaagagtcgaaacgtgtattgcaggaacttaaaagcgtcctcgggtttaaagcatctgaggcagaacgccagaaatggaagcaactgctttttagcgatcacgccgtactcaagagtctatcgccagtggatcccgtggagcctatttctaatagcgaaccctccatgaacagcgacatgggaaaagtgtcaaagaatgatactgaggaagaatcaaacaaatccgctaccacagataacgagatttcccgcaccgagtatctctgtgagaactcactcgaggggaagaacaaagataattcctccaatgaggtgttcccgcagggggcagaagaacggatgtgctatcagtgtgagtcagaggatgagcctcaggcggatgggtcaggcttaactacagccccacctacccctagagatagcctgcagccgtcaatcaagcaacggctggctcggctgcagctgagtcctgactttactttcacagccggactggccgctgaggtagcggcacgttcactgtcatttaccaccatgcaggagcagacatttggtggtgaagaggaagaacagataatcgaagaaaacaagaacgagattgaggaaaaatag

SEQ ID NO: 194039 - DNA, 2340 bp, Artificial Sequence
  derived and/or modified sequence
atgactccagagttcgacgaggaagtggtgtttgaaaacagcccactgtatcagtatttacaggatttgggtcacacagacttcgagatctgcagctccctctctcccaagacagaaaaatgtacgacagaaggtcagcagaagccaccaacccgggtgctccctaaacaaggtatccttctaaaagttgcagagaccattaagtcttggattttctttagccagtgtaacaaaaaagacgacctcctccataaactcgacatcgggtttcgactggatagtctgcacacaatcctccagcaagaagtgctcctgcaggaagatgtagaactcatagaactgctagatccatccatcctgtccgcaggtcagtcccaacagcaagaaaacggtcatctcccaaccttgtgctcattggccacccctaatatctgggatttgtctatgctgtttgcattcatttctctgcttgtgatgttgccaacttggtggatcgtgtctagctggcttgtttggggagtaatcttgttcgtgtatttggtcatccgggctctgcggttatggaggaccgccaagctgcaagtcaccctgaaaaagtattccgtacatctggaggatatggctactaacagcagggcctttaccaacctggtcaggaaagctttacgactaatccaagagacggaggtgatctctagaggttttacccttgtgagcgcggcttgcccttttaataaggcagggcagcacccttctcagcatttgattggtctccgcaaggccgtctacagaacccttcgggcaaattttcaggccgcaagattggccacactgtatatgctcaagaattaccccctgaactccgagagcgacaacgtaactaattacatttgtgtagttcccttcaaagagttaggccttggcctgtcagaagagcagatctcagaggaagaagcccataacttcaccgacggattttcgctacccgcactgaaggtcctgtttcagctgtgggtggcccagtcctctgagttttttagaagattggccttactgttatctacagccaactcccctcctgggccactgctcaccccagcccttttaccccaccggatactttccgacgtcacacagggattgccccacgcgcactccgcttgtctggaggaactcaaacggtcctatgaattttatcgctactttgagacccaacaccaaagtgtacctcagtgcttgagtaagactcagcagaagtctagagaactcaataacgtgcatacagccgtccgatcccttcagctgcacctcaaggccctcttgaacgaggtgattatactcgaggacgagcttgaaaagcttgtatgtaccaaggagacccaggaactggtcagcgaggcctatcccatcctagagcaaaagctcaaactgatacagccacacgtccaagcatccaacaattgttgggaggaagctattagccaggttgacaagctgctgagaaggaatacagataagaaggggaagcccgagattgcctgtgaaaaccctcattgtaccgtggtgcccctgaaacaaccaaccctacatatcgcagataaagaccccatccccgaagagcaagagttggaagcttacgtggacgatatcgacatcgacagcgacttccgtaaggacgatttctactatttaagtcaggaagataaagagcgtcagaagcgcgagcacgaagaatcaaagcgagtgctccaggagctcaagtccgtcttgggcttcaaagcgtccgaggctgagaggcagaaatggaaacagcttctgttctccgaccacgcggtacttaagagtctgagccctgttgatcctgttgagcctatcagcaattcagaaccatctatgaactcagacatgggcaaagtctcgaagaacgatacagaagaggaatccaacaaatcagccacgaccgataatgagatcagtcggaccgagtatctttgcgaaaactctctcgagggaaagaacaaggacaattccagcaatgaggtgtttccacagggggcagaggaacgcatgtgttatcagtgcgaatccgaggatgaaccacaggcagacgggtcaggattaacaaccgcgccaccaacgcctcgagactcactgcaaccgagcataaaacagcgcctggcaaggctgcagttaagtcccgacttcacttttacagctgggttagctgccgaggtggctgccaggagcctttcttttactaccatgcaggagcagactttcggtggggaggaagaggaacaaatcattgaagagaacaagaacgaaattgaagagaagtag

SEQ ID NO: 194040 - DNA, 2835 bp, Artificial Sequence
  derived and/or modified sequence
atgttgcctgacatggaagatgttcatctttttcagaattctccactttaccaatacttacaggatctgggacacacagactttgaaatatgttcttctttgtcaccaaaaacagaaaaatgcacaacagagggacaacaaaagcctcctacaagagtcctaccaaaacaaggtatcctgttaaaagtggctgaaaccatcaaaagttggatttttttttctcagtgcaataagaaagatgacttacttcacaagttggatattggattccgactcgactcattacataccatcctgcaacaggaagtcctgttacaagaggatgtggagctgattgagctacttgatcccagtatcctgtctgcagggcaatctcaacaacaggaaaatggacaccttccaacactttgctccctggcaacccctaatatttgggatctctcaatgctatttgccttcattagcttgctcgttatgcttcccacttggtggattgtgtcttcctggctggtatggggagtgattctatttgtgtatctggtcataagagctttgagattatggaggacagccaaactacaagtgaccctaaaaaaatacagcgttcatttggaagatatggccacaaacagccgagcttttactaacctcgtgagaaaagctttacgtctcattcaagaaaccgaagtgatttccagaggatttacactggtcagtgctgcttgcccatttaataaagctggacagcatccaagtcagcatctcatcggtcttcggaaagctgtctaccgaactctaagagccaacttccaagcagcaaggctagctaccctatatatgctgaaaaactaccccctgaactctgagagtgacaatgtaaccaactacatctgtgtggtgccttttaaagagctgggccttggacttagtgaagagcagatttcagaagaggaagcacataactttacagatggcttcagcctgcctgcattgaaggttttgttccaactctgggtggcacagagttcagagttcttcagacggttagccctattactttctacagccaattcacctcctgggcccttacttactccagcacttctgcctcatcgtatcttatctgatgtgactcaaggtctacctcatgctcattctgcctgtttggaagagcttaagcgcagctatgagttctatcggtactttgaaactcagcaccagtcagtaccgcagtgtttatccaaaactcaacagaagtcaagagaactgaataatgttcacacagcagtgcgtagcttgcagctccatctgaaagcattactgaatgaggtaataattcttgaagatgaacttgaaaagcttgtttgtactaaagaaacacaagaactagtgtcagaggcttatcccatcctagaacagaaattaaagttgattcagccccacgttcaagcaagcaacaattgctgggaagaggccatttctcaggtcgacaaactgctacgaagaaatacagataaaaaaggcaagcctgaaatagcatgtgaaaacccacattgtacagtagtacctttgaagcagcctactctacacattgcagacaaagatccaatcccagaggagcaggaattagaagcttatgtagatgatatagatattgatagtgatttcagaaaggatgatttttattacttgtctcaagaagacaaagagagacagaagcgtgagcatgaagaatccaagagggtgctccaagaattaaaatctgtgctgggatttaaagcttcagaggcagaaaggcagaagtggaagcaacttctatttagtgatcatgccgtgttgaaatccttgtctcctgtagacccagtggaacccataagtaattcagaaccatcaatgaattcagatatgggaaaagtcagtaaaaatgatactgaagaggaaagtaataaatccgccacaacagacaatgaaataagtaggactgagtatttatgtgaaaactctctagaaggtaaaaataaagataattcttcaaatgaagtcttcccccaaggagcagaagaaagaatgtgttaccaatgtgagagtgaagatgaaccacaagcagatggaagtggtctgaccactgcccctccaactcccagggactcattacagccctccattaagcagaggctggcacggctacagctgtcaccagattttaccttcactgctggccttgctgcagaagtggctgctagatctctctcctttaccaccatgcaggaacagacttttggtggtgaggaggaagaacaaataatagaagaaaataaaaatgagatagaagaaaagtaagaaccaagattcatatgaagtgatattagattgttccttttacaaaagtgtttagcttcaagactggaaagggaatatgagtgtaagtttactatatataaagctaagatgtggatttacaggaagaaccctggtttgaataactgatctgaaattagtagttacctgtaaatggcagatcttttaggaaaataagagaaaggtaagggctcttttgaataaactgctgttttatttgtggcacaactgatcaatcttggaaattctttaagtatttttaataagaaatgaattatcatttcttgccagaatttgctaccttaaggtgattgggaaaattctgttgcaagaacattaacatttagtatgactcctttttactgtattcttgcagttaataactgcagctattatgttaataacaagttgtttgtattttatttttgtttataccagtcttaaagatccaggttctgaataaaaaaattaattgat

SEQ ID NO: 194041 - DNA, 4562 bp, Artificial Sequence
  derived and/or modified sequence
gtagttttctggacccacgggacgggcaggagctggagctccgtgccgcctgtactcccgccttcatttcccatcgtgctgaggcgggtggcatggcggagaaggatgacaccggagtttgacgaagaggtggtttttgagaattctccactttaccaatacttacaggatctgggacacacagactttgaaatatgttcttctttgtcaccaaaaacagaaaaatgcacaacagagggacaacaaaagcctcctacaagagtcctaccaaaacaaggtatcctgttaaaagtggctgaaaccatcaaaagttggatttttttttctcagtgcaataagaaagatgacttacttcacaagttggatattggattccgactcgactcattacataccatcctgcaacaggaagtcctgttacaagaggatgtggagctgattgagctacttgatcccagtatcctgtctgcagggcaatctcaacaacaggaaaatggacaccttccaacactttgctccctggcaacccctaatatttgggatctctcaatgctatttgccttcattagcttgctcgttatgcttcccacttggtggattgtgtcttcctggctggtatggggagtgattctatttgtgtatctggtcataagagctttgagattatggaggacagccaaactacaagtgaccctaaaaaaatacagcgttcatttggaagatatggccacaaacagccgagcttttactaacctcgtgagaaaagctttacgtctcattcaagaaaccgaagtgatttccagaggatttacactggtcagtgctgcttgcccatttaataaagctggacagcatccaagtcagcatctcatcggtcttcggaaagctgtctaccgaactctaagagccaacttccaagcagcaaggctagctaccctatatatgctgaaaaactaccccctgaactctgagagtgacaatgtaaccaactacatctgtgtggtgccttttaaagagctgggccttggacttagtgaagagcagatttcagaagaggaagcacataactttacagatggcttcagcctgcctgcattgaaggttttgttccaactctgggtggcacagagttcagagttcttcagacggttagccctattactttctacagccaattcacctcctgggcccttacttactccagcacttctgcctcatcgtatcttatctgatgtgactcaaggtctacctcatgctcattctgcctgtttggaagagcttaagcgcagctatgagttctatcggtactttgaaactcagcaccagtcagtaccgcagtgtttatccaaaactcaacagaagtcaagagaactgaataatgttcacacagcagtgcgtagcttgcagctccatctgaaagcattactgaatgaggtaataattcttgaagatgaacttgaaaagcttgtttgtactaaagaaacacaagaactagtgtcagaggcttatcccatcctagaacagaaattaaagttgattcagccccacgttcaagcaagcaacaattgctgggaagaggccatttctcaggtcgacaaactgctacgaagaaatacagataaaaaaggcaagcctgaaatagcatgtgaaaacccacattgtacagtagtacctttgaagcagcctactctacacattgcagacaaagatccaatcccagaggagcaggaattagaagcttatgtagatgatatagatattgatagtgatttcagaaaggatgatttttattacttgtctcaagaagacaaagagagacagaagcgtgagcatgaagaatccaagagggtgctccaagaattaaaatctgtgctgggatttaaagcttcagaggcagaaaggcagaagtggaagcaacttctatttagtgatcatgccgtgttgaaatccttgtctcctgtagacccagtggaacccataagtaattcagaaccatcaatgaattcagatatgggaaaagtcagtaaaaatgatactgaagaggaaagtaataaatccgccacaacagacaatgaaataagtaggactgagtatttatgtgaaaactctctagaaggtaaaaataaagataattcttcaaatgaagtcttcccccaaggagcagaagaaagaatgtgttaccaatgtgagagtgaagatgaaccacaagcagatggaagtggtctgaccactgcccctccaactcccagggactcattacagccctccattaagcagaggctggcacggctacagctgtcaccagattttaccttcactgctggccttgctgcagaagtggctgctagatctctctcctttaccaccatgcaggaacagacttttggtggtgaggaggaagaacaaataatagaagaaaataaaaatgagatagaagaaaagtaagaaccaagattcatatgaagtgatattagattgttccttttacaaaagtgtttagcttcaagactggaaagggaatatgagtgtaagtttactatatataaagctaagatgtggatttacaggaagaaccctggtttgaataactgatctgaaattagtagttacctgtaaatggcagatcttttaggaaaataagagaaaggtaagggctcttttgaataaactgctgttttatttgtggcacaactgatcaatcttggaaattctttaagtatttttaataagaaatgaattatcatttcttgccagaatttgctaccttaaggtgattgggaaaattctgttgcaagaacattaacatttagtatgactcctttttactgtattcttgcagttaataactgcagctattatgttaataacaagttgtttgtattttatttttgtttataccagtcttaaagatccaggttctgaataaaaaaattaattgatacaattgatgtgtgctggggtttggaactaaaagtagtttcaacagtgcgtgggttatgacatttcttatgtttctttgttcatgtgtgtatttagtagttaattttaagatgtcctagtgatctttaaaagaaaaatattgtaccattttttagaattacactttcacctttctttttgcaattgaaagtgatgatgtcaaagtgggatttctgtactccaaggccccacccccaatttagcaagcagaaaaacgttccttgtatcactttaccttggataattgggtgccattaacacaaacaggtcacaatcctgctgttttctagccctgtccaccataatgagattcaggaaacatcctgtcagcctcctggaaagcatccttgtctccttagtatttcatttacaaactacctcttaacagagactgcttttcaaattggccaatcttacctgttttgtgttgtgattgcattttcaaagagtaattattttcagcatatacagttttgaaacctgtagctcctatgcaataacatagttctatagacattatttgggggaaatgtagtaataactcaatctatgttgctgtcctagaaaggaaattgcatgatgaatctagattgtctttagagtaaagaaacacattcaaattcctgtaacttatcactttcagtgagtaaatttacttataccaaaggggattttttttctttcaggaatctaaggaaatttactttttaacctgagaaaaaaacttggttctgctttatataaacagtagagattattgtactataagtgattttgcctttttgccaaaatcctggaactcatctataattaacctcttcggagcaataccttaggttgggccttgctttactacttagaaatagctaaatttcaattttaaaaatctttgtgtgttataactgttaaattattcaataatacttagggtttactttcttatttaaatcacttatttagtttaccgacttcatttttctttggatttagaagaagcaattatggaaaaacttggtaatctctctcaacctataaccttacacaggaagaattagagtttaataatttttaattcttttattgtatgttacttttattacaccagtttgggggaaaatcttcataaaattgtatcagttttattcagtgttctctaaggtgataccttttaattttgaaagactaaataattttaatcgagaatttccagtctttcagtctgatctatttaattcactacttgttacataatccagtgaaaactctacttgttgaaattatgacataaagatcttgcagctttatttgagtatttgttcttttgtgtagtttccatcttttaaaatatttaaaatattttcaagataaagtattatcttctctgcaaaaattcctggagtaattttctctcataatatttgaagtcagtggttctcagttgtattagtggggtaactacatcaaaataaataaagtcttatttttaaaatgcaaattttagaccatactcccagtgattcttagttggtctttttggaatgagccataggtaatgtttatgtccaataaaatctaggaacctc

SEQ ID NO: 194042 - protein, 782 aa, Artificial Sequence
  derived and/or modified sequence
MSGEDGPAAGPGAAAAAARERRREQLRQWGARAGAEPGPGERRARTVRFERAAEFLAACAGGDLDEARLMLRAADPGPGAELDPAAPPPARAVLDSTNADGISALHQACIDENLEVVRFLVEQGATVNQADNEGWTPLHVAASCGYLDIARYLLSHGANIAAVNSDGDLPLDLAESDAMEGLLKAEIARRGVDVEAAKRAEEELLLHDTRCWLNGGAMPEARHPRTGASALHVAAAKGYIEVMRLLLQAGYDPELRDGDGWTPLHAAAHWGVEDACRLLAEHGGGMDSLTHAGQRPCDLADEEVLSLLEELARKQEDLRNQKEASQSRGQEPQAPSSSKHRRSSVCRLSSREKISLQDLSKERRPGGAGGPPIQDEDEGEEGPTEPPPAEPRTLNGVSSPPHPSPKSPVQLEEAPFSRRFGLLKTGSSGALGPPERRTAEGAPGAGLQRSASSSWLEGTSTQAKELRLARITPTPSPKLPEPSVLSEVTKPPPCLENSSPPSRIPEPESPAKPNVPTASTAPPADSRDRRRSYQMPVRDEESESQRKARSRLMRQSRRSTQGVTLTDLKEAEKAAGKAPESEKPAQSLDPSRRPRVPGVENSDSPAQRAEAPDGQGPGPQAAREHRKVGKEWRGPAEGEEAEPADRSQESSTLEGGPSARRQRWQRDLNPEPEPESEEPDGGFRTLYAELRRENERLREALTETTLRLAQLKVELERATQRQERFAERPALLELERFERRALERKAAELEEELKALSDLRADNQRLKDENAALIRVISKLSK

SEQ ID NO: 194043 - protein, 719 aa, Artificial Sequence
  derived and/or modified sequence
MSGEDGPAAGPGAAAAAARERRREQLRQWGARAGAEPGPGERRARTVRFERAAEFLAACAGGDLDEARLMLRAADPGPGAELDPAAPPPARAVLDSTNADGISALHQACIDENLEVVRFLVEQGATVNQADNEGWTPLHVAASCGYLDIARYLLSHGANIAAVNSDGDLPLDLAESDAMEGLLKAEIARRGVDVEAAKRAEEELLLHDTRCWLNGGAMPEARHPRTGASALHVAAAKGYIEVMRLLLQAGYDPELRDGDGWTPLHAAAHWGVEDACRLLAEHGGGMDSLTHAGQRPCDLADEEVLSLLEELARKQEDLRNQKEASQSRGQEPQAPSSSKHRRSSVCRLSSREKISLQDLSKERRPGGAGGPPIQDEDEGEEGPTEPPPAEPRTLNGVSSPPHPSPKSPVQLEEAPFSRRFGLLKTGSSGALGPPERRTAEGAPGAGLQRSASSSWLEGTSTQAKELRLARITPTPSPKLPEPSVLSEVTKPPPCLENSSPPSRIPEPESPAKPNVPTASTAPPADSRDRRRSYQMPVRDEESESQRKARSRLMRQSRRSTQGVTLTDLKEAEKAGEEAEPADRSQESSTLEGGPSARRQRWQRDLNPEPEPESEEPDGGFRTLYAELRRENERLREALTETTLRLAQLKVELERATQRQERFAERPALLELERFERRALERKAAELEEELKALSDLRADNQRLKDENAALIRVISKLSK

SEQ ID NO: 194044 - DNA, 2349 bp, Artificial Sequence
  derived and/or modified sequence
atgagtggggaagatggacccgctgctggaccaggagcagccgcggcagcagcccgagaacgccgaagagagcagttgaggcagtggggcgcgcgagcaggcgccgaacccgggccgggtgaacgaagggcccgaaccgtgaggttcgagagagcagctgagtttttagcagcctgcgcaggcggagatttagacgaggcgcggcttatgctccgcgccgcagatcccggcccaggtgctgaattggatccggctgctccaccacccgctagggcagtgctcgattcaactaacgctgatggaatttcggctctacaccaggcatgcatcgatgaaaatttagaagtggtgagattcctcgtggagcagggcgcgaccgtgaatcaagccgacaacgagggatggacacctcttcatgttgcagcgtcctgcggctacctggacatcgctaggtacctgctgagtcatggcgccaatatcgcagctgtcaattcagacggagaccttccacttgacctggctgagtctgatgcaatggaagggttgctgaaagccgagattgcgagacggggggtcgatgtagaagccgccaagcgagccgaggaggaactattgcttcatgatacacgctgctggctgaacgggggtgctatgccagaagcacggcacccgagaactggagcttcagcgctccacgtagccgctgcgaaaggatacatcgaagtgatgagactgcttctgcaggcagggtacgaccccgagctgagagatggcgacggatggactccgcttcatgctgccgcccactggggcgttgaggatgcttgtaggctgctggccgagcatggcggaggtatggatagcctcactcatgccggccagaggccatgcgatctggccgacgaggaagtcctgagccttctggaagaattggccaggaaacaggaagaccttcggaaccaaaaagaggctagccagtctcgaggtcaggagccacaagcacccagctcctctaagcataggaggtcttccgtgtgcagactcagcagtagagaaaagatctctctgcaggatcttagtaaggagagacgccccggcggtgctgggggaccccctatccaggatgaagacgaaggcgaggagggtcccactgagccaccgccagccgagccacgcacgctgaatggcgtgtctagtccaccccacccgtctcctaagagcccagttcagttggaggaagcccctttcagccgccgattcgggttgcttaaaaccggctcgtctggggcacttgggccccctgaaaggaggaccgccgaaggggcccctggggcgggcctgcagcggagcgctagctcctcgtggctggaagggacaagtacccaggcaaaagaacttaggctggcacggattacaccaacccccagcccaaaactgcccgagccttctgttcttagcgaggttacaaagccaccaccatgcctggagaattcttctcccccttcaagaattccagagcccgagtcccctgcaaagccaaatgtgcccacggcatccactgccccccctgctgactccagggacaggcgacggagttatcaaatgcccgttcgcgatgaagagtcagagagtcagcgcaaggctagatctcggctaatgaggcagtcccggcgctcgacacagggagtcacgctgacagatctgaaggaagcggagaaggcagctggaaaggcccctgagtcagagaagcctgctcaatctttggatccttctcggcgtccccgcgtcccaggtgtggagaactcggactctcccgcccaaagggccgaggcacccgatggtcagggcccaggccctcaggcggccagggaacaccgtaaggtggggaaggaatggcgggggccagcagagggcgaggaagccgagccagctgatagatcacaggagtcatccactttggaaggcgggcctagcgcacggcgacaaagatggcagcgggacctgaatcctgaacctgaacctgagtctgaagagccggacggtggctttcgtaccctatatgccgagcttagacgggagaacgagagattgcgagaggccctgaccgagaccacactgcgcttagctcagctcaaggtggaactggaacgagctacacagagacaggagcgtttcgcagagcgaccggccctgttagagctggagagatttgagagacgcgctctggaaagaaaagcagcggagctggaagaggaactaaaggccctttcagacctgcgtgcagataatcagcggcttaaggacgaaaacgctgctttgatccgcgtgatctccaagctgtccaagtag

SEQ ID NO: 194045 - DNA, 2160 bp, Artificial Sequence
  derived and/or modified sequence
atgtctggggaggatggcccagcagccgggcctggagccgccgcagcagccgccagggaacggcggagagagcagcttagacaatggggagctcgcgccggagctgagccgggcccaggagagagacgggcccgaaccgtccggtttgaaagggccgctgaatttctggctgcctgcgccggcggagacttggatgaggccagactcatgctccgagccgctgacccagggcccggggctgaactcgaccctgctgccccccccccggccagagcggtactggattcaacaaatgcggacgggatttcggctctgcatcaggcgtgcattgacgaaaatttggaagttgtgaggttcctcgtcgaacaaggggctaccgtgaaccaggccgacaatgagggctggactcccctacatgtggcagcctcttgcggctacctggatattgcccggtatttgctcagtcacggagctaatattgccgctgtgaatagtgatggagaccttcccctcgacttagccgagagtgatgccatggagggactccttaaagcggaaattgcccgcaggggagtcgacgtcgaagcagccaaacgagctgaggaggagcttcttctacatgacacgcggtgttggttgaatggaggtgccatgcctgaggcacgccatccaagaacaggcgcctccgcccttcacgtggccgcagccaagggatatattgaagtaatgcggctgctcttgcaggccgggtatgacccggagttgcgcgatggtgatgggtggactcccctccacgccgctgcccactggggtgtggaggacgcatgccggcttcttgcagaacacggagggggcatggattctttgacgcatgcgggacaacgaccctgtgatctcgctgatgaggaagttctcagtctcctcgaggagttagcacgtaaacaagaagatcttagaaatcagaaggaggcttcccaaagtcgtgggcaggaacctcaggcaccttcctccagcaagcacagacggtcatcagtgtgccggctgagctcacgcgagaagatctctctgcaggatctgtctaaggagcggcgaccagggggagcgggaggccctcccatccaggacgaagacgagggcgaggagggcccaaccgagccgccaccggccgaaccacgcactctgaacggcgtttcatcaccaccccacccaagtcccaaatcaccagtgcagctggaggaggcgcccttttctcgtcgcttcggccttctgaaaacaggcagctctggggcactgggaccgcccgagcgtcgcacagcggagggtgctccaggcgccggactgcaaagatcagcatcatcaagctggttagagggaacctcgactcaggctaaagagctgcggctcgctagaattacccccacccctagcccaaaacttcccgaacctagcgtccttagcgaagtaaccaagccccccccctgtctggaaaattcctctcccccatcaagaatccccgagcctgaaagtccagccaaacccaacgtgcccacggcatcaaccgcgccaccggcggattctagagacagacggaggagctaccagatgcctgtgagagacgaggaaagcgaaagtcagcgcaaagccaggagcaggctaatgcgtcagtctcgcaggtctacccagggtgtgactttaaccgaccttaaggaggccgagaaggccggcgaagaggcggagcctgccgaccggagtcaggagtccagcactctggaaggcggaccttcagctcgacggcagagatggcagcgggacctaaacccggaaccggagcccgagagcgaagagcctgatggtggcttccgaacactctacgccgagctgcgcagggagaatgagagactgcgcgaggcgcttacagaaacaactttgaggctggcccagctcaaggtggagcttgagcgggctacacagagacaggaaaggttcgccgagagaccagccctcttggagctggaacgctttgagagaagggccctcgagcgcaaggccgccgaactggaggaggaactgaaagccctctccgatctgagggccgataaccagcgactgaaggacgagaatgccgctttgatacgagtgatctcaaagctctccaagtag

SEQ ID NO: 194046 - DNA, 2349 bp, Artificial Sequence
  derived and/or modified sequence
atgtctggagaagatggccctgctgctggccctggagctgctgctgctgctgcccgggagcggcggcgggagcagctgcggcagtggggcgcccgggccggggctgagcccggccctggagagcggcgggccaggacagtgcgctttgaaagagctgctgagttcctggccgcctgtgccggcggggacctggatgaggcccggctgatgctgcgggctgctgaccccggccctggagctgagctggaccctgctgcccctcctccagcccgggctgtgctggacagcaccaatgctgatggcatcagcgccctgcaccaggcctgcattgatgagaacctggaggtggtgcgcttcctggtggagcagggcgccaccgtgaaccaggccgacaatgaaggctggacccccctgcacgtggccgccagctgtggctacctggacatcgcccgctacctgctgagccacggggccaacattgctgctgtgaacagtgatggagacctgcccctggacctggccgagagtgatgccatggagggcctgctgaaggccgagatcgccaggagaggagtggatgtggaggccgccaagagagctgaggaggagctgctgctgcatgacacccgctgctggctgaatggaggagccatgcctgaggcccggcaccccaggactggagccagcgccctgcacgtggccgccgccaagggctacatcgaggtgatgaggctgctgctgcaggccggctatgaccctgagctgagagatggagatggctggacccccctgcacgccgccgcccactggggcgtggaggatgcctgccgcctgctggccgagcacggcggcggcatggacagcctgacccacgccggccagaggccctgtgacctggctgatgaggaggtgctgagcctgctggaggagctggccaggaagcaggaggacctgaggaaccagaaggaggccagccagagccggggccaggagccccaggcccccagcagcagcaagcacagaagaagctctgtgtgccgcctgagcagccgggagaagatcagcctgcaggacctgagcaaggagaggaggcctggaggagctgggggcccccccatccaggatgaagatgaaggagaggagggccccacagagcccccacctgctgagcccaggaccctgaatggagtgagcagccccccccaccccagccccaagagccctgtgcagctggaggaggcccccttcagccgccgcttcggcctgctgaagacaggcagcagcggggccctgggccccccagagaggagaacagctgagggcgcccctggagctggcctgcagaggtctgccagcagctcctggctggagggcaccagcacccaggccaaggagctgcggctggcccgcatcacccccacccccagccccaagctgcctgagcccagcgtgctgtctgaggtgaccaagcccccaccctgcctggagaacagcagcccccccagccgcatccctgagcctgagagccctgccaagcccaacgtgcccacagccagcacagcccccccagctgacagccgggacagaagaagaagctaccagatgcctgtgagagatgaggagagcgagagccagaggaaggcccggagccggctgatgaggcagagcagaagaagcacccagggcgtgaccctgacagacctgaaggaggccgagaaggctgctgggaaggcccctgagagcgagaagccagcccagagcctggaccccagccggcggccccgggtgcctggggtggagaacagcgacagccctgcccagagagctgaggccccagatggccagggccctggcccccaggccgcccgggagcacaggaaggtgggcaaggagtggaggggccctgctgagggggaggaggccgagcctgctgacaggagccaggagagcagcaccctggagggcggccccagcgcccggcggcagcgctggcagagggacctgaaccctgagcctgagcctgagagcgaggagccagatggcggcttccgcaccctgtatgcagagctgcggagagaaaatgaaaggctgcgggaggccctgacagagaccaccctgcggctggcccagctgaaggtggagctggagcgggccacccagaggcaggagagatttgctgagaggcctgccctgctggagctggagagatttgaaagaagagccctggagaggaaggctgctgagctggaggaggagctgaaggccctgagtgacctgcgggctgacaaccagaggctgaaggatgaaaatgctgccctgatccgggtcatcagcaagctgagcaagtag

SEQ ID NO: 194047 - DNA, 2160 bp, Artificial Sequence
  derived and/or modified sequence
atgtctggagaagatggccctgctgctggccctggagctgctgctgctgctgcccgggagcggcggcgggagcagctgcggcagtggggcgcccgggccggggctgagcccggccctggagagcggcgggccaggacagtgcgctttgaaagagctgctgagttcctggccgcctgtgccggcggggacctggatgaggcccggctgatgctgcgggctgctgaccccggccctggagctgagctggaccctgctgcccctcctccagcccgggctgtgctggacagcaccaatgctgatggcatcagcgccctgcaccaggcctgcattgatgagaacctggaggtggtgcgcttcctggtggagcagggcgccaccgtgaaccaggccgacaatgaaggctggacccccctgcacgtggccgccagctgtggctacctggacatcgcccgctacctgctgagccacggggccaacattgctgctgtgaacagtgatggagacctgcccctggacctggccgagagtgatgccatggagggcctgctgaaggccgagatcgccaggagaggagtggatgtggaggccgccaagagagctgaggaggagctgctgctgcatgacacccgctgctggctgaatggaggagccatgcctgaggcccggcaccccaggactggagccagcgccctgcacgtggccgccgccaagggctacatcgaggtgatgaggctgctgctgcaggccggctatgaccctgagctgagagatggagatggctggacccccctgcacgccgccgcccactggggcgtggaggatgcctgccgcctgctggccgagcacggcggcggcatggacagcctgacccacgccggccagaggccctgtgacctggctgatgaggaggtgctgagcctgctggaggagctggccaggaagcaggaggacctgaggaaccagaaggaggccagccagagccggggccaggagccccaggcccccagcagcagcaagcacagaagaagctctgtgtgccgcctgagcagccgggagaagatcagcctgcaggacctgagcaaggagaggaggcctggaggagctgggggcccccccatccaggatgaagatgaaggagaggagggccccacagagcccccacctgctgagcccaggaccctgaatggagtgagcagccccccccaccccagccccaagagccctgtgcagctggaggaggcccccttcagccgccgcttcggcctgctgaagacaggcagcagcggggccctgggccccccagagaggagaacagctgagggcgcccctggagctggcctgcagaggtctgccagcagctcctggctggagggcaccagcacccaggccaaggagctgcggctggcccgcatcacccccacccccagccccaagctgcctgagcccagcgtgctgtctgaggtgaccaagcccccaccctgcctggagaacagcagcccccccagccgcatccctgagcctgagagccctgccaagcccaacgtgcccacagccagcacagcccccccagctgacagccgggacagaagaagaagctaccagatgcctgtgagagatgaggagagcgagagccagaggaaggcccggagccggctgatgaggcagagcagaagaagcacccagggcgtgaccctgacagacctgaaggaggccgagaaggccggggaggaggccgagcctgctgacaggagccaggagagcagcaccctggagggcggccccagcgcccggcggcagcgctggcagagggacctgaaccctgagcctgagcctgagagcgaggagccagatggcggcttccgcaccctgtatgcagagctgcggcgggagaatgaaaggctgcgggaggccctgacagagaccaccctgcggctggcccagctgaaggtggagctggagcgggccacccagaggcaggagagatttgctgagaggcctgccctgctggagctggagagatttgagcggcgggccctggagaggaaggctgctgagctggaggaggagctgaaggccctgagtgacctgcgggctgacaaccagaggctgaaggatgaaaatgctgccctgatccgggtcatcagcaagctgagcaagtag

SEQ ID NO: 194048 - DNA, 2349 bp, Artificial Sequence
  derived and/or modified sequence
atgagcggcgaggacggccccgccgccggccccggcgccgccgccgcggctgctcgggagcgtcggcgtgagcagctccgccagtggggggcgagagcgggggcagaacccggcccaggtgaacgaagggcccgcacagtacgtttcgagagagctgccgaattcctcgcagcttgcgcaggcggcgatctggacgaagcccggctgatgctgcgggctgcagacccagggccaggcgccgagttagatcccgcagcccccccccctgctcgcgcagtgttagattctacgaatgccgacgggatatcggcccttcatcaggcctgcattgacgagaacttggaggtggtcagattcttggtcgagcaaggcgccaccgtcaaccaagccgataacgagggctggacgccactgcacgtggccgcgagttgcggctatctggatatcgcccggtatctgctgtcccacggggcgaacatcgcagctgtcaactccgacggggatttgcccctggacctggccgaatcagacgcaatggaaggtctgctcaaagctgagatcgcgaggagaggcgtagatgtggaggccgctaaaagagccgaggaggaactgcttctgcacgatactcgctgttggctaaatggaggggcgatgcctgaggcccggcaccctcgcactggggcaagcgccctgcacgtggctgcagccaaaggatacatcgaggtgatgcgtttgctgctgcaggccggctatgacccagagctgcgagatggagatggctggacccctctgcatgcagcagctcactggggcgtagaagatgcttgtcgtcttctggcagaacatggtggcggcatggatagcctgacccacgcaggtcagcgcccgtgcgatctggctgatgaggaggtactgagcctgctcgaagagcttgcccgaaagcaggaggatttgcggaatcagaaagaggctagccaaagtcgaggccaggagccacaagctcccagctcatctaagcataggagaagcagtgtgtgccgtttgtcttcgagagagaagatttctttacaggatcttagtaaagagcgccggcccgggggcgcaggcgggcccccaatacaagacgaggacgaaggagaagaagggcccaccgagccgccccctgccgagcctagaactctgaacggagtctcaagtcccccacacccgagcccgaagtctcctgtgcaactggaggaggctccgttttcaagacgattcggtctccttaaaacgggatcatcgggcgctctgggcccaccggagcgcaggaccgccgagggcgccccaggcgcgggcttacagcgcagcgcttcgtcctcatggctcgaaggcacatctacgcaagcgaaggagctccgcctggctaggatcacccctacgccatcccccaagcttcccgagccgagcgtgctgtcagaggtcactaaacctcctccatgtctggagaacagttcaccaccctcccgaatccctgagcctgagagcccagcaaagcccaacgtcccaactgcaagcacggcccctcctgcggatagcagggaccgcaggagatcataccaaatgccggtgcgcgatgaagagagcgaatcccagagaaaggccaggtctcgcctgatgagacaatctcggagatctacccaaggagtcaccttgacggatctgaaggaggccgagaaagccgccggtaaagccccggaaagcgagaagccagctcagagtctcgacccaagccggaggccaagggtgcctggagtcgagaacagcgacagccctgctcagagggccgaggcccccgatgggcaggggccagggcctcaggcagcacgcgagcatagaaaagtgggaaaagagtggaggggccctgccgaaggcgaggaggctgaaccagccgataggagccaggagtccagcacactggaagggggcccatctgcaagacgccagcggtggcagagggacctgaaccctgagccagaacccgagtccgaagagcccgatggtggctttaggacactgtatgccgagctgcggcgggagaacgaacgcctccgggaagccctgactgagaccaccctaaggttggctcagctgaaggtggagctggagcgtgctacccagcgccaggagagattcgcagaacggcctgcgctgctcgaacttgaacggtttgagcgacgagcacttgaacgaaaagccgcagaactcgaagaagaactgaaagccttgtccgacttacgcgctgataaccaacgcctcaaagacgaaaacgcagcattgattagggtcattagtaaactgtcgaaatag

SEQ ID NO: 194049 - DNA, 2160 bp, Artificial Sequence
  derived and/or modified sequence
atgagcggcgaggacggccccgccgccggccccggcgccgccgccgcggccgccagagagcggcggagggagcagctgagacagtggggagcccgtgcaggggctgagcccggtcccggggagcggagggcccgtacggtgagattcgagagggcggctgagttccttgcggcctgtgctggcggagacctggacgaggctagactgatgctgagagcagccgaccccggccctggagctgagcttgacccagccgctcccccccctgcaagagccgtgctcgactccacaaatgctgatgggatttccgccctacatcaggcctgtattgacgagaatctggaggtggtccgcttcctggttgagcagggagccacagtgaatcaggccgacaatgaaggctggactcctctgcacgtcgctgcctcttgtggttaccttgatatcgcccgctatttgttaagccacggtgcaaatatcgccgcagttaattccgatggtgaccttcctctggatctcgcagagtcagatgccatggagggcctgctgaaagccgagattgcccgcagaggggtggacgttgaggcggccaaacgggcagaagaggagctcctcttgcacgacactcggtgctggctgaatggcggggccatgccagaggcgagacaccctagaactggcgccagtgccctccatgttgccgccgctaagggatatatagaggtgatgcgtctcctactgcaagcaggttatgacccagagttgcgggacggagatggctggacgcccctccatgcagcggctcattggggagtcgaggacgcatgccgcctacttgcagagcacggcgggggaatggatagcctcacacatgctgggcaacggccttgcgacctcgctgacgaagaagttctgtccctgctcgaggagctggcgagaaaacaggaggacttacgaaatcagaaggaagcgtctcagagcaggggacaagagccacaagcgccatcttcatcaaagcatagaaggtccagcgtgtgcagactgtcctcaagggaaaaaatttctttgcaagacctaagtaaagaacgtcgacccggcggcgctggtggcccgcccattcaggacgaagacgaaggtgaagaaggtcctaccgagcctccacccgcggagccccgcacgctcaatggtgtgtccagccccccccacccatcacccaagtcacccgtacaactggaagaagcacctttttcccgccggttcggactactaaaaacaggaagcagcggcgccctggggcccccagagagaaggacagccgaaggagcccctggcgccggtctgcaaagaagcgcatcctcatcctggctagaaggtacctccacacaggcaaaagaactgaggctcgctcgcatcacccccacgccatcccccaagctccccgaaccctccgtgctctccgaagttacaaagccaccaccctgtctggagaactccagccccccatctaggataccagagcccgagtctcccgcaaagccgaacgtgcctacagcctctactgcccccccagcagacagcagggataggcggcgcagttaccaaatgccagttagggatgaggaatctgaatcccaaaggaaggccaggtctcgcttgatgcggcagtcgcgacgcagcacccaaggcgtgacgctaacagatttgaaagaggcagagaaggctggcgaggaagcagagcctgctgatagaagccaggaatctagtaccttagagggaggcccatcagcccgccggcagcggtggcaacgggatttaaaccctgaacctgaacccgagtctgaagagcctgatggtggcttcaggacactgtatgcagagctgcgcagagaaaacgagcgacttcgcgaagctctcaccgagactactcttagacttgctcagctgaaagtggaactggaaagggccactcaacgccaggaaaggtttgcggagcgtccagcactgctcgagttggaaagatttgagcgccgcgccctggagcgcaaagccgccgagctcgaggaagaattaaaggccttatctgacctgagagctgataatcaacggttgaaagatgaaaacgcagccctgatccgtgtgatttctaaactctctaaatag

SEQ ID NO: 194050 - DNA, 2349 bp, Artificial Sequence
  derived and/or modified sequence
atgtccggagaggacggtcccgcagccggacctggggcagctgccgctgcagctcgggagagacgaagggaacaacttcggcaatggggcgctcgagccggtgccgagcctggaccaggcgagaggcgggcacggacagttcgctttgaaagagcagccgagttcttggcggcttgtgccggtggtgatttagatgaagcacggctgatgctccgggcagcagacccaggcccaggagcagaactagatcctgcagccccaccccctgctcgagcagttcttgacagcacgaatgcagatgggataagcgcccttcatcaggcttgcattgacgaaaatctcgaggtagtgaggtttcttgtggaacaaggtgctaccgtcaatcaggcagacaatgaaggctggaccccgttgcacgttgccgcttcatgcggctatctagatattgctagatatttgctgtctcatggtgcaaatatagctgctgtgaactctgacggcgacctccctttagatctagccgagtctgacgccatggaaggcctgttgaaagcggaaatcgccagacgtggggttgatgtggaggcagccaagcgcgctgaggaggaactgttgctgcacgacacaaggtgttggctgaacggtggcgcaatgcctgaggcgagacatcctaggaccggggcatctgccctgcatgtcgccgcagccaaaggatacatagaggtcatgaggctactactccaggccggttatgatcccgaactccgagacggcgatggctggacgccactgcacgccgcagctcactggggtgttgaagatgcctgtaggctgctggccgagcatgggggtggcatggattctctgactcatgcaggccagcgcccatgtgatcttgccgacgaggaagtattatcccttcttgaggagttggcccgaaaacaggaggacctccggaatcagaaggaagccagccagtcccgtggtcaggagccacaggctccttcctctagcaagcatcgccgaagctcagtatgcagactgtcatcaagggaaaagatctctctgcaggatctttctaaggaacggagacctggcggtgccggtggcccacccattcaggacgaggacgagggcgaggaaggcccaactgaacctcccccagccgagccacgaactcttaacggagtttcctccccgcctcatccctcacccaaatcccccgtccaactcgaggaggcccctttctcgaggcggttcggtctccttaagacaggcagcagcggggctctcgggccacctgagcgcaggacggccgaaggggctcctggtgccggacttcagagaagcgcatccagctcgtggttggaggggacctccacccaagccaaggaactcaggctggctcgcattaccccaactccttccccgaagttacctgagcccagcgtgcttagcgaggtgaccaagcctcctccgtgcctggaaaattcatcaccaccaagcaggattcccgaaccagaatctcctgccaaacccaatgtgccaaccgcctccaccgcccctccagccgactctagggatcggcgtcgctcctaccagatgcccgttagagatgaggagtcagagtctcagagaaaagccaggtccaggttaatgcggcagtcaaggcgcagcactcagggagtcacactcacggacctgaaggaggcagagaaggctgccggaaaggcacctgagtccgagaaacccgcacagtcactggatccttctaggagaccacgcgtcccaggtgttgagaattccgattcacctgcccagcgcgcagaggcgccagatgggcagggtcctggaccccaggccgctcgggagcaccgcaaagttgggaaggaatggagagggccagcagaaggcgaagaagccgagcccgcagacaggagccaggagagctccacccttgagggaggcccatccgccagacgccagagatggcagcgagacctgaaccccgagcctgaacccgagtcagaggagccagacggaggctttcggacgctgtatgctgaacttcgccgtgagaacgaacgcctccgcgaggctctgactgaaacaactcttcgccttgcccagctcaaagtggagctagagagggccacacagcggcaggagagattcgccgaaaggcctgctttactggaactggaacgatttgagcggagagcactggaaagaaaagctgcagagctggaggaagaattgaaagccttatcggatctgcgcgcagacaaccagcgcttaaaggacgagaatgcagcgctgattagagtgatttcgaaactctcaaagtag

SEQ ID NO: 194051 - DNA, 2160 bp, Artificial Sequence
  derived and/or modified sequence
atgagcggcgaggacggccctgcagccggacctggagctgcagcggctgctgcgcgtgagagacggagggagcagctcaggcagtggggggcaagagcgggagccgagccgggtcctggggagcgtcgggcaagaaccgtccggttcgaacgcgctgcggaatttctagcggcttgcgctggaggagatctggacgaagcccgtcttatgttgcgggctgccgatcctgggcctggagctgagctggatcctgctgcgcctccccctgctcgggcagttctcgacagcaccaatgctgacggcatttctgctttgcatcaggcctgtatcgatgagaacctcgaagtcgttagatttttggttgaacaaggcgcaacagtcaaccaggctgacaatgaagggtggactccactgcatgtcgcagcttcctgcggatatctcgatatagcacggtacctgctgagccacggtgccaatattgccgctgtgaattccgatggagatcttccgctggatctggcagaatccgacgctatggaggggctgctaaaagcggagatcgccagaagaggcgtggacgtggaggccgcaaaacgagctgaggaagagttgttgctacacgatacccgctgttggctcaacgggggagctatgcccgaagcgcgtcatccgcgaacaggggcttcagctttacatgtggcagctgccaaggggtacatcgaggttatgcggcttctcttacaggcagggtatgatcccgaactcagggacggcgacggttggacccccctacacgccgcagcccactggggggtggaggacgcatgcaggctgctggcggaacatggcggaggaatggacagcctcactcatgccggacagaggccttgtgacctggcagacgaagaggtgctgtctctcttggaggagcttgctagaaaacaggaagacttacgtaaccagaaggaggccagccagtcacgcggacaagagccacaggccccatccagctcgaagcaccggcgatctagcgtgtgtagactcagctcccgcgagaagatttccctacaggatctgagcaaggaaaggagacctggtggagccggaggtccccctatccaggacgaggatgagggagaagaaggcccaactgagcctcctccagcggagcccagaaccctcaacggagtctccagccccccacatccctccccgaagagccccgtgcagttggaggaggcccctttctcaagacgcttcggcctgctcaaaactggcagcagtggggctctgggccctcccgaacgtcggaccgcagagggagccccaggagctggcctgcagaggagtgcttcttcctcatggctggaaggtacatcgacccaggcaaaggagttgcgtttggcccgaattactcccactcccagcccgaagctccctgaaccaagtgtgttgtctgaggtcacaaagccccctccctgcctggagaactcgagtcccccttccagaatccccgagccagagtctcctgcaaaaccgaacgttccaacagcctcgaccgctccccctgctgattcgcgtgatcgcagaaggtcataccagatgccggtgagagacgaagagtctgaatcacaacgaaaggctcggtcccgcctgatgcgccagtcccgtaggtccacacagggggtgacgctgacggacctgaaagaggctgagaaggccggtgaggaagctgagcccgcagaccggtcccaggaaagcagcacactagagggcggtccaagcgccagacgccagaggtggcagagagatttaaatccggaaccagagcccgagagcgaagagcctgatggagggtttaggaccttatacgctgagctgagacgggagaacgagcggttacgcgaagctctgaccgagactacactgcggttagctcagttaaaggttgagttggagcgagccacgcagcgtcaggagcggttcgccgaacgcccagccctgcttgaactggagaggtttgagagacgagcactagagcgcaaggccgcagagctggaggaggagctgaaggctctgagcgacctgagagccgataaccagagactaaaagacgagaatgctgccctgattcgagtgatttccaaactttccaaatag

SEQ ID NO: 194052 - DNA, 2922 bp, Artificial Sequence
  derived and/or modified sequence
gcgggcgggcggtgcgatgtccggagaggatggcccggcggctggcccgggggcggcggcggcggctgcccgggagcggcgacgggagcagctgcggcagtggggggcgcgggcgggcgccgagcctggccccggagagcgccgcgcccgcaccgtccgcttcgagcgcgccgccgagttcctggcggcctgtgcgggcggcgacctggacgaggcgcgtctgatgctgcgcgccgccgaccctggccccggcgccgagctcgaccccgccgcgccgccgcccgcccgcgccgtgctggactccaccaacgccgacggtatcagcgccctgcaccaggcctgcattgatgagaacctggaggtggtgcgcttcttggtggagcagggcgccactgtgaaccaggcagacaacgagggctggacgccactgcacgtggccgcctcctgtggctacctagatatcgccaggtacctcctgagccacggggccaacatcgccgccgtcaacagtgacggggacctgcccctggacctggccgagtcggacgccatggaggggctgctgaaggcggagatcgcccgccgaggtgtggatgtggaagcagccaagcgggcagaagaggaattgctccttcatgacacgaggtgctggctgaatgggggcgccatgccagaggcccggcacccccgcacaggcgcctctgccctgcacgtggctgctgccaagggctacattgaggtgatgaggttgctccttcaggctggctacgacccagagctccgggacggggacggctggactcccctgcacgcagcggcacactggggcgtggaggatgcctgccgcctgctggccgagcatggcgggggcatggactcactgacccatgcggggcagcgtccctgtgacctggccgatgaggaagtactgagcctgttggaggaactggcccggaaacaggaggaccttcggaaccaaaaagaagcttcccagagccggggccaggagccccaagcgccctctagcagcaaacacagaaggagctctgtgtgtcgtctgagcagtcgcgagaagatttccctccaggacttgtccaaggagcgccggcctggtggggctggggggccccccatccaggacgaggatgagggggaagaaggtcccaccgaaccaccccctgcagaacccagaaccctcaatggcgtctcctccccgccgcaccccagccctaagagtcccgtgcagcttgaagaggcccccttctccaggcgctttggcctcctgaagacagggagttctggtgccctgggtccccctgaaaggcggacagcggagggagcccctggggctgggctgcagcgctcggcttcctcctcctggctggaagggacctccactcaggccaaggagctccgtcttgccagaattaccccgaccccctccccgaagctgccggagccctctgtcctgtctgaggtcaccaagcctcctccttgcttggagaactcctcgcctccctccaggattccggagcctgaatccccagcgaagccaaacgtccccacagcctccacggcgcccccagcggactcccgggaccgacggaggtcctaccagatgcctgtgcgggatgaggagtcggaatcccagagaaaagctcgctcccgtctcatgcgccagtctcggaggtccacacagggtgtgactcttacagacctgaaggaggcagagaaggctgcagggaaggccccagagtcagagaagccggcgcagagcctggacccttcccgaaggccccgcgtccctggagtggagaactctgacagccctgcccagagagcagaggcgcccgacgggcagggtccgggaccgcaggcggccagggagcaccgcaaggtcggaaaggagtggagggggcctgcggagggggaggaggcggagccggctgaccgcagccaggagtccagcaccctggagggcggcccctcggcccgcaggcagcggtggcagcgggacctcaacccagaacctgagccagaatcggaagagccagacggaggctttaggacgctgtatgcagagctgcgcagggagaacgagcggcttcgcgaggccctgaccgagaccacgctgcggctggcgcagctcaaggtggagctggagcgggccacgcagaggcaagaacgcttcgctgagaggccagccctcctggaactggagagattcgagcgcagggccctggaacgcaaggccgcagagctggaggaggagctgaaggccctgtctgacctccgcgctgacaaccagcgcctcaaggatgagaatgcagcgttgatccgcgtcatcagcaaactctccaagtgacccggagggactttcccgcacccgtatttatacagctgcttctgccacacgcaccccttcccccgtgtgaacacgagtgacagggctccgggggaagtctcagagaagccatagcccccctgggacctccggactgggaggggagcagagtccccaggagccgagggggccacccgaggccaggatggaggtgggaggccgagccaagcagggggacgttgccagaggggaccagggccagagacgggaccaggaaggaactgaggaccaagaagtgcaaggatcagtagccaggaccagagtggccgcctggaggtccccatctcacgtgtgatgccaccccgtcacccctcccctcctgagcagggatccaagaatgtgccaagagtcccgccagcctcagccaggtgggcctgtatatagggtccatgtgcaatagggagggacgtcttctattttttgctgccccctccccgcccactgtctggggcagggggagaaggtattttcgagataaagcacaggcaccacaaataaaagtcgtgaagttgccactc

SEQ ID NO: 194053 - DNA, 2733 bp, Artificial Sequence
  derived and/or modified sequence
gcgggcgggcggtgcgatgtccggagaggatggcccggcggctggcccgggggcggcggcggcggctgcccgggagcggcgacgggagcagctgcggcagtggggggcgcgggcgggcgccgagcctggccccggagagcgccgcgcccgcaccgtccgcttcgagcgcgccgccgagttcctggcggcctgtgcgggcggcgacctggacgaggcgcgtctgatgctgcgcgccgccgaccctggccccggcgccgagctcgaccccgccgcgccgccgcccgcccgcgccgtgctggactccaccaacgccgacggtatcagcgccctgcaccaggcctgcattgatgagaacctggaggtggtgcgcttcttggtggagcagggcgccactgtgaaccaggcagacaacgagggctggacgccactgcacgtggccgcctcctgtggctacctagatatcgccaggtacctcctgagccacggggccaacatcgccgccgtcaacagtgacggggacctgcccctggacctggccgagtcggacgccatggaggggctgctgaaggcggagatcgcccgccgaggtgtggatgtggaagcagccaagcgggcagaagaggaattgctccttcatgacacgaggtgctggctgaatgggggcgccatgccagaggcccggcacccccgcacaggcgcctctgccctgcacgtggctgctgccaagggctacattgaggtgatgaggttgctccttcaggctggctacgacccagagctccgggacggggacggctggactcccctgcacgcagcggcacactggggcgtggaggatgcctgccgcctgctggccgagcatggcgggggcatggactcactgacccatgcggggcagcgtccctgtgacctggccgatgaggaagtactgagcctgttggaggaactggcccggaaacaggaggaccttcggaaccaaaaagaagcttcccagagccggggccaggagccccaagcgccctctagcagcaaacacagaaggagctctgtgtgtcgtctgagcagtcgcgagaagatttccctccaggacttgtccaaggagcgccggcctggtggggctggggggccccccatccaggacgaggatgagggggaagaaggtcccaccgaaccaccccctgcagaacccagaaccctcaatggcgtctcctccccgccgcaccccagccctaagagtcccgtgcagcttgaagaggcccccttctccaggcgctttggcctcctgaagacagggagttctggtgccctgggtccccctgaaaggcggacagcggagggagcccctggggctgggctgcagcgctcggcttcctcctcctggctggaagggacctccactcaggccaaggagctccgtcttgccagaattaccccgaccccctccccgaagctgccggagccctctgtcctgtctgaggtcaccaagcctcctccttgcttggagaactcctcgcctccctccaggattccggagcctgaatccccagcgaagccaaacgtccccacagcctccacggcgcccccagcggactcccgggaccgacggaggtcctaccagatgcctgtgcgggatgaggagtcggaatcccagagaaaagctcgctcccgtctcatgcgccagtctcggaggtccacacagggtgtgactcttacagacctgaaggaggcagagaaggctggggaggaggcggagccggctgaccgcagccaggagtccagcaccctggagggcggcccctcggcccgcaggcagcggtggcagcgggacctcaacccagaacctgagccagaatcggaagagccagacggaggctttaggacgctgtatgcagagctgcgcagggagaacgagcggcttcgcgaggccctgaccgagaccacgctgcggctggcgcagctcaaggtggagctggagcgggccacgcagaggcaagaacgcttcgctgagaggccagccctcctggaactggagagattcgagcgcagggccctggaacgcaaggccgcagagctggaggaggagctgaaggccctgtctgacctccgcgctgacaaccagcgcctcaaggatgagaatgcagcgttgatccgcgtcatcagcaaactctccaagtgacccggagggactttcccgcacccgtatttatacagctgcttctgccacacgcaccccttcccccgtgtgaacacgagtgacagggctccgggggaagtctcagagaagccatagcccccctgggacctccggactgggaggggagcagagtccccaggagccgagggggccacccgaggccaggatggaggtgggaggccgagccaagcagggggacgttgccagaggggaccagggccagagacgggaccaggaaggaactgaggaccaagaagtgcaaggatcagtagccaggaccagagtggccgcctggaggtccccatctcacgtgtgatgccaccccgtcacccctcccctcctgagcagggatccaagaatgtgccaagagtcccgccagcctcagccaggtgggcctgtatatagggtccatgtgcaatagggagggacgtcttctattttttgctgccccctccccgcccactgtctggggcagggggagaaggtattttcgagataaagcacaggcaccacaaataaaagtcgtgaagttgccactc

SEQ ID NO: 194054 - DNA, 2349 bp, Artificial Sequence
  derived and/or modified sequence
atgagcggcgaggacggccccgccgccggccccggcgccgccgccgccgccgccagagagagaagaagagagcagctgagacagtggggcgccagagccggcgccgagcccggccccggcgagagaagagccagaaccgtgagattcgagagagccgccgagttcctggccgcctgcgccggcggcgacctggacgaggccagactgatgctgagagccgccgaccccggccccggcgccgagctggaccccgccgcccccccccccgccagagccgtgctggacagcaccaacgccgacggcatcagcgccctgcaccaggcctgcatcgacgagaacctggaggtggtgagattcctggtggagcagggcgccaccgtgaaccaggccgacaacgagggctggacccccctgcacgtggccgccagctgcggctacctggacatcgccagatacctgctgagccacggcgccaacatcgccgccgtgaacagcgacggcgacctgcccctggacctggccgagagcgacgccatggagggcctgctgaaggccgagatcgccagaagaggcgtggacgtggaggccgccaagagagccgaggaggagctgctgctgcacgacaccagatgctggctgaacggcggcgccatgcccgaggccagacaccccagaaccggcgccagcgccctgcacgtggccgccgccaagggctacatcgaggtgatgagactgctgctgcaggccggctacgaccccgagctgagagacggcgacggctggacccccctgcacgccgccgcccactggggcgtggaggacgcctgcagactgctggccgagcacggcggcggcatggacagcctgacccacgccggccagagaccctgcgacctggccgacgaggaggtgctgagcctgctggaggagctggccagaaagcaggaggacctgagaaaccagaaggaggccagccagagcagaggccaggagccccaggcccccagcagcagcaagcacagaagaagcagcgtgtgcagactgagcagcagagagaagatcagcctgcaggacctgagcaaggagagaagacccggcggcgccggcggcccccccatccaggacgaggacgagggcgaggagggccccaccgagcccccccccgccgagcccagaaccctgaacggcgtgagcagccccccccaccccagccccaagagccccgtgcagctggaggaggcccccttcagcagaagattcggcctgctgaagaccggcagcagcggcgccctgggcccccccgagagaagaaccgccgagggcgcccccggcgccggcctgcagagaagcgccagcagcagctggctggagggcaccagcacccaggccaaggagctgagactggccagaatcacccccacccccagccccaagctgcccgagcccagcgtgctgagcgaggtgaccaagccccccccctgcctggagaacagcagcccccccagcagaatccccgagcccgagagccccgccaagcccaacgtgcccaccgccagcaccgccccccccgccgacagcagagacagaagaagaagctaccagatgcccgtgagagacgaggagagcgagagccagagaaaggccagaagcagactgatgagacagagcagaagaagcacccagggcgtgaccctgaccgacctgaaggaggccgagaaggccgccggcaaggcccccgagagcgagaagcccgcccagagcctggaccccagcagaagacccagagtgcccggcgtggagaacagcgacagccccgcccagagagccgaggcccccgacggccagggccccggcccccaggccgccagagagcacagaaaggtgggcaaggagtggagaggccccgccgagggcgaggaggccgagcccgccgacagaagccaggagagcagcaccctggagggcggccccagcgccagaagacagagatggcagagagacctgaaccccgagcccgagcccgagagcgaggagcccgacggcggcttcagaaccctgtacgccgagctgagaagagagaacgagagactgagagaggccctgaccgagaccaccctgagactggcccagctgaaggtggagctggagagagccacccagagacaggagagattcgccgagagacccgccctgctggagctggagagattcgagagaagagccctggagagaaaggccgccgagctggaggaggagctgaaggccctgagcgacctgagagccgacaaccagagactgaaggacgagaacgccgccctgatcagagtgatcagcaagctgagcaagtag

SEQ ID NO: 194055 - DNA, 2160 bp, Artificial Sequence
  derived and/or modified sequence
atgagcggcgaggacggccccgccgccggccccggcgccgccgccgccgccgccagagagagaagaagagagcagctgagacagtggggcgccagagccggcgccgagcccggccccggcgagagaagagccagaaccgtgagattcgagagagccgccgagttcctggccgcctgcgccggcggcgacctggacgaggccagactgatgctgagagccgccgaccccggccccggcgccgagctggaccccgccgcccccccccccgccagagccgtgctggacagcaccaacgccgacggcatcagcgccctgcaccaggcctgcatcgacgagaacctggaggtggtgagattcctggtggagcagggcgccaccgtgaaccaggccgacaacgagggctggacccccctgcacgtggccgccagctgcggctacctggacatcgccagatacctgctgagccacggcgccaacatcgccgccgtgaacagcgacggcgacctgcccctggacctggccgagagcgacgccatggagggcctgctgaaggccgagatcgccagaagaggcgtggacgtggaggccgccaagagagccgaggaggagctgctgctgcacgacaccagatgctggctgaacggcggcgccatgcccgaggccagacaccccagaaccggcgccagcgccctgcacgtggccgccgccaagggctacatcgaggtgatgagactgctgctgcaggccggctacgaccccgagctgagagacggcgacggctggacccccctgcacgccgccgcccactggggcgtggaggacgcctgcagactgctggccgagcacggcggcggcatggacagcctgacccacgccggccagagaccctgcgacctggccgacgaggaggtgctgagcctgctggaggagctggccagaaagcaggaggacctgagaaaccagaaggaggccagccagagcagaggccaggagccccaggcccccagcagcagcaagcacagaagaagcagcgtgtgcagactgagcagcagagagaagatcagcctgcaggacctgagcaaggagagaagacccggcggcgccggcggcccccccatccaggacgaggacgagggcgaggagggccccaccgagcccccccccgccgagcccagaaccctgaacggcgtgagcagccccccccaccccagccccaagagccccgtgcagctggaggaggcccccttcagcagaagattcggcctgctgaagaccggcagcagcggcgccctgggcccccccgagagaagaaccgccgagggcgcccccggcgccggcctgcagagaagcgccagcagcagctggctggagggcaccagcacccaggccaaggagctgagactggccagaatcacccccacccccagccccaagctgcccgagcccagcgtgctgagcgaggtgaccaagccccccccctgcctggagaacagcagcccccccagcagaatccccgagcccgagagccccgccaagcccaacgtgcccaccgccagcaccgccccccccgccgacagcagagacagaagaagaagctaccagatgcccgtgagagacgaggagagcgagagccagagaaaggccagaagcagactgatgagacagagcagaagaagcacccagggcgtgaccctgaccgacctgaaggaggccgagaaggccggcgaggaggccgagcccgccgacagaagccaggagagcagcaccctggagggcggccccagcgccagaagacagagatggcagagagacctgaaccccgagcccgagcccgagagcgaggagcccgacggcggcttcagaaccctgtacgccgagctgagaagagagaacgagagactgagagaggccctgaccgagaccaccctgagactggcccagctgaaggtggagctggagagagccacccagagacaggagagattcgccgagagacccgccctgctggagctggagagattcgagagaagagccctggagagaaaggccgccgagctggaggaggagctgaaggccctgagcgacctgagagccgacaaccagagactgaaggacgagaacgccgccctgatcagagtgatcagcaagctgagcaagtag

SEQ ID NO: 194056 - protein, 707 aa, Artificial Sequence
  derived and/or modified sequence
MAAEVYFGDLELFEPFDHPEESIPKPVHTRFKDDDGDEEDENGVGDAELRERLRQCEETIEQLRAENQELKRKLNILTRPSGILVNDTKLDGPILQILFMNNAISKQYHQEIEEFVSNLVKRFEEQQKNDVEKTSFNLLPQPSSIVLEEDHKVEESCAIKNNKEAFSVVGSVLYFTNFCLDKLGQPLLNENPQLSEGWEIPKYHQVFSHIVSLEGQEIQVKAKRPKPHCFNCGSEEHQMKDCPMPRNAARISEKRKEYMDACGEANNQNFQQRYHAEEVEERFGRFKPGVISEELQDALGVTDKSLPPFIYRMRQLGYPPGWLKEAELENSGLALYDGKDGTDGETEVGEIQQNKSVTYDLSKLVNYPGFNISTPRGIPDEWRIFGSIPMQACQQKDVFANYLTSNFQAPGVKSGNKRSSSHSSPGSPKKQKNESNSAGSPADMELDSDMEVPHGSQSSESFQFQPPLPPDTPPLPRGTPPPVFTPPLPKGTPPLTPSDSPQTRTASGAVDEDALTLEELEEQQRRIWAALEQAESVNSDSDVPVDTPLTGNSVASSPCPNELDLPVPEGKTSEKQTLDEPEVPEIFTKKSEAGHASSPDSEVTSLCQKEKAELAPVNTEGALLDNGSVVPNCDISNGGSQKLFPADTSPSTATKIHSPIPDMSKFATGITPFEFENMAESTGMYLRIRSLLKNSPRNQQKNKKASE

SEQ ID NO: 194057 - protein, 38 aa, Artificial Sequence
  derived and/or modified sequence
MKDCPMPRNAARISEKRKEYMDACGEANNQNFQQRYHA

SEQ ID NO: 194058 - DNA, 2124 bp, Artificial Sequence
  derived and/or modified sequence
atggccgccgaggtgtacttcggcgacctggagctgttcgagcccttcgaccaccccgaggagagcatccccaagcccgtgcacaccagattcaaggacgacgacggcgacgaggaggacgagaacggcgtgggcgacgccgagctgagagagagactgagacagtgcgaggagaccatcgagcagctgagagccgagaaccaggagctgaagagaaagctgaacatcctgaccagacccagcggcatcctggtgaacgacaccaagctggacggccccatcctgcagatcctgttcatgaacaacgccatcagcaagcagtaccaccaggagatcgaggagttcgtgagcaacctggtgaagagattcgaggagcagcagaagaacgacgtggagaagaccagcttcaacctgctgccccagcccagcagcatcgtgctggaggaggaccacaaggtggaggagagctgcgccatcaagaacaacaaggaggccttcagcgtggtgggcagcgtgctgtacttcaccaacttctgcctggacaagctgggccagcccctgctgaacgagaacccccagctgagcgagggctgggagatccccaagtaccaccaggtgttcagccacatcgtgagcctggagggccaggagatccaggtgaaggccaagagacccaagccccactgcttcaactgcggcagcgaggagcaccagatgaaggactgccccatgcccagaaacgccgccagaatcagcgagaagagaaaggagtacatggacgcctgcggcgaggccaacaaccagaacttccagcagagataccacgccgaggaggtggaggagagattcggcagattcaagcccggcgtgatcagcgaggagctgcaggacgccctgggcgtgaccgacaagagcctgccccccttcatctacagaatgagacagctgggctacccccccggctggctgaaggaggccgagctggagaacagcggcctggccctgtacgacggcaaggacggcaccgacggcgagaccgaggtgggcgagatccagcagaacaagagcgtgacctacgacctgagcaagctggtgaactaccccggcttcaacatcagcacccccagaggcatccccgacgagtggagaatcttcggcagcatccccatgcaggcctgccagcagaaggacgtgttcgccaactacctgaccagcaacttccaggcccccggcgtgaagagcggcaacaagagaagcagcagccacagcagccccggcagccccaagaagcagaagaacgagagcaacagcgccggcagccccgccgacatggagctggacagcgacatggaggtgccccacggcagccagagcagcgagagcttccagttccagccccccctgccccccgacaccccccccctgcccagaggcacccccccccccgtgttcaccccccccctgcccaagggcaccccccccctgacccccagcgacagcccccagaccagaaccgccagcggcgccgtggacgaggacgccctgaccctggaggagctggaggagcagcagagaagaatctgggccgccctggagcaggccgagagcgtgaacagcgacagcgacgtgcccgtggacacccccctgaccggcaacagcgtggccagcagcccctgccccaacgagctggacctgcccgtgcccgagggcaagaccagcgagaagcagaccctggacgagcccgaggtgcccgagatcttcaccaagaagagcgaggccggccacgccagcagccccgacagcgaggtgaccagcctgtgccagaaggagaaggccgagctggcccccgtgaacaccgagggcgccctgctggacaacggcagcgtggtgcccaactgcgacatcagcaacggcggcagccagaagctgttccccgccgacaccagccccagcaccgccaccaagatccacagccccatccccgacatgagcaagttcgccaccggcatcacccccttcgagttcgagaacatggccgagagcaccggcatgtacctgagaatcagaagcctgctgaagaacagccccagaaaccagcagaagaacaagaaggccagcgagtag

SEQ ID NO: 194059 - DNA, 117 bp, Artificial Sequence
  derived and/or modified sequence
atgaaggactgccccatgcccagaaacgccgccagaatcagcgagaagagaaaggagtacatggacgcctgcggcgaggccaacaaccagaacttccagcagagataccacgcctag

SEQ ID NO: 194060 - DNA, 2124 bp, Artificial Sequence
  derived and/or modified sequence
atggctgccgaggtatactttggtgacttagagctgttcgaacccttcgaccatcccgaggaatctatccccaaacccgtgcatacaagattcaaagacgacgacggcgatgaagaagacgaaaatggcgtaggagacgcagagctgcgcgagagattgcgccagtgcgaagaaactatcgagcaactccgggcagagaaccaagagctaaagcgaaagctgaatatcctgactcggccttctggcattttggtcaatgatacgaagctcgacgggcctattctccaaatcttgttcatgaataatgcaattagcaagcagtaccaccaggagatcgaggaattcgtcagcaatcttgtgaaaagatttgaagaacagcagaagaatgacgtcgagaaaacatcatttaacctcctccctcagccaagctctatagtacttgaagaggaccataaggttgaagagtcttgcgcaatcaaaaataacaaggaggcctttagcgtggtgggatctgtactctacttcactaacttttgtctggataaactaggtcagcctttactgaatgaaaaccctcagctgagcgaaggttgggaaatcccaaagtaccatcaggtgttttcacacatcgtgtccctagaaggtcaagaaatccaggtcaaggccaagcgccccaagccacattgcttcaactgcggatccgaggagcatcagatgaaagactgtcctatgcctcggaacgccgcccgaatttcagagaaaagaaaagaatacatggacgcatgcggagaggctaataaccagaacttccagcagagataccatgcggaagaagttgaagagcggtttgggaggttcaaacccggcgtcatctccgaggagctgcaagacgccctgggtgtgactgacaagtcccttcctccctttatttaccggatgcgtcagcttgggtatccgcccgggtggctgaaagaagctgagctggagaactcaggcctggcactgtacgatggcaaagatggcaccgatggcgagactgaagtgggggagatccaacaaaacaaaagcgtgacctacgacctgtcaaagctcgttaactatcccggattcaacatctccaccccacgcggcatcccagacgagtggcggatctttggaagcatccctatgcaggcatgccaacagaaagatgtgtttgcaaactatttgacatccaacttccaagcaccgggcgtgaaatccggtaacaaaagatcatcctctcactcctcccctggaagtccaaaaaagcagaagaatgagagcaatagcgcaggttcccccgccgatatggagctggacagtgatatggaggtcccgcacggaagccagagctctgagtcctttcagtttcagcccccactgccgccagacactccccctctgccccggggcactcctccccctgtctttacccctccattgccaaaggggacacccccactgaccccttcagatagcccccaaactagaactgcctccggggcagtagacgaggatgctttgacactcgaggagttggaggagcagcagcggcgaatttgggcagccctggagcaagctgagtctgtgaacagtgattctgacgttcccgttgatacaccactgaccggtaactctgtggcatcgtctccctgccccaacgagcttgatctgcccgtccctgaaggaaaaacatccgagaaacagactttggatgagccagaagtgcctgagatcttcaccaaaaaaagcgaggccggacacgccagcagccccgactcggaggtgacttctctgtgtcagaaagagaaggccgaactggcgcctgtgaatacagaaggagctctgctagacaacggatccgtggtgccaaattgtgacatatcaaacggggggagtcagaagttgttcccagctgatacttcacccagtactgccaccaaaattcatagcccaatccccgatatgtctaagtttgctacaggcatcaccccctttgagttcgagaatatggcagagagtactggcatgtacctgcggatcaggtcactcctgaagaactcaccaaggaaccaacagaaaaacaagaaggcaagtgagtag

SEQ ID NO: 194061 - DNA, 117 bp, Artificial Sequence
  derived and/or modified sequence
atgaaagactgccccatgccaagaaacgccgccaggatctcagaaaagcggaaagagtacatggacgcttgcggcgaggcaaataaccaaaactttcaacagagataccatgcatag

SEQ ID NO: 194062 - DNA, 2124 bp, Artificial Sequence
  derived and/or modified sequence
atggctgctgaggtgtactttggagacctggagctgtttgagccctttgaccaccctgaggagagcatccccaagcctgtgcacacccgcttcaaggatgatgatggagatgaagaagatgaaaatggagtgggagatgctgagctgcgggagcggctgcggcagtgtgaggagaccatcgagcagctgcgggcagagaaccaggagctgaagaggaagctgaacatcctgacccggcccagcggcatcctggtgaatgacaccaagctggatggccccatcctgcagatcctcttcatgaacaatgccatcagcaagcagtaccaccaggagattgaggagtttgtgagcaacctggtgaagagatttgaggagcagcagaagaatgatgtggagaagaccagcttcaacctgctgccccagcccagcagcatcgtgctggaggaggaccacaaggtggaggagagctgtgccatcaagaacaacaaggaggccttctctgtggtgggctctgtgctgtacttcaccaacttctgcctggacaagctgggccagcccctgctgaatgaaaacccccagctgtctgagggctgggagatccccaagtaccaccaggtgttcagccacatcgtgtccctggagggccaggagatccaggtgaaggccaagaggcccaagccccactgcttcaactgtggcagcgaggagcaccagatgaaggactgccccatgcccagaaatgctgcccgcatcagcgagaagaggaaggagtacatggatgcctgtggggaggccaacaaccagaacttccagcagcgctaccacgccgaggaggtggaggagagatttggccgcttcaagccaggagtcatcagcgaggagctgcaggatgccctgggcgtgacagacaagagcctgccccccttcatctacaggatgaggcagctgggctacccacctggctggctgaaggaggccgagctggagaacagcggcctggccctgtatgatggcaaggatggaacagatggagaaacagaggtgggggagatccagcagaacaagtctgtgacctatgacctgagcaagctggtgaactacccaggcttcaacatcagcaccccccggggcatcccagatgagtggaggatcttcggcagcatccccatgcaggcctgccagcagaaggatgtgtttgccaactacctgaccagcaacttccaggcccctggggtgaagagcggcaacaagaggagcagcagccacagcagccctggcagccccaagaagcagaagaatgaaagcaacagcgctggcagccctgctgacatggagctggacagcgacatggaggtgccccacggcagccagagcagcgagagcttccagttccagccccccctgcccccagacaccccacccctgccccggggcaccccacctcctgtgttcaccccacccctgcccaagggcaccccacccctgacccccagcgacagcccccagaccaggacagccagcggggctgtggatgaagatgccctgaccctggaggagctggaggagcagcagaggcgcatctgggccgccctggagcaggccgagagcgtgaacagcgacagtgatgtgcctgtggacacccccctgaccggcaacagcgtggccagcagcccctgccccaatgagctggacctgcctgtgcctgagggcaagaccagcgagaagcagaccctggatgagcctgaggtgcctgagatcttcaccaagaagtctgaggccggccacgccagcagcccagattctgaggtgaccagcctgtgccagaaggagaaggccgagctggcccctgtgaacacagaaggagccctgctggacaatggatctgtggtgcccaactgtgacatcagcaatggaggcagccagaagctgtttcctgctgacaccagccccagcacagccaccaagatccacagccccatcccagacatgagcaagtttgccaccggcatcaccccatttgaatttgagaacatggccgagagcacaggcatgtacctgcgcatccgcagcctgctgaagaacagccccaggaaccagcagaagaacaagaaggccagcgagtag

SEQ ID NO: 194063 - DNA, 117 bp, Artificial Sequence
  derived and/or modified sequence
atgaaggactgccccatgcccagaaatgctgcccgcatcagcgagaagaggaaggagtacatggatgcctgtggggaggccaacaaccagaacttccagcagcgctaccacgcctag

SEQ ID NO: 194064 - DNA, 2124 bp, Artificial Sequence
  derived and/or modified sequence
atggccgccgaggtgtacttcggcgacctggagctgttcgagcccttcgatcaccccgaggaatctattcctaagcctgtacatacccggttcaaagacgatgacggggatgaagaagacgaaaacggggtgggggacgccgaactgcgagagagactccgtcagtgtgaagagacaatcgagcagctgagagcggaaaatcaagagctgaagcgaaaactaaatattctgacgcggccatcaggcattcttgtgaacgacacaaaactggacggtcccatcctgcagatattattcatgaacaacgcgatttcgaaacagtaccatcaggagatcgaagagttcgtgtccaatttggtaaagagattcgaggaacagcagaagaacgacgtggaaaagacttccttcaatctcctacctcagccttcttccatcgtgttagaggaggatcacaaagtggaagagtcctgcgcgatcaagaacaacaaagaggcattcagtgttgtaggttccgtcctctactttactaacttctgcctagataagctgggtcagcctttactcaacgagaatcctcaattgtccgaaggatgggagatcccaaaatatcaccaggttttctcgcatatcgtgagtctggaggggcaagagatccaggtcaaggcaaaacgcccaaagcctcactgcttcaactgcggctccgaagaacaccagatgaaggactgtccgatgcctagaaatgctgcccggatcagcgaaaagcgtaaggaatacatggacgcatgtggagaggcaaacaaccaaaacttccagcagcggtaccatgccgaagaggtcgaggagcggttcggacgattcaagcccggtgttatatccgaagaattgcaggacgcactgggcgtcaccgataagtccttgcctccttttatctatcgcatgagacagctcgggtacccaccgggatggctgaaagaggctgaactagaaaatagcggactggcactgtatgacggcaaagacggcacagatggcgagacagaggttggagaaatccagcagaacaaatccgtcacatacgacttgagtaagctcgttaactaccctggcttcaatatctctacaccaagggggatccctgacgagtggagaatcttcgggtcaatacctatgcaggcctgccaacagaaggacgtcttcgcaaattatttaacctcaaatttccaagccccaggcgtgaagagtgggaacaagcggagcagctcccactcttccccaggatctccgaaaaagcagaagaatgagtcaaatagcgcagggtctcccgccgacatggaactcgactcagacatggaagtcccacacggttcgcagtcaagtgagagttttcagttccagcctcccctaccccctgacactccgcccctccccaggggcacacccccaccagtttttacaccgcctctacctaagggcactcctcctttgacacccagtgactctcctcagacgcggacagctagcggggccgtggatgaagatgccctcacattagaagaactggaggagcaacagagaaggatttgggccgcgctggaacaggccgaaagcgttaattctgattccgacgttcctgttgatacccctctaaccggtaatagcgtggcgtctagtccctgtccgaatgaactggaccttcctgttcccgaaggaaagaccagtgaaaagcagactttggatgagcccgaagtacctgagatctttacaaaaaagagcgaagctggccatgctagttcccctgacagtgaagtgactagcctttgtcagaaggaaaaggcggagctagcacccgtgaacactgagggcgccctgttggataatggttcagtggtgccaaactgtgatatctctaacgggggatcccagaaactgttccctgccgacacctcaccatccaccgcaaccaaaatccacagcccgattcccgatatgtctaaattcgccactggaattaccccctttgaatttgaaaacatggccgagtctaccgggatgtacctgcggattagatctttgttgaagaactcgccccggaaccaacaaaagaacaagaaggccagcgaatag

SEQ ID NO: 194065 - DNA, 117 bp, Artificial Sequence
  derived and/or modified sequence
atgaaggactgccccatgccccggaacgccgcccggatcagcgagaaacggaaggagtacatggacgcctgtggcgaggcaaataaccagaactttcagcaacgctatcacgcatag

SEQ ID NO: 194066 - DNA, 2124 bp, Artificial Sequence
  derived and/or modified sequence
atggccgcagaagtctattttggtgatttagaattgttcgagccatttgatcatcccgaggagagcatacccaagcccgtgcacactagattcaaagatgatgatggagacgaagaggacgagaatggggtaggagacgctgagctgcgcgagcggcttcgccaatgtgaagaaaccattgagcagctgcgtgccgaaaatcaggagctcaaacgcaagctgaatatcctaactaggccctcagggatactggtgaatgatactaagctcgacggcccaattcttcagatcctgttcatgaacaatgctatatctaagcaataccaccaagaaatcgaagaatttgtgagcaatctggttaagcgtttcgaggagcagcagaaaaacgacgtggaaaagacttcttttaatctgctgccccagccaagctccatagtcctggaagaggaccacaaggtagaggagtcttgcgcaatcaagaacaataaggaggctttcagcgtggtcgggtcagtgctctatttcacaaacttctgcctggataaattaggccagccactattgaacgagaatccccagctgtctgaaggctgggagatccctaagtaccaccaagtgttctctcacatcgtgagcctcgagggacaggaaatacaggttaaggccaaacgtcctaagccacactgttttaactgtggctcagaagagcatcagatgaaggattgtccaatgcccaggaacgccgcaagaatcagcgagaagaggaaggagtacatggatgcctgtggcgaggcaaacaaccagaacttccagcagcgttatcacgctgaggaagtggaggagcgctttggcaggtttaagcctggcgtgataagtgaggaactccaggatgcattaggggtcaccgataaatcattaccgcctttcatctaccggatgagacagcttggatacccacccggttggctgaaggaggcagagctggagaacagtggactcgctctgtatgatgggaaggatgggaccgatggagagactgaagttggtgagatccagcaaaacaagtctgtgacctacgacctgagcaaactcgtcaactacccagggttcaacatctccactcctcgagggatccccgacgagtggcgcattttcggctccatcccgatgcaagcctgccagcagaaagacgtttttgcaaattatcttacctctaactttcaggctcctggtgtgaagtctggcaacaagcgtagtagttcccatagtagtcccggatcacctaagaaacagaaaaatgagtccaactcagcaggctcaccggcagacatggaactggacagcgacatggaggttcctcacggatcgcagagttcagagagctttcagtttcagccaccccttccccctgacacacccccactcccgagggggacccctcccccagttttcactccgccattgccaaagggcaccccacccctgacccccagtgacagcccacagactcggaccgccagtggagcggtagatgaggacgcactgactctggaggagcttgaggaacagcagcggaggatctgggccgcattagagcaggccgagtcggtgaatagtgacagtgacgtgcccgtggatacacccctaacagggaacagtgttgcctcaagtccctgtccgaatgagctagacttgccagtgcctgaagggaagacctccgagaaacaaaccctcgacgaaccagaggtgcccgagatttttacgaaaaaaagtgaggctggccacgcatcttctcccgattcggaagttacttcactgtgtcagaaagagaaggccgagctggcccctgttaacaccgagggggctctgctcgataatgggagcgtcgtcccaaattgcgatatttctaacggcggtagtcagaaacttttccccgctgacacatcaccgagtaccgctacaaaaattcacagccctatacctgacatgtcaaaattcgctactggcataacccctttcgagttcgagaacatggctgagagcacaggaatgtacctccgaataagatctctgctgaagaactcccctcgcaaccagcaaaagaataaaaaggcctcagaatag

SEQ ID NO: 194067 - DNA, 117 bp, Artificial Sequence
  derived and/or modified sequence
atgaaggactgtcccatgcccagaaatgcggcacggatctccgagaagcgtaaggagtatatggatgcctgcggcgaagccaacaaccagaatttccagcaacggtaccacgcttag

SEQ ID NO: 194068 - DNA, 2862 bp, Artificial Sequence
  derived and/or modified sequence
gcgtctggagaaaaccctagcgggtggctccgtgcggccagagctctagagagtggtgccgccttccaaccttcttccccaagccctggtggccggctccgcctcttctcgaatcttttccacagcccaaaatggccgcagaggtgtattttggcgatctagagctcttcgagccgttcgaccacccagaggagtcgattccgaagcccgttcacactcgcttcaaggacgacgacggcgacgaggaggacgaaaatggggtcggcgacgcggagctacgggagcggcttcggcagtgcgaggagaccatcgagcagctccgcgccgagaatcaagaacttaaacgaaaattgaacattctgactcgaccgagtggaatattggtgaacgatactaagttagatggacctatattacagattctattcatgaacaatgctatttcaaagcaatatcatcaagaaatagaggaatttgtatcaaatttagtaaaaagatttgaggaacagcagaaaaatgatgtggaaaagacttcctttaatcttttgccccagccatccagtattgtgctagaggaggaccacaaagtggaagagtcctgtgccattaaaaacaacaaggaagctttcagtgttgtaggaagtgtcctgtattttactaatttttgccttgataaattggggcaaccgcttctaaatgaaaaccctcagctttccgaaggatgggaaatacccaagtaccatcaagtcttcagccacattgtttctctagaagggcaagaaatacaagtaaaggcaaaaaggccaaagcctcactgtttcaattgtggttctgaagaacaccaaatgaaagattgcccaatgcctcggaatgctgctcgaataagtgaaaagagaaaagagtatatggatgcctgtggagaagcaaacaatcagaatttccagcagcgataccacgcagaagaagtagaagaaagatttggaagattcaagccaggagttattagtgaggaacttcaagatgcactaggtgtgacagacaagagtcttccaccttttatctatcggatgcgccagctagggtacccaccagggtggctcaaagaggctgaattggagaattcggggcttgcactctatgatggaaaagatggcactgatggggaaacagaagttggagaaatacaacagaataaaagtgtcacttacgatctctcaaaattggtcaactatcctggttttaatatatctactcccagaggaattccagacgaatggaggatctttggttccataccaatgcaggcatgtcagcagaaggatgtgtttgccaattaccttacttctaacttccaagcgccaggtgtgaagtctggcaacaagaggtcttcatctcactctagcccaggtagtccaaagaagcagaagaatgaaagcaactcagcgggatctcccgccgacatggagctcgattcagatatggaggtaccacatggttctcagagcagcgaaagttttcagtttcaaccaccattacctcctgacactcctccactcccccggggaactcctccacccgtcttcacccctccactcccaaagggcaccccgccgctgactcccagtgactcaccccagaccagaacagcatctggagctgtggatgaggacgcactgactctagaagaacttgaagaacagcagaggcggatctgggcagctcttgagcaggccgagagcgtaaacagcgactccgacgttcctgtggacacacctttaactggcaattccgttgcctcatcaccttgtccaaatgagctagacctccctgtcccggagggaaaaacatctgaaaagcagacgctggatgagcctgaggtaccagagatttttacaaagaaatcagaagctggacatgcctccagtccagactctgaggtgacatcactttgtcagaaggaaaaagcagagttggctccggtaaacactgaaggtgcccttcttgataatggcagtgtcgtaccaaactgtgacatcagcaatgggggcagccagaagctctttcctgcagacaccagtccttcaacggccactaaaattcatagccctatacctgacatgagcaaatttgcaactggaatcacgccatttgaatttgagaatatggcagaatctactggaatgtacctcaggataagaagcttgttaaagaactcaccccgaaaccagcagaaaaacaaaaaggcctctgaataatggcttgacttagcactgagagctatttaataactttgttccgttaattagtactaattaagtggatagatagaatggttttcctgtttgtccctcccatgtttaaaaatctatccaaggttcatgttccaaagtcaagcctattttaaagaaagactgagctcactagttcagtatattttattctcactgacaaaacttggggggagatgtgaatatgacctggtttagagagggtttgttaaggtttatactatttttggattgtgactatccgtcgagagtgatggtttttatctgtcttttgtacattgttttccctttctacattttgctaattatcctgtatataagtttaatatatcactttttaaaagaaaaaattctaccattttaaattcatgtttcaactcctacaaccaaatgagaaaaatcagggatgagcagctttatcccatttggggtatttttgtaagtgatttacatgtgtcaattttagtaatacttttacttttttgtaacttcatccttcatatatgcttgctatacaggtatgttcatctttgtgtacagaggtttaataaattagttttcatatacataatct

SEQ ID NO: 194069 - DNA, 1250 bp, Artificial Sequence
  derived and/or modified sequence
attccaagtgctttctgtcacccgccggcggaccgagagtctagggttcggggcgcgcaggctgcctcggcgcagacctcttcccctcagggaggccgtctcctgaccagacccactcctgcctcccacccgggtgccgtgtttagggttattttaggctgctcacctgacagattgtacacaagcccttaattgcccccctctgtttgaggtcgtggtgaggtttcatatttcgcagccacgctcaaattgtgccgtcatgttacagttgtaggtgatgaaataccggctgcttagacgcgggatcggtttttataccggggcaaacgctagtggtcccagaatgcagagttgggggcctcaaggaatccgggtgtgctgagataattggttaattgcttgattaaaattggggattaattttagagttcttccactcggagctcgcttctgtgctgaagatgctttgcaacgccttgaggaaaacgcgccaaagaagtttctgttagacttgagttacaagattgcagatttttcttgatttgctatggaatattggtgaacgatactaagttagatggacctatattacagattctattcatgaacaatgctatttcaaagcaatatcatcaagaaatagaggaatttgtatcaaatttagtaaaaagatttgaggaacagcagaaaaatgatgtggaaaagacttcctttaatcttttgccccagccatccagtattgtgctagaggaggaccacaaagtggaagagtcctgtgccattaaaaacaacaaggaagctttcagtgttgtaggaagtgtcctgtattttactaatttttgccttgataaattggggcaaccgcttctaaatgaaaaccctcagctttccgaaggatgggaaatacccaagtatcctacatagtgaatgaagatcttttatgcatcttgccactaagttcacctttaaaacaatttccaaattttgcagaccatgataactattccttaataaaattcactaaaggtaccatcaagtcttcagccacattgtttctctagaagggcaagaaatacaagtaaaggcaaaaaggccaaagcctcactgtttcaattgtggttctgaagaacaccaaatgaaagattgcccaatgcctcggaatgctgctcgaataagtgaaaagagaaaagagtatatggatgcctgtggagaagcaaacaatcagaatttccagcagcgataccacgcag

SEQ ID NO: 194070 - DNA, 4393 bp, Artificial Sequence
  derived and/or modified sequence
ggcagcgccaggcgtggggccggggcagcgccgggcgagggcgagggcgcgggcggaagttccaggagggccagaattccaagtgctttctgtcacccgccggcggaccgagagtctagggttcggggcgcgcaggctgcctcggcgcagacctcttcccctcagggaggccgtctcctgaccagacccactcctgcctcccacccgggtgccgtgtttagggttattttaggctgctcacctgacagattgtacacaagcccttaattgcccccctctgtttgaggtcgtggtgaggtttcatatttcgcagccacgctcaaattgtgccgtcatgttacagttgtaggtgatgaaataccggctgcttagacgcgggatcggtttttataccggggcaaacgctagtggtcccagaatgcagagttgggggcctcaaggaatccgggtgtgctgagataattggttaattgcttgattaaaattggggattaattttagagttcttccactcggagctcgcttctgtgctgaagatgctttgcaacgccttgaggaaaacgcgccaaagaagtttctgttagacttgagttacaagattgcagatttttcttgatttgctagtatgtttttttttacgttcgtagagttttataggtagatagataactttggttcgggtagttttccttttaaaatttgtagagaactgaaagtggctgatatgttagcttttttagggggacggggtcggggaatggagtctcagtctgttgcccaggctggagtgcagtggcgcgatctcggctcactgcaacctccgcctcccgggttcaagcgattctcctgcctcagcctcccgaatagctgggattacaggcgcccgccacggcgcccagtcagtatatcagtttttaaggtttgtgaagcgcgatttattttttcagaatgtcgtcttcctccacattgtgaggaaaattttcagaatacaaaaagttgaggccgggcgctgtggctcaagcctgtaatcccagcactttgggaggccgaggcgggtggatcatgaggtcaggaggatcatgaggatcaggtggatcatgaggatcaggaggtcagcctggccaacatggtgaaaccccgtctctactaaaaatacaaaattagccgggcgtggtggcgcgtgcttgtaatcccagctactcaggaggctgaggcaggagaatcccttgaacctgggaggcggaggttgcagtgagccaagatcacaccattgcactccagcctgggcgacagggtgagactgtgtctcaaaaaaaaaaaaaaaaagttgaaaggattctacagtggacatccatagatttattccaaattctaaagttgttaacagctcgttatactgcattctctttatcacatagtggttgttgaaaggtttgacaggaacactgatgcttcaataatggttttggttcagtttgttagtctgttgaacttcaggatcgtgtcttagaatatatgttcgaaaggataaaaaccgtactttaattttgggtttcaaaagcctacccctgcaacaaaatagaagctcaataagtgtgtcatcctcaaaatatccgtgggtcttttgtctttataatattctgacaccaaaagtgagagaagtagtagttgaattttatgatttgcattgttaaatgagggcttatcttccttaacaaataataacatcaagaacttaaacgaaaattgaacattctgactcgaccgagtggaatattggtgaacgatactaagttagatggacctatattacagattctattcatgaacaatgctatttcaaagcaatatcatcaagaaatagaggaatttgtatcaaatttagtaaaaagatttgaggaacagcagaaaaatgatgtggaaaagacttcctttaatcttttgccccagccatccagtattgtgctagaggaggaccacaaagtggaagagtcctgtgccattaaaaacaacaaggaagctttcagtgttgtaggaagtgtcctgtattttactaatttttgccttgataaattggggcaaccgcttctaaatgaaaaccctcagctttccgaaggatgggaaatacccaagtatcctacatagtgaatgaagatcttttatgcatcttgccactaagttcacctttaaaacaatttccaaattttgcagaccatgataactattccttaataaaattcactaaaggtaccatcaagtcttcagccacattgtttctctagaagggcaagaaatacaagtaaaggcaaaaaggccaaagcctcactgtttcaattgtggttctgaagaacaccaaatgaaagattgcccaatgcctcggaatgctgctcgaataagtgaaaagagaaaagagtatatggatgcctgtggagaagcaaacaatcagaatttccagcagcgataccacgcagaagaagtagaagaaagatttggaagattcaagccaggagttattagtgaggaacttcaagatgcactaggtgtgacagacaagagtcttccaccttttatctatcggatgcgccagctagggtacccaccagggtggctcaaagaggctgaattggagaattcggggcttgcactctatgatggaaaagatggcactgatggggaaacagaagttggagaaatacaacagaataaaagtgtcacttacgatctctcaaaattggtcaactatcctggttttaatatatctactcccagaggaattccagacgaatggaggatctttggttccataccaatgcaggcatgtcagcagaaggatgtgtttgccaattaccttacttctaacttccaagcgccaggtgtgaagtctggcaacaagaggtcttcatctcactctagcccaggtagtccaaagaagcagaagaatgaaagcaactcagcgggatctcccgccgacatggagctcgattcagatatggaggtaccacatggttctcagagcagcgaaagttttcagtttcaaccaccattacctcctgacactcctccactcccccggggaactcctccacccgtcttcacccctccactcccaaagggcaccccgccgctgactcccagtgactcaccccagaccagaacagcatctggagctgtggatgaggacgcactgactctagaagaacttgaagaacagcagaggcggatctgggcagctcttgagcaggccgagagcgtaaacagcgactccgacgttcctgtggacacacctttaactggcaattccgttgcctcatcaccttgtccaaatgagctagacctccctgtcccggagggaaaaacatctgaaaagcagacgctggatgagcctgaggtaccagagatttttacaaagaaatcagaagctggacatgcctccagtccagactctgaggtgacatcactttgtcagaaggaaaaagcagagttggctccggtaaacactgaaggtgcccttcttgataatggcagtgtcgtaccaaactgtgacatcagcaatgggggcagccagaagctctttcctgcagacaccagtccttcaacggccactaaaattcatagccctatacctgacatgagcaaatttgcaactggaatcacgccatttgaatttgagaatatggcagaatctactggaatgtacctcaggataagaagcttgttaaagaactcaccccgaaaccagcagaaaaacaaaaaggcctctgaataatggcttgacttagcactgagagctatttaataactttgttccgttaattagtactaattaagtggatagatagaatggttttcctgtttgtccctcccatgtttaaaaatctatccaaggttcatgttccaaagtcaagcctattttaaagaaagactgagctcactagttcagtatattttattctcactgacaaaacttggggggagatgtgaatatgacctggtttagagagggtttgttaaggtttatactatttttggattgtgactatccgtcgagagtgatggtttttatctgtcttttgtacattgttttccctttctacattttgctaattatcctgtatataagtttaatatatcactttttaaaagaaaaaattctaccattttaaattcatgtttcaactcctacaaccaaatgagaaaaatcagggatgagcagctttatcccatttggggtatttttgtaagtgatttacatgtgtcaattttagtaatacttttacttttttgtaacttcatccttcatatatgcttgctatacaggtatgttcatctttgtgtacagaggtttaataaattagttttcatatacataatctaagactttgaatacaaaaaa

SEQ ID NO: 194071 - protein, 566 aa, Artificial Sequence
  derived and/or modified sequence
MALSVPGYSPGFRKPPEVVRLRRKRARSRGAAASPPRELTEPAARRAALVAGLPLRPFPAAGGRGGGSGGGPAAARRNPFARLDNRPRVAAEPPDGPAREQPEAPVPFLDSNQENDLLWEEKFPERTTVTELPQTSHVSFSEPDIPSSKSTELPVDWSIKTRLLFTSSQPFTWADHLKAQEEAQGLVQHCRATEVTLPKSIQDPKLSSELRCTFQQSLIYWLHPALSWLPLFPRIGADRKMAGKTSPWSNDATLQHVLMSDWSVSFTSLYNLLKTKLCPYFYVCTYQFTVLFRAAGLAGSDLITALISPTTRGLREAMRNEGIEFSLPLIKESGHKKETASGTSLGYGEEQAISDEDEEESFSWLEEMGVQDKIKKPDILSIKLRKEKHEVQMDHRPESVVLVKGINTFTLLNFLINSKSLVATSGPQAGLPPTLLSPVAFRGATMQMLKARSVNVKTQALSGYRDQFSLEITGPIMPHSLHSLTMLLKSSQSGSFSAVLYPHEPTAVFNICLQMDKVLDMEVVHKELTNCGLHPNTLEQLSQIPLLGKSSLRNVVLRDYIYNWRS

SEQ ID NO: 194072 - DNA, 1701 bp, Artificial Sequence
  derived and/or modified sequence
atggctctgtccgtacctggctacagtccgggattccgtaagccacccgaagtcgttcgacttcgtcgcaagcgggcacggtcccgaggcgcagctgctagcccaccaagggagctgaccgagcccgcagccaggagagctgctctggtggccggtttaccacttcggcccttccctgctgcaggcggaagaggcggcgggagtggcggcggccccgctgcggccagaaggaatccttttgcaagactggacaacaggcctagagttgctgccgagccaccagatggtcctgccagagagcagcccgaagcccctgtgccgttcttggactccaaccaagagaacgacttgctgtgggaggagaagttccctgaaaggactactgtcacagagctcccgcagaccagccacgtgtctttttctgaacccgatatcccatcttcaaagtctacagagttgcccgtggactggtctattaaaaccagacttctttttacctccagccagcccttcacttgggccgatcacttaaaggcccaagaagaagcgcaaggcctggtgcagcactgccgcgccaccgaggtgacactgcccaaatctatacaggatccaaagctctcaagtgagcttagatgcacttttcagcagagtctgatttactggctccatcccgccctctcgtggctgccgctgttcccgcggattggtgctgaccggaagatggcaggcaagactagcccttggtctaacgacgcaactttacaacacgtcctcatgagcgactggagtgtgtctttcacctctctttacaatcttctgaagaccaagttgtgcccttatttttacgtgtgcacctaccagttcacagtcctgtttcgggcagccgggctggcagggagtgatctgatcaccgccctgatcagccccaccacaagaggactccgagaagcgatgcgcaacgaaggtatcgagttcagtctgcctctgattaaggaatcgggtcacaaaaaagagaccgcgtccggcacctctctgggctacggcgaggagcaggcgatctccgatgaagatgaggaagagtcattcagctggctcgaagagatgggcgtgcaagataaaatcaagaagccggacattctgagcatcaagctcaggaaggaaaagcatgaagtgcaaatggaccaccgccctgaaagtgtagtcttggtgaaggggattaacacgttcacgcttctgaacttccttatcaatagcaaaagtctcgtcgcaacaagcgggccacaggctggactcccacccacgttactctctcctgtggctttccggggggccactatgcagatgctgaaagcacggtcagtcaatgtgaaaacacaagcgctgtctggatacagagatcagttctccctggaaattaccgggcccattatgccccatagcctccactcactgaccatgttgctcaagtcatcacagagtggatccttttcagccgtcctctatccgcatgagcctacggccgtgttcaacatctgtctccagatggacaaggtgctcgatatggaggtcgtccacaaagaactgacaaactgtggtctgcaccccaatactctcgaacagctctcacagatcccactcctggggaagagctctttaagaaatgtggtgctccgcgactacatttacaattggagatcatag

SEQ ID NO: 194073 - DNA, 1701 bp, Artificial Sequence
  derived and/or modified sequence
atggccctgtctgtgcccggctacagccctggcttcaggaagcccccagaggtggtgcggctgcggaggaagagggcccggagcagaggagctgctgccagccccccccgggagctgacagagcctgctgccaggagagctgccctggtggccggcctgcccctgcggcccttccctgctgctgggggccggggcggcggcagcggcggcggccctgctgctgcccggaggaacccctttgcccggctggacaaccggccccgggtggccgctgagcccccagatggccctgcccgggagcagcctgaggcccctgtgcccttcctggacagcaaccaggagaatgacctgctgtgggaggagaagtttcctgagaggaccaccgtgacagagctgccccagaccagccacgtgtccttcagcgagccagacatccccagcagcaagagcacagagctgcctgtggactggagcatcaagacccggctgctcttcaccagcagccagcccttcacctgggccgaccacctgaaggcccaggaggaggcccagggcctggtgcagcactgccgggccacagaggtgaccctgcccaagagcatccaggaccccaagctgagcagcgagctgcgctgcaccttccagcagagcctcatctactggctgcacccagccctgtcctggctgcccctcttccccagaattggagctgacaggaagatggccggcaagaccagcccctggagcaatgatgccaccctgcagcacgtgctgatgtctgactggagcgtgtccttcaccagcctgtacaacctgctgaagaccaagctgtgcccctacttctacgtgtgcacctaccagttcaccgtgctcttccgggctgctggcctggccggcagtgacctgatcacagccctgatcagccccaccacccggggcctgcgggaggccatgagaaatgaaggaattgagttcagcctgcccctcatcaaggagagcggccacaagaaggagacagccagcggcaccagcctgggctatggagaggagcaggccatcagtgatgaagatgaggaggagagcttctcctggctggaggagatgggcgtgcaggacaagatcaagaagccagacatcctgagcatcaagctgaggaaggagaagcatgaggtgcagatggaccacaggcctgagagcgtggtgctggtgaagggcatcaacaccttcaccctgctgaacttcctgatcaacagcaagagcctggtggccaccagcggcccccaggccggcctgccccccaccctgctgagccctgtggccttccggggggccaccatgcagatgctgaaggcccggtctgtgaatgtgaagacccaggccctgagcggctacagagaccagttcagcctggagatcaccggccccatcatgccccacagcctgcacagcctgaccatgctgctgaagagcagccagagcggcagcttctctgctgtgctgtacccccatgagcccacagctgtgttcaacatctgcctgcagatggacaaggtgctggacatggaggtggtgcacaaggagctgaccaactgtggcctgcaccccaacaccctggagcagctgagccagatccccctgctgggcaagagcagcctgagaaatgtggtgctgcgggactacatctacaactggaggagctag

SEQ ID NO: 194074 - DNA, 1701 bp, Artificial Sequence
  derived and/or modified sequence
atggccctgagcgtgcccggctacagccccggcttccggaagccccctgaggttgtacggctgcgtcgcaaaagagcgcgctctagaggtgcagccgccagcccgccccgggaactgaccgagccagccgccaggcgcgccgcgctggtcgccgggctgccattgcgaccatttcccgctgctgggggtagaggtggtggctcaggcggtgggcctgccgctgcccgcagaaatcctttcgcccggttagacaatcgcccacgggtcgcagctgaaccaccagatggacctgctcgggaacagccggaggcccccgtcccttttctcgactctaaccaggagaacgatctgctctgggaggagaagttccccgaacgcacgactgtgaccgaactgccacaaacttcccatgttagcttctcagagcctgatattcccagttctaagagcaccgaactgccggtagactggtctattaagacgagactgctttttacatcttcccagccattcacatgggctgaccatttaaaggcacaggaagaagctcagggacttgtgcagcactgtagggcaacagaggtaactctgcccaagagcatacaggatccaaagctcagctcagaattgaggtgcacatttcaacagagcttaatctactggctgcaccccgccctgtcctggctgcccctgtttccacggataggcgctgacagaaagatggccggaaagacttcaccttggtctaacgacgcgaccctgcagcatgtcttaatgagtgattggtctgtgtctttcacttcgctgtacaatttgctcaagacaaagctgtgcccttacttttacgtttgtacataccagtttacagtactgtttcgcgccgcaggcctggctggctctgacctcattacagccttgatttcaccaacaacccgcgggctgagggaggccatgcgaaacgaaggcatcgagtttagtctcccattaatcaaggagtccggccataagaaggaaactgcctcaggaacatctcttggttatggggaggaacaggccatctcagatgaggacgaggaggagtcgttctcatggttagaagagatgggcgtgcaggataagattaaaaagcccgacatcttaagcatcaagttgcggaaagaaaagcatgaggtgcagatggaccatcgccccgaatcagtggtgctggttaagggcattaacaccttcaccctattgaactttctgatcaacagcaagtcccttgttgccacctcggggccccaagccggcttgccgccaaccctcctctctcccgtggccttcagaggggccacgatgcaaatgcttaaggcgcgctccgtcaatgtgaaaacccaggctctctcgggataccgagatcagttcagtttagaaatcacggggcctatcatgccgcattccctccactccctgacgatgctcctcaagtcctctcagtccggaagtttttccgccgtcctgtaccctcatgagcctacggcagtattcaatatctgcctacagatggataaggtcctggacatggaggtggtgcacaaagagttaactaactgcggcctgcatccaaacaccctggaacagctgagccagataccgctcttaggcaaatcaagtctcagaaacgtagtgctcagagactacatctataattggcgtagttag

SEQ ID NO: 194075 - DNA, 1701 bp, Artificial Sequence
  derived and/or modified sequence
atggcccttagcgtgccagggtactcccctggatttcgcaagcctcccgaagtggtccggctcagacgtaaacgcgctaggtccagaggcgctgccgcaagccctccgcgagaactgactgaacccgcagcccgaagggctgccctggtggccggtctgccattgagaccttttcctgccgctggaggcagaggcggaggatccgggggaggccctgcagctgcacgcaggaatccgtttgccaggttggataatagaccaagggtggcagccgaacctcctgatggtccagcccgtgaacagcccgaggccccagtgccttttttggattcaaaccaggaaaacgacctactctgggaggaaaaatttccggaacggaccaccgtcacagagctgccccagacctctcacgtctcttttagcgaacctgatatccccagctctaaaagtaccgagcttcccgttgattggtcaataaaaacccgattactctttaccagttcgcagcctttcacttgggcagatcatctcaaggcacaggaggaggcacaggggttggtgcagcattgccgcgctacagaagtcactttgcctaaatcgatacaagatccaaagttatcctcagagttgcgctgcacctttcagcagtcgttgatctattggcttcatcccgctctgtcatggctgccacttttccccagaataggtgccgatcggaaaatggccggaaaaacaagcccttggagcaatgatgccacgctccagcacgttctcatgtccgactggagcgtgtcttttacttctctgtacaatctacttaagactaagctgtgcccatacttctatgtgtgcacctatcaattcaccgtgctttttagggcagccggactcgccggttctgacctcatcactgctcttatctctcctacgaccagagggctgcgggaagcaatgcggaacgaggggatcgaattctcactgcccctgataaaggagtctgggcataaaaaagaaacggcttcagggactagtttgggttatggtgaggagcaagctatttccgacgaagatgaagaggagtctttttcgtggctggaggaaatgggggttcaagacaagattaagaagcccgacatactgtccattaaattgaggaaggagaagcacgaggtgcagatggaccaccgtcccgagtcagtggttttggtgaaaggcatcaatacttttacgctgctcaattttttgataaatagcaagtccctggttgccacgagtggacctcaggcgggtctaccacctaccctgctgagtccagttgcttttaggggtgccactatgcagatgctaaaggctaggtcagtgaatgtgaagacacaagcgctgtcaggctatagggaccagtttagccttgaaatcactggacctattatgccacattccctccatagcctgaccatgttgctaaaaagttctcaaagcggaagcttctccgcagttctctacccacatgagcccacagcagtgttcaatatctgtctgcaaatggataaagtgctcgatatggaggtggtgcacaaggagctcacaaattgtggcttgcatccaaataccctggagcagttaagtcaaattcctctgttaggcaaatcttctttacgcaacgttgtcctccgcgactacatatacaactggcgctcttag

SEQ ID NO: 194076 - DNA, 2170 bp, Artificial Sequence
  derived and/or modified sequence
aggggcgggcccggcgcgcgcgggaagtctctgtagggcggccggctaccctcagccgccgcgcgtcatggccctttcggtgcccggctactcaccgggcttccgaaagccgcccgaggtagtgcggctccgacggaaaagggcccggagccgtggagctgccgcctccccgccccgtgagctgacggagccggcggcccgccgagccgccctggtggcggggctgcctcttcgccctttccctgctgcggggggcagaggcggtggcagcggcggcggcccggccgctgctcggaggaaccccttcgcccgcctggacaaccgaccgcgggtcgccgcggagccccccgacgggccggcccgcgagcagccggaggccccggtcccgtttttagattctaatcaagaaaatgatttgctatgggaagagaagtttcctgaaagaacaactgttactgaattacctcagacttcacatgtatcattctccgagcctgatattccgtcctcaaaaagtactgagttacctgtggactggagtattaaaacgcgactccttttcacctcttctcaaccctttacctgggcagatcatttgaaagcacaggaagaagctcaaggtcttgtccagcattgtagggcaacagaagttactttgcctaaaagtatacaggatcccaaactctcctctgagctccgttgtaccttccagcagagccttatctattggctccaccctgctttgtcttggctaccactgttccctcgtattggagctgatagaaaaatggctggaaagacaagtccttggtcaaatgatgcaaccctgcagcatgttttaatgagtgactggtctgtgagctttacttctctatataatttgctgaagacaaaactttgcccctatttctacgtttgtacctatcagtttactgtcctgttccgagcagcaggattagctggaagtgacttaatcacagctctcatatctccaacaactcgaggtttaagagaagctatgagaaatgaaggtattgaattttctctgcctttaataaaagaaagtggccataagaaggagacagcatctggaacaagcttgggatatggggaggagcaagccatcagtgatgaggatgaagaggaaagtttttcctggctggaagagatgggtgtgcaagataaaattaaaaagccagacatactttctatcaagctgcgtaaagagaaacatgaagtacaaatggatcacagacctgaatctgttgtgttggtaaaaggaatcaacacctttacattgctcaattttttgattaactctaagagtttagttgctacctcaggtccacaggcaggacttcctccaaccctcttgtcccctgttgctttccgaggtgccacaatgcaaatgcttaaggcacggagtgtgaatgtgaagacacaagctctttctggatacagagaccaatttagtttggagattacaggtcctatcatgcctcattctctgcattcactgaccatgctgctcaaatcttcacagagtggatctttctctgcagtactgtatccacacgagccaactgctgtatttaacatctgcctgcaaatggacaaagtacttgatatggaggttgttcataaggagcttactaactgtggtttgcaccctaacactctggagcaacttagtcaaataccgttacttgggaaatcatctttacggaatgtggtgctgagagactacatttataattggagatcctgaacaccaaagtaagcctaaaaggaatctttgaggaaaaaagccttctagcaaggaaattcaagattcttgaagttgaaggaatatactgaaatgtttataaacataacttttactacagtagcatctaaggttttaaatgtgttttactattttcagattagatttttagatataaagatgaaaaactcagataactcaaatgagatatctatatccctacaacctaattgtatattgagcagaaactgaattaatatgcttccttgcaaatgggaaatcacatagcagttaccccatggcattgtgactaatggcatcagggcaaaaatatgttactttacgatttacctgttagcaggttcttgtttcataaaggtagaaaataaatacagacaacatcta

SEQ ID NO: 194077 - DNA, 1701 bp, Artificial Sequence
  derived and/or modified sequence
atggccctgagcgtgcccggctacagccccggcttcagaaagccccccgaggtggtgagactgagaagaaagagagccagaagcagaggcgccgccgccagcccccccagagagctgaccgagcccgccgccagaagagccgccctggtggccggcctgcccctgagacccttccccgccgccggcggcagaggcggcggcagcggcggcggccccgccgccgccagaagaaaccccttcgccagactggacaacagacccagagtggccgccgagccccccgacggccccgccagagagcagcccgaggcccccgtgcccttcctggacagcaaccaggagaacgacctgctgtgggaggagaagttccccgagagaaccaccgtgaccgagctgccccagaccagccacgtgagcttcagcgagcccgacatccccagcagcaagagcaccgagctgcccgtggactggagcatcaagaccagactgctgttcaccagcagccagcccttcacctgggccgaccacctgaaggcccaggaggaggcccagggcctggtgcagcactgcagagccaccgaggtgaccctgcccaagagcatccaggaccccaagctgagcagcgagctgagatgcaccttccagcagagcctgatctactggctgcaccccgccctgagctggctgcccctgttccccagaatcggcgccgacagaaagatggccggcaagaccagcccctggagcaacgacgccaccctgcagcacgtgctgatgagcgactggagcgtgagcttcaccagcctgtacaacctgctgaagaccaagctgtgcccctacttctacgtgtgcacctaccagttcaccgtgctgttcagagccgccggcctggccggcagcgacctgatcaccgccctgatcagccccaccaccagaggcctgagagaggccatgagaaacgagggcatcgagttcagcctgcccctgatcaaggagagcggccacaagaaggagaccgccagcggcaccagcctgggctacggcgaggagcaggccatcagcgacgaggacgaggaggagagcttcagctggctggaggagatgggcgtgcaggacaagatcaagaagcccgacatcctgagcatcaagctgagaaaggagaagcacgaggtgcagatggaccacagacccgagagcgtggtgctggtgaagggcatcaacaccttcaccctgctgaacttcctgatcaacagcaagagcctggtggccaccagcggcccccaggccggcctgccccccaccctgctgagccccgtggccttcagaggcgccaccatgcagatgctgaaggccagaagcgtgaacgtgaagacccaggccctgagcggctacagagaccagttcagcctggagatcaccggccccatcatgccccacagcctgcacagcctgaccatgctgctgaagagcagccagagcggcagcttcagcgccgtgctgtacccccacgagcccaccgccgtgttcaacatctgcctgcagatggacaaggtgctggacatggaggtggtgcacaaggagctgaccaactgcggcctgcaccccaacaccctggagcagctgagccagatccccctgctgggcaagagcagcctgagaaacgtggtgctgagagactacatctacaactggagaagctag

SEQ ID NO: 194078 - protein, 363 aa, Artificial Sequence
  derived and/or modified sequence
MAPAGRPGAKKGILERLESGEVVIGDGSFLITLEKRGYVKAGLWTPEAVIEHPDAVRQLHMEFLRAGSNVMQTFTFSASEDNMESKWEDVNAAACDLAREVAGKGDALVAGGICQTSIYKYQKDEARIKKLFRQQLEVFAWKNVDFLIAEYFEHVEEAVWAVEVLKESDRPVAVTMCIGPEGDMHDITPGECAVRLVKAGASIVGVNCRFGPDTSLKTMELMKEGLEWAGLKAHLMVQPLGFHAPDCGKEGFVDLPEYPFGLESRVATRWDIQKYAREAYNLGVRYIGGCCGFEPYHIRAIAEELAPERGFLPPASEKHGSWGSGLDMHTKPWIRARARREYWENLLPASGRPFCPSLSKPDF

SEQ ID NO: 194079 - DNA, 1092 bp, Artificial Sequence
  derived and/or modified sequence
atggctccggcgggccgcccgggcgcgaaaaagggcatcctggagaggttggaatcaggtgaggtcgtaatcggcgatgggtccttcctgatcaccttggaaaaacgtggctacgtgaaagccgggctctggacccccgaggcggttatagagcatcccgatgccgtgagacagctgcacatggagttcttgagagcaggcagcaatgtgatgcagacctttacgtttagcgccagtgaggacaatatggagtccaagtgggaagacgtcaacgctgccgcctgcgacctggcccgggaggtggctgggaagggagacgcattagttgcagggggcatctgccaaacctctatttataaataccaaaaagacgaagctcggatcaagaagctttttcgccagcagctggaggtgttcgcctggaagaacgtggatttcttaattgctgagtacttcgagcacgttgaggaagcggtatgggcagttgaggttctgaaagaaagcgacagacccgttgctgtgaccatgtgtatcgggcccgagggggacatgcatgacattacgccaggtgaatgcgcggtgcgattggtgaaggccggggcgtcaatagtcggcgtaaattgtagattcgggccggatacaagtctgaaaaccatggagctcatgaaagagggactagagtgggccggcctgaaggcgcatctcatggttcaacccctggggttccatgcccccgactgtggcaaggaggggtttgtggacctaccagagtatccttttggtctcgaatcaagagtcgccacacgatgggacatacagaaatatgctcgcgaggcctataacctcggagtacgttatatcggtgggtgctgcggatttgagccataccacatacgggctatcgccgaagaactggcccctgaaaggggcttcctgccgcccgcgagtgaaaagcatgggtcctggggtagtggcttagatatgcatacaaagccatggatcagggcgcgagcccgccgagagtactgggaaaatctgctcccggcaagtggccgccccttctgcccatcactgtctaagcctgatttctag

SEQ ID NO: 194080 - DNA, 1092 bp, Artificial Sequence
  derived and/or modified sequence
atggccccagctggccggcctggggccaagaagggcatcctggagcggctggagagcggggaggtggtgattggagatggcagcttcctgatcaccctggagaagaggggctacgtgaaggccggcctgtggaccccagaggccgtcatcgagcacccagatgctgtgcggcagctgcacatggagttcctgcgggccggcagcaatgtgatgcagaccttcaccttcagcgccagcgaggacaacatggagagcaagtgggaggatgtgaatgctgctgcctgtgacctggcccgggaggtggccgggaaaggagatgccctggtggccggcggcatctgccagaccagcatctacaagtaccagaaggatgaggcccgcatcaagaagctgttccggcagcagctggaggtgtttgcctggaagaatgtggacttcctgattgctgagtactttgagcacgtggaggaggccgtgtgggccgtggaggtgctgaaggagagtgacaggcctgtggccgtgaccatgtgcatcggccctgagggggacatgcatgacatcaccccaggagaatgtgctgtgcggctggtgaaggccggggccagcatcgtgggcgtgaactgccgcttcggccctgacaccagcctgaagaccatggagctgatgaaggagggcctggagtgggccggcctgaaggcccacctgatggtgcagcccctgggcttccacgccccagactgtgggaaggagggctttgtggacctgcctgagtaccccttcggcctggagagccgggtggccacccgctgggacatccagaagtatgcccgggaggcctacaacctgggcgtgcgctacatcggcggctgctgcggctttgagccctaccacatccgggccatcgccgaggagctggcccctgagcggggcttcctgcccccagccagcgagaagcacggctcctggggcagcggcctggacatgcacaccaagccctggatccgggcccgggcccggcgggagtactgggagaacctgctgcctgccagcggccggcccttctgccccagcctgagcaagccagacttctag

SEQ ID NO: 194081 - DNA, 1092 bp, Artificial Sequence
  derived and/or modified sequence
atggcccccgccggccggcccggcgccaagaagggcatcctggagcgtttagagtcaggcgaggtggtcatcggcgacgggagtttcctcattacactcgagaaacgcggttacgttaaagctggcctatggacaccagaggccgtcatagaacatccagacgccgttcgacagcttcacatggagtttctgagagcaggctcgaatgtgatgcaaacattcaccttctccgcttctgaggacaatatggagagcaaatgggaggatgtgaacgccgcagcctgcgacctcgctcgggaggttgcgggcaagggagacgctctagtggctggaggtatttgtcagacatctatttataagtatcagaaggatgaggctagaattaaaaaactgtttcggcagcagctagaagtgtttgcatggaaaaatgtcgactttctcattgcagaatatttcgagcacgtggaggaggcggtatgggctgtagaggtcctgaaagaaagcgatcggccagtcgcagtgaccatgtgcatcggcccagagggggacatgcacgacatcactcccggcgagtgtgctgtgcggcttgttaaagccggggccagtattgttggcgtcaactgtcgctttggacccgatacatcgttgaagaccatggagttaatgaaagaaggcttggagtgggcaggcctgaaggcccatctaatggtgcagccactagggttccatgctcccgattgtggaaaagaggggttcgtcgaccttccagagtatcccttcgggttagagtctcgggtcgctacacggtgggacatccagaaatatgccagagaggcctataatttaggagtgagatacattggaggatgttgcgggtttgaaccctaccacatcagggccatcgctgaagagctcgctcccgaacgcggatttttaccacccgcaagtgagaagcacggttcttggggcagcggcttggatatgcacaccaagccctggattagagccagagcacggcgggagtattgggaaaacctcctgcctgcttctggaagacccttttgccctagcctgtccaagcctgatttttag

SEQ ID NO: 194082 - DNA, 1092 bp, Artificial Sequence
  derived and/or modified sequence
atggcaccagcaggaaggccgggagccaaaaagggcatccttgaaagactagaaagtggtgaagtggtgatcggagacgggagctttctaatcaccttggaaaaacgaggctatgttaaggctggactgtggacaccagaggcagttattgaacaccccgacgctgtgcgccaactgcacatggaattcctgagggcgggaagtaacgtaatgcagactttcaccttttcagcatcagaagacaacatggagtctaagtgggaagatgtgaacgccgctgcatgcgacctggcccgtgaggtcgccggaaagggagacgcattagtggctggcggaatatgccaaacaagcatttacaaatatcagaaggatgaagctaggattaagaaactgttccgccagcagttggaggtctttgcttggaagaatgttgatttcttgatcgccgagtactttgagcatgtggaagaggcggtgtgggccgtcgaagtgctgaaggagtctgatcgacctgtggccgtcacaatgtgcattggaccagagggcgatatgcacgatatcacccctggcgagtgtgccgtacggctggtgaaggccggtgctagtatagtcggggtgaactgcagattcggcccagacacatcgctgaagaccatggagctcatgaaagagggtttagagtgggctggtctgaaggcccatctcatggtgcagcctctgggcttccacgccccagattgcggaaaggaaggatttgtcgatctgccagagtatccgttcgggctggagagtcgagtggccaccagatgggatatccagaagtacgcacgggaagcctacaacctcggggtgcgctatataggcggttgttgcggatttgaaccttaccacatcagggccattgcagaggagctcgcacctgagcgcggatttctgccaccagcctccgaaaaacatgggagctggggctccggcctggacatgcataccaaaccttggatccgtgcacgcgcaagaagggagtactgggagaacctcctgcctgccagtggaaggcccttttgtccatccctgagtaaacctgacttctag

SEQ ID NO: 194083 - DNA, 2050 bp, Artificial Sequence
  derived and/or modified sequence
gggctgggggcgggctcctagacggccgcgcgcccgggaacccggcgcccacagagccgcggcaccatggcacctgctggacgcccgggggccaagaaggggattttggagcgcctggagagtggggaggttgtgattggagatggcagctttctcattactctggagaagagaggctatgtgaaggctgggctctggactccagaggcagtgatagaacacccagacgcagttcgtcaacttcacatggaattcttgagagcaggatcaaatgtcatgcagacttttaccttttctgccagtgaggacaatatggaaagcaagtgggaagatgtaaatgctgctgcctgtgacctcgccagggaagtggctggcaaaggtgatgctttggtagcaggggggatctgccagacatcaatatacaaataccagaaggatgaagctagaattaaaaaactttttcgacaacagctagaagtttttgcctggaaaaatgtggacttcttgattgcagagtattttgagcacgttgaagaagctgtgtgggctgtggaagtcttaaaagaatcagatagacccgtggcagttaccatgtgcataggcccagagggagacatgcatgatataacccccggagaatgtgctgtgaggctggtgaaggcaggggcttccatcgttggcgtgaactgccgctttgggcccgacaccagcttgaagacgatggagctcatgaaggagggtcttgagtgggcagggctgaaagcgcacctcatggtgcagcctctggggttccacgcgcctgactgtggcaaagaggggtttgtggatctcccagaatatccctttggactggagtccagagttgccaccagatgggatattcaaaaatacgccagagaggcctacaacctgggggtcaggtacattggcgggtgctgtggatttgagccctaccacatcagggcaattgcagaggagctggccccagaaaggggctttttgccaccagcttcagaaaaacacggcagctggggaagtggtttggacatgcacaccaaaccctggattagagcaagggctcgaagggagtattgggagaatctgctgccagcttcaggcagacctttctgtccttcgctgtcaaagccagacttctaaggagtagtgaaagaaaaccctgaaataatcgaacaggaaaaagttgccctcaagcctgacctggaaccgttcctcaccttcatcctcaccatgccctgctatctccagctgctgagcagctgaggtgctgcagccccttcccttccagcccacaagtgtgtgcatattgagctcctgctgtggttaagcactgcaacagactctaccagagatgcaaagagaagcgagagaggcaccttgttctccaagaacttactgtccaatcatgctgtggtgcattcctttgaagatcatgaagaatagccaaacttgtctttgagggtgaatttgacactttaaaataatcagaagtcactgagacccaaagctagtgaataattcaagtgactaagctagatacttgaggatgatagagcaacactaaactaaagcaatgagtctgctttttttaatgatttatacaatgactccaaaggcaatcccaaagaaaagatgtaaagaatgttttgagcaatggtagcattattgaaataaatgtttaactatccaaagtgattactttcaaagatgatttttacttaaagatattaggtctggccaggcgaagtgactcacacctgcaatcccagcactttgggaggccgaggcgggcggatcacctgaggtcagcagttcaagaccagcctgaccaacatggtgaaaccctgtctctaccaaaatacaaaaattagccgggcatgatggcgggtgcctgtaatcccagctactcgggaggctgaggcaggagaatcgcttgaacccaggaggcggagcttgcagtgagccgagatcaggccattgcacttcagcctgggtgacagagtgagactccatctcaaaaaaaaaaaaaaaa

SEQ ID NO: 194084 - DNA, 1092 bp, Artificial Sequence
  derived and/or modified sequence
atggcccccgccggcagacccggcgccaagaagggcatcctggagagactggagagcggcgaggtggtgatcggcgacggcagcttcctgatcaccctggagaagagaggctacgtgaaggccggcctgtggacccccgaggccgtgatcgagcaccccgacgccgtgagacagctgcacatggagttcctgagagccggcagcaacgtgatgcagaccttcaccttcagcgccagcgaggacaacatggagagcaagtgggaggacgtgaacgccgccgcctgcgacctggccagagaggtggccggcaagggcgacgccctggtggccggcggcatctgccagaccagcatctacaagtaccagaaggacgaggccagaatcaagaagctgttcagacagcagctggaggtgttcgcctggaagaacgtggacttcctgatcgccgagtacttcgagcacgtggaggaggccgtgtgggccgtggaggtgctgaaggagagcgacagacccgtggccgtgaccatgtgcatcggccccgagggcgacatgcacgacatcacccccggcgagtgcgccgtgagactggtgaaggccggcgccagcatcgtgggcgtgaactgcagattcggccccgacaccagcctgaagaccatggagctgatgaaggagggcctggagtgggccggcctgaaggcccacctgatggtgcagcccctgggcttccacgcccccgactgcggcaaggagggcttcgtggacctgcccgagtaccccttcggcctggagagcagagtggccaccagatgggacatccagaagtacgccagagaggcctacaacctgggcgtgagatacatcggcggctgctgcggcttcgagccctaccacatcagagccatcgccgaggagctggcccccgagagaggcttcctgccccccgccagcgagaagcacggcagctggggcagcggcctggacatgcacaccaagccctggatcagagccagagccagaagagagtactgggagaacctgctgcccgccagcggcagacccttctgccccagcctgagcaagcccgacttctag

SEQ ID NO: 194085 - protein, 2555 aa, Artificial Sequence
  derived and/or modified sequence
MPPLLAPLLCLALLPALAARGPRCSQPGETCLNGGKCEAANGTEACVCGGAFVGPRCQDPNPCLSTPCKNAGTCHVVDRRGVADYACSCALGFSGPLCLTPLDNACLTNPCRNGGTCDLLTLTEYKCRCPPGWSGKSCQQADPCASNPCANGGQCLPFEASYICHCPPSFHGPTCRQDVNECGQKPGLCRHGGTCHNEVGSYRCVCRATHTGPNCERPYVPCSPSPCQNGGTCRPTGDVTHECACLPGFTGQNCEENIDDCPGNNCKNGGACVDGVNTYNCRCPPEWTGQYCTEDVDECQLMPNACQNGGTCHNTHGGYNCVCVNGWTGEDCSENIDDCASAACFHGATCHDRVASFYCECPHGRTGLLCHLNDACISNPCNEGSNCDTNPVNGKAICTCPSGYTGPACSQDVDECSLGANPCEHAGKCINTLGSFECQCLQGYTGPRCEIDVNECVSNPCQNDATCLDQIGEFQCICMPGYEGVHCEVNTDECASSPCLHNGRCLDKINEFQCECPTGFTGHLCQYDVDECASTPCKNGAKCLDGPNTYTCVCTEGYTGTHCEVDIDECDPDPCHYGSCKDGVATFTCLCRPGYTGHHCETNINECSSQPCRHGGTCQDRDNAYLCFCLKGTTGPNCEINLDDCASSPCDSGTCLDKIDGYECACEPGYTGSMCNINIDECAGNPCHNGGTCEDGINGFTCRCPEGYHDPTCLSEVNECNSNPCVHGACRDSLNGYKCDCDPGWSGTNCDINNNECESNPCVNGGTCKDMTSGYVCTCREGFSGPNCQTNINECASNPCLNQGTCIDDVAGYKCNCLLPYTGATCEVVLAPCAPSPCRNGGECRQSEDYESFSCVCPTGWQGQTCEVDINECVLSPCRHGASCQNTHGGYRCHCQAGYSGRNCETDIDDCRPNPCHNGGSCTDGINTAFCDCLPGFRGTFCEEDINECASDPCRNGANCTDCVDSYTCTCPAGFSGIHCENNTPDCTESSCFNGGTCVDGINSFTCLCPPGFTGSYCQHDVNECDSQPCLHGGTCQDGCGSYRCTCPQGYTGPNCQNLVHWCDSSPCKNGGKCWQTHTQYRCECPSGWTGLYCDVPSVSCEVAAQRQGVDVARLCQHGGLCVDAGNTHHCRCQAGYTGSYCEDLVDECSPSPCQNGATCTDYLGGYSCKCVAGYHGVNCSEEIDECLSHPCQNGGTCLDLPNTYKCSCPRGTQGVHCEINVDDCNPPVDPVSRSPKCFNNGTCVDQVGGYSCTCPPGFVGERCEGDVNECLSNPCDARGTQNCVQRVNDFHCECRAGHTGRRCESVINGCKGKPCKNGGTCAVASNTARGFICKCPAGFEGATCENDARTCGSLRCLNGGTCISGPRSPTCLCLGPFTGPECQFPASSPCLGGNPCYNQGTCEPTSESPFYRCLCPAKFNGLLCHILDYSFGGGAGRDIPPPLIEEACELPECQEDAGNKVCSLQCNNHACGWDGGDCSLNFNDPWKNCTQSLQCWKYFSDGHCDSQCNSAGCLFDGFDCQRAEGQCNPLYDQYCKDHFSDGHCDQGCNSAECEWDGLDCAEHVPERLAAGTLVVVVLMPPEQLRNSSFHFLRELSRVLHTNVVFKRDAHGQQMIFPYYGREEELRKHPIKRAAEGWAAPDALLGQVKASLLPGGSEGGRRRRELDPMDVRGSIVYLEIDNRQCVQASSQCFQSATDVAAFLGALASLGSLNIPYKIEAVQSETVEPPPPAQLHFMYVAAAAFVLLFFVGCGVLLSRKRRRQHGQLWFPEGFKVSEASKKKRREPLGEDSVGLKPLKNASDGALMDDNQNEWGDEDLETKKFRFEEPVVLPDLDDQTDHRQWTQQHLDAADLRMSAMAPTPPQGEVDADCMDVNVRGPDGFTPLMIASCSGGGLETGNSEEEEDAPAVISDFIYQGASLHNQTDRTGETALHLAARYSRSDAAKRLLEASADANIQDNMGRTPLHAAVSADAQGVFQILIRNRATDLDARMHDGTTPLILAARLAVEGMLEDLINSHADVNAVDDLGKSALHWAAAVNNVDAAVVLLKNGANKDMQNNREETPLFLAAREGSYETAKVLLDHFANRDITDHMDRLPRDIAQERMHHDIVRLLDEYNLVRSPQLHGAPLGGTPTLSPPLCSPNGYLGSLKPGVQGKKVRKPSSKGLACGSKEAKDLKARRKKSQDGKGCLLDSSGMLSPVDSLESPHGYLSDVASPPLLPSPFQQSPSVPLNHLPGMPDTHLGIGHLNVAAKPEMAALGGGGRLAFETGPPRLSHLPVASGTSTVLGSSSGGALNFTVGGSTSLNGQCEWLSRLQSGMVPNQYNPLRGSVAPGPLSTQAPSLQHGMVGPLHSSLAASALSQMMSYQGLPSTRLATQPHLVQTQQVQPQNLQMQQQNLQPANIQQQQSLQPPPPPPQPHLGVSSAASGHLGRSFLSGEPSQADVQPLGPSSLAVHTILPQESPALPTSLPSSLVPPVTAAQFLTPPSQHSYSSPVDNTPSHQLQVPEHPFLTPSPESPDQWSSSSPHSNVSDWSEGVSSPPTSMQSQIARIPEAFK

SEQ ID NO: 194086 - DNA, 7668 bp, Artificial Sequence
  derived and/or modified sequence
atgccccccctgctggcccccctgctgtgcctggccctgctgcccgccctggccgccagaggccccagatgcagccagcccggcgagacctgcctgaacggcggcaagtgcgaggccgccaacggcaccgaggcctgcgtgtgcggcggcgccttcgtgggccccagatgccaggaccccaacccctgcctgagcaccccctgcaagaacgccggcacctgccacgtggtggacagaagaggcgtggccgactacgcctgcagctgcgccctgggcttcagcggccccctgtgcctgacccccctggacaacgcctgcctgaccaacccctgcagaaacggcggcacctgcgacctgctgaccctgaccgagtacaagtgcagatgcccccccggctggagcggcaagagctgccagcaggccgacccctgcgccagcaacccctgcgccaacggcggccagtgcctgcccttcgaggccagctacatctgccactgcccccccagcttccacggccccacctgcagacaggacgtgaacgagtgcggccagaagcccggcctgtgcagacacggcggcacctgccacaacgaggtgggcagctacagatgcgtgtgcagagccacccacaccggccccaactgcgagagaccctacgtgccctgcagccccagcccctgccagaacggcggcacctgcagacccaccggcgacgtgacccacgagtgcgcctgcctgcccggcttcaccggccagaactgcgaggagaacatcgacgactgccccggcaacaactgcaagaacggcggcgcctgcgtggacggcgtgaacacctacaactgcagatgcccccccgagtggaccggccagtactgcaccgaggacgtggacgagtgccagctgatgcccaacgcctgccagaacggcggcacctgccacaacacccacggcggctacaactgcgtgtgcgtgaacggctggaccggcgaggactgcagcgagaacatcgacgactgcgccagcgccgcctgcttccacggcgccacctgccacgacagagtggccagcttctactgcgagtgcccccacggcagaaccggcctgctgtgccacctgaacgacgcctgcatcagcaacccctgcaacgagggcagcaactgcgacaccaaccccgtgaacggcaaggccatctgcacctgccccagcggctacaccggccccgcctgcagccaggacgtggacgagtgcagcctgggcgccaacccctgcgagcacgccggcaagtgcatcaacaccctgggcagcttcgagtgccagtgcctgcagggctacaccggccccagatgcgagatcgacgtgaacgagtgcgtgagcaacccctgccagaacgacgccacctgcctggaccagatcggcgagttccagtgcatctgcatgcccggctacgagggcgtgcactgcgaggtgaacaccgacgagtgcgccagcagcccctgcctgcacaacggcagatgcctggacaagatcaacgagttccagtgcgagtgccccaccggcttcaccggccacctgtgccagtacgacgtggacgagtgcgccagcaccccctgcaagaacggcgccaagtgcctggacggccccaacacctacacctgcgtgtgcaccgagggctacaccggcacccactgcgaggtggacatcgacgagtgcgaccccgacccctgccactacggcagctgcaaggacggcgtggccaccttcacctgcctgtgcagacccggctacaccggccaccactgcgagaccaacatcaacgagtgcagcagccagccctgcagacacggcggcacctgccaggacagagacaacgcctacctgtgcttctgcctgaagggcaccaccggccccaactgcgagatcaacctggacgactgcgccagcagcccctgcgacagcggcacctgcctggacaagatcgacggctacgagtgcgcctgcgagcccggctacaccggcagcatgtgcaacatcaacatcgacgagtgcgccggcaacccctgccacaacggcggcacctgcgaggacggcatcaacggcttcacctgcagatgccccgagggctaccacgaccccacctgcctgagcgaggtgaacgagtgcaacagcaacccctgcgtgcacggcgcctgcagagacagcctgaacggctacaagtgcgactgcgaccccggctggagcggcaccaactgcgacatcaacaacaacgagtgcgagagcaacccctgcgtgaacggcggcacctgcaaggacatgaccagcggctacgtgtgcacctgcagagagggcttcagcggccccaactgccagaccaacatcaacgagtgcgccagcaacccctgcctgaaccagggcacctgcatcgacgacgtggccggctacaagtgcaactgcctgctgccctacaccggcgccacctgcgaggtggtgctggccccctgcgcccccagcccctgcagaaacggcggcgagtgcagacagagcgaggactacgagagcttcagctgcgtgtgccccaccggctggcagggccagacctgcgaggtggacatcaacgagtgcgtgctgagcccctgcagacacggcgccagctgccagaacacccacggcggctacagatgccactgccaggccggctacagcggcagaaactgcgagaccgacatcgacgactgcagacccaacccctgccacaacggcggcagctgcaccgacggcatcaacaccgccttctgcgactgcctgcccggcttcagaggcaccttctgcgaggaggacatcaacgagtgcgccagcgacccctgcagaaacggcgccaactgcaccgactgcgtggacagctacacctgcacctgccccgccggcttcagcggcatccactgcgagaacaacacccccgactgcaccgagagcagctgcttcaacggcggcacctgcgtggacggcatcaacagcttcacctgcctgtgcccccccggcttcaccggcagctactgccagcacgacgtgaacgagtgcgacagccagccctgcctgcacggcggcacctgccaggacggctgcggcagctacagatgcacctgcccccagggctacaccggccccaactgccagaacctggtgcactggtgcgacagcagcccctgcaagaacggcggcaagtgctggcagacccacacccagtacagatgcgagtgccccagcggctggaccggcctgtactgcgacgtgcccagcgtgagctgcgaggtggccgcccagagacagggcgtggacgtggccagactgtgccagcacggcggcctgtgcgtggacgccggcaacacccaccactgcagatgccaggccggctacaccggcagctactgcgaggacctggtggacgagtgcagccccagcccctgccagaacggcgccacctgcaccgactacctgggcggctacagctgcaagtgcgtggccggctaccacggcgtgaactgcagcgaggagatcgacgagtgcctgagccacccctgccagaacggcggcacctgcctggacctgcccaacacctacaagtgcagctgccccagaggcacccagggcgtgcactgcgagatcaacgtggacgactgcaacccccccgtggaccccgtgagcagaagccccaagtgcttcaacaacggcacctgcgtggaccaggtgggcggctacagctgcacctgcccccccggcttcgtgggcgagagatgcgagggcgacgtgaacgagtgcctgagcaacccctgcgacgccagaggcacccagaactgcgtgcagagagtgaacgacttccactgcgagtgcagagccggccacaccggcagaagatgcgagagcgtgatcaacggctgcaagggcaagccctgcaagaacggcggcacctgcgccgtggccagcaacaccgccagaggcttcatctgcaagtgccccgccggcttcgagggcgccacctgcgagaacgacgccagaacctgcggcagcctgagatgcctgaacggcggcacctgcatcagcggccccagaagccccacctgcctgtgcctgggccccttcaccggccccgagtgccagttccccgccagcagcccctgcctgggcggcaacccctgctacaaccagggcacctgcgagcccaccagcgagagccccttctacagatgcctgtgccccgccaagttcaacggcctgctgtgccacatcctggactacagcttcggcggcggcgccggcagagacatccccccccccctgatcgaggaggcctgcgagctgcccgagtgccaggaggacgccggcaacaaggtgtgcagcctgcagtgcaacaaccacgcctgcggctgggacggcggcgactgcagcctgaacttcaacgacccctggaagaactgcacccagagcctgcagtgctggaagtacttcagcgacggccactgcgacagccagtgcaacagcgccggctgcctgttcgacggcttcgactgccagagagccgagggccagtgcaaccccctgtacgaccagtactgcaaggaccacttcagcgacggccactgcgaccagggctgcaacagcgccgagtgcgagtgggacggcctggactgcgccgagcacgtgcccgagagactggccgccggcaccctggtggtggtggtgctgatgccccccgagcagctgagaaacagcagcttccacttcctgagagagctgagcagagtgctgcacaccaacgtggtgttcaagagagacgcccacggccagcagatgatcttcccctactacggcagagaggaggagctgagaaagcaccccatcaagagagccgccgagggctgggccgcccccgacgccctgctgggccaggtgaaggccagcctgctgcccggcggcagcgagggcggcagaagaagaagagagctggaccccatggacgtgagaggcagcatcgtgtacctggagatcgacaacagacagtgcgtgcaggccagcagccagtgcttccagagcgccaccgacgtggccgccttcctgggcgccctggccagcctgggcagcctgaacatcccctacaagatcgaggccgtgcagagcgagaccgtggagccccccccccccgcccagctgcacttcatgtacgtggccgccgccgccttcgtgctgctgttcttcgtgggctgcggcgtgctgctgagcagaaagagaagaagacagcacggccagctgtggttccccgagggcttcaaggtgagcgaggccagcaagaagaagagaagagagcccctgggcgaggacagcgtgggcctgaagcccctgaagaacgccagcgacggcgccctgatggacgacaaccagaacgagtggggcgacgaggacctggagaccaagaagttcagattcgaggagcccgtggtgctgcccgacctggacgaccagaccgaccacagacagtggacccagcagcacctggacgccgccgacctgagaatgagcgccatggcccccacccccccccagggcgaggtggacgccgactgcatggacgtgaacgtgagaggccccgacggcttcacccccctgatgatcgccagctgcagcggcggcggcctggagaccggcaacagcgaggaggaggaggacgcccccgccgtgatcagcgacttcatctaccagggcgccagcctgcacaaccagaccgacagaaccggcgagaccgccctgcacctggccgccagatacagcagaagcgacgccgccaagagactgctggaggccagcgccgacgccaacatccaggacaacatgggcagaacccccctgcacgccgccgtgagcgccgacgcccagggcgtgttccagatcctgatcagaaacagagccaccgacctggacgccagaatgcacgacggcaccacccccctgatcctggccgccagactggccgtggagggcatgctggaggacctgatcaacagccacgccgacgtgaacgccgtggacgacctgggcaagagcgccctgcactgggccgccgccgtgaacaacgtggacgccgccgtggtgctgctgaagaacggcgccaacaaggacatgcagaacaacagagaggagacccccctgttcctggccgccagagagggcagctacgagaccgccaaggtgctgctggaccacttcgccaacagagacatcaccgaccacatggacagactgcccagagacatcgcccaggagagaatgcaccacgacatcgtgagactgctggacgagtacaacctggtgagaagcccccagctgcacggcgcccccctgggcggcacccccaccctgagcccccccctgtgcagccccaacggctacctgggcagcctgaagcccggcgtgcagggcaagaaggtgagaaagcccagcagcaagggcctggcctgcggcagcaaggaggccaaggacctgaaggccagaagaaagaagagccaggacggcaagggctgcctgctggacagcagcggcatgctgagccccgtggacagcctggagagcccccacggctacctgagcgacgtggccagcccccccctgctgcccagccccttccagcagagccccagcgtgcccctgaaccacctgcccggcatgcccgacacccacctgggcatcggccacctgaacgtggccgccaagcccgagatggccgccctgggcggcggcggcagactggccttcgagaccggcccccccagactgagccacctgcccgtggccagcggcaccagcaccgtgctgggcagcagcagcggcggcgccctgaacttcaccgtgggcggcagcaccagcctgaacggccagtgcgagtggctgagcagactgcagagcggcatggtgcccaaccagtacaaccccctgagaggcagcgtggcccccggccccctgagcacccaggcccccagcctgcagcacggcatggtgggccccctgcacagcagcctggccgccagcgccctgagccagatgatgagctaccagggcctgcccagcaccagactggccacccagccccacctggtgcagacccagcaggtgcagccccagaacctgcagatgcagcagcagaacctgcagcccgccaacatccagcagcagcagagcctgcagcccccccccccccccccccagccccacctgggcgtgagcagcgccgccagcggccacctgggcagaagcttcctgagcggcgagcccagccaggccgacgtgcagcccctgggccccagcagcctggccgtgcacaccatcctgccccaggagagccccgccctgcccaccagcctgcccagcagcctggtgccccccgtgaccgccgcccagttcctgaccccccccagccagcacagctacagcagccccgtggacaacacccccagccaccagctgcaggtgcccgagcaccccttcctgacccccagccccgagagccccgaccagtggagcagcagcagcccccacagcaacgtgagcgactggagcgagggcgtgagcagcccccccaccagcatgcagagccagatcgccagaatccccgaggccttcaagtag

SEQ ID NO: 194087 - DNA, 7668 bp, Artificial Sequence
  derived and/or modified sequence
atgccccctcttttggccccattgctgtgtctggcactgttaccagcactcgccgctcgtggacctcggtgttcacagcccggagagacgtgcctcaatggcgggaaatgtgaagctgccaacggcacagaagcttgcgtatgcggcggcgccttcgtcggtccacgctgccaggaccccaacccctgcctgtctacaccctgcaagaatgccggcacttgtcacgtggttgatcgacggggcgtcgccgactatgcatgttcctgcgctttgggttttagcggccctctgtgtcttacccctctggacaacgcttgtctcacaaatccttgccggaatggcggtacttgtgatttattgacactgactgaatacaagtgccggtgtcctcctggttggtctgggaagtcatgtcagcaggccgatccgtgcgcaagcaatccctgtgctaacggtggccaatgcctgccattcgaagcatcatacatatgccattgccctccctcttttcatggccccacgtgccgccaggatgtgaatgagtgtgggcagaagccagggttatgcagacatggtggtacatgccacaacgaggtcggatcataccgctgcgtctgtagggcaacccataccggccccaattgcgagcgcccatatgtcccctgcagccctagcccatgccagaacgggggcacctgcaggccgacaggagacgtcacccatgagtgtgcctgtctgccagggtttaccggccagaattgtgaggagaatatcgacgattgccccgggaacaactgcaagaacggaggagcctgtgttgatggagtgaatacttataattgccgttgcccccctgaatggacaggccaatattgtactgaggatgtggacgaatgtcagctgatgccaaacgcctgccagaacgggggcacttgccacaatacccacggaggatataactgcgtgtgcgtcaacggatggactggtgaagactgcagtgagaatattgacgattgtgcgtctgcagcttgcttccacggggctacctgtcatgatcgcgtggcctctttctactgtgaatgtcctcatggccgcaccggcctgctgtgccacctcaacgacgcgtgtatcagtaatccttgcaacgaaggatccaactgtgacactaacccagtgaatggtaaggccatttgcacgtgcccatccggctacacaggtcctgcatgcagccaagatgtcgacgaatgcagtttaggggcgaatccttgtgaacacgcgggcaaatgcatcaataccttaggtagctttgagtgccaatgtctgcagggatataccggcccgagatgtgagatcgatgtcaacgaatgcgtttccaacccctgtcaaaatgatgccacatgtcttgatcagatcggtgaattccagtgtatttgcatgcccggctatgagggcgtgcactgcgaggttaacacagatgagtgcgcaagctccccttgcctccacaacggcaggtgcttagataaaatcaatgaattccagtgcgaatgtccaacgggtttcaccggacatctgtgccagtacgacgtggacgagtgtgcctcaactccgtgcaaaaacggcgccaagtgcctggacggccctaacacttatacgtgtgtgtgcacagaaggctacacaggcacacactgtgaagttgatatcgacgaatgtgatcctgacccatgccattacggaagctgcaaagacggtgtggctacatttacttgcctgtgccgtcccggctataccggacaccactgtgaaaccaacataaacgaatgttcatcgcagccttgtaggcacgggggaacttgccaggaccgggataacgcatatctgtgtttctgtctgaagggaactacagggccaaattgcgagattaacttagatgactgcgccagctccccttgtgacagcggcacttgcctggacaagatagacggctatgagtgcgcttgtgaacccggatacacaggcagtatgtgtaatatcaacatcgacgaatgcgccgggaacccttgccacaatggtggcacttgcgaggatggaatcaatggcttcacttgccggtgccctgaaggatatcacgatcccacctgtctgagcgaggttaatgaatgcaactctaacccatgcgtacatggggcctgtagggattctctcaatggttacaagtgtgattgcgaccctggatggtccggtaccaactgtgacattaataacaacgagtgcgagtccaatccttgcgtgaatggggggacatgcaaggatatgacctccggttacgtgtgcacctgccgggaaggcttcagcggtcctaactgccaaacaaatatcaatgaatgtgcaagcaacccgtgtctgaatcaggggacttgcattgacgatgtcgcgggttacaagtgtaattgcctcctcccttacacaggagcaacctgcgaagtggtgctggcgccctgcgcgccctccccctgtaggaatggaggcgaatgcaggcagagtgaagattatgaatctttctcttgcgtgtgccctacggggtggcaagggcagacttgtgaggttgatattaacgaatgcgttctgagcccatgccgtcacggcgcatcgtgtcagaacacccatggaggctaccgatgccattgccaagctgggtacagcgggagaaactgtgaaactgacattgatgattgtcggcccaatccctgtcacaacggaggctcatgtacagatgggattaataccgccttttgcgattgccttccggggttccgcggcacattctgtgaggaggatataaatgagtgtgcctcagatccttgtcgcaatggcgccaactgcacagactgcgtagacagctacacatgcacttgcccagctggtttttccggcattcactgcgagaataatactccggactgcacagaatcatcttgctttaacggcggcacatgcgtggacggaatcaacagcttcacttgtctctgcccgccaggatttaccggttcttactgccagcacgatgtgaacgaatgcgactctcagccatgcctgcatggcggaacctgccaggacgggtgcggatcataccgatgtacctgtccgcagggatataccggtccaaactgccagaacctagtgcattggtgtgattcctcaccatgtaagaatggaggcaaatgttggcagacacatactcagtacaggtgcgagtgcccaagcggctggactggactatactgtgacgtgcctagcgtctcatgcgaagttgccgcacagcgccagggagtggacgtggcccgcctgtgccagcatggcggattgtgcgtggacgcaggaaacactcaccactgccggtgccaagccgggtacaccggctcatattgtgaagacctggtggacgagtgctcaccaagtccatgccagaatggagctacctgtacagattatctggggggctattcctgcaagtgtgtcgcagggtaccacggcgtcaattgctcagaggagatcgacgagtgcctgtcgcatccctgccagaacggcggtacctgcctggatctgcccaacacatataaatgctcttgtcctaggggcacacagggggtccattgtgagatcaatgtggacgattgcaatccccctgtcgatccggtgtcccgttcaccaaaatgtttcaacaatggtacttgcgtggaccaagttggcggttactcatgtacttgtcccccagggttcgtgggcgagaggtgcgaaggtgatgtcaacgagtgtctgtctaacccatgtgatgcgaggggcactcagaactgcgttcaacgcgtaaacgatttccactgcgagtgcagggccggtcacaccggccggaggtgcgaaagtgtaatcaacggatgcaagggtaagccgtgcaaaaacggcggcacttgcgcggttgcttcaaacaccgctcgtggcttcatttgcaaatgcccggcgggtttcgagggcgccacctgcgagaacgacgcccggacttgcggctccctccggtgcctcaatggaggcacatgtatctctggtcctaggagcccaacatgtctctgcctaggcccctttacaggacctgagtgtcagttcccagcctcgagtccttgcctggggggaaacccatgttacaatcagggaacctgcgagcctacatctgagagtcctttctatagatgcctgtgtcccgccaaattcaacggactgctgtgtcatatcctagattacagcttcggaggaggcgcagggagggacatcccaccccctttaattgaagaggcttgcgaactccctgagtgccaggaggatgcaggaaataaagtctgctcgcttcaatgcaacaaccacgcctgtgggtgggatggcggtgactgttcactgaatttcaatgacccctggaaaaactgcactcagtcccttcagtgctggaaatatttttccgacggccactgcgatagccagtgcaacagcgctggttgtctctttgatggattcgattgtcagcgggctgaaggacagtgtaatcctctgtacgaccagtactgtaaagaccacttcagcgacggccactgtgatcaaggctgcaattcagccgagtgtgagtgggatggactggattgcgcagagcatgttcctgaacgcctggcagccggtaccctcgttgtcgtcgtattgatgccccccgaacagctgcgcaacagttcttttcatttcttgagagaattgtccagggtgctccatacaaatgtagtgtttaagagggacgctcatggacaacagatgatatttccctattatgggcgcgaggaggaactgaggaagcatcctattaagcgtgctgcggagggttgggccgctcccgatgcattactaggccaagttaaggccagtcttctgccaggaggatccgaaggaggccggcgccggcgggagctggatcccatggacgtaagaggtagtatcgtctacctcgaaattgataatcgacagtgcgttcaagcttcctcacagtgctttcagagcgcaaccgatgttgcggcattcctgggcgcgctagcgtcactcgggtccctgaatatcccgtacaagatcgaggccgtgcagtcagaaacagttgaacctcctccaccggcccaacttcacttcatgtacgttgccgcagctgcttttgtgctgttattcttcgtgggctgtggggtgcttctgagtcggaaacgacggagacagcatggacagctgtggttccctgagggcttcaaggtcagcgaggcgtccaaaaagaagcgccgggaaccactcggggaggattccgtagggctgaagcccctgaagaacgcttctgacggagcactcatggatgataatcagaacgagtggggcgacgaggatctggagacaaaaaagtttcgattcgaggagcccgttgtccttcccgacctggacgatcagactgatcacaggcagtggacccagcaacatctagatgcagcagacttgagaatgtctgccatggctcccactcccccccagggcgaagttgatgctgactgcatggatgtgaacgtgcgtggtcctgacggttttactccacttatgatagcaagctgttctggcggcgggcttgagacaggaaacagtgaggaagaagaggacgctcccgccgtgatttccgactttatctaccagggtgcctccctgcataatcagaccgatcgtacaggtgaaaccgccctccacctggccgccaggtattccaggtcggatgctgccaagcgtttattagaagcctccgccgacgcaaacatccaggacaatatgggccgcacacctctgcacgcggccgtgtccgctgatgcccaaggcgtcttccagattctgatccgtaaccgcgctactgatctcgatgcacggatgcacgatgggacaactccactcattttggctgccaggctggctgtagagggcatgttggaggacctgattaatagtcacgctgacgtaaacgctgtggatgacctcggcaaatcggccctccactgggccgctgcagtaaataacgtggacgcagccgtggtccttttaaagaatggagccaataaggacatgcagaacaaccgagaggaaacacccctgttcctggctgccagagaggggtcttatgaaacagctaaggttctactagatcactttgccaatcgcgatattacggatcacatggatcggctgccgcgggacattgcacaggaacgtatgcatcacgatattgtgcgccttcttgatgaatataatctggtccggtcccctcaactccacggggctccactgggcggcacgccgaccctttccccaccactgtgctctcctaacgggtacctgggcagtctaaagcctggcgtacagggcaaaaaggtccggaagccctcctctaagggcttggcatgcggaagtaaggaagccaaggatctaaaggcccgtcggaagaagagccaggatggcaaggggtgcctgctggattcttcgggcatgcttagtccagtggactccctggagagcccccacggatatctcagcgatgtggccagccctcctttgctgcccagcccatttcagcagagtccctcagtgcccctaaaccacctcccaggtatgccggacactcacctgggcatcggacatctgaatgttgctgctaaaccagaaatggcagctctcggcggcggaggaaggctagcttttgagacaggaccgccacggctatctcatctccccgttgctagcggaacttctactgtgctcggcagtagctctgggggggcactgaattttaccgtcgggggatctacttccctgaacgggcagtgcgagtggttatcgcggctgcagtccggaatggtgcctaaccagtacaaccccctgaggggaagcgtggcacccggacccctcagcacacaggccccaagtcttcagcacgggatggtgggccccctgcacagctcactggcagcgtctgctctgagccagatgatgtcttaccagggattaccaagcactcggctggccacccagccgcatcttgtgcagacccagcaggttcaacctcagaacttgcagatgcagcagcagaacctgcaacccgctaacattcaacagcagcagagtctgcagccgcctccgcctccccctcagccacatttgggcgtgtcttccgccgcatcaggccacctgggaagatcgttcttgtcaggggagccttcgcaggctgacgtgcagccgttaggccctagtagtctggctgtccacacaatactacctcaggagtctccagctcttccgacaagcctcccgtcttccctcgtgccgcccgtgactgccgcccaattcctgactccaccaagtcagcattcttattcgagccctgtagacaacaccccttcccaccagctccaggtccccgagcacccattcctcactcccagtcctgaaagccccgaccaatggagctcctcctcaccccattcgaacgtgagcgattggagcgaaggcgtatccagtccacctacttctatgcagagtcagatcgctagaatcccagaagccttcaagtag

SEQ ID NO: 194088 - DNA, 7668 bp, Artificial Sequence
  derived and/or modified sequence
atgccacccctgctggcccccctgctgtgcctggccctgctgcctgccctggccgcccggggcccccgctgcagccagcctggagagacctgcctgaatggaggaaaatgtgaggccgccaatggaacagaggcctgtgtgtgtggcggggcctttgtgggcccccgctgccaggaccccaacccctgcctgagcaccccctgcaagaatgccggcacctgccacgtggtggacagaagaggagtggccgactatgcctgcagctgtgccctgggcttcagcggccccctgtgcctgacccccctggacaatgcctgcctgaccaacccctgcagaaatggaggcacctgtgacctgctgaccctgacagagtacaagtgccgctgccccccaggctggagcggcaagagctgccagcaggccgacccctgtgccagcaacccctgtgccaatggaggccagtgcctgccctttgaggccagctacatctgccactgccccccatccttccacggccccacctgccggcaggatgtgaatgaatgtggccagaagccaggcctgtgcagacatggaggcacctgccacaatgaggtgggcagctaccgctgtgtgtgccgggccacccacacaggccccaactgtgagcggccctacgtgccctgcagccccagcccctgccagaatggaggcacctgccggcccactggagatgtgacccatgaatgtgcctgcctgcccggcttcaccggccagaactgtgaggagaacattgatgactgccccggcaacaactgcaagaatggaggagcctgtgtggatggagtgaacacctacaactgccgctgccccccagagtggacaggccagtactgcacagaagatgtggatgagtgccagctgatgcccaatgcctgccagaatggaggcacctgccacaacacccacggcggctacaactgtgtgtgtgtgaatggctggacaggagaggactgcagcgagaacattgatgactgtgccagcgctgcctgcttccacggggccacctgccacgacagagtggccagcttctactgtgagtgcccccacggccgcacaggcctgctgtgccacctgaatgatgcctgcatcagcaacccctgcaatgaaggcagcaactgtgacaccaaccctgtgaatggcaaggccatctgcacctgccccagcggctacacaggccctgcctgcagccaggatgtggatgaatgttccctgggcgccaacccctgtgaacatgctgggaagtgcatcaacaccctgggcagctttgagtgccagtgcctgcagggctacacaggcccccgctgtgaaattgatgtgaatgaatgtgtgagcaacccctgccagaatgatgccacctgcctggaccagattggagagttccagtgcatctgcatgcctggctatgagggcgtgcactgtgaggtgaacacagatgaatgtgccagcagcccctgcctgcacaacggccgctgcctggacaagatcaatgagttccagtgtgaatgtcccaccggcttcaccggccacctgtgccagtatgatgtggatgaatgtgccagcaccccctgcaagaatggagccaagtgcctggatggccccaacacctacacctgtgtgtgcacagagggctacacaggcacccactgtgaggtggacattgatgaatgtgaccctgacccctgccactacggcagctgcaaggatggagtggccaccttcacctgcctgtgcaggcctggctacacaggccaccactgtgagaccaacatcaatgaatgtagcagccagccctgccgccacggcggcacctgccaggaccgggacaatgcctacctgtgcttctgcctgaagggcaccaccggccccaactgtgagatcaacctggatgactgtgccagcagcccctgtgacagcggcacctgcctggacaagattgatggctatgaatgtgcctgtgagcccggctacacaggctccatgtgcaacatcaacattgatgaatgtgccggcaacccctgccacaatggaggcacctgtgaagatggcatcaatggcttcacctgccgctgcccagagggctaccatgaccccacctgcctgtctgaggtgaatgaatgcaacagcaacccctgtgtgcatggagcctgccgggacagcctgaatggctacaagtgtgactgtgaccccggctggagcggcaccaactgtgacatcaacaacaatgaatgtgagagcaacccctgtgtgaatggaggcacctgcaaggacatgaccagcggctacgtgtgcacctgccgggagggcttcagcggccccaactgccagaccaacatcaatgaatgtgccagcaacccctgcctgaaccagggcacctgcattgatgatgtggccggctacaagtgcaactgcctgctgccctacaccggggccacctgtgaggtggtgctggccccctgtgcccccagcccctgcagaaatggaggagaatgtcggcagagcgaggactatgagagcttcagctgtgtgtgccccaccggctggcagggccagacctgtgaggtggacatcaatgaatgtgtgctgagcccctgccgccacggggccagctgccagaacacccacggcggctaccgctgccactgccaggccggctacagcggcaggaactgtgaaacagacattgatgactgccggcccaacccctgccacaacggcggcagctgcacagatggcatcaacacagccttctgtgactgcctgcccggcttccggggcaccttctgtgaggaggacatcaatgaatgtgccagtgacccctgcagaaatggagccaactgcacagactgtgtggacagctacacctgcacctgcccagctggcttcagcggcatccactgtgagaacaacaccccagactgcacagagagcagctgcttcaacggcggcacctgtgtggatggcatcaacagcttcacctgcctgtgccccccaggcttcaccggcagctactgccagcatgatgtgaatgaatgtgacagccagccctgcctgcacggcggcacctgccaggacggctgcggcagctaccgctgcacctgcccccagggctacacaggccccaactgccagaacctggtgcactggtgtgacagcagcccctgcaagaatggaggcaagtgctggcagacccacacccagtaccgctgtgagtgccccagcggctggacaggcctgtactgtgatgtgcccagcgtgtcctgtgaggtggccgcccagaggcagggcgtggatgtggcccggctgtgccagcacggcggcctgtgtgtggatgctggcaacacccaccactgccgctgccaggccggctacacaggcagctactgtgaggacctggtggatgagtgcagccccagcccctgccagaatggagccacctgcacagactacctgggcggctacagctgcaagtgtgtggccggctaccacggcgtgaactgcagcgaggagattgatgagtgcctgagccacccctgccagaatggaggcacctgcctggacctgcccaacacctacaagtgcagctgcccccggggcacccagggcgtgcactgtgagatcaacgtggatgactgcaacccccctgtggaccctgtgagccgcagccccaagtgcttcaacaacggcacctgtgtggaccaggtgggcggctacagctgcacctgccccccaggctttgtgggggagcgctgtgaaggagatgtgaatgaatgtctgagcaacccctgtgatgcccggggcacccagaactgtgtgcagagggtgaatgacttccactgtgagtgcagagctggccacacaggccgccgctgtgagagcgtcatcaatggctgcaagggcaagccctgcaagaatggaggcacctgtgctgtggccagcaacacagcccggggcttcatctgcaagtgcccagctggctttgagggcgccacctgtgaaaatgatgcccggacctgtggcagcctgcgctgcctgaatggaggcacctgcatcagcggccccaggagccccacctgcctgtgcctgggccccttcaccggccctgagtgccagtttcctgccagcagcccctgcctgggcggcaacccctgctacaaccagggcacctgtgagcccaccagcgagagccccttctaccgctgcctgtgcccagccaagttcaacggcctgctgtgccacatcctggactacagctttggaggaggagctggccgggacatccccccacccctgattgaggaggcctgtgagctgcctgagtgccaggaggatgctggcaacaaggtgtgcagcctgcagtgcaacaaccacgcctgtggctgggatggaggagactgcagcctgaacttcaatgacccctggaagaactgcacccagagcctgcagtgctggaagtacttcagtgatggccactgtgacagccagtgcaacagcgctggctgcctgtttgatggctttgactgccagagagctgagggccagtgcaaccccctgtatgaccagtactgcaaggaccacttcagtgatggccactgtgaccagggctgcaacagcgcagaatgtgagtgggatggcctggactgtgccgagcacgtgcctgagcggctggccgccggcaccctggtggtggtggtgctgatgcctcctgagcagctgaggaacagcagcttccacttcctgcgggagctgagccgggtgctgcacaccaacgtggtgttcaagagagatgcccacggccagcagatgatcttcccctactacggccgggaggaggagctgaggaagcaccccatcaagagagctgctgagggctgggccgccccagatgccctgctgggccaggtgaaggccagcctgctgcccggcggcagcgagggcggcagaagaagaagagagctggaccccatggatgtgcggggcagcatcgtgtacctggagattgacaaccggcagtgtgtgcaggccagcagccagtgcttccagagcgccacagatgtggccgccttcctgggcgccctggccagcctgggcagcctgaacatcccctacaagattgaggccgtgcagagcgagaccgtggagcccccacctccagcccagctgcacttcatgtatgtggccgccgccgcctttgtgctgctcttctttgtgggctgcggcgtgctgctgagcaggaagagaagacggcagcacggccagctgtggttccctgagggcttcaaggtgtctgaggccagcaagaagaagagaagagagcccctgggagaagattctgtgggcctgaagcccctgaagaatgccagtgatggagccctgatggatgacaaccagaatgagtggggagatgaggacctggagaccaagaagttccgctttgaggagcctgtggtgctgcctgacctggatgaccagacagaccaccggcagtggacccagcagcacctggatgctgctgacctgaggatgtctgccatggcccccaccccaccccagggcgaggtggatgctgactgcatggatgtgaatgtgcggggcccagatggcttcacccccctgatgattgccagctgcagcggcggcggcctggagactggaaacagcgaggaggaggaggatgccccagctgtgatcagtgacttcatctaccagggcgccagcctgcacaaccagacagacagaactggagaaacagccctgcacctggccgcccgctacagcagaagtgatgctgccaagaggctgctggaggccagcgcagatgccaacatccaggacaacatgggccgcacccccctgcatgctgctgtgtctgcagatgcccagggcgtcttccagatcctgatccggaacagagccacagacctggatgccaggatgcatgatggcaccacccccctcatcctggccgcccggctggccgtggagggcatgctggaggacctgatcaacagccatgctgatgtgaatgctgtggatgacctgggcaagagcgccctgcactgggccgctgctgtgaacaacgtggatgctgctgtggtgctgctgaagaatggagccaacaaggacatgcagaacaaccgggaggagacccccctcttcctggccgcccgggagggcagctatgaaacagccaaggtgctgctggaccactttgccaacagagacatcacagaccacatggaccggctgccccgggacatcgcccaggagaggatgcaccacgacatcgtgcggctgctggatgagtacaacctggtgcgcagcccccagctgcatggagcccccctgggcggcacccccaccctgagcccccccctgtgcagccccaacggctacctgggcagcctgaagccaggagtgcagggcaagaaggtgaggaagcccagcagcaagggcctggcctgtggcagcaaggaggccaaggacctgaaggcccggaggaagaagagccaggacggcaagggctgcctgctggacagcagcggcatgctgagccctgtggacagcctggagagcccccacggctacctgagtgatgtggccagcccccccctgctgcccagccccttccagcagagccccagcgtgcccctgaaccacctgcccggcatgccagacacccacctgggcatcggccacctgaatgtggccgccaagccagagatggccgccctgggcggcggcggccgcctggcctttgagaccggccccccccggctgagccacctgcctgtggccagcggcaccagcacagtgctgggcagcagcagcggcggggccctgaacttcaccgtgggcggcagcaccagcctgaatggccagtgtgagtggctgagccggctgcagagcggcatggtgcccaaccagtacaaccccctgcggggctctgtggcccctggccccctgagcacccaggcccccagcctgcagcacggcatggtgggccccctgcacagcagcctggccgccagcgccctgagccagatgatgagctaccagggcctgcccagcacccggctggccacccagccccacctggtgcagacccagcaggtgcagccccagaacctgcagatgcagcagcagaacctgcagcctgccaacatccagcagcagcagagcctgcagcccccacctcctccaccccagccccacctgggcgtgtcctctgctgccagcggccacctgggccgctccttcctgtctggagagcccagccaggctgatgtgcagcccctgggccccagcagcctggccgtgcacaccatcctgccccaggagagccctgccctgcccaccagcctgcccagcagcctggtgccccctgtgacagctgcccagttcctgaccccacccagccagcacagctacagcagccctgtggacaacacccccagccaccagctgcaggtgcctgagcaccccttcctgacccccagccctgagagcccagaccagtggagcagcagcagcccccacagcaatgtgtctgactggagcgagggcgtgagcagcccccccacctccatgcagagccagatcgcccgcatccctgaggccttcaagtag

SEQ ID NO: 194089 - DNA, 7668 bp, Artificial Sequence
  derived and/or modified sequence
atgccccccctgctggcccccctgctgtgcctggccctgctgcccgccctagcagctcgcggtccaagatgttcccagccaggcgagacgtgtttaaacggaggtaaatgtgaggccgcaaatgggacagaggcctgtgtgtgcggcggtgcgttcgtcggaccacggtgccaggacccaaacccctgtttaagcacaccatgtaaaaacgccggtacctgtcacgtggtggataggcgcggggtcgccgattatgcatgtagctgtgctctcggcttctccggaccattatgccttactccacttgataacgcctgcctgacgaatccgtgcaggaatggaggtacttgcgacctccttacactgacggagtataagtgccgatgtccacctggctggtccggcaaatcctgccagcaggcagatccctgtgctagcaacccgtgcgctaacggtgggcagtgtctcccctttgaggcctcatatatctgccactgtcctccaagttttcatggcccaacgtgtaggcaagatgttaacgagtgtggccagaaaccgggactgtgtagacatggcgggacctgccacaacgaagtagggtcttaccgctgcgtgtgccgggcaactcacacaggtcctaactgtgaaaggccctacgtgccgtgcagcccgtccccttgtcagaatggcggaacctgcaggccgaccggggatgtaactcacgaatgcgcatgcctaccgggctttacaggccagaactgtgaggaaaatatagatgattgtcctggcaacaattgtaaaaacgggggcgcctgcgttgacggcgtgaacacatataattgcagatgcccacccgagtggactggacagtattgtaccgaagacgttgacgagtgccagctgatgccaaatgcttgccagaatggagggacttgtcacaatacccatgggggttacaattgtgtatgcgtcaacggatggaccggggaagattgtagcgaaaatatcgacgactgtgcaagcgccgcctgctttcacggggccacatgccacgacagagtggctagcttttattgtgagtgcccgcatggacggaccgggctcctctgtcatctgaatgatgcgtgcatttcaaacccttgcaacgaaggatccaattgtgacacaaaccccgtgaacggtaaggctatttgtacctgtccctctgggtacacggggccagcgtgcagccaagacgtagatgagtgctccctgggcgcgaatccttgtgagcacgctggcaagtgtataaatacactggggtcatttgagtgccaatgcctccaggggtacacaggacctcggtgtgaaattgatgtaaacgaatgtgtaagtaacccctgccaaaacgatgctacctgtctcgaccagatcggcgaattccaatgtatttgtatgccaggatatgaaggcgtgcactgcgaagtgaacactgacgaatgcgcctcaagcccttgccttcataacggaaggtgcctagataagatcaatgagtttcaatgtgagtgtcctacaggcttcaccggacacctatgtcagtacgatgtggatgaatgtgccagcacaccatgtaaaaatggagcgaagtgtctggacgggccgaatacttatacatgtgtctgcaccgagggatacacagggacacattgcgaagtggacattgatgaatgtgatcctgacccgtgccactatggttcttgcaaggacggagtcgctacttttacttgcctgtgtcggccagggtacacaggacaccactgcgagacaaatataaacgagtgctcaagccaaccatgccggcacggagggacatgtcaagatcgggacaacgcttacctgtgcttttgtcttaaagggaccactgggcctaattgcgaaattaaccttgacgactgcgcatcttcgccatgtgatagcgggacgtgcctggacaagatagatggctatgagtgtgcctgcgagccaggttacacagggagtatgtgcaacatcaatatcgacgaatgtgctggaaacccgtgtcacaatggggggacatgcgaggacggcatcaacggctttacgtgcagatgccccgagggataccacgatcccacctgtctaagcgaggtcaacgaatgtaactctaatccctgcgttcacggggcttgtcgtgatagtctgaacggatacaaatgtgattgtgatcccggatggtctggaactaactgtgacatcaacaataacgaatgcgagagtaatccctgtgtgaatgggggaacatgcaaggacatgacgagcgggtatgtgtgcacatgccgcgagggattctctggcccaaattgccaaaccaatataaatgagtgcgccagtaatccctgtctcaatcagggcacatgcattgacgatgtcgccggatacaagtgtaactgccttcttccgtatactggcgcaacgtgcgaggtggtgctcgctccttgcgcgccctctccctgccgaaacggaggagagtgtcgtcaatcagaagattatgagtctttctcttgtgtgtgccccacaggctggcaaggccagacctgcgaggttgatatcaatgaatgcgtgcttagcccctgcagacatggcgcctcatgccaaaacacccatggagggtacaggtgccactgccaagctggttactcaggacggaattgtgaaacggacatcgacgattgcagacccaacccctgtcataacggcggaagttgtaccgacggcatcaatacggccttttgcgattgcctgcctgggttccgaggcactttctgtgaggaggatatcaacgaatgcgccagcgatccttgtaggaatggagcgaattgcaccgattgcgtagactcttacacatgcacctgtcctgcgggctttagtgggatccactgtgagaataacactccggactgtactgagtccagttgttttaacgggggaacatgcgttgatgggatcaactcattcacctgtctttgcccacctggtttcacaggctcctattgtcagcatgatgtgaacgaatgtgactctcagccctgcctacatgggggcacgtgtcaagatggttgcggcagctacagatgcacttgcccacagggctacacgggcccaaactgccagaacctagtgcactggtgtgatagctctccatgcaagaatggtggaaaatgctggcagacacacactcagtaccgttgcgagtgccccagcggctggaccgggctgtactgtgatgtgcccagcgtgtcctgtgaggtggccgcccaaaggcagggtgtggacgtcgcccggctgtgtcagcatggaggcctctgcgtggacgccgggaatacacaccactgcagatgtcaggccggctacaccggctcctactgtgaagacttggttgatgagtgttccccatccccatgccagaatggtgccacctgtaccgattatctggggggatattcctgtaagtgcgtggcagggtatcacggggttaattgcagtgaggagattgatgaatgtcttagtcatccctgccagaatggaggaacttgcttggatctgccaaacacatacaagtgtagttgtccacgcggaacccagggagtgcattgcgaaattaatgtggatgactgcaatcccccggtggaccccgttagccgctcgcctaagtgctttaataacggtacttgcgtcgatcaggttggtggttactcatgtacttgtccccccggtttcgtgggggagaggtgcgagggcgacgtgaacgagtgcctgtcgaatccgtgcgatgccagggggactcagaactgtgtgcagcgggtcaatgattttcattgtgaatgcagagccggacacactgggcgccgttgcgagtctgtgatcaacgggtgcaaggggaaaccttgcaagaatggcggcacttgcgctgtggccagtaacacggcccggggttttatttgtaagtgcccagctggctttgaaggagccacttgtgaaaacgacgcgcgcacctgtggctccctaaggtgcctaaacggcggaacatgcatcagcgggccccgcagtcccacatgtttatgcctgggaccgtttaccggaccggagtgtcaattcccagccagtagcccttgtctggggggcaatccctgttataaccagggaacatgcgagcccactagcgaatcccccttttaccgatgcttgtgtcctgctaagtttaacgggttgctgtgtcacatcctggactactcatttggaggtggcgcaggaagggatatacccccaccgctcatcgaggaggcttgcgaactcccggaatgccaggaggatgctggcaataaagtgtgttccctgcagtgtaacaaccacgcttgcggttgggacggcggcgactgttccctgaacttcaatgatccctggaagaattgcacccaatccctacagtgctggaagtactttagcgatggtcactgtgacagccagtgcaactcggccgggtgtctattcgatggcttcgattgtcagcgggcggaggggcagtgcaatccactctacgaccagtactgcaaggaccacttcagtgatggccattgcgatcaagggtgcaattcagctgagtgcgagtgggacggcttagactgcgctgagcacgtgccagagcgtctagcagcaggaacccttgttgttgtggtcttgatgcccccagaacagctgcggaactcaagctttcatttcctcagagagttgagcagggtcctgcatactaacgtcgtatttaagcgggacgctcacgggcagcagatgattttcccttactacgggcgtgaggaggagctccggaaacatcccatcaagagagctgctgagggatgggctgccccagatgcattattggggcaggttaaagctagtctcctaccaggtggcagtgagggcggccgtagacgtcgcgagctcgatcctatggacgttcgtggctccatcgtttatctggagattgacaatcgccaatgtgttcaggccagcagccagtgctttcagtctgccactgatgtggccgctttcctgggtgcactggcctctttaggttctcttaatatcccctataaaatagaggccgtgcaaagcgagacagttgaaccaccccctcctgcccagttgcatttcatgtacgttgccgctgctgcctttgttctattatttttcgttggctgtggcgtacttctatctcgcaaaagaagacggcagcacgggcagctctggtttcctgagggctttaaagtgtccgaggcatcaaagaaaaagagacgcgaacccctaggcgaggattccgttgggctgaagccactgaaaaacgcatctgatggtgccttgatggacgacaatcaaaatgagtggggcgatgaggacttagagaccaagaagtttcggtttgaggaaccagtagtccttccggacctagatgatcaaactgaccacaggcagtggacccagcagcacctcgatgccgccgacctgaggatgtctgctatggctcctacccctccacaaggcgaagtggacgcagactgtatggatgtgaatgtgaggggtcccgatgggttcacccccctgatgatagcttcatgcagcggggggggactcgagaccggcaactccgaagaggaagaagatgctcccgctgtaatctcagactttatctaccagggcgcctctctgcacaatcaaaccgatcgtaccggggagacggccttgcatctggccgctcgatatagtagaagcgatgctgccaagcggcttttggaagcgtcggccgacgccaacatacaggacaatatgggacgaacaccgctgcatgccgctgtctcagccgacgcacagggagtcttccagatcctcatccgtaaccgggctactgacctagatgctaggatgcatgacggaaccaccccactgatcttggccgcaagacttgcagtagagggcatgctggaagacctcatcaattcccatgcggacgtcaacgcagtcgatgatcttggcaaatcagcgctgcactgggccgccgcggttaacaacgtggacgctgcagtggtcttactgaaaaatggagctaacaaggatatgcagaacaacagggaagaaaccccactgtttttggccgcacgagaaggctcttatgagactgccaaagtgctgctggatcacttcgctaatagagatatcactgaccacatggacaggctcccacgcgatatcgcgcaggaacggatgcatcatgatattgtgagacttcttgacgagtataatcttgtccggtcaccacagctccatggagcccccttgggcggaactccaaccttgtcacccccactgtgctctcccaacggctatctcggcagtctgaagcctggggttcagggtaagaaggtccgcaagccatctagtaaaggtctggcgtgtggtagcaaggaagctaaagatctcaaggcccgcaggaaaaagagccaggacggtaaaggctgcctcctagattctagcggcatgctgtctccagtcgattctctcgagtctccacatggttatctgtcagatgtcgcatccccacccttgcttccatcaccttttcagcagagcccttcagtcccacttaatcacctcccaggtatgcctgatacgcatttagggatcggacacctgaacgttgccgccaagcctgagatggctgcactagggggggggggacgcttagcgtttgagacaggccctccaaggttgtcacacttaccagtggcttctggaacatctaccgtcctcggctcatcttcgggcggagccctgaatttcacggtcggcgggtctaccagcctgaacggccagtgtgagtggctgtctcgcttacagtcaggaatggttccgaatcagtataatccccttcgcgggtcagtggcccccggacctctatcaacacaggctccatctctgcaacacggcatggtggggcctttacattcctcactggctgcaagcgccctatcacagatgatgtcctaccagggcctgcccagcacgagactggccacacaaccacatctggtccagacccaacaggtacagccgcagaatctgcagatgcagcagcagaacctgcagccagctaacatccagcagcagcagtccctgcaaccacccccaccaccgccacagcctcatctgggagtttcgtctgctgccagcggtcatttgggtcggtcgtttctctccggggaaccctcacaagcggacgtccagcctctcggacccagctccctagctgtacatactatcctcccgcaggagtctcctgccctaccgacctccctcccaagctccctggtcccgcctgttacggctgcacaattcctcacgccacccagtcaacattcgtactcttcacccgtggataataccccttcacatcagttgcaggttccagaacaccctttcctcacgccttccccagagagcccagatcaatggagtagttcctcaccacactctaacgtctcggactggagcgagggtgtctcttcccctcctacatctatgcagtcacagatagcacgaatccccgaggcctttaagtag

SEQ ID NO: 194090 - DNA, 9371 bp, Artificial Sequence
  derived and/or modified sequence
gcgcgtgtgcgtcccagccccgccggccagcgcaggaggccgccgcccgggcgcagagggcagccggtggggaggcatgccgccgctcctggcgcccctgctctgcctggcgctgctgcccgcgctcgccgcacgaggcccgcgatgctcccagcccggtgagacctgcctgaatggcgggaagtgtgaagcggccaatggcacggaggcctgcgtctgtggcggggccttcgtgggcccgcgatgccaggaccccaacccgtgcctcagcaccccctgcaagaacgccgggacatgccacgtggtggaccgcagaggcgtggcagactatgcctgcagctgtgccctgggcttctctgggcccctctgcctgacacccctggacaatgcctgcctcaccaacccctgccgcaacgggggcacctgcgacctgctcacgctgacggagtacaagtgccgctgcccgcccggctggtcagggaaatcgtgccagcaggctgacccgtgcgcctccaacccctgcgccaacggtggccagtgcctgcccttcgaggcctcctacatctgccactgcccacccagcttccatggccccacctgccggcaggatgtcaacgagtgtggccagaagcccgggctttgccgccacggaggcacctgccacaacgaggtcggctcctaccgctgcgtctgccgcgccacccacactggccccaactgcgagcggccctacgtgccctgcagcccctcgccctgccagaacgggggcacctgccgccccacgggcgacgtcacccacgagtgtgcctgcctgccaggcttcaccggccagaactgtgaggaaaatatcgacgattgtccaggaaacaactgcaagaacgggggtgcctgtgtggacggcgtgaacacctacaactgccgctgcccgccagagtggacaggtcagtactgtaccgaggatgtggacgagtgccagctgatgccaaatgcctgccagaacggcgggacctgccacaacacccacggtggctacaactgcgtgtgtgtcaacggctggactggtgaggactgcagcgagaacattgatgactgtgccagcgccgcctgcttccacggcgccacctgccatgaccgtgtggcctccttctactgcgagtgtccccatggccgcacaggtctgctgtgccacctcaacgacgcatgcatcagcaacccctgtaacgagggctccaactgcgacaccaaccctgtcaatggcaaggccatctgcacctgcccctcggggtacacgggcccggcctgcagccaggacgtggatgagtgctcgctgggtgccaacccctgcgagcatgcgggcaagtgcatcaacacgctgggctccttcgagtgccagtgtctgcagggctacacgggcccccgatgcgagatcgacgtcaacgagtgcgtctcgaacccgtgccagaacgacgccacctgcctggaccagattggggagttccagtgcatctgcatgcccggctacgagggtgtgcactgcgaggtcaacacagacgagtgtgccagcagcccctgcctgcacaatggccgctgcctggacaagatcaatgagttccagtgcgagtgccccacgggcttcactgggcatctgtgccagtacgatgtggacgagtgtgccagcaccccctgcaagaatggtgccaagtgcctggacggacccaacacttacacctgtgtgtgcacggaagggtacacggggacgcactgcgaggtggacatcgatgagtgcgaccccgacccctgccactacggctcctgcaaggacggcgtcgccaccttcacctgcctctgccgcccaggctacacgggccaccactgcgagaccaacatcaacgagtgctccagccagccctgccgccacgggggcacctgccaggaccgcgacaacgcctacctctgcttctgcctgaaggggaccacaggacccaactgcgagatcaacctggatgactgtgccagcagcccctgcgactcgggcacctgtctggacaagatcgatggctacgagtgtgcctgtgagccgggctacacagggagcatgtgtaacatcaacatcgatgagtgtgcgggcaacccctgccacaacgggggcacctgcgaggacggcatcaatggcttcacctgccgctgccccgagggctaccacgaccccacctgcctgtctgaggtcaatgagtgcaacagcaacccctgcgtccacggggcctgccgggacagcctcaacgggtacaagtgcgactgtgaccctgggtggagtgggaccaactgtgacatcaacaacaatgagtgtgaatccaacccttgtgtcaacggcggcacctgcaaagacatgaccagtggctacgtgtgcacctgccgggagggcttcagcggtcccaactgccagaccaacatcaacgagtgtgcgtccaacccatgtctgaaccagggcacgtgtattgacgacgttgccgggtacaagtgcaactgcctgctgccctacacaggtgccacgtgtgaggtggtgctggccccgtgtgcccccagcccctgcagaaacggcggggagtgcaggcaatccgaggactatgagagcttctcctgtgtctgccccacgggctggcaagggcagacctgtgaggtcgacatcaacgagtgcgttctgagcccgtgccggcacggcgcatcctgccagaacacccacggcggctaccgctgccactgccaggccggctacagtgggcgcaactgcgagaccgacatcgacgactgccggcccaacccgtgtcacaacgggggctcctgcacagacggcatcaacacggccttctgcgactgcctgcccggcttccggggcactttctgtgaggaggacatcaacgagtgtgccagtgacccctgccgcaacggggccaactgcacggactgcgtggacagctacacgtgcacctgccccgcaggcttcagcgggatccactgtgagaacaacacgcctgactgcacagagagctcctgcttcaacggtggcacctgcgtggacggcatcaactcgttcacctgcctgtgtccacccggcttcacgggcagctactgccagcacgatgtcaatgagtgcgactcacagccctgcctgcatggcggcacctgtcaggacggctgcggctcctacaggtgcacctgcccccagggctacactggccccaactgccagaaccttgtgcactggtgtgactcctcgccctgcaagaacggcggcaaatgctggcagacccacacccagtaccgctgcgagtgccccagcggctggaccggcctttactgcgacgtgcccagcgtgtcctgtgaggtggctgcgcagcgacaaggtgttgacgttgcccgcctgtgccagcatggagggctctgtgtggacgcgggcaacacgcaccactgccgctgccaggcgggctacacaggcagctactgtgaggacctggtggacgagtgctcacccagcccctgccagaacggggccacctgcacggactacctgggcggctactcctgcaagtgcgtggccggctaccacggggtgaactgctctgaggagatcgacgagtgcctctcccacccctgccagaacgggggcacctgcctcgacctccccaacacctacaagtgctcctgcccacggggcactcagggtgtgcactgtgagatcaacgtggacgactgcaatccccccgttgaccccgtgtcccggagccccaagtgctttaacaacggcacctgcgtggaccaggtgggcggctacagctgcacctgcccgccgggcttcgtgggtgagcgctgtgagggggatgtcaacgagtgcctgtccaatccctgcgacgcccgtggcacccagaactgcgtgcagcgcgtcaatgacttccactgcgagtgccgtgctggtcacaccgggcgccgctgcgagtccgtcatcaatggctgcaaaggcaagccctgcaagaatgggggcacctgcgccgtggcctccaacaccgcccgcgggttcatctgcaagtgccctgcgggcttcgagggcgccacgtgtgagaatgacgctcgtacctgcggcagcctgcgctgcctcaacggcggcacatgcatctccggcccgcgcagccccacctgcctgtgcctgggccccttcacgggccccgaatgccagttcccggccagcagcccctgcctgggcggcaacccctgctacaaccaggggacctgtgagcccacatccgagagccccttctaccgttgcctgtgccccgccaaattcaacgggctcttgtgccacatcctggactacagcttcgggggtggggccgggcgcgacatccccccgccgctgatcgaggaggcgtgcgagctgcccgagtgccaggaggacgcgggcaacaaggtctgcagcctgcagtgcaacaaccacgcgtgcggctgggacggcggtgactgctccctcaacttcaatgacccctggaagaactgcacgcagtctctgcagtgctggaagtacttcagtgacggccactgtgacagccagtgcaactcagccggctgcctcttcgacggctttgactgccagcgtgcggaaggccagtgcaaccccctgtacgaccagtactgcaaggaccacttcagcgacgggcactgcgaccagggctgcaacagcgcggagtgcgagtgggacgggctggactgtgcggagcatgtacccgagaggctggcggccggcacgctggtggtggtggtgctgatgccgccggagcagctgcgcaacagctccttccacttcctgcgggagctcagccgcgtgctgcacaccaacgtggtcttcaagcgtgacgcacacggccagcagatgatcttcccctactacggccgcgaggaggagctgcgcaagcaccccatcaagcgtgccgccgagggctgggccgcacctgacgccctgctgggccaggtgaaggcctcgctgctccctggtggcagcgagggtgggcggcggcggagggagctggaccccatggacgtccgcggctccatcgtctacctggagattgacaaccggcagtgtgtgcaggcctcctcgcagtgcttccagagtgccaccgacgtggccgcattcctgggagcgctcgcctcgctgggcagcctcaacatcccctacaagatcgaggccgtgcagagtgagaccgtggagccgcccccgccggcgcagctgcacttcatgtacgtggcggcggccgcctttgtgcttctgttcttcgtgggctgcggggtgctgctgtcccgcaagcgccggcggcagcatggccagctctggttccctgagggcttcaaagtgtctgaggccagcaagaagaagcggcgggagcccctcggcgaggactccgtgggcctcaagcccctgaagaacgcttcagacggtgccctcatggacgacaaccagaatgagtggggggacgaggacctggagaccaagaagttccggttcgaggagcccgtggttctgcctgacctggacgaccagacagaccaccggcagtggactcagcagcacctggatgccgctgacctgcgcatgtctgccatggcccccacaccgccccagggtgaggttgacgccgactgcatggacgtcaatgtccgcgggcctgatggcttcaccccgctcatgatcgcctcctgcagcgggggcggcctggagacgggcaacagcgaggaagaggaggacgcgccggccgtcatctccgacttcatctaccagggcgccagcctgcacaaccagacagaccgcacgggcgagaccgccttgcacctggccgcccgctactcacgctctgatgccgccaagcgcctgctggaggccagcgcagatgccaacatccaggacaacatgggccgcaccccgctgcatgcggctgtgtctgccgacgcacaaggtgtcttccagatcctgatccggaaccgagccacagacctggatgcccgcatgcatgatggcacgacgccactgatcctggctgcccgcctggccgtggagggcatgctggaggacctcatcaactcacacgccgacgtcaacgccgtagatgacctgggcaagtccgccctgcactgggccgccgccgtgaacaatgtggatgccgcagttgtgctcctgaagaacggggctaacaaagatatgcagaacaacagggaggagacacccctgtttctggccgcccgggagggcagctacgagaccgccaaggtgctgctggaccactttgccaaccgggacatcacggatcatatggaccgcctgccgcgcgacatcgcacaggagcgcatgcatcacgacatcgtgaggctgctggacgagtacaacctggtgcgcagcccgcagctgcacggagccccgctggggggcacgcccaccctgtcgcccccgctctgctcgcccaacggctacctgggcagcctcaagcccggcgtgcagggcaagaaggtccgcaagcccagcagcaaaggcctggcctgtggaagcaaggaggccaaggacctcaaggcacggaggaagaagtcccaggacggcaagggctgcctgctggacagctccggcatgctctcgcccgtggactccctggagtcaccccatggctacctgtcagacgtggcctcgccgccactgctgccctccccgttccagcagtctccgtccgtgcccctcaaccacctgcctgggatgcccgacacccacctgggcatcgggcacctgaacgtggcggccaagcccgagatggcggcgctgggtgggggcggccggctggcctttgagactggcccacctcgtctctcccacctgcctgtggcctctggcaccagcaccgtcctgggctccagcagcggaggggccctgaatttcactgtgggcgggtccaccagtttgaatggtcaatgcgagtggctgtcccggctgcagagcggcatggtgccgaaccaatacaaccctctgcgggggagtgtggcaccaggccccctgagcacacaggccccctccctgcagcatggcatggtaggcccgctgcacagtagccttgctgccagcgccctgtcccagatgatgagctaccagggcctgcccagcacccggctggccacccagcctcacctggtgcagacccagcaggtgcagccacaaaacttacagatgcagcagcagaacctgcagccagcaaacatccagcagcagcaaagcctgcagccgccaccaccaccaccacagccgcaccttggcgtgagctcagcagccagcggccacctgggccggagcttcctgagtggagagccgagccaggcagacgtgcagccactgggccccagcagcctggcggtgcacactattctgccccaggagagccccgccctgcccacgtcgctgccatcctcgctggtcccacccgtgaccgcagcccagttcctgacgcccccctcgcagcacagctactcctcgcctgtggacaacacccccagccaccagctacaggtgcctgagcaccccttcctcaccccgtcccctgagtcccctgaccagtggtccagctcgtccccgcattccaacgtctccgactggtccgagggcgtctccagccctcccaccagcatgcagtcccagatcgcccgcattccggaggccttcaagtaaacggcgcgccccacgagaccccggcttcctttcccaagccttcgggcgtctgtgtgcgctctgtggatgccagggccgaccagaggagcctttttaaaacacatgtttttatacaaaataagaacgaggattttaattttttttagtatttatttatgtacttttattttacacagaaacactgcctttttatttatatgtactgttttatctggccccaggtagaaacttttatctattctgagaaaacaagcaagttctgagagccagggttttcctacgtaggatgaaaagattcttctgtgtttataaaatataaacaaagattcatgatttataaatgccatttatttattgattccttttttcaaaatccaaaaagaaatgatgttggagaagggaagttgaacgagcatagtccaaaaagctcctggggcgtccaggccgcgccctttccccgacgcccacccaaccccaagccagcccggccgctccaccagcatcacctgcctgttaggagaagctgcatccagaggcaaacggaggcaaagctggctcaccttccgcacgcggattaatttgcatctgaaataggaaacaagtgaaagcatatgggttagatgttgccatgtgttttagatggtttcttgcaagcatgcttgtgaaaatgtgttctcggagtgtgtatgccaagagtgcacccatggtaccaatcatgaatctttgtttcaggttcagtattatgtagttgttcgttggttatacaagttcttggtccctccagaaccaccccggccccctgcccgttcttgaaatgtaggcatcatgcatgtcaaacatgagatgtgtggactgtggcacttgcctgggtcacacacggaggcatcctacccttttctggggaaagacactgcctgggctgaccccggtggcggccccagcacctcagcctgcacagtgtcccccaggttccgaagaagatgctccagcaacacagcctgggccccagctcgcgggacccgaccccccgtgggctcccgtgttttgtaggagacttgccagagccgggcacattgagctgtgcaacgccgtgggctgcgtcctttggtcctgtccccgcagccctggcagggggcatgcggtcgggcaggggctggagggaggcgggggctgcccttgggccacccctcctagtttgggaggagcagatttttgcaataccaagtatagcctatggcagaaaaaatgtctgtaaatatgtttttaaaggtggattttgtttaaaaaatcttaatgaatgagtctgttgtgtgtcatgccagtgagggacgtcagacttggctcagctcggggagccttagccgcccatgcactggggacgctccgctgccgtgccgcctgcactcctcagggcagcctcccccggctctacgggggccgcgtggtgccatccccagggggcatgaccagatgcgtcccaagatgttgatttttactgtgttttataaaatagagtgtagtttacagaaaaagactttaaaagtgatctacatgaggaactgtagatgatgtatttttttcatcttttttgttaactgatttgcaataaaaatgatactgatggtga

SEQ ID NO: 194091 - DNA, 7668 bp, Artificial Sequence
  derived and/or modified sequence
atgccccctctgctggctcccctactgtgcctggctctcctccctgccctggccgctagaggccctcgctgttcacagcccggagagacctgcctgaacggcggtaagtgtgaggctgcaaatgggaccgaggcttgcgtgtgcggtggggcattcgtcggccctcgctgtcaagaccctaatccctgcctctcgacaccatgcaagaacgccggtacgtgtcacgtggtagatcgccgaggagtggccgattacgcctgcagctgtgcactaggcttctccggccctctctgccttacacctctagacaacgcctgcctgaccaacccctgtcggaacgggggaacttgtgaccttctgacattgactgaatacaagtgtagatgtcccccaggatggtctggcaaatcatgtcagcaggccgatccatgcgcctcgaacccctgcgccaacggaggtcagtgcttaccatttgaggcttcatacatatgccactgccccccaagcttccacggtcccacatgtagacaagacgtgaatgaatgcggacagaaaccagggctgtgtagacatggtgggacatgtcacaacgaggtaggcagctacaggtgcgtgtgtcgcgctacccacacaggcccaaactgcgagcggccttatgttccctgttctccttctccatgccagaacggaggtacctgccggccaacaggcgatgttacacacgagtgcgcctgtctccctgggttcaccgggcagaattgcgaagaaaatatcgatgattgtccgggaaataactgtaagaatggtggagcatgtgttgacggcgttaacacctataactgcaggtgtcccccagagtggaccgggcagtactgcactgaagacgtggatgaatgtcagttgatgcctaatgcatgccagaatggcggtacgtgtcacaatacacatggaggctataattgcgtatgcgtaaatggctggactggagaggactgcagcgagaacatcgatgattgcgcctctgctgcatgcttccacggcgctacgtgtcacgaccgcgttgcttctttctattgtgagtgccctcacggcaggaccgggttgctgtgtcatctgaacgatgcatgtatttctaacccgtgtaatgagggctccaactgtgacaccaatcctgtgaatggaaaggctatttgcacctgcccatcaggatatactggccctgcctgttcacaggacgtggacgagtgctcattgggagccaacccatgtgaacacgccggaaagtgcatcaataccttagggtcttttgagtgtcagtgcctgcaaggatatacaggcccacggtgtgaaatcgatgttaacgaatgcgtgagcaacccatgccaaaacgatgcgacttgcctggatcagattggagaattccagtgcatttgcatgcccggatacgagggagtgcattgtgaagtcaatacagacgagtgcgcatccagcccgtgcctgcataatggcagatgtctggataagataaacgagtttcagtgtgaatgccctactggcttcacaggacacctctgtcaatatgacgttgacgagtgtgcaagtaccccttgcaagaacggcgcaaaatgtttagatggaccaaatacctatacctgtgtttgtactgagggatatacaggcactcactgcgaagtggacatcgatgagtgcgatccagacccttgccactacggatcttgtaaggatggagtagctacttttacttgcctttgccggccaggctatacaggacatcattgcgagacaaatatcaacgaatgcagctcgcaaccctgccgccatggcggtacatgccaggaccgggataacgcctacctgtgcttctgtctgaaagggacgactggacccaattgcgaaattaacctagacgactgtgctagttcaccctgtgactctgggacctgcctcgataaaattgacgggtacgagtgtgcatgcgaacctggctatactggctccatgtgtaacataaatattgatgaatgtgcaggaaatccatgtcacaacggaggaacgtgcgaggacgggatcaacggcttcacatgcaggtgtcctgagggctatcatgatccgacttgcctgtccgaggttaacgagtgtaacagcaatccttgtgtgcacggggcttgtagagactcactgaacgggtacaaatgtgactgcgacccaggatggtccgggacaaattgtgacatcaacaataatgagtgcgaaagcaacccctgtgtcaacggcggaacctgcaaggatatgacctctggctacgtatgcacctgcagagagggattttcaggacccaactgtcagaccaacatcaacgagtgtgcctccaatccttgtctcaaccagggtacgtgtattgatgatgtggctgggtacaagtgcaactgccttctgccatatacgggggcaacctgtgaggtcgtgctggccccttgtgccccaagcccctgcaggaatggaggggagtgcagacagagtgaagattacgagagcttcagctgcgtctgtccaactggttggcagggccagacctgtgaagtcgacattaacgagtgcgtgctctctccgtgtaggcacggcgcatcttgtcaaaacacacatggcggatatcgttgccattgccaggccggatattctggtcgcaactgtgaaactgatatcgacgattgccggccaaatccctgccacaacggcggatcttgtacagatgggatcaacaccgcattctgcgactgcctgcccggattccgaggcacattctgtgaggaagacatcaatgaatgtgcctctgacccctgccgtaatggtgctaactgcacagactgcgtggattcctatacgtgcacatgtcccgcaggctttagcggtatacactgtgagaataatacaccagactgtaccgagagcagttgcttcaatggtggtacctgtgtcgatgggatcaattcattcacctgcctgtgcccgcctggattcacaggatcgtactgtcaacacgatgtgaacgagtgcgatagtcagccctgtctacatggcggtacttgccaggacggttgcgggagttaccggtgtacgtgtcctcagggttacaccggccctaactgtcagaatctggtgcattggtgcgattccagcccatgtaagaacggagggaagtgttggcaaacacacacccagtaccgctgtgagtgcccttcgggatggactggactttattgcgacgtcccatcggtcagttgcgaggttgctgcccagcggcagggagtcgatgtggctaggctttgtcagcacgggggactgtgtgtcgacgctgggaacactcaccactgcagatgtcaagcaggttacacagggtcttactgcgaagacttagtcgacgaatgctccccctcaccatgccagaatggggctacatgcactgactaccttgggggttactcttgtaaatgcgtggccggataccacggggttaactgctctgaagaaatagacgagtgtctgtcgcacccctgtcagaacggcggaacctgcttggacttgcctaatacatataaatgttcctgcccgcgagggacccaaggagtgcactgcgagatcaacgttgacgactgtaatcctccagtggatcccgtctcccgatctcctaagtgctttaacaacggtacttgcgttgaccaggttggagggtatagttgcacatgtcccccaggattcgttggtgagagatgcgagggcgatgtgaatgagtgtctgagcaacccatgcgatgcaagaggtacccagaattgtgtccagagagtgaacgacttccattgtgagtgccgagccggtcataccggtcgcaggtgcgaatctgtgatcaacggctgtaagggaaaaccatgtaaaaacggcggaacgtgtgctgtagcttccaacactgctcggggattcatctgtaagtgtccagcaggcttcgaaggagccacatgcgagaacgatgccagaacttgtggatcgttgagatgtttaaatggagggacatgtatatctggaccgagatctccgacctgtctatgcctagggccatttaccggccctgagtgtcaatttcccgcttcctcaccctgccttgggggaaatccctgttacaaccagggtacgtgtgagcctacctccgagtcaccattctaccgctgcttatgccctgcaaagtttaacggcctgttgtgtcacatcttggattactcttttggaggaggcgcaggacgggacatacctcccccactgatcgaagaggcctgtgagttacccgaatgtcaggaggacgctggtaacaaagtctgttcactgcagtgcaacaatcacgcctgcggctgggacggaggagattgctccctcaactttaacgacccatggaaaaattgcacccagtccctgcagtgttggaagtatttcagcgacggacactgcgattcgcagtgtaattcagcagggtgtctgttcgacggcttcgattgtcagagagctgagggtcagtgcaacccattatatgatcaatattgcaaggaccatttttctgacggtcattgcgaccaaggatgtaatagcgccgaatgcgagtgggatggattggattgcgcggaacatgtccctgaacgactggccgctggtactcttgtggttgtggtgctaatgccacctgagcagctgcgtaactcctcatttcattttctgcgagagcttagtagggttctacacacaaatgtcgtctttaagagggatgcccacggccagcagatgatattcccatattatggtcgagaagaagaactgaggaagcatcctatcaagcgggctgcggaggggtgggccgctcccgatgcccttttgggacaggttaaggccagcctgctgcctggcggatctgagggcggacgaagacggagggaactcgatcccatggacgtgagaggcagcatagtttatctggaaatcgacaataggcagtgtgtacaggcttcttctcagtgtttccagtccgcgactgacgttgccgcttttttaggcgctctagcaagtttgggctcattaaatattccctacaagatagaggccgttcagtcggagacagtggagccccctcctcctgctcaattacattttatgtacgtcgcagcagctgcttttgttctcctgttcttcgttggttgtggggttctgctgtcccgcaaaaggagacgacagcacggtcaactctggttcccagagggctttaaagtgtccgaggcctctaaaaaaaaacgtcgcgaaccgttgggagaggacagcgttggcctgaagcccctcaagaacgcctctgatggagccctgatggacgacaatcaaaatgagtggggggatgaagacctggagaccaagaaattcaggttcgaggaaccggtggtcctgcctgatctggatgaccagacagaccatcggcagtggacccagcagcacttggacgcagcggaccttaggatgagcgccatggcccctactccccctcagggtgaggtggacgcagactgcatggacgtaaacgtgaggggccctgacggcttcaccccactcatgatagcgagttgtagcggaggcggactggagaccgggaatagtgaagaggaggaagacgcacccgctgttattagcgatttcatatatcaaggcgcatctctgcacaatcaaacagatagaacaggagagaccgccctgcacctggccgcaagatactctcgctccgacgcggctaaacgcttgcttgaggccagtgccgatgcaaacattcaggataatatgggacgaacacctctgcacgcagctgttagtgccgatgcccagggcgtcttccagattttaattcgcaaccgagccactgatctggacgctcgcatgcacgatgggaccacccctctgattctggccgctcgtctcgcagtcgaaggtatgctagaggacctcattaactcccacgctgacgtaaacgcggtggatgatttgggcaagtctgccctgcactgggctgccgcagtcaataatgttgatgctgcggtagtgctgctcaaaaacggcgctaacaaggatatgcaaaacaaccgggaagaaactccattgtttttagcagcaagggagggctcctatgaaactgcaaaagtcctattagatcactttgcaaatagggatatcaccgatcacatggataggcttccgagggatatcgcccaggagaggatgcaccacgacatcgtgcgcctgttagacgagtacaacttggtgcgcagccctcagttgcacggcgctccactgggcggaactcctaccctctcgccacctctgtgcagccctaatggctatctggggtctctcaagccaggcgtgcagggcaagaaggtgcgaaagccttcttccaagggactggcttgcggaagtaaggaagctaaggacctaaaggcccgacgcaagaagagccaggatggcaaaggatgtttgctggattcctcgggaatgctgagtcctgtggactcacttgagtctccacatggatacctgtcggatgtggcaagccccccactgctcccttcaccatttcagcagtctccaagtgttcctctgaatcatttgcccggtatgcccgacacacatttgggcatcggacatctgaatgtggcagccaaacccgaaatggccgcactcggcggtggaggacggctcgcgttcgaaaccgggcctcctaggctctcacatctgccagtggcaagtggaaccagcacagtactgggatcaagtagcggcggagccttgaattttacagtgggaggtagtaccagccttaacgggcagtgcgaatggctgtctcggttgcagtcaggtatggtccctaaccagtacaaccctctgcgaggttctgtggcaccaggacctctgagtacccaggcgccatccttgcagcatggcatggttggtcctctccattcttccctggcggcatctgccctgagccaaatgatgtcttatcaggggctgccaagcacaaggctagcaacacagccacacctagtgcaaacacaacaggtgcagcctcagaacttgcagatgcagcaacaaaatctgcagccagccaacatacagcaacagcaatctctgcagcctcccccacccccaccacagccccacctgggtgtctcctcagccgcatccggacacctgggacggtcatttctttccggtgaaccatcccaggcggatgtccagccgctcggaccctcctcactggctgtccacactatcttaccacaggagtcccccgcactcccgacttcattgccgtctagcttggtgccgcctgtaactgccgctcagttcctcactccccctagccagcattcctattcctcccctgtggacaacacacccagtcaccagctgcaggtccctgagcacccgttcctgacaccatcccccgaaagccccgaccagtggagctcttcgtcaccgcacagtaatgttagcgactggagcgagggagtcagtagtccgcctacgtctatgcaatcacagattgccagaatccccgaagcttttaagtac

SEQ ID NO: 194092 - protein, 898 aa, Artificial Sequence
  derived and/or modified sequence
MRPMRIFVNDDRHVMAKHSSVYPTQEELEAVQNMVSHTERALKAVSDWIDEQEKGSSEQAESDNMDVPPEDDSKEGAGEQKTEHMTRTLRGVMRVGLVAKGLLLKGDLDLELVLLCKEKPTTALLDKVADNLAIQLAAVTEDKYEILQSVDDAAIVIKNTKEPPLSLTIHLTSPVVREEMEKVLAGETLSVNDPPDVLDRQKCLAALASLRHAKWFQARANGLKSCVIVIRVLRDLCTRVPTWGPLRGWPLELLCEKSIGTANRPMGAGEALRRVLECLASGIVMPDGSGIYDPCEKEATDAIGHLDRQQREDITQSAQHALRLAAFGQLHKVLGMDPLPSKMPKKPKNENPVDYTVQIPPSTTYAITPMKRPMEEDGEEKSPSKKKKKIQKKEEKAEPPQAMNALMRLNQLKPGLQYKLVSQTGPVHAPIFTMSVEVDGNSFEASGPSKKTAKLHVAVKVLQDMGLPTGAEGRDSSKGEDSAEETEAKPAVVAPAPVVEAVSTPSAAFPSDATAENVKQQGPILTKHGKNPVMELNEKRRGLKYELISETGGSHDKRFVMEVEVDGQKFQGAGSNKKVAKAYAALAALEKLFPDTPLALDANKKKRAPVPVRGGPKFAAKPHNPGFGMGGPMHNEVPPPPNLRGRGRGGSIRGRGRGRGFGGANHGGYMNAGAGYGSYGYGGNSATAGYSQFYSNGGHSGNASGGGGGGGGGSSGYGSYYQGDNYNSPVPPKHAGKKQPHGGQQKPSYGSGYQSHQGQQQSYNQSPYSNYGPPQGKQKGYNHGQGSYSYSNSYNSPGGGGGSDYNYESKFNYSGSGGRSGGNSYGSGGASYNPGSHGGYGGGSGGGSSYQGKQGGYSQSNYNSPGSGQNYSGPPSSYQSSQGGYGRNADHSMNYQYR

SEQ ID NO: 194093 - DNA, 2697 bp, Artificial Sequence
  derived and/or modified sequence
atgagacccatgagaatcttcgtgaacgacgacagacacgtgatggccaagcacagcagcgtgtaccccacccaggaggagctggaggccgtgcagaacatggtgagccacaccgagagagccctgaaggccgtgagcgactggatcgacgagcaggagaagggcagcagcgagcaggccgagagcgacaacatggacgtgccccccgaggacgacagcaaggagggcgccggcgagcagaagaccgagcacatgaccagaaccctgagaggcgtgatgagagtgggcctggtggccaagggcctgctgctgaagggcgacctggacctggagctggtgctgctgtgcaaggagaagcccaccaccgccctgctggacaaggtggccgacaacctggccatccagctggccgccgtgaccgaggacaagtacgagatcctgcagagcgtggacgacgccgccatcgtgatcaagaacaccaaggagccccccctgagcctgaccatccacctgaccagccccgtggtgagagaggagatggagaaggtgctggccggcgagaccctgagcgtgaacgacccccccgacgtgctggacagacagaagtgcctggccgccctggccagcctgagacacgccaagtggttccaggccagagccaacggcctgaagagctgcgtgatcgtgatcagagtgctgagagacctgtgcaccagagtgcccacctggggccccctgagaggctggcccctggagctgctgtgcgagaagagcatcggcaccgccaacagacccatgggcgccggcgaggccctgagaagagtgctggagtgcctggccagcggcatcgtgatgcccgacggcagcggcatctacgacccctgcgagaaggaggccaccgacgccatcggccacctggacagacagcagagagaggacatcacccagagcgcccagcacgccctgagactggccgccttcggccagctgcacaaggtgctgggcatggaccccctgcccagcaagatgcccaagaagcccaagaacgagaaccccgtggactacaccgtgcagatcccccccagcaccacctacgccatcacccccatgaagagacccatggaggaggacggcgaggagaagagccccagcaagaagaagaagaagatccagaagaaggaggagaaggccgagcccccccaggccatgaacgccctgatgagactgaaccagctgaagcccggcctgcagtacaagctggtgagccagaccggccccgtgcacgcccccatcttcaccatgagcgtggaggtggacggcaacagcttcgaggccagcggccccagcaagaagaccgccaagctgcacgtggccgtgaaggtgctgcaggacatgggcctgcccaccggcgccgagggcagagacagcagcaagggcgaggacagcgccgaggagaccgaggccaagcccgccgtggtggcccccgcccccgtggtggaggccgtgagcacccccagcgccgccttccccagcgacgccaccgccgagaacgtgaagcagcagggccccatcctgaccaagcacggcaagaaccccgtgatggagctgaacgagaagagaagaggcctgaagtacgagctgatcagcgagaccggcggcagccacgacaagagattcgtgatggaggtggaggtggacggccagaagttccagggcgccggcagcaacaagaaggtggccaaggcctacgccgccctggccgccctggagaagctgttccccgacacccccctggccctggacgccaacaagaagaagagagcccccgtgcccgtgagaggcggccccaagttcgccgccaagccccacaaccccggcttcggcatgggcggccccatgcacaacgaggtgccccccccccccaacctgagaggcagaggcagaggcggcagcatcagaggcagaggcagaggcagaggcttcggcggcgccaaccacggcggctacatgaacgccggcgccggctacggcagctacggctacggcggcaacagcgccaccgccggctacagccagttctacagcaacggcggccacagcggcaacgccagcggcggcggcggcggcggcggcggcggcagcagcggctacggcagctactaccagggcgacaactacaacagccccgtgccccccaagcacgccggcaagaagcagccccacggcggccagcagaagcccagctacggcagcggctaccagagccaccagggccagcagcagagctacaaccagagcccctacagcaactacggccccccccagggcaagcagaagggctacaaccacggccagggcagctacagctacagcaacagctacaacagccccggcggcggcggcggcagcgactacaactacgagagcaagttcaactacagcggcagcggcggcagaagcggcggcaacagctacggcagcggcggcgccagctacaaccccggcagccacggcggctacggcggcggcagcggcggcggcagcagctaccagggcaagcagggcggctacagccagagcaactacaacagccccggcagcggccagaactacagcggcccccccagcagctaccagagcagccagggcggctacggcagaaacgccgaccacagcatgaactaccagtacagatag

SEQ ID NO: 194094 - DNA, 2697 bp, Artificial Sequence
  derived and/or modified sequence
atgaggccaatgcggatcttcgtcaatgacgatcgccacgttatggccaaacactcctcagtctatcccacccaggaggagttggaagcagtgcaaaatatggtctcccataccgagcgagcactcaaggcggtcagcgactggattgatgagcaggagaagggatcttcagagcaagcagagtccgacaatatggatgtcccccccgaggacgactcgaaagagggagctggagagcagaagaccgagcacatgacgaggacattgaggggagtgatgcgcgtgggactagtggctaaaggactgctgcttaagggtgatttggacctcgaattagttctcctgtgcaaagagaagcccaccacggccttattggataaagtggccgataatctggccattcagctcgccgccgtgacagaggataaatatgaaatacttcaatccgtggatgacgcagctatcgtgatcaagaacaccaaggagcctcctctgagcttgactattcacctcacatccccggttgtcagagaagaaatggagaaagtcctcgccggggaaaccctgagcgtcaatgaccctcccgatgtcctggaccgccagaaatgtctagccgccctggcttcactccgacacgctaagtggttccaggcacgggctaacggcctcaagtcatgcgttattgtaattagggtgttaagggacctttgtacacgggtgccgacttggggaccccttaggggctggcctctggaactcttgtgcgagaaatctatcggaacagccaacaggcccatgggagcaggagaggcactccggagagtgctggaatgcctagcatcagggatcgtaatgcctgacggttcaggcatctatgacccgtgtgagaaagaggcgaccgacgccattgggcacctcgataggcagcagcgcgaggacataacacagtccgcccagcacgccttgcgtttggctgcgtttggccagctacacaaggtcctgggaatggacccacttccctcaaagatgccaaaaaagcctaagaatgaaaatccagtggattatacagtgcagatccccccttctaccacatatgcgataaccccaatgaaacgcccaatggaagaagatggagaggaaaaatcgccctccaagaaaaaaaaaaaaattcaaaagaaggaggaaaaggccgaacctcctcaagccatgaatgccctgatgagactgaaccagctaaagcctggcctgcagtataaacttgtgtctcagactggaccagtccacgccccgatttttactatgagcgtcgaagtcgacggaaattcgttcgaagcttcaggcccctccaagaagaccgccaaacttcatgtggccgtgaaggttctacaggacatgggcctgcccaccggcgctgaggggagggacagctccaaaggcgaggatagcgccgaggagactgaagccaagcctgccgtggttgctccagcccccgtcgttgaagccgtctccacacccagcgcggctttcccttcagatgctacagctgagaacgtgaaacaacagggcccaatcctgaccaagcacggtaaaaatcctgtgatggagctgaacgaaaagagacgtggactaaaatacgagctgatctccgagaccggtggctctcacgataagaggttcgtcatggaggttgaggtagacggccagaaatttcagggggccgggtcaaacaagaaagtagcgaaggcttacgcagccctcgctgccctagaaaaattattccccgacacccccttggctctggacgcgaacaagaaaaaacgagcaccagtacccgtgagggggggacctaagtttgcggccaagccacataaccccgggttcggtatgggagggccgatgcataacgaagtgcctccccctccgaacctcagaggccgaggtcggggcggctccataagaggtcgtggacggggtcgagggttcgggggcgctaatcacggaggctacatgaacgctggcgcaggatatgggagttatggctacggaggaaattctgcaactgccggttattcccagttctactctaatggcggacacagcgggaatgcctccggggggggcggtggcggcggtggcggttcatccggctatggctcctactaccaaggcgataactacaacagcccggtgccaccaaaacacgcagggaagaaacaaccacacgggggccagcaaaaaccatcatatggaagtggctaccagagccaccagggacagcagcagagttataaccagtctccatactctaactatggacccccgcagggcaaacaaaagggctataatcatggccagggatcatacagttattctaatagttataatagtcccggaggcggcggggggagcgactataattatgagtctaagttcaattattccggatctggggggcgctcaggtgggaacagctacggatcgggcggtgcatcctacaacccaggttcccatgggggttacggaggaggctccgggggaggctccagttatcaaggaaagcaaggcggatatagtcagagcaactataactcacctgggtctggtcaaaattactccggcccaccctcatcttatcagagcagtcaaggtggctacggtcgtaatgccgaccatagcatgaactaccagtatagatag

SEQ ID NO: 194095 - DNA, 2697 bp, Artificial Sequence
  derived and/or modified sequence
atgaggcccatgaggatctttgtgaatgatgacagacatgtgatggccaagcacagctctgtgtaccccacccaggaggagctggaggccgtgcagaacatggtgagccacacagagcgggccctgaaggctgtgtctgactggattgatgagcaggagaagggcagcagcgagcaggccgagagtgacaacatggatgtgcccccagaagatgacagcaaggagggcgctggggagcagaagacagagcacatgaccaggaccctgcggggcgtgatgagggtgggcctggtggccaagggcctgctgctgaagggggacctggacctggagctggtgctgctgtgcaaggagaagcccaccacagccctgctggacaaggtggccgacaacctggccatccagctggccgctgtgacagaggacaagtatgagatcctgcagagcgtggatgatgctgccatcgtcatcaagaacaccaaggagccccccctgagcctgaccatccacctgaccagccctgtggtgcgggaggagatggagaaggtgctggccggggagaccctgtctgtgaatgaccccccagatgtgctggaccggcagaagtgcctggccgccctggccagcctgcggcatgccaagtggttccaggcccgggccaacggcctgaagagctgtgtgattgtcatccgggtgctgcgggacctgtgcaccagggtgcccacctggggccccctgcggggctggcccctggagctgctgtgtgagaagagcattggaacagccaaccggcccatgggcgctggggaggccctgcggcgggtgctggagtgcctggccagcggcatcgtgatgccagatggcagcggcatctatgacccctgtgagaaggaggccacagatgccatcggccacctggaccggcagcagcgggaggacatcacccagagcgcccagcacgccctgcggctggccgccttcggccagctgcacaaggtgctgggcatggaccccctgcccagcaagatgcccaagaagcccaagaatgaaaatcctgtggactacacagtgcagatcccccccagcaccacctacgccatcacccccatgaagaggcccatggaggaggatggagaggagaagagccccagcaagaagaagaagaagatccagaagaaggaggagaaggccgagcccccccaggccatgaatgccctgatgaggctgaaccagctgaagccaggcctgcagtacaagctggtgtcccagacaggccctgtgcacgcccccatcttcaccatgtctgtggaggtggatggcaacagctttgaggccagcggccccagcaagaagacagccaagctgcacgtggccgtgaaggtgctgcaggacatgggcctgcccactggagctgagggccgggacagcagcaagggggaggacagcgctgaggagacagaggccaagccagctgtggtggccccagcccctgtggtggaggccgtgtccacccccagcgctgccttccccagtgatgccacagcagaaaatgtgaagcagcagggccccatcctgaccaagcacggcaagaaccctgtgatggagctgaatgagaagaggcggggcctgaagtatgagctgatcagcgagactggaggcagccatgacaagagatttgtgatggaggtggaggtggatggccagaagttccagggcgccggcagcaacaagaaggtggccaaggcctatgctgccctggccgccctggagaagctgttcccagacacccccctggccctggatgccaacaagaagaagagggcccctgtgcctgtgcggggcggccccaagtttgctgccaagccccacaaccctggcttcggcatgggcggccccatgcacaatgaggtgcccccaccacccaacctgcggggccggggccggggcggcagcatccggggccggggccggggccggggctttggaggagccaaccacggcggctacatgaatgctggggccggctacggcagctatggctatggaggcaacagcgccacagctggctacagccagttctacagcaatggaggccacagcggaaatgccagcggcggcggcggcggcggcggcggcggcagcagcggctacggcagctactaccagggcgacaactacaacagccctgtgccccccaagcatgctgggaagaagcagccccatggaggccagcagaagcccagctatggcagcggctaccagagccaccagggccagcagcagagctacaaccagagcccctacagcaactacggccccccccagggcaagcagaagggctacaaccacggccagggcagctacagctacagcaacagctacaacagccctgggggcggcggcggcagtgactacaactatgagagcaagttcaactacagcggcagcggcggccgcagcggcggcaacagctatggcagcggcggggccagctacaaccctggcagccatggaggctacggcggcggcagcggcggcggcagcagctaccagggcaagcagggcggctacagccagagcaactacaacagccctggcagcggccagaactacagcggcccccccagcagctaccagagcagccagggcggctatggaagaaatgctgaccacagcatgaactaccagtacagatag

SEQ ID NO: 194096 - DNA, 2697 bp, Artificial Sequence
  derived and/or modified sequence
atgcggcccatgcggatcttcgtgaacgacgaccggcacgtgatggccaagcacagctcagtgtatccaacacaggaagagttggaagccgtccaaaatatggtcagtcacacagagcgggccctgaaagcagtgtcagattggattgacgagcaggaaaaaggaagctccgaacaggccgagagcgacaacatggacgtgccgcctgaggatgacagtaaggagggagccggagagcagaaaactgaacacatgacgaggacacttagaggcgtgatgcgcgtgggactcgtcgcaaagggcctcctcttgaagggcgatctcgacctggagctggttctcttgtgtaaggagaagccaaccacggcattgctggacaaagtggctgataatctagctattcaactcgccgccgtgacagaggacaagtacgaaattctgcagtcggtggatgacgctgccatcgtcatcaagaacaccaaggaacccccgctgagcctgaccattcacctgacatcccccgttgttagggaggagatggagaaggtactggctggggagacactgagcgttaacgacccccccgacgtgctagaccgccagaagtgcctggccgccctcgcatccctccgacatgccaaatggtttcaggctcgtgccaatgggctgaagtcatgcgtgattgtaatcagagtgctgcgggatctctgtacacgggtccccacttggggtcctctccggggctggcccctggagctcctgtgcgaaaagtcaatcggaacggccaaccgcccgatgggagccggagaggccctgagaagagtgctcgagtgtcttgctagcggcatcgtgatgccagacgggagtggcatctatgatccctgtgagaaggaagccaccgacgcaattggccacctggacaggcagcagcgcgaggatattactcagagcgcgcagcacgccctcaggctggccgcctttggacaactccataaagtattagggatggatcccctgcctagcaagatgcccaagaaacctaagaatgaaaatccagtggattacactgtgcagatccccccatcaacgacctacgctattacccccatgaaaagacccatggaagaggacggtgaggagaagagtccctccaagaagaaaaaaaaaatccagaaaaaagaagaaaaggcggaaccgcctcaggccatgaatgccctgatgagacttaatcagttaaaaccaggtctgcaatataagctggtgagtcagacaggcccagtgcacgcaccgatcttcaccatgtccgtcgaggtggacggaaatagctttgaggcaagtggtccgtcaaagaagacggccaaacttcatgtggcagtgaaggtgcttcaggatatgggattacctaccggcgcagaggggcgggatagttccaaaggggaggactccgctgaggaaaccgaggccaaacctgccgtggtagcacctgcccccgttgtggaagcggtgtccacaccgtctgcggccttcccttccgatgccacggcagagaacgtgaagcagcaaggcccgatactcacgaaacacggcaagaatcccgttatggagcttaacgagaagcgacggggccttaaatacgagctgattagcgaaacgggaggctctcacgacaaaaggtttgtaatggaggtagaagtagacggccaaaagttccaaggtgccggctcaaacaagaaggtggctaaggcctacgccgccctggcggctctagaaaaactcttcccggacactccactggcccttgacgcaaacaaaaagaagcgggcgcccgtccccgtgagaggcggtccaaaattcgcagcaaagcctcataacccaggcttcggcatgggaggccccatgcacaatgaggttccccctccccccaatctgagaggacgcggacgaggaggctctatccggggccggggaaggggcagaggcttcggcggagcaaaccacggaggctacatgaatgccggtgcgggttacggctcttacgggtacggtggcaattccgctactgcgggatactctcagttctactccaacggagggcattcaggaaatgccagcggaggagggggtggaggaggggggggcagcagcggttatggctcctactaccagggcgacaattacaatagccctgtgccacccaagcacgccgggaagaaacagccacacgggggccaacagaagccttcctacgggagtgggtatcagtcgcaccaaggtcagcagcagtcctacaatcagtccccatattccaactatggccctcctcagggtaagcaaaagggatataaccatggacaaggatcatacagttattccaattcttacaactcaccaggcggagggggagggtctgactacaactacgaaagtaagttcaattactccggaagcggcggtcgttccggggggaattcgtacggttctggcggagcatcctataaccctgggtcacacggaggctacggcgggggttcaggcggggggtcaagttaccagggaaaacagggcggatactcccagtctaattacaactcccccggcagcgggcagaattactcaggtccgccttcttcttaccagtcctctcagggagggtacggccggaatgctgaccattctatgaattatcaatacagatag

SEQ ID NO: 194097 - DNA, 2697 bp, Artificial Sequence
  derived and/or modified sequence
atgcgccctatgaggatattcgtgaacgacgacaggcacgtcatggcaaagcactcaagcgtctatcccacccaggaggaactggaggctgtgcagaatatggtaagccataccgagagggccctcaaggcagtgtctgactggatcgacgagcaagagaaggggtcatctgaacaggctgagagcgacaatatggacgtgcccccagaagatgacagcaaggagggagctggcgaacagaagaccgagcacatgacccgaactctgagaggtgtgatgcgggtagggctggtggccaaagggttacttttaaaaggcgatcttgacctcgaattggttctgctttgtaaagagaagccgacaactgccctgctggacaaagtggcagacaatctcgccatccagttggcagctgtgaccgaggataagtacgagatacttcaatcagtggacgacgctgcgatcgtcattaaaaacacgaaggaaccgccactgtcacttaccatacatctgacctctcctgttgtgagagaggagatggagaaggttcttgccggtgagacactgtctgtaaacgaccctccggacgtgctggaccgccagaaatgtcttgcagctctcgcatcattgaggcacgctaagtggtttcaggcacgggctaacggactgaagagctgtgtaatagtgatccgtgttctgagggacctctgtacaagggtccccacttggggcccacttaggggatggcctttagaattactctgtgaaaagagcattggcactgctaataggccaatgggagcaggcgaggctctccggcgagtccttgaatgccttgcaagcggaatagtcatgcctgacggaagtggtatctacgatccttgtgaaaaagaagccactgacgctatcgggcatcttgataggcagcagcgtgaggatataacacagtctgcgcagcacgctttgcgcctggcggcatttggtcagctacacaaggtgctcggtatggatcccctaccttctaagatgccaaagaagcccaaaaatgagaaccctgtggattataccgtccagatcccacctagcaccacctacgccattacacccatgaaacggccaatggaggaagacggggaagagaagtcaccatcaaaaaaaaaaaaaaaaatccagaaaaaggaagagaaggcagagccgcctcaagccatgaatgctctcatgagattgaatcagctgaaacccggtttgcaatataaacttgtctctcagaccgggccagtgcacgccccaatctttacgatgtccgtcgaagtggatggcaatagttttgaagctagcggcccttcgaagaagactgccaaactccacgtcgctgtgaaggtgctgcaagacatgggacttccaactggcgctgaagggagagactcgtcaaaaggagaggattccgctgaggagacagaagcaaagcctgcggtagtggctcctgcacccgttgtggaagctgttagtacaccgtctgctgctttcccttccgatgccacagcagagaacgttaaacagcaaggaccaatcctcaccaaacacgggaagaatcctgtgatggagcttaatgaaaagcggagggggctaaaatacgagctgatcagcgaaactggcggatcccacgacaagcgatttgtgatggaggtggaggttgatgggcagaaattccagggcgctggtagcaacaagaaggtggctaaggcctatgcagcattggctgccctcgagaaactgttcccagataccccactggctcttgatgcaaacaaaaaaaagagagcccctgtccccgtgcgtggcggacccaaattcgcggctaaacctcataatccgggatttgggatgggaggacctatgcacaacgaggtaccacctcctcctaatcttcgaggcagaggcaggggcggaagtattcgcggacgtggccgtggcagagggtttgggggagccaatcatggcggttatatgaacgctggagcaggttacgggtcgtacggatatgggggtaattcagcgaccgccggatactcccagttctattccaatggcggtcacagtgggaatgctagcgggggaggcggtgggggtggtgggggatcttccgggtacggcagttactaccagggcgataactataactcgccagtcccaccaaagcacgctggaaaaaagcagcctcatggtggtcagcagaaaccttcatatggtagtggataccagtctcatcagggacagcagcagagttataaccagtcaccatattcaaactatggcccaccacaagggaaacagaaaggatataatcacggacaaggaagctactcctatagcaattcatacaactctccaggcggaggtgggggatctgactacaactacgagtcaaagtttaactattctggatctggaggacgttctggaggcaatagttacggctcaggcggagcatcctacaacccgggatcccatgggggttacggaggtggctctggtggcggaagtagttatcaaggaaagcaggggggatactcccaatctaattataactctcctgggtcaggacagaattactcaggccctccatcatcataccaatccagtcagggaggctacggaaggaacgccgaccattcaatgaattaccagtatcggtag

SEQ ID NO: 194098 - DNA, 6119 bp, Artificial Sequence
  derived and/or modified sequence
aaagggggcggggcttcagccggtcacgtgttcccgcacctccccggcgcgcgcctgcccgcccgcccgctcgcccccggtccggactcctcctcctcctcttctcgccattgcagttggacccagcagcccggcgcgcaccgcgtggcttttgggggcagaccccggcgggctgtggcaggagggcggcggcggcggctgcggtcgaagaaggggacgccgacaagagttgaagtattgataacaccaaggaactctatcacaatttgaaaagataagcaaaagtttgatttccagacactacagaagaagtaaaaatgcgtccaatgcgaatttttgtgaatgatgaccgccatgtgatggcaaagcattcttccgtttatccaacacaagaggagctggaggcagtccagaacatggtgtcccacacggagcgggcgctcaaagctgtgtccgactggatagacgagcaggaaaagggtagcagcgagcaggcagagtccgataacatggatgtgcccccagaggacgacagtaaagaaggggctggggaacagaagacggagcacatgaccagaaccctgcggggagtgatgcgggtgggcctggtggcaaagggcctcctactcaagggggacttggatctggagctggtgctgctgtgtaaggagaagcccacaaccgccctcctggacaaggtggccgacaacctggccatccagcttgctgctgtaacagaagacaagtacgaaatactgcaatctgtcgacgatgctgcgattgtgataaaaaacacaaaagagcctccattgtccctgaccatccacctgacatcccctgttgtcagagaagaaatggagaaagtattagctggagaaacgctatcagtcaacgaccccccggacgttctggacaggcagaaatgccttgctgccttggcgtccctccgacacgccaagtggttccaggccagagccaacgggctgaagtcttgtgtcattgtgatccgggtcttgagggacctgtgcactcgcgtgcccacctggggtcccctccgaggctggcctctcgagctcctgtgtgagaaatccattggcacggccaacagaccgatgggtgctggcgaggccctgcggagagtgctggagtgcctggcgtcgggcatcgtgatgccagatggttctggcatttatgacccttgtgaaaaagaagccactgatgctattgggcatctagacagacagcaacgggaagatatcacacagagtgcgcagcacgcactgcggctcgctgccttcggccagctccataaagtcctaggcatggaccctctgccttccaagatgcccaagaaaccaaagaatgaaaacccagtggactacaccgttcagatcccaccaagcaccacctatgccattacgcccatgaaacgcccaatggaggaggacggggaggagaagtcgcccagcaaaaagaagaagaagattcagaagaaagaggagaaggcagagcccccccaggctatgaatgccctgatgcggttgaaccagctgaagccagggctgcagtacaagctggtgtcccagactgggcccgtccatgcccccatctttaccatgtctgtggaggttgatggcaattcattcgaggcctctgggccctccaaaaagacggccaagctgcacgtggccgttaaggtgttacaggacatgggcttgccgacgggtgctgaaggcagggactcgagcaagggggaggactcggctgaggagaccgaggcgaagccagcagtggtggcccctgccccagtggtagaagctgtctccacccctagtgcggcctttccctcagatgccactgccgagaacgtaaaacagcaggggccgatcctgacaaagcacggcaagaacccagtcatggagctgaacgagaagaggcgtgggctcaagtacgagctcatctccgagaccgggggcagccacgacaagcgcttcgtcatggaggtcgaagtggatggacagaagttccaaggtgctggttccaacaaaaaggtggcgaaggcctacgctgctcttgctgccctagaaaagcttttccctgacacccctctcgcccttgatgccaacaaaaagaagagagccccagtacccgtcagagggggaccgaaatttgctgctaagccacataaccctggcttcggcatgggaggccccatgcacaacgaagtgcccccaccccccaaccttcgagggcggggaagaggcgggagcatccggggacgagggcgcgggcgaggatttggtggcgccaaccatggaggctacatgaatgccggtgctgggtatggaagctatgggtacggaggcaactcggcgacagcaggctacagtcagttctacagcaacggagggcattctgggaatgccagtggcggtggcggcgggggcggtggtggctcctccggctatggctcctactaccaaggtgacaactacaactcaccggtgcccccaaaacacgctgggaagaagcagccgcacgggggccagcagaagccctcctacggctcgggctaccagtcccaccagggccagcagcagtcctacaaccagagcccctacagcaactatggccctccacagggcaagcagaaaggctataaccatggacaaggcagctactcctactcgaactcctacaactctcccgggggcgggggcggatccgactacaactacgagagcaaattcaactacagtggtagtggaggccgaagcggcgggaacagctacggctcaggcggggcatcctacaacccagggtcacacgggggctacggcggaggttctgggggcggctcctcataccaaggcaaacaaggaggctactcacagtcgaactacaactccccggggtccggccagaactacagtggccctcccagctcctaccagtcctcacaaggcggctatggcagaaacgcagaccacagcatgaactaccagtacagataagcccccgcggggcggagatttctaccttctgcacttactccccatcagaagatcgagttttatgcatcacagttaacatgtcagctggccctccaggcccccgcccccatcccgtccacgttgctgtgtcgtgaggtgcagcgggtcaccctgtggcccgtcctgtgacccatatttagccgtgtttgggactccgtgtcttcaatggtttgttagttgccattacaactttgtctgggtagagtttttgagtttttgcagttcagtatccctctgtctattcacacttcgtgttagtggtaactcagtttgtctttaaatagttacagaagggatacgtcatttgttaatgcttttgtgaagtgagttaaacgagctttctgtattttaatgctttagtgtttcagttttataagtgaagattttattttaaaaaccagtgggaaagagtggggggtttctttttatgtctgggtcattcaggcagtacatctgaattaagctgaatgtagacaaataaagaaaaacaaaactgcgcccgtcttaggcctgggtgtctgacccaccagcagtgcaatgggcaggtttccccactctattcctgctcttgggaaagcagcgtgggccatcaggatggtccctggtccttagagagggtccagttcaggcttctagacattttactcatgctcagcgaaggctggttcctggtcccctgggctgtgtagacccggtgtcccaccaggctccaggctcccaccatctacagaggggcttacagcgcccattctggtcttggggaacccatcacaaaataggctttttctgctccccgattctggtgtagttctaagtacacagtgatgtcctctgtaggggcgtgcctgtggtggaacataacgcagttacaaaagaaagggcaggtgaggcctgggtaaccccagccatggaccgtcagtggctggagggagcttcgtgtctgtgctggagctgcagcctgctcgccatctggaggctcagtggagtggggagttggggttctcataccagcagatttccctagagcgtgattctcccatctgaggcaatcttgcctcccaggggaaattttgcaatgtttggaggatgttgtcacagctagtagcgggtgctctgggatctggtggatagatgccaaggatgctgtcaagcatactgtactgcccagaacagtggcccatagcagggacctgccctatcaaaatatcaggtgtatggaggtggagtcccaacgctagagcagcccttctcagctccaccctgcccggggagggaggaggagctctggtttcagagcagtgccgggattgcctttccccaggatctgtgtcggccatccaggaagaactgtactggccaagcctgggaccacacgtctgcagagatcctgctctgctggcctgagccccaggccttggcctcctgtgcttgggtaaccatggccactgggaaaagcaaggaccgtgtttgactttcttggagaggtgaaagaggtgaaagaacaagttgtgtgctagaaaacttttgaggaattcttatttgtgttagagcagaggaggtcccagataccaagtggcgcctcccaggaaaggctgggagaagaggtggcctggagtaccccgagatcccagcagcgcacacagtggagggatgaggatggatgggtcctaacccctgattttgatgggatgtgttcatgtcctatctcctctcctggacacattaaggggttgggacaagaagagactcctgtgagatcagcagacctcgtgtttaaggagagaatgcctgcctgcaacactcatggagagggacacttcctggccccacctgctaaatacctccaaactctgggcaggcgcctgcattctcaacacaggacttcccttaacagtttccggatcagtgaccaccaccacgttcaggtttctgaatgcagacccaccacgagggatggattccacccgcccgccctgctgcagatacatgcggcacagcaggcacgtgcctggagagaacagctcctgagcacagcacccttggagccctcaccccgctcacgatcctcaccagtgctgatgatgccgtcatgctgctggcctgagacagtatcccagctacaacaggacgacaccgggttcaggaatatgtggctatcaccttgagcactgacagtggccttccaggctagttgccttccaaacgcaggtagccgacctgcaggagggcctacaaacgggcccagcaagagctgggcaacagctggcttgtgaaatgagacaccttgaccaatatgctttgggtggacggtctcctacatgttcagtggaggccaccaggagcatccatgagcggggaaggggtccacacccttacatggcaagttgatacgatggggtgcttggtggatgggccatggaggtccgtgagctggaactgggcacacgccatcccagagggctcaggatgccccaggaaggaaagaagggcaacagactacacgattggacgtgtgtggttgactgggatgaagttggagggaggggcagggccttgcaggggattggtactgatcccagggaggaagtgttggggcttcatgaactaggatgaaaggaggcccctgagccatgacaaggggcacatccaggatttccgccaccctgaatttagtagagctagtaggccctggtcgtcactctgggcagggatgccgtcagccttgagggtcgccacccacctgtgtgttgccctctgtcctggcagggaaacatacaccccttgtctcaccaccaaccttgcttgtgtagtcagcagggctggccctgccccaaggactcactgcatgtacccggacccctaggcctggcctttgcagcatagttgggagcttctggattccatctgcacctgtgagccccatgctggctgtgcactgcgcgggcctgagactgctggatacaatgttgggcaacaactcagccagcctgatggcagcctcagaggcttactctaacccatcccagaataaatggagacttcatgtgttcattgtttcattcactc

SEQ ID NO: 194099 - protein, 313 aa, Artificial Sequence
  derived and/or modified sequence
MNQLSFLLFLIATTRGWSTDEANTYFKEWTCSSSPSLPRSCKEIKDECPSAFDGLYFLRTENGVIYQTFCDMTSGGGGWTLVASVHENDMRGKCTVGDRWSSQQGSKAVYPEGDGNWANYNTFGSAEAATSDDYKNPGYYDIQAKDLGIWHVPNKSPMQHWRNSSLLRYRTDTGFLQTLGHNLFGIYQKYPVKYGEGKCWTDNGPVIPVVYDFGDAQKTASYYSPYGQREFTAGFVQFRVFNNERAANALCAGMRVTGCNTEHHCIGGGGYFPEASPQQCGDFSGFDWSGYGTHVGYSSSREITEAAVLLFYR

SEQ ID NO: 194100 - DNA, 942 bp, Artificial Sequence
  derived and/or modified sequence
atgaatcagctttcgtttctgctgttccttatcgccaccactagagggtggagtactgacgaggcaaatacgtacttcaaagaatggacctgctccagctcaccctctctccccaggtcatgcaaggagattaaggacgagtgtcctagcgctttcgacgggctatattttctgcgaacagaaaacggggttatctaccagaccttctgcgatatgacaagtggtggaggagggtggacccttgtggcttctgtccacgagaatgatatgcgcggaaaatgtaccgtgggagaccggtggtcatcccagcagggcagtaaggccgtctatccagagggcgatggcaattgggctaattataacacttttggatccgccgaagccgctacatccgacgactacaagaacccgggctattacgacattcaggccaaggatctgggtatttggcatgtgcctaacaagtccccgatgcagcattggcggaactccagtctcctccggtaccggactgatacaggtttcctgcaaaccctggggcacaacttgtttggcatctaccaaaagtaccctgtgaagtatggcgagggaaagtgctggaccgacaatgggcccgtgatcccggtcgtttatgattttggtgatgcacaaaaaactgcatcctactactccccttatggccagagggagttcacagctgggttcgttcagtttagggtgttcaacaatgagcgcgctgccaacgccctctgcgcgggaatgcgggtcaccggatgtaatactgagcatcactgcatcggtggtgggggatactttcctgaggcttctcctcagcagtgcggtgacttctccggtttcgattggtcagggtatggcacccacgtgggttatagcagcagccgggaaatcacggaggctgctgtgttactcttttatcggtag

SEQ ID NO: 194101 - DNA, 1183 bp, Artificial Sequence
  derived and/or modified sequence
aggagcgtttttggagaaagctgcactctgttgagctccagggcgcagtggagggagggagtgaaggagctctctgtacccaaggaaagtgcagctgagactcagacaagattacaatgaaccaactcagcttcctgctgtttctcatagcgaccaccagaggatggagtacagatgaggctaatacttacttcaaggaatggacctgttcttcgtctccatctctgcccagaagctgcaaggaaatcaaagacgaatgtcctagtgcatttgatggcctgtattttctccgcactgagaatggtgttatctaccagaccttctgtgacatgacctctgggggtggcggctggaccctggtggccagcgtgcacgagaatgacatgcgtgggaagtgcacggtgggcgatcgctggtccagtcagcagggcagcaaagcagtctacccagagggggacggcaactgggccaactacaacacctttggatctgcagaggcggccacgagcgatgactacaagaaccctggctactacgacatccaggccaaggacctgggcatctggcacgtgcccaataagtcccccatgcagcactggagaaacagctccctgctgaggtaccgcacggacactggcttcctccagacactgggacataatctgtttggcatctaccagaaatatccagtgaaatatggagaaggaaagtgttggactgacaacggcccggtgatccctgtggtctatgattttggcgacgcccagaaaacagcatcttattactcaccctatggccagcgggaattcactgcgggatttgttcagttcagggtatttaataacgagagagcagccaacgccttgtgtgctggaatgagggtcaccggatgtaacactgagcaccactgcattggtggaggaggatactttccagaggccagtccccagcagtgtggagatttttctggttttgattggagtggatatggaactcatgttggttacagcagcagccgtgagataactgaggcagctgtgcttctattctatcgttgagagttttgtgggagggaacccagacctctcctcccaaccatgagatcccaaggatggagaacaacttacccagtagctagaatgttaatggcagaagagaaaacaataaatcatattgactcaag

SEQ ID NO: 194102 - DNA, 942 bp, Artificial Sequence
  derived and/or modified sequence
atgaaccagctgtccttcctgctcttcctgattgccaccacccggggctggagcacagatgaggccaacacctacttcaaggagtggacctgcagcagcagccccagcctgcccaggagctgcaaggagatcaaggatgaatgtcccagcgcctttgatggcctgtacttcctgaggacagaaaatggagtcatctaccagaccttctgtgacatgaccagcggcggcggcggctggaccctggtggcctctgtgcatgaaaatgacatgagaggaaaatgtactgtgggggaccgctggagcagccagcagggcagcaaggctgtgtacccagaaggagatggcaactgggccaactacaacacctttggatctgctgaggccgccaccagtgatgactacaagaaccctggctactatgacatccaggccaaggacctgggcatctggcacgtgcccaacaagagccccatgcagcactggaggaacagcagcctgctgcgctacagaacagacaccggcttcctgcagaccctgggccacaacctgtttggcatctaccagaagtaccctgtgaagtacggggagggcaagtgctggacagacaatggacctgtgattcctgtggtgtatgactttggagatgcccagaagacagccagctactacagcccctacggccagcgggagttcaccgctggctttgtgcagttccgggtcttcaacaatgaaagagctgccaatgccctgtgtgccggcatgagggtgacaggctgcaacacagagcaccactgcatcggcggcggcggctacttccctgaggccagcccccagcagtgtggggacttcagcggctttgactggagcggctacggcacccacgtgggctacagcagcagccgggagatcacagaggccgctgtgctgctcttctacagatag

SEQ ID NO: 194103 - DNA, 942 bp, Artificial Sequence
  derived and/or modified sequence
atgaaccagctgagcttcctgctgttcctgatcgccaccacccggggctggagcacggatgaagctaacacttacttcaaggaatggacatgctccagttccccctctcttccaagaagttgcaaggaaatcaaagatgagtgtccctcagcctttgacggactgtacttcctccggacagagaatggcgtgatctaccagaccttttgcgatatgacttcaggcggaggcgggtggactttggtggccagcgtgcatgaaaacgacatgcgcggcaaatgtaccgtcggggaccgctggtcctcacaacagggaagcaaggccgtctatcctgaaggcgacgggaattgggcaaattataacacctttgggagtgcagaagcagcgacaagcgatgactacaagaaccccggatattacgacatccaggccaaggacctgggtatctggcatgtgccgaacaaatctcctatgcaacactggagaaattcctctcttctccgatataggacagataccggatttttgcaaacactgggacacaatcttttcggcatttatcagaagtacccggtaaagtacggggaaggaaagtgctggactgacaacggtcctgtaattcctgttgtgtacgattttggcgacgcccagaagaccgcttcttactacagcccttacggccaaagggaatttacggccggctttgtgcagttccgggtgttcaataatgagcgggcagctaacgcactttgcgcaggaatgcgagtgaccggatgcaacaccgaacaccattgcatcggaggaggtggatacttcccagaggctagcccgcagcagtgtggagactttagcggatttgattggagcggttacgggacacacgtgggctacagttcttctcgggagattacagaagccgcagtactgctcttttacagatag

SEQ ID NO: 194104 - DNA, 942 bp, Artificial Sequence
  derived and/or modified sequence
atgaaccagctgtcattcctgctctttctgatagcaactacacgtggctggtcgacagacgaggcaaacacctacttcaaagaatggacctgctcttctagtccatccctccccagaagctgcaaggagataaaggacgaatgtccaagtgcatttgacgggctttacttcctgcgcaccgagaatggggtgatctaccaaacattctgcgacatgacaagcggcggtggaggatggacacttgtcgcctctgttcacgagaatgacatgcgcggaaaatgcacggtgggcgacagatggtcaagtcagcaaggatccaaggccgtttatcctgagggagacggtaactgggcaaactataacacttttggatccgccgaggccgcaactagcgatgactataaaaaccctggatactacgatattcaggccaaggatttgggcatatggcacgtgccaaataagagccccatgcaacattggcgtaattctagtttgctccgatacagaacagatacgggattcctccagacactgggtcataaccttttcgggatttaccagaaatacccagtaaagtatggtgaaggaaaatgctggaccgacaacggtccggtcattccagtagtttacgacttcggtgacgcacagaaaacagcaagttactatagtccctacgggcagcgagaatttaccgccggattcgtacagttcagggtgttcaacaacgaaagagccgctaatgcgttgtgcgcgggaatgcgagttaccggatgtaatacagagcaccactgcatcggcggaggcggatatttccccgaggcctctccccagcaatgtggagactttagcgggttcgactggagtggctacggaactcatgtgggttattcctcctcacgagagatcactgaagcagccgttcttctgttttacaggtag

SEQ ID NO: 194105 - DNA, 942 bp, Artificial Sequence
  derived and/or modified sequence
atgaaccagctgagcttcctgctgttcctgatcgccaccaccagaggctggagcaccgacgaggccaacacctacttcaaggagtggacctgcagcagcagccccagcctgcccagaagctgcaaggagatcaaggacgagtgccccagcgccttcgacggcctgtacttcctgagaaccgagaacggcgtgatctaccagaccttctgcgacatgaccagcggcggcggcggctggaccctggtggccagcgtgcacgagaacgacatgagaggcaagtgcaccgtgggcgacagatggagcagccagcagggcagcaaggccgtgtaccccgagggcgacggcaactgggccaactacaacaccttcggcagcgccgaggccgccaccagcgacgactacaagaaccccggctactacgacatccaggccaaggacctgggcatctggcacgtgcccaacaagagccccatgcagcactggagaaacagcagcctgctgagatacagaaccgacaccggcttcctgcagaccctgggccacaacctgttcggcatctaccagaagtaccccgtgaagtacggcgagggcaagtgctggaccgacaacggccccgtgatccccgtggtgtacgacttcggcgacgcccagaagaccgccagctactacagcccctacggccagagagagttcaccgccggcttcgtgcagttcagagtgttcaacaacgagagagccgccaacgccctgtgcgccggcatgagagtgaccggctgcaacaccgagcaccactgcatcggcggcggcggctacttccccgaggccagcccccagcagtgcggcgacttcagcggcttcgactggagcggctacggcacccacgtgggctacagcagcagcagagagatcaccgaggccgccgtgctgctgttctacagatag

SEQ ID NO: 194106 - protein, 1165 aa, Artificial Sequence
  derived and/or modified sequence
MEQDRTNHVEGNRLSPFLIPSPPICQTEPLATKLQNGSPLPERAHPEVNGDTKWHSFKSYYGIPCMKGSQNSRVSPDFTQESRGYSKCLQNGGIKRTVSEPSLSGLLQIKKLKQDQKANGERRNFGVSQERNPGESSQPNVSDLSDKKESVSSVAQENAVKDFTSFSTHNCSGPENPELQILNEQEGKSANYHDKNIVLLKNKAVLMPNGATVSASSVEHTHGELLEKTLSQYYPDCVSIAVQKTTSHINAINSQATNELSCEITHPSHTSGQINSAQTSNSELPPKPAAVVSEACDADDADNASKLAAMLNTCSFQKPEQLQQQKSVFEICPSPAENNIQGTTKLASGEEFCSGSSSNLQAPGGSSERYLKQNEMNGAYFKQSSVFTKDSFSATTTPPPPSQLLLSPPPPLPQVPQLPSEGKSTLNGGVLEEHHHYPNQSNTTLLREVKIEGKPEAPPSQSPNPSTHVCSPSPMLSERPQNNCVNRNDIQTAGTMTVPLCSEKTRPMSEHLKHNPPIFGSSGELQDNCQQLMRNKEQEILKGRDKEQTRDLVPPTQHYLKPGWIELKAPRFHQAESHLKRNEASLPSILQYQPNLSNQMTSKQYTGNSNMPGGLPRQAYTQKTTQLEHKSQMYQVEMNQGQSQGTVDQHLQFQKPSHQVHFSKTDHLPKAHVQSLCGTRFHFQQRADSQTEKLMSPVLKQHLNQQASETEPFSNSHLLQHKPHKQAAQTQPSQSSHLPQNQQQQQKLQIKNKEEILQTFPHPQSNNDQQREGSFFGQTKVEECFHGENQYSKSSEFETHNVQMGLEEVQNINRRNSPYSQTMKSSACKIQVSCSNNTHLVSENKEQTTHPELFAGNKTQNLHHMQYFPNNVIPKQDLLHRCFQEQEQKSQQASVLQGYKNRNQDMSGQQAAQLAQQRYLIHNHANVFPVPDQGGSHTQTPPQKDTQKHAALRWHLLQKQEQQQTQQPQTESCHSQMHRPIKVEPGCKPHACMHTAPPENKTWKKVTKQENPPASCDNVQQKSIIETMEQHLKQFHAKSLFDHKALTLKSQKQVKVEMSGPVTVLTRQTTAAELDSHTPALEQQTTSSEKTPTKRTAASVLNNFIESPSKLLDTPIKNLLDTPVKTQYDFPSCRCVGKCQKCTETHGVYPELANLSSDMGFSFFF

SEQ ID NO: 194107 - DNA, 3498 bp, Artificial Sequence
  derived and/or modified sequence
atggagcaggacagaaccaaccacgtggagggcaacagactgagccccttcctgatccccagcccccccatctgccagaccgagcccctggccaccaagctgcagaacggcagccccctgcccgagagagcccaccccgaggtgaacggcgacaccaagtggcacagcttcaagagctactacggcatcccctgcatgaagggcagccagaacagcagagtgagccccgacttcacccaggagagcagaggctacagcaagtgcctgcagaacggcggcatcaagagaaccgtgagcgagcccagcctgagcggcctgctgcagatcaagaagctgaagcaggaccagaaggccaacggcgagagaagaaacttcggcgtgagccaggagagaaaccccggcgagagcagccagcccaacgtgagcgacctgagcgacaagaaggagagcgtgagcagcgtggcccaggagaacgccgtgaaggacttcaccagcttcagcacccacaactgcagcggccccgagaaccccgagctgcagatcctgaacgagcaggagggcaagagcgccaactaccacgacaagaacatcgtgctgctgaagaacaaggccgtgctgatgcccaacggcgccaccgtgagcgccagcagcgtggagcacacccacggcgagctgctggagaagaccctgagccagtactaccccgactgcgtgagcatcgccgtgcagaagaccaccagccacatcaacgccatcaacagccaggccaccaacgagctgagctgcgagatcacccaccccagccacaccagcggccagatcaacagcgcccagaccagcaacagcgagctgccccccaagcccgccgccgtggtgagcgaggcctgcgacgccgacgacgccgacaacgccagcaagctggccgccatgctgaacacctgcagcttccagaagcccgagcagctgcagcagcagaagagcgtgttcgagatctgccccagccccgccgagaacaacatccagggcaccaccaagctggccagcggcgaggagttctgcagcggcagcagcagcaacctgcaggcccccggcggcagcagcgagagatacctgaagcagaacgagatgaacggcgcctacttcaagcagagcagcgtgttcaccaaggacagcttcagcgccaccaccaccccccccccccccagccagctgctgctgagcccccccccccccctgccccaggtgccccagctgcccagcgagggcaagagcaccctgaacggcggcgtgctggaggagcaccaccactaccccaaccagagcaacaccaccctgctgagagaggtgaagatcgagggcaagcccgaggccccccccagccagagccccaaccccagcacccacgtgtgcagccccagccccatgctgagcgagagaccccagaacaactgcgtgaacagaaacgacatccagaccgccggcaccatgaccgtgcccctgtgcagcgagaagaccagacccatgagcgagcacctgaagcacaacccccccatcttcggcagcagcggcgagctgcaggacaactgccagcagctgatgagaaacaaggagcaggagatcctgaagggcagagacaaggagcagaccagagacctggtgccccccacccagcactacctgaagcccggctggatcgagctgaaggcccccagattccaccaggccgagagccacctgaagagaaacgaggccagcctgcccagcatcctgcagtaccagcccaacctgagcaaccagatgaccagcaagcagtacaccggcaacagcaacatgcccggcggcctgcccagacaggcctacacccagaagaccacccagctggagcacaagagccagatgtaccaggtggagatgaaccagggccagagccagggcaccgtggaccagcacctgcagttccagaagcccagccaccaggtgcacttcagcaagaccgaccacctgcccaaggcccacgtgcagagcctgtgcggcaccagattccacttccagcagagagccgacagccagaccgagaagctgatgagccccgtgctgaagcagcacctgaaccagcaggccagcgagaccgagcccttcagcaacagccacctgctgcagcacaagccccacaagcaggccgcccagacccagcccagccagagcagccacctgccccagaaccagcagcagcagcagaagctgcagatcaagaacaaggaggagatcctgcagaccttcccccacccccagagcaacaacgaccagcagagagagggcagcttcttcggccagaccaaggtggaggagtgcttccacggcgagaaccagtacagcaagagcagcgagttcgagacccacaacgtgcagatgggcctggaggaggtgcagaacatcaacagaagaaacagcccctacagccagaccatgaagagcagcgcctgcaagatccaggtgagctgcagcaacaacacccacctggtgagcgagaacaaggagcagaccacccaccccgagctgttcgccggcaacaagacccagaacctgcaccacatgcagtacttccccaacaacgtgatccccaagcaggacctgctgcacagatgcttccaggagcaggagcagaagagccagcaggccagcgtgctgcagggctacaagaacagaaaccaggacatgagcggccagcaggccgcccagctggcccagcagagatacctgatccacaaccacgccaacgtgttccccgtgcccgaccagggcggcagccacacccagacccccccccagaaggacacccagaagcacgccgccctgagatggcacctgctgcagaagcaggagcagcagcagacccagcagccccagaccgagagctgccacagccagatgcacagacccatcaaggtggagcccggctgcaagccccacgcctgcatgcacaccgccccccccgagaacaagacctggaagaaggtgaccaagcaggagaacccccccgccagctgcgacaacgtgcagcagaagagcatcatcgagaccatggagcagcacctgaagcagttccacgccaagagcctgttcgaccacaaggccctgaccctgaagagccagaagcaggtgaaggtggagatgagcggccccgtgaccgtgctgaccagacagaccaccgccgccgagctggacagccacacccccgccctggagcagcagaccaccagcagcgagaagacccccaccaagagaaccgccgccagcgtgctgaacaacttcatcgagagccccagcaagctgctggacacccccatcaagaacctgctggacacccccgtgaagacccagtacgacttccccagctgcagatgcgtgggcaagtgccagaagtgcaccgagacccacggcgtgtaccccgagctggccaacctgagcagcgacatgggcttcagcttcttcttctag

SEQ ID NO: 194108 - DNA, 333 bp, Artificial Sequence
  derived and/or modified sequence
atggagcaggacagaaccaaccacgtggagggcaacagactgagccccttcctgatccccagcccccccatctgccagaccgagcccctggccaccaagctgcagaacggcagccccctgcccgagagagcccaccccgaggtgaacggcgacaccaagtggcacagcttcaagagctactacggcatcccctgcatgaagggcagccagaacagcagagtgagccccgacttcacccaggagagcagaggctacagcaagtgcctgcagaacggcggcatcaagagaaccgtgagcgagcccagcctgagcggcctgctgcagatcaagtag

SEQ ID NO: 194109 - DNA, 3498 bp, Artificial Sequence
  derived and/or modified sequence
atggaacaggacaggacgaatcatgtagaaggcaatcgcctgtcccctttcctcatcccctcccctcccatttgtcagacagagccactggccacaaaactgcagaacggcagcccccttccggaaagagcccatccggaggtgaacggcgacaccaagtggcactcgttcaagagctattacggcatcccctgtatgaagggttctcagaattctagagtctcgcccgacttcactcaggagtcacgcggttattcaaagtgtctccagaacggtggcattaagcgtacagtatccgagccatcactgagcgggctgcttcagattaagaaactcaaacaagaccagaaggccaacggtgagagaaggaacttcggtgtcagccaggagcgcaacccaggcgagtcctctcagcctaacgtatcagacctatctgacaagaaggagtctgtgtcttccgtggcacaggaaaacgccgtaaaagattttacatccttctcgacgcacaattgtagtggtcctgaaaatcccgaacttcagattctgaatgaacaggagggaaaaagtgccaattaccacgacaaaaatattgtgcttcttaagaacaaggctgtcttgatgccaaatggcgccactgtgtcggcatcctccgtcgagcatacccacggtgagcttctggagaaaaccctgagccaatactatcctgattgtgtgagtattgctgtccaaaagacaacgagccatatcaatgccatcaacagccaggccactaacgagttgtcctgtgagattacccacccttctcacacttcaggacagataaacagcgcccaaacaagcaactctgaactcccaccaaagccagcagcggttgtgagcgaggcctgtgacgctgacgacgctgacaacgcaagtaaactcgctgccatgctgaacacatgtagctttcagaagcccgaacaactgcaacagcagaaatctgtattcgagatatgccctagcccagccgagaacaatatccagggcaccaccaaactcgcatccggagaagagttttgctctgggtcgagcagcaacctgcaggctccgggcgggtccagtgaacgctaccttaagcagaatgaaatgaatggagcatactttaaacagagttccgtgtttacaaaagacagtttcagcgcaaccactacccctccaccaccttcccagttactactcagccctcccccaccgctgccccaggtcccacagcttcccagcgaaggaaagagtacccttaacgggggcgttctcgaggagcaccatcactaccctaaccagtccaacaccactctgttacgagaagtaaagatcgaaggaaaacctgaagcccccccaagtcaatcacctaatccatctacgcacgtgtgctcccccagcccaatgttgagcgagcgtccccagaataactgcgttaataggaacgatatccagactgccgggaccatgacagttcctctgtgttcggagaaaactaggcctatgtccgagcacttaaaacacaacccaccaatttttggctctagcggagaacttcaggacaactgccagcaactaatgaggaacaaagaacaggagatcttgaaggggcgcgataaggagcagactagggatttggttcctccgacccaacactacctcaagcccgggtggatcgagctaaaggccccgaggtttcatcaggctgagtcgcacttgaaaaggaacgaagctagcttacccagtatcctgcaataccagccaaatctcagtaaccaaatgacatcaaagcagtatactggtaacagcaatatgccaggcggcttgccacgccaggcctacacacagaagacaactcaactcgagcacaagtcacagatgtaccaggtggaaatgaatcagggccaatctcaaggaacggtggatcagcatctgcagtttcagaaaccttctcaccaagtgcacttctcaaagacggatcacctgcctaaagctcacgtgcaaagtctctgtggtacccggttccattttcagcagcgggcagactcacagactgagaagctgatgtccccagtgctcaaacaacacttgaaccaacaggcatcagagacggagcctttcagtaattctcatcttctgcagcacaagcctcacaagcaggctgcccagacacagccctcccagtctagccacctgccccaaaaccagcaacagcagcagaaactgcaaatcaaaaacaaagaagagattctgcaaacatttccacaccctcagtctaataacgaccaacagagggaagggagcttctttggccagaccaaggtagaggagtgctttcacggcgagaatcaatacagcaagagcagcgagtttgaaactcacaacgtgcagatgggcctggaagaagtacagaatataaaccggcgcaactctccatacagtcaaactatgaagtccagcgcttgtaaaatccaggtgtcatgctccaacaacacccatctggtcagcgagaataaggaacagactactcaccctgagctgttcgccggaaacaagactcaaaatttgcaccacatgcagtattttccaaacaatgttataccaaaacaagacctacttcaccgatgtttccaagagcaggagcagaagagtcagcaggcaagtgtgcttcagggctacaaaaacagaaatcaggatatgagtggacagcaggctgcgcagctggcacagcagagatatctcatccacaaccacgccaatgtattcccagtccccgatcagggtgggtcacacacacagacaccaccacagaaagacacacagaaacacgctgctctcaggtggcacttgttgcagaagcaagagcaacagcagacgcagcagccacagaccgaatcctgccattcacagatgcaccgcccaataaaggtggagccgggatgtaaacctcacgcctgcatgcacacggctcccccagaaaataagacatggaagaaggtgactaagcaggaaaaccccccagcatcttgtgacaacgtgcagcagaagagcattattgagacaatggaacagcacttgaagcagtttcacgcaaagtctctattcgaccacaaggccctgacgcttaaaagccaaaagcaggtgaaggtagaaatgagcggaccggtgaccgtgctaaccagacagactactgctgcagaactcgatagccatacacccgcccttgaacagcaaaccacttcaagcgagaagactccaaccaagcggacagccgctagcgttcttaataactttatagagagccctagcaagctgcttgacactcctattaaaaatctgcttgatactcctgtcaaaacacaatacgattttccttcctgtcgctgcgtaggaaagtgtcaaaagtgtacagagacgcacggcgtgtaccctgagctcgccaatctatcctccgatatgggattctctttcttcttttag

SEQ ID NO: 194110 - DNA, 3498 bp, Artificial Sequence
  derived and/or modified sequence
atggaacaagacaggacaaatcatgttgagggcaaccgcctctcccctttcctgattccctctccccccatttgtcagacggaacccttagccacaaagctccagaacggcagtccgctcccggagagggcgcatccagaagtgaatggcgacactaagtggcacagttttaagtcttattatggaattccatgtatgaaggggtcacagaactctagggtgtctcccgacttcacccaggaatcacgaggctatagtaagtgtcttcagaatggtggtattaagaggactgtgtccgagcccagcctgtctgggttgcttcaaatcaagaagctaaagcaggaccagaaggccaatggcgagaggcgaaacttcggtgttagccaggagaggaatcccggggaatcctcacagcctaacgtgtctgatctgagtgacaagaaggagagcgtcagctctgtggcccaagagaacgccgtgaaggactttacctctttttctacccataactgttcagggcccgagaacccagagctccagatcctcaatgagcaggaagggaaatcagctaactaccatgacaagaatatagtcttgctaaagaataaggcagtgctgatgcctaatggcgcaacagttagcgcctcctctgtggaacatacccatggcgaattgcttgaaaaaacgctcagccaatactatcctgactgcgtgtctattgcggtacaaaagacaacaagccatatcaacgcgatcaacagccaggctacgaacgaactgagctgcgagattacgcatccctcccacacttcaggccaaattaattcagcacagacaagcaatagcgaactgcctcccaagccggccgctgttgtgagcgaagcatgtgacgccgacgatgcggataatgcaagcaagctcgcagctatgctgaatacctgttccttccagaagccggagcagctacagcagcagaagagcgtgtttgagatttgtccaagccccgcagaaaacaacattcagggaaccaccaaacttgcctcaggcgaggaattttgctctgggtcatcctccaacctacaggcgccaggcgggtcaagcgagcggtatctgaagcagaatgagatgaacggagcctacttcaagcagagctccgtgtttaccaaggactctttttccgccacaactacacctccacctcctagtcagctactcctttctcccccgccgcccctgccacaggttccgcaactgccaagcgaagggaagagcacattgaatggtggtgtgttggaagagcatcaccactacccaaatcagagcaacaccacgctgctgcgtgaagtcaagattgagggaaaacccgaggccccaccatcccagagccccaatcctagcacccatgtctgctctccaagccccatgctgtctgagcgaccgcagaacaactgtgtgaaccggaacgatattcagaccgccggcacaatgacagtcccactatgttctgaaaagactcgacctatgtccgagcacctgaagcacaatccaccaatttttggctcctctggggagctccaagacaactgccaacagctcatgcgaaacaaggagcaggagattctgaaaggacgtgataaggagcagacaagagatttggtgccacctacacagcattatctcaaaccaggatggatagagttgaaggcgccaagattccaccaggccgagagccatttgaagaggaacgaggcaagcctcccaagcattttacagtatcagccaaacttgtctaaccagatgacgagcaaacagtatacgggcaatagtaatatgccaggtggcctgcctcggcaggcctatacccagaaaactacccaactggaacataagtcccaaatgtaccaggtcgagatgaaccagggtcagtcccaggggaccgtcgaccagcatttacagtttcaaaagcctagccaccaggtgcacttctcaaagaccgatcacctaccgaaagcccacgtccagagcctgtgtggaacccgctttcattttcagcagcgggccgactcgcaaaccgagaaactgatgagccccgtgctgaagcagcatctaaatcagcaagctagcgagacagagcctttcagcaattcccatttgttgcagcacaagcctcacaagcaagcggcccagacgcagccttcccagagctcccatctgccgcagaatcagcagcagcagcagaagctccagatcaagaataaagaggagattcttcagacatttcctcatccccagtcaaacaacgaccagcagcgggaaggttccttcttcggccaaaccaaagtagaggagtgtttccacggcgagaaccaatactccaagtcaagtgaatttgaaacacacaatgtacagatgggactggaagaagtacagaatatcaataggagaaacagcccctatagccaaacaatgaagtcctctgcttgcaaaattcaggtgtcctgtagcaataacacacatctggtgagtgagaacaaggagcagaccacccaccctgagctcttcgccggtaacaaaacccaaaacttgcatcatatgcaatactttccgaataacgtgatcccaaagcaagacctgctccaccgctgcttccaggaacaggagcagaaaagccagcaggcttcagtgttgcaggggtataagaatcggaatcaagacatgtccggccaacaggccgcacagctggcacagcagcgctacctcattcacaatcatgctaatgtgttccctgtgccagaccagggtggaagccatacacagactcccccccagaaggacacacaaaagcacgccgccctccgctggcatctcctgcagaagcaggaacagcagcagacgcagcagcctcagacagagagctgccatagccagatgcatcgcccgataaaagtggagccgggttgtaaacctcacgcttgcatgcatacagcacctcctgagaataagacatggaagaaggttaccaagcaggagaaccctcctgcgtcttgtgataatgtacagcagaagtctatcatcgagacaatggagcagcacctgaaacaatttcacgctaagtcccttttcgatcataaggccctgacactaaaatcccaaaagcaggtcaaggtggagatgtctggtcccgttaccgtgcttactcggcaaaccactgccgccgaattggacagccatacccctgctttggaacagcagacgacatcttcagagaagacgcctaccaagcgcactgctgcgagtgtgttgaacaacttcatcgagagccctagcaaactcctggacacccccattaaaaatttactcgacactcccgtaaagacccaatatgactttccctcgtgtagatgcgttggcaaatgccagaagtgcacagaaacacatggcgtctatccggaactcgctaacttgtcaagtgacatgggcttctcatttttcttctag

SEQ ID NO: 194111 - DNA, 333 bp, Artificial Sequence
  derived and/or modified sequence
atggaacaagaccgcaccaaccacgttgaaggtaatagactaagcccattcctcatcccttccccgcctatctgtcagacagagccgctagccacaaagctccagaatggttcccctctacccgagagggcacatccagaagtgaacggagacacaaagtggcatagctttaaatcgtactacgggattccatgtatgaagggctctcaaaattccagggtctccccggacttcacccaggagtcacgggggtattctaagtgtctgcagaatggcggcattaagcgtaccgttagcgagccttccttgtccggcctcctgcagataaagtag

SEQ ID NO: 194112 - DNA, 3498 bp, Artificial Sequence
  derived and/or modified sequence
atggagcaggacaggaccaaccacgtggagggcaaccggctgagccccttcctgatccccagcccccccatctgccagacagagcccctggccaccaagctgcagaatggcagccccctgcctgagcgggcccaccctgaggtgaatggagacaccaagtggcacagcttcaagagctactacggcatcccctgcatgaagggcagccagaacagccgggtgtccccagacttcacccaggagagccggggctacagcaagtgcctgcagaatggaggcatcaagaggacagtgtctgagcccagcctgagcggcctgctgcagatcaagaagctgaagcaggaccagaaggccaatggagagaggaggaactttggagtgtcccaggagagaaatcctggagagagcagccagcccaacgtgtctgacctgagtgacaagaaggagagcgtgtcctctgtggcccaggagaatgctgtgaaggacttcaccagcttcagcacccacaactgcagcggcccagaaaatcctgagctgcagatcctgaatgagcaggagggcaagagcgccaactaccatgacaagaacatcgtgctgctgaagaacaaggctgtgctgatgcccaatggagccaccgtgtctgccagctctgtggagcacacccacggggagctgctggagaagaccctgagccagtactacccagactgtgtgtccattgctgtgcagaagaccaccagccacatcaatgccatcaacagccaggccaccaatgagctgagctgtgagatcacccaccccagccacaccagcggccagatcaacagcgcccagaccagcaacagcgagctgccccccaagccagctgctgtggtgtctgaggcctgtgatgctgatgatgctgacaatgccagcaagctggccgccatgctgaacacctgcagcttccagaagccagagcagctgcagcagcagaagtctgtgtttgagatctgccccagccctgctgagaacaacatccagggcaccaccaagctggccagcggggaggagttctgcagcggcagcagcagcaacctgcaggcccctgggggcagcagcgagcgctacctgaagcagaatgagatgaatggagcctacttcaagcagagctctgtgttcaccaaggacagcttcagcgccaccaccaccccacctccacccagccagctgctgctgagccccccaccacccctgccccaggtgccccagctgcccagcgagggcaagagcaccctgaatggaggagtgctggaggagcaccaccactaccccaaccagagcaacaccaccctgctgcgggaggtgaagattgagggcaagccagaggccccacccagccagagccccaaccccagcacccacgtgtgcagccccagccccatgctgtctgagcggccccagaacaactgtgtgaacagaaatgacatccagacagctggcaccatgacagtgcccctgtgcagcgagaagacccggcccatgtctgagcacctgaagcacaacccccccatcttcggcagcagcggggagctgcaggacaactgccagcagctgatgaggaacaaggagcaggagatcctgaagggccgggacaaggagcagacccgggacctggtgccccccacccagcactacctgaagccaggctggattgagctgaaggccccccgcttccaccaggccgagagccacctgaagagaaatgaggccagcctgcccagcatcctgcagtaccagcccaacctgagcaaccagatgaccagcaagcagtacacaggcaacagcaacatgcctgggggcctgccccggcaggcctacacccagaagaccacccagctggagcacaagagccagatgtaccaggtggagatgaaccagggccagagccagggcaccgtggaccagcacctgcagttccagaagcccagccaccaggtgcacttcagcaagacagaccacctgcccaaggcccacgtgcagagcctgtgtggcacccgcttccacttccagcagagagctgacagccagacagagaagctgatgagccctgtgctgaagcagcacctgaaccagcaggccagcgagacagagcccttcagcaacagccacctgctgcagcacaagccccacaagcaggccgcccagacccagcccagccagagcagccacctgccccagaaccagcagcagcagcagaagctgcagatcaagaacaaggaggagatcctgcagaccttcccccacccccagagcaacaatgaccagcagcgggagggcagcttcttcggccagaccaaggtggaggagtgcttccacggggagaaccagtacagcaagagcagcgagtttgagacccacaacgtgcagatgggcctggaggaggtgcagaacatcaacagaagaaacagcccctacagccagaccatgaagagcagcgcctgcaagatccaggtgtcctgcagcaacaacacccacctggtgtctgagaacaaggagcagaccacccaccctgagctgtttgctggcaacaagacccagaacctgcaccacatgcagtacttccccaacaacgtcatccccaagcaggacctgctgcaccgctgcttccaggagcaggagcagaagagccagcaggcctctgtgctgcagggctacaagaacagaaaccaggacatgagcggccagcaggccgcccagctggcccagcagcgctacctgatccacaaccacgccaacgtgtttcctgtgcctgaccagggcggcagccacacccagaccccaccccagaaggacacccagaagcacgccgccctgcgctggcacctgctgcagaagcaggagcagcagcagacccagcagccccagacagagagctgccacagccagatgcaccggcccatcaaggtggagcccggctgcaagccccacgcctgcatgcacacagcccccccagagaacaagacctggaagaaggtgaccaagcaggagaaccccccagccagctgtgacaacgtgcagcagaagagcatcatcgagaccatggagcagcacctgaagcagttccacgccaagagcctgtttgaccacaaggccctgaccctgaagagccagaagcaggtgaaggtggagatgagcggccctgtgacagtgctgacccggcagaccacagctgctgagctggacagccacaccccagccctggagcagcagaccaccagcagcgagaagacccccaccaagaggacagctgcctctgtgctgaacaacttcatcgagagccccagcaagctgctggacacccccatcaagaacctgctggacacccctgtgaagacccagtatgacttccccagctgccgctgtgtgggcaagtgccagaagtgcacagagacccacggcgtgtacccagagctggccaacctgagcagtgacatgggcttctccttcttcttctag

SEQ ID NO: 194113 - DNA, 333 bp, Artificial Sequence
  derived and/or modified sequence
atggagcaggacaggaccaaccacgtggagggcaaccggctgagccccttcctgatccccagcccccccatctgccagacagagcccctggccaccaagctgcagaatggcagccccctgcctgagcgggcccaccctgaggtgaatggagacaccaagtggcacagcttcaagagctactacggcatcccctgcatgaagggcagccagaacagccgggtgtccccagacttcacccaggagagccggggctacagcaagtgcctgcagaatggaggcatcaagaggacagtgtctgagcccagcctgagcggcctgctgcagatcaagtag

SEQ ID NO: 194114 - DNA, 3498 bp, Artificial Sequence
  derived and/or modified sequence
atggagcaggaccggaccaaccacgtggagggcaaccggctgagcccttttctcatcccttctcctcccatctgtcagaccgagcctctagcaacaaagctgcaaaacggaagcccgctaccagagcgcgcccatcccgaggtgaatggtgacaccaagtggcactccttcaagtcttattatggaatcccttgcatgaagggatcgcaaaactctcgggtaagtccagattttacacaggagagtcgcgggtacagcaaatgtcttcagaatggggggattaagaggacagtgtctgaaccctctctgtccggactactgcagattaagaaactaaagcaagatcagaaggctaatggagagcgtagaaactttggcgtgtctcaagaaagaaaccctggggagagttcacaacctaatgtgtctgacttgtccgacaaaaaggagtccgtgagttctgtcgcccaggaaaatgcagtcaaggacttcacctccttcagcacgcataactgtagcggccctgaaaaccctgagctgcagatactgaatgagcaagagggtaaaagcgcaaactatcatgacaagaacattgtgctgctgaaaaataaggctgtcctcatgccaaacggagctacagtatccgctagtagcgttgaacacacacacggcgaactattggaaaaaactctctctcagtactatcctgactgtgttagtatagctgtccagaaaacaaccagccatatcaatgcaataaattctcaagccaccaatgaattgtcgtgtgagatcacccacccctcacacactagtggacaaatcaattccgcccaaacgtcaaactcagagctcccaccgaagcctgcagccgtcgtgagcgaggcgtgcgatgccgacgatgcagacaatgccagcaaactggccgctatgttgaatacatgcagtttccagaagccagaacagttacagcagcagaaatcggtgttcgagatctgtccctcacctgcagaaaacaacatccagggcactactaaactagcaagcggggaagaattctgttccgggtcctcctcaaatctgcaggcaccgggcgggagttccgagagatatcttaaacagaatgaaatgaacggggcatattttaaacaaagcagcgtattcaccaaagattcgttttcagccaccaccactcctccccccccaagtcagctcctgctcagtccgcctccgcccctgccgcaagtgccgcagctcccctccgaaggcaagtctaccctcaacggtggcgtcctcgaagaacaccatcactacccaaatcaaagcaacactaccctccttcgggaagttaagatcgaaggtaagcccgaagcaccacccagccaaagtccaaacccatcaacgcacgtgtgcagcccaagtcccatgctgtccgaaagaccacagaataactgtgttaaccggaacgatatacagaccgctggtacaatgacggtccctttgtgtagcgagaaaacccgcccaatgagtgagcatctcaagcacaacccccccatctttgggtcctccggcgaactgcaagacaactgtcagcagttaatgaggaataaggaacaggaaattctgaagggtagagacaaagaacaaaccagagacctggtgcctcccacacaacactatctcaagcccggctggatcgagttaaaagctccaaggttccaccaggcagaatcccacctaaagagaaacgaagcttctctaccttctattttgcagtatcagcctaacctgtccaaccagatgacaagcaagcaatatactggcaactccaacatgcccggtggcttgccccggcaggcttacactcagaaaaccacccagctggaacacaagagccaaatgtatcaggtcgaaatgaatcaggggcagtcccagggaaccgtggatcagcacctacagttccagaagcctagccatcaagtgcacttttcgaaaaccgatcacttgcccaaggctcacgtgcaatctctgtgtgggaccaggttccatttccagcagagggccgatagccagacagagaagctcatgagccccgttttaaagcagcatctaaaccagcaggctagcgagactgagccctttagcaatagccacctcctacagcacaagccacataagcaggctgcgcaaacccagcccagccaatcttctcatctgcctcagaaccagcagcagcagcagaagctgcagattaagaacaaggaagaaattctgcaaacatttcctcatcctcagtctaataacgaccagcagcgggaaggctctttcttcgggcaaaccaaagtagaggaatgcttccatggagaaaaccaatatagcaagtccagcgaattcgagacacataatgttcaaatgggtttggaggaggtccagaacattaacagacgtaactctccctactcccagactatgaagagttccgcctgtaagatccaggttagctgttccaacaacacccatctcgtttctgaaaacaaagagcagactactcaccccgaactcttcgccggcaacaaaactcaaaacctgcatcatatgcagtattttcctaataacgtgatcccaaaacaagacctgttacatcgctgtttccaggagcaggaacagaagagccagcaggccagcgttcttcagggctataaaaaccggaaccaggacatgagtggccagcaggctgcccaactggctcagcagagatatttgatccataaccacgctaatgtcttccccgtacccgaccagggagggagccacacgcagacccctcctcaaaaggatactcaaaaacatgcagcgctcagatggcacctgttgcagaagcaagagcagcagcagactcagcagcctcagaccgagtcctgccactctcaaatgcaccgccctattaaagtggagcctggctgcaagccacatgcatgtatgcacacagctcccccggaaaacaaaacatggaaaaaagtgaccaagcaagagaaccccccggctagctgtgacaacgtacagcaaaaaagcatcatcgagactatggagcaacatctgaaacagtttcatgctaaaagtctgtttgaccataaggcactgaccttgaaatcccagaagcaggtgaaagtggagatgtcagggcccgttacagtgctgacccgccagaccactgctgcagaattggacagccacacacccgctctggagcagcagacaacttcctctgaaaagaccccaacaaaacggactgcagcctctgtcctgaacaactttatcgagagcccctccaaactgctggatactccaatcaagaacctgttggacacccctgtaaaaacccaatatgactttcccagctgtcggtgcgttggtaaatgccagaagtgtaccgagacgcatggtgtctacccagagctcgcaaacctgtcgagcgacatggggttcagcttttttttctag

SEQ ID NO: 194115 - DNA, 3498 bp, Artificial Sequence
  derived and/or modified sequence
atggagcaggaccggaccaaccacgtggagggcaaccggctgagcccattcctgataccaagcccacccatctgccagacagaacccctggcgacaaaactgcaaaacggaagtccgctacccgaacgagctcatccggaagtgaatggggacacgaagtggcattcattcaagtcctattacggcatcccatgtatgaaggggtcgcagaactcaagggtctccccagattttacacaggagtctaggggttactcgaagtgccttcagaacggaggaataaagcggaccgtatccgaaccatcactgtctggtttgctgcaaatcaaaaaactgaagcaagatcagaaagctaacggtgagagacggaactttggtgtgagccaagagcggaacccgggggagtcctctcagccaaacgtatctgatttatccgacaagaaggagagcgtgtctagcgttgctcaggagaacgcagtcaaggacttcacatcctttagcacacacaattgctccggtccagaaaatccagaattgcagatactcaacgaacaggaggggaaaagcgctaattatcacgacaaaaatattgtgttgctcaagaataaagctgtgctgatgcctaatggcgcaacagtttctgctagtagtgtggagcatacccacggagagcttcttgaaaagacccttagccagtactatcccgattgcgttagcatcgcggtccagaaaacaacttctcatatcaatgccatcaattcccaggctacaaatgagctgagctgcgagatcacacaccctagtcatacgtctggccagatcaactcagcccagacttccaacagcgagttgccacccaaaccagctgccgtggtctctgaggcttgtgatgccgatgatgcagacaacgcctctaaactcgccgccatgcttaacacatgctctttccagaaacccgagcaattgcagcagcaaaagtcggttttcgagatctgtccgtcccccgcagagaataacatccaaggcaccactaagctggcgtccggcgaggaattttgcagcgggtccagctctaatctgcaagcccccgggggttcctccgagcgctatttgaagcagaatgaaatgaacggcgcatactttaagcaatcatcagtttttaccaaggattctttcagcgcaaccaccactcctcctccccccagtcagctcctcctgtcaccccccccgcctctgccccaggtccctcagctgcctagtgagggaaaatcaaccctcaacggcggcgtcctggaggagcatcatcattaccccaaccagtctaatactaccttattgcgagaggtgaagatcgagggcaagcccgaagcacctcccagccaatccccaaacccatccacacatgtctgttctccatctccaatgctaagcgagcgaccccagaataattgtgtcaatcgaaatgacatacagaccgctggcacaatgacagtccccctgtgttcagagaaaacaagacccatgtctgaacatctaaagcacaatccacccatctttggatcttctggtgaactgcaggataattgtcagcagctcatgcggaataaggaacaggaaattctgaaaggtagggacaaggagcagacacgggatttggtacccccaacacagcactacttgaagcccgggtggatcgagctgaaggcaccacggttccatcaggccgagagccatctaaagagaaatgaagcaagtctgccctcaatcttacagtatcaacccaatctttctaatcaaatgaccagcaagcaatataccggtaattctaacatgcccggaggcctcccgcggcaggcctacacccagaagactacacagcttgagcacaagagccagatgtatcaagtcgagatgaaccagggccaatcgcagggcaccgtcgaccagcacctgcagttccaaaagccgtcccaccaggtgcacttctccaaaaccgaccatctccccaaggcccacgtgcagagcctgtgtggtacccgattccactttcagcagagagccgactcacagactgagaagctgatgtcacctgtgctgaaacaacatctcaaccagcaggccagtgagaccgagccctttagcaacagtcatcttctccaacacaaaccgcacaaacaggcagcccaaacccaacccagtcagagctctcatttgccccaaaaccaacagcagcagcagaagctgcagattaagaataaagaggagattctgcagacattccctcacccgcagagcaataacgaccagcagcgagaaggaagtttcttcgggcagaccaaggtggaggagtgctttcatggggagaaccagtactctaagagtagcgagtttgagacccacaacgtacagatggggctggaggaggtacagaatattaatcggaggaactctccctattcccagacaatgaagtcatccgcatgcaagattcaagtatcatgtagcaacaatacccacctggtatctgaaaataaggagcagaccacacaccccgagctctttgctggcaataagacccaaaacttgcatcacatgcaatatttccctaacaacgtgattcccaaacaggacttgcttcacaggtgctttcaggagcaggagcagaagagccagcaggcctctgtactacagggctacaagaacaggaatcaggatatgagtggccagcaggcggcccaactcgcacagcagcggtatctcattcataatcacgctaatgtgtttccagtaccagatcagggagggtcccatacgcagaccccaccccagaaagacactcagaaacacgcagccctccgatggcacctcctacaaaagcaggaacagcagcagacccaacagccgcaaaccgaatcttgtcactctcagatgcacaggcccataaaagtggagccaggttgtaaacctcatgcctgcatgcacactgcgcctccagagaacaagacctggaaaaaggttaccaaacaagagaacccccctgcctcctgtgataacgtgcagcagaagtccatcatcgagaccatggagcagcacctgaagcagtttcatgccaagagcctatttgatcataaggctttgacgttaaaaagccaaaagcaggtgaaagtcgaaatgagtggtccagtcaccgtgcttaccagacaaaccaccgccgctgagctagattctcacaccccagcactggagcagcagaccacctcctcagaaaagacgccgaccaagagaacggctgcctcagttctgaacaatttcatagaaagcccatcgaagctgctggacactccaatcaagaacttacttgacaccccggttaagacacagtatgatttcccatcttgtcggtgcgtgggaaagtgtcagaagtgtaccgagacccatggagtctaccccgaactggcaaatctctctagtgacatgggattctcattttttttctag

SEQ ID NO: 194116 - DNA, 333 bp, Artificial Sequence
  derived and/or modified sequence
atggagcaggaccggaccaaccacgtggagggcaaccggctgagcccattcctgatcccctctcctcctatctgtcaaacggagccactggctaccaagctgcagaatggcagtccactgcctgagcgcgcccaccccgaggtcaacggcgacactaaatggcactcattcaagagctactacggaattccttgtatgaagggatcacagaattccagggtgagtcctgatttcacacaggagagccgtggttacagcaagtgtctgcagaatggtgggatcaagagaactgtctctgaaccttctttgagtggactccttcagattaaatag

SEQ ID NO: 194117 - DNA, 3498 bp, Artificial Sequence
  derived and/or modified sequence
atggaacaagaccgaacgaatcacgtggaaggaaatcggctctcgccgtttcttatcccctcgcctccaatctgccagactgaacccttggccacaaagttacagaatggcagtcctttaccagagcgagctcatccagaggtgaatggagacacgaagtggcacagcttcaagagttattatggtataccgtgtatgaaaggaagtcagaactcacgcgtgagcccagattttactcaagaatctagggggtactctaaatgcctccagaacggaggcattaagcgcaccgtctctgaaccgtcattgtctgggctcttacaaatcaagaagctaaagcaagatcagaaagctaatggagaaagacgaaactttggcgtgtctcaagaaagaaatcctggcgaatcttcccagccgaacgtctcggaccttagcgataaaaaagaatctgtttcgagtgtggcccaggaaaatgcggttaaggacttcacaagcttctccactcacaactgttctgggcctgaaaaccctgaattgcagattttgaacgaacaagaggggaaatcagcaaattaccacgataagaacatcgttttactaaagaacaaagccgtgctcatgccaaacggggctacagttagcgcatcttcggttgaacatacacacggtgaactccttgaaaagacattgagccagtattacccggattgtgtctctattgcagtccaaaaaacgacttctcacatcaatgccattaactctcaggctacaaatgaattgagctgcgaaattactcaccctagtcatacttctggtcagatcaacagcgcccagacttccaattccgaactgccacctaagccagccgcagtcgtctcggaggcttgtgacgccgatgatgccgacaacgccagcaagctcgcagcaatgctgaatacctgcagctttcagaagcccgagcagctgcaacagcaaaaaagtgtctttgaaatttgtccatctccagcagagaacaacattcagggcactaccaagcttgcctcaggcgaggaattttgcagtggctcatctagcaatttacaggccccaggtggttcctcagagaggtacttaaaacaaaacgagatgaacggggcttacttcaaacagagctccgtattcacaaaagacagcttttccgccaccactacccccccacctccttctcagctcctgctgtctcccccaccccctctgcctcaagtaccacagctgccatctgaaggaaagtccacgttaaacggcggagtactggaggagcaccatcactatcccaatcagtcaaataccaccctgctgcgggaggtgaagatagaaggaaaacccgaggcccctccgtcacagagccccaacccttcaacacatgtatgctccccatcacccatgctgagcgaaaggcctcagaacaattgcgtcaaccggaatgatatccagaccgcgggaacaatgaccgtgccactttgtagcgagaagacacgcccaatgtcagagcacctgaagcacaatccgccaatttttgggtcaagtggcgagctacaagacaactgccagcagttgatgcggaacaaagagcaggagatcctgaagggacgcgacaaagaacagacccgcgatctcgtgccacctacccaacattacctgaagcctggctggattgagctgaaagcccctcgcttccatcaggccgaaagccatctcaaaaggaacgaggccagcctaccctccattctgcagtaccaacccaacctgagcaatcaaatgacctctaaacaatacaccggcaacagcaatatgcctggaggcctccctagacaagcctacactcaaaaaaccacacagctggaacacaagagccaaatgtatcaggtcgagatgaatcagggccagtcacagggaactgtcgaccaacacctccaatttcagaagccgtcacaccaggtgcactttagcaagacagaccacttgcccaaagcacacgtacagtctttgtgtggtacacgcttccactttcagcagcgcgcagattcccagacggaaaagctgatgtctccggtcctgaaacagcaccttaatcagcaggccagcgagaccgagcccttctccaattctcacctgctccaacacaagccacacaaacaggcggctcagacacagcctagtcagagctcccacctaccacaaaatcagcagcagcagcaaaaactccaaatcaaaaataaagaggagatactgcaaactttccctcacccacagagcaataatgatcagcagagagaaggatctttcttcggacagacaaaagtggaggaatgttttcacggcgaaaaccagtactccaaatcatccgaattcgagacacacaatgtccaaatgggcctcgaagaagtccagaacatcaatcggaggaactctccatattcccagaccatgaagtctagtgcctgtaaaattcaggtgtcctgctcaaacaacacccacctggtatctgaaaacaaagaacagaccactcaccccgagctgtttgctgggaacaaaacgcagaatctgcaccatatgcaatacttccctaacaatgtaatcccgaaacaagacctcctccacaggtgcttccaggaacaggaacagaaatctcaacaggcatcggtgctgcaggggtataaaaaccggaaccaggatatgtctgggcagcaggccgctcagctcgcccaacagaggtacctgatccataaccatgccaacgtgttccccgtgccagatcaggggggaagccatacacagacaccacctcagaaggatacacaaaaacacgcagctctgcgatggcacctgctccagaaacaggaacagcagcagacccagcagcctcagactgaatcatgccattcacagatgcatcgtcccatcaaagtggagcctggttgtaaaccacatgcctgcatgcacacggcccctcccgaaaacaaaacttggaagaaagtaacaaagcaggagaatcctcctgcctcttgtgacaacgttcagcagaaatcaatcattgagacaatggaacagcatcttaagcaattccacgccaaatccctctttgatcacaaggccctgaccctaaagagtcagaagcaagtgaaggttgagatgagtgggccagtgactgtgctgacaaggcagaccacagcagcggaactggatagccacactcctgcattagagcagcagaccacctcgtctgagaagaccccaactaaacggactgcagcttctgtgctaaacaacttcatcgagagcccgtccaaactccttgatacccctattaaaaatctattggacacccccgttaaaacacagtatgattttccgtcatgtaggtgcgttggtaaatgccagaagtgtacagaaacgcacggagtgtaccctgagctggcaaacctcagctcagacatgggattctcttttttcttctag

SEQ ID NO: 194118 - DNA, 3498 bp, Artificial Sequence
  derived and/or modified sequence
atggaacaagacagaaccaatcacgtggagggtaataggctgagcccgtttctcatcccttctcctcccatttgccagacagagcctctcgctaccaaactccaaaatggatcgccactaccagagcgggcacacccagaggtcaatggcgataccaaatggcatagctttaagagttattacggaatcccttgcatgaaggggtcacaaaattctcgggtgtcgcctgatttcactcaggaatccagggggtactccaagtgtctgcagaatgggggaatcaaacggaccgtttccgagcctagcctgtccgggctcctccaaatcaagaagctcaagcaagaccagaaggctaacggcgaaagacgcaactttggggtgagccaggaaaggaaccctggcgaatcttcacagccaaacgtgagcgacctatccgataaaaaagagagcgtatcatctgtagcacaagagaatgcagtcaaagacttcacttcattctctacacacaactgtagcggccctgaaaatccagaactgcaaattcttaatgaacaggaaggtaaaagtgctaattatcatgataagaatattgtgctgctcaagaacaaggccgtgctgatgcccaacggagcaaccgtatcggcgagcagcgtggaacatacacatggggagctgctggaaaaaaccctgagccagtactaccccgattgcgtttcgatcgctgttcagaaaaccacaagccacatcaacgctataaattcccaggctacgaatgagctgagctgtgagattacacatcccagtcacacttccgggcagatcaatagtgcccagaccagtaacagtgagttgcccccaaaaccggcagccgtcgtgagcgaagcctgtgatgctgatgacgccgataatgcctccaaattggccgctatgctgaatacctgtagtttccagaaaccagagcaattgcaacaacagaagtctgtcttcgagatatgtccttctcccgcagaaaataacatccaggggacaacaaagctggcttctggggaggagttttgttccggttccagcagcaacctgcaggcacccggtggaagcagcgagagatatctgaagcagaacgaaatgaacggagcttacttcaagcaatcctctgtgttcacaaaggattccttttccgcgacgacaacacctccccctccatcccagctgcttctgtcacccccaccaccgttgcctcaggtccctcagctgccctcagaaggaaagagtaccctcaacggaggtgttctggaggagcaccatcactatcccaatcagtctaacacgacactgttgcgagaagtgaagatcgagggcaagccagaggcccctcctagtcagagccctaaccccagcactcacgtgtgttccccgtccccaatgttgagcgaaaggcctcagaataattgcgttaatagaaatgacatccagactgccggtacaatgacagtaccgctttgtagcgagaagacccggccaatgtctgaacatctgaaacataaccctccaatattcggctcttctggggagctccaggacaattgccagcaactgatgaggaataaggagcaggagatccttaaaggccgtgacaaagaacagactcgggatctcgtcccacccacccagcactacctcaaacctgggtggattgaacttaaggcccctaggtttcaccaagcagagagtcacctcaagagaaacgaagccagtcttccctcaatcctgcagtaccaaccaaacctaagcaaccagatgacctcgaagcaatatacaggtaattccaatatgccaggtgggctgccaagacaagcgtacactcagaaaaccacccagctggaacataagagtcagatgtatcaggtcgagatgaaccagggacagagccaggggactgttgatcagcacctgcagtttcagaaaccgtctcatcaggtgcatttctccaaaacggatcaccttccgaaggctcacgtgcagtcactttgtgggacccgcttccactttcagcaacgggcagactctcagactgagaaactcatgagtccagttctgaagcagcatcttaatcagcaggcatcggagaccgagcccttttcaaattcacaccttctccagcacaagccacacaaacaggctgcccaaacccagccctcgcagagctctcacctccctcaaaatcagcagcagcagcaaaaactccagataaaaaacaaggaggaaattttacagacttttccccacccccagtctaacaacgatcagcagagggagggctccttcttcggacagaccaaagttgaggagtgctttcacggtgagaatcagtattccaaaagttccgaatttgaaactcacaatgtgcagatgggccttgaggaagtccagaacatcaacaggagaaatagtccatatagtcaaaccatgaagtcatcagcatgcaaaatccaggtcagctgctccaataacacccatctggttagtgaaaacaaggagcagactacacaccctgagctgtttgccggtaacaagacccaaaatctgcaccacatgcagtacttccccaataatgtgattcccaaacaagacttgcttcaccggtgttttcaagagcaagaacagaagtcacagcaggcctccgttttacaaggctataagaatcggaaccaagacatgagcggtcaacaggcagcgcagctggcccaacagcgttatcttatccacaatcacgccaatgtcttcccagtccctgatcagggaggttctcacacccagacgccccctcagaaagacacgcagaagcacgcagcccttcgctggcacctgctccagaagcaggagcaacagcaaacacagcagccacagactgagtcatgtcacagccagatgcatagaccgattaaagtggaaccaggctgtaagccacacgcgtgtatgcacactgcgcctcctgaaaataagacttggaagaaggtgaccaagcaggagaacccccctgcaagttgcgacaacgtgcagcagaagtctatcatcgagacgatggagcagcacctaaagcagtttcacgccaagagcttatttgatcataaagccctgactctgaaatcacagaaacaggtaaaagtcgaaatgtccggtccggtgacagtgctgacacgacaaactactgccgcagagctcgattctcacactcccgctctggaacaacaaacaactagctcagaaaaaactccaactaaacggacagccgcatctgttttgaacaacttcattgagagccccagcaagttacttgataccccgattaagaatctcttagacacccctgtgaagacacaatacgacttccctagttgccggtgcgtgggaaagtgtcagaaatgcaccgaaacccatggcgtttatcctgaactggcaaatttgtcctcagatatgggtttttcttttttcttctag

SEQ ID NO: 194119 - DNA, 333 bp, Artificial Sequence
  derived and/or modified sequence
atggaacaagatagaaccaatcacgtggagggaaacagactttctccctttctgattccaagtcccccaatatgtcaaacggaacctctggcgacgaagctgcaaaacgggtccccactccctgaaagggcccaccctgaggtgaatggtgataccaaatggcattcctttaaaagctattatggaatcccatgcatgaagggctcacagaatagccgggtttctcccgattttacacaggagtctcgaggctattctaagtgcctgcagaatggcggaattaagcgcaccgtctcagagccaagtctgtccggtctcttgcaaatcaaatag

SEQ ID NO: 194120 - DNA, 9233 bp, Artificial Sequence
  derived and/or modified sequence
aaacagaaggtgggccggggcggggagaaacagaactcggtcaatttcccagtttgtcgggtctttaaaaatacaggcccctaaagcactaagggcatgccctcggtgaaacaggggagcgcttctgctgaatgagattaaagcgacagaaaagggaaaggagagcgcgggcaacgggatctaaagggagatagagacgcgggcctctgagggctggcaaacattcagcagcacaccctctcaagattgtttacttgcctttgctcctgttgagttacaacgcttggaagcaggagatgggctcagcagcagccaataggacatgatccaggaagagcagtaagggactgagctgctgaattcaactagagggcagccttgtggatggccccgaagcaagcctgatggaacaggatagaaccaaccatgttgagggcaacagactaagtccattcctgataccatcacctcccatttgccagacagaacctctggctacaaagctccagaatggaagcccactgcctgagagagctcatccagaagtaaatggagacaccaagtggcactctttcaaaagttattatggaataccctgtatgaagggaagccagaatagtcgtgtgagtcctgactttacacaagaaagtagagggtattccaagtgtttgcaaaatggaggaataaaacgcacagttagtgaaccttctctctctgggctccttcagatcaagaaattgaaacaagaccaaaaggctaatggagaaagacgtaacttcggggtaagccaagaaagaaatccaggtgaaagcagtcaaccaaatgtctccgatttgagtgataagaaagaatctgtgagttctgtagcccaagaaaatgcagttaaagatttcaccagtttttcaacacataactgcagtgggcctgaaaatccagagcttcagattctgaatgagcaggaggggaaaagtgctaattaccatgacaagaacattgtattacttaaaaacaaggcagtgctaatgcctaatggtgctacagtttctgcctcttccgtggaacacacacatggtgaactcctggaaaaaacactgtctcaatattatccagattgtgtttccattgcggtgcagaaaaccacatctcacataaatgccattaacagtcaggctactaatgagttgtcctgtgagatcactcacccatcgcatacctcagggcagatcaattccgcacagacctctaactctgagctgcctccaaagccagctgcagtggtgagtgaggcctgtgatgctgatgatgctgataatgccagtaaactagctgcaatgctaaatacctgttcctttcagaaaccagaacaactacaacaacaaaaatcagtttttgagatatgcccatctcctgcagaaaataacatccagggaaccacaaagctagcgtctggtgaagaattctgttcaggttccagcagcaatttgcaagctcctggtggcagctctgaacggtatttaaaacaaaatgaaatgaatggtgcttacttcaagcaaagctcagtgttcactaaggattccttttctgccactaccacaccaccaccaccatcacaattgcttctttctccccctcctcctcttccacaggttcctcagcttccttcagaaggaaaaagcactctgaatggtggagttttagaagaacaccaccactaccccaaccaaagtaacacaacacttttaagggaagtgaaaatagagggtaaacctgaggcaccaccttcccagagtcctaatccatctacacatgtatgcagcccttctccgatgctttctgaaaggcctcagaataattgtgtgaacaggaatgacatacagactgcagggacaatgactgttccattgtgttctgagaaaacaagaccaatgtcagaacacctcaagcataacccaccaatttttggtagcagtggagagctacaggacaactgccagcagttgatgagaaacaaagagcaagagattctgaagggtcgagacaaggagcaaacacgagatcttgtgcccccaacacagcactatctgaaaccaggatggattgaattgaaggcccctcgttttcaccaagcggaatcccatctaaaacgtaatgaggcatcactgccatcaattcttcagtatcaacccaatctctccaatcaaatgacctccaaacaatacactggaaattccaacatgcctggggggctcccaaggcaagcttacacccagaaaacaacacagctggagcacaagtcacaaatgtaccaagttgaaatgaatcaagggcagtcccaaggtacagtggaccaacatctccagttccaaaaaccctcacaccaggtgcacttctccaaaacagaccatttaccaaaagctcatgtgcagtcactgtgtggcactagatttcattttcaacaaagagcagattcccaaactgaaaaacttatgtccccagtgttgaaacagcacttgaatcaacaggcttcagagactgagccattttcaaactcacaccttttgcaacataagcctcataaacaggcagcacaaacacaaccatcccagagttcacatctccctcaaaaccagcaacagcagcaaaaattacaaataaagaataaagaggaaatactccagacttttcctcacccccaaagcaacaatgatcagcaaagagaaggatcattctttggccagactaaagtggaagaatgttttcatggtgaaaatcagtattcaaaatcaagcgagttcgagactcataatgtccaaatgggactggaggaagtacagaatataaatcgtagaaattccccttatagtcagaccatgaaatcaagtgcatgcaaaatacaggtttcttgttcaaacaatacacacctagtttcagagaataaagaacagactacacatcctgaactttttgcaggaaacaagacccaaaacttgcatcacatgcaatattttccaaataatgtgatcccaaagcaagatcttcttcacaggtgctttcaagaacaggagcagaagtcacaacaagcttcagttctacagggatataaaaatagaaaccaagatatgtctggtcaacaagctgcgcaacttgctcagcaaaggtacttgatacataaccatgcaaatgtttttcctgtgcctgaccagggaggaagtcacactcagacccctccccagaaggacactcaaaagcatgctgctctaaggtggcatctcttacagaagcaagaacagcagcaaacacagcaaccccaaactgagtcttgccatagtcagatgcacaggccaattaaggtggaacctggatgcaagccacatgcctgtatgcacacagcaccaccagaaaacaaaacatggaaaaaggtaactaagcaagagaatccacctgcaagctgtgataatgtgcagcaaaagagcatcattgagaccatggagcagcatctgaagcagtttcacgccaagtcgttatttgaccataaggctcttactctcaaatcacagaagcaagtaaaagttgaaatgtcagggccagtcacagttttgactagacaaaccactgctgcagaacttgatagccacaccccagctttagagcagcaaacaacttcttcagaaaagacaccaaccaaaagaacagctgcttctgttctcaataattttatagagtcaccttccaaattactagatactcctataaaaaatttattggatacacctgtcaagactcaatatgatttcccatcttgcagatgtgtaggtaagtgccagaaatgtactgagacacatggcgtttatccagaattagcaaatttatcttcagatatgggattttccttctttttttaaatcttgagtctggcagcaatttgtaaaggctcataaaaatctgaagcttacattttttgtcaagttaccgatgcttgtgtcttgtgaaagagaacttcacttacatgcagtttttccaaaagaattaaataatcgtgcatgtttatttttccctctcttcagatcctgtaaaatttgaatgtatctgttttagatcaattcgcctatttagctctttgtatattatctcctggagagacagctaggcagcaaaaaaacaatctattaaaatgagaaaataacgaccataggcagtctaatgtacgaactttaaatattttttaattcaaggtaaaatatattagtttcacaagatttctggctaatagggaaattattatcttcagtcttcatgagttgggggaaatgataatgctgacactcttagtgctcctaaagtttccttttctccatttatacatttggaatgttgtgatttatattcattttgattcccttttctctaaaatttcatctttttgattaaaaaatatgatacaggcatacctcagagatattgtgggtttggctccataccacaataaaatgaatattacaataaagcaagttgtaaggactttttggtttctcactgtatgtaaaagttatttatatactatactgtaacatactaagtgtgcaatagcattgtgtctaaaaaatatatactttaaaaataatttattgttaaaaaaatgccaacaattatctgggcctttagtgagtgctaatctttttgctggtggagggtcgtgcttcagtattgatcgctgtggactgatcatggtggtagttgctgaaggttgctgggatggctgtgtgtgtggcaatttcttaaaataagacaacagtgaagtgctgtatcaattgatttttccattcacaaaagatttctctgtagcatgcaatgctgtttgatagcatttaacccacagcagaatttctttgaaaattggactcagtcctctcaaactgtgctgctgctttatcaactaagtttttgtaattttctgaatcctttgttgtcatttcagcagtttacagcatcttcattggaagtatattccatctcaaacattctttgttcatccataagaagcaacttcttatcaagttttttcatgacattgcagtaactcagccccatcttcaggctctacttctaattctggttctcttgctacatctccctcatctgcagtgacctctccacggaagtcttgaactcctcaaagtaatccatgagggttggaatcaacttctaaactcctgttaatgttgatatattgaccccctcccatgaattatgaatgttcttaataacttctaaatggtgatacctttccagaaggctttcaatgtactttgcccggatccatcagaagactatcttggcagctgtagactaacaatatatttcttaaatgataagacttgaaagtcaaaagtactccttaatccataggctgcagaatcaatgttgtattaacaggcacgaaaacagcattaatcttgtgcatctccatcggagctcttgggtgactaggtgccttgagcagtaatattttgaaaggaggttttggttttgttttttgttttttttttttgttttttagcagtaagtctcaacactgggcttaaaatattcagtaaactatgttgtaaaaagatgtgttatcatccagactttgttgttccattactctacacaagcagggtacacttagcataattcttaagggccttggaattttcagaatggtaaatgagtatgggcttcaacttaaaatcatcaactgcattagcctgtaacaagagagtcagcctgtcctttgaagcaaggcattgacttctatctatgaaagtcttagatggcaccttgtttcaatagtaggctgtttagtacagccaccttcatcagtgatcttagctagatcttctgcataacttgctgcagcttctacatcagcacttgctgcctcaccttgtccttttatgttatagagacagctgcgcttcttaaactttataaaccaacttctgctagcttccaacttctcttctgcagcttcctcattctcttcatagaactgaagggagtcaaggccttgctctggattaagctttggcttaaggaatgttgtggctgacgtgatcttctatccagaccactaaagcgctctccatatcagcaataaggccgttttgctttcttacctttcatgtgttcactggagtaatttccttcaagaatttttcctttacattcacaacttggctaactggcatgcaaggcctagctttcagcctgtcttggcttttgacatgccttcctcacttagctcgtcatatctagcttttgatttaaagtggcaggcatacaactcttcctttcacttgaacacttagaggccactgtagggttattaattggcctaatttcaatattgttgtgttttagggaatagagaggcccagggagagggagagagcccaaacggctggttgatagagcaggcagaatgcacacaacatttatcagattatgtttgcaccatttaccagattatgggtacggtttgtggcaccccccaaaaattagaatagtaacatcaaagatcactgatcacagatcgccataacataaataataataaactttaaaatactgtgagaattaccaaaatgtgatacagagacatgaagtgagcacatgctgttgaaaaaaatgacactgatagacatacttaacacgtgggattgccacaaaccttcagtttgtaaaagtcacagtaactgtgactcacaaaagaacaaagcacaataaaacgaggtatgcctgtatttttaaaaaaagctttttgttaaaattcaggatatgtaataggtctgtaggaatagtgaaatatttttgctgatggatgtagatatatacgtggatagagatgaagatcttaattatagctatgcagcatagatttagtcaaagacatttgaaaagacaaatgttaaattagtgtggctaatgacctacccgtgccatgttttccctcttgcaatgagataccccacactgtgtagaaggatggagggaggactcctactgtccctctttgcgtgtggttattaagttgcctcactgggctaaaacaccacacatctcatagataatatttggtaagttgtaatcgtcttcactcttctcttatcacccacccctatcttcccacttttccatctttgttggtttgcaacagccccttctttttgcctgactctccaggattttctctcatcataaattgttctaaagtacatactaatatgggtctggattgactattcttatttgcaaaacagcaattaaatgttatagggaagtaggaagaaaaaggggtatccttgacaataaaccaagcaatattctgggggtgggatagagcaggaaattttatttttaatcttttaaaatccaagtaataggtaggcttccagttagctttaaatgttttttttttccagctcaaaaaattggattgtagttgatactacatataatacattctaattccctcactgtattctttgtttagtttcatttatttggtttaaaataattttttatcccatatctgaaatgtaatatatttttatccaacaaccagcatgtacatatacttaattatgtggcacattttctaatagatcagtccatcaatctactcattttaaagaaaaaaaaattttaaagtcacttttagagcccttaatgtgtagttgggggttaagctttgtggatgtagcctttatatttagtataattgaggtctaaaataataatcttctattatctcaacagagcaaattattgaaaaagatgaaggtcctttttatacccatctaggagcaggtcctaatgtggcagctattagagaaatcatggaagaaaggtaattaacgcaaaggcacagggcagattaacgtttatccttttgtatatgtcagaatttttccagccttcacacacaaagcagtaaacaattgtaaattgagtaattattagtaggcttagctattctagggttgccaacactacacactgtgctattcaccagagagtcacaatatttgacaggactaatagtctgctagctggcacaggctgcccactttgcgatggatgccagaaaacccaggcatgaacaggaatcggccagccaggctgccagccacaaggtactggcacaggctccaacgagaggtcccactctggctttcccacctgataataaagtgtcaaagcagaaagactggtaaagtgtggtataagaaaagaaccactgaattaaattcacctagtgttgcaaatgagtacttatctctaagttttcttttaccataaaaagagagcaagtgtgatatgttgaatagaaagagaaacatactatttacagctgcctttttttttttttttcgctatcaatcacaggtatacaagtacttgcctttactcctgcatgtagaagactcttatgagcgagataatgcagagaaggcctttcatataaatttatacagctctgagctgttcttcttctagggtgccttttcattaagaggtaggcagtattattattaaagtacttaggatacattggggcagctaggacatattcagtatcattcttgctccatttccaaattattcatttctaaattagcatgtagaagttcactaaataatcatctagtggcctggcagaaatagtgaatttccctaagtgccttttttttgttgtttttttgttttgttttttaaacaagcagtaggtggtgctttggtcataagggaagatatagtctatttctaggactattccatattttccatgtggctggatactaactatttgccagcctccttttctaaattgtgagacattcttggaggaacagttctaactaaaatctattatgactccccaagttttaaaatagctaaatttagtaagggaaaaaatagtttatgttttagaagactgaacttagcaaactaacctgaattttgtgctttgtgaaattttatatcgaaatgagctttcccattttcacccacatgtaatttacaaaatagttcattacaattatctgtacattttgatattgaggaaaaacaaggcttaaaaaccattatccagtttgcttggcgtagacctgtttaaaaaataataaaccgttcatttctcaggatgtggtcatagaataaagttatgctcaaatgttcaaatattt

SEQ ID NO: 194121 - DNA, 9215 bp, Artificial Sequence
  derived and/or modified sequence
gcggccgccccgagacgccggccccgctgagtgatgagaacagacgtcaaactgccttatgaatattgatgcggaggctaggctgctttcgtagagaagcagaaggaagcaagatggctgccctttaggatttgttagaaaggagacccgactgcaactgctggattgctgcaaggctgagggacgagaacgaggctggcaaacattcagcagcacaccctctcaagattgtttacttgcctttgctcctgttgagttacaacgcttggaagcaggagatgggctcagcagcagccaataggacatgatccaggaagagcagtaagggactgagctgctgaattcaactagagggcagccttgtggatggccccgaagcaagcctgatggaacaggatagaaccaaccatgttgagggcaacagactaagtccattcctgataccatcacctcccatttgccagacagaacctctggctacaaagctccagaatggaagcccactgcctgagagagctcatccagaagtaaatggagacaccaagtggcactctttcaaaagttattatggaataccctgtatgaagggaagccagaatagtcgtgtgagtcctgactttacacaagaaagtagagggtattccaagtgtttgcaaaatggaggaataaaacgcacagttagtgaaccttctctctctgggctccttcagatcaagaaattgaaacaagaccaaaaggctaatggagaaagacgtaacttcggggtaagccaagaaagaaatccaggtgaaagcagtcaaccaaatgtctccgatttgagtgataagaaagaatctgtgagttctgtagcccaagaaaatgcagttaaagatttcaccagtttttcaacacataactgcagtgggcctgaaaatccagagcttcagattctgaatgagcaggaggggaaaagtgctaattaccatgacaagaacattgtattacttaaaaacaaggcagtgctaatgcctaatggtgctacagtttctgcctcttccgtggaacacacacatggtgaactcctggaaaaaacactgtctcaatattatccagattgtgtttccattgcggtgcagaaaaccacatctcacataaatgccattaacagtcaggctactaatgagttgtcctgtgagatcactcacccatcgcatacctcagggcagatcaattccgcacagacctctaactctgagctgcctccaaagccagctgcagtggtgagtgaggcctgtgatgctgatgatgctgataatgccagtaaactagctgcaatgctaaatacctgttcctttcagaaaccagaacaactacaacaacaaaaatcagtttttgagatatgcccatctcctgcagaaaataacatccagggaaccacaaagctagcgtctggtgaagaattctgttcaggttccagcagcaatttgcaagctcctggtggcagctctgaacggtatttaaaacaaaatgaaatgaatggtgcttacttcaagcaaagctcagtgttcactaaggattccttttctgccactaccacaccaccaccaccatcacaattgcttctttctccccctcctcctcttccacaggttcctcagcttccttcagaaggaaaaagcactctgaatggtggagttttagaagaacaccaccactaccccaaccaaagtaacacaacacttttaagggaagtgaaaatagagggtaaacctgaggcaccaccttcccagagtcctaatccatctacacatgtatgcagcccttctccgatgctttctgaaaggcctcagaataattgtgtgaacaggaatgacatacagactgcagggacaatgactgttccattgtgttctgagaaaacaagaccaatgtcagaacacctcaagcataacccaccaatttttggtagcagtggagagctacaggacaactgccagcagttgatgagaaacaaagagcaagagattctgaagggtcgagacaaggagcaaacacgagatcttgtgcccccaacacagcactatctgaaaccaggatggattgaattgaaggcccctcgttttcaccaagcggaatcccatctaaaacgtaatgaggcatcactgccatcaattcttcagtatcaacccaatctctccaatcaaatgacctccaaacaatacactggaaattccaacatgcctggggggctcccaaggcaagcttacacccagaaaacaacacagctggagcacaagtcacaaatgtaccaagttgaaatgaatcaagggcagtcccaaggtacagtggaccaacatctccagttccaaaaaccctcacaccaggtgcacttctccaaaacagaccatttaccaaaagctcatgtgcagtcactgtgtggcactagatttcattttcaacaaagagcagattcccaaactgaaaaacttatgtccccagtgttgaaacagcacttgaatcaacaggcttcagagactgagccattttcaaactcacaccttttgcaacataagcctcataaacaggcagcacaaacacaaccatcccagagttcacatctccctcaaaaccagcaacagcagcaaaaattacaaataaagaataaagaggaaatactccagacttttcctcacccccaaagcaacaatgatcagcaaagagaaggatcattctttggccagactaaagtggaagaatgttttcatggtgaaaatcagtattcaaaatcaagcgagttcgagactcataatgtccaaatgggactggaggaagtacagaatataaatcgtagaaattccccttatagtcagaccatgaaatcaagtgcatgcaaaatacaggtttcttgttcaaacaatacacacctagtttcagagaataaagaacagactacacatcctgaactttttgcaggaaacaagacccaaaacttgcatcacatgcaatattttccaaataatgtgatcccaaagcaagatcttcttcacaggtgctttcaagaacaggagcagaagtcacaacaagcttcagttctacagggatataaaaatagaaaccaagatatgtctggtcaacaagctgcgcaacttgctcagcaaaggtacttgatacataaccatgcaaatgtttttcctgtgcctgaccagggaggaagtcacactcagacccctccccagaaggacactcaaaagcatgctgctctaaggtggcatctcttacagaagcaagaacagcagcaaacacagcaaccccaaactgagtcttgccatagtcagatgcacaggccaattaaggtggaacctggatgcaagccacatgcctgtatgcacacagcaccaccagaaaacaaaacatggaaaaaggtaactaagcaagagaatccacctgcaagctgtgataatgtgcagcaaaagagcatcattgagaccatggagcagcatctgaagcagtttcacgccaagtcgttatttgaccataaggctcttactctcaaatcacagaagcaagtaaaagttgaaatgtcagggccagtcacagttttgactagacaaaccactgctgcagaacttgatagccacaccccagctttagagcagcaaacaacttcttcagaaaagacaccaaccaaaagaacagctgcttctgttctcaataattttatagagtcaccttccaaattactagatactcctataaaaaatttattggatacacctgtcaagactcaatatgatttcccatcttgcagatgtgtaggtaagtgccagaaatgtactgagacacatggcgtttatccagaattagcaaatttatcttcagatatgggattttccttctttttttaaatcttgagtctggcagcaatttgtaaaggctcataaaaatctgaagcttacattttttgtcaagttaccgatgcttgtgtcttgtgaaagagaacttcacttacatgcagtttttccaaaagaattaaataatcgtgcatgtttatttttccctctcttcagatcctgtaaaatttgaatgtatctgttttagatcaattcgcctatttagctctttgtatattatctcctggagagacagctaggcagcaaaaaaacaatctattaaaatgagaaaataacgaccataggcagtctaatgtacgaactttaaatattttttaattcaaggtaaaatatattagtttcacaagatttctggctaatagggaaattattatcttcagtcttcatgagttgggggaaatgataatgctgacactcttagtgctcctaaagtttccttttctccatttatacatttggaatgttgtgatttatattcattttgattcccttttctctaaaatttcatctttttgattaaaaaatatgatacaggcatacctcagagatattgtgggtttggctccataccacaataaaatgaatattacaataaagcaagttgtaaggactttttggtttctcactgtatgtaaaagttatttatatactatactgtaacatactaagtgtgcaatagcattgtgtctaaaaaatatatactttaaaaataatttattgttaaaaaaatgccaacaattatctgggcctttagtgagtgctaatctttttgctggtggagggtcgtgcttcagtattgatcgctgtggactgatcatggtggtagttgctgaaggttgctgggatggctgtgtgtgtggcaatttcttaaaataagacaacagtgaagtgctgtatcaattgatttttccattcacaaaagatttctctgtagcatgcaatgctgtttgatagcatttaacccacagcagaatttctttgaaaattggactcagtcctctcaaactgtgctgctgctttatcaactaagtttttgtaattttctgaatcctttgttgtcatttcagcagtttacagcatcttcattggaagtatattccatctcaaacattctttgttcatccataagaagcaacttcttatcaagttttttcatgacattgcagtaactcagccccatcttcaggctctacttctaattctggttctcttgctacatctccctcatctgcagtgacctctccacggaagtcttgaactcctcaaagtaatccatgagggttggaatcaacttctaaactcctgttaatgttgatatattgaccccctcccatgaattatgaatgttcttaataacttctaaatggtgatacctttccagaaggctttcaatgtactttgcccggatccatcagaagactatcttggcagctgtagactaacaatatatttcttaaatgataagacttgaaagtcaaaagtactccttaatccataggctgcagaatcaatgttgtattaacaggcacgaaaacagcattaatcttgtgcatctccatcggagctcttgggtgactaggtgccttgagcagtaatattttgaaaggaggttttggttttgttttttgttttttttttttgttttttagcagtaagtctcaacactgggcttaaaatattcagtaaactatgttgtaaaaagatgtgttatcatccagactttgttgttccattactctacacaagcagggtacacttagcataattcttaagggccttggaattttcagaatggtaaatgagtatgggcttcaacttaaaatcatcaactgcattagcctgtaacaagagagtcagcctgtcctttgaagcaaggcattgacttctatctatgaaagtcttagatggcaccttgtttcaatagtaggctgtttagtacagccaccttcatcagtgatcttagctagatcttctgcataacttgctgcagcttctacatcagcacttgctgcctcaccttgtccttttatgttatagagacagctgcgcttcttaaactttataaaccaacttctgctagcttccaacttctcttctgcagcttcctcattctcttcatagaactgaagggagtcaaggccttgctctggattaagctttggcttaaggaatgttgtggctgacgtgatcttctatccagaccactaaagcgctctccatatcagcaataaggccgttttgctttcttacctttcatgtgttcactggagtaatttccttcaagaatttttcctttacattcacaacttggctaactggcatgcaaggcctagctttcagcctgtcttggcttttgacatgccttcctcacttagctcgtcatatctagcttttgatttaaagtggcaggcatacaactcttcctttcacttgaacacttagaggccactgtagggttattaattggcctaatttcaatattgttgtgttttagggaatagagaggcccagggagagggagagagcccaaacggctggttgatagagcaggcagaatgcacacaacatttatcagattatgtttgcaccatttaccagattatgggtacggtttgtggcaccccccaaaaattagaatagtaacatcaaagatcactgatcacagatcgccataacataaataataataaactttaaaatactgtgagaattaccaaaatgtgatacagagacatgaagtgagcacatgctgttgaaaaaaatgacactgatagacatacttaacacgtgggattgccacaaaccttcagtttgtaaaagtcacagtaactgtgactcacaaaagaacaaagcacaataaaacgaggtatgcctgtatttttaaaaaaagctttttgttaaaattcaggatatgtaataggtctgtaggaatagtgaaatatttttgctgatggatgtagatatatacgtggatagagatgaagatcttaattatagctatgcagcatagatttagtcaaagacatttgaaaagacaaatgttaaattagtgtggctaatgacctacccgtgccatgttttccctcttgcaatgagataccccacactgtgtagaaggatggagggaggactcctactgtccctctttgcgtgtggttattaagttgcctcactgggctaaaacaccacacatctcatagataatatttggtaagttgtaatcgtcttcactcttctcttatcacccacccctatcttcccacttttccatctttgttggtttgcaacagccccttctttttgcctgactctccaggattttctctcatcataaattgttctaaagtacatactaatatgggtctggattgactattcttatttgcaaaacagcaattaaatgttatagggaagtaggaagaaaaaggggtatccttgacaataaaccaagcaatattctgggggtgggatagagcaggaaattttatttttaatcttttaaaatccaagtaataggtaggcttccagttagctttaaatgttttttttttccagctcaaaaaattggattgtagttgatactacatataatacattctaattccctcactgtattctttgtttagtttcatttatttggtttaaaataattttttatcccatatctgaaatgtaatatatttttatccaacaaccagcatgtacatatacttaattatgtggcacattttctaatagatcagtccatcaatctactcattttaaagaaaaaaaaattttaaagtcacttttagagcccttaatgtgtagttgggggttaagctttgtggatgtagcctttatatttagtataattgaggtctaaaataataatcttctattatctcaacagagcaaattattgaaaaagatgaaggtcctttttatacccatctaggagcaggtcctaatgtggcagctattagagaaatcatggaagaaaggtaattaacgcaaaggcacagggcagattaacgtttatccttttgtatatgtcagaatttttccagccttcacacacaaagcagtaaacaattgtaaattgagtaattattagtaggcttagctattctagggttgccaacactacacactgtgctattcaccagagagtcacaatatttgacaggactaatagtctgctagctggcacaggctgcccactttgcgatggatgccagaaaacccaggcatgaacaggaatcggccagccaggctgccagccacaaggtactggcacaggctccaacgagaggtcccactctggctttcccacctgataataaagtgtcaaagcagaaagactggtaaagtgtggtataagaaaagaaccactgaattaaattcacctagtgttgcaaatgagtacttatctctaagttttcttttaccataaaaagagagcaagtgtgatatgttgaatagaaagagaaacatactatttacagctgcctttttttttttttttcgctatcaatcacaggtatacaagtacttgcctttactcctgcatgtagaagactcttatgagcgagataatgcagagaaggcctttcatataaatttatacagctctgagctgttcttcttctagggtgccttttcattaagaggtaggcagtattattattaaagtacttaggatacattggggcagctaggacatattcagtatcattcttgctccatttccaaattattcatttctaaattagcatgtagaagttcactaaataatcatctagtggcctggcagaaatagtgaatttccctaagtgccttttttttgttgtttttttgttttgttttttaaacaagcagtaggtggtgctttggtcataagggaagatatagtctatttctaggactattccatattttccatgtggctggatactaactatttgccagcctccttttctaaattgtgagacattcttggaggaacagttctaactaaaatctattatgactccccaagttttaaaatagctaaatttagtaagggaaaaaatagtttatgttttagaagactgaacttagcaaactaacctgaattttgtgctttgtgaaattttatatcgaaatgagctttcccattttcacccacatgtaatttacaaaatagttcattacaattatctgtacattttgatattgaggaaaaacaaggcttaaaaaccattatccagtttgcttggcgtagacctgtttaaaaaataataaaccgttcatttctcaggatgtggtcatagaataaagttatgctcaaatgttcaaatattt

SEQ ID NO: 194122 - DNA, 865 bp, Artificial Sequence
  derived and/or modified sequence
atcagctgtagggtctgggtctgggtttgtgtctgcctcctcctaccttcttatccccctttagggggctgtacgaagtgaatgtcacagggagtggaattggagtacactgagtgggttttttttttccttaagtccgcgcgttttgttagcggcgctgagtgaaagaggaaagaatagtttctctggttccccaaacaagaccagaactcacttttctcaaggtacataagtcagcgctgggctgagccttccagcctggggaatgtatgtaagagaatttatggacaaatctgtgtcccggctttgtgcttctcccgaatcagcttcgtttggttccttggctggcaaacattcagcagcacaccctctcaagattgtttacttgcctttgctcctgttgagttacaacgcttggaagcaggagatgggctcagcagcagccaataggacatgatccaggaagagcagtaagggactgagctgctgaattcaactagagggcagccttgtggatggccccgaagcaagcctgatggaacaggatagaaccaaccatgttgagggcaacagactaagtccattcctgataccatcacctcccatttgccagacagaacctctggctacaaagctccagaatggaagcccactgcctgagagagctcatccagaagtaaatggagacaccaagtggcactctttcaaaagttattatggaataccctgtatgaagggaagccagaatagtcgtgtgagtcctgactttacacaagaaagtagagggtattccaagtgtttgcaaaatggaggaataaaacgcacagttagtgaaccttctctctctgggctccttcagatcaag

SEQ ID NO: 194123 - protein, 1712 aa, Artificial Sequence
  derived and/or modified sequence
MERNVLTTFSQEMSQLILNEMPKAEYSSLFNDFVESEFFLIDGDSLLITCICEISFKPGQNLHFFYLVERYLVDLISKGGQFTIVFFKDAEYAYFNFPELLSLRTALILHLQKNTTIDVRTTFSRCLSKEWGSFLEESYPYFLIVADEGLNDLQTQLFNFLIIHSWARKVNVVLSSGQESDVLCLYAYLLPSMYRHQIFSWKNKQNIKDAYTTLLNQLERFKLSALAPLFGSLKWNNITEEAHKTVSLLTQVWPEGSDIRRVFCVTSCSLSLRMYHRFLGNREPSSGQETEIQQVNSNCLTLQEMEDLCKLHCLTVVFLLHLPLSQRACARVITSHWAEDMKPLLQMKKWCEYFILRNIHTFEFWNLNLIHLSDLNDELLLKNIAFYYENENVKGLHLNLGDTIMKDYEYLWNTVSKLVRDFEVGQPFPLRTTKVCFLEKKPSPIKDSSNEMVPNLGFIPTSSFVVDKFAGDILKDLPFLKSDDPIVTSLVKQKEFDELVHWHSHKPLSDDYDRSRCQFDEKSRDPRVLRSVQKYHVFQRFYGNSLETVSSKIIVTQTIKSKKDFSGPKSKKAHETKAEIIARENKKRLFAREEQKEEQKWNALSFSIEEQLKENLHSGIKSLEDFLKSCKSSCVKLQVEMVGLTACLKAWKEHCRSEEGKTTKDLSIAVQVMKRIHSLMEKYSELLQEDDRQLIARCLKYLGFDELASSLHPAQDAENDVKVKKRNKYSVGIGPARFQLQYMGHYLIRDERKDPDPRVQDFIPDTWQRELLDVVDKNESAVIVAPTSSGKTYASYYCMEKVLKESDDGVVVYVAPTKALVNQVAATVQNRFTKNLPSGEVLCGVFTREYRHDALNCQVLITVPACFEILLLAPHRQNWVKKIRYVIFDEVHCLGGEIGAEIWEHLLVMIRCPFLALSATISNPEHLTEWLQSVKWYWKQEDKIIENNTASKRHVGRQAGFPKDYLQVKQSYKVRLVLYGERYNDLEKHVCSIKHGDIHFDHFHPCAALTTDHIERYGFPPDLTLSPRESIQLYDAMFQIWKSWPRAQELCPENFIHFNNKLVIKKMDARKYEESLKAELTSWIKNGNVEQARMVLQNLSPEADLSPENMITMFPLLVEKLRKMEKLPALFFLFKLGAVENAAESVSTFLKKKQETKRPPKADKEAHVMANKLRKVKKSIEKQKIIDEKSQKKTRNVDQSLIHEAEHDNLVKCLEKNLEIPQDCTYADQKAVDTETLQKVFGRVKFERKGEELKALAERGIGYHHSAMSFKEKQLVEILFRKGYLRVVTATGTLALGVNMPCKSVVFAQNSVYLDALNYRQMSGRAGRRGQDLMGDVYFFDIPFPKIGKLIKSNVPELRGHFPLSITLVLRLMLLASKGDDPEDAKAKVLSVLKHSLLSFKQPRVMDMLKLYFLFSLQFLVKEGYLDQEGNPMGFAGLVSHLHYHEPSNLVFVSFLVNGLFHDLCQPTRKGSKHFSQDVMEKLVLVLAHLFGRRYFPPKFQDAHFEFYQSKVFLDDLPEDFSDALDEYNMKIMEDFTTFLRIVSKLADMNQEYQLPLSKIKFTGKECEDSQLVSHLMSCKEGRVAISPFVCLSGNFDDDLLRLETPNHVTLGTIGVNRSQAPVLLSQKFDNRGRKMSLNAYALDFYKHGSLIGLVQDNRMNEGDAYYLLKDFALTIKSISVSLRELCENEDDNVVLAFEQLSTTFWEKLNKV

SEQ ID NO: 194124 - protein, 120 aa, Artificial Sequence
  derived and/or modified sequence
MERNVLTTFSQEMSQLILNEMPKAEYSSLFNDFVESEFFLIDGDSLLITCICEISFKPGQNLHFFYLVERYLVDLISKGGQFTIVFFKDAEYAYFNFPELLSLRTALILHLQKNTTIDVR

SEQ ID NO: 194125 - protein, 294 aa, Artificial Sequence
  derived and/or modified sequence
MIRCPFLALSATISNPEHLTEWLQSVKWYWKQEDKIIENNTASKRHVGRQAGFPKDYLQVKQSYKVRLVLYGERYNDLEKHVCSIKHGDIHFDHFHPCAALTTDHIERYGFPPDLTLSPRESIQLYDAMFQIWKSWPRAQELCPENFIHFNNKLVIKKMDARKYEESLKAELTSWIKNGNVEQARMVLQNLSPEADLSPENMITMFPLLVEKLRKMEKLPALFFLFKLGAVENAAESVSTFLKKKQETKRPPKADKEAHVMANKLRKVKKSIEKQKIIDEKSQKNQKCGSKPNT

SEQ ID NO: 194126 - DNA, 5139 bp, Artificial Sequence
  derived and/or modified sequence
atggagagaaatgttcttacaacattctcacaagagatgtctcagctaattcttaatgagatgcccaaggctgaatatagctctctgttcaacgacttcgtcgaaagtgagtttttcttgatagacggggattccctcctcattacttgtatctgtgaaatctcttttaagccaggacagaacttgcatttcttctatttggtcgaacgctatttagtagacctcattagcaagggggggcagttcaccattgtctttttcaaggacgccgaatacgcgtacttcaatttccctgagttgctgtcattaaggacagcactcattcttcacctgcagaaaaacacgacgatagatgttagaacaacctttagtcgttgcctcagcaaggagtgggggtctttccttgaagagtcttacccttacttcctgatcgtcgccgacgaagggctgaacgatttgcagacacagcttttcaatttcttgataatccacagttgggctcgtaaagtcaatgtggtcttaagtagcggccaagaatcggatgttctctgcttgtacgcctatctcctgccgagcatgtatcggcaccagatcttctcctggaagaataagcagaacattaaggacgcatatacaacgctcctcaatcagctggagagatttaaactaagcgcactggcgcctctgtttgggagcctgaaatggaataatataacggaagaggcccataaaaccgtaagccttctgacccaggtctggcccgaggggagtgatatccgtcgggttttttgcgtcaccagctgtagtctgagcctccggatgtatcatcgatttctggggaatagagagccctcctcagggcaggaaacagagattcaacaggtcaattcaaattgtctaactctgcaggagatggaggatctgtgcaagttacactgtctaactgtagtattcctgctccacctcccactcagtcagcgagcctgtgcgcgggtgatcacatcacactgggccgaagatatgaagccactgttgcaaatgaagaagtggtgcgaatatttcatactgagaaatatccatacttttgaattctggaatcttaatttgatccacctctccgatctgaatgacgagcttttattgaagaatatcgcgttctattacgaaaacgaaaacgtgaagggtctgcacttgaaccttggggatacaatcatgaaggactacgagtacctgtggaacaccgttagtaaattggtgagagattttgaagttggacagcccttcccattgagaactactaaggtgtgtttcttagagaagaagccaagtcctatcaaggactcctccaacgaaatggtgccaaacctcgggttcatcccaaccagctcattcgtggtggataagtttgcaggggatatactgaaagacctgccttttttgaagagcgacgatcccatcgtaacgtccctggtgaagcagaaagagttcgacgagctggtccactggcacagccacaagcccctgtccgatgactacgaccgtagccggtgccagttcgatgaaaagtcgcgggacccacgcgtgctgagatccgtgcagaaataccatgtctttcagcgcttctatggtaatagcctggaaaccgtcagctccaaaatcattgttactcagacaatcaaaagcaagaaagatttctccgggcctaagagcaaaaaggctcacgagacaaaagctgagattatcgcacgggagaacaaaaagaggctgtttgcccgggaggagcaaaaggaagaacaaaaatggaacgcactgtctttcagcattgaggaacaattgaaggagaatctccactctgggattaaatccctggaagatttccttaaatcatgcaaaagcagctgcgtgaagctccaggtagaaatggtcggacttacagcatgcctgaaggcctggaaagaacactgtcgctcagaggaaggtaagaccactaaggacctatccattgcagtccaggtgatgaaacggatccactctttgatggagaagtatagcgaactactccaagaggacgacaggcagctcatagccagatgcctgaagtatttgggttttgacgagctagcttcaagccttcatcctgcccaggatgctgagaacgacgtgaaggtaaagaaacgaaacaagtacagcgttggtattggtcccgcaagattccaactccagtacatggggcattatctgatcagagatgaacggaaggatcctgacccacgagttcaagacttcatcccagatacgtggcagagagaactattagacgtcgttgacaaaaacgagtccgctgtaatcgtggccccaacgagcagcggtaagacgtatgcaagctattattgcatggagaaggtactgaaggaatccgacgatggggtggtggtttacgttgccccgactaaggctctagtgaatcaggttgccgcaacagtgcaaaatcggtttaccaagaatctgccaagcggcgaagtgctgtgcggcgtctttacgcgcgaatatcggcacgacgccctgaattgtcaggtgcttattaccgtgcccgcctgtttcgagattctgctgcttgccccccatagacaaaattgggtgaagaagattcgttacgttatttttgatgaggttcattgtcttggaggcgaaattggagctgagatctgggaacatctcctggtcatgatcaggtgtccttttctagctctctcggcaacaatctctaatcccgagcatctcacggaatggttacagtcagttaagtggtactggaagcaggaggataaaattatcgagaataatacggcttccaaacgacacgtcggaaggcaggctggcttccctaaggactatcttcaggtcaagcagtcctacaaagtacgcctggtgctgtacggggaacgctataacgacctggaaaagcacgtttgcagtattaaacatggagacattcacttcgaccatttccatccatgtgcagcactcactacagatcatattgagcgatacggatttccacccgatctgaccctcagcccaagggaaagcattcaattatacgatgccatgttccagatctggaagagctggccgcgagcccaggaattgtgtccggagaactttatccactttaacaacaaactggtcataaagaaaatggatgcacggaagtatgaggaatccctgaaggcggagttgacatcgtggattaaaaatggcaatgtggagcaggcacggatggtgctacagaacctctctcccgaagccgatctttctcccgagaacatgatcaccatgtttcctttgctggtcgagaagctccgtaagatggagaagctcccggctctgttcttcctcttcaagttgggagctgtggagaatgccgcagaaagcgttagcacctttttgaagaaaaagcaggagacaaaaaggcctccaaaagccgacaaggaggcccatgttatggcaaacaagctgagaaaggtgaagaaaagcattgagaagcagaaaattattgatgaaaaaagccaaaaaaagacaaggaacgtcgaccagagcctgattcacgaggctgagcatgacaacttggtgaaatgcctcgagaagaacctcgagatcccgcaggactgcacgtatgccgatcagaaagctgtggacacagaaacactccagaaagtctttggccgggtgaagttcgagcgaaagggtgaggagcttaaggctcttgcagagaggggcataggttaccaccactccgcaatgtcttttaaagagaagcagttggttgaaatcctgttcagaaaggggtacctgcgcgtggtaacggccactgggactctggcactcggagtgaacatgccatgcaagagcgttgttttcgcacaaaactcagtatatctcgacgctttgaactaccggcagatgtctggccgggctggccgaagaggtcaggatctgatgggcgacgtgtactttttcgacatcccatttccgaaaatcggaaagttgatcaagtcaaatgtgccagaattacgtggccatttcccactcagtatcacgctggtactcagacttatgcttctggcctctaagggggacgatcccgaagatgctaaggcaaaggtgctttccgtgcttaagcactccctgttgtcctttaagcaaccaagggtaatggacatgcttaaactgtatttcttattctccctgcagtttcttgtgaaggagggctacttagatcaggagggcaatcctatgggctttgctggactcgtctctcatctgcattaccatgagcctagcaacctggtgtttgtgtccttcctcgtgaacggcctgttccacgacctgtgtcagcccacacgcaaaggatcaaagcacttctcccaggacgtaatggaaaagcttgtgttggtcttagcacatctattcggccgcagatacttccctccgaagtttcaggatgctcatttcgaattttaccagagtaaggtctttctggatgacctacccgaagacttttctgatgccctcgatgagtacaatatgaagattatggaagatttcacgacctttcttcggatagtaagcaagctggcagatatgaatcaagagtaccagctgccactctcgaaaatcaagtttactgggaaagaatgcgaggattctcagctagtgtcacacctcatgagctgtaaggaaggaagggttgccatttcgccgttcgtgtgtctcagcggcaattttgatgacgacctgctgcggttggagactccgaatcatgttaccctcggaaccatcggcgtgaaccgctcccaggctcctgtgctgctatctcagaaatttgataaccgcgggcggaaaatgtctctgaacgcctatgctcttgatttttataagcatgggtcccttatcggacttgttcaggacaatcgcatgaatgagggtgacgcctactatctgttaaaagactttgcgcttacgattaaaagcatcagcgtctcattaagggagttatgcgagaacgaagatgacaacgtcgtcttggcattcgaacagctgagcactaccttctgggagaagctaaataaggtgtag

SEQ ID NO: 194127 - DNA, 5139 bp, Artificial Sequence
  derived and/or modified sequence
atggagagaaatgtgctgaccaccttcagccaggagatgagccagctgatcctgaatgagatgcccaaggccgagtacagcagcctcttcaatgactttgtggagagcgagttcttcctgattgatggagacagcctgctgatcacctgcatctgtgagatctccttcaagccaggccagaacctgcacttcttctacctggtggagcgctacctggtggacctgatcagcaagggcggccagttcaccatcgtgttcttcaaggatgctgaatatgcctacttcaacttccctgagctgctgagcctgaggacagccctgatcctgcacctgcagaagaacaccaccattgatgtgaggaccaccttcagccgctgcctgagcaaggagtggggcagcttcctggaggagagctacccctacttcctgattgtggctgatgagggcctgaatgacctgcagacccagctgttcaacttcctgatcatccacagctgggccaggaaggtgaatgtggtgctgagcagcggccaggagagtgatgtgctgtgcctgtatgcctacctgctgcccagcatgtaccgccaccagatcttctcctggaagaacaagcagaacatcaaggatgcctacaccaccctgctgaaccagctggagcgcttcaagctgagcgccctggcccccctgtttggcagcctgaagtggaacaacatcacagaggaggcccacaagacagtgtccctgctgacccaggtgtggccagagggcagtgacatccggcgggtcttctgtgtgaccagctgcagcctgagcctgaggatgtaccaccgcttcctgggcaaccgggagcccagcagcggccaggagacagagatccagcaggtgaacagcaactgcctgaccctgcaggagatggaggacctgtgcaagctgcactgcctgactgtggtgttcctgctgcacctgcccctgagccagagggcctgtgcccgggtcatcaccagccactgggccgaggacatgaagcccctgctgcagatgaagaagtggtgtgagtacttcatcctgaggaacatccacacctttgagttctggaacctgaacctgatccacctgagtgacctgaatgatgagctgctgctgaagaacatcgccttctactatgaaaatgaaaatgtgaagggcctgcacctgaacctgggggacaccatcatgaaggactatgagtacctgtggaacacagtgtccaagctggtgcgggactttgaggtgggccagcccttccccctgcggaccaccaaggtgtgcttcctggagaagaagcccagccccatcaaggacagcagcaatgagatggtgcccaacctgggcttcatccccaccagcagctttgtggtggacaagtttgctggggacatcctgaaggacctgcccttcctgaagagtgatgaccccatcgtgaccagcctggtgaagcagaaggagtttgatgagctggtgcactggcacagccacaagcccctgagtgatgattatgacaggagccgctgccagtttgatgagaagagccgggacccccgggtgctgcggtctgtgcagaagtaccacgtgttccagcgcttctacggcaacagcctggagaccgtgagcagcaagatcatcgtgacccagaccatcaagagcaagaaggacttcagcggccccaagagcaagaaggcccacgagaccaaggccgagatcatcgcccgggagaacaagaagaggctgtttgcccgggaggagcagaaggaggagcagaagtggaatgccctgtccttcagcattgaggagcagctgaaggagaacctgcacagcggcatcaagagcctggaggacttcctgaagagctgcaagagcagctgtgtgaagctgcaggtggagatggtgggcctgacagcctgcctgaaggcctggaaggagcactgccgctctgaggagggcaagaccaccaaggacctgagcattgctgtgcaggtgatgaagaggatccacagcctgatggagaagtacagcgagctgctgcaggaggatgaccggcagctgattgcccgctgcctgaagtacctgggctttgatgagctggccagcagcctgcacccagcccaggatgctgaaaatgatgtgaaggtgaagaagaggaacaagtacagcgtgggcatcggccctgcccgcttccagctgcagtacatgggccactacctgatcagagatgagaggaaggaccctgacccccgggtgcaggacttcatcccagacacctggcagcgggagctgctggatgtggtggacaagaatgaatctgctgtgattgtggcccccaccagcagcggcaagacctacgccagctactactgcatggagaaggtgctgaaggagagtgatgatggagtggtggtgtatgtggcccccaccaaggccctggtgaaccaggtggccgccaccgtgcagaaccgcttcaccaagaacctgcccagcggggaggtgctgtgtggggtcttcacccgggagtacagacatgatgccctgaactgccaggtgctgatcaccgtgcctgcctgctttgagatcctgctgctggccccccaccggcagaactgggtgaagaagatccgctacgtgatctttgatgaggtgcactgcctgggcggggagatcggggctgagatctgggagcacctgctggtgatgatccgctgccccttcctggccctgagcgccaccatcagcaaccctgagcacctgacagagtggctgcagagcgtgaagtggtactggaagcaggaggacaagatcatcgagaacaacacagccagcaagagacatgtgggccggcaggccggcttccccaaggactacctgcaggtgaagcagagctacaaggtgcggctggtgctgtatggagagcgctacaatgacctggagaagcacgtgtgcagcatcaagcatggagacatccactttgaccacttccacccctgtgccgccctgaccacagaccacatcgagagatatggcttccccccagacctgaccctgagcccccgggagagcatccagctgtatgatgccatgttccagatctggaagtcctggccccgggcccaggagctgtgcccagagaacttcatccacttcaacaacaagctggtgatcaagaagatggatgccaggaaatatgaggagagcctgaaggccgagctgacctcctggatcaagaatggaaatgtggagcaggccaggatggtgctgcagaacctgagccctgaggccgacctgagccctgagaacatgatcaccatgttccccctgctggtggagaagctgaggaagatggagaagctgcctgccctcttcttcctgttcaagctgggcgctgtggagaatgctgctgagagcgtgtccaccttcctgaagaagaagcaggagaccaagaggcctcccaaggctgacaaggaggcccacgtgatggccaacaagctgaggaaggtgaagaagagcattgagaagcagaagatcattgatgagaagagccagaagaagaccagaaatgtggaccagagcctcatccatgaagctgagcatgacaacctggtgaagtgcctggagaagaacctggagatcccccaggactgcacctatgctgaccagaaggctgtggacacagagaccctgcagaaggtgtttggccgggtgaagtttgagaggaaaggagaggagctgaaggccctggccgagcggggcatcggctaccaccacagcgccatgtccttcaaggagaagcagctggtggagatcctcttcaggaagggctacctgcgggtggtgacagccaccggcaccctggccctgggcgtgaacatgccctgcaagtctgtggtgtttgcccagaacagcgtgtacctggatgccctgaactaccggcagatgagcggccgggccggccggcggggccaggacctgatgggagatgtgtacttctttgacatccccttccccaagattggcaagctgatcaagagcaatgtgcctgagctgcggggccacttccccctgagcatcaccctggtgctgcggctgatgctgctggccagcaaaggagatgatcctgaagatgccaaggccaaggtgctgtctgtgctgaagcacagcctgctgtccttcaagcagccccgggtgatggacatgctgaagctgtacttcctgttcagcctgcagttcctggtgaaggagggctacctggaccaggagggcaaccccatgggctttgctggcctggtgagccacctgcactaccacgagcccagcaacctggtgtttgtgtccttcctggtgaatggcctcttccatgacctgtgccagcccaccaggaagggcagcaagcacttcagccaggatgtgatggagaagctggtgctggtgctggcccacctgtttggaagacgctacttcccccccaagttccaggatgcccactttgagttctaccagagcaaggtgttcctggatgacctgcctgaggacttcagtgatgccctggatgagtacaacatgaagatcatggaggacttcaccaccttcctgcgcatcgtgtccaagctggccgacatgaaccaggagtaccagctgcccctgagcaagatcaagttcaccgggaaggaatgtgaggacagccagctggtgagccacctgatgagctgcaaggagggccgggtggccatcagcccctttgtgtgcctgagcggcaactttgatgatgacctgctgcggctggagacccccaaccacgtgaccctgggcaccatcggcgtgaacagaagccaggcccctgtgctgctgagccagaagtttgacaacagaggaaggaagatgagcctgaatgcctatgccctggacttctacaagcacggcagcctcatcggcctggtgcaggacaacaggatgaatgaaggagatgcctactacctgctgaaggactttgccctgaccatcaagagcatctctgtgtccctgcgggagctgtgtgaaaatgaagatgacaacgtggtgctggcctttgagcagctgagcaccaccttctgggagaagctgaacaaggtgtag

SEQ ID NO: 194128 - DNA, 5139 bp, Artificial Sequence
  derived and/or modified sequence
atggagcggaacgtgctgaccaccttcagccaggagatgagccagctgatccttaacgaaatgcctaaagctgaatattccagtttatttaatgattttgtcgagagcgagtttttcctgatagatggcgattccctactcattacatgtatctgcgaaatatcatttaaaccgggccagaacctccactttttctacttggtcgagcgttacctggtggaccttatttccaagggtggacagttcacgattgtattttttaaagacgcagagtatgcttatttcaatttccccgagttgctttccctccgaacggcactgatactgcacttacagaagaatacgacgatcgacgtcaggacaactttctccagatgcctgagtaaagaatgggggagctttctagaagagagttatccctacttcctgattgtggcggacgaaggactcaacgacctgcagacccagctttttaatttcctgattattcacagttgggcgcgaaaggttaatgtggtcctctctagtggccaagaatctgacgtactgtgcctttatgcgtatttgctccccagcatgtataggcaccagatctttagttggaaaaacaaacagaatatcaaagatgcctataccacattgctgaaccagctcgaaaggtttaagctgtccgctttggctccgttgttcgggtctttgaaatggaacaacatcacggaggaggcccacaagaccgtgagtctgctcactcaagtgtggcctgaaggatccgacatccgccgtgtgttttgtgtcacttcttgttctcttagtcttagaatgtatcatagatttctcggcaatagagaaccgtccagtgggcaggagactgagattcagcaggtcaatagcaactgcttgacactccaggagatggaggacttatgcaaactccactgcctcacagttgttttcttactccacctccctctttcacaaagagcatgcgcccgcgttatcacctctcattgggcggaggatatgaagcctctgctgcagatgaagaaatggtgcgagtatttcattctgagaaatattcataccttcgaattctggaatcttaacctaattcatctgagtgatcttaatgatgagctgctgcttaagaacatagcattctactacgagaacgaaaacgttaaaggacttcatcttaaccttggggacactataatgaaggactacgaatatctgtggaataccgtgtcaaaattggtacgggactttgaggtcggccaacccttccctttgagaacaactaaagtctgctttttggaaaagaaaccatcacctatcaaagatagcagcaatgaaatggttccgaacctgggcttcatcccgacctcctctttcgtcgtggataaattcgcgggggatattctgaaggatttgcccttcctgaaatcagacgacccgatcgttacaagcctcgtcaagcaaaaagaatttgacgagttggtacattggcatagtcataagcccctatcagatgactacgacagaagccgttgccagttcgacgaaaaatcgcgcgaccctagggtgttgaggtccgtgcaaaagtaccatgtgttccaacggttctatgggaattctctcgagacggtgagctcaaagattatcgtgacacagactattaagagtaagaaggacttcagcgggcctaagagcaaaaaagcccatgagacaaaggccgagattatcgctcgagagaataagaaaagactgttcgctcgtgaggaacagaaggaggaacagaaatggaatgccctctcttttagtatcgaggagcaactgaaagagaacttgcattccgggataaaatcactggaagactttcttaaatcctgcaaaagtagctgtgtcaaacttcaggttgaaatggtcggcctaaccgcctgcctgaaagcatggaaagagcattgtaggtccgaagagggaaaaacaacgaaagacttgtctattgccgttcaggtgatgaagcgtatccacagcctgatggaaaagtattcagagctcctgcaagaagacgaccgccaactcattgcccggtgcctgaagtacttaggcttcgatgagttagcctcgtctctgcatccagcccaggacgccgaaaacgacgttaaggtcaagaagcgcaataagtattctgtcgggatcgggcccgctaggttccaactccagtatatgggtcattacctgatcagggatgaaaggaaggacccagacccccgcgtgcaggactttatccccgacacttggcaacgggaacttcttgacgtcgtcgacaagaacgaaagcgcagtcatcgtagctcccacatcctctgggaagacatacgcctcatactactgcatggaaaaggtgctcaaagaatctgatgacggcgtcgtcgtgtacgtggcccctacgaaagcactggtgaatcaagttgccgccaccgtccagaaccgctttaccaaaaacctcccctctggcgaggtgctatgtggagtgttcactcgggagtatcggcatgatgcattgaactgccaggtgctcattactgtcccagcctgcttcgagatcctgctgctcgctccacacagacaaaattgggtgaaaaagatcaggtatgtgatttttgatgaagtgcattgtctggggggcgagattggggccgagatctgggaacacctgctagtgatgatcagatgccccttcttagccctgtcagcaaccatttcaaatccagaacatctcacagaatggctgcagagcgtcaagtggtattggaaacaagaggacaagataattgaaaataacaccgccagtaagcggcacgtcgggaggcaggcggggttccctaaagattacctgcaggtgaaacagtcctacaaagttaggttggtactgtacggagagagatacaatgacctcgagaagcacgtttgctctatcaagcacggcgacatccatttcgatcactttcatccttgcgccgccttgactaccgaccacatcgagaggtacggttttccccctgatcttacactgtcacctcgcgaatctattcaactttacgacgcgatgttccagatctggaaaagctggcccagggcacaggaactctgccccgagaactttatccactttaacaataagctagtgattaaaaaaatggacgctcggaagtacgaggagtccctgaaagctgaactgacgtcatggatcaagaatggcaacgttgagcaggctagaatggtcctccaaaatctttctcccgaggctgatctgtctcccgagaacatgattactatgttcccactcctggtagagaaacttcgcaagatggaaaagttgcccgcactgtttttcctctttaaactgggcgctgtcgagaatgccgctgagagcgtttccacgtttctgaagaagaagcaagaaacgaaacgccccccgaaggccgacaaagaagcacatgttatggccaacaaactaagaaaagttaaaaagtcaatcgaaaagcagaaaatcatcgacgagaaaagccaaaagaagacacggaacgtagaccaaagcttgatccacgaggctgagcatgacaacctcgtgaagtgtttagagaaaaatcttgagattccacaagattgcacctacgccgatcagaaagctgttgacacagaaacattacaaaaagtgttcggccgggtgaagtttgaacggaagggtgaggagctcaaggccttggctgagaggggaatagggtaccatcattcagcaatgagctttaaggagaagcagctggttgagattttatttcggaaaggataccttcgcgtggtgaccgctacaggcactctggccctgggggtcaacatgccatgcaagtccgtggtgttcgcccagaatagcgtgtatttggacgccctgaattacaggcagatgtctgggcgggctggcagacgggggcaagacctgatgggggacgtctatttttttgatattccgttcccaaagatcggtaagcttattaaaagtaatgtaccagaattacgggggcatttccctctgtccatcaccctggtgctgcggctaatgttgctcgcgtccaagggcgacgaccccgaggatgccaaggccaaagtgctatcagtgctcaagcacagtctgctgagttttaaacagcccagagtgatggatatgttgaaattgtacttcctattctcattacagttcttggtgaaagaaggatatctggaccaggaaggcaacccgatgggattcgccggccttgtatcccacttacattatcacgaaccgagcaaccttgtgttcgtgagctttctggtcaacggcctgtttcacgacctgtgtcagccaaccaggaaaggtagtaagcatttctctcaggatgtcatggagaagttagtccttgtgctagctcacttgttcggccgcaggtacttccccccaaagttccaggatgcccacttcgagttctaccagagcaaagtttttttggacgacctacccgaggatttttccgacgcgctcgacgagtataacatgaagattatggaggattttacaacttttctaagaattgtgagcaagctggcagacatgaaccaggaataccagctgccactgagtaaaattaagttcaccgggaaagaatgcgaggattcgcaactggtttcccacctgatgtcctgtaaggaaggacgagtcgcaatcagtcccttcgtatgcctatctggaaactttgacgatgacctcttgagactcgagacacctaatcacgtcactctgggaacaattggtgtgaatagatcccaagcccccgtcttgctgtcccagaagtttgataacaggggcagaaagatgagtctgaatgcctacgctctggacttctataaacatggatcactcatcggtctggtgcaggacaaccgtatgaatgaaggggatgcctattatctgcttaaagacttcgccctcactatcaagtcgatcagcgtgagcttgagggagttgtgcgaaaacgaagatgataacgtcgttcttgcctttgagcagctctctacaacattctgggaaaaacttaataaagtgtag

SEQ ID NO: 194129 - DNA, 5138 bp, Artificial Sequence
  derived and/or modified sequence
atggaaagaaatgttctcacgactttttcgcaggaaatgtctcagcttatcctgaacgaaatgcccaaggctgaatatagctcactgttcaatgattttgtcgagagtgaattcttcctgatcgatggagattctcttctcatcacctgcatctgcgagatttcgttcaagccaggccagaatttgcatttcttttatcttgtggaaagatatctggttgacctgataagtaaaggagggcagtttaccattgtgttctttaaagatgctgagtatgcctactttaacttcccagagctgctctccctgcgaacagccctcatcctacatctacaaaagaacacaactatagacgtgcgaacaacctttagcagatgtctgtcaaaggaatggggtagttttttggaggagagctatccttattttcttatcgttgccgatgaaggtctcaacgacttacagacgcagcttttcaattttctgatcatccacagctgggccagaaaagttaatgtggtcttaagctccgggcaggaatccgatgttctgtgcctctacgcttacttacttccctctatgtatcgacaccagatcttctcgtggaagaataaacagaatatcaaagacgcctacacaactctcctcaatcagctagaacgctttaagttgtccgccttggccccactcttcgggtctttgaagtggaacaacattaccgaagaggctcataagacagtaagcctgctcacccaagtctggccggaaggcagtgatattagaagggtattttgtgtgacctcatgctcactgagcctaaggatgtaccaccggtttctggggaatagagagccatcaagcggacaggagaccgagattcaacaagtcaatagcaactgtctcacccttcaggagatggaggatctttgcaagctgcattgcctgacggtggtgttcctactgcatctgcctttaagtcagcgtgcttgcgcgagagtgattaccagtcattgggccgaggacatgaagccattgctgcagatgaagaagtggtgtgaatattttatcctgagaaatattcataccttcgaattctggaacctgaacctgatacatctgtccgacctgaacgatgagctcctgctcaagaatatcgctttttactatgagaacgaaaatgtcaaggggctgcacctcaacctgggcgacaccattatgaaggattacgaatacctgtggaacactgtttcaaaactggtgcgggacttcgaagtgggtcagccgtttcctctccgcaccacaaaagtatgctttctggaaaagaaaccgagtcctattaaagactctagtaacgagatggtcccgaatcttggctttatcccaaccagttctttcgtggtagacaagtttgctggggatatccttaaggacttgccttttctgaagagcgatgacccaatcgtgaccagtctggtgaaacaaaaggagttcgacgaactggttcattggcattcccacaagcctctttccgatgattacgatcgaagccgctgtcaattcgacgaaaaatcaagagatcccagggtcttgcgtagcgttcaaaaataccacgtctttcaaagattttatgggaattccttggaaacagtcagcagcaaaattatcgtgactcagactattaagagtaaaaaggacttctccgggcctaaatccaagaaagcacacgaaacaaaggccgagattattgctagggagaataagaagcggctcttcgctcgagaagagcagaaggaagagcagaaatggaacgcattgagtttcagtatcgaagaacagctcaaagagaatctgcatagtgggatcaaaagcctagaagatttcctgaagagttgcaaatcaagctgcgtcaaattgcaggtggagatggtgggcctgactgcatgcctcaaagcatggaaagagcactgccgaagtgaggaaggtaagactacaaaggatctctccattgcagtgcaggtcatgaaacgaatccattctctgatggagaagtattccgagctcctccaggaagatgatcgccagttaatcgcaagatgcttaaaatacttaggattcgacgagttggctagttccctgcatccggctcaggatgccgagaacgacgtcaaggtgaagaagagaaacaagtacagtgttggaatcggccctgctagatttcaactgcagtacatgggtcattatttaatacgcgatgagcgcaaggaccccgaccccagagtccaggatttcattcccgacacatggcagagagagttgttagatgtcgtcgacaaaaacgagagcgccgtgatcgtagcaccaacatccagcggaaagacttacgctagctattattgtatggagaaagtcttgaaggagtccgacgacggagtggtcgtatatgtggccccaacgaaagcgcttgtgaaccaagtggccgctacggtgcaaaacagatttaccaaaaatctgccaagcggagaggttctgtgtggagtttttacccgggagtaccggcatgatgctctaaattgccaagtgctcattaccgtgcctgcctgttttgaaattctcttgctcgctcctcatcgtcagaattgggtgaagaagattagatacgtgatattcgatgaagtacactgtctcggcggtgaaatcggcgctgaaatctgggagcatcttcttgtcatgattaggtgcccattcctcgccctgtcagccaccattagtaatcccgaacacctcacggagtggctccaaagcgtaaaatggtattggaagcaggaagacaaaattatcgaaaataacacagcatccaagagacatgtgggtaggcaagctggattccctaaggattacctacaggtgaagcagtcttacaaggtgcggttggtcctgtacggtgaaaggtacaatgatctggagaagcatgtgtgctctattaagcacggtgatattcactttgatcactttcacccttgtgcagctcttactacagaccacatcgaacgctacggattcccaccggatctgacgctgtcccctagagaaagcatccaactctacgacgccatgtttcaaatttggaaaagctggccacgagctcaggaactctgtcccgagaattttatccactttaataataaattggtgataaaaaagatggacgccaggaaatacgaggaaagcctgaaagcagagctcacctcctggattaagaatggcaacgttgaacaagcacggatggtgcttcaaaacttaagccccgaagcagatctgagtcccgagaacatgatcaccatgtttccgctccttgtcgaaaagctgcgaaaaatggagaagcttcccgcacttttttttctgtttaaactgggcgctgtggagaacgctgccgagtcggtgagtacttttttaaaaaagaagcaagagacaaagcgtcctccaaaggctgataaggaagcccacgtgatggccaataaattgcggaaggtgaagaaatctatcgaaaagcaaaagattatcgacgaaaagagccagaaaaaaacccggaacgtcgaccagagtctgatccacgaagcagagcacgataatctagtgaagtgcttggagaagaatctggaaatcccccaggactgtacctacgcagatcagaaggccgtcgataccgaaacactgcagaaagtattcggtcgtgttaagttcgagaggaagggagaagagctgaaagcccttgccgaacggggaatcggctatcaccatagcgccatgtctttcaaagagaagcagttagttgagatcctcttccgcaaggggtacctgcgcgtcgtaaccgctacggggactttggcactcggggttaatatgccatgtaagtctgtggtgttcgctcagaattccgtttatctggatgcactgaattatagacagatgagcggccgagcgggtagaaggggccaggacctgatgggtgacgtttatttttttgatattccattcccgaagatcggcaagctcattaagtcaaatgtacctgagctccgtgggcatttcccattgtccatcacactggtcctgcgtctgatgctcttggcttctaaaggcgatgacccggaagacgccaaagccaaagtgctgagtgtgctgaagcactcactgttgagtttcaaacagccgagagtcatggatatgttaaaactctacttcctttttagcttacagttcctggtgaaggaaggctacctggatcaagaaggtaaccctatgggattcgcagggctggtatcccaccttcactatcacgagccctccaatctggtgttcgtatcctttttggtgaacggcctgtttcatgatttgtgccagccaaccaggaagggttccaagcatttctcccaggacgtgatggagaagttggtgcttgttctcgctcatctgttcggcagaagatacttcccgcctaaattccaagatgcgcattttgagttttatcagagcaaggtgtttctggatgatctgcccgaggacttcagcgacgctctcgatgagtataacatgaaaataatggaggactttacgacattccttcgcatagtgtccaagttagctgatatgaaccaggaataccaattgccgctgagcaaaatcaagtttacagggaaggaatgtgaggacagccagctcgtgtcccatcttatgtcttgcaaggagggccgtgtagccattagccccttcgtgtgtctttcagggaactttgacgacgacttgctgagattagagacccccaatcacgtgactctcggaaccatcggtgtgaacagatcccaggctccggtgctgctgtcacagaaattcgacaaccggggtcgcaagatgtcccttaatgcatacgcattggatttctacaaacatgggtctctgattggactggtgcaggataaccgcatgaatgagggagacgcgtattacttgctaaaagatttcgccttgacaatcaaaagtattagcgtgtcactcagagaattgtgcgagaatgaggatgataatgttgtcctcgctttcgagcagctctccaccactttctgggagaaactcaataaggtgta

SEQ ID NO: 194130 - DNA, 5139 bp, Artificial Sequence
  derived and/or modified sequence
atggagagaaacgtgctgaccaccttcagccaggagatgagccagctgatcctgaacgagatgcccaaggccgagtacagcagcctgttcaacgacttcgtggagagcgagttcttcctgatcgacggcgacagcctgctgatcacctgcatctgcgagatcagcttcaagcccggccagaacctgcacttcttctacctggtggagagatacctggtggacctgatcagcaagggcggccagttcaccatcgtgttcttcaaggacgccgagtacgcctacttcaacttccccgagctgctgagcctgagaaccgccctgatcctgcacctgcagaagaacaccaccatcgacgtgagaaccaccttcagcagatgcctgagcaaggagtggggcagcttcctggaggagagctacccctacttcctgatcgtggccgacgagggcctgaacgacctgcagacccagctgttcaacttcctgatcatccacagctgggccagaaaggtgaacgtggtgctgagcagcggccaggagagcgacgtgctgtgcctgtacgcctacctgctgcccagcatgtacagacaccagatcttcagctggaagaacaagcagaacatcaaggacgcctacaccaccctgctgaaccagctggagagattcaagctgagcgccctggcccccctgttcggcagcctgaagtggaacaacatcaccgaggaggcccacaagaccgtgagcctgctgacccaggtgtggcccgagggcagcgacatcagaagagtgttctgcgtgaccagctgcagcctgagcctgagaatgtaccacagattcctgggcaacagagagcccagcagcggccaggagaccgagatccagcaggtgaacagcaactgcctgaccctgcaggagatggaggacctgtgcaagctgcactgcctgaccgtggtgttcctgctgcacctgcccctgagccagagagcctgcgccagagtgatcaccagccactgggccgaggacatgaagcccctgctgcagatgaagaagtggtgcgagtacttcatcctgagaaacatccacaccttcgagttctggaacctgaacctgatccacctgagcgacctgaacgacgagctgctgctgaagaacatcgccttctactacgagaacgagaacgtgaagggcctgcacctgaacctgggcgacaccatcatgaaggactacgagtacctgtggaacaccgtgagcaagctggtgagagacttcgaggtgggccagcccttccccctgagaaccaccaaggtgtgcttcctggagaagaagcccagccccatcaaggacagcagcaacgagatggtgcccaacctgggcttcatccccaccagcagcttcgtggtggacaagttcgccggcgacatcctgaaggacctgcccttcctgaagagcgacgaccccatcgtgaccagcctggtgaagcagaaggagttcgacgagctggtgcactggcacagccacaagcccctgagcgacgactacgacagaagcagatgccagttcgacgagaagagcagagaccccagagtgctgagaagcgtgcagaagtaccacgtgttccagagattctacggcaacagcctggagaccgtgagcagcaagatcatcgtgacccagaccatcaagagcaagaaggacttcagcggccccaagagcaagaaggcccacgagaccaaggccgagatcatcgccagagagaacaagaagagactgttcgccagagaggagcagaaggaggagcagaagtggaacgccctgagcttcagcatcgaggagcagctgaaggagaacctgcacagcggcatcaagagcctggaggacttcctgaagagctgcaagagcagctgcgtgaagctgcaggtggagatggtgggcctgaccgcctgcctgaaggcctggaaggagcactgcagaagcgaggagggcaagaccaccaaggacctgagcatcgccgtgcaggtgatgaagagaatccacagcctgatggagaagtacagcgagctgctgcaggaggacgacagacagctgatcgccagatgcctgaagtacctgggcttcgacgagctggccagcagcctgcaccccgcccaggacgccgagaacgacgtgaaggtgaagaagagaaacaagtacagcgtgggcatcggccccgccagattccagctgcagtacatgggccactacctgatcagagacgagagaaaggaccccgaccccagagtgcaggacttcatccccgacacctggcagagagagctgctggacgtggtggacaagaacgagagcgccgtgatcgtggcccccaccagcagcggcaagacctacgccagctactactgcatggagaaggtgctgaaggagagcgacgacggcgtggtggtgtacgtggcccccaccaaggccctggtgaaccaggtggccgccaccgtgcagaacagattcaccaagaacctgcccagcggcgaggtgctgtgcggcgtgttcaccagagagtacagacacgacgccctgaactgccaggtgctgatcaccgtgcccgcctgcttcgagatcctgctgctggccccccacagacagaactgggtgaagaagatcagatacgtgatcttcgacgaggtgcactgcctgggcggcgagatcggcgccgagatctgggagcacctgctggtgatgatcagatgccccttcctggccctgagcgccaccatcagcaaccccgagcacctgaccgagtggctgcagagcgtgaagtggtactggaagcaggaggacaagatcatcgagaacaacaccgccagcaagagacacgtgggcagacaggccggcttccccaaggactacctgcaggtgaagcagagctacaaggtgagactggtgctgtacggcgagagatacaacgacctggagaagcacgtgtgcagcatcaagcacggcgacatccacttcgaccacttccacccctgcgccgccctgaccaccgaccacatcgagagatacggcttcccccccgacctgaccctgagccccagagagagcatccagctgtacgacgccatgttccagatctggaagagctggcccagagcccaggagctgtgccccgagaacttcatccacttcaacaacaagctggtgatcaagaagatggacgccagaaagtacgaggagagcctgaaggccgagctgaccagctggatcaagaacggcaacgtggagcaggccagaatggtgctgcagaacctgagccccgaggccgacctgagccccgagaacatgatcaccatgttccccctgctggtggagaagctgagaaagatggagaagctgcccgccctgttcttcctgttcaagctgggcgccgtggagaacgccgccgagagcgtgagcaccttcctgaagaagaagcaggagaccaagagaccccccaaggccgacaaggaggcccacgtgatggccaacaagctgagaaaggtgaagaagagcatcgagaagcagaagatcatcgacgagaagagccagaagaagaccagaaacgtggaccagagcctgatccacgaggccgagcacgacaacctggtgaagtgcctggagaagaacctggagatcccccaggactgcacctacgccgaccagaaggccgtggacaccgagaccctgcagaaggtgttcggcagagtgaagttcgagagaaagggcgaggagctgaaggccctggccgagagaggcatcggctaccaccacagcgccatgagcttcaaggagaagcagctggtggagatcctgttcagaaagggctacctgagagtggtgaccgccaccggcaccctggccctgggcgtgaacatgccctgcaagagcgtggtgttcgcccagaacagcgtgtacctggacgccctgaactacagacagatgagcggcagagccggcagaagaggccaggacctgatgggcgacgtgtacttcttcgacatccccttccccaagatcggcaagctgatcaagagcaacgtgcccgagctgagaggccacttccccctgagcatcaccctggtgctgagactgatgctgctggccagcaagggcgacgaccccgaggacgccaaggccaaggtgctgagcgtgctgaagcacagcctgctgagcttcaagcagcccagagtgatggacatgctgaagctgtacttcctgttcagcctgcagttcctggtgaaggagggctacctggaccaggagggcaaccccatgggcttcgccggcctggtgagccacctgcactaccacgagcccagcaacctggtgttcgtgagcttcctggtgaacggcctgttccacgacctgtgccagcccaccagaaagggcagcaagcacttcagccaggacgtgatggagaagctggtgctggtgctggcccacctgttcggcagaagatacttcccccccaagttccaggacgcccacttcgagttctaccagagcaaggtgttcctggacgacctgcccgaggacttcagcgacgccctggacgagtacaacatgaagatcatggaggacttcaccaccttcctgagaatcgtgagcaagctggccgacatgaaccaggagtaccagctgcccctgagcaagatcaagttcaccggcaaggagtgcgaggacagccagctggtgagccacctgatgagctgcaaggagggcagagtggccatcagccccttcgtgtgcctgagcggcaacttcgacgacgacctgctgagactggagacccccaaccacgtgaccctgggcaccatcggcgtgaacagaagccaggcccccgtgctgctgagccagaagttcgacaacagaggcagaaagatgagcctgaacgcctacgccctggacttctacaagcacggcagcctgatcggcctggtgcaggacaacagaatgaacgagggcgacgcctactacctgctgaaggacttcgccctgaccatcaagagcatcagcgtgagcctgagagagctgtgcgagaacgaggacgacaacgtggtgctggccttcgagcagctgagcaccaccttctgggagaagctgaacaaggtgtag

SEQ ID NO: 194131 - DNA, 6071 bp, Artificial Sequence
  derived and/or modified sequence
aggaaaccgaaactcccgccggatgcataaaagactggctgcggtggctcagagcgccgagtcctaggccaggtctggggtaacctggaacttccacctgggctctgcgctaggtctctgtttcactccctccccgcggggcgcgcagctcgcgggtctttggacaccaccggtcctgagtccgcggactgccattttcattaagaactgccacttagaggtaccaaaataaagggtatttgctacctttaatacttgccagttcaggttggaggcacaggcagcagcaagaatggaaagaaatgttcttacaacattttcacaggaaatgtcccagttaattttgaatgaaatgccaaaagctgaatattccagtttattcaatgattttgttgaatctgaattttttttgattgatggggattcattacttatcacatgtatctgtgagatatcatttaagcctgggcagaacctccatttcttctatctggttgaacgctatcttgtggatcttattagcaaaggaggacaattcaccatagttttcttcaaggatgccgagtatgcgtatttcaacttccctgaacttctttctttgagaactgctttaattcttcatcttcagaagaataccaccattgatgttcgaacaacattttcgagatgcttatcaaaagagtggggaagtttcttggaagagagttacccatatttcctgatagttgcagacgaaggcctgaacgatctacaaacacagcttttcaactttttaatcattcattcttgggcaaggaaggtcaacgttgtactttcctcagggcaagaatctgatgttctttgcctttatgcataccttcttccaagcatgtacagacaccagattttttcctggaagaataagcagaacattaaagatgcttatacaaccctgcttaaccagttggaaagatttaagctttcagcattagcacctctttttggaagtttaaaatggaataatattacggaagaggcacacaagactgtatctctgcttacacaagtctggccagaaggatctgacattcggcgtgtcttttgtgttacttcatgctcattatctttgagaatgtaccatcgctttttaggaaacagagagccctcctctggtcaggaaactgagatccaacaggtgaacagtaattgcttaaccctgcaggagatggaagatttgtgtaaactgcattgtctcactgtggtttttctactccatctgcctctttctcaaagagcttgtgctagagtcatcacttcccattgggctgaggacatgaagcctttattacaaatgaaaaagtggtgtgaatatttcatcttaagaaatatacatacttttgaattttggaatctgaatttaattcacctttctgacttaaatgatgagcttttgttgaagaatattgctttttactatgaaaatgaaaatgtaaaaggcctacatttgaatttgggagataccattatgaaagattatgaatatctctggaataccgtatcaaagttggtcagagactttgaggttggacagccatttcctctgagaacaacaaaagtttgttttcttgaaaagaaaccatcaccaatcaaagacagctccaatgaaatggtgcccaatttgggttttattccaacgtcatcttttgtggttgataaatttgctggagatattttgaaagatttgccttttctaaagagtgatgatcctattgttacttcactggttaaacaaaaggaatttgatgaacttgtgcactggcattctcataaacccctgagtgatgattatgacaggtccaggtgtcagtttgatgaaaaatctagagaccctcgtgttcttagatctgtgcaaaagtatcatgttttccaacggttttatgggaattcattagaaacagtctcttcgaaaatcatcgtgactcaaactattaagtcaaagaaggattttagtgggcccaagagcaaaaaggcacacgagaccaaggctgaaataattgctagagagaataagaaaaggttatttgccagggaagaacaaaaggaagagcaaaagtggaatgctttgtcattttctattgaagagcaattgaaagaaaatttacactctggaataaagagcctggaagattttttgaaatcctgtaaaagtagctgtgtgaaacttcaggttgaaatggtggggttaactgcttgcttgaaagcctggaaagaacattgccgaagtgaagaaggtaaaaccacgaaagatttaagtatagctgttcaggtgatgaaaaggatccactccttgatggaaaaatactcagaacttttacaagaagatgatcggcaactcatagccagatgccttaagtatttaggatttgatgagttggcaagttctttacatccagcccaggatgcagaaaatgatgtaaaagtgaagaaaaggaataaatattcagttggcattgggccagctcggttccaactgcaatacatgggccattatttgatacgagatgagagaaaagacccagatcccagggtccaggattttattcccgacacatggcagcgagagctccttgatgttgtggataagaatgagtcagcagtgattgttgccccaacgtcctcaggcaaaacctatgcctcctactactgtatggagaaagtgctgaaggagagcgacgacggggtggtcgtgtacgttgcacccacaaaggcccttgttaatcaagtggcagcaactgttcagaatcgttttacgaaaaatctgccaagtggtgaagttctctgtggtgttttcaccagggagtatcgtcatgatgccttaaactgtcaggtacttattacagtgcctgcctgctttgaaattctgctgcttgctcctcatcgccaaaactgggtgaaaaagatcagatatgttatatttgatgaggttcattgtcttggtggagaaattggagcagaaatctgggaacatctccttgtcatgatccgatgtccctttttggctctttcagctaccataagtaatcctgaacatctcaccgagtggctacaatcggtaaaatggtactggaaacaagaagacaaaataattgaaaataataccgcttctaaaagacatgtgggtcgtcaggccggctttcccaaagactacttgcaagtaaaacaatcgtataaagttagacttgtgctctatggagagaggtataatgatctagagaagcatgtatgttcaataaaacatggtgacattcattttgatcattttcacccatgtgctgcactaacaacagatcatattgaaaggtatggattccctcctgatcttaccctttcacctcgagaaagcatccagctgtatgatgccatgtttcaaatttggaaaagttggcctcgggcccaggaactgtgcccagaaaacttcattcattttaacaataaattagtcattaaaaagatggatgctaggaaatatgaagagagtctaaaggcagaattaacaagttggattaaaaatggcaacgtagagcaggccagaatggtacttcagaatcttagtcctgaagcagatttgagtccagaaaacatgatcaccatgtttccacttctagttgaaaaactaaggaaaatggagaagttacctgcactattttttttattcaagttaggagctgtagaaaacgcagctgaaagtgtgagcactttcctaaagaaaaagcaggagacaaaaaggcctcccaaagctgataaagaagcccatgtcatggctaacaaacttcgaaaagttaaaaaatccatagagaaacaaaagatcatagatgaaaagagccagaaaaaaaccagaaatgtggatcaaagcctaatacatgaagctgaacatgataatctagtgaagtgtctagagaagaacctggaaatcccacaggactgcacatatgctgatcaaaaagcagtggacactgagactttgcagaaggtatttggtcgagtaaaatttgaaagaaaaggtgaagaattgaaagccttggcagaaaggggtattggatatcatcacagtgctatgagtttcaaagaaaaacaattagttgaaatcctctttagaaaaggatatcttagggtggtgacagctactggaacacttgctttaggtgtcaacatgccttgtaaatctgtggtttttgctcaaaactcagtctatctggatgcgttgaattatagacagatgtctggccgtgctggaagaagaggtcaagacctgatgggagatgtatatttctttgatattccattccccaaaataggaaaactcataaaatccaatgttcctgagctgagaggacacttccctctcagcataaccctggtcctgcgactcatgctgctggcttccaagggagatgacccagaggatgccaaggcaaaggtgctatcagtgctaaagcattcattgctgtccttcaagcaacccagagtcatggacatgttaaaactttacttcctgttttctttgcagttcctggtgaaagagggctatttagatcaagaaggtaatcctatggggtttgctggacttgtatcacatttgcattatcatgaaccttctaatcttgtttttgtcagttttcttgtaaatggactcttccatgatctctgtcagccaaccaggaaaggctcaaaacatttttctcaagacgttatggaaaagctagtattagtattggcacatctctttggaagaagatattttccaccaaagttccaagatgcacacttcgagttttatcaatcaaaggtgttccttgatgatctccctgaggattttagtgatgctttagatgaatataacatgaaaattatggaggactttaccactttcctacgaattgtttccaaactggctgatatgaatcaggaatatcaactcccattgtcaaaaatcaaattcacaggtaaagaatgtgaagactctcaactcgtatctcatttgatgagctgcaaggaaggaagagtagcaatttcaccatttgtttgtctgtctgggaactttgatgatgatttgcttcgactagaaactccaaaccatgttactctaggcacaatcggtgtcaatcgctctcaggctccagtgctgttgtcacagaaatttgataaccgaggaaggaaaatgtcgcttaatgcctatgcactggatttctacaaacatggttccttgataggattagtccaggataacaggatgaatgaaggagatgcttattatttgttgaaggattttgcactcaccattaaatctatcagtgtttccttgcgtgagctatgtgaaaatgaagacgacaacgttgtcttagcctttgaacaactgagtacaactttttgggaaaagttaaacaaagtctaaaaacaaagtctatgcaaaccacttaaaaataattccatagtagtttttcaggtcacgtttttgattcttatgcttcttgccagaaatacattatgataaagtggaaatacattacgatgaagtggaaagagcaaacactttggaatcaaacagagttgcaatcaaacctgccatgttctgtcatgaatactcacaaattatttagtatacctgaatcttggtttctttttataactgagtaataatggttacatctcaggtagtttgaggattgactaaaaaaatgcgagaatgttgtatgtgactgaataacaatttttactctgcgaagccaaagtaaatataatattatcagtaactttatccccagtgtcagtatttataaaatgtttattaaggctagaaaaaatgaatacaatatcctgaaggtgaaatatattctcttcaattagcataaatatgatttacataagttagctatacagctattgagatagtactttctagtaaacttaaactactttttaaacatacattttgtgatgatttaacaaaaatatagagaatgatttgctttattgtaattgtatataagtgactggaaaagcacaaagaaataaagtgggttcgatctgtttac

SEQ ID NO: 194132 - DNA, 3901 bp, Artificial Sequence
  derived and/or modified sequence
aggaaaccgaaactcccgccggatgcataaaagactggctgcggtggctcagagcgccgagtcctaggccaggtctggggtaacctggaacttccacctgggctctgcgctaggtctctgtttcactccctccccgcggggcgcgcagctcgcgggtctttggacaccaccggtcctgagtccgcggactgccattttcattaagaactgccacttagaggtaccaaaataaagggtatttgctacctttaatacttgccagttcaggttggaggcacaggcagcagcaagaatggaaagaaatgttcttacaacattttcacaggaaatgtcccagttaattttgaatgaaatgccaaaagctgaatattccagtttattcaatgattttgttgaatctgaattttttttgattgatggggattcattacttatcacatgtatctgtgagatatcatttaagcctgggcagaacctccatttcttctatctggttgaacgctatcttgtggatcttattagcaaaggaggacaattcaccatagttttcttcaaggatgccgagtatgcgtatttcaacttccctgaacttctttctttgagaactgctttaattcttcatcttcagaagaataccaccattgatgttcgaacaacattttcgagatgcttatcaaaagagtggggaagtttcttggaagagagttacccatatttcctgatagttgcagacgaaggcctgaacgatctacaaacacagcttttcaactttttaatcattcattcttgggcaaggaaggtcaacgttgtactttcctcagggcaagaatctgatgttctttgcctttatgcataccttcttccaagcatgtacagacaccagattttttcctggaagaataagcagaacattaaagatgcttatacaaccctgcttaaccagttggaaagatttaagctttcagcattagcacctctttttggaagtttaaaatggaataatattacggaagaggcacacaagactgtatctctgcttacacaagtctggccagaaggatctgacattcggcgtgtcttttgtgttacttcatgctcattatctttgagaatgtaccatcgctttttaggaaacagagagccctcctctggtcaggaaactgagatccaacaggtgaacagtaattgcttaaccctgcaggagatggaagatttgtgtaaactgcattgtctcactgtggtttttctactccatctgcctctttctcaaagagcttgtgctagagtcatcacttcccattgggctgaggacatgaagcctttattacaaatgaaaaagtggtgtgaatatttcatcttaagaaatatacatacttttgaattttggaatctgaatttaattcacctttctgacttaaatgatgagcttttgttgaagaatattgctttttactatgaaaatgaaaatgtaaaaggcctacatttgaatttgggagataccattatgaaagattatgaatatctctggaataccgtatcaaagttggtcagagactttgaggttggacagccatttcctctgagaacaacaaaagtttgttttcttgaaaagaaaccatcaccaatcaaagacagctccaatgaaatggtgcccaatttgggttttattccaacgtcatcttttgtggttgataaatttgctggagatattttgaaagatttgccttttctaaagagtgatgatcctattgttacttcactggttaaacaaaaggaatttgatgaacttgtgcactggcattctcataaacccctgagtgatgattatgacaggtccaggtgtcagtttgatgaaaaatctagagaccctcgtgttcttagatctgtgcaaaagtatcatgttttccaacggttttatgggaattcattagaaacagtctcttcgaaaatcatcgtgactcaaactattaagtcaaagaaggattttagtgggcccaagagcaaaaaggcacacgagaccaaggctgaaataattgctagagagaataagaaaaggttatttgccagggaagaacaaaaggaagagcaaaagtggaatgctttgtcattttctattgaagagcaattgaaagaaaatttacactctggaataaagagcctggaagattttttgaaatcctgtaaaagtagctgtgtgaaacttcaggttgaaatggtggggttaactgcttgcttgaaagcctggaaagaacattgccgaagtgaagaaggtaaaaccacgaaagatttaagtatagctgttcaggtgatgaaaaggatccactccttgatggaaaaatactcagaacttttacaagaagatgatcggcaactcatagccagatgccttaagtatttaggatttgatgagttggcaagttctttacatccagcccaggatgcagaaaatgatgtaaaagtgaagaaaaggaataaatattcagttggcattgggccagctcggttccaactgcaatacatgggccattatttgatacgagatgagagaaaagacccagatcccagggtccaggattttattcccgacacatggcagcgagagctccttgatgttgtggataagaatgagtcagcagtgattgttgccccaacgtcctcaggcaaaacctatgcctcctactactgtatggagaaagtgctgaaggagagcgacgacggggtggtcgtgtacgttgcacccacaaaggcccttgttaatcaagtggcagcaactgttcagaatcgttttacgaaaaatctgccaagtggtgaagttctctgtggtgttttcaccagggagtatcgtcatgatgccttaaactgtcaggtacttattacagtgcctgcctgctttgaaattctgctgcttgctcctcatcgccaaaactgggtgaaaaagatcagatatgttatatttgatgaggttcattgtcttggtggagaaattggagcagaaatctgggaacatctccttgtcatgatccgatgtccctttttggctctttcagctaccataagtaatcctgaacatctcaccgagtggctacaatcggtaaaatggtactggaaacaagaagacaaaataattgaaaataataccgcttctaaaagacatgtgggtcgtcaggccggctttcccaaagactacttgcaagtaaaacaatcgtataaagttagacttgtgctctatggagagaggtataatgatctagagaagcatgtatgttcaataaaacatggtgacattcattttgatcattttcacccatgtgctgcactaacaacagatcatattgaaaggtatggattccctcctgatcttaccctttcacctcgagaaagcatccagctgtatgatgccatgtttcaaatttggaaaagttggcctcgggcccaggaactgtgcccagaaaacttcattcattttaacaataaattagtcattaaaaagatggatgctaggaaatatgaagagagtctaaaggcagaattaacaagttggattaaaaatggcaacgtagagcaggccagaatggtacttcagaatcttagtcctgaagcagatttgagtccagaaaacatgatcaccatgtttccacttctagttgaaaaactaaggaaaatggagaagttacctgcactattttttttattcaagttaggagctgtagaaaacgcagctgaaagtgtgagcactttcctaaagaaaaagcaggagacaaaaaggcctcccaaagctgataaagaagcccatgtcatggctaacaaacttcgaaaagttaaaaaatccatagagaaacaaaagatcatagatgaaaagagccagaaaaaccagaaatgtggatcaaagcctaatacatga

SEQ ID NO: 194133 - protein, 580 aa, Artificial Sequence
  derived and/or modified sequence
MAQEVSEYLSQNPRVAAWVEALRCDGETDKHWRHRRDFLLRNAGDLAPAGGAASASTDEAADAESGTRNRQLQQLISFSMAWANHVFLGCRYPQKVMDKILSMAEGIKVTDAPTYTTRDELVAKVKKRGISSSNEGVEEPSKKRVIEGKNSSAVEQDHAKTSAKTERASAQQENSSTCIGSAIKSESGNSARSSGISSQNSSTSDGDRSVSSQSSSSVSSQVTTAGSGKASEAEAPDKHGSASFVSLLKSSVNSHMTQSTDSRQQSGSPKKSALEGSSASASQSSSEIEVPLLGSSGSSEVELPLLSSKPSSETASSGLTSKTSSEASVSSSVAKNSSSSGTSLLTPKSSSSTNTSLLTSKSTSQVAASLLASKSSSQTSGSLVSKSTSLASVSQLASKSSSQTSTSQLPSKSTSQSSESSVKFSCKLTNEDVKQKQPFFNRLYKTVAWKLVAVGGFSPNVNHGELLNAAIEALKATLDVFFVPLKELADLPQNKSSQESIVCELRCKSVYLGTGCGKSKENAKAVASREALKLFLKKKVVVKICKRKYRGSEIEDLVLLDEESRPVNLPPALKHPQELL

SEQ ID NO: 194134 - DNA, 1743 bp, Artificial Sequence
  derived and/or modified sequence
atggctcaagaagtcagcgagtacctgtcccagaatccacgcgtcgccgcctgggtcgaagcccttcggtgcgatggtgaaactgacaaacactggaggcaccggcgggacttcctgttaaggaatgccggcgacttggcaccagcaggcggagccgcgtcagcctccaccgacgaggcggctgacgccgaaagtggaacaaggaatagacagctgcaacagctgatctcttttagtatggcctgggctaaccacgtctttcttgggtgccgctacccccagaaagttatggacaaaatactgtctatggccgaagggattaaagttacagatgctccgacatacaccacccgcgacgaattagtagcgaaggtgaaaaagagagggatcagtagttctaacgaaggggtggaggagccttctaagaaacgcgtgatagagggaaagaattcctccgccgtggagcaggaccacgcaaagacgagcgccaaaacggaacgcgctagcgcacagcaggagaatagtagcacttgcataggcagcgccatcaaatccgaaagcgggaacagtgctaggtcctccggcataagctctcagaacagttcgacctcggatggggaccggtctgttagctctcagtcctcgtcaagcgtctcaagtcaagtgacaacagccggaagcggcaaggcaagtgaagcagaagcccccgacaagcacggaagcgcgagcttcgtttctctgcttaagtcttcagttaatagtcatatgactcagagtacagacagccggcagcagtctggttctccgaaaaaatctgctctggaagggtccagtgcaagcgcctcacagtcatcaagcgagattgaggtgccccttctgggttcgtcaggctcctctgaagtggaactccctctgcttagcagtaagcctagcagcgagactgcgagcagcggtttgacctcgaagacttcaagcgaggcttctgtctcttcctctgtcgccaagaacagctctagttccggcacaagcttgctaacgcccaagtcctcaagcagtaccaatacgagcttactgacatcaaagtcaacctcacaggtagccgcgtcgttgttggctagcaaaagttcttctcaaacctcaggcagcctcgttagcaagtctacttcactggcttctgtctctcagctcgcatcaaaatccagttctcagaccagcacatcgcagcttccgtccaaatcaacgtcccagagctccgagagctctgtgaagttctcttgcaagctgacgaacgaagatgtcaaacaaaaacagcctttctttaacaggctgtataagaccgtagcttggaaactggtggcagtcggcggcttctcccccaatgtcaatcatggagagctactaaacgctgcgatcgaagccctcaaggctactctggacgtgtttttcgtgccccttaaagaactggccgatctcccacagaataagagttcccaagaatcaatcgtttgtgaactgcgttgcaagagtgtctacctcggaacagggtgtggaaagtccaaggagaacgccaaggcagtcgcatctcgtgaggctctgaagctgttcctgaagaagaaagtggtggtgaagatttgtaaacggaagtatagagggtccgagattgaggatttggtactcttagacgaggaaagccgacctgtaaacctccctcccgctctaaaacacccgcaagagctcctgtag

SEQ ID NO: 194135 - DNA, 1743 bp, Artificial Sequence
  derived and/or modified sequence
atggcccaggaggtgtctgagtacctgagccagaacccccgggtggccgcctgggtggaggccctgcgctgtgatggagaaacagacaagcactggaggcacagaagagacttcctgctgagaaatgctggggacctggccccagctggaggagctgccagcgccagcacagatgaggccgcagatgctgagagcggcaccaggaaccggcagctgcagcagctgatctccttctccatggcctgggccaaccacgtgttcctgggctgccgctacccccagaaggtgatggacaagatcctgtccatggccgagggcatcaaggtgacagatgcccccacctacaccaccagagatgagctggtggccaaggtgaagaagaggggcatcagcagcagcaatgaaggagtggaggagcccagcaagaagagggtcatcgagggcaagaacagcagcgctgtggagcaggaccacgccaagaccagcgccaagacagagcgggccagcgcccagcaggagaacagcagcacctgcatcggcagcgccatcaagtctgagagcggcaacagcgcccggagcagcggcatcagcagccagaacagcagcaccagtgatggagacagatctgtgagcagccagagcagcagctctgtgagcagccaggtgaccacagctggcagcggcaaggccagcgaggccgaggccccagacaagcacggcagcgccagctttgtgtccctgctgaagagctctgtgaacagccacatgacccagagcacagacagccggcagcagagcggcagccccaagaagagcgccctggagggcagcagcgccagcgccagccagagcagcagcgagattgaggtgcccctgctgggcagcagcggcagcagcgaggtggagctgcccctgctgagcagcaagcccagcagcgagacagccagcagcggcctgaccagcaagaccagcagcgaggcctctgtgagcagctctgtggccaagaacagcagcagcagcggcaccagcctgctgacccccaagagcagcagcagcaccaacaccagcctgctgaccagcaagagcaccagccaggtggccgccagcctgctggccagcaagagcagcagccagaccagcggcagcctggtgtccaagagcaccagcctggcctctgtgtcccagctggccagcaagagcagcagccagaccagcaccagccagctgcccagcaagagcaccagccagagcagcgagagctctgtgaagttcagctgcaagctgaccaatgaagatgtgaagcagaagcagcccttcttcaacagactctacaagacagtggcctggaagctggtggccgtgggcggcttcagccccaacgtgaaccacggggagctgctgaatgctgccatcgaggccctgaaggccaccctggatgtgttctttgtgcccctgaaggagctggccgacctgccccagaacaagagcagccaggagagcatcgtgtgtgagctgcgctgcaagtctgtgtacctgggcaccggctgtgggaagagcaaagaaaatgccaaggctgtggccagccgggaggccctgaagctgttcctgaagaagaaggtggtggtgaagatctgcaagaggaagtaccggggcagcgagattgaggacctggtgctgctggatgaggagagcaggcctgtgaacctgcccccagccctgaagcacccccaggagctgctgtag

SEQ ID NO: 194136 - DNA, 1743 bp, Artificial Sequence
  derived and/or modified sequence
atggcccaggaggtgagcgagtacctgagccagaacccccgggtggccgcttgggtggaagctctgcgatgtgatggggagaccgataagcattggaggcaccggagggatttcctgctacgcaatgcaggcgatctggcacccgccgggggggccgcgagcgcaagcactgacgaggccgctgacgccgagagcggaacacggaaccggcaactgcagcagctgatttccttttcgatggcctgggccaatcacgtcttcctgggttgtcgctaccctcagaaagttatggacaagattttgtcgatggctgaaggtatcaaggtcaccgatgccccgacctacactactagggatgagctagtggctaaagtgaagaaaagaggaatttcctcctccaacgaaggcgtcgaagaaccttccaaaaagcgcgttattgaaggtaaaaactcttctgcagtggaacaggaccacgccaagacaagtgccaagactgagcgcgccagcgcacagcaggagaatagcagcacatgtatcggcagcgcaatcaagtctgagtctggtaactcagcccgctccagtgggatctctagccaaaacagcagcactagcgacggagataggtctgttagttcccaaagctcttcttcggtgagctcccaggtgaccacggctggttccggcaaggcttctgaagctgaagccccagacaaacacggctccgcttcatttgtgagtctccttaagagttccgtcaactctcatatgacccagtcaactgacagccggcagcagtctgggtcaccaaaaaagtctgccttggaaggatctagcgcctctgcatcccagtcgtccagcgagattgaagtgccactcctggggagtagcggctccagtgaggtcgagcttccccttttatcatcaaagccttcatcagagactgcaagctccggccttacttcgaaaacctcaagcgaggcctctgttagctctagcgtagctaaaaatagcagtagcagcggaacctcattgcttactccgaagtccagttcctcaaccaacaccagcctgctcacttctaagagcacgagccaggtggccgcctctctactcgcttcgaagagctccagccagacaagcgggagtctggtgtccaagagcacgtcccttgctagcgtctctcagctggcaagcaagagctcatcacaaacctccacatctcaactcccgtctaaatctacaagccagtcatctgagagttccgtcaaattttcatgtaaacttacaaacgaagacgtcaagcagaaacagcctttctttaatcgactgtacaaaacggtggcctggaagcttgtagcagttgggggctttagccccaacgtcaaccacggagagttgctcaacgctgctattgaggccctgaaggcaacactagatgtgttttttgtgcccctgaaagaattagccgacctgccacaaaacaaatcatcacaagaaagcattgtgtgtgaacttcgatgtaagagcgtataccttggcaccggctgtggaaaatcaaaggagaacgccaaggcggtcgccagccgcgaagcattgaagctgttcctcaagaagaaggtggtagtcaagatctgcaagcggaagtaccgtggcagcgaaatcgaggatctggtgttactggacgaggaatctcggcccgttaacctgcctcccgcactgaaacatccacaagagctcctgtag

SEQ ID NO: 194137 - DNA, 1743 bp, Artificial Sequence
  derived and/or modified sequence
atggcccaggaggtctcggagtatctgtcgcagaatcctcgggtcgctgcatgggtagaagcattgcgctgcgatggagagaccgacaagcattggaggcatcgcagagattttctgctccggaacgcaggcgacctggctcccgctggcggagctgcatcagcctcaaccgacgaggcagccgacgccgaatccgggacacggaatcgtcagctccagcagctcatctcatttagtatggcttgggccaaccatgtgttcctaggatgcagataccctcagaaagtgatggacaaaatcctctccatggctgaggggattaaggtaaccgacgcgccaacctacaccacccgagacgagctcgttgcaaaggtgaagaagcgagggatctcaagtagcaatgaaggggttgaggaaccttcaaagaagagagtgatcgaaggcaaaaattcatctgccgtagaacaggatcacgccaaaacatctgcgaagacagagcgggcatctgcacaacaggagaattccagcacctgcatcggttccgccattaaatcagagagcggaaatagtgctagaagcagcggcatatctagccagaattcttcaacctctgacggtgacaggtccgtctcaagccagtcatccagcagtgtcagctctcaagttaccacagctggatccggtaaagcatccgaggccgaagctccagacaaacacggctcagccagcttcgtgagccttctcaagagcagcgtgaatagtcacatgacacaaagcacagattcaagacagcagagcggatcccccaaaaagtccgccctggagggtagctcggcctccgcttcccagtcaagcagtgaaattgaggtcccactgctgggatcttccggaagctcagaagtcgagcttccgctgctgtcttcaaaaccatcatctgagactgcgagttccggcttgacttccaagacaagcagtgaagcttctgtttcctcttcagtagctaagaatagcagctcctccggaacctctttattaacccctaagtcttccagctctaccaatacttcccttctgacctctaagagtacgagtcaggtggccgctagtctgctggcatctaaatcatccagccagacttcaggaagtctagtctcaaaaagcacttccctcgccagcgtcagtcagctcgcctcaaaatcgtcctcacagaccagcacttcccagttgcctagtaagagcacgtcccagagtagcgagtctagtgtgaagttttcttgcaagctaaccaatgaggatgtgaaacagaaacagcctttttttaacagactttataagacagtggcctggaaactggtggcagtcggcggattcagcccgaacgtgaatcatggagagctgctgaatgccgcaatagaggccctgaaggcaactttggacgtgttcttcgtgccactgaaagagctggcagatctgccccagaataagagctcacaggagagcattgtatgcgaactgaggtgcaaatctgtgtatctgggcaccggctgcgggaaaagcaaagaaaatgctaaggctgtcgcatctcgagaggccctgaaacttttccttaagaagaaggttgtcgtgaagatttgcaaaagaaagtacagggggtctgaaattgaagatttagtgcttctcgatgaagagagtcgtcccgttaacctcccacctgccctgaaacacccgcaggagctcttgtag

SEQ ID NO: 194138 - DNA, 2721 bp, Artificial Sequence
  derived and/or modified sequence
ggcggcggcgaggttataaaagggaagaagccggcggtgggcggaagtgggcggttcggcggctctgggcgctgttgtttggtctttaggcctgcggaggggcgttatctggagggccgcgggtgcaggccgcagtgacagggccgctcgccccgctagtcctgcctgtctcccggtgcagctgtgttcgcggcctgcaggcccaacatggcgcaggaggtgtcggagtacctgagccagaacccgcgggtggcagcctgggtggaggcgctgcgctgcgacggcgagactgacaaacactggcgccaccgccgggattttttgcttcgcaacgccggggacctggcccccgctggcggcgctgcctccgctagcacggatgaagctgccgacgccgagagcgggacccgaaaccggcagctgcagcagctcatctccttttccatggcctgggcgaaccacgtcttcctcgggtgccgataccctcaaaaagttatggataaaatacttagtatggctgaaggcatcaaagtgacagatgctccaacctatacaacaagagatgaactggttgccaaggtgaagaaaagagggatatcgagtagcaatgaaggggtagaagagccatccaaaaaacgagttatagaaggaaaaaacagttctgcagttgagcaagatcacgcaaaaacctctgccaagacagaacgtgcatcagctcagcaggaaaacagttcaacgtgtatagggtcggccatcaaatcagagagtgggaactcagctcggagctctggcatctccagtcagaatagctctacaagtgatggagatcgatctgtttccagccaaagcagcagcagcgtttcctctcaggtaacaacggcaggatctgggaaagcttctgaagcagaagctccagataaacacggttctgcatcatttgtttccttgctgaaatccagtgtgaatagtcacatgacccaatccactgattctagacaacaaagtggatcacctaaaaagagtgctttggaaggctcttcagcctcagcttctcaaagcagctcagagatcgaggtgcccttgttgggctcctcaggaagctcagaggtagaattgccactattgtcttccaaacctagttcagagacagcttcaagtgggttaacttccaaaactagttcagaggcaagtgtttcatcatcagttgctaaaaacagttcctcatcaggcacatccttactgactcccaagagcagctcttcaacaaatacatcgctgctaacttccaagagcacttcccaggtagctgcatcactactagcttccaagagcagctcccagaccagtggatctctggtttccaaaagcacttccttagcaagtgtgtcccagttggcttctaagagtagttctcagactagcacctcacagttgccttctaaaagtacttcacagtcaagtgagagttctgtcaaattctcttgcaagttaaccaatgaagatgtgaaacagaagcaaccttttttcaatagactatataaaacggtggcatggaagttggtagctgttggtggctttagtcccaatgtgaatcatggagagctcctaaatgcagctattgaggctctgaaagcaacactggatgtattttttgtcccactaaaagaattggcagatctgcctcaaaataagagctctcaagaaagtattgtttgtgaattgaggtgcaagtctgtgtatttgggcactggctgtggaaaaagcaaagaaaatgcaaaagcagttgcatcaagagaagcattgaagttatttctcaagaaaaaggtggtggtaaaaatatgtaaaaggaaatacagaggcagtgaaatagaagatctagtactccttgatgaagaatcgaggcctgtaaacttacctccagcactaaaacatcctcaagaattactataatgtgtccaaaatatcactgcatacaatatctggtatttgaagagaaaaactgacttttgtatagtataaaacacaggctttcacaaattttgtattgctttttttccagttttgcagaaaatttacattctagttctcttcacacagtagcagttgtaaataatttatgaatgacagtacacattaaaaggtatgcattagcagcatattagtatgctgttttatttgctgaagaaaatactgtcttctatttttaatgatacattaggtacgatgtgtagttcggtagagtcctaaaatttttgtactactttcaatttggtgaaaatgtattaagttgtctaccatgttttcttttctagctgaataaaccacatcaaaggaaagggaccacagtatttgaatgtttgaaagtctgtaaagcttaaggttttaaaaatgttgcccgtaatgttgaacgtgtctgttaaaaaataaaagaaaaaatagttgcttcaaactatttttatgagaagttgtaagcattttttagatataaagcagtataaagtacttgttattttactctgaagttgtttaaaattcaccatgactttgaccgctgaagattctttaagcgggttaatttatgttttgaggtggaatacaatttacacttttttcttaaaaacatgaatgtgggtttctatattaagcatattttgtgactactattaacagattgatttgtttagatattaaatgctttaagctattttaccttttcaagaa

SEQ ID NO: 194139 - DNA, 1743 bp, Artificial Sequence
  derived and/or modified sequence
atggcccaggaggtgagcgagtacctgagccagaaccccagagtggccgcctgggtggaggccctgagatgcgacggcgagaccgacaagcactggagacacagaagagacttcctgctgagaaacgccggcgacctggcccccgccggcggcgccgccagcgccagcaccgacgaggccgccgacgccgagagcggcaccagaaacagacagctgcagcagctgatcagcttcagcatggcctgggccaaccacgtgttcctgggctgcagatacccccagaaggtgatggacaagatcctgagcatggccgagggcatcaaggtgaccgacgcccccacctacaccaccagagacgagctggtggccaaggtgaagaagagaggcatcagcagcagcaacgagggcgtggaggagcccagcaagaagagagtgatcgagggcaagaacagcagcgccgtggagcaggaccacgccaagaccagcgccaagaccgagagagccagcgcccagcaggagaacagcagcacctgcatcggcagcgccatcaagagcgagagcggcaacagcgccagaagcagcggcatcagcagccagaacagcagcaccagcgacggcgacagaagcgtgagcagccagagcagcagcagcgtgagcagccaggtgaccaccgccggcagcggcaaggccagcgaggccgaggcccccgacaagcacggcagcgccagcttcgtgagcctgctgaagagcagcgtgaacagccacatgacccagagcaccgacagcagacagcagagcggcagccccaagaagagcgccctggagggcagcagcgccagcgccagccagagcagcagcgagatcgaggtgcccctgctgggcagcagcggcagcagcgaggtggagctgcccctgctgagcagcaagcccagcagcgagaccgccagcagcggcctgaccagcaagaccagcagcgaggccagcgtgagcagcagcgtggccaagaacagcagcagcagcggcaccagcctgctgacccccaagagcagcagcagcaccaacaccagcctgctgaccagcaagagcaccagccaggtggccgccagcctgctggccagcaagagcagcagccagaccagcggcagcctggtgagcaagagcaccagcctggccagcgtgagccagctggccagcaagagcagcagccagaccagcaccagccagctgcccagcaagagcaccagccagagcagcgagagcagcgtgaagttcagctgcaagctgaccaacgaggacgtgaagcagaagcagcccttcttcaacagactgtacaagaccgtggcctggaagctggtggccgtgggcggcttcagccccaacgtgaaccacggcgagctgctgaacgccgccatcgaggccctgaaggccaccctggacgtgttcttcgtgcccctgaaggagctggccgacctgccccagaacaagagcagccaggagagcatcgtgtgcgagctgagatgcaagagcgtgtacctgggcaccggctgcggcaagagcaaggagaacgccaaggccgtggccagcagagaggccctgaagctgttcctgaagaagaaggtggtggtgaagatctgcaagagaaagtacagaggcagcgagatcgaggacctggtgctgctggacgaggagagcagacccgtgaacctgccccccgccctgaagcacccccaggagctgctgtag

SEQ ID NO: 194140 - protein, 461 aa, Artificial Sequence
  derived and/or modified sequence
MHQRYFWTDQGQVALGGHYMAEGEGYFAMSEDELACSPYIPLGGDFGGGDFGGGDFGGGDFGGGGSFGGHCLDYCESPTAHCNVLNWEQVQRLDGILSETIPIHGRGNFPTLELQPSLIVKVVRRRLAEKRIGVRDVRLNGSAASHVLHQDSGLGYKDLDLIFCADLRGEGEFQTVKDVVLDCLLDFLPEGVNKEKITPLTLKEAYVQKMVKVCNDSDRWSLISLSNNSGKNVELKFVDSLRRQFEFSVDSFQIKLDSLLLFYECSENPMTETFHPTIIGESVYGDFQEAFDHLCNKIIATRNPEEIRGGGLLKYCNLLVRGFRPASDEIKTLQRYMCSRFFIDFSDIGEQQRKLESYLQNHFVGLEDRKYEYLMTLHGVVNESTVCLMGHERRQTLNLITMLAIRVLADQNVIPNVANVTCYYQPAPYVADANFSNYYIAQVQPVFTCQQQTYSTWLPCN

SEQ ID NO: 194141 - protein, 523 aa, Artificial Sequence
  derived and/or modified sequence
MQMRRVWRTCRSGPRKRREARYKKSTEDIFPAQLLKLQRHERVWQQEPPVRDHRSWGGSGAGGVAGREWTDQGQVALGGHYMAEGEGYFAMSEDELACSPYIPLGGDFGGGDFGGGDFGGGDFGGGGSFGGHCLDYCESPTAHCNVLNWEQVQRLDGILSETIPIHGRGNFPTLELQPSLIVKVVRRRLAEKRIGVRDVRLNGSAASHVLHQDSGLGYKDLDLIFCADLRGEGEFQTVKDVVLDCLLDFLPEGVNKEKITPLTLKEAYVQKMVKVCNDSDRWSLISLSNNSGKNVELKFVDSLRRQFEFSVDSFQIKLDSLLLFYECSENPMTETFHPTIIGESVYGDFQEAFDHLCNKIIATRNPEEIRGGGLLKYCNLLVRGFRPASDEIKTLQRYMCSRFFIDFSDIGEQQRKLESYLQNHFVGLEDRKYEYLMTLHGVVNESTVCLMGHERRQTLNLITMLAIRVLADQNVIPNVANVTCYYQPAPYVADANFSNYYIAQVQPVFTCQQQTYSTWLPCN

SEQ ID NO: 194142 - protein, 88 aa, Artificial Sequence
  derived and/or modified sequence
  misc_feature (1)..(1): Xaa can be any naturally occurring amino acid
XKRIGVRDVRLNGSAASHVLHQDSGLGYKDLDLIFCADLRGEGEFQTVKDVVLDCLLDFLPEGVNKEKITPLTLKEESHTTTYFLNIS

SEQ ID NO: 194143 - protein, 86 aa, Artificial Sequence
  derived and/or modified sequence
  misc_feature (1)..(1): Xaa can be any naturally occurring amino acid
XQDSGLGYKDLDLIFCADLRGEGEFQTVKDVVLDCLLDFLPEGVNKEKITPLTLKVFHRLLRHWRAAEKTGVLFAEPLCGIGRPQV

SEQ ID NO: 194144 - protein, 442 aa, Artificial Sequence
  derived and/or modified sequence
MAEGEGYFAMSEDELACSPYIPLGGDFGGGDFGGGDFGGGDFGGGGSFGGHCLDYCESPTAHCNVLNWEQVQRLDGILSETIPIHGRGNFPTLELQPSLIVKVVRRRLAEKRIGVRDVRLNGSAASHVLHQDSGLGYKDLDLIFCADLRGEGEFQTVKDVVLDCLLDFLPEGVNKEKITPLTLKEAYVQKMVKVCNDSDRWSLISLSNNSGKNVELKFVDSLRRQFEFSVDSFQIKLDSLLLFYECSENPMTETFHPTIIGESVYGDFQEAFDHLCNKIIATRNPEEIRGGGLLKYCNLLVRGFRPASDEIKTLQRYMCSRFFIDFSDIGEQQRKLESYLQNHFVGLEDRKYEYLMTLHGVVNESTVCLMGHERRQTLNLITMLAIRVLADQNVIPNVANVTCYYQPAPYVADANFSNYYIAQVQPVFTCQQQTYSTWLPCN

SEQ ID NO: 194145 - DNA, 1386 bp, Artificial Sequence
  derived and/or modified sequence
atgcaccagagatacttctggaccgaccagggccaggtggccctgggcggccactacatggccgagggcgagggctacttcgccatgagcgaggacgagctggcctgcagcccctacatccccctgggcggcgacttcggcggcggcgacttcggcggcggcgacttcggcggcggcgacttcggcggcggcggcagcttcggcggccactgcctggactactgcgagagccccaccgcccactgcaacgtgctgaactgggagcaggtgcagagactggacggcatcctgagcgagaccatccccatccacggcagaggcaacttccccaccctggagctgcagcccagcctgatcgtgaaggtggtgagaagaagactggccgagaagagaatcggcgtgagagacgtgagactgaacggcagcgccgccagccacgtgctgcaccaggacagcggcctgggctacaaggacctggacctgatcttctgcgccgacctgagaggcgagggcgagttccagaccgtgaaggacgtggtgctggactgcctgctggacttcctgcccgagggcgtgaacaaggagaagatcacccccctgaccctgaaggaggcctacgtgcagaagatggtgaaggtgtgcaacgacagcgacagatggagcctgatcagcctgagcaacaacagcggcaagaacgtggagctgaagttcgtggacagcctgagaagacagttcgagttcagcgtggacagcttccagatcaagctggacagcctgctgctgttctacgagtgcagcgagaaccccatgaccgagaccttccaccccaccatcatcggcgagagcgtgtacggcgacttccaggaggccttcgaccacctgtgcaacaagatcatcgccaccagaaaccccgaggagatcagaggcggcggcctgctgaagtactgcaacctgctggtgagaggcttcagacccgccagcgacgagatcaagaccctgcagagatacatgtgcagcagattcttcatcgacttcagcgacatcggcgagcagcagagaaagctggagagctacctgcagaaccacttcgtgggcctggaggacagaaagtacgagtacctgatgaccctgcacggcgtggtgaacgagagcaccgtgtgcctgatgggccacgagagaagacagaccctgaacctgatcaccatgctggccatcagagtgctggccgaccagaacgtgatccccaacgtggccaacgtgacctgctactaccagcccgccccctacgtggccgacgccaacttcagcaactactacatcgcccaggtgcagcccgtgttcacctgccagcagcagacctacagcacctggctgccctgcaactag

SEQ ID NO: 194146 - DNA, 1572 bp, Artificial Sequence
  derived and/or modified sequence
atgcagatgagaagagtgtggagaacctgcagaagcggccccagaaagagaagagaggccagatacaagaagagcaccgaggacatcttccccgcccagctgctgaagctgcagagacacgagagagtgtggcagcaggagccccccgtgagagaccacagaagctggggcggcagcggcgccggcggcgtggccggcagagagtggaccgaccagggccaggtggccctgggcggccactacatggccgagggcgagggctacttcgccatgagcgaggacgagctggcctgcagcccctacatccccctgggcggcgacttcggcggcggcgacttcggcggcggcgacttcggcggcggcgacttcggcggcggcggcagcttcggcggccactgcctggactactgcgagagccccaccgcccactgcaacgtgctgaactgggagcaggtgcagagactggacggcatcctgagcgagaccatccccatccacggcagaggcaacttccccaccctggagctgcagcccagcctgatcgtgaaggtggtgagaagaagactggccgagaagagaatcggcgtgagagacgtgagactgaacggcagcgccgccagccacgtgctgcaccaggacagcggcctgggctacaaggacctggacctgatcttctgcgccgacctgagaggcgagggcgagttccagaccgtgaaggacgtggtgctggactgcctgctggacttcctgcccgagggcgtgaacaaggagaagatcacccccctgaccctgaaggaggcctacgtgcagaagatggtgaaggtgtgcaacgacagcgacagatggagcctgatcagcctgagcaacaacagcggcaagaacgtggagctgaagttcgtggacagcctgagaagacagttcgagttcagcgtggacagcttccagatcaagctggacagcctgctgctgttctacgagtgcagcgagaaccccatgaccgagaccttccaccccaccatcatcggcgagagcgtgtacggcgacttccaggaggccttcgaccacctgtgcaacaagatcatcgccaccagaaaccccgaggagatcagaggcggcggcctgctgaagtactgcaacctgctggtgagaggcttcagacccgccagcgacgagatcaagaccctgcagagatacatgtgcagcagattcttcatcgacttcagcgacatcggcgagcagcagagaaagctggagagctacctgcagaaccacttcgtgggcctggaggacagaaagtacgagtacctgatgaccctgcacggcgtggtgaacgagagcaccgtgtgcctgatgggccacgagagaagacagaccctgaacctgatcaccatgctggccatcagagtgctggccgaccagaacgtgatccccaacgtggccaacgtgacctgctactaccagcccgccccctacgtggccgacgccaacttcagcaactactacatcgcccaggtgcagcccgtgttcacctgccagcagcagacctacagcacctggctgccctgcaactag

SEQ ID NO: 194147 - DNA, 267 bp, Artificial Sequence
  derived and/or modified sequence
tgaaagagaatcggcgtgagagacgtgagactgaacggcagcgccgccagccacgtgctgcaccaggacagcggcctgggctacaaggacctggacctgatcttctgcgccgacctgagaggcgagggcgagttccagaccgtgaaggacgtggtgctggactgcctgctggacttcctgcccgagggcgtgaacaaggagaagatcacccccctgaccctgaaggaggagagccacaccaccacctacttcctgaacatcagctag

SEQ ID NO: 194148 - DNA, 261 bp, Artificial Sequence
  derived and/or modified sequence
tgacaggacagcggcctgggctacaaggacctggacctgatcttctgcgccgacctgagaggcgagggcgagttccagaccgtgaaggacgtggtgctggactgcctgctggacttcctgcccgagggcgtgaacaaggagaagatcacccccctgaccctgaaggtgttccacagactgctgagacactggagagccgccgagaagaccggcgtgctgttcgccgagcccctgtgcggcatcggcagaccccaggtgtag

SEQ ID NO: 194149 - DNA, 1386 bp, Artificial Sequence
  derived and/or modified sequence
atgcaccagagatacttttggaccgaccaaggacaggtggcgcttggaggccactacatggccgagggcgaggggtattttgcaatgtccgaagacgagctggcttgttctccatatatccccctgggtggagactttggcgggggcgacttcggtggcggggactttgggggaggggatttcggcgggggggggtctttcggtggccactgcctagactactgtgagtccccgaccgcccactgtaatgtgctcaattgggagcaggttcaaagactggacggaattctaagcgaaaccatacccatccacggtcgcgggaatttccccactctggagctgcagccgagtctcattgtgaaggttgtgaggcggcggctggctgaaaaacgtatcggggtgcgcgacgtaaggctgaacggaagcgctgcatcccacgtgttacaccaggattccgggcttggttacaaagacctcgatctcattttttgtgccgaccttcggggggaaggagagtttcagaccgttaaagacgtggtcctcgattgccttctggactttcttcctgaaggcgtgaacaaggagaaaatcacacctctgactctgaaggaggcatacgtacagaaaatggtgaaagtgtgtaacgactcggaccgatggtcattgattagtctgtcaaataactctggtaagaatgtcgaactgaagttcgtggacagcctgcggcgacagttcgagttcagcgtggatagctttcagatcaagttggactctctgctgctcttctacgagtgcagcgagaatcctatgaccgaaaccttccatcccacgattataggagaatctgtctatggggacttccaggaagcttttgatcacctatgcaacaagataattgccactcgtaacccggaagagattcgcggggggggattgctcaaatactgcaatctcctggtaaggggatttcgacctgctagcgatgaaataaaaacattgcagaggtacatgtgcagccgcttttttattgatttctcagatatcggagaacagcagcgcaagcttgaaagctacctgcagaatcattttgtagggctggaggatcgaaaatacgagtacctaatgactttgcatggggtggtgaatgagtcaacagtatgcctaatggggcatgaaagacgacagacgttaaacctgattacaatgctggcaattagggtgctcgcagatcaaaatgtgatccccaatgtggcgaatgtgacctgttactaccagccagccccctacgtggccgacgccaacttcagtaattactacattgcgcaggtgcagcctgtttttacatgccaacagcaaacttactctacatggttgccatgcaactag

SEQ ID NO: 194150 - DNA, 1572 bp, Artificial Sequence
  derived and/or modified sequence
atgcagatgagacgcgtctggaggacatgtcggagtggcccgcgcaaacgccgggaagctaggtataagaaatcgacagaagacatttttcccgctcagttattgaaactgcagagacatgaacgcgtgtggcagcaagagcctcccgtgcgagaccacagatcatggggaggatctggcgctgggggcgtggcaggccgagagtggacagatcagggtcaggtggctctagggggacactacatggcagaaggtgagggctactttgcgatgtctgaagatgagctcgcatgttctccctacattcccttgggcggggacttcggtggcggcgacttcgggggcggagacttcggcgggggcgatttcggcggcggcggcagcttcggagggcattgtctcgactattgtgagtcacccacggctcactgcaatgtgctgaattgggaacaggtgcagagactggatggaatactgagcgaaacaatccccatccacggcaggggaaatttccctactctggagctgcaaccaagcctgatcgtgaaagttgtgaggagacgccttgctgagaagagaattggcgtccgcgacgtccggcttaacggaagcgccgcgtctcacgtcttgcaccaagactccggactggggtataaggacttagaccttattttctgtgctgacctaagaggtgaaggcgaatttcagaccgtgaaagacgtcgtactggattgccttctggatttcctccctgaaggagtcaataaggaaaagattaccccactaaccctgaaagaggcctacgtacagaaaatggtgaaagtgtgtaacgattccgaccgatggagcctcattagtctgtccaataattctgggaagaatgtcgagttgaagttcgtggactcactgcgccgccaatttgagttttccgtagactcattccagataaagcttgacagccttctcttgttctacgagtgctctgaaaaccccatgactgagaccttccatcctaccattattggagaatcggtgtacggtgactttcaggaggcctttgatcacctgtgtaataaaataatcgccacaaggaatcctgaagagatcagaggggggggattgctgaagtattgtaaccttcttgtgagaggcttccgtcctgcttctgacgaaatcaagaccctgcagcgatacatgtgctcacgcttttttattgacttctccgatatcggtgagcagcagcgaaagctggagtcctaccttcaaaaccactttgttgggctggaagatagaaagtatgagtacttgatgaccctgcacggtgttgtgaacgagtccacagtgtgtctcatgggccatgaacgccgacagaccttgaatctgatcacaatgctggccatccgcgtgcttgccgaccagaacgtaataccaaacgtcgccaacgtgacatgttactatcagccagccccttacgtggctgatgctaacttttctaattactatattgcccaagtgcagccagtgttcacatgccaacagcagacgtatagcacgtggttgccctgtaactag

SEQ ID NO: 194151 - DNA, 267 bp, Artificial Sequence
  derived and/or modified sequence
tagaaacggatcggagtccgggatgtgcgcctgaatggctccgccgcatctcatgtcctacaccaggatagtggcctgggatataaagatttggacctcatattctgcgcagacctgagaggcgagggagaatttcagacagtaaaggacgtggtgctggactgcctgctggactttcttcccgaaggggtgaataaggaaaagattacacccttgacacttaaggaggagagccatacaacaacgtacttcttgaacatctcgtag

SEQ ID NO: 194152 - DNA, 261 bp, Artificial Sequence
  derived and/or modified sequence
tagcaagactccggcctgggatacaaggatctggacctgatcttctgcgcagacctcagaggggagggtgaatttcagacggtgaaagacgtggtgcttgattgtttattagattttcttcctgaaggagtcaacaaagagaaaattacccctcttaccctaaaggtatttcaccgattacttcgccactggcgggctgctgaaaagaccggcgtgcttttcgccgagcccctgtgcggcatcggaaggcctcaggtgtag

SEQ ID NO: 194153 - DNA, 5664 bp, Artificial Sequence
  derived and/or modified sequence
aaaaaaagtactgaagacattttccccgcacaactgctaaagctccagagacacgagcgtgtgtggcagcaagagccgccagttcgggaccaccgcagctggggtggcagcggcgcaggaggggtcgcggggagggagtggtgagcgcaggcggcaggggtctgggaaagacgaagtcgctatttgctgtctgagcgcgctcgcagctcctggaagtgttgccgcctctcggtttcgctctcgctcgctgcgctcctagaaggggcggccgcctccaggtgacacagacgggactctcgcttgcgctttccagatgcatcagagatacttttggactgaccagggccaagtggcgctcggcgggcactacatggcggagggtgaagggtacttcgccatgtctgaggacgagctggcctgcagcccctacatccccctaggcggcgacttcggcggcggcgacttcggcggcggcgacttcggcggcggcgacttcggcggtggcggcagcttcggtgggcattgcttggactattgcgaaagccctacggcgcactgcaatgtgctgaactgggagcaagtgcagcggctggacggcatcctgagcgagaccattccgattcacgggcgcggcaacttccccacgctcgagctgcagccgagcctgatcgtgaaggtggtgcggcggcgcctggccgagaagcgcattggcgtccgcgacgtgcgcctcaacggctcggcagccagccatgtcctgcaccaggacagcggcctgggctacaaggacctggacctcatcttctgcgccgacctgcgcggggaaggggagtttcagactgtgaaggacgtcgtgctggactgcctgttggacttcttacccgagggggtgaacaaagagaagatcacaccactcacgctcaaggaagcttatgtgcagaaaatggttaaagtgtgcaatgactctgaccgatggagtcttatatccctgtcaaacaacagtggcaaaaatgtggaactgaaatttgtggattccctccggaggcagtttgaattcagtgtagattcttttcaaatcaaattagactctcttctgctcttttatgaatgttcagagaacccaatgactgagacatttcaccccacaataatcggggagagcgtctatggcgatttccaggaagcctttgatcacctttgtaacaagatcattgccaccaggaacccagaggaaatccgagggggaggcctgcttaagtactgcaacctcttggtgaggggctttaggcccgcctctgatgaaatcaagacccttcaaaggtatatgtgttccaggtttttcatcgacttctcagacattggagagcagcagagaaaactggagtcctatttgcagaaccactttgtgggattggaagaccgcaagtatgagtatctcatgacccttcatggagtggtaaatgagagcacagtgtgcctgatgggacatgaaagaagacagactttaaaccttatcaccatgctggctatccgggtgttagctgaccaaaatgtcattcctaatgtggctaatgtcacttgctattaccagccagccccctatgtagcagatgccaactttagcaattactacattgcacaggttcagccagtattcacgtgccagcaacagacctactccacttggctaccctgcaattaagaatcatttaaaaatgtcctgtggggaagccatttcagacaagacaggagagaaaaaaaaaaaaaagaaaaaaaaaagagtgatccagcccttattagggatgtgttttgtgcaatgatgatatgctcctggttttaagtttggcaaagcttatgtatcttttaatagatgtgggagcatgatctcgaaaggatccttttcccttctcttattctcctacccaattggattctatcctgcaaaaaaagagagacctgtcattagaagcaaccaggttctcctgatacaagagaagaaatgtgtgatgacaatatgggtttgctgtatctgctcccatagctttgccataggaaaaaaaaaagtggaaagtttcttttaagatggaattcataaaagggaaaatacggaggaaaaaaggtctcactccaacttgtgaatcagtttaggagttcagatattaatagtaacaatacaggaaaaaggggaactccaacgttgggattactgtctgaggcttgtagcaagtgctttctgtggaatgatcttgttttgctaacaaacggcttgctccaaatgaacagtagtaggttggtgcagttctcgtaacaatcagcagaacttatgatgacacaatccattaattccagctgcgtgcatagatcacatttttaaaatgtaaaaatgcaagcaaaaacagctgtaacaaagaaagtgtgctcaaggaccaaagatttaacagataaaaatacccaattagaagagatatagtagactatatgaagagagattatatttgttacacaccaatatacatcaaagtgcctgttgccttctgaaaatttgaagtggcaaaattattttatggtttaatgattattttattttatcagggactgcctcaagaagaaaataacataagcttgtgaatggtggagaaaatgccctattttttcttgcaaatacttgtataaagttaacatttgttgatctgatattatcataggtacatgtgtatgtgtgtataaattatatgtgtgtgtgtatatatacattttatatatacattttatatgtatatatacacagtagattgactatgatctagaataatgtctcaaataggaaatgtttaaatactgtgtgtttttatgttttcaacaggataacatgagacgtgggcatattgcaatgatgaattaaatccacatctaaaaaaattaaatgaaggagggaaccaagtaatatatttcataggaagagcagaaattatactgttttagtgggatttttttttctttttttttttttctttggtgagccataaaattccacaaatgggagaatatttgtttggcagagcactcttttttatattgaactgccattttgacagttggaacccatttattaaaaaaaaaattgcattcctctatgatgtttaatctagtggatcatggatcagtaataggctacttaaatccctgactgctaaaaaggatttccggtgatctaaacactacttgctaatgtttaaatgaattttaatgaatgcattctgcatttctggaccactagaatttagtaatgtgaaatgaccctttttacagaatatttgcacaattgcttaaaatttatatatgagatatatattatatataacattttataaatcatgtcaatatgaaacatctttgatctggttgtcacactgcatttaaatatttagtactgtactttaaatcgctttccattaaatcaaatccaactttattttctttcttacaaaaataccagttatacctttgtgaaatgaactggcattactatttcagttcaataacagctaatcctaaaaccaccctttctcctagccagtagttcctctagatactggtctctgaaaatgcatttgttaaaaacaaaacaaaactaacacataagaaccttccctttgtgttgtgaaacaaccacataatctccacaaccttagtggatgactgcttgctatgataattcctcgaagacccaattagaagattttcatcatcagttaaagagagaccacgggagaaaaaaatatcctcctgttggcagtataatttgtttgtttgtttatctagggatcctcagatgcttagtgctaggttaatccaggttaatccgtctggactaccttttgtgcatctttctttgaagccttaatgggaacctgatgggtttgctgtagcagcttccttgtgaattctgtcagagctgcaacagccgctgcactgccactcagttttctaaggaactcctcctactaccatcttggctcagtctccctcacttaagccctgggtttgaaaaattaattgcaacttcccaggaaacattgttcagtttgcagattaagcctggcactcacctatcagaaaccagagctccgcctgcttagttgtttcaaagttttctgaaagaaaactaggggagcacttgtgaacacaggagcagctggtgatctgctttcttaccctaactcttgacaaatgagtcgtctactattttaaagagtctggaggtctctgactctgccataacaataacctgctgttaatttataacacagatttttgtttggaagagccttatttgaaatacactttgatttattttcttaaatatttatattcttttcttgcttacttcagggttggtagcttagttggaagtgccagcacctggcacctattcatatagaacaggctgtactcaagacaacttctagcatttactttaagacttatataatttatttctattttgtgtgtactatagtcttgtgcatatgtagttgaacacacagtgaaatatatgtctctctttgtggatgtgcggcctaaaaatttgaatgtctggtgagagagagccatgtgtataggtcagagaaaagaacagctcccgactccctattagcgcctgtgatttgtttccttttgtgtttatctggcctagtgtgctgtttctttaaaccaggaagaagttttgtcttttggaggctcttctcacctgtccagcctggcatgtcagagaacacatagcctgtgacaatgccgtttttaaaggtttacttaatttgcagtaaatccagctgcctcaagaactcctacaccaagatggacatttcctttccagaaatgggatcaagtatctgctcactttggtattggatggactaataatgtagctccaaaaatgcaaggatggaagaatatgtgtaatccaaaccaaggaaggaaatgaaaagtgaacgtactgtttttaccacccctttctgtttgcttattgttggttgcttcactgtgcataaagttgttttcaatgcaacgcttgttaaataaatattgtgaactattttgtaaatgaaatgtattatgttgaaagctgtcagttcaaaaataagcttttttgttgttgttgaagatgaagtgtgttaggtgaaaccaaaaagccaaaaaaagtaatttcatatatagcatctatttgaatataatctttctttaaaatttcttttagcatagcattttcagtgctaagaaagaatctctatgttatattttgttaaaataatggctttctaacaaagcaaatggtaaagtacaaagttggaagatgtcaagttaacgagacttgctgcaaagccttgcagaacggaggaggctctgcctgctggctgtctctccctccaacctctctacaatcatgcctgctttgaggtgttctgttgcagcaagctgcaccttgggtcactcttttggaatattttgactataggctgcgtcacaggcagaaaaggagttgatggaaaatggactaaaaaactgacatgtttgaatcagtgctagagggaacagattgtgaattttgtttacagcatccaatatttggatttttttgtaaataaaaaagttatttttttctattga

SEQ ID NO: 194154 - DNA, 5537 bp, Artificial Sequence
  derived and/or modified sequence
atgcagatgaggagggtgtggcgaacgtgccgctctgggccccggaagcgcagagaagcccggtataaaaaaagtactgaagacattttccccgcacaactgctaaagctccagagacacgagcgtgtgtggcagcaagagccgccagttcgggaccaccgcagctggggtggcagcggcgcaggaggggtcgcggggagggagtggactgaccagggccaagtggcgctcggcgggcactacatggcggagggtgaagggtacttcgccatgtctgaggacgagctggcctgcagcccctacatccccctaggcggcgacttcggcggcggcgacttcggcggcggcgacttcggcggcggcgacttcggcggtggcggcagcttcggtgggcattgcttggactattgcgaaagccctacggcgcactgcaatgtgctgaactgggagcaagtgcagcggctggacggcatcctgagcgagaccattccgattcacgggcgcggcaacttccccacgctcgagctgcagccgagcctgatcgtgaaggtggtgcggcggcgcctggccgagaagcgcattggcgtccgcgacgtgcgcctcaacggctcggcagccagccatgtcctgcaccaggacagcggcctgggctacaaggacctggacctcatcttctgcgccgacctgcgcggggaaggggagtttcagactgtgaaggacgtcgtgctggactgcctgttggacttcttacccgagggggtgaacaaagagaagatcacaccactcacgctcaaggaagcttatgtgcagaaaatggttaaagtgtgcaatgactctgaccgatggagtcttatatccctgtcaaacaacagtggcaaaaatgtggaactgaaatttgtggattccctccggaggcagtttgaattcagtgtagattcttttcaaatcaaattagactctcttctgctcttttatgaatgttcagagaacccaatgactgagacatttcaccccacaataatcggggagagcgtctatggcgatttccaggaagcctttgatcacctttgtaacaagatcattgccaccaggaacccagaggaaatccgagggggaggcctgcttaagtactgcaacctcttggtgaggggctttaggcccgcctctgatgaaatcaagacccttcaaaggtatatgtgttccaggtttttcatcgacttctcagacattggagagcagcagagaaaactggagtcctatttgcagaaccactttgtgggattggaagaccgcaagtatgagtatctcatgacccttcatggagtggtaaatgagagcacagtgtgcctgatgggacatgaaagaagacagactttaaaccttatcaccatgctggctatccgggtgttagctgaccaaaatgtcattcctaatgtggctaatgtcacttgctattaccagccagccccctatgtagcagatgccaactttagcaattactacattgcacaggttcagccagtattcacgtgccagcaacagacctactccacttggctaccctgcaattaagaatcatttaaaaatgtcctgtggggaagccatttcagacaagacaggagagaaaaaaaaaaaaaagaaaaaaaaaagagtgatccagcccttattagggatgtgttttgtgcaatgatgatatgctcctggttttaagtttggcaaagcttatgtatcttttaatagatgtgggagcatgatctcgaaaggatccttttcccttctcttattctcctacccaattggattctatcctgcaaaaaaagagagacctgtcattagaagcaaccaggttctcctgatacaagagaagaaatgtgtgatgacaatatgggtttgctgtatctgctcccatagctttgccataggaaaaaaaaaagtggaaagtttcttttaagatggaattcataaaagggaaaatacggaggaaaaaaggtctcactccaacttgtgaatcagtttaggagttcagatattaatagtaacaatacaggaaaaaggggaactccaacgttgggattactgtctgaggcttgtagcaagtgctttctgtggaatgatcttgttttgctaacaaacggcttgctccaaatgaacagtagtaggttggtgcagttctcgtaacaatcagcagaacttatgatgacacaatccattaattccagctgcgtgcatagatcacatttttaaaatgtaaaaatgcaagcaaaaacagctgtaacaaagaaagtgtgctcaaggaccaaagatttaacagataaaaatacccaattagaagagatatagtagactatatgaagagagattatatttgttacacaccaatatacatcaaagtgcctgttgccttctgaaaatttgaagtggcaaaattattttatggtttaatgattattttattttatcagggactgcctcaagaagaaaataacataagcttgtgaatggtggagaaaatgccctattttttcttgcaaatacttgtataaagttaacatttgttgatctgatattatcataggtacatgtgtatgtgtgtataaattatatgtgtgtgtgtatatatacattttatatatacattttatatgtatatatacacagtagattgactatgatctagaataatgtctcaaataggaaatgtttaaatactgtgtgtttttatgttttcaacaggataacatgagacgtgggcatattgcaatgatgaattaaatccacatctaaaaaaattaaatgaaggagggaaccaagtaatatatttcataggaagagcagaaattatactgttttagtgggatttttttttctttttttttttttctttggtgagccataaaattccacaaatgggagaatatttgtttggcagagcactcttttttatattgaactgccattttgacagttggaacccatttattaaaaaaaaaattgcattcctctatgatgtttaatctagtggatcatggatcagtaataggctacttaaatccctgactgctaaaaaggatttccggtgatctaaacactacttgctaatgtttaaatgaattttaatgaatgcattctgcatttctggaccactagaatttagtaatgtgaaatgaccctttttacagaatatttgcacaattgcttaaaatttatatatgagatatatattatatataacattttataaatcatgtcaatatgaaacatctttgatctggttgtcacactgcatttaaatatttagtactgtactttaaatcgctttccattaaatcaaatccaactttattttctttcttacaaaaataccagttatacctttgtgaaatgaactggcattactatttcagttcaataacagctaatcctaaaaccaccctttctcctagccagtagttcctctagatactggtctctgaaaatgcatttgttaaaaacaaaacaaaactaacacataagaaccttccctttgtgttgtgaaacaaccacataatctccacaaccttagtggatgactgcttgctatgataattcctcgaagacccaattagaagattttcatcatcagttaaagagagaccacgggagaaaaaaatatcctcctgttggcagtataatttgtttgtttgtttatctagggatcctcagatgcttagtgctaggttaatccaggttaatccgtctggactaccttttgtgcatctttctttgaagccttaatgggaacctgatgggtttgctgtagcagcttccttgtgaattctgtcagagctgcaacagccgctgcactgccactcagttttctaaggaactcctcctactaccatcttggctcagtctccctcacttaagccctgggtttgaaaaattaattgcaacttcccaggaaacattgttcagtttgcagattaagcctggcactcacctatcagaaaccagagctccgcctgcttagttgtttcaaagttttctgaaagaaaactaggggagcacttgtgaacacaggagcagctggtgatctgctttcttaccctaactcttgacaaatgagtcgtctactattttaaagagtctggaggtctctgactctgccataacaataacctgctgttaatttataacacagatttttgtttggaagagccttatttgaaatacactttgatttattttcttaaatatttatattcttttcttgcttacttcagggttggtagcttagttggaagtgccagcacctggcacctattcatatagaacaggctgtactcaagacaacttctagcatttactttaagacttatataatttatttctattttgtgtgtactatagtcttgtgcatatgtagttgaacacacagtgaaatatatgtctctctttgtggatgtgcggcctaaaaatttgaatgtctggtgagagagagccatgtgtataggtcagagaaaagaacagctcccgactccctattagcgcctgtgatttgtttccttttgtgtttatctggcctagtgtgctgtttctttaaaccaggaagaagttttgtcttttggaggctcttctcacctgtccagcctggcatgtcagagaacacatagcctgtgacaatgccgtttttaaaggtttacttaatttgcagtaaatccagctgcctcaagaactcctacaccaagatggacatttcctttccagaaatgggatcaagtatctgctcactttggtattggatggactaataatgtagctccaaaaatgcaaggatggaagaatatgtgtaatccaaaccaaggaaggaaatgaaaagtgaacgtactgtttttaccacccctttctgtttgcttattgttggttgcttcactgtgcataaagttgttttcaatgcaacgcttgttaaataaatattgtgaactattttgtaaatgaaatgtattatgttgaaagctgtcagttcaaaaataagcttttttgttgttgttgaagatgaagtgtgttaggtgaaaccaaaaagccaaaaaaagtaatttcatatatagcatctatttgaatataatctttctttaaaatttcttttagcatagcattttcagtgctaagaaagaatctctatgttatattttgttaaaataatggctttctaacaaagcaaatggtaaagtacaaagttggaagatgtcaagttaacgagacttgctgcaaagccttgcagaacggaggaggctctgcctgctggctgtctctccctccaacctctctacaatcatgcctgctttgaggtgttctgttgcagcaagctgcaccttgggtcactcttttggaatattttgactataggctgcgtcacaggcagaaaaggagttgatggaaaatggactaaaaaactgacatgtttgaatcagtgctagagggaacagattgtgaattttgtttacagcatccaatatttggatttttttgtaaataaaaaagttatttttttctattga

SEQ ID NO: 194155 - DNA, 546 bp, Artificial Sequence
  derived and/or modified sequence
gaagcgcattggcgtccgcgacgtgcgcctcaacggctcggcagccagccatgtcctgcaccaggacagcggcctgggctacaaggacctggacctcatcttctgcgccgacctgcgcggggaaggggagtttcagactgtgaaggacgtcgtgctggactgcctgttggacttcttacccgagggggtgaacaaagagaagatcacaccactcacgctcaaggaagaaagtcacacaaccacatattttctgaacataagctgaacttctacttccatggagtgagttacttcacctcattggcaaaagacaacagaagagtccaaagtctgaggggactgggcaagcttctgtcacatgctttcagaatgaagacaatctgcaagaattttaagttgtgacctctacagagaaaagaatgaaaagtagccaaatctccacatgagagattttggactattttgcagtgtaaaccccatctgatttatatgaagtaagcagactttctctccaagagttcaaaataaattaattctaatgctaaa

SEQ ID NO: 194156 - DNA, 356 bp, Artificial Sequence
  derived and/or modified sequence
accaggacagcggcctgggctacaaggacctggacctcatcttctgcgccgacctgcgcggggaaggggagtttcagactgtgaaggacgtcgtgctggactgcctgttggacttcttacccgagggggtgaacaaagagaagatcacaccactcacgctcaaggtttttcatcgacttctcagacattggagagcagcagagaaaactggagtcctatttgcagaaccactttgtgggattggaagaccgcaagtatgagtatctcatgacccttcatggagtggtaaatgagagcacagtgtgcctgatgggacatgaaagaagacagactttaaaccttatcaccatgctggc

SEQ ID NO: 194157 - DNA, 1386 bp, Artificial Sequence
  derived and/or modified sequence
atgcaccagcgctacttctggacagaccagggccaggtggccctgggcggccactacatggccgagggggagggctactttgccatgtctgaagatgagctggcctgcagcccctacatccccctgggcggggactttggaggaggagactttggaggaggagactttggaggaggagactttggaggcggcggcagctttggaggccactgcctggactactgtgagagccccacagcccactgcaatgtgctgaactgggagcaggtgcagaggctggatggcatcctgtctgagaccatccccatccacggccggggcaacttccccaccctggagctgcagcccagcctgattgtgaaggtggtgagaagaaggctggccgagaagagaattggagtgagagatgtgcggctgaatggcagcgctgccagccacgtgctgcaccaggacagcggcctgggctacaaggacctggacctgatcttctgtgccgacctgcggggggagggggagttccagacagtgaaggatgtggtgctggactgcctgctggacttcctgcctgagggcgtgaacaaggagaagatcacccccctgaccctgaaggaggcctacgtgcagaagatggtgaaggtgtgcaatgacagcgaccgctggagcctcatcagcctgagcaacaacagcggcaagaatgtggagctgaagtttgtggacagcctgcggcggcagtttgagttctctgtggacagcttccagatcaagctggacagcctgctgctcttctatgagtgcagcgagaaccccatgacagagaccttccaccccaccatcattggagagagcgtgtatggagacttccaggaggcctttgaccacctgtgcaacaagatcatcgccaccaggaaccctgaggagatccggggcggcggcctgctgaagtactgcaacctgctggtgcggggcttccggcctgccagtgatgagatcaagaccctgcagcgctacatgtgcagccgcttcttcatcgacttcagtgacatcggggagcagcagaggaagctggagagctacctgcagaaccactttgtgggcctggaggacagaaaatatgagtacctgatgaccctgcacggcgtggtgaatgaaagcacagtgtgcctgatgggccatgaaagacggcagaccctgaacctgatcaccatgctggccatccgggtgctggccgaccagaatgtcatccccaacgtggccaacgtgacctgctactaccagcctgccccctacgtggctgatgccaacttcagcaactactacatcgcccaggtgcagcctgtgttcacctgccagcagcagacctacagcacctggctgccctgcaactag

SEQ ID NO: 194158 - DNA, 1572 bp, Artificial Sequence
  derived and/or modified sequence
atgcagatgagaagagtgtggaggacctgccgcagcggccccaggaagagaagagaggcccgctacaagaagagcacagaggacatcttccctgcccagctgctgaagctgcagagacatgagcgggtgtggcagcaggagccccctgtgcgggaccaccgctcctggggcggcagcggggccggcggcgtggccggccgggagtggacagaccagggccaggtggccctgggcggccactacatggccgagggggagggctactttgccatgtctgaagatgagctggcctgcagcccctacatccccctgggcggggactttggaggaggagactttggaggaggagactttggaggaggagactttggaggcggcggcagctttggaggccactgcctggactactgtgagagccccacagcccactgcaatgtgctgaactgggagcaggtgcagaggctggatggcatcctgtctgagaccatccccatccacggccggggcaacttccccaccctggagctgcagcccagcctgattgtgaaggtggtgagaagaaggctggccgagaagagaattggagtgagagatgtgcggctgaatggcagcgctgccagccacgtgctgcaccaggacagcggcctgggctacaaggacctggacctgatcttctgtgccgacctgcggggggagggggagttccagacagtgaaggatgtggtgctggactgcctgctggacttcctgcctgagggcgtgaacaaggagaagatcacccccctgaccctgaaggaggcctacgtgcagaagatggtgaaggtgtgcaatgacagcgaccgctggagcctcatcagcctgagcaacaacagcggcaagaatgtggagctgaagtttgtggacagcctgcggcggcagtttgagttctctgtggacagcttccagatcaagctggacagcctgctgctcttctatgagtgcagcgagaaccccatgacagagaccttccaccccaccatcattggagagagcgtgtatggagacttccaggaggcctttgaccacctgtgcaacaagatcatcgccaccaggaaccctgaggagatccggggcggcggcctgctgaagtactgcaacctgctggtgcggggcttccggcctgccagtgatgagatcaagaccctgcagcgctacatgtgcagccgcttcttcatcgacttcagtgacatcggggagcagcagaggaagctggagagctacctgcagaaccactttgtgggcctggaggacagaaaatatgagtacctgatgaccctgcacggcgtggtgaatgaaagcacagtgtgcctgatgggccatgaaagacggcagaccctgaacctgatcaccatgctggccatccgggtgctggccgaccagaatgtcatccccaacgtggccaacgtgacctgctactaccagcctgccccctacgtggctgatgccaacttcagcaactactacatcgcccaggtgcagcctgtgttcacctgccagcagcagacctacagcacctggctgccctgcaactag

SEQ ID NO: 194159 - DNA, 267 bp, Artificial Sequence
  derived and/or modified sequence
tgaaaaagaattggagtgagagatgtgcggctgaatggcagcgctgccagccacgtgctgcaccaggacagcggcctgggctacaaggacctggacctgatcttctgtgccgacctgcggggggagggggagttccagacagtgaaggatgtggtgctggactgcctgctggacttcctgcctgagggcgtgaacaaggagaagatcacccccctgaccctgaaggaggagagccacaccaccacctacttcctgaacatctcctag

SEQ ID NO: 194160 - DNA, 261 bp, Artificial Sequence
  derived and/or modified sequence
tgacaggacagcggcctgggctacaaggacctggacctgatcttctgtgccgacctgcggggggagggggagttccagacagtgaaggatgtggtgctggactgcctgctggacttcctgcctgagggcgtgaacaaggagaagatcacccccctgaccctgaaggtgttccaccggctgctgcggcactggagggctgctgagaagacaggagtgctgtttgctgagcccctgtgtggcatcggccggccccaggtgtag

SEQ ID NO: 194161 - DNA, 1386 bp, Artificial Sequence
  derived and/or modified sequence
atgcaccagcggtacttctggaccgaccagggccaggtggccctgggaggtcactacatggccgagggagagggttattttgccatgtcggaagacgagttagcatgttctccctatattccgctgggaggtgacttcggtggcggagatttcggcggcggagacttcggtggaggagatttcggcgggggtggaagctttgggggacattgcctggactattgtgagtcccccaccgcccactgtaacgtcttgaattgggagcaggttcaacggctggatggcatcctctcggagactatacccatccatggcagaggcaatttccccaccctggagctccaaccgtctctgattgtcaaggtcgttcggcgccgcctcgctgaaaaaaggatcggggtgcgggacgtacgtttaaacggtagcgcggccagccatgtgttgcaccaggattctggactgggttataaggacctcgatttaatcttttgcgcggatttgagaggggaaggggaattccagactgtcaaggacgtggtccttgactgccttctcgatttccttcccgagggggtgaataaggagaaaattacccctctgactctgaaagaggcctatgtgcaaaaaatggtaaaagtgtgtaacgacagcgacagatggtcactgatttccctgagtaataattccggaaaaaacgtcgaattgaaattcgtagactctctgcggcgtcagttcgagttctcggtggattcattccagataaagctggactcactcctccttttctacgaatgcagcgagaaccccatgacggagacgtttcaccccaccatcattggggagtccgtctatggcgatttccaggaagcctttgatcacctttgcaataaaatcattgctacccgcaatcccgaggaaattagaggaggagggctattgaagtattgcaatctgcttgtgagggggtttaggcctgcctccgatgagatcaaaacactacaaaggtacatgtgctcaagattctttatcgactttagtgatattggtgaacagcagaggaagctagaaagttacctccagaatcacttcgtcggcctcgaagatcgaaagtatgaatacctcatgactctgcatggggttgttaacgaatccaccgtttgccttatgggacacgagcggcggcagacactaaatttgattactatgctggcaatccgggttctggcggatcagaacgttatccccaatgtggctaatgtaacttgctactatcagcctgccccctacgtggctgatgcgaattttagcaattactacattgctcaggttcagcccgtgttcacatgtcaacagcagacctatagtacctggctgccctgcaactag

SEQ ID NO: 194162 - DNA, 1572 bp, Artificial Sequence
  derived and/or modified sequence
atgcagatgcggcgggtgtggcggacctgccggagcggcccccggaagagacgcgaagcgcgatataagaagtctacggaggatatttttccggcccagcttctgaaactgcagaggcacgaacgcgtatggcaacaggaaccacccgtgagagaccacagatcttggggcgggtctggagccggaggcgtggccggccgggagtggacggatcagggtcaagtagctttgggcggacactatatggccgaaggggagggatacttcgccatgtccgaggacgaactggcctgtagtccctacatcccacttggaggtgatttcggcggaggcgatttcggtggaggagactttggcggcggggattttggtggggggggtagttttggcggccactgcctcgattactgcgaatcaccgaccgcacactgcaacgtgctcaactgggaacaggtccagaggcttgacggaatcctctctgaaaccattccaatccacgggcgaggtaacttccctaccttagaactgcaacctagtttgattgtgaaagtcgtccgaagacggcttgcagagaagcgcatcggggtgcgagacgtccgactgaatggctccgctgccagccacgtgctgcaccaagatagtgggttggggtataaagacttggaccttatattttgcgccgatctcaggggagaaggggagttccagaccgtgaaggacgtcgtcctagactgtctgctcgacttcttgcctgagggcgtgaacaaggagaagataacgcctctgacccttaaggaagcctacgttcagaaaatggttaaggtctgcaatgatagtgaccgctggtctctcatttccctcagtaacaatagcgggaaaaatgtagaactcaaatttgtagattctttgcgcagacagtttgaattctcagtggatagttttcagattaaattagattcccttctccttttctacgagtgttctgaaaatccgatgacggagacctttcatcctactattataggggaaagtgtgtacggtgattttcaagaagcctttgatcacttgtgtaacaaaataatcgccactaggaaccccgaggaaatccgaggaggtggcttacttaagtattgcaatctcctggtgaggggattcagacccgcctcagatgaaatcaagacacttcagcggtatatgtgtagtcggttcttcatcgacttttctgatataggcgagcaacaacgtaagctggaaagctacttacaaaaccattttgtcggcttggaagatagaaagtatgaatacctgatgaccctgcacggcgtcgtcaacgaaagtacagtgtgccttatgggacacgagagacggcagaccctgaatctcattaccatgctggcgattagagtcctcgccgaccagaatgtgatccccaatgtggccaatgtaacttgttattaccagcctgccccttacgttgctgatgcaaacttcagtaactactacatcgcacaagtgcagcccgtgttcacttgccagcagcagacctacagtacctggctgccatgtaattag

SEQ ID NO: 194163 - DNA, 267 bp, Artificial Sequence
  derived and/or modified sequence
tgaaagcggatcggcgtgcgggacgtgcggctgaacggcagcgccgcgtcccacgtgcttcaccaggactcgggactcggctacaaggatttggatctcatcttctgtgcagaccttaggggagagggagagtttcaaactgtcaaggacgtggtgctcgattgcctcctggattttctaccagaaggcgtgaataaggaaaagattacgccactcaccctgaaagaggaatcacacacaacaacatacttcctgaacatctcttag

SEQ ID NO: 194164 - DNA, 261 bp, Artificial Sequence
  derived and/or modified sequence
tgacaggacagcggcctgggctacaaggacctggacctgatcttctgcgccgacctcaggggcgaaggagaattccaaactgtgaaagacgtagtcttagactgtctgctggatttccttccagagggtgtgaacaaggaaaagatcacaccgttaaccctgaaggtctttcaccgccttctgaggcattggagggcagccgaaaaaaccggagttctgtttgcggaaccactatgcggaattggcagaccccaggtgtag

SEQ ID NO: 194165 - DNA, 1386 bp, Artificial Sequence
  derived and/or modified sequence
atgcaccagagatacttttggaccgaccagggccaagtcgcccttggcggacattacatggcagaaggtgagggttattttgccatgtccgaggacgaactggcttgctccccttacattccccttgggggagatttcgggggtggggacttcggtggtggggactttggcggaggtgacttcggcggaggcggatcatttgggggacactgtctcgactactgcgagtctccaaccgcacattgtaatgtcctgaactgggagcaggtccaacgccttgatgggatcctgtctgagactattcccattcatggacggggtaatttcccgaccctggagttgcagccatccctgattgttaaagtcgtccgacgccgtttagctgagaagagaataggggttcgagacgtcaggttgaatggctcagctgccagccacgtcctgcaccaggatagcgggctgggatacaaggacctagatctcatcttctgtgccgatttgagaggcgagggagagtttcaaaccgtaaaagatgtcgtcctggactgcttgctggactttctgcccgagggagtaaataaagagaagatcactcctctaactctcaaggaagcctacgtgcagaaaatggtcaaagtgtgtaacgattctgacagatggagtctgataagtctctctaataattccggcaaaaatgtagagctgaaatttgtggacagcctgagacgccagtttgaattcagcgttgactcttttcaaatcaaacttgattctctcctacttttctatgagtgttccgagaaccccatgaccgagacctttcatcccactataatcggagaatctgtttacggggattttcaagaagcattcgaccacctttgtaataagattatcgctaccagaaatccggaagagatcagaggtggaggattgttaaaatattgcaatctgctggtgcggggttttaggccggcatctgatgagataaagacgttacaacgttatatgtgcagtcgtttctttatcgatttcagcgacattggtgagcaacaaaggaaactggaaagctacctgcagaaccacttcgtgggactcgaggaccgtaagtatgagtacctcatgactttgcacggagtggttaacgaatcaacagtttgccttatgggtcacgagaggcgacaaacattgaatctgattaccatgttggctatcagggtgctagcggaccagaatgtaatacctaatgtggccaatgtgacatgttattatcagcccgctccctacgtggctgatgccaattttagcaattactatatcgcgcaggtccagccagtcttcacttgccagcagcagacttatagcacctggctcccgtgcaattag

SEQ ID NO: 194166 - DNA, 1572 bp, Artificial Sequence
  derived and/or modified sequence
atgcagatgcgtcgggtctggagaacatgcaggtctggtcccagaaagcgcagggaagcgagatacaaaaaaagcactgaggacatttttcctgcgcagctcctcaagctgcagagacacgagagggtatggcagcaggagcctccggtgcgtgaccaccgttcctggggagggtcgggcgctgggggtgttgccggtcgggagtggaccgaccaggggcaggttgcattagggggacattatatggcagaaggcgagggttattttgctatgagcgaggacgaactggcctgctccccctacataccattgggcggtgacttcgggggtggcgactttgggggtggcgactttggcggtggcgatttcgggggtggcggatcttttgggggacactgtctggattactgcgagtcccccactgcgcattgcaacgtgctcaactgggagcaggtacaacgcttggacggtatcttgtcagagaccattcctattcacggtagaggaaacttcccaacccttgaactgcagccatctctgatagtgaaggttgtgaggcgccgtcttgcagagaaaagaataggcgttcgggatgtcaggctgaacgggtctgcggctagtcacgttcttcaccaagactcaggactgggctataaggatctcgatctcattttttgcgctgatctgcgtggcgagggtgagtttcaaacagtgaaagacgttgtactagactgtctgctcgatttcctccccgagggtgtaaataaggagaaaattacgcccctgacactgaaggaagcctatgtgcagaagatggtgaaggtttgcaacgatagcgaccgatggtcactaatcagcctatcaaacaattccggaaaaaacgtggaactgaagtttgtcgattcgctacgcagacagttcgaattttctgtggactcctttcaaattaaactagattctctgctgttgttttacgagtgttcagaaaacccaatgaccgaaacatttcatcctacgatcattggcgaatccgtttatggagacttccaagaggccttcgaccacctgtgtaacaagattatcgcgactcgcaatcctgaggagatacgaggaggcggacttcttaaatactgcaaccttttggttagggggtttagaccagccagtgatgagatcaaaactttacagagatacatgtgttcaaggttctttattgatttctctgacattggtgagcagcagagaaaattggagtcctacttacaaaatcatttcgtcgggctggaggaccgaaagtacgaataccttatgacattacacggtgtggtgaatgagagcacagtttgcctgatggggcatgagcggaggcaaaccttaaaccttatcaccatgctggctatccgagtgttagccgatcagaatgtgattccaaatgtcgcaaatgtgacgtgctactatcaaccagcaccctatgtcgcagacgcaaacttttccaattattacatcgcacaggtgcagcccgtgttcacttgccaacaacaaacctattccacatggctcccatgcaattag

SEQ ID NO: 194167 - DNA, 267 bp, Artificial Sequence
  derived and/or modified sequence
tgaaaacgtatcggagtcagagatgttaggctgaacggctccgccgcaagccacgtgctccaccaagattctggcctaggctataaggatctcgacctaatattttgtgccgaccttcgcggagagggcgaattccagaccgttaaggatgtggttttggactgcctgctggactttctgcccgagggagtgaataaagagaagatcacacctctgactttgaaggaggaatctcacactaccacctactttcttaacatctcctag

SEQ ID NO: 194168 - DNA, 261 bp, Artificial Sequence
  derived and/or modified sequence
taacaggattccggactgggatacaaagaccttgacctgatcttctgcgcggacctgcgcggagaaggcgagtttcagactgtgaaggacgtcgtgttagattgcctcctggattttctgccagagggggtcaataaggagaagatcacccccctgacgctaaaagtgttccacaggcttctccgtcattggagagccgctgagaagaccggcgtgttattcgccgaacccctttgtggtatcggcagaccgcaggtatag

SEQ ID NO: 194169 - DNA, 5609 bp, Artificial Sequence
  derived and/or modified sequence
aaaaaaagtactgaagacattttccccgcacaactgctaaagctccagagacacgagcgtgtgtggcagcaagagccgccagttcgggaccaccgcagctggggtggcagcggcgcaggaggggtcgcggggagggagtggtgagcgcaggcggcaggggtctgggaaagacgaagtcgctatttgctgtctgagcgcgctcgcagctcctggaagtgttgccgcctctcggtttcgctctcgctcgctgcgctcctagaaggggcggccgcctccaggactgaccagggccaagtggcgctcggcgggcactacatggcggagggtgaagggtacttcgccatgtctgaggacgagctggcctgcagcccctacatccccctaggcggcgacttcggcggcggcgacttcggcggcggcgacttcggcggcggcgacttcggcggtggcggcagcttcggtgggcattgcttggactattgcgaaagccctacggcgcactgcaatgtgctgaactgggagcaagtgcagcggctggacggcatcctgagcgagaccattccgattcacgggcgcggcaacttccccacgctcgagctgcagccgagcctgatcgtgaaggtggtgcggcggcgcctggccgagaagcgcattggcgtccgcgacgtgcgcctcaacggctcggcagccagccatgtcctgcaccaggacagcggcctgggctacaaggacctggacctcatcttctgcgccgacctgcgcggggaaggggagtttcagactgtgaaggacgtcgtgctggactgcctgttggacttcttacccgagggggtgaacaaagagaagatcacaccactcacgctcaaggaagcttatgtgcagaaaatggttaaagtgtgcaatgactctgaccgatggagtcttatatccctgtcaaacaacagtggcaaaaatgtggaactgaaatttgtggattccctccggaggcagtttgaattcagtgtagattcttttcaaatcaaattagactctcttctgctcttttatgaatgttcagagaacccaatgactgagacatttcaccccacaataatcggggagagcgtctatggcgatttccaggaagcctttgatcacctttgtaacaagatcattgccaccaggaacccagaggaaatccgagggggaggcctgcttaagtactgcaacctcttggtgaggggctttaggcccgcctctgatgaaatcaagacccttcaaaggtatatgtgttccaggtttttcatcgacttctcagacattggagagcagcagagaaaactggagtcctatttgcagaaccactttgtgggattggaagaccgcaagtatgagtatctcatgacccttcatggagtggtaaatgagagcacagtgtgcctgatgggacatgaaagaagacagactttaaaccttatcaccatgctggctatccgggtgttagctgaccaaaatgtcattcctaatgtggctaatgtcacttgctattaccagccagccccctatgtagcagatgccaactttagcaattactacattgcacaggttcagccagtattcacgtgccagcaacagacctactccacttggctaccctgcaattaagaatcatttaaaaatgtcctgtggggaagccatttcagacaagacaggagagaaaaaaaaaaaaaagaaaaaaaaaagagtgatccagcccttattagggatgtgttttgtgcaatgatgatatgctcctggttttaagtttggcaaagcttatgtatcttttaatagatgtgggagcatgatctcgaaaggatccttttcccttctcttattctcctacccaattggattctatcctgcaaaaaaagagagacctgtcattagaagcaaccaggttctcctgatacaagagaagaaatgtgtgatgacaatatgggtttgctgtatctgctcccatagctttgccataggaaaaaaaaaagtggaaagtttcttttaagatggaattcataaaagggaaaatacggaggaaaaaaggtctcactccaacttgtgaatcagtttaggagttcagatattaatagtaacaatacaggaaaaaggggaactccaacgttgggattactgtctgaggcttgtagcaagtgctttctgtggaatgatcttgttttgctaacaaacggcttgctccaaatgaacagtagtaggttggtgcagttctcgtaacaatcagcagaacttatgatgacacaatccattaattccagctgcgtgcatagatcacatttttaaaatgtaaaaatgcaagcaaaaacagctgtaacaaagaaagtgtgctcaaggaccaaagatttaacagataaaaatacccaattagaagagatatagtagactatatgaagagagattatatttgttacacaccaatatacatcaaagtgcctgttgccttctgaaaatttgaagtggcaaaattattttatggtttaatgattattttattttatcagggactgcctcaagaagaaaataacataagcttgtgaatggtggagaaaatgccctattttttcttgcaaatacttgtataaagttaacatttgttgatctgatattatcataggtacatgtgtatgtgtgtataaattatatgtgtgtgtgtatatatacattttatatatacattttatatgtatatatacacagtagattgactatgatctagaataatgtctcaaataggaaatgtttaaatactgtgtgtttttatgttttcaacaggataacatgagacgtgggcatattgcaatgatgaattaaatccacatctaaaaaaattaaatgaaggagggaaccaagtaatatatttcataggaagagcagaaattatactgttttagtgggatttttttttctttttttttttttctttggtgagccataaaattccacaaatgggagaatatttgtttggcagagcactcttttttatattgaactgccattttgacagttggaacccatttattaaaaaaaaaattgcattcctctatgatgtttaatctagtggatcatggatcagtaataggctacttaaatccctgactgctaaaaaggatttccggtgatctaaacactacttgctaatgtttaaatgaattttaatgaatgcattctgcatttctggaccactagaatttagtaatgtgaaatgaccctttttacagaatatttgcacaattgcttaaaatttatatatgagatatatattatatataacattttataaatcatgtcaatatgaaacatctttgatctggttgtcacactgcatttaaatatttagtactgtactttaaatcgctttccattaaatcaaatccaactttattttctttcttacaaaaataccagttatacctttgtgaaatgaactggcattactatttcagttcaataacagctaatcctaaaaccaccctttctcctagccagtagttcctctagatactggtctctgaaaatgcatttgttaaaaacaaaacaaaactaacacataagaaccttccctttgtgttgtgaaacaaccacataatctccacaaccttagtggatgactgcttgctatgataattcctcgaagacccaattagaagattttcatcatcagttaaagagagaccacgggagaaaaaaatatcctcctgttggcagtataatttgtttgtttgtttatctagggatcctcagatgcttagtgctaggttaatccaggttaatccgtctggactaccttttgtgcatctttctttgaagccttaatgggaacctgatgggtttgctgtagcagcttccttgtgaattctgtcagagctgcaacagccgctgcactgccactcagttttctaaggaactcctcctactaccatcttggctcagtctccctcacttaagccctgggtttgaaaaattaattgcaacttcccaggaaacattgttcagtttgcagattaagcctggcactcacctatcagaaaccagagctccgcctgcttagttgtttcaaagttttctgaaagaaaactaggggagcacttgtgaacacaggagcagctggtgatctgctttcttaccctaactcttgacaaatgagtcgtctactattttaaagagtctggaggtctctgactctgccataacaataacctgctgttaatttataacacagatttttgtttggaagagccttatttgaaatacactttgatttattttcttaaatatttatattcttttcttgcttacttcagggttggtagcttagttggaagtgccagcacctggcacctattcatatagaacaggctgtactcaagacaacttctagcatttactttaagacttatataatttatttctattttgtgtgtactatagtcttgtgcatatgtagttgaacacacagtgaaatatatgtctctctttgtggatgtgcggcctaaaaatttgaatgtctggtgagagagagccatgtgtataggtcagagaaaagaacagctcccgactccctattagcgcctgtgatttgtttccttttgtgtttatctggcctagtgtgctgtttctttaaaccaggaagaagttttgtcttttggaggctcttctcacctgtccagcctggcatgtcagagaacacatagcctgtgacaatgccgtttttaaaggtttacttaatttgcagtaaatccagctgcctcaagaactcctacaccaagatggacatttcctttccagaaatgggatcaagtatctgctcactttggtattggatggactaataatgtagctccaaaaatgcaaggatggaagaatatgtgtaatccaaaccaaggaaggaaatgaaaagtgaacgtactgtttttaccacccctttctgtttgcttattgttggttgcttcactgtgcataaagttgttttcaatgcaacgcttgttaaataaatattgtgaactattttgtaaatgaaatgtattatgttgaaagctgtcagttcaaaaataagcttttttgttgttgttgaagatgaagtgtgttaggtgaaaccaaaaagccaaaaaaagtaatttcatatatagcatctatttgaatataatctttctttaaaatttcttttagcatagcattttcagtgctaagaaagaatctctatgttatattttgttaaaataatggctttctaacaaagcaaatggtaaagtacaaagttggaagatgtcaagttaacgagacttgctgcaaagccttgcagaacggaggaggctctgcctgctggctgtctctccctccaacctctctacaatcatgcctgctttgaggtgttctgttgcagcaagctgcaccttgggtcactcttttggaatattttgactataggctgcgtcacaggcagaaaaggagttgatggaaaatggactaaaaaactgacatgtttgaatcagtgctagagggaacagattgtgaattttgtttacagcatccaatatttggatttttttgtaaataaaaaagttatttttttctattga

SEQ ID NO: 194170 - DNA, 1329 bp, Artificial Sequence
  derived and/or modified sequence
atggccgagggggaagggtattttgccatgtccgaggacgagctagcttgttcaccttacatcccactgggaggagactttggtggtggcgattttggaggcggcgatttcgggggcggggacttcgggggcggcggtagttttgggggacactgcttggactactgcgaaagccccactgcccattgtaacgtccttaattgggaacaagtgcaacgcctagacgggatcctgtccgaaactattcccatccacggtcgcggtaacttccccaccctggagctgcagccaagcttgattgtgaaagtggtgcggcggagactggccgaaaagcgtattggagtgcgggacgtgaggctgaatggctctgctgcctcacatgtgcttcaccaagactccgggttgggatacaaagatctggatctgatattttgtgctgatcttagaggagaaggagagtttcaaaccgtaaaagatgtggttctcgattgtctgctggattttctgcccgagggggtgaacaaggaaaagattacccctctcactcttaaagaggcctacgtccagaaaatggttaaggtgtgtaatgattccgatcggtggagcctgattagcctatcaaacaattcagggaagaatgtggagctcaagttcgtcgatagcctgaggcgtcagttcgagtttagtgtggacagctttcagattaaactggactcacttctgctgttttatgaatgctctgaaaaccccatgacggagacctttcatcctaccataattggagagtccgtatatggggattttcaggaggcatttgaccacctctgcaacaagattattgccacccgtaacccggaggaaattagaggcggtggtctgctcaaatactgcaacttactggtgcggggcttcagacctgccagtgacgaaattaagacactgcagaggtatatgtgcagccggttctttattgactttagcgatatcggtgagcagcagaggaaacttgaatcgtacctgcagaatcatttcgtaggcctcgaggatagaaaatacgaatatttaatgaccctgcacggtgtggtgaatgagagcaccgtctgcctgatgggacatgaacgccgtcagaccctgaacctcattacaatgctggctataagagtgttagctgaccagaacgttatcccaaatgtggctaacgtgacctgttactaccagcccgcaccttacgtggcggacgccaacttttctaattactatatcgctcaggttcagcccgtcttcacttgtcagcagcagacttattctacctggcttccatgtaattag

SEQ ID NO: 194171 - DNA, 1329 bp, Artificial Sequence
  derived and/or modified sequence
atggccgagggggagggctactttgccatgtctgaagatgagctggcctgcagcccctacatccccctgggcggggactttggaggaggagactttggaggaggagactttggaggaggagactttggaggcggcggcagctttggaggccactgcctggactactgtgagagccccacagcccactgcaatgtgctgaactgggagcaggtgcagaggctggatggcatcctgtctgagaccatccccatccacggccggggcaacttccccaccctggagctgcagcccagcctcatcgtgaaggtggtgagaagaaggctggccgagaagagaattggagtgagagatgtgcggctgaatggatctgctgccagccacgtgctgcaccaggacagcggcctgggctacaaggacctggacctgatcttctgtgccgacctgcggggggagggggagttccagacagtgaaggatgtggtgctggactgcctgctggacttcctgcctgagggcgtgaacaaggagaagatcacccccctgaccctgaaggaggcctacgtgcagaagatggtgaaggtgtgcaatgacagcgaccgctggagcctcatcagcctgagcaacaacagcggcaagaatgtggagctgaagtttgtggacagcctgcggcggcagtttgagttctctgtggacagcttccagatcaagctggacagcctgctgctcttctatgaatgttctgagaaccccatgacagagaccttccaccccaccatcatcggggagagcgtgtatggagacttccaggaggcctttgaccacctgtgcaacaagatcatcgccaccagaaatcctgaggagatccggggcggcggcctgctgaagtactgcaacctgctggtgcggggcttccggcctgccagtgatgagatcaagaccctgcagcgctacatgtgcagccgcttcttcatcgacttcagtgacattggagagcagcagaggaagctggagagctacctgcagaaccactttgtgggcctggaggacagaaaatatgagtacctgatgaccctgcatggagtggtgaatgaaagcacagtgtgcctgatgggccacgagcggcggcagaccctgaacctgatcaccatgctggccatccgggtgctggccgaccagaatgtcatccccaacgtggccaacgtgacctgctactaccagcctgccccctacgtggctgatgccaacttcagcaactactacatcgcccaggtgcagcccgtcttcacctgccagcagcagacctacagcacctggctgccctgcaactag

SEQ ID NO: 194172 - DNA, 1329 bp, Artificial Sequence
  derived and/or modified sequence
atggccgagggcgagggctacttcgccatgagcgaggacgagctggcctgctccccctatattccactcggtggtgactttggcggaggagacttcggcgggggtgatttcggtggaggggacttcggcggtggagggtcattcggaggtcactgcctggattattgtgagtcaccgacggcccactgtaacgtgcttaattgggaacaggtgcagcgactggatgggatcctgtcagagactatcccgattcatggtagaggtaattttccgacactagaactgcagccctctttaattgtgaaggtagtgcggcgaaggctcgccgagaagcgtataggtgtgcgggatgtgagactgaatggctccgcagcgagtcatgtcctgcaccaggattcagggcttgggtacaaggacctggacctgattttttgtgctgatctgcgtggcgaaggtgagttccagaccgtgaaggacgtggtgcttgactgtctcctggacttcttaccggagggagtgaataaggaaaagatcacaccgttaacactgaaagaggcctatgtccagaagatggtgaaagtgtgcaacgactcagatcgttggagtctgatctcccttagcaataattctggcaaaaacgtagagctgaaatttgtagactctctcagaagacagttcgagttctccgtcgattcctttcaaatcaagctcgattcattgctactcttttacgaatgctcagaaaatccgatgacggagacctttcaccccaccatcatcggggaatcagtgtacggtgatttccaagaagccttcgaccatctctgcaacaaaatcatcgctaccaggaaccccgaagagatcaggggcggggggctgctcaagtactgcaatctgctggtgagaggatttcgccccgcctccgatgaaattaaaaccctgcaacgctatatgtgcagccgctttttcatcgacttctctgatattggcgaacaacagaggaaacttgagagctaccttcagaatcattttgtgggattagaggaccgtaagtacgagtacctgatgacactccacggggttgtgaacgagtcaacggtctgtcttatgggacacgaaaggcgccagactctcaacctgataacaatgctggctattagagtcctggctgatcaaaatgtgattcctaacgtagccaacgtgacctgttattaccagcctgccccatacgtcgcagacgctaacttctcaaactattacatcgcccaggtgcagcccgtgttcacatgtcagcagcaaacgtacagcacatggctgccatgtaactag

SEQ ID NO: 194173 - DNA, 1329 bp, Artificial Sequence
  derived and/or modified sequence
atggccgagggggaaggttacttcgccatgtccgaagacgagctggcttgctccccttatatacctttagggggagattttggcggaggagacttcggcggaggcgatttcggcggaggagacttcggtggtggtgggtctttcggagggcactgcctcgattattgtgagtcacccacggcacactgcaacgtgctgaactgggagcaggttcagagactggatggtatcctatccgagacaatacctatccacggcaggggaaactttcctacactcgaactccaaccgagcctaatcgttaaggtggtcagacgcagattggcagagaaacgtataggagtccgcgacgtgcgcctgaacggttcagccgctagccatgtgctgcaccaggatagcggcctcggttacaaggatttggatttgatcttttgtgctgacttaaggggcgaaggggagttccagacagtgaaagacgtagtgctggattgtctcctggattttctgcccgagggggtaaataaggagaagatcactcccctaacactgaaagaggcttacgtgcagaagatggttaaagtttgtaatgactcagatcgttggagtctcatttcactgagtaacaactccggtaagaatgtcgagcttaaatttgtggacagcctcagaagacagtttgaatttagcgttgattcatttcaaattaaattagactctctgctccttttttatgaatgctccgagaatccaatgaccgagaccttccacccaacaattattggagaatccgtttatggagatttccaggaagcgtttgaccacctttgtaacaagataatagcaacgaggaatcctgaggaaatcaggggcggaggcctgcttaaatactgcaatctattggtgcgtggctttcggcctgcatcagacgaaatcaaaacactgcagaggtatatgtgctccaggttctttattgacttttccgatattggcgaacaacaaagaaagcttgaaagttacttacagaatcactttgtgggtctcgaggataggaaatacgaatacctgatgacgttgcacggcgtggtcaacgagtccacggtttgtctaatgggacacgaacgcaggcagactctcaacctgatcactatgctggccatacgcgtcctcgcagatcagaacgtgatccctaacgttgcaaatgtaacctgttactaccagcccgctccctacgtcgccgatgcaaatttcagtaactactatatagcacaggtgcagcctgtgtttacatgccagcagcagacatactccacgtggctgccttgtaattag

SEQ ID NO: 194174 - DNA, 1329 bp, Artificial Sequence
  derived and/or modified sequence
atggccgagggcgagggctacttcgccatgagcgaggacgagctggcctgcagcccctacatccccctgggcggcgacttcggcggcggcgacttcggcggcggcgacttcggcggcggcgacttcggcggcggcggcagcttcggcggccactgcctggactactgcgagagccccaccgcccactgcaacgtgctgaactgggagcaggtgcagagactggacggcatcctgagcgagaccatccccatccacggcagaggcaacttccccaccctggagctgcagcccagcctgatcgtgaaggtggtgagaagaagactggccgagaagagaatcggcgtgagagacgtgagactgaacggcagcgccgccagccacgtgctgcaccaggacagcggcctgggctacaaggacctggacctgatcttctgcgccgacctgagaggcgagggcgagttccagaccgtgaaggacgtggtgctggactgcctgctggacttcctgcccgagggcgtgaacaaggagaagatcacccccctgaccctgaaggaggcctacgtgcagaagatggtgaaggtgtgcaacgacagcgacagatggagcctgatcagcctgagcaacaacagcggcaagaacgtggagctgaagttcgtggacagcctgagaagacagttcgagttcagcgtggacagcttccagatcaagctggacagcctgctgctgttctacgagtgcagcgagaaccccatgaccgagaccttccaccccaccatcatcggcgagagcgtgtacggcgacttccaggaggccttcgaccacctgtgcaacaagatcatcgccaccagaaaccccgaggagatcagaggcggcggcctgctgaagtactgcaacctgctggtgagaggcttcagacccgccagcgacgagatcaagaccctgcagagatacatgtgcagcagattcttcatcgacttcagcgacatcggcgagcagcagagaaagctggagagctacctgcagaaccacttcgtgggcctggaggacagaaagtacgagtacctgatgaccctgcacggcgtggtgaacgagagcaccgtgtgcctgatgggccacgagagaagacagaccctgaacctgatcaccatgctggccatcagagtgctggccgaccagaacgtgatccccaacgtggccaacgtgacctgctactaccagcccgccccctacgtggccgacgccaacttcagcaactactacatcgcccaggtgcagcccgtgttcacctgccagcagcagacctacagcacctggctgccctgcaactag

SEQ ID NO: 194175 - protein, 389 aa, Artificial Sequence
  derived and/or modified sequence
MRRVTLFLNGSPKNGKVVAVYGTLSDLLSVASSKLGIKATSVYNGKGGLIDDIALIRDDDVLFVCEGEPFIDPQTDSKPPEGLLGFHTDWLTLNVGGRYFTTTRSTLVNKEPDSMLAHMFKDKGVWGNKQDHRGAFLIDRSPEYFEPILNYLRHGQLIVNDGINLLGVLEEARFFGIDSLIEHLEVAIKNSQPPEDHSPISRKEFVRFLLATPTKSELRCQGLNFSGADLSRLDLRYINFKMANLSRCNLAHANLCCANLERADLSGSVLDCANLQGVKMLCSNAEGASLKLCNFEDPSGLKANLEGANLKGVDMEGSQMTGINLRVATLKNAKLKNCNLRGATLAGTDLENCDLSGCDLQEANLRGSNVKGAIFEEMLTPLHMSQSVR

SEQ ID NO: 194176 - DNA, 3398 bp, Artificial Sequence
  derived and/or modified sequence
ggcaggctgaggagcctaggggcggggtgggaaggaggaccggccgaaccttgggtgtgggacagagtgcgtgcgtgtggtgtgtccccaagggcaggaaggtggcgaagggaggcgaatccgagtgggtggagggaggggaagggcgggaggagaaaaaggtgggaggaggaccaggtgggagggtggcggctcactcaggacccagcgggggcagcgcgatgaggcgggtgaccctgttcctgaacggcagccccaagaacggaaaggtggttgctgtatatggaactttatctgatttgctttctgtggccagcagtaaactcggcataaaagccaccagtgtgtataatgggaaaggtggactgattgatgatattgctttgatcagggatgatgatgttttgtttgtttgtgaaggagagccatttattgatcctcagacagattctaagcctcctgagggattgttaggattccacacagactggctgacattaaatgttggagggcggtactttacaactacacggagcactttagtgaataaagaacctgacagtatgctggcccacatgtttaaggacaaaggtgtctggggaaataagcaagatcatagaggagctttcttaattgaccgaagtcctgagtacttcgaacccattttgaactacttgcgtcatggacagctcattgtaaatgatggcattaatttattgggtgtgttagaagaagcaagattttttggtattgactcattgattgaacacctagaagtggcaataaagaattctcaaccaccggaggatcattcaccaatatcccgaaaggaatttgtccgatttttgctagcaactccaaccaagtcagaactgcgatgccagggtttgaacttcagtggtgctgatctttctcgtttggaccttcgatacattaacttcaaaatggccaatttaagccgctgtaatcttgcacatgcaaatctttgctgtgcaaatcttgaacgagctgatctctctggatcagtgcttgactgtgcgaatctccagggagtcaagatgctctgttctaatgcagaaggagcatccctgaaactgtgtaattttgaggatccttctggtcttaaagccaatttagaaggtgctaatctgaaaggtgtggatatggaaggaagtcagatgacaggaattaacctgagagtggctaccttaaaaaatgcaaagttgaagaactgtaacctcagaggagcaactctggcaggaactgatttagagaattgtgatctgtctgggtgtgatcttcaagaagccaacctgagagggtccaacgtgaagggagctatatttgaagagatgctgacaccactacacatgtcacaaagtgtcagatgagaattttaggggctggaggaagatgtaaaagatgaaaatgttttccttatcacttttctttctccacccactcagttgtctagaagaaataacactgtaaggaaatttaaaaaaaaaacatttagaggattatgcttgttttgagtggtgcataagggaaaaaactgactttttttccatattctgatttttaacagaaaagcactcatttaatagatgtagggaaactagatattgctgccttttgaatggggtaggggggtttacctggttttatgaccaggcatagtatctattatatttgcttttaaataggcatgatgtggaaataccatcttggtttgagatgcatttgaggattttaatttatggaaagcacaacatatgcaattatatttattgaattcctagatgcagtatggatatttaaattgttaaaactttatgaaaacttggaaaaggttgttcaggtttataaatagctttagtgatgcctcccctctttaaatacctgtcacaccgtatgaatatggtgagatcagactccctaagactcttttcaggttcatttttataatgtttactttttaggacagaacagtagctaaattaaagtaatatccagttcttactgattgagacagagtggaaagaaagacatcattgtacatcactgtcattccaaaggtacagtgtaactctggatggaggaataacttacctatcactacaacacttacaaatgagaatttctcagaatttcattctaggcaagttccactcaacaccagatcaagcaattctatctatttacactattagcctagttttctcatacagtcatcacaagcataggaagatacttcaaaaccaaaaaaaccaaggtgcatcattaatattcatttaattcaaataccaaatagtttacatagggccagcttagaaatagatactaaatccagagctactgcaatcaaagcttatatgagtgaatatggtagagttgcctgctaaaaggcaatgtaatataattgcagctagaaccctacagtggggaatgaggaattttaaacacacatttgattacagccaccaaaaaaatagacgtaaaaataaaggcatttggctggtccaagatgtaattatcaatcagtcagcacctgtgattcttttacttatttttttgtggttttttttttttaaacaaattttagcccaattttcttgagtcattctctctctgcagcagcagaggaagggcctgtacctccctaccaatgacttggtgtccttattttctaccccaagagcagggatattagctgtgtccaaatgggttctgaattctacagactcatcaacatgaggcaaggaatcattgaaaaccacctgtgtctcctttgggagaatgacatatctttagtatttacgtagcttattcttctatatctacatatgcaaagctttccttaacagtaaagggtacatatgcatagtgggaggagatcagacctttacaagtgaaggaaagcaacttcagaaatgaattattttctttgctttattatttttaccaagacagagaagtattgtattgagagataatctattttcataatcaatatgtgcctaaattatatttaaatcatttcactctgtactatattttcaggaattacagaatgtggtattcattcacttaaaggtacctctgtagaaataacctaaaactgcagaaggatctgaaagatctaaacatggtgtgcttagaaactgcagattttagatctaatgtatactgcattaataaatgatataaagtgtttgttgaaaaggagtttcttctcttccttttgaaaatcatcactttctgtattttgcttacatttcttcaatatgtgttgacaaccagccctgtggttctgggtagcaaaggaaatacagtataacttaatttgttatggattagtctttttgaaagtaccattaaagtaaatttatttcttt

SEQ ID NO: 194177 - DNA, 1170 bp, Artificial Sequence
  derived and/or modified sequence
atgcggagggttacactcttcctcaatgggtcacccaaaaacggcaaagtggtagccgtatacggcaccctctctgacctcttgtcagtagccagctcgaagctgggtatcaaggccaccagcgtgtataacgggaagggtggcctaattgatgacatcgccctgatacgggacgacgacgttttgtttgtctgcgagggtgaacccttcattgatcctcagaccgattcaaagccaccggaaggactccttggattccataccgattggttgacacttaatgtaggtgggcggtactttactacgactaggtccactctagtgaacaaggaacccgattcaatgctagcccatatgtttaaagacaaaggggtttggggcaataagcaggaccacagaggtgctttcttaatcgatcgttcaccagaatatttcgagcctatcctcaactatctacgtcacggccagctaattgtcaatgacgggattaacttactaggggtgttggaagaagctcgattcttcggaatcgattccttgattgaacacctggaggtcgcaataaagaatagccagccacccgaggatcactctccgataagtcgaaaggagttcgtgcggtttctcctcgccacgcctacaaaaagcgagctgagatgccagggtctgaacttctcgggagcagacttatccaggctggatctgcgatacattaacttcaaaatggcaaacctgagtagatgtaatctggcccatgctaacctttgttgcgcaaacctggagcgcgccgacctctctggatccgtgctcgattgcgccaatctgcagggcgtgaagatgctgtgctcaaacgcggagggggcttctctgaagttgtgcaatttcgaggacccttccggattgaaagccaatctcgagggcgcaaacctgaagggcgttgatatggaaggttcccaaatgactgggatcaaccttagggttgccactctgaagaacgcaaagctgaaaaactgcaacctccgtggagctacgctcgctggaaccgacctcgagaattgcgacctcagtggctgcgatctgcaggaagctaacttacgcgggtcaaatgtcaagggagccattttcgaggagatgctgactccactgcacatgagtcagagtgttcgctag

SEQ ID NO: 194178 - DNA, 1170 bp, Artificial Sequence
  derived and/or modified sequence
atgagaagagtgaccctcttcctgaatggcagccccaagaatggcaaggtggtggccgtgtatggcaccctgagtgacctgctgtctgtggccagcagcaagctgggcatcaaggccacctctgtgtacaacgggaagggcggcctgattgatgacatcgccctgatcagagatgatgatgtgctgtttgtgtgtgagggggagcccttcatcgacccccagacagacagcaagcccccagagggcctgctgggcttccacacagactggctgaccctgaatgtgggcggccgctacttcaccaccaccaggagcaccctggtgaacaaggagccagacagcatgctggcccacatgttcaaggacaagggcgtgtggggcaacaagcaggaccacagaggagccttcctgattgacaggagccctgagtactttgagcccatcctgaactacctgcggcacggccagctgattgtgaatgatggcatcaacctgctgggcgtgctggaggaggcccgcttctttggaattgacagcctgattgagcacctggaggtggccatcaagaacagccagcccccagaggaccacagccccatcagcaggaaggagtttgtgcgcttcctgctggccacccccaccaagtctgagctgcgctgccagggcctgaacttcagcggggctgacctgagccggctggacctgcgctacatcaacttcaagatggccaacctgagccgctgcaacctggcccacgccaacctgtgctgtgccaacctggagagagctgacctgagcggctctgtgctggactgtgccaacctgcagggcgtgaagatgctgtgcagcaatgctgagggcgccagcctgaagctgtgcaactttgaggaccccagcggcctgaaggccaacctggagggcgccaacctgaagggcgtggacatggagggcagccagatgacaggcatcaacctgcgggtggccaccctgaagaatgccaagctgaagaactgcaacctgcggggggccaccctggccggcacagacctggagaactgtgacctgagcggctgtgacctgcaggaggccaacctgcggggcagcaatgtgaagggggccatctttgaggagatgctgacccccctgcacatgagccagagcgtgaggtag

SEQ ID NO: 194179 - DNA, 1170 bp, Artificial Sequence
  derived and/or modified sequence
atgcggcgggtgaccctgttcctgaacggcagccccaagaacggcaaagtcgttgctgtgtacggcactctgtctgacttgctgtccgtggcttccagcaagcttgggatcaaggccaccagcgtgtacaacggtaaaggtggcttgattgacgacatcgctctgatccgggatgatgatgtgctctttgtgtgcgagggagagcccttcatcgaccctcagactgattctaagccgcctgagggtctccttgggtttcacacagactggttgaccttgaatgtcgggggtcgatattttacaacaactaggagcacccttgtcaacaaggagccagactcaatgctcgcacacatgttcaaagataagggagtctggggaaataaacaggatcaccgaggtgcgtttctgattgatcgctccccagagtatttcgagccgatcctgaactacctgaggcatgggcagctgatcgtgaacgatggcataaatttgctgggggttctcgaagaagcaagattcttcggaatcgattctttaatagagcatcttgaggtagccattaaaaactcccagcctccagaggaccacagccctatcagtcgcaaggagtttgtcagattcctactcgctacacctaccaagtccgaactgcggtgtcaagggctgaacttctcgggcgccgatttgagccggctggatctcaggtacattaattttaaaatggcgaacctgtcgagatgtaacctggctcatgcaaatttatgctgcgcaaatctggagcgagcagacttgtcaggctcagtgctggactgtgctaacctccagggggtgaagatgttgtgtagcaatgccgaaggggcaagcctgaaactgtgtaattttgaagatccaagtggtttgaaagctaacctagagggggctaacttgaaaggcgtcgacatggagggatcccaaatgaccggcataaacctccgggtggctactctcaagaacgctaagttgaaaaactgtaatttgagaggcgcaacgctggccggtacggatctcgagaactgcgatttatctggctgtgacctgcaagaggctaacttgagggggtctaacgtgaaaggagccattttcgaggaaatgctcaccccactccacatgagtcaatctgtcaggtag

SEQ ID NO: 194180 - DNA, 1170 bp, Artificial Sequence
  derived and/or modified sequence
atgaggagagtgactctctttctgaacggctctccaaagaacgggaaagtggtagccgtgtatggcactcttagcgacttgctgtccgtagcgtcttccaagttggggatcaaggcaactagcgtttataacgggaaggggggtttgatcgatgacatcgcactaatcagagacgacgacgtcttgtttgtctgcgagggtgaaccattcattgacccacagactgattccaaacccccagagggcctgctcgggttccacacggactggctgaccctcaatgtaggtggcaggtatttcacaactactcggtcaactctggtaaacaaggaaccagattccatgttagctcatatgttcaaggacaagggcgtgtggggaaacaaacaggatcacagaggtgcttttctcatcgaccgctcacctgagtacttcgaacccatcctcaactaccttaggcacggccaactgatcgtcaatgatggtattaacctcttgggagtcctggaagaggccagattcttcggcatcgactctctgatagaacacttggaggtcgcgattaaaaactcccaaccacctgaggatcatagtcctatatccaggaaagaatttgtcagattcctgcttgccacaccgactaaaagtgaactgaggtgtcaagggctgaacttctcaggggcagacctgagtcggctagatttacgctatattaatttcaaaatggcaaatctgagccgttgtaaccttgcgcatgccaatctctgttgtgccaatttggaaagggccgacctttctggttccgtgctggattgtgctaatttgcagggggttaaaatgctttgttcgaatgctgagggagctagtcttaaattgtgcaattttgaagacccttccgggctgaaagccaacctggagggtgctaacttaaagggcgtagacatggaggggtctcagatgacaggcataaatctccgcgtggctaccctgaagaacgcaaagctgaagaattgtaatctgcgtggagccacactggctggaacagacctagaaaactgtgacctcagcggatgcgacctgcaagaggcaaacttgcgaggatcaaacgtgaagggggcaatctttgaggagatgctcaccccactgcacatgtcacagtctgtgaggtag

SEQ ID NO: 194181 - DNA, 1170 bp, Artificial Sequence
  derived and/or modified sequence
atgagaagagtgaccctgttcctgaacggcagccccaagaacggcaaggtggtggccgtgtacggcaccctgagcgacctgctgagcgtggccagcagcaagctgggcatcaaggccaccagcgtgtacaacggcaagggcggcctgatcgacgacatcgccctgatcagagacgacgacgtgctgttcgtgtgcgagggcgagcccttcatcgacccccagaccgacagcaagccccccgagggcctgctgggcttccacaccgactggctgaccctgaacgtgggcggcagatacttcaccaccaccagaagcaccctggtgaacaaggagcccgacagcatgctggcccacatgttcaaggacaagggcgtgtggggcaacaagcaggaccacagaggcgccttcctgatcgacagaagccccgagtacttcgagcccatcctgaactacctgagacacggccagctgatcgtgaacgacggcatcaacctgctgggcgtgctggaggaggccagattcttcggcatcgacagcctgatcgagcacctggaggtggccatcaagaacagccagccccccgaggaccacagccccatcagcagaaaggagttcgtgagattcctgctggccacccccaccaagagcgagctgagatgccagggcctgaacttcagcggcgccgacctgagcagactggacctgagatacatcaacttcaagatggccaacctgagcagatgcaacctggcccacgccaacctgtgctgcgccaacctggagagagccgacctgagcggcagcgtgctggactgcgccaacctgcagggcgtgaagatgctgtgcagcaacgccgagggcgccagcctgaagctgtgcaacttcgaggaccccagcggcctgaaggccaacctggagggcgccaacctgaagggcgtggacatggagggcagccagatgaccggcatcaacctgagagtggccaccctgaagaacgccaagctgaagaactgcaacctgagaggcgccaccctggccggcaccgacctggagaactgcgacctgagcggctgcgacctgcaggaggccaacctgagaggcagcaacgtgaagggcgccatcttcgaggagatgctgacccccctgcacatgagccagagcgtgagatag

SEQ ID NO: 194182 - protein, 1214 aa, Artificial Sequence
  derived and/or modified sequence
MVVPEKEQSWIPKIFKKKTCTTFIVDSTDPGGTLCQCGRPRTAHPAVAMEDAFGAAVVTVWDSDAHTTEKPTDAYGELDFTGAGRKHSNFLRLSDRTDPAAVYSLVTRTWGFRAPNLVVSVLGGSGGPVLQTWLQDLLRRGLVRAAQSTGAWIVTGGLHTGIGRHVGVAVRDHQMASTGGTKVVAMGVAPWGVVRNRDTLINPKGSFPARYRWRGDPEDGVQFPLDYNYSAFFLVDDGTHGCLGGENRFRLRLESYISQQKTGVGGTGIDIPVLLLLIDGDEKMLTRIENATQAQLPCLLVAGSGGAADCLAETLEDTLAPGSGGARQGEARDRIRRFFPKGDLEVLQAQVERIMTRKELLTVYSSEDGSEEFETIVLKALVKACGSSEASAYLDELRLAVAWNRVDIAQSELFRGDIQWRSFHLEASLMDALLNDRPEFVRLLISHGLSLGHFLTPMRLAQLYSAAPSNSLIRNLLDQASHSAGTKAPALKGGAAELRPPDVGHVLRMLLGKMCAPRYPSGGAWDPHPGQGFGESMYLLSDKATSPLSLDAGLGQAPWSDLLLWALLLNRAQMAMYFWEMGSNAVSSALGACLLLRVMARLEPDAEEAARRKDLAFKFEGMGVDLFGECYRSSEVRAARLLLRRCPLWGDATCLQLAMQADARAFFAQDGVQSLLTQKWWGDMASTTPIWALVLAFFCPPLIYTRLITFRKSEEEPTREELEFDMDSVINGEGPVGTADPAEKTPLGVPRQSGRPGCCGGRCGGRRCLRRWFHFWGAPVTIFMGNVVSYLLFLLLFSRVLLVDFQPAPPGSLELLLYFWAFTLLCEELRQGLSGGGGSLASGGPGPGHASLSQRLRLYLADSWNQCDLVALTCFLLGVGCRLTPGLYHLGRTVLCIDFMVFTVRLLHIFTVNKQLGPKIVIVSKMMKDVFFFLFFLGVWLVAYGVATEGLLRPRDSDFPSILRRVFYRPYLQIFGQIPQEDMDVALMEHSNCSSEPGFWAHPPGAQAGTCVSQYANWLVVLLLVIFLLVANILLVNLLIAMFSYTFGKVQGNSDLYWKAQRYRLIREFHSRPALAPPFIVISHLRLLLRQLCRRPRSPQPSSPALEHFRVYLSKEAERKLLTWESVHKENFLLARARDKRESDSERLKRTSQKVDLALKQLGHIREYEQRLKVLEREVQQCSRVLGWVAEALSRSALLPPGGPPPPDLPGSKD

SEQ ID NO: 194183 - DNA, 3645 bp, Artificial Sequence
  derived and/or modified sequence
atggtggtgcccgagaaggagcagagctggatccccaagatcttcaagaagaagacctgcaccaccttcatcgtggacagcaccgaccccggcggcaccctgtgccagtgcggcagacccagaaccgcccaccccgccgtggccatggaggacgccttcggcgccgccgtggtgaccgtgtgggacagcgacgcccacaccaccgagaagcccaccgacgcctacggcgagctggacttcaccggcgccggcagaaagcacagcaacttcctgagactgagcgacagaaccgaccccgccgccgtgtacagcctggtgaccagaacctggggcttcagagcccccaacctggtggtgagcgtgctgggcggcagcggcggccccgtgctgcagacctggctgcaggacctgctgagaagaggcctggtgagagccgcccagagcaccggcgcctggatcgtgaccggcggcctgcacaccggcatcggcagacacgtgggcgtggccgtgagagaccaccagatggccagcaccggcggcaccaaggtggtggccatgggcgtggccccctggggcgtggtgagaaacagagacaccctgatcaaccccaagggcagcttccccgccagatacagatggagaggcgaccccgaggacggcgtgcagttccccctggactacaactacagcgccttcttcctggtggacgacggcacccacggctgcctgggcggcgagaacagattcagactgagactggagagctacatcagccagcagaagaccggcgtgggcggcaccggcatcgacatccccgtgctgctgctgctgatcgacggcgacgagaagatgctgaccagaatcgagaacgccacccaggcccagctgccctgcctgctggtggccggcagcggcggcgccgccgactgcctggccgagaccctggaggacaccctggcccccggcagcggcggcgccagacagggcgaggccagagacagaatcagaagattcttccccaagggcgacctggaggtgctgcaggcccaggtggagagaatcatgaccagaaaggagctgctgaccgtgtacagcagcgaggacggcagcgaggagttcgagaccatcgtgctgaaggccctggtgaaggcctgcggcagcagcgaggccagcgcctacctggacgagctgagactggccgtggcctggaacagagtggacatcgcccagagcgagctgttcagaggcgacatccagtggagaagcttccacctggaggccagcctgatggacgccctgctgaacgacagacccgagttcgtgagactgctgatcagccacggcctgagcctgggccacttcctgacccccatgagactggcccagctgtacagcgccgcccccagcaacagcctgatcagaaacctgctggaccaggccagccacagcgccggcaccaaggcccccgccctgaagggcggcgccgccgagctgagaccccccgacgtgggccacgtgctgagaatgctgctgggcaagatgtgcgcccccagataccccagcggcggcgcctgggacccccaccccggccagggcttcggcgagagcatgtacctgctgagcgacaaggccaccagccccctgagcctggacgccggcctgggccaggccccctggagcgacctgctgctgtgggccctgctgctgaacagagcccagatggccatgtacttctgggagatgggcagcaacgccgtgagcagcgccctgggcgcctgcctgctgctgagagtgatggccagactggagcccgacgccgaggaggccgccagaagaaaggacctggccttcaagttcgagggcatgggcgtggacctgttcggcgagtgctacagaagcagcgaggtgagagccgccagactgctgctgagaagatgccccctgtggggcgacgccacctgcctgcagctggccatgcaggccgacgccagagccttcttcgcccaggacggcgtgcagagcctgctgacccagaagtggtggggcgacatggccagcaccacccccatctgggccctggtgctggccttcttctgcccccccctgatctacaccagactgatcaccttcagaaagagcgaggaggagcccaccagagaggagctggagttcgacatggacagcgtgatcaacggcgagggccccgtgggcaccgccgaccccgccgagaagacccccctgggcgtgcccagacagagcggcagacccggctgctgcggcggcagatgcggcggcagaagatgcctgagaagatggttccacttctggggcgcccccgtgaccatcttcatgggcaacgtggtgagctacctgctgttcctgctgctgttcagcagagtgctgctggtggacttccagcccgccccccccggcagcctggagctgctgctgtacttctgggccttcaccctgctgtgcgaggagctgagacagggcctgagcggcggcggcggcagcctggccagcggcggccccggccccggccacgccagcctgagccagagactgagactgtacctggccgacagctggaaccagtgcgacctggtggccctgacctgcttcctgctgggcgtgggctgcagactgacccccggcctgtaccacctgggcagaaccgtgctgtgcatcgacttcatggtgttcaccgtgagactgctgcacatcttcaccgtgaacaagcagctgggccccaagatcgtgatcgtgagcaagatgatgaaggacgtgttcttcttcctgttcttcctgggcgtgtggctggtggcctacggcgtggccaccgagggcctgctgagacccagagacagcgacttccccagcatcctgagaagagtgttctacagaccctacctgcagatcttcggccagatcccccaggaggacatggacgtggccctgatggagcacagcaactgcagcagcgagcccggcttctgggcccacccccccggcgcccaggccggcacctgcgtgagccagtacgccaactggctggtggtgctgctgctggtgatcttcctgctggtggccaacatcctgctggtgaacctgctgatcgccatgttcagctacaccttcggcaaggtgcagggcaacagcgacctgtactggaaggcccagagatacagactgatcagagagttccacagcagacccgccctggccccccccttcatcgtgatcagccacctgagactgctgctgagacagctgtgcagaagacccagaagcccccagcccagcagccccgccctggagcacttcagagtgtacctgagcaaggaggccgagagaaagctgctgacctgggagagcgtgcacaaggagaacttcctgctggccagagccagagacaagagagagagcgacagcgagagactgaagagaaccagccagaaggtggacctggccctgaagcagctgggccacatcagagagtacgagcagagactgaaggtgctggagagagaggtgcagcagtgcagcagagtgctgggctgggtggccgaggccctgagcagaagcgccctgctgccccccggcggcccccccccccccgacctgcccggcagcaaggactag

SEQ ID NO: 194184 - DNA, 3645 bp, Artificial Sequence
  derived and/or modified sequence
atggtggttccagaaaaggagcagtcttggataccaaagatcttcaagaagaagacttgtacaacgtttatcgtcgattcaaccgaccctggcggcactttatgccagtgtgggcggccacgaacagcccaccccgccgttgcaatggaggatgcattcggggctgccgtggtcaccgtatgggatagcgacgcgcacactacagaaaaaccaacggatgcctatggggagttagacttcaccggtgccggcaggaaacactccaatttcctgaggctcagcgataggaccgatccagccgcggtgtattcgcttgtgacgcggacatggggcttcagagctcccaacctagtggtgtcagtgctcggcggatctggcggcccagtgctccagacctggctccaagacctcctgcgccgaggcctggtgagagctgcacagtctacaggggcgtggatcgttaccggcggtctgcacaccggaattgggcggcatgtgggcgttgccgtgagggatcaccaaatggcgagcaccggagggaccaaagttgtggcaatgggcgtcgctccgtggggagtggtcagaaatagagatacgctgattaacccaaagggatcctttccagctaggtacagatggcgaggggatccggaagacggagtgcaattccctttggactacaactactcagctttctttctcgtggatgatggcacacatggctgcctggggggggagaaccgcttccgacttcggttggagtcatatatcagtcaacagaagaccggcgtcggtggcactggaattgacatcccggtgctactcctgctgatcgatggggatgagaaaatgttaacgaggatagagaatgctacacaagcccagcttccctgcctgctggttgccgggtctggcggggccgccgattgtctggcagaaacactggaggacactttagctcctggcagcggcggggcaaggcagggcgaagcccgggatcggattcgcaggtttttcccgaaaggcgatctggaggtgttacaggcccaggtcgaacggattatgacccgaaaggagctcctgacagtgtactcttcggaggacggcagcgaggaatttgaaacgatcgtcctcaaggccctcgtcaaggcatgtggtagcagtgaagccagcgcatacctcgatgaattgagactggccgtggcatggaatcgggtggatattgcgcagtctgagcttttccgtggggacatccaatggcgcagctttcacctcgaggcttctctcatggatgcactcctgaatgatcgccctgaattcgtgaggctgcttatatcgcacggcttatctcttgggcacttcctgacgccgatgcgccttgcgcagctctacagtgccgcaccaagtaacagcctgatcaggaatcttctagaccaagcgagccattcagcaggaactaaggctcctgcattaaagggcggagctgcagagctaaggccgccagacgttgggcatgtgcttcgaatgctccttggcaagatgtgtgctcctagatatccatccggcggtgcttgggatccgcatccaggacaagggtttggggagtctatgtatctgctgtccgacaaggctacctcacctctctccctcgacgcaggcttgggtcaggctccctggtccgatctactcttgtgggcactcttattgaatagggcgcagatggccatgtacttctgggaaatgggatctaatgcagtgagctccgccctgggcgcctgtctcctgttaagggtgatggcacggctggaaccagacgctgaggaagcagcgcggcggaaagacctggcattcaaatttgaaggtatgggtgttgatctgttcggggagtgctatcgcagtagcgaagtgagagccgctcgactcttgcttagacgctgtccattgtggggtgacgctacctgtttgcagcttgcgatgcaggctgacgcgcgagctttcttcgcgcaagatggcgttcagagcctgcttactcagaaatggtggggcgacatggctagtactacccctatttgggccctcgttctagccttcttctgcccccccttgatttatactcggctaattaccttccgtaaatcagaggaagaaccaacaagggaggaactcgaatttgatatggactccgtgatcaatggagaggggcctgtcggaacagcagacccggccgaaaaaacaccactcggcgtgcctcggcagagtgggagaccgggatgctgcggtggaagatgtggggggaggagatgtttacggagatggttccatttctggggggcgcctgtgactatttttatggggaacgtggttagctatcttttatttttacttctgttcagcagagttctgttagtcgattttcagccagcgcctcctgggagcttagaactattgctttacttttgggcattcactctgctgtgcgaggaactgaggcaggggctgtctggaggcggaggctcattagcatcaggtggtcctgggccaggccacgcctctctgtctcagaggttgagattgtaccttgctgattcctggaaccaatgcgaccttgtggcattaacctgttttttactgggtgtgggttgtcgcctaactcccggcctgtatcacctcgggcgaacagtactatgtatcgacttcatggtgtttaccgtccggcttctgcacatcttcaccgtgaacaaacagttggggccgaaaatcgtcatagttagtaagatgatgaaggacgtgttcttcttcctcttttttctgggtgtgtggttagtcgcttatggggttgcaaccgaggggctcctcagacctagggacagcgacttcccttccatccttcgtcgggtgttttatcgaccctaccttcagatttttggacagataccgcaagaggacatggacgtggctcttatggagcactctaattgctcctcagaacccggattctgggcccacccccccggggcgcaggctgggacctgtgtttcccaatacgctaattggctggtggttttgctgctcgtaatcttcctcctggttgccaatatcctgttagttaacctactgatcgccatgttcagctatacattcggaaaggtgcaaggcaactctgatctgtactggaaggcccagagatataggctgattagggagtttcatagcaggccggccctagccccccccttcattgttataagtcacctgagattgctactcagacagttgtgtcgacggccccggtcacctcagccatcttcaccggccctcgaacactttcgcgtctacctgtcaaaagaagctgagagaaaactactgacctgggaatccgttcacaaagaaaactttctgctggccagggcaagggataaacgagaatccgacagtgagagacttaaacggacctctcaaaaagtggacctggctctgaaacagttaggacacatccgagagtacgagcagaggctcaaggtgcttgagcgcgaagtccaacagtgttcaagagttttaggatgggtcgcagaggcactcagtcgcagcgcactgctgcctcccggcggaccacccccaccagatctccccggcagcaaggactag

SEQ ID NO: 194185 - DNA, 3645 bp, Artificial Sequence
  derived and/or modified sequence
atggtggtgcctgagaaggagcagagctggatccccaagatcttcaagaagaagacctgcaccaccttcatcgtggacagcacagaccccggcggcaccctgtgccagtgtggccggcccaggacagcccaccctgctgtggccatggaggatgcctttggagctgctgtggtgacagtgtgggacagtgatgcccacaccacagagaagcccacagatgcctatggagagctggacttcaccggggccggcaggaagcacagcaacttcctgcggctgagtgacagaacagatcctgctgctgtgtacagcctggtgaccaggacctggggcttccgggcccccaacctggtggtgtctgtgctgggcggcagcggcggccctgtgctgcagacctggctgcaggacctgctgcggcggggcctggtgcgggccgcccagagcactggagcctggatcgtgactggaggcctgcacacaggcatcggcagacatgtgggcgtggccgtgcgggaccaccagatggccagcactggaggcaccaaggtggtggccatgggcgtggccccctggggcgtggtgaggaacagagacaccctcatcaaccccaagggcagcttccctgcccgctaccgctggaggggggaccctgaagatggagtgcagttccccctggactacaactacagcgccttcttcctggtggatgatggcacccacggctgcctgggcggggagaaccgcttccggctgcggctggagagctacatcagccagcagaagacaggagtgggcggcactggaattgacatccctgtgctgctgctgctgattgatggagatgagaagatgctgaccagaattgaaaatgccacccaggcccagctgccctgcctgctggtggccggcagcggcggcgctgctgactgcctggccgagaccctggaggacaccctggcccctggcagcggcggggcccggcagggcgaggcccgggaccgcatccgccgcttcttccccaagggggacctggaggtgctgcaggcccaggtggagcgcatcatgaccaggaaggagctgctgactgtgtacagcagtgaagatggcagcgaggagtttgagaccatcgtgctgaaggccctggtgaaggcctgtggcagcagcgaggccagcgcctacctggatgagctgcggctggccgtggcctggaacagagtggacatcgcccagagcgagctgttccggggggacatccagtggaggagcttccacctggaggccagcctgatggatgccctgctgaatgacaggcctgagtttgtgcggctgctgatcagccacggcctgagcctgggccacttcctgacccccatgaggctggcccagctgtacagcgctgcccccagcaacagcctcatccggaacctgctggaccaggccagccacagcgctggcaccaaggccccagccctgaagggcggcgctgctgagctgcggcccccagatgtgggccacgtgctgaggatgctgctgggcaagatgtgtgccccccgctaccccagcggcggggcctgggacccccaccctggccagggctttggagagagcatgtacctgctgagtgacaaggccaccagccccctgagcctggatgctggcctgggccaggccccctggagcgacctgctgctgtgggccctgctgctgaacagagcccagatggccatgtacttctgggagatgggcagcaatgctgtgagcagcgccctgggcgcctgcctgctgctgcgggtgatggcccggctggagccagatgctgaggaggccgcccggaggaaggacctggccttcaagtttgagggcatgggcgtggacctgtttggagagtgctaccgcagcagcgaggtgcgggccgcccggctgctgctgcggcgctgccccctgtggggagatgccacctgcctgcagctggccatgcaggctgatgcccgggccttctttgcccaggatggagtgcagagcctgctgacccagaagtggtggggagacatggccagcaccacccccatctgggccctggtgctggccttcttctgccccccactcatctacaccaggctcatcaccttcaggaagtctgaggaggagcccacccgggaggagctggagtttgacatggacagcgtcatcaatggagagggccctgtgggcacagctgaccctgctgagaagacccccctgggcgtgccccggcagagcggccggcccggctgctgcggcggccgctgtggcggccgccgctgcctgcggcgctggttccacttctggggcgcccctgtgaccatcttcatgggaaatgtggtgtcctacctgctcttcctgctgctcttcagccgggtgctgctggtggacttccagcctgcccctcctggcagcctggagctgctgctgtacttctgggccttcaccctgctgtgtgaggagctgcggcagggcctgagcggcggcggcggcagcctggccagcggcggccctggccctggccacgccagcctgagccagaggctgcggctgtacctggccgacagctggaaccagtgtgacctggtggccctgacctgcttcctgctgggcgtgggctgccgcctgaccccaggcctgtaccacctgggccgcacagtgctgtgcatcgacttcatggtgttcaccgtgcggctgctgcacatcttcaccgtgaacaagcagctgggccccaagatcgtcatcgtgtccaagatgatgaaggatgtgttcttcttcctgttcttcctgggcgtgtggctggtggcctacggcgtggccacagagggcctgctgcggccccgggacagcgacttccccagcatcctgcggcgggtcttctaccggccctacctgcagatcttcggccagatcccccaggaggacatggatgtggccctgatggagcacagcaactgcagcagcgagcccggcttctgggcccaccccccaggggcccaggccggcacctgtgtgtcccagtatgccaactggctggtggtgctgctgctggtgatcttcctgctggtggccaacatcctgctggtgaacctgctgattgccatgttctcctacaccttcggcaaggtgcagggcaacagcgacctgtactggaaggcccagcgctaccgcctcatccgggagttccacagcaggcctgccctggccccacccttcatcgtcatcagccacctgcggctgctgctgcggcagctgtgccggcggcccaggagcccccagcccagcagccctgccctggagcacttccgggtgtacctgagcaaggaggccgagaggaagctgctgacctgggagagcgtgcacaaggagaacttcctgctggcccgggcccgggacaagcgggagagtgacagcgagcggctgaagaggaccagccagaaggtggacctggccctgaagcagctgggccacatccgggagtatgagcagaggctgaaggtgctggagcgggaggtgcagcagtgcagccgggtgctgggctgggtggccgaggccctgagccgcagcgccctgctgcccccaggcggccccccacctccagacctgcccggcagcaaggactag

SEQ ID NO: 194186 - DNA, 3645 bp, Artificial Sequence
  derived and/or modified sequence
atggtggtgcccgagaaggagcagagctggatccccaagatcttcaaaaagaagacatgtactacatttatcgtagactctaccgacccagggggtactctgtgccaatgcgggcgtccccgcactgctcaccctgcagtggccatggaagacgctttcggcgcagccgtcgtgactgtctgggattcagacgcacatacgacggagaaacctaccgacgcttacggagagttggacttcactggagctgggagaaagcactctaatttcctacggctttccgacagaactgaccccgcagcagtgtactccctcgtgacaagaacttggggattcagagcgccaaacctggtcgtttccgtactgggcggcagcggtggtcccgttctgcagacttggctccaggatctcctacggcgaggcctggtgcgcgccgcacagtcaacaggcgcctggattgtgaccggcggattgcatacagggatcgggaggcacgtcggcgtggcagtgcgcgaccaccagatggcaagcaccgggggcacaaaagttgtggctatgggcgtggcaccctggggagtggttagaaatcgggacaccttgattaaccctaagggatcatttcccgcacgatacaggtggcgcggggatccagaggacggtgttcaattccctctagactataattatagcgccttcttcctggtcgacgatggaacacatggctgtctagggggagaaaatcggtttcggttgcgcctggagagctatatcagccagcagaaaactggagtcgggggtaccgggattgatatccctgtgttactcttattgatcgatggtgacgaaaagatgctcacaagaattgaaaatgccacacaagcgcagctaccgtgcctcctggtcgctggcagcggcggcgctgccgattgtctggccgaaacgctggaagataccttagcaccaggaagcggcggcgcgagacagggcgaagccagagatagaattagacgctttttccccaaaggggacctggaggtcttgcaggcccaggtcgagagaattatgacgaggaaagaattgcttacagtgtactcttctgaggacggttcagaagaatttgaaacaatcgtattgaaagccctggtcaaagcttgtgggagtagcgaggccagcgcctacctggatgagctgagactggcggtcgcttggaatagggtagacatcgcccagtctgagttgttccggggggatattcagtggcgtagcttccatttggaggcatccctgatggacgcactactcaatgatcggcccgaatttgtccgcctgttaatctcccatggactgtcactggggcattttctgactccaatgagactggctcagctttatagtgctgcaccctcaaactccctcatccggaatctgctggatcaggcctcccactcggccggcaccaaagcaccagctctgaagggaggcgctgccgaactaaggcctccagacgtgggccacgttctgcgcatgctcctcggcaagatgtgcgcccccagatatccttcagggggcgcatgggacccccaccctggccaagggttcggggaatccatgtatctcctcagcgacaaagccacctctcccctatccttggatgcaggactgggtcaggctccttggtcagacttacttttgtgggccttgttgctgaatagagcacagatggctatgtacttctgggagatgggaagcaacgcagtgtctagtgccctcggtgcatgcctcctgttgagagttatggctcgtttggaacctgacgccgaagaagcagcgcgtaggaaggacctggccttcaagttcgaaggtatgggcgttgatttgttcggagaatgctacaggtctagcgaggtgcgagctgcgaggcttctcctgagacgctgcccactttggggtgacgccacctgcctgcagcttgccatgcaggctgatgctagggctttctttgctcaagacggcgttcagtctttgttgacacaaaaatggtggggagacatggcgtctacaacgcccatctgggcactggtgctggcatttttctgtccccccctcatttacaccaggttgatcacgtttcgaaagtccgaggaggagcctacccgggaggagctggagttcgacatggactccgtgattaatggtgaaggcccggtcggaactgcggatcccgcggagaaaacccctctcggggtccccaggcaatcaggtcggccgggatgctgcggcggacggtgcggggggcggagatgtctgcgccggtggtttcatttctggggcgcacccgtcactatttttatgggtaacgtcgtgtcctacctgctttttctactgttgtttagtagggtgctgttggtggatttccagcccgcccctcctggctccttagagctgttactatacttctgggcatttacacttctttgtgaagaacttcgccaggggctctcgggaggtggcggttcactagcatcaggcggacccggcccgggccacgcatcattgagccagcggttgaggctttacctagcagattcttggaatcagtgtgacctcgtcgccctgacatgttttctgctgggggtcggttgccggttgactcctgggctgtaccatctaggacgcacagtgctgtgtatcgactttatggttttcaccgtaagattgctacacatttttaccgtcaacaaacagttgggtccaaagattgtcattgtgtccaagatgatgaaagatgtcttctttttcctgtttttccttggggtctggttggtcgcatacggcgtggctacagagggactgctgcgcccacgggatagcgattttccctccatcctgcgccgcgtgttttatcgaccctacctgcaaatctttggacagattccgcaggaggacatggatgtggccctgatggaacacagcaattgttcctccgagccagggttctgggcccatcctcccggggcacaggctggaacttgcgtatcgcaatacgccaattggctcgtggtgctgctgctggtaatctttcttctcgtagccaacatccttctcgtcaatctgctaatcgctatgtttagctacacttttgggaaggtgcagggaaactcggatctgtactggaaagctcagcgttatcgtctcattagagagtttcacagccgcccagcgttggccccccccttcattgtgatttcacacctgagactgctcctaagacagctgtgtagacggcctcggtcaccacagccaagcagtcctgcactcgaacactttcgtgtctatctttctaaggaggcagagcggaagctgctcacatgggagtctgttcataaagagaacttcctgttggccagagcgcgcgataaacgtgaaagcgatagtgagcgtctgaaaagaacatcccaaaaggtggatctggctctgaaacaattgggccacattagggaatacgagcagcgcctgaaggttctggagcgcgaagtgcagcaatgctctcgcgtgcttggttgggttgctgaagccctcagccgctcagcacttctgccacctgggggccctcctccccccgatctgcctgggagcaaggactag

SEQ ID NO: 194187 - DNA, 3645 bp, Artificial Sequence
  derived and/or modified sequence
atggtggtgcccgagaaagagcagtcctggatccccaaaatcttcaaaaagaaaacctgcactacctttattgtagattcaacagatccaggcggtacactatgccaatgcggtcgtccacgtaccgcccaccctgcagtggcgatggaagacgcttttggcgctgcggttgtaacggtgtgggactctgatgcccataccacagaaaagcctacggacgcctacggcgaactggactttacgggcgcaggcaggaaacacagtaattttttgagactcagcgacaggaccgatcccgctgctgtttactccctggtgacacgcacatggggcttcagagctccgaatctggtggtctctgtccttgggggttccggcggacccgtattgcagacctggctccaggacctgcttaggaggggcctggtgagggccgctcagtctaccggggcttggattgtcactgggggtctccacacagggattggcagacacgtgggcgtggcggttagagatcaccaaatggctagtaccgggggtacaaaagtcgtcgccatgggcgtcgcaccgtggggagtggtcaggaaccgagacactttgataaatcctaaggggtcatttcccgctcgctaccgatggcgaggagaccctgaagatggggtccagtttccgctcgactataattactctgcttttttcttggtggacgacggtactcatggctgtctcggaggtgaaaatcgctttcgcttgcgactcgagagctacatctctcaacagaaaacaggagttggcggaacggggatcgacattcccgtgctgctcttactgatcgacggcgatgaaaaaatgctcactaggatagagaacgctacccaggcccagctgccttgcctgctggtggccggaagtggcggagcagcggactgtctggcagagactctggaggataccctggctccgggttccggtggtgctaggcagggggaggccagagatagaatcagacgctttttcccaaagggagacttagaggtgctacaagcacaggttgagagaattatgaccagaaaggaactcctgactgtctactcgagcgaggatggatccgaagagttcgagacaatagtcctgaaagcgttggtgaaggcatgcggaagcagcgaggctagcgcatatctggacgaactgaggttggctgttgcctggaaccgggtggacatcgcacagagtgagttgttcaggggcgatatccagtggcgctcttttcaccttgaggctagcctgatggacgcacttttgaatgatcgccctgaatttgtacgtctgcttatctcacacggcctgtccttgggccacttcctgaccccaatgaggttagcacaactctattctgcagcgccatccaactcactgatcaggaatctattggaccaggcctctcactccgctggtactaaagcccctgcgcttaaggggggagctgcggagctgcggcctcccgacgtgggccatgttctgcgaatgctgttaggtaagatgtgcgcccctcgatacccttctgggggtgcatgggatcctcacccaggccagggcttcggtgaaagcatgtatctgctgtctgacaaggctacctcccccctgagtttggatgctggcttaggacaggccccttggtcagacttacttttgtgggctctcttactgaacagggcccagatggccatgtacttctgggaaatgggctccaacgctgtttctagcgccctcggcgcatgtttgctactacgtgtcatggcgaggctggagcccgatgcggaggaagccgctagaaggaaagaccttgccttcaagttcgaaggaatgggagtggatcttttcggggaatgttatcggtcatccgaagtgcgggctgcacggctactccttagaagatgtcccctctggggcgatgctacttgcctgcagctcgctatgcaggcagacgccagagcttttttcgcccaagacggcgttcaaagtctcctgacccagaagtggtggggggacatggcaagcactacaccaatctgggctctggtgctggccttcttttgccctcctctcatttatacccgactcattacgttcaggaagagcgaggaagaaccgacaagggaggaactggagtttgacatggattcagtgatcaacggcgaaggtccagtcggaactgctgatcccgcagagaaaacacctttaggcgttccacgccaatcaggaaggcccggttgttgcggcggaaggtgtggtggaagacgatgcctgaggagatggtttcacttttggggcgctcccgtaacaatttttatggggaacgttgtctcgtacctgctgtttctgctgctgttttctagggttttgctggtggactttcaacccgctccgcctgggagtctggagctgctcctgtatttctgggcctttaccctgctctgcgaagagctccggcaagggctatctggcggagggggatcattggccagtggaggacctggccctggccatgccagcctgtctcagaggctgagactgtacctggctgattcctggaatcagtgcgacctggtggcgttgacctgcttcttgctgggcgtaggctgtcgcctgacacctggcctgtaccacctggggagaaccgttttatgcatcgacttcatggtgtttacagtgcgcctgcttcatatattcacagtcaacaaacagctcggccctaagatcgtcattgtttccaagatgatgaaagatgtcttcttttttttgtttttcctgggcgtttggctggtcgcctacggcgtagcaactgagggtctgttgcgacctcgcgattccgatttcccaagtatcctcaggagggtgttttatagaccatacttgcagatcttcggtcagattccccaggaagatatggacgtcgctcttatggagcatagtaactgctcctcggagcccggattctgggcccacccaccaggagctcaagcaggaacttgtgtttctcagtatgccaattggttggtggtactacttctcgtgatcttcctgctcgtcgcgaacatactgttagtcaacctgctcatcgccatgttttcttatacatttggcaaggtgcagggcaactctgatctgtattggaaggcacaaagataccgcttgatccgggagtttcactcgcgtccagcccttgcaccccctttcattgtaatttcccacctccgactattgttgcgtcagctctgcaggcgccctaggagcccccagccaagctcccccgcactggagcactttagggtgtatctctctaaggaagctgagcgcaagttgctgacctgggaatcagtgcataaagagaattttttactggcccgtgctcgtgacaaaagagagagcgatagtgagcgcctcaaacgcacctcacagaaagtcgacttagcactaaagcagctgggacacatccgggagtacgagcagcgcctgaaggtcctggagcgcgaggtccagcagtgctcccgcgttttagggtgggtagccgaggcactgtcacggtccgcgctcctccccccaggcggaccacctccgccagatttgccagggtctaaagactag

SEQ ID NO: 194188 - DNA, 4053 bp, Artificial Sequence
  derived and/or modified sequence
ggtctggaagcagagccggcggagggagcgccggggccctgggctgcaggaggttgcggcggccgcggcagcatggtggtgccggagaaggagcagagctggatccccaagatcttcaagaagaagacctgcacgacgttcatagttgactccacagatccgggagggaccttgtgccagtgtgggcgcccccggaccgcccaccccgcagtggccatggaggatgccttcggggcagccgtggtgaccgtgtgggacagcgatgcacacaccacggagaagcccaccgatgcctacggagagctggacttcacgggggccggccgcaagcacagcaatttcctccggctctctgaccgaacggatccagctgcagtttatagtctggtcacacgcacatggggcttccgtgccccgaacctggtggtgtcagtgctggggggatcggggggccccgtcctccagacctggctgcaggacctgctgcgtcgtgggctggtgcgggctgcccagagcacaggagcctggattgtcactgggggtctgcacacgggcatcggccggcatgttggtgtggctgtacgggaccatcagatggccagcactgggggcaccaaggtggtggccatgggtgtggccccctggggtgtggtccggaatagagacaccctcatcaaccccaagggctcgttccctgcgaggtaccggtggcgcggtgacccggaggacggggtccagtttcccctggactacaactactcggccttcttcctggtggacgacggcacacacggctgcctggggggcgagaaccgcttccgcttgcgcctggagtcctacatctcacagcagaagacgggcgtgggagggactggaattgacatccctgtcctgctcctcctgattgatggtgatgagaagatgttgacgcgaatagagaacgccacccaggctcagctcccatgtctcctcgtggctggctcagggggagctgcggactgcctggcggagaccctggaagacactctggccccagggagtgggggagccaggcaaggcgaagcccgagatcgaatcaggcgtttctttcccaaaggggaccttgaggtcctgcaggcccaggtggagaggattatgacccggaaggagctcctgacagtctattcttctgaggatgggtctgaggaattcgagaccatagttttgaaggcccttgtgaaggcctgtgggagctcggaggcctcagcctacctggatgagctgcgtttggctgtggcttggaaccgcgtggacattgcccagagtgaactctttcggggggacatccaatggcggtccttccatctcgaagcttccctcatggacgccctgctgaatgaccggcctgagttcgtgcgcttgctcatttcccacggcctcagcctgggccacttcctgaccccgatgcgcctggcccaactctacagcgcggcgccctccaactcgctcatccgcaaccttttggaccaggcgtcccacagcgcaggcaccaaagccccagccctaaaagggggagctgcggagctccggccccctgacgtggggcatgtgctgaggatgctgctggggaagatgtgcgcgccgaggtacccctccgggggcgcctgggaccctcacccaggccagggcttcggggagagcatgtatctgctctcggacaaggccacctcgccgctctcgctggatgctggcctcgggcaggccccctggagcgacctgcttctttgggcactgttgctgaacagggcacagatggccatgtacttctgggagatgggttccaatgcagtttcctcagctcttggggcctgtttgctgctccgggtgatggcacgcctggagcctgacgctgaggaggcagcacggaggaaagacctggcgttcaagtttgaggggatgggcgttgacctctttggcgagtgctatcgcagcagtgaggtgagggctgcccgcctcctcctccgtcgctgcccgctctggggggatgccacttgcctccagctggccatgcaagctgacgcccgtgccttctttgcccaggatggggtacagtctctgctgacacagaagtggtggggagatatggccagcactacacccatctgggccctggttctcgccttcttttgccctccactcatctacacccgcctcatcaccttcaggaaatcagaagaggagcccacacgggaggagctagagtttgacatggatagtgtcattaatggggaagggcctgtcgggacggcggacccagccgagaagacgccgctgggggtcccgcgccagtcgggccgtccgggttgctgcgggggccgctgcggggggcgccggtgcctacgccgctggttccacttctggggcgcgccggtgaccatcttcatgggcaacgtggtcagctacctgctgttcctgctgcttttctcgcgggtgctgctcgtggatttccagccggcgccgcccggctccctggagctgctgctctatttctgggctttcacgctgctgtgcgaggaactgcgccagggcctgagcggaggcgggggcagcctcgccagcgggggccccgggcctggccatgcctcactgagccagcgcctgcgcctctacctcgccgacagctggaaccagtgcgacctagtggctctcacctgcttcctcctgggcgtgggctgccggctgaccccgggtttgtaccacctgggccgcactgtcctctgcatcgacttcatggttttcacggtgcggctgcttcacatcttcacggtcaacaaacagctggggcccaagatcgtcatcgtgagcaagatgatgaaggacgtgttcttcttcctcttcttcctcggcgtgtggctggtagcctatggcgtggccacggaggggctcctgaggccacgggacagtgacttcccaagtatcctgcgccgcgtcttctaccgtccctacctgcagatcttcgggcagattccccaggaggacatggacgtggccctcatggagcacagcaactgctcgtcggagcccggcttctgggcacaccctcctggggcccaggcgggcacctgcgtctcccagtatgccaactggctggtggtgctgctcctcgtcatcttcctgctcgtggccaacatcctgctggtcaacttgctcattgccatgttcagttacacattcggcaaagtacagggcaacagcgatctctactggaaggcgcagcgttaccgcctcatccgggaattccactctcggcccgcgctggccccgccctttatcgtcatctcccacttgcgcctcctgctcaggcaattgtgcaggcgaccccggagcccccagccgtcctccccggccctcgagcatttccgggtttacctttctaaggaagccgagcggaagctgctaacgtgggaatcggtgcataaggagaactttctgctggcacgcgctagggacaagcgggagagcgactccgagcgtctgaagcgcacgtcccagaaggtggacttggcactgaaacagctgggacacatccgcgagtacgaacagcgcctgaaagtgctggagcgggaggtccagcagtgtagccgcgtcctggggtgggtggccgaggccctgagccgctctgccttgctgcccccaggtgggccgccaccccctgacctgcctgggtccaaagactgagccctgctggcggacttcaaggagaagcccccacaggggattttgctcctagagtaaggctcatctgggcctcggcccccgcacctggtggccttgtccttgaggtgagccccatgtccatctgggccactgtcaggaccacctttgggagtgtcatccttacaaaccacagcatgcccggctcctcccagaaccagtcccagcctgggaggatcaaggcctggatcccgggccgttatccatctggaggctgcagggtccttggggtaacagggaccacagacccctcaccactcacagattcctcacactggggaaataaagccatttcagagg

SEQ ID NO: 194189 - protein, 903 aa, Artificial Sequence
  derived and/or modified sequence
MAHLGPTPPPHSLNYKSEDRLSEQDWPAYFKVPCCGVDTSQIESEEAEVDVRERETQRDREPKRARDLTLRDSCTDNSMQFGTRTTTAEPGFMGTWQNADTNLLFRMSQQAIRCTLVNCTCECFQPGKINLRTCDQCKHGWVAHALDKLSTQHLYHPTQVEIVQSNVVFDISSLMLYGTQAVPVRLKILLDRLFSVLKQEEVLHILHGLGWTLRDYVRGYILQDAAGKVLDRWAIMSREEEIITLQQFLRFGETKSIVELMAIQEKEGQAVAVPSSKTDSDIRTFIESNNRTRSPSLLAHLENSNPSSIHHFENIPNSLAFLLPFQYINPVSAPLLGLPPNGLLLEQPGLRLREPSLSTQNEYNESSESEVSPTPYKNDQTPNRNALTSITNVEPKTEPACVSPIQNSAPVSDLTKTEHPKSSFRIHRMRRMGSASRKGRVFCNACGKTFYDKGTLKIHYNAVHLKIKHRCTIEGCNMVFSSLRSRNRHSANPNPRLHMPMLRNNRDKDLIRATSGAATPVIASTKSNLALTSPGRPPMGFTTPPLDPVLQNPLPSQLVFSGLKTVQPVPPFYRSLLTPGEMVSPPTSLPTSPIIPTSGTIEQHPPPPSEPVVPAVMMATHEPSADLAPKKKPRKSSMPVKIEKEIIDTADEFDDEDDDPNDGGAVVNDMSHDNHCHSQEEMSPGMSVKDFSKHNRTRCISRTEIRRADSMTSEDQEPERDYENESESSEPKLGEESMEGDEHIHSEVSEKVLMNSERPDENHSEPSHQDVIKVKEEFTDPTYDMFYMSQYGLYNGGGASMAALHESFTSSLNYGSPQKFSPEGDLCSSPDPKICYVCKKSFKSSYSVKLHYRNVHLKEMHVCTVAGCNAAFPSRRSRDRYWEKSNEQNGLLVSWGETLSSLK

SEQ ID NO: 194190 - protein, 1099 aa, Artificial Sequence
  derived and/or modified sequence
MAHLGPTPPPHSLNYKSEDRLSEQDWPAYFKVPCCGVDTSQIESEEAEVDVRERETQRDREPKRARDLTLRDSCTDNSMQFGTRTTTAEPGFMGTWQNADTNLLFRMSQQAIRCTLVNCTCECFQPGKINLRTCDQCKHGWVAHALDKLSTQHLYHPTQVEIVQSNVVFDISSLMLYGTQAVPVRLKILLDRLFSVLKQEEVLHILHGLGWTLRDYVRGYILQDAAGKVLDRWAIMSREEEIITLQQFLRFGETKSIVELMAIQEKEGQAVAVPSSKTDSDIRTFIESNNRTRSPSLLAHLENSNPSSIHHFENIPNSLAFLLPFQYINPVSAPLLGLPPNGLLLEQPGLRLREPSLSTQNEYNESSESEVSPTPYKNDQTPNRNALTSITNVEPKTEPACVSPIQNSAPVSDLTKTEHPKSSFRIHRMRRMGSASRKGRVFCNACGKTFYDKGTLKIHYNAVHLKIKHRCTIEGCNMVFSSLRSRNRHSANPNPRLHMPMLRNNRDKDLIRATSGAATPVIASTKSNLALTSPGRPPMGFTTPPLDPVLQNPLPSQLVFSGLKTVQPVPPFYRSLLTPGEMVSPPTSLPTSPIIPTSGTIEQHPPPPSEPVVPAVMMATHEPSADLAPKKKPRKSSMPVKIEKEIIDTADEFDDEDDDPNDGGAVVNDMSHDNHCHSQEEMSPGMSVKDFSKHNRTRCISRTEIRRADSMTSEDQEPERDYENESESSEPKLGEESMEGDEHIHSEVSEKVLMNSERPDENHSEPSHQDVIKVKEEFTDPTYDMFYMSQYGLYNGGGASMAALHESFTSSLNYGSPQKFSPEGDLCSSPDPKICYVCKKSFKSSYSVKLHYRNVHLKEMHVCTVAGCNAAFPSRRSRDRHSANINLHRKLLTKELDDMGLDSSQPSLSKDLRDEFLVKIYGAQHPMGLDVREDASSPAGTEDSHLNGYGRGMAEDYMVLDLSTTSSLQSSSSIHSSRESDAGSDEGILLDDIDGASDSGESAHKAEAPALPGSLGAEVSGSLMFSSLSGSNGGIMCNICHKMYSNKGTLRVHYKTVHLREMHKCKVPGCNMMFSSVRSRNRHSQNPNLHKNIPFTSVD

SEQ ID NO: 194191 - DNA, 2712 bp, Artificial Sequence
  derived and/or modified sequence
atggcacacctaggccccacacccccacctcattccctcaattataagagcgaggataggctgtcagaacaggactggcctgcttacttcaaagtaccttgctgtggggtggacacttcccagattgaatcggaagaggctgaggtggacgtgagggaacgagaaactcagcgggacagggagcctaaacgagcccgggacctgaccttgagggattcttgtactgataactccatgcaattcggaactcggactacaacagccgagccaggctttatggggacgtggcagaacgccgatactaacctgctttttcggatgtcccaacaggccatccgttgcaccttggttaattgcacatgtgaatgcttccagccggggaaaataaatcttagaacatgcgatcaatgcaaacacggatgggtggcccatgcactagataagctgtcgacacagcacctgtaccacccaacccaagtggaaatcgtgcagtcaaatgtcgtctttgacatttcctcccttatgctctatggaacccaggcggtgcctgtgaggctgaaaatccttctggatagactgttcagcgtgctaaagcaggaagaggtgctgcacatcttgcatggattgggttggaccttacgggactatgtgcgcggttacatcctgcaggacgccgcaggtaaagtactagataggtgggccatcatgtctcgggaagaggaaattataactctgcaacagttcctacgcttcggggagacaaaatccatcgtcgagttaatggctatccaggagaaagaaggccaggcagtggcagtcccttctagtaagaccgactctgacattaggacttttattgaaagtaataataggactcgatcccctagcctgttagcacatttagaaaactccaatccaagctctatacaccattttgaaaatataccaaacagcctggcctttctgctaccatttcagtacatcaaccccgtctctgctcccctactgggactccccccgaatggcctcctactcgagcaacccggcttgagactgagagaaccatcactctccacacagaatgagtataacgagagcagcgaatccgaagtttcacctacaccttataagaacgaccagacgccaaatcggaacgccctaacaagtattacaaacgttgagcctaaaactgagcctgcttgcgtttcccctattcagaacagcgccccggtctccgatttaacgaagactgagcaccctaagtcttcgttcagaatccacagaatgcgtaggatggggtccgcgagtcgaaagggccgggtgttctgcaatgcatgtggaaagaccttctatgacaagggtaccttaaagattcattataacgcggttcatttgaaaatcaagcataggtgtaccatagaaggatgcaatatggtttttagcagccttcggtctcgaaacaggcattccgccaatcccaaccccagactccacatgccgatgctgcgcaataatagagataaagatttaattagagctactagtggcgcggctacaccagtgatcgctagtacaaagtccaatctggcgttgacaagcccaggaaggcctcctatgggatttacaacaccacccctagatcctgtcctgcagaacccattgcctagtcagctagttttttctggactaaagaccgttcagccagtgcctcccttttaccgatctctgcttactcccggcgaaatggtgtctcctcccactagtctgcccacaagtccaataatcccgacttccgggacaattgaacaacaccctcctcctccttctgagcctgtggttcctgccgtcatgatggcaacacatgagccttcagccgatctggccccaaagaagaaaccacgcaagtcctctatgcctgtgaagattgagaaggaaattatcgacacagctgacgaatttgacgacgaggacgatgaccctaatgacggcggcgctgtagtcaacgacatgagccacgataaccattgtcatagccaggaggagatgagcccaggtatgtccgtaaaagacttctccaaacataatcggacacgctgtatctcacgcactgagatcagaagagcagacagtatgaccagtgaggaccaggagcccgaacgtgattatgagaacgagtccgagagctctgaaccaaagctgggagaagagagcatggagggagacgagcatattcactccgaggtaagtgaaaaggttctgatgaacagcgagcgacccgacgaaaaccatagtgaaccaagccaccaggatgttattaaggtgaaggaggaattcacagacccgacatacgatatgttctatatgtcccagtacggcctgtacaatgggggcggagcctccatggctgctctccacgagtcttttacctcctcgctcaattatggctcaccccagaaattttcgcctgagggtgatttgtgctcttcaccagaccccaagatctgctatgtatgcaagaaatccttcaaatcatcctatagcgttaaactacactatcgcaatgtccatctcaaggagatgcacgtgtgcactgtggctggctgcaatgccgcatttccatccagacggtcgagagatcgctactgggaaaaaagcaatgaacaaaatggcctgctggtcagctggggggagaccttgtctagcctgaagtag

SEQ ID NO: 194192 - DNA, 3099 bp, Artificial Sequence
  derived and/or modified sequence
atggcccacctgggccccacccctcccccccatagtctgaactacaaatcagaggacaggcttagtgagcaagactggccagcctattttaaagttccttgctgtggtgtcgacacatctcaaattgaggccatacggtgtaccctagtgaattgcacttgtgaatgctttcagccgggcaagattaacctacgcacatgtgaccagtgtaagcacggttgggtggcacatgcattggacaaactgagcactcaacatctgtaccaccccacccaggtggaaatagtgcaatcaaacgttgtttttgatatttcttctttaatgctgtatggcacccaggcagttcctgtgaggctgaaaatcttgctggaccggctcttttccgtgttgaaacaggaagaggtccttcatatcctccatgggttgggttggactctgagggactatgttagggggtacattctgcaggatgctgctggtaaagtcctggaccgatgggccataatgtcaagagaagaagaaatcatcactctccagcagtttctgcggttcggcgagaccaagagcattgtggagctgatggcaatccaggagaaggagggccaggcggtggctgttccaagctccaaaaccgattcagatattcggacatttatcgagtctaacaataggaccagatcacctagcctacttgctcacctggagaattcaaatccttcgagtattcaccacttcgagaacatacccaattccttggcattccttctgcctttccagtacataaacccagtaagtgcaccccttctaggattgccaccaaatggacttttactggagcagcccgggttgagactgagagagcctagtttgtctacccagaacgaatataatgagtcctctgagagcgaggtatctcccacaccttacaaaaatgaccagacccccaacaggaacgcgctgacctccatcactaacgtagagcctaaaacggagcccgcgtgcgttagtccaatacaaaattccgcccccgtgtcagatcttacaaagacagagcaccccaagtcctcttttcgcatacatcgtatgcgcaggatgggatctgcatccaggaaaggtcgcgtcttctgcaatgcctgcggaaagactttctatgacaagggtactttaaagattcactacaatgcagtgcacctcaagatcaagcaccgatgtacaatcgagggctgcaatatggtatttagctcactcaggtctaggaacagacatagcgcgaatccgaatccacggttacatatgcccatgctccggaacaacagggataaggacctcattagggctactagcggagctgctacacccgttattgccagcacaaagtctaacttggctctgacatccccaggacgcccccccatgggtttcacaaccccgcccctggatcctgtcctgcagaaccccctgcctagtcaactcgtgttcagcggccttaagaccgtccagcccgtgccccccttttatcggagcctattgacccctggtgaaatggtgtcaccccccacctccttgccgacatcaccgatcattccaacatcagggacaatcgaacaacatccacctccaccttctgagccagtggtcccggcagtgatgatggcgacccacgagcctagcgctgatttagctcctaagaaaaaaccccgcaaatcctccatgcccgtcaaaatcgagaaggaaattatagacaccgccgatgagttcgacgatgaggatgacgaccccaacgatggtggcgcggttgtgaacgatatgtctcatgataatcactgtcactcacaggaagaaatgtcacctggtatgagtgtaaaagactttagcaagcataatcgaacacggtgtattagcaggacagagatcagaagagcagattctatgaccagtgaggatcaggagcccgagagagactacgagaatgaaagcgagagttccgaacccaagctcggtgaggagtcgatggagggcgacgaacacatccacagtgaggtttctgagaaagtgctgatgaactcagaaagaccagatgagaatcactccgaaccaagccaccaggatgtcatcaaggtcaaagaagaatttacagaccccacttacgacatgttctatatgagccagtacgggctgtataatggaggcggcgcaagcatggccgctttacatgaatccttcacctcttcgctgaactacggcagcccacaaaaatttagtccagagggggatttgtgttcctctccagatcctaaaatctgctacgtgtgtaagaaaagcttcaaatctagctattccgttaagcttcattatcggaatgtacacctcaaggaaatgcatgtatgcacggtggccggctgcaatgcagcctttccttctaggcgctcacgcgatcggcattcggcaaacataaatttgcataggaaactcttaactaaggaattggatgacatgggcctggatagcagccagccttcattgtccaaagatctcagggatgaatttctggtgaagatctacggcgcccagcaccccatgggcctggacgtacgagaggacgcatcctcaccagccggtacagaggactctcacctgaacgggtatggtcgggggatggctgaagactacatggtactcgatctttcaactacctcctctctacagtcatcatctagtattcacagttctagggaatccgatgctggaagcgacgagggaattctgctggatgatatcgacggtgcctccgacagtggagaatccgcacacaaggctgaggcaccagccctacctgggtctctgggggcagaagttagtggctccctaatgttctctagcttgagtggatctaacggcggcattatgtgtaatatctgtcataagatgtatagcaataaaggcacactgagagttcactacaagactgtacacctccgagaaatgcataaatgcaaggtgcctgggtgtaacatgatgtttagcagtgtgagatctagaaatcgccattctcaaaaccctaacctacataagaacattccattcacttctgtcgattag

SEQ ID NO: 194193 - DNA, 3300 bp, Artificial Sequence
  derived and/or modified sequence
atggctcacctcggccccacccccccacctcattccctgaattataaaagtgaggataggctgtctgagcaggactggccagcctatttcaaagtcccttgctgcggggtggacacctctcagatcgaaagtgaggaggccgaagtggacgttcgcgaaagggagacacagcgggacagagagccaaagcgcgcacgagatctgactcttagagacagctgtacggacaactcaatgcagttcggcacaagaacaaccactgcagaaccagggttcatggggacatggcagaatgcagatacaaacctgctctttcggatgtcgcagcaggcaattcgctgtacactggtcaattgtacgtgcgaatgtttccagcctggtaaaatcaatttgcggacctgcgatcagtgcaaacacgggtgggtggcacacgctctcgacaaattgtccactcagcacctctatcaccctactcaggtagagattgtgcaatccaacgtcgtatttgacatcagttcgctcatgctctacggaacacaggctgttcctgttcgactcaagattctgcttgacagactgttcagtgttcttaaacaggaggaagtactccacatcttacacggcctgggctggaccctgagggactacgtaagaggatacatcctgcaggatgccgccggcaaagtgctggacaggtgggcaattatgtctagggaagaggagattatcaccctccagcaatttctccggttcggcgagacgaaatcaatagttgaactcatggctattcaggaaaaggagggccaggccgtggctgtgccttcttccaagactgactccgacattcggacttttatagaatcaaataataggacgcgcagccccagcttactagcccacctcgaaaattccaacccgagctccattcatcatttcgaaaacatccctaactccttggccttcctgctgccatttcaatatattaatccagtctctgcaccattactgggtctcccccccaacggtctccttctggaacagccagggctgaggctgagagaacctagtttgagcacccagaacgagtataacgaaagctccgaaagcgaggtctctccgaccccctacaaaaacgatcaaactcccaatagaaacgctctaaccagtataactaacgtagagcccaaaacggagccggcctgcgtcagcccaattcagaattctgctcccgtgtctgacctgacaaagacagagcaccccaaatcctctttcagaatacacagaatgagaagaatgggctctgccagcagaaagggtagagtattttgcaatgcctgtggtaaaaccttttacgataagggaactctgaaaatccattacaatgctgttcacctgaaaatcaagcataggtgcactatcgaaggatgcaacatggtgttctccagtttacgttcgcgtaatcgacactcggccaacccaaaccctaggttgcacatgcccatgcttagaaataacagggacaaagatcttatccgtgctacaagtggcgctgccacccccgtgatcgcttctacaaaatcaaatctggccctgacgagcccagggcgccctcctatggggtttacaacgcctccattggatcctgtgctgcagaacccactacccagccaacttgtcttctccggcttaaagaccgtgcagccagtaccccctttttatcggtcactgcttacacccggagaaatggtgtccccaccaacgtctcttccaacatcaccaataatcccgacatcagggaccattgagcaacaccctccacctcccagcgagccagtggtaccggcagtgatgatggctactcacgagcctagcgccgacctggcacccaagaagaaaccacgcaagtcatctatgccagtgaaaattgaaaaagaaattattgataccgccgatgagttcgatgatgaggatgatgaccctaacgatgggggcgcggtcgtgaacgacatgagtcatgataatcattgtcattcgcaggaggagatgtctcccggcatgtctgtgaaggacttttctaaacacaaccgaaccagatgtattagcagaacggaaattcggagagctgacagtatgactagtgaagatcaggaaccagaacgagactatgagaatgaaagtgaaagtagtgagccgaaattaggcgaggagagtatggaaggggacgagcatattcactccgaagtttcagagaaggtactaatgaactcagaaaggcccgatgagaaccacagcgagccaagccaccaagatgtaatcaaagtgaaagaggagtttactgatcccacctacgacatgttctatatgtcgcagtatgggctgtacaatggaggaggcgcctccatggccgcactccacgagtcattcacatcttcactcaactacgggtcgccgcagaagttctctccagagggagatctctgttcctcccccgaccccaagatttgctacgtgtgcaaaaagagtttcaaaagttcctattcggtaaaattacactacagaaacgtccacttgaaggaaatgcacgtttgtactgtcgccggttgcaatgccgcatttccatctagacgcagcagggatagacactcagcgaacatcaatctccacaggaagctccttaccaaggagttggacgatatgggcctcgacagctctcagccttcgctctctaaggacctccgggacgagtttttggtgaaaatatacggggcgcagcaccccatgggcctggatgtgagggaagatgctagctccccagccggcactgaagactcccatctgaacggctatgggcgggggatggccgaggactatatggtgctggacctgagcactacatccagcttgcagtcatcaagtagcatacactcctcaagggagtccgacgctggcagcgatgaaggtatactactggacgatatcgatggcgctagtgattcaggagagagtgcccataaagccgaagcacccgcactcccgggtagcttaggtgccgaggtgagcgggagtctgatgttctcatcactttctggtagcaacggcggcataatgtgcaacatctgccataaaatgtatagcaacaaggggacgctgcgggtccactataaaaccgtgcatctccgggagatgcacaagtgtaaggtaccagggtgcaatatgatgttttcaagcgttcgatcacgaaaccgccattcacagaaccccaacctgcacaagaatatcccatttacatcagtcgactag

SEQ ID NO: 194194 - DNA, 2712 bp, Artificial Sequence
  derived and/or modified sequence
atggcccatctcggccccacccctccccctcattctctgaactacaaatccgaagaccgtctatcagagcaggattggcctgcctactttaaggtgccatgctgcggagttgatacctctcaaatagagtccgaggaagcagaagtggacgtgcgcgagcgcgaaacacaaagggaccgcgagcccaagcgggctcgcgacttaacccttcgcgatagctgcacggacaattccatgcaattcggcaccaggaccaccaccgctgagcctggatttatgggaacttggcagaacgcggacaccaatctactctttcgtatgtctcagcaggctattaggtgcacgctggtgaactgcacttgcgagtgttttcaacccgggaagattaacttgagaacttgtgatcaatgtaagcacgggtgggtggctcatgccctcgataagttgtcaacacagcacctttaccatcctacccaagtggaaatcgtgcagtcaaatgtggttttcgatatctcttcactgatgctctatgggacacaggcagtccccgtgagactgaagattttgttagacaggctgttctctgtactcaaacaggaggaagtacttcatatattgcacgggctcgggtggactctgcgggattatgtgcgcggctacattctgcaggacgcggccggcaaggtcctggatcgctgggccatcatgagtcgtgaggaagagatcattacccttcagcagtttttgaggttcggcgagactaagagcattgtcgagcttatggccattcaggagaaagaggggcaggctgtggctgttccaagcagcaaaaccgatagtgacatcaggacgtttatagagtccaataataggacacgaagcccaagtctattggctcatctcgaaaacagtaatccctctagtattcaccatttcgagaacattccgaacagcctcgcttttctgctgcctttccagtacattaatcctgtgtcagcccccctcctcggtttgccccctaatggcctgctactggagcagccaggactgcgcctgagggaacccagtttatcaacccagaatgagtataacgaatcatctgagagtgaggtgagtccaactccctacaagaatgatcagactcctaataggaacgctctgaccagcatcactaatgttgagccaaagactgagccagcatgcgtcagtccaatccagaacagcgcccctgtgagcgatctcacaaagaccgaacaccctaaatcgtcattccgcatccacagaatgagacgcatggggagcgcgtcccgcaagggacgagtattctgtaacgcatgtggaaagaccttttatgacaaggggacccttaaaattcactacaacgcggttcacctgaaaatcaagcaccgctgcactattgaggggtgcaacatggtgttttcttcactcaggtcaaggaatagacacagtgctaatcctaaccccagattacatatgcctatgctgcgtaacaaccgcgacaaggacctgattcgagctacgagtggtgcggctactccagtgattgcatcaactaagtctaacctcgctctcaccagtccaggcaggccaccaatggggttcaccacccctcccctggatcccgttctgcaaaacccacttccttcccagctggtttttagtggtttgaaaacagttcagcctgtcccacccttttataggtccttactgactcccggcgaaatggtttcccccccaacaagtctcccgaccagccccatcatccctacttccgggaccattgaacaacacccccctcctccctccgaacctgtggtcccagcagtcatgatggctacacatgagccttcagcagacctcgcccccaagaagaagccgcggaaaagttcgatgcctgtgaagatcgagaaagagatcattgacacagccgacgaattcgatgatgaagatgacgaccctaatgacggaggcgccgtggtgaacgatatgagtcatgacaaccactgtcattcacaggaggaaatgtcccctggcatgagcgttaaagacttctctaagcacaataggacccgttgtatctctcggaccgagatcagaagggctgactccatgacatcggaggatcaggagcccgagcgcgattacgaaaatgaaagtgagtcttcagagcccaagctgggcgaagagtcaatggaaggtgatgaacatatccacagcgaagtcagcgagaaagtcttgatgaacagtgaacgaccagacgagaatcactcagaaccctcccaccaagatgtcataaaggttaaagaggagttcaccgacccaacatacgacatgttttacatgtcacagtacggactgtataatggaggaggagctagtatggcagctctgcacgagtcgtttacatcctccctgaattacggaagtccacaaaaattttcaccagagggagacttatgttcatcgccggaccctaagatttgctacgtttgtaagaagagcttcaagtcatcctacagcgtcaagctgcattaccgaaatgtccacctcaaggagatgcacgtgtgcaccgtcgctggatgcaatgccgcctttcctagtaggaggagcagggaccggtactgggagaaaagtaatgaacagaacggccttcttgtgagctggggtgaaaccctgagctccctcaaatag

SEQ ID NO: 194195 - DNA, 1950 bp, Artificial Sequence
  derived and/or modified sequence
atgctctacggcactcaggccgtcccagttcgcttaaaaattctccttgacagacttttctctgtcctcaaacaagaggaagtgctgcacatccttcacggcctcggatggactcttagggactacgtccgaggatatattttacaggatgctgccgggaaagtgcttgatcgctgggctattatgagtagagaggaggagatcatcaccctgcagcaattcctacgatttggcgaaaccaagtctatagtggaattaatggccatacaggagaaggagggccaggcggttgccgtgccatccagcaagaccgatagcgacatccgcacatttatagagagcaacaatcgcacccggagccccagcctgctagctcacctcgagaatagcaatcccagcagcatccaccactttgagaatattcctaacagccttgcatttctgcttccctttcagtatattaatcccgtcagtgcccccctcctcggtctcccccccaatggcctgctcctggaacaaccaggtctgaggctccgcgaaccatctctgtccacccagaatgaatataacgagagcagcgaatctgaggtgagccccactccgtacaagaatgaccagacccctaatcgaaacgccctcacaagcatcacaaacgtcgaacccaaaaccgaaccagcctgtgtttcgccgatacaaaactcagcacccgtatccgatttgacaaaaactgagcacccaaaatcatcttttcggattcatcgcatgcgaaggatgggatctgcgtcgaggaaagggagagtattttgtaatgcatgcggtaaaactttttatgataagggcaccctgaagatccactataatgcggtgcacctgaaaataaaacatcggtgtacaatcgaaggatgtaacatggtcttctccagccttagatcacgtaacagacacagcgctaatcccaatccgcggctgcatatgcctatgcttaggaataacagagataaagaccttataagagccacttcgggggcagccactcctgtgatcgctagcacaaaatcgaacttggcccttacctcgcccggccggccccctatgggctttacaacacccccgctcgaccccgtgctgcaaaatccacttccaagtcaactggtgttttccggccttaagactgtgcagcccgtgccgccattttataggtccttgctgacacccggggagatggtcagccctcccacttccctccccacatcccctatcattccaacttccggaacgatcgagcaacatccaccacccccaagtgagcccgtagtccctgcggttatgatggccactcacgaacctagcgccgatctggccccaaaaaagaaaccccgcaagagctcaatgccggttaagatcgagaaggaaatcattgataccgccgacgagttcgatgatgaggatgatgatcccaatgacggaggggcagtcgtcaatgacatgtcacacgataaccattgccactcacaggaggaaatgtctccaggcatgtctgttaaggatttctcaaagcataatagaactcgctgcatttcacgaacagaaatccggcgcgctgattctatgaccagcgaagaccaagagcccgaaagggattatgaaaatgagtctgagtctagcgagcccaaattgggagaggagagcatggagggtgacgaacacatacactctgaagtcagtgagaaggtcctcatgaatagcgaacgcccggacgagaaccactccgaaccaagtcatcaagatgtcatcaaggttaaggaagagttcaccgatcctacctatgacatgttctacatgtcccagtacggcctatataacgggggtggagcatctatggccgctttgcatgagtcatttaccagctctctgaattatggctccccacaagttctacccagaagatag

SEQ ID NO: 194196 - DNA, 2712 bp, Artificial Sequence
  derived and/or modified sequence
atggcccacctgggccccaccccaccaccccacagcctgaactacaagtctgaggaccggctgtctgagcaggactggccagcctacttcaaggtgccctgctgcggcgtggacaccagccagatcgagagcgaggaggccgaggtggatgtgcgggagcgggagacccagagggaccgggagcccaagagggcccgggacctgaccctgcgggacagctgcacagacaacagcatgcagtttggcaccaggaccaccacagctgagcccggcttcatgggcacctggcagaatgctgacaccaacctgctcttcaggatgagccagcaggccatccgctgcaccctggtgaactgcacctgtgagtgcttccagcccgggaagatcaacctgcggacctgtgaccagtgcaagcacggctgggtggcccacgccctggacaagctgagcacccagcacctgtaccaccccacccaggtggagatcgtgcagagcaatgtggtgtttgacatcagcagcctgatgctgtatggcacccaggccgtgcctgtgcggctgaagatcctgctggacaggctcttctctgtgctgaagcaggaggaggtgctgcacatcctgcacggcctgggctggaccctgcgggactatgtgcggggctacatcctgcaggatgctgctgggaaggtgctggaccgctgggccatcatgagccgggaggaggagatcatcaccctgcagcagttcctgcgctttggagagaccaagagcatcgtggagctgatggccatccaggagaaggagggccaggccgtggccgtgcccagcagcaagacagacagcgacatccgcaccttcatcgagagcaacaacagaaccaggagccccagcctgctggcccacctggagaacagcaaccccagcagcatccaccactttgagaacatccccaacagcctggccttcctgctgcccttccagtacatcaaccctgtgtctgcccccctgctgggcctgcccccaaatggcctgctgctggagcagcccggcctgcggctgcgggagcccagcctgagcacccagaatgagtacaatgaatcttctgagagcgaggtgagccccaccccctacaagaatgaccagacccccaacagaaatgccctgaccagcatcaccaacgtggagcccaagacagagcccgcctgtgtgagccccatccagaacagcgcccctgtgtctgacctgaccaagacagagcaccccaagagcagcttccgcatccacaggatgaggaggatgggcagcgccagcaggaagggccgggtcttctgcaatgcctgtgggaagaccttctatgacaagggcaccctgaagatccactacaatgctgtgcacctgaagatcaagcaccgctgcaccatcgagggctgcaacatggtgttcagcagcctgcggagcaggaacagacacagcgccaaccccaacccccggctgcacatgcccatgctgaggaacaacagagacaaggacctgatccgggccaccagcggggccgccacccctgtgattgccagcaccaagagcaacctggccctgaccagccctggccggccccccatgggcttcaccaccccacccctggaccctgtgctgcagaaccccctgcccagccagctggtgttttctggcctgaagacagtgcagcctgtgccccccttctaccgcagcctgctgaccccaggagagatggtgtccccacccaccagcctgcccaccagccccatcatccccaccagcggcaccatcgagcagcaccccccacctccttctgagcctgtggtgcctgctgtgatgatggccacccatgagcccagcgctgacctggcccccaagaagaagcccaggaagagctccatgcctgtgaagattgagaaggagatcatcgacacagcagatgaatttgatgatgaagatgatgaccccaatgatggcggcgctgtggtgaatgacatgagccatgacaaccactgccacagccaggaggagatgagccctggcatgtctgtgaaggacttcagcaagcacaacagaacccgctgcatcagcaggacagagatccggcgggctgacagcatgaccagcgaggaccaggagcctgagcgggactatgaaaatgaaagtgagagcagcgagcccaagctgggggaggagagcatggagggagatgagcacatccacagcgaggtgtctgagaaggtgctgatgaacagcgagaggccagatgagaaccacagcgagcccagccaccaggacgtcatcaaggtgaaggaggagttcacagaccccacctatgacatgttctacatgagccagtatggcctgtacaatggaggaggagcctccatggccgccctgcacgagagcttcaccagcagcctgaactacggcagcccccagaagttcagccctgagggggacctgtgcagcagcccagaccccaagatctgctacgtgtgcaagaagagcttcaagagcagctacagcgtgaagctgcactacagaaatgtgcacctgaaggagatgcacgtgtgcaccgtggccggctgcaatgctgccttccccagcagaagaagccgggaccgctactgggagaagagcaatgagcagaatggcctgctggtgtcctggggcgagaccctgagcagcctgaagtag

SEQ ID NO: 194197 - DNA, 3099 bp, Artificial Sequence
  derived and/or modified sequence
atggcccacctgggccccaccccaccaccccacagcctgaactacaagtctgaggaccggctgtctgagcaggactggccagcctacttcaaggtgccctgctgcggcgtggacaccagccagatcgaggccatccgctgcaccctggtgaactgcacctgtgagtgcttccagcccgggaagatcaacctgcggacctgtgaccagtgcaagcacggctgggtggcccacgccctggacaagctgagcacccagcacctgtaccaccccacccaggtggagatcgtgcagagcaatgtggtgtttgacatcagcagcctgatgctgtatggcacccaggccgtgcctgtgcggctgaagatcctgctggacaggctcttctctgtgctgaagcaggaggaggtgctgcacatcctgcacggcctgggctggaccctgcgggactatgtgcggggctacatcctgcaggatgctgctgggaaggtgctggaccgctgggccatcatgagccgggaggaggagatcatcaccctgcagcagttcctgcgctttggagagaccaagagcatcgtggagctgatggccatccaggagaaggagggccaggccgtggccgtgcccagcagcaagacagacagcgacatccgcaccttcatcgagagcaacaacagaaccaggagccccagcctgctggcccacctggagaacagcaaccccagcagcatccaccactttgagaacatccccaacagcctggccttcctgctgcccttccagtacatcaaccctgtgtctgcccccctgctgggcctgccccccaacggcctgctgctggagcagcccggcctgcggctgcgggagcccagcctgagcacccagaatgagtacaatgaaagcagcgagagcgaggtgagccccaccccctacaagaatgaccagacccccaacagaaatgccctgaccagcatcaccaacgtggagcccaagacagagcccgcctgtgtgagccccatccagaacagcgcccctgtgtctgacctgaccaagacagagcaccccaagagcagcttccgcatccacaggatgaggaggatgggcagcgccagcaggaagggccgggtcttctgcaatgcctgtgggaagaccttctatgacaagggcaccctgaagatccactacaatgctgtgcacctgaagatcaagcaccgctgcaccatcgagggctgcaacatggtgttcagcagcctgcggagcaggaacagacattctgccaaccccaacccccggctgcacatgcccatgctgaggaacaacagagacaaggacctgatccgggccaccagcggggccgccacccctgtgattgccagcaccaagagcaacctggccctgaccagccctggccggccccccatgggcttcaccaccccacccctggaccctgtgctgcagaaccccctgcccagccagctggtgttcagcggcctgaagacagtgcagcctgtgccccccttctaccgcagcctgctgaccccaggagagatggtgagcccccccaccagcctgcccaccagccccatcatccccaccagcggcaccatcgagcagcaccccccaccacccagcgagcctgtggtgcctgctgtgatgatggccacccatgagcccagcgctgacctggcccccaagaagaagcccaggaagagctccatgcctgtgaagattgagaaggagatcatcgacacagcagatgaatttgatgatgaagatgatgaccccaatgatggaggagctgtggtgaatgacatgagccatgacaaccactgccacagccaggaggagatgagccctggcatgtctgtgaaggacttcagcaagcacaacagaacccgctgcatcagcaggacagagatcagaagagctgacagcatgaccagcgaggaccaggagcctgagcgggactatgaaaatgaaagtgagagcagcgagcccaagctgggggaggagagcatggagggagatgagcacatccacagcgaggtgtctgagaaggtgctgatgaacagcgagaggccagatgagaaccacagcgagcccagccaccaggatgtgatcaaggtgaaggaggagttcacagaccccacctatgacatgttctacatgagccagtatggcctgtacaacggcggcggggcctccatggccgccctgcacgagagcttcaccagcagcctgaactacggcagcccccagaagttcagccctgagggggacctgtgcagcagcccagaccccaagatctgctacgtgtgcaagaagagcttcaagagcagctacagcgtgaagctgcactacagaaatgtgcacctgaaggagatgcacgtgtgcaccgtggccggctgcaatgctgccttccccagccgccgcagccgggacagacattctgccaacatcaacctgcacaggaagctgctgaccaaggagctggatgacatgggcctggacagcagccagcccagcctgagcaaggacctgagagatgagttcctggtgaagatctacggggcccagcaccccatgggcctggatgtgcgggaggatgccagcagccctgctggaacagaggacagccacctgaatggctacggccggggcatggccgaggactacatggtgctggacctgagcaccaccagcagcctgcagagcagcagcagcatccacagcagccgggagagtgatgctggcagtgatgagggcatcctgctggatgacattgatggagccagtgacagcggggagagcgcccacaaggccgaggccccagccctgcccggcagcctgggcgctgaggtgtctggcagcctgatgttcagcagcctgagcggcagcaatggaggcatcatgtgcaacatctgccacaagatgtacagcaacaagggcaccctgcgggtgcactacaagacagtgcacctgcgggagatgcacaagtgcaaggtgcccggctgcaacatgatgttcagctctgtgcgcagcaggaacagacacagccagaaccccaacctgcacaagaacatccccttcacctctgtggactag

SEQ ID NO: 194198 - DNA, 3300 bp, Artificial Sequence
  derived and/or modified sequence
atggcccacctgggccccaccccaccaccccacagcctgaactacaagtctgaggaccggctgtctgagcaggactggccagcctacttcaaggtgccctgctgcggcgtggacaccagccagatcgagagcgaggaggccgaggtggatgtgcgggagcgggagacccagagggaccgggagcccaagagggcccgggacctgaccctgcgggacagctgcacagacaacagcatgcagtttggcaccaggaccaccacagctgagcccggcttcatgggcacctggcagaatgctgacaccaacctgctcttcaggatgagccagcaggccatccgctgcaccctggtgaactgcacctgtgagtgcttccagcccgggaagatcaacctgcggacctgtgaccagtgcaagcacggctgggtggcccacgccctggacaagctgagcacccagcacctgtaccaccccacccaggtggagatcgtgcagagcaatgtggtgtttgacatcagcagcctgatgctgtatggcacccaggccgtgcctgtgcggctgaagatcctgctggacaggctcttctctgtgctgaagcaggaggaggtgctgcacatcctgcacggcctgggctggaccctgcgggactatgtgcggggctacatcctgcaggatgctgctgggaaggtgctggaccgctgggccatcatgagccgggaggaggagatcatcaccctgcagcagttcctgcgctttggagagaccaagagcatcgtggagctgatggccatccaggagaaggagggccaggccgtggccgtgcccagcagcaagacagacagcgacatccgcaccttcatcgagagcaacaacagaaccaggagccccagcctgctggcccacctggagaacagcaaccccagcagcatccaccactttgagaacatccccaacagcctggccttcctgctgcccttccagtacatcaaccctgtgtctgcccccctgctgggcctgcccccaaatggcctgctgctggagcagcccggcctgcggctgcgggagcccagcctgagcacccagaatgagtacaatgaatcttctgagagcgaggtgagccccaccccctacaagaatgaccagacccccaacagaaatgccctgaccagcatcaccaacgtggagcccaagacagagcccgcctgtgtgagccccatccagaacagcgcccctgtgtctgacctgaccaagacagagcaccccaagagcagcttccgcatccacaggatgaggaggatgggcagcgccagcaggaagggccgggtcttctgcaatgcctgtgggaagaccttctatgacaagggcaccctgaagatccactacaatgctgtgcacctgaagatcaagcaccgctgcaccatcgagggctgcaacatggtgttcagcagcctgcggagcaggaacagacacagcgccaaccccaacccccggctgcacatgcccatgctgaggaacaacagagacaaggacctgatccgggccaccagcggggccgccacccctgtgattgccagcaccaagagcaacctggccctgaccagccctggccggccccccatgggcttcaccaccccacccctggaccctgtgctgcagaaccccctgcccagccagctggtgttttctggcctgaagacagtgcagcctgtgccccccttctaccgcagcctgctgaccccaggagagatggtgtccccacccaccagcctgcccaccagccccatcatccccaccagcggcaccatcgagcagcaccccccacctccttctgagcctgtggtgcctgctgtgatgatggccacccatgagcccagcgctgacctggcccccaagaagaagcccaggaagagctccatgcctgtgaagattgagaaggagatcatcgacacagcagatgaatttgatgatgaagatgatgaccccaatgatggcggcgctgtggtgaatgacatgagccatgacaaccactgccacagccaggaggagatgagccctggcatgtctgtgaaggacttcagcaagcacaacagaacccgctgcatcagcaggacagagatccggcgggctgacagcatgaccagcgaggaccaggagcctgagcgggactatgaaaatgaaagtgagagcagcgagcccaagctgggggaggagagcatggagggagatgagcacatccacagcgaggtgtctgagaaggtgctgatgaacagcgagaggccagatgagaaccacagcgagcccagccaccaggacgtcatcaaggtgaaggaggagttcacagaccccacctatgacatgttctacatgagccagtatggcctgtacaatggaggaggagcctccatggccgccctgcacgagagcttcaccagcagcctgaactacggcagcccccagaagttcagccctgagggggacctgtgcagcagcccagaccccaagatctgctacgtgtgcaagaagagcttcaagagcagctacagcgtgaagctgcactacagaaatgtgcacctgaaggagatgcacgtgtgcaccgtggccggctgcaatgctgccttccccagcagaagaagccgggacagacacagcgccaacatcaacctgcacaggaagctgctgaccaaggagctggatgacatgggcctggacagcagccagcccagcctgagcaaggacctgagagatgagttcctggtgaagatctatggagcccagcaccccatgggcctggatgtgagagaagatgccagcagccctgctggaacagaggacagccacctgaatggctacggccggggcatggccgaggactacatggtgctggacctgagcaccaccagcagcctgcagagcagcagcagcatccacagcagccgggagagtgatgctggcagtgatgagggcatcctgctggatgacattgatggagccagtgacagcggggagagcgcccacaaggccgaggccccagccctgcccggcagcctgggcgctgaggtgtctggcagcctgatgttcagcagcctgagcggcagcaatggaggcatcatgtgcaacatctgccacaagatgtacagcaacaagggcaccctgcgggtgcactacaagacagtgcacctgcgggagatgcacaagtgcaaggtgcccggctgcaacatgatgttcagctctgtgcgcagcaggaacagacacagccagaaccccaacctgcacaagaacatccccttcacctctgtggactag

SEQ ID NO: 194199 - DNA, 1950 bp, Artificial Sequence
  derived and/or modified sequence
atgctgtatggcacccaggccgtgcctgtgcggctgaagatcctgctggacaggctcttctctgtgctgaagcaggaggaggtgctgcacatcctgcacggcctgggctggaccctgcgggactatgtgcggggctacatcctgcaggatgctgctgggaaggtgctggaccgctgggccatcatgagccgggaggaggagatcatcaccctgcagcagttcctgcgctttggagagaccaagagcatcgtggagctgatggccatccaggagaaggagggccaggccgtggccgtgcccagcagcaagacagacagcgacatccgcaccttcatcgagagcaacaacagaaccaggagccccagcctgctggcccacctggagaacagcaaccccagcagcatccaccactttgagaacatccccaacagcctggccttcctgctgcccttccagtacatcaaccctgtgtctgcccccctgctgggcctgcccccaaatggcctgctgctggagcagcccggcctgcggctgcgggagcccagcctgagcacccagaatgagtacaatgaatcttctgagagcgaggtgagccccaccccctacaagaatgaccagacccccaacagaaatgccctgaccagcatcaccaacgtggagcccaagacagagcccgcctgtgtgagccccatccagaacagcgcccctgtgtctgacctgaccaagacagagcaccccaagagcagcttccgcatccacaggatgaggaggatgggcagcgccagcaggaagggccgggtcttctgcaatgcctgtgggaagaccttctatgacaagggcaccctgaagatccactacaatgctgtgcacctgaagatcaagcaccgctgcaccatcgagggctgcaacatggtgttcagcagcctgcggagcaggaacagacacagcgccaaccccaacccccggctgcacatgcccatgctgaggaacaacagagacaaggacctgatccgggccaccagcggggccgccacccctgtgattgccagcaccaagagcaacctggccctgaccagccctggccggccccccatgggcttcaccaccccacccctggaccctgtgctgcagaaccccctgcccagccagctggtgttttctggcctgaagacagtgcagcctgtgccccccttctaccgcagcctgctgaccccaggagagatggtgtccccacccaccagcctgcccaccagccccatcatccccaccagcggcaccatcgagcagcaccccccacctccttctgagcctgtggtgcctgctgtgatgatggccacccatgagcccagcgctgacctggcccccaagaagaagcccaggaagagctccatgcctgtgaagattgagaaggagatcatcgacacagcagatgaatttgatgatgaagatgatgaccccaatgatggcggcgctgtggtgaatgacatgagccatgacaaccactgccacagccaggaggagatgagccctggcatgtctgtgaaggacttcagcaagcacaacagaacccgctgcatcagcaggacagagatccggcgggctgacagcatgaccagcgaggaccaggagcctgagcgggactatgaaaatgaaagtgagagcagcgagcccaagctgggggaggagagcatggagggagatgagcacatccacagcgaggtgtctgagaaggtgctgatgaacagcgagaggccagatgagaaccacagcgagcccagccaccaggacgtcatcaaggtgaaggaggagttcacagaccccacctatgacatgttctacatgagccagtatggcctgtacaatggaggaggagcctccatggccgccctgcacgagagcttcaccagcagcctgaactacggcagcccccaggtgctgcccaggaggtag

SEQ ID NO: 194200 - DNA, 2712 bp, Artificial Sequence
  derived and/or modified sequence
atggcccacctgggccccaccccccccccccacagcctgaactacaaatccgaagatcggctttcggagcaagactggcccgcctactttaaagtaccatgttgtggtgtggatacatcccagatcgagagtgaggaagctgaagtggatgtgagggagcgggagacccagcgcgacagagaacccaagagagcgcgcgacctaactctgagagatagctgcacagataatagtatgcagtttggtacccgcaccactaccgctgaaccggggtttatgggaacctggcagaacgctgacactaatttactctttagaatgtctcagcaggctatccgttgcaccctcgtaaattgtacatgtgagtgttttcaaccaggaaaaataaacctcaggacgtgtgatcagtgcaagcatggatgggttgcccacgctctcgacaagttatccacccagcatctttaccaccccacacaagtcgaaattgtgcaatcaaacgttgtgttcgacatctccagcttgatgctgtatggtacccaggccgtgcccgtgcgtttaaagattttgctggacagattgttctccgtgctgaagcaggaagaggtcctccatatcctccatggtctgggatggacactgagagactacgttcgaggatatattctgcaggacgctgcgggaaaggtcctggaccgatgggctattatgtcccgcgaagaggaaatcatcacgctacagcagtttctgcgattcggcgagaccaagtccattgtggagctcatggccattcaagagaaggaggggcaagctgtcgctgtcccttcgtctaagactgactctgacataaggacatttattgagagcaacaatcgcactagatccccaagtctgttggcccacctcgaaaatagtaatccatcatctatccatcactttgaaaacataccgaacagtttggcgtttctgttgcccttccagtacattaaccctgtgagcgcgcctctcttagggctgccacccaacggccttctgctcgaacaaccaggcctccgcctgcgggagcccagcctgtctacacagaatgagtataatgagagtagtgagtcagaggtgtcacctactccttataaaaacgatcagacaccaaatcgaaatgccctgacatcgatcactaacgttgagccgaagactgagccagcctgtgtgtccccaatccaaaacagcgcacccgtttccgacctgacgaagacagaacacccaaagtcttccttccgtatacaccggatgcgtcgtatgggctctgcctcacgcaagggcagggtattctgcaatgcttgtgggaagacattttacgacaagggaacattgaagattcactacaacgctgtgcatttgaagatcaagcatcggtgcaccatagaggggtgtaatatggtcttttcatctcttcgctctaggaacagacatagcgcaaaccccaacccgcgcctgcacatgccaatgcttcgcaacaaccgcgataaggatctcataagagccacatcgggcgcggctacccctgttatcgccagcacgaagagtaacctggcgctgacaagtccaggaagaccaccgatggggtttacaactccaccactggacccagtcctgcaaaatcccctaccatctcagctcgtgttttccggacttaaaaccgtgcagcccgtgcctcctttttatagatccctgttgaccccgggagaaatggtcagcccccccacatccctgccgaccagccctatcattcctacaagcgggacgattgaacaacaccctccgccccctagtgagccggttgtgccagccgtgatgatggcaactcatgagcccagtgcagacctggctccaaagaagaagcctcggaagagctctatgccagttaagatcgaaaaggagatcatcgataccgccgacgagttcgatgatgaggacgatgacccgaatgatggaggagcagttgttaacgacatgtcacacgataaccactgtcactctcaggaagaaatgtctccgggtatgagtgttaaggacttcagtaagcataatcggacgcgctgtatctcacgcacagaaatcagaagggcggattcaatgacctcggaagaccaggagcccgaaagggattatgaaaatgagtccgagtcctcggagccaaaacttggtgaagaaagtatggagggagacgaacacatccattctgaggtgtccgagaaggtgttaatgaatagcgaacggcctgacgagaatcattcagaaccctctcaccaagatgtcattaaggtgaaagaagagtttacggatccaacttacgatatgttttacatgagccagtacggcctatacaacgggggcggggcaagcatggctgcactccatgagagtttcacctcttcacttaactacggaagtcctcagaagttctcccccgagggtgatctgtgtagctctccagacccaaagatctgttatgtgtgcaaaaagtcctttaagtccagttattctgttaaactccattaccgcaacgtccatctgaaggagatgcacgtatgtaccgtagccggttgcaacgccgcattcccatccaggagatcccgggaccgctattgggaaaaatcaaacgaacagaacgggttactggtctcatggggcgagaccctgagttcactgaaatag

SEQ ID NO: 194201 - DNA, 3099 bp, Artificial Sequence
  derived and/or modified sequence
atggcccacctgggccccaccccccccccccacagcctgaactacaagagcgaggaccggctatcagaacaggactggcctgcatacttcaaggtgccctgttgtggagtggataccagtcagattgaggcaatcaggtgcaccctcgttaactgcacctgtgagtgtttccagcccggcaagattaatctccgcacttgtgaccagtgcaagcacggttgggtggcccacgccttggacaagctgagtacacagcacttgtatcatcctactcaggtagagattgttcaaagtaatgtggtcttcgatatttctagcttgatgctgtacgggacacaagcagttcctgttaggctcaagattctactcgacagacttttttctgtcctgaaacaggaagaagttctccacatactgcacggcctggggtggacactgcgcgattatgtgcgaggatatatcctccaggacgctgccggaaaggtgctggacaggtgggcgataatgtcacgggaggaggaaataattactctccagcagttcctgcggtttggagagaccaagtccatcgtggaactgatggcaattcaggagaaagagggacaggccgtggctgtgccctcaagcaaaaccgactctgacatacggacctttatcgagagcaacaacaggacaagaagcccttctcttctggctcatctggagaactccaatccaagcagtatccaccattttgagaacattcccaacagcctggcctttctgctcccctttcaatatattaaccctgttagcgcacctctactggggctcccaccaaatggcctcctgctggaacagcccggcctgcgacttagggagcctagcctgagcacccagaatgagtataatgagagctcagaatctgaggtcagccctacaccatacaagaacgatcagacacctaatcggaacgcgctgacctctattacaaatgtggagcctaagaccgagcctgcctgcgtgagccccattcaaaatagcgccccagtctcagacctgaccaagacagaacacccaaaaagttcctttagaatacaccgcatgcggcggatggggtccgcgtctaggaaaggaagggtgttctgcaacgcttgtggtaaaacattctacgacaagggcaccctgaagattcattacaacgccgttcaccttaaaatcaagcatcgttgtacgattgaagggtgtaacatggttttttctagcttacgatctcggaaccgacatagcgccaaccccaacccccggctgcacatgcctatgttacgcaataaccgcgacaaagacttgattagggctacgtcaggtgccgctacccccgtaatcgcatcgacaaaatctaatcttgctctcacaagcccgggaaggcctccaatggggttcacgacccctccgctggaccctgtcctgcagaatcctctcccttctcagcttgttttctccggactgaaaaccgtgcagcccgttcctccattttatcgcagcctgcttactcctggagagatggtttcgccaccaacaagtctgccaacgagcccgatcattccaacatctggcaccattgagcaacatccccctcccccgagtgagcccgtggttcccgctgtcatgatggcgactcatgaaccaagtgctgatcttgcgccaaagaaaaagcctcgcaaatcctccatgcccgtaaaaatagaaaaggagattattgacaccgcagacgaatttgacgacgaagatgatgaccctaacgacggaggcgcggtagttaatgacatgtcgcacgacaatcattgccacagccaagaggaaatgtccccaggtatgtctgtaaaagacttcagcaagcataacaggacccggtgcatcagtcgtacagagatacgacgggccgactctatgacttccgaggatcaggagcccgaacgagactacgagaatgagtcagaaagctcagaacccaagttaggcgaagagagcatggagggggatgagcatattcactcggaggtatcagagaaggtgctgatgaactctgaaaggccagacgaaaaccactccgaaccttcacaccaggatgtcatcaaagtgaaagaggagttcacagatcctacttacgacatgttctacatgtctcaatacggtctttataatggaggcggggccagcatggcagccttgcacgagagctttacttcctccttgaattacggtagcccacagaaattttcacccgagggggacctgtgttcttcacccgaccccaagatctgttatgtgtgcaagaagagcttcaagtccagctattccgttaagcttcattatcggaacgtccatttgaaggagatgcacgtttgcaccgtggcaggctgcaatgcagccttcccatccaggcgatctagagatcggcatagtgctaacattaatctacacagaaagctgcttacaaaagagcttgatgatatggggctggactcttctcagccgtccctgtcaaaggacctccgcgacgaatttcttgtgaagatctatggcgcgcagcaccctatgggcctggacgtgcgcgaggacgccagtagccccgccggtacagaggattcacatcttaatgggtacgggagaggaatggccgaagattacatggttctcgatctgagtactactagctcgctgcaatcaagttcctcgattcactccagcagggaaagcgacgcgggcagcgacgagggcatcctgttggacgacatagatggagcatctgacagtggtgaatctgctcacaaggccgaagcgcctgctctcccaggttcactgggcgctgaggtctccggttcactgatgttcagtagcctgagcgggtctaacggcggcatcatgtgtaacatatgccataaaatgtatagcaataagggcacgctacgagtacactacaagaccgtgcatctgagggagatgcacaaatgtaaggtaccgggttgcaacatgatgttcagcagcgtaagatctcggaaccgccactcccagaatccaaacctccataaaaacatcccatttacatcagtcgactag

SEQ ID NO: 194202 - DNA, 3300 bp, Artificial Sequence
  derived and/or modified sequence
atggcccacctgggccccaccccccccccccacagcctgaactacaaatctgaagacaggctatcggaacaggattggccggcatactttaaggtgccttgctgtggggttgacactagccagatcgagagtgaagaggcagaggtagatgtgcgcgaaagggaaacccagagggatcgtgaaccaaaaagggcaagggacctcactttaagagatagttgcacagataactccatgcaattcggtactcggacaactaccgccgaacccggattcatgggaacctggcagaatgcggacactaacttgctgttcaggatgtctcagcaggccattcgctgtacacttgttaattgcacctgcgaatgtttccagccgggcaagatcaatctccgtacttgtgatcagtgcaagcatggatgggtagctcacgcactggataagctctcaacacagcacctgtaccacccaactcaggtggaaatcgtgcaaagcaacgtggttttcgatatttcgagcctgatgttatatggaacccaggcggtccctgtccggctcaagatcttactggaccggttatttagcgtcttaaagcaggaggaagtgctccatatcctccatggactcgggtggacgttacgagactacgtgcgagggtacatcctccaagacgccgctgggaaggtcctggaccgttgggcaatcatgagccgcgaagaggagattataaccttacaacaatttctgcgcttcggagagacaaaatcgatagtagagttgatggcaattcaggagaaggagggacaggctgtcgccgtccccagctccaaaactgatagtgatattaggacattcatcgagtcaaataatagaaccaggagcccctcactcttagcccatcttgaaaatagtaatccttcttccatccatcacttcgagaatattcctaattcattagccttcctcttgccctttcagtacatcaatccagtctccgcgcctttactaggactgccgcctaacgggctgcttctggagcagccaggacttagactgcgcgaaccctccctgagcacccagaatgaatacaatgaatcatctgaatccgaggtatcacctaccccgtacaagaatgaccaaacccccaatcggaatgccctgacatcaatcactaatgtcgaacctaaaacagaacctgcgtgcgtttcccccatccagaacagcgctcctgtgtcagatctgactaagacagaacaccccaaaagctctttcaggattcaccgaatgagaaggatgggcagcgcatctaggaagggtagagtattctgcaacgcgtgcggaaaaacattctatgacaaagggaccctgaagattcattacaacgccgtacatcttaaaatcaaacatcggtgcacaatcgagggttgtaatatggttttcagtagcctccggagccggaaccgacacagtgctaatccgaaccctaggcttcatatgccaatgcttcgcaataatcgggacaaggacttaatcagagcaacatcgggggcagctacccccgttattgccagtactaaatcaaatctagcactgacctcaccaggaaggccacctatgggcttcacaacaccacccctggatcctgttcttcagaacccccttccgtctcaacttgtattttcaggactgaagactgtgcaaccagtaccacccttctaccgcagtctgctaacgccaggagagatggtgagtccccccacttccctgcccacatccccgatcatcccaacttctggtacaatcgaacagcacccccctcctccttccgagcctgtcgtgccggccgttatgatggccacacacgaaccaagtgcagatctggctcctaaaaagaagccccgtaaaagctctatgcccgtaaagattgagaaggagataattgacaccgccgacgagttcgatgatgaggatgatgatcctaacgatgggggtgccgtggtaaacgatatgtcgcacgacaaccactgccatagccaggaggagatgtctccaggcatgtcagtaaaggacttctccaagcataacaggaccaggtgtatctcaagaactgagatccgacgcgccgattcgatgactagcgaagatcaggaaccggaaagagactacgagaatgagtcagagtctagcgaacctaagctcggagaggagagcatggagggcgacgagcatatccactccgaggtttccgagaaggtgctcatgaatagtgagcgccccgacgagaaccacagtgagccctcccaccaggatgtgattaaagtgaaagaggaatttacagacccgacttacgatatgttctacatgtcccaatacggcctgtataacggcggcggagcctcaatggcagccctgcatgagagttttacctcctcgctcaattatgggtcacctcagaagtttagcccagaaggggacttgtgttcctctcctgacccaaagatctgttatgtgtgcaaaaaatcgttcaagagctcgtattctgttaagctgcactaccgcaatgtacacttaaaagagatgcatgtgtgcaccgttgcaggatgcaacgctgctttcccttcacgtaggtcccgggacagacactcagccaatatcaatctgcaccgtaaactgctgacaaaggagcttgatgatatgggtcttgactcctcacagcccagtctctccaaggatctgcgggacgagttcctggtcaagatttatggtgcacagcaccccatgggactcgatgtgcgagaggacgcaagttctcccgcaggaaccgaagattcccacctgaatggctatggacggggaatggctgaggactatatggtcctcgatctgtctactacctcttccctgcaatcatcaagcagtatacatagcagtcgcgaatccgacgccgggagtgacgaagggatccttctggatgacatcgatggcgcgtccgacagcggcgaatccgcacataaggcagaggccccagcccttcccgggtcgcttggggccgaggtgagcgggtcgctaatgttctcctcactcagtgggagcaatggtggcatcatgtgcaatatctgtcacaaaatgtattccaataagggcaccttgagggtgcattacaaaaccgtgcacctaagagagatgcacaagtgcaaagtgccagggtgtaacatgatgttttcctccgtgcgctccaggaatcgccactcccaaaaccccaacctccacaagaatattcccttcacttctgttgactag

SEQ ID NO: 194203 - DNA, 2712 bp, Artificial Sequence
  derived and/or modified sequence
atggcccacctgggccccaccccccccccccacagcctgaactacaaatcagaggatcggctaagcgaacaggactggcctgcatactttaaagtgccatgctgtggagttgatacgtcacagatagaaagcgaagaggctgaagtggacgttagagagagggaaacccaacgggaccgtgagcccaagcgggctcgggacctgaccctgcgtgactcttgcactgacaacagcatgcaattcgggacacggacaaccactgctgagcccggattcatggggacttggcagaatgccgacactaacctgttgttcagaatgagtcagcaggccattaggtgcaccctggtgaattgcacttgcgagtgcttccaaccagggaaaatcaacctcaggacatgcgaccagtgtaaacacggttgggtagcgcacgcgcttgacaagctgtctacacagcacctataccacccaacgcaagttgaaatagttcagagtaatgtggtgttcgacatctcttcccttatgttatacggaactcaggccgtgcctgtcaggctgaagatcctactggatagattattttccgttctgaaacaggaggaggtgctacacatacttcacggactcggttggactctgcgggactacgtccgggggtatatccttcaggacgcggcaggaaaagtgttggaccggtgggctatcatgtcacgagaggaagaaatcataactctgcagcaatttctgaggtttggagaaacaaaatcaatcgttgaattgatggctatacaggagaaagagggccaggccgttgctgtcccatcgtcaaaaacggactctgatatcaggacattcattgagtcaaataataggacccggtcaccttcccttctggctcatctggagaactcaaatccatcttcaatccatcattttgaaaatattccaaactccctggcctttttgctaccctttcaatacatcaatcctgtgtccgcgcctctgctgggattaccacctaacggacttctcttagaacagcctggattacggctgcgggagccctctctgtctactcagaatgagtataacgagtccagcgaaagcgaggtttctcctaccccctacaaaaatgatcagactcctaacaggaatgcgctgacgtcaatcaccaatgtggagcccaaaaccgaacctgcgtgcgtgagccccatacagaactctgctccggttagtgatttaaccaaaaccgaacacccaaaatcctcttttagaattcaccggatgcgtaggatgggcagcgcttccagaaaaggtcgagttttttgcaacgcctgtggcaaaaccttttacgacaagggcaccttaaagatccattataacgctgttcacctcaaaatcaaacacagatgtaccatcgaaggctgtaatatggtcttctcgtcactgcgatcaaggaaccggcatagcgcgaatcctaatccccggttgcatatgcccatgcttaggaataaccgggataaggaccttataagagccacctcaggcgccgccacccccgttatcgcgagcaccaagtctaacctggctctcacgagcccgggaagaccccccatggggttcacaactccccctctcgatcctgtccttcagaatccacttccttctcagctggtgtttagcgggctgaagactgtgcagccagtacctcccttttaccgttccctgctgaccccgggcgaaatggtcagtccccctactagcctgcccaccagtcctatcattcccacaagtggtaccattgagcagcatccacccccacctagtgaacctgtcgttcctgccgtaatgatggctacccatgagccttccgcggatctggcacctaaaaaaaaacctcgcaaatcttccatgcccgtcaaaatcgaaaaggagatcatcgatacagcagacgagttcgacgacgaggacgacgatccgaatgacggcggggccgtcgtgaatgacatgtcacacgacaatcactgtcattctcaggaggagatgtctccgggcatgtccgttaaggacttctccaagcataatagaacgcgatgcatttcacgtaccgagattcggagagctgattctatgacctcggaggaccaggaacctgaacgcgattacgagaatgagtcggagtcatccgaaccaaaactgggagaagaaagcatggagggtgacgagcacatacactcagaggtgtctgagaaggtgttaatgaatagcgaacgacccgatgagaatcattcagaaccttcccaccaggacgtaattaaggtgaaggaggagttcacagatcccacgtatgacatgttctacatgagccaatacggtctgtacaatggaggaggcgcaagcatggcagcactccatgaaagtttcacaagcagtcttaactacggaagtcctcaaaaattctcccccgaaggcgatctctgctctagtcccgacccaaaaatttgttacgtttgtaaaaagagttttaagagcagctatagcgtgaagctgcattatcgaaatgtccacctgaaggagatgcacgtgtgcactgtggccggctgcaacgcggcgttccccagcaggaggtctcgggatcggtactgggagaagtccaacgaacagaacggcctgctggtgtcgtggggtgaaactctgagctctcttaaatag

SEQ ID NO: 194204 - DNA, 1950 bp, Artificial Sequence
  derived and/or modified sequence
atgctgtacggcacccaggccgtgcccgtgcggctgaagatcctgctggatcgtctgttctctgtgctgaaacaggaggaggttctgcacatcctgcatggattgggttggacattaagggattatgtgcgcggttacattttacaagatgcggctggaaaggtgctagacaggtgggccattatgtcgagggaagaggaaattattacactgcaacagttcttgcgatttggcgaaacaaaaagtattgttgagctcatggcaatacaggagaaagaaggccaggcagtggccgttccgagttctaagacagactcggatatccgcacgttcattgaatcaaataaccggacacggagtccctcgctcctcgcccacttagagaattctaacccctcatctatccaccacttcgagaacattcccaactcgctggctttcctcttgccatttcagtatatcaatcccgtcagtgcacctctccttgggctgccacccaacgggctcttgcttgagcagccgggactgcgattaagagagcccagtctgagcacacagaatgaatacaatgagagctccgagtccgaagtgagccccactccctacaagaatgatcagaccccaaacagaaacgccttgacaagcatcaccaacgtagagcccaaaacagagcccgcctgtgtgtcaccgatccagaacagtgcgcccgtcagtgacctgacaaagaccgaacatcctaaaagttcctttcgcatccataggatgagacgtatgggatccgcaagtaggaaggggagagtattctgtaatgcttgcggaaagactttctatgacaagggtacccttaaaatacactacaatgctgttcatctcaagattaagcatcgctgcaccatcgagggctgtaatatggttttttcatctctgcgaagtagaaaccgccatagtgccaaccctaacccccgcctccacatgcctatgttgcgtaataaccgcgacaaagacctgatcagagccacatctggagcagctaccccagtcatcgcctctaccaaatcaaacctggccctgacatcgccgggtcgtcctcccatggggttcaccactcctcccttggatccggtgctacagaaccccctgccatcacagctcgtgttttccggccttaagactgtgcagccagtgccaccgttctaccggtcactgctcactcctggagagatggtaagccctcccacgtctctccctacatccccaatcatccctactagtggcaccattgagcagcacccccccccgccttccgaacctgtggtgcccgcggtcatgatggccacgcatgagccctcagcagacctggcgccgaagaaaaaacccagaaagagcagtatgccagtaaagatcgaaaaggagattatcgatactgccgatgagttcgacgatgaagacgatgatcctaatgacggaggagccgttgttaacgatatgagtcacgacaatcattgccattctcaggaggaaatgtccccgggaatgtctgtcaaagatttttccaagcataacagaacccgttgcatctcccggacggagatccgccgcgctgacagcatgacaagtgaagatcaagagcctgagcgtgactacgaaaatgagtcggagtcttctgagcctaaactgggggaggagtccatggaaggtgacgaacatattcattcagaggtgtcagagaaggtgcttatgaactctgagagacctgacgaaaaccactctgagccttctcatcaggatgtgatcaaggttaaggaggaatttaccgaccctacttatgatatgttttacatgtcacagtacggtctctacaatggcggcggcgcgtctatggctgccctccacgaaagtttcacctcctctttgaactacgggtccccacaggtactgcctcggcggtag

SEQ ID NO: 194205 - DNA, 2712 bp, Artificial Sequence
  derived and/or modified sequence
atggcgcatttggggcctacaccccctccccatagcctcaattacaaatctgaggatcggctgtctgagcaggattggccagcatacttcaaggtgccttgttgcggcgtagatacgtcccagatcgaaagcgaagaggctgaggtggatgtgcgggagcgcgagacacagcgcgacagggagccaaagagagctagagacctgactctgcgggactcttgtacagacaactcaatgcagttcgggacccgaactaccaccgccgagccaggcttcatggggacatggcagaacgctgacacaaatctactctttcgaatgagccaacaggctatcagatgtactctagtgaattgcacatgcgagtgctttcagccaggtaagatcaacctgcggacatgcgaccagtgtaagcatgggtgggttgcccatgccttggataaactgtccactcagcacttataccaccctacacaggtggagatcgttcagtctaatgttgtgttcgacatcagctcactgatgctgtatggaacacaggccgtccctgtgcggctaaagatactattagatcggttgttttctgttctcaagcaagaggaagttctgcacattctgcacggcctcgggtggaccctgagagattacgtaagaggctatatcctccaagacgctgccggtaaagtcctcgatcgatgggctatcatgtctagggaagaggaaataattacactgcagcaatttctcaggttcggtgaaaccaaatctatcgtggagctgatggccattcaagagaaagagggccaggccgtcgcggtacctagtagcaaaaccgactctgatatccgcaccttcatcgaatcgaacaaccggacccgaagcccatctctgcttgctcacctagaaaattctaatccatcttctatacaccactttgagaacatccccaattccctcgcatttctcttacccttccagtacatcaatcctgtgtccgccccacttttgggcctccccccaaatggccttctcctagaacagccaggcctccgattacgcgagcctagcctgagtacccagaacgaatataatgaaagctcagagtccgaggtatccccaaccccctataaaaatgaccagacccctaatcggaatgctctgacaagcattaccaatgtggaacccaagacggaaccagcttgcgtaagtcccatccagaactccgcacctgtgagtgacctcacaaagactgaacatccaaaaagctcatttcgcatccataggatgcggagaatgggttccgcttctcgaaaagggcgtgtcttctgtaacgcttgcgggaaaactttttacgacaagggtaccctgaaaattcattacaacgcggtacacctgaaaataaagcatcggtgtacgatcgagggctgcaacatggtgttctccagcttgaggtctcggaatagacactctgctaacccaaaccccaggttacacatgcctatgctgcgtaacaaccgggataaggaccttatccgggcaactagcggagctgctaccccggtgatcgcaagtacaaagtcaaacctagcactgacttccccaggtcgtcctccaatggggtttacaactcctccacttgacccggttctgcaaaatcctctgcctagccagcttgttttcagtggactcaagacggtccagccggtcccgcctttctataggagtctcctcactcctggcgagatggtttccccacccacttcgctcccgacgagtccaatcatccctacgtccggtacaatcgaacagcaccccccacccccttccgaacccgtggtgcctgccgtcatgatggctactcacgaaccatccgcggatctggcccctaagaaaaagcccaggaaatcctctatgcctgtcaagattgagaaagaaatcatagacacagccgatgagtttgacgacgaagatgacgatcccaatgacggcggtgcagtcgtgaacgatatgtcacatgacaaccactgtcattcccaggaggaaatgtcccccggtatgtcagtcaaggatttttcaaagcataaccgaactcgatgcatctcacgaactgaaattcggcgagctgattcaatgaccagcgaggatcaggaacctgaaagagactatgagaatgagtctgaatcaagtgagccaaagctgggtgaggaaagtatggagggggacgagcatatccacagtgaggtgagcgagaaggtgctgatgaacagtgagaggcccgatgagaaccatagcgagccctctcaccaggacgtgattaaagtgaaggaagagttcaccgatccaacttacgacatgttctatatgtcacaatacggactttacaacggcggtggcgcttccatggcagccctccacgagtccttcacttctagtctcaattatggaagcccccaaaagtttagccccgagggtgatctttgcagttctccagatcctaaaatatgctacgtgtgtaagaaaagctttaagagcagttatagcgtcaagttacattaccgtaatgtgcatctgaaggaaatgcacgtgtgcaccgtggctgggtgtaacgctgcctttcccagtcggagatccagagacaggtattgggagaaatcaaacgagcaaaacggactactcgttagctggggggagacactcagcagtttgaagtag

SEQ ID NO: 194206 - DNA, 3099 bp, Artificial Sequence
  derived and/or modified sequence
atggcccacctgggccctactcctccacctcactcactcaactacaaatccgaagataggttgtcagaacaggattggccagcgtacttcaaagtaccatgttgtggcgtggatacttcacaaatcgaggccattcgctgcacactcgttaattgcacttgcgagtgttttcaaccaggaaagatcaaccttagaacatgcgaccagtgcaagcatgggtgggtcgcgcacgctctggataaattgagcacgcagcatctttaccatcctacccaggttgagattgtacaaagcaacgtggtgttcgacattagctctctcatgttgtatggaacgcaggccgtcccagtgagactgaaaatactgcttgaccgtctgtttagcgtactcaaacaggaagaagtgctacatatcctgcacggtctcgggtggacccttagggactacgtgcgagggtacatcctgcaagacgccgcagggaaagtactggatagatgggcgatcatgtcccgcgaggaagagatcattacattgcagcagttccttcgattcggtgaaactaagtccatcgtagagctcatggctatccaggagaaggaaggccaggcagttgcagtgccaagcagcaaaactgattctgatatccgaacattcatcgaaagcaacaacaggactcggtccccgtcactgctagcccatctggaaaacagcaaccctagctcgatccaccacttcgaaaatattcccaactcgctcgcattcctgctgccgtttcagtacataaaccctgtgtccgcaccactcctcgggctgccacccaacggactgctcttggagcaacccggacttagactacgggagccatctctgtctacgcagaatgagtacaatgaaagcagtgagagcgaagtgtctccgactccctacaaaaacgatcagacacccaaccgcaatgctctgacaagtatcactaacgtggagcctaaaaccgagccagcctgtgtctctccgatccagaattccgcaccagtatcagacctgaccaaaaccgaacatcctaagtctagctttagaatacaccggatgcgcagaatgggctcagcatccaggaaaggacgagtgttttgtaatgcatgcggcaagaccttctacgacaagggtacactcaaaatccattacaacgcagtgcatctgaaaattaaacatcgctgcactattgaagggtgtaatatggttttctccagtcttcggtcccggaaccgccactcagcaaaccccaaccctcggctccacatgcccatgctccggaacaatcgggataaagatctcataagagccacatcaggagcagccacaccagtgattgcctcgacaaagtctaatcttgcccttacttcccccggacgcccacccatggggtttacaacacctcccttggaccccgtcttgcagaaccccttaccctcgcagcttgtgttctccgggctcaaaacggtccagcctgtccctcctttttaccggtcactgctgacccctggtgaaatggtctccccccctaccagcctgcctacctcaccaatcattcctacctccgggacaatcgaacagcaccctcctccaccgtctgagcccgttgtgccagcagtgatgatggctacccatgaaccaagcgctgacttggctcctaaaaagaagccaaggaagtcatcaatgcctgttaagatcgagaaagaaattatcgacactgctgacgagttcgacgatgaggatgacgatcccaatgatggcggagccgtggtaaacgatatgagccacgataaccattgtcactcacaggaagagatgtcgcctggcatgagtgtgaaggatttcagcaaacataaccggactaggtgcatttcaaggacggaaattcggagggctgatagtatgacttctgaggaccaagagcctgaacgcgactatgagaatgaatcagagtcctcagaacccaaactgggcgaggagtcaatggagggcgacgagcacatccattcagaagtaagtgagaaagtgttgatgaactccgagagacctgatgaaaatcactcagagccatctcaccaggatgtcattaaggtgaaagaagaattcactgacccaacctacgatatgttttacatgagtcagtacggcctttacaatggaggcggagcatccatggctgctctacacgagagctttaccagctctttaaattatggcagcccacagaagttttcaccagagggtgacctatgcagctcccccgacccgaagatctgctacgtctgcaagaaaagtttcaagagttcttatagtgtgaaattacactatcggaatgtacatttgaaggagatgcacgtatgtacagttgcaggttgcaatgctgctttcccctctcggaggagtcgggaccggcactccgccaatatcaacttgcaccggaagctgttaactaaagagctggacgatatgggtttggattccagccagccttccctgtcgaaagacttgcgggacgagttccttgtgaaaatctacggcgcacagcatccaatgggcctggacgtccgggaggatgcatcaagcccagctggcacagaagacagtcacttgaacggatacggacggggaatggcagaggactatatggtacttgacttgtctaccacatcctcccttcagagcagctcatccatccactccagcagggaatcagatgccggaagcgacgaggggattctgctagatgatatagacggcgcttccgacagtggagagagcgcccacaaggcagaggcccctgcactgcctggatcgctgggcgcagaggtgtcaggctctctcatgttctcatcactgtctggatccaatggcggaatcatgtgtaacatttgtcacaagatgtattcaaataaggggactctgcgcgtacactacaagacggtgcacctgcgagaaatgcacaagtgtaaggtccccggatgcaatatgatgttctcatccgttagatccagaaataggcacagtcagaaccctaatctgcacaaaaatattccattcacaagcgtcgattag

SEQ ID NO: 194207 - DNA, 3300 bp, Artificial Sequence
  derived and/or modified sequence
atggcccacttgggtcccactccgcctcctcacagcttaaattataagagcgaagaccggctgtctgaacaggactggcctgcttacttcaaagttccatgctgcggagtggacacatctcagatcgagtctgaagaggccgaggtcgacgtaagagagagagagactcagcgtgacagggaaccgaaacgggcacgtgatctaacactgcgagatagctgcacggacaactcaatgcagttcggcaccagaaccacaacagccgagccaggctttatgggaacttggcaaaacgcagacactaatctgctgtttcgcatgagccagcaggccatccgctgcactttggtgaattgcacgtgcgaatgctttcaacccggaaagattaacctgcgcacttgcgatcagtgtaagcacgggtgggtagcccacgccctggacaagctgtctacccaacatctataccacccgactcaggtagaaatcgtacagtctaatgtcgtattcgatataagctcgttgatgctgtacggtacacaagcggtgcccgtgagacttaagattctgttggaccgcctcttttctgtgcttaaacaggaagaagtgctgcacatcctgcacggtttaggttggactctgagggattacgtgcgagggtatattctgcaggacgctgcgggaaaagtcctagataggtgggcgattatgtcccgggaggaggagatcattacgctccaacaatttttgaggtttggcgagaccaagagcatcgtagagctgatggccatccaggagaaggaggggcaagctgtggctgtgcccagcagcaagacggattcagacatccgaacctttatcgaatctaacaacaggacaaggagtccgagcctcctggctcaccttgagaactccaacccctcatccatccaccatttcgaaaacatcccgaacagcctcgcgttcctattgccctttcagtacatcaatccggtttccgcgccattactagggctcccacccaatggattgctactcgagcagcctgggctgagactgagggagcccagcctgagcacccaaaacgaatacaacgagtccagcgaatccgaggtgtctcctacgccctacaaaaatgaccagacaccgaataggaatgcactgacgtccatcacgaatgtcgaacctaaaaccgagccagcatgcgtttctccaatccaaaattccgcaccggtgtctgatctgacaaaaaccgagcatccaaagtcatctttccggatacatcggatgagaagaatggggagcgcctccagaaaaggtagggtcttctgtaacgcgtgcggcaagaccttttatgacaaagggacactgaagatccattacaatgccgtgcatcttaagatcaagcacagatgcaccatcgaagggtgtaacatggtcttcagcagtttaagatccagaaacaggcactctgcaaacccaaacccccgactgcatatgcccatgctgcgcaataacagggacaaggatctaattcgagccacgtccggagccgctactcctgtgatagcatccacaaaatctaacttggcccttacgtccccagggaggccccctatgggattcactacccccccactagatcccgtacttcaaaacccgttgccttctcaactggtgtttagcgggctaaaaactgtacagccggtgcccccattttacaggagcttgctaacaccaggggaaatggtctctccccctacgtcgttgccaacatcaccaattatccctactagcggaactatagagcagcacccccctccgccatcagaacccgtggtccctgccgtgatgatggctacacatgaacctagcgccgatttagctccaaagaaaaaacccaggaagtctagcatgcctgttaaaatcgagaaagaaattatcgataccgccgacgaatttgacgatgaagacgatgaccccaacgacggcggtgccgtcgtcaacgacatgtctcatgacaatcactgccactctcaggaagagatgagccctggcatgtctgttaaggatttctcaaagcacaacaggacccgctgcatttcccggactgagataaggagagcagactcaatgacaagtgaggatcaggagcccgagcgcgactatgagaacgagagcgagtccagtgaacccaagctgggcgaagaatcaatggaaggggatgaacacattcactccgaggtgtcagagaaagtgttaatgaacagtgaacgccctgatgaaaaccatagtgagccgtcccatcaggatgtgatcaaggtgaaggaggaatttaccgatcccacctacgatatgttttacatgtctcagtatggtctttataacgggggaggcgctagcatggccgctctccacgagtcctttaccagtagtcttaactacggaagccctcaaaagttttccccagagggtgacctctgcagctcccccgacccaaaaatttgttacgtgtgcaagaagagcttcaaaagttcctacagcgttaaactacactaccgtaacgtccatttgaaagaaatgcatgtctgcaccgtggctggctgcaacgcagcctttccctcaagaaggtcgagggatcgccacagcgctaacatcaacttgcatcgtaagctccttacaaaggagctggatgatatgggacttgactcctcccaaccgtccctgtcaaaagacctgagggacgaatttctggtaaaaatctacggggcacagcaccccatgggattagatgtccgtgaggacgccagttcccctgcaggaacagaggatagtcacctcaacggatatgggaggggaatggccgaggactacatggttctggatctgtctacgacttcgtcgctgcagagttcaagcagcatccatagcagccgagagtccgatgccggatcagatgagggtattctgctggacgatatcgacggtgccagtgatagcggagagtctgctcacaaggccgaagccccagccctgcccggtagcctgggcgctgaggtcagcgggtccctcatgttcagctcactttctgggtctaacgggggtatcatgtgcaacatttgtcacaagatgtacagtaataaaggcacactccgcgtacactacaaaactgtacacctgcgggaaatgcataagtgtaaggttcccggatgtaacatgatgttctcatccgtgagatcacgcaacagacatagccagaatcccaacctgcataaaaatattcccttcacctcagtagattag

SEQ ID NO: 194208 - DNA, 2712 bp, Artificial Sequence
  derived and/or modified sequence
atggcacacctcggcccaactccgcctccccacagtctcaattataagagcgaggatagactcagtgagcaggactggccagcctatttcaaggtgccctgctgcggagtcgacacatctcagattgagtccgaggaagctgaagtcgacgtaagagaaagggaaacccagagggatcgggagcctaaacgggcacgtgatctgaccctgagagacagctgcaccgataatagcatgcaattcggcaccagaactaccaccgccgagccagggtttatgggaacctggcagaatgctgacacgaacttgttgttcaggatgtcccagcaggctatccgttgcacacttgtcaactgtacctgcgaatgctttcagccgggaaaaattaatcttaggacttgtgatcagtgcaagcacgggtgggtggcacatgccttagacaagctatcgacccaacacctctaccatccaactcaggtcgagattgttcagagcaatgtcgtcttcgatatatccagtcttatgctttacggaacgcaagctgtgccagtgcggctgaaaatcctgctggatagattattttccgtgctcaagcaggaggaagtgctgcacattttacatggcctgggctggaccctacgggattacgtgagagggtacatccttcaagacgcagcaggcaaagtgctagatcgttgggccataatgtcccgcgaggaggagatcattacgctgcagcaatttctccgctttggggaaaccaagagtattgtggaactgatggccattcaggaaaaggagggccaggccgtcgctgtgcctagtagcaaaactgactcagatatccgaacattcattgaaagtaacaatcggactcggtctccctcgctgcttgctcatttggaaaacagtaacccgagttcaatacaccattttgagaacatccctaattcattggctttcctgcttccttttcagtacatcaacccagttagtgcccctcttcttggcttaccaccaaacggcctgctgctggagcaacctggtctaaggctcagggaaccctccctcagcactcagaatgaatataacgaaagtagcgagtctgaggtgtctcctaccccctacaaaaatgatcaaacccctaaccgtaatgccctgacaagtatcacaaacgtcgagccaaaaaccgaacctgcatgcgtctctccaatccagaactctgcaccagtaagcgacctcacaaagaccgaacatcctaagagttccttcagaatccatcgtatgaggcggatgggaagcgcctctcgaaaaggcagagtcttttgtaatgcctgtggcaaaacattttacgataaaggaaccctgaaaatccactacaacgccgtccacctcaaaatcaagcatcgctgcacaatcgaggggtgcaacatggtcttctcaagtctccggtcccggaacaggcatagtgctaaccctaatcccaggctgcacatgcccatgttacgcaacaacagggacaaggacctgattcgggctacaagtggtgccgcaacgcccgtgattgccagcacaaagtccaacttagccctcacatctcctgggcgaccacccatgggattcacaacaccccctttagatccagtgttgcaaaatcccctgccatctcagctagttttcagcgggctgaagactgtgcagcccgtcccacccttttataggtcacttttgacgccaggagagatggtcagtccccctacttcattgccaacgtctcctattatccctacttctggaactatagagcagcacccaccacccccatctgagccggtggtgcccgcagtaatgatggcaactcatgaaccaagcgctgatttagctccaaagaaaaaaccacggaaaagctccatgccggtgaaaatagagaaggaaatcatcgatactgcggacgaattcgatgatgaagacgacgatcccaacgatggaggagccgtcgtgaatgacatgtcgcatgacaatcactgtcatagccaggaggagatgtctcccggaatgagcgtgaaggacttcagcaaacacaacagaacgcgatgcatctctcggaccgagatcaggagagctgactccatgacttccgaagatcaggaaccagagcgcgactacgagaacgagtcagaatccagcgaaccaaagctgggagaagaaagcatggagggcgacgaacacatccattccgaagtatccgagaaggttcttatgaactccgagcggccagacgagaatcacagtgagccttctcaccaggatgtcatcaaagtgaaggaagagtttaccgatccaacctatgatatgttttacatgagtcagtatggcctctataacgggggaggagcctccatggccgcactgcacgaatcctttactagctccttaaattacggcagcccccaaaaattcagccccgaaggggatctgtgtagcagtcccgacccaaagatttgctacgtttgcaagaaatcattcaaaagttcatatagcgtcaagctacattacagaaatgttcatcttaaagaaatgcacgtttgtacagtcgccggatgcaacgccgctttcccctcgagaagatctcgggacagatattgggagaagtctaatgaacaaaatgggctgctggtgagttggggtgagaccctctcaagtctgaagtag

SEQ ID NO: 194209 - DNA, 1950 bp, Artificial Sequence
  derived and/or modified sequence
atgctgtacggtactcaggcagtcccagttcgtcttaagatccttctcgaccgcctgttcagcgtcctgaagcaggaagaagtgttacatatcctgcatggtcttggctggacattgagggactacgtcagaggttatatcctacaggatgccgcaggcaaggtgcttgaccgatgggcaattatgtctcgggaagaggaaataataacgctgcagcaattcttgcgtttcggcgagaccaagagcatcgttgagctgatggccatccaggaaaaagaaggtcaggctgtggctgtgccttcctccaaaacggactccgacattcgaaccttcattgagagcaataatagaacgagaagtccctcactgctcgcacacctggagaacagtaatcccagctcgatccatcactttgagaatatccccaactccctcgcctttcttctcccctttcaatatattaatcctgtttctgcccctctacttgggctccccccaaatggcttgctactggaacaacctggcctgcgattgagagaaccctccctttctacccagaacgagtacaatgaatcctccgagtcagaggttagtcctacgccctataagaacgatcagaccccgaacagaaatgcattgacctcaattaccaatgtcgaacccaagacagagccggcatgcgtctcccccatccagaactcagcccctgtaagcgatcttactaaaacggaacatccaaaatcttcttttaggattcataggatgaggcgtatgggatccgccagtcgaaagggcagggttttttgcaacgcctgcggcaaaacgttctatgataaaggcactctcaagatccactacaacgccgtccacctgaaaattaaacatcgatgcaccatagaggggtgtaatatggttttttcctcactaagatctagaaatcgccactcagccaatcccaacccacggttacatatgcccatgttacggaataatagggacaaagaccttatacgcgcaaccagtggggcagcgacacccgttatagcctctacaaagagcaacttggccctgacatcaccaggaagacctcctatgggttttactactccccctctagaccctgtgctccaaaatcccctcccatcacagcttgtctttagtggtctgaaaactgtgcagcctgtaccccctttttaccggagtctcctcacccctggagaaatggtgtcaccaccaacttccttaccaacgtcacccattattcccacgtcagggacaatcgaacagcacccccctcctccatctgagcctgtcgttccagctgtgatgatggccactcacgagcctagtgccgatctggcgcctaaaaaaaagccccgaaaatcttctatgcctgttaaaatcgagaaggagatcatcgacactgctgatgagttcgatgatgaggacgatgatccaaacgacggaggggcagtggtcaatgatatgtcgcatgacaaccactgtcattcccaggaggagatgagcccaggaatgtcagtgaaggacttcagtaagcataaccgaactaggtgtatttctcggaccgagatccgccgtgccgacagcatgacctctgaagaccaggagccagagcgtgactatgagaatgaatcggaatccagcgaacccaagttgggtgaggaatcaatggagggtgacgagcacatacactcagaggtgagcgaaaaagtcttgatgaacagcgagcgcccagacgaaaatcacagcgaaccatctcatcaggatgtaataaaagtcaaagaggaattcactgaccccacctatgatatgttctacatgtctcagtatgggttatacaacggtggcggagcttccatggccgctctccatgaatctttcactagctcacttaactatggatcacctcaggttttgcccagacgctag

SEQ ID NO: 194210 - DNA, 2852 bp, Artificial Sequence
  derived and/or modified sequence
gaggcccggaggaactcggagggggagggagagaaaggccgagacggagggagccagcggcggccgaggggctggtccaggcgcggccgctaagaggagaccaagaggcgggggctgcacttgacaaccagcatgccgagatggcacaccttgggcccaccccacctccacatagccttaattacaaatcagaggacaggcttagtgagcaagactggccagcatatttcaaggtcccatgttgtggggttgatacatctcaaattgagtcagaagaggcagaagtggatgtgagagaaagagagacacagagagacagagagccaaagagggcaagagacttgactttaagagactcctgtactgacaactccatgcagttcggaaccagaacgactacggctgaaccagggttcatggggacatggcaaaacgctgatactaacctcttattcagaatgtcccaacaggccatccgttgcacactggtaaactgcacatgtgaatgttttcagccagggaagattaacctgaggacttgtgatcagtgtaaacatggctgggtggcacatgccttggataagctcagcacgcagcacctgtaccaccccacccaagtggagattgtgcagtccaacgtcgtgtttgacatcagcagcctgatgctctatgggacacaagcagtgcctgtgcggctaaagatcctgctggaccgtctcttcagcgtcctgaagcaagaggaggtactgcacatactgcacggccttggctggactctgcgggactatgtccgaggatacatccttcaggatgctgctggcaaggtgctggaccgctgggccatcatgtctcgagaagaggaaatcatcacccttcagcagtttctgcggtttggagaaaccaaatccattgtggagctgatggcaattcaggagaaagaagggcaggccgtggctgtaccatcttcaaagacagactcagatataaggactttcattgagagcaataatcgcaccaggagtcccagcctccttgctcacttagagaacagcaatccttccagcattcatcacttcgaaaacatcccaaacagccttgcatttctgcttccattccagtacataaaccctgtctcagcaccactgctagggttgcctccaaatgggctactgttagagcaaccagggttgaggctgcgggaacccagcctttcaactcagaatgaatataatgagagcagcgaatccgaagtttctcccacaccttataagaatgatcaaacacccaatagaaatgccctgaccagcattactaatgtggagcccaaaaccgagccagcctgtgtctctcccattcagaattctgccccagtcagtgatctaaccaaaactgaacacccaaaaagctcattccggattcatcggatgagaaggatggggtcagcctctaggaaaggaagagtgttctgtaatgcatgtgggaagacattctatgacaaaggtactctcaaaattcattacaatgctgttcacctgaagatcaaacatcgatgcaccattgaaggttgcaacatggtctttagctccctccgaagtcgtaatcgccacagtgcaaaccccaatcctcgccttcacatgcctatgctaaggaataaccgagataaagatttaattcgggccacctcaggagctgccacccctgtcatagcaagtacaaaatcaaatctggcactcacaagccctggccgacccccaatgggttttaccactccccctctagaccctgtcttgcaaaatcctctccctagccagctagtattttctgggctaaagactgtacaaccagttcctccattttatagaagtttactcactccaggggaaatggtgagtcctccaacctccctcccaaccagtcccatcattccaaccagtggtaccatagagcagcaccccccgccaccctctgagccagtagtgccagcagtgatgatggccacccatgagcccagtgctgacctggcacccaagaaaaagcccaggaagtcaagcatgcctgtgaagattgagaaggaaattattgataccgccgatgagtttgatgatgaagatgatgaccccaatgatggtggagctgtggtcaatgacatgagccatgacaatcattgtcactcccaagaggagatgagcccaggcatgtctgtgaaggacttttctaagcataacaggacccggtgcatttcaaggactgaaataaggagggccgacagcatgacttctgaagaccaagaacctgagcgggactatgagaacgagtctgagtcttcggagcccaaactgggcgaggaatccatggaaggggatgagcacattcacagcgaagtgagtgaaaaagtcctgatgaatagtgagaggcctgatgagaaccacagtgagccctctcaccaggacgtcatcaaggtgaaggaagaatttacagaccccacttacgacatgttttacatgagccagtatggactgtacaatggtgggggtgccagcatggccgccttgcatgagagctttacatcgtctctgaattatggcagccctcaaaagttctccccagaaggtgacctatgttctagcccagaccccaaaatctgttatgtgtgcaagaagagtttcaaaagctcctacagtgtgaaacttcactacaggaacgttcacttgaaagagatgcacgtctgcacagtggctggttgcaatgctgcattcccctctcgccgaagccgagacagatactgggagaagagcaatgagcaaaacggtctccttgtatcatggggagagactctgtcaagcctaaagtga

SEQ ID NO: 194211 - DNA, 3393 bp, Artificial Sequence
  derived and/or modified sequence
gagagaaaggccgagacggagggagccagcggcggccgaggggctggtccaggcgcggccgctaagaggagaccaagaggcgggggctgcacttgacaaccagcatgccgagatggcacaccttgggcccaccccacctccacatagccttaattacaaatcagaggacaggcttagtgagcaagactggccagcatatttcaaggtcccatgttgtggggttgatacatctcaaattgaggccatccgttgcacactggtaaactgcacatgtgaatgttttcagccagggaagattaacctgaggacttgtgatcagtgtaaacatggctgggtggcacatgccttggataagctcagcacgcagcacctgtaccaccccacccaagtggagattgtgcagtccaacgtcgtgtttgacatcagcagcctgatgctctatgggacacaagcagtgcctgtgcggctaaagatcctgctggaccgtctcttcagcgtcctgaagcaagaggaggtactgcacatactgcacggccttggctggactctgcgggactatgtccgaggatacatccttcaggatgctgctggcaaggtgctggaccgctgggccatcatgtctcgagaagaggaaatcatcacccttcagcagtttctgcggtttggagaaaccaaatccattgtggagctgatggcaattcaggagaaagaagggcaggccgtggctgtaccatcttcaaagacagactcagatataaggactttcattgagagcaataatcgcaccaggagtcccagcctccttgctcacttagagaacagcaatccttccagcattcatcacttcgaaaacatcccaaacagccttgcatttctgcttccattccagtacataaaccctgtctcagcaccactgctagggttgcctccaaatgggctactgttagagcaaccagggttgaggctgcgggaacccagcctttcaactcagaatgaatataatgagagcagcgaatccgaagtttctcccacaccttataagaatgatcaaacacccaatagaaatgccctgaccagcattactaatgtggagcccaaaaccgagccagcctgtgtctctcccattcagaattctgccccagtcagtgatctaaccaaaactgaacacccaaaaagctcattccggattcatcggatgagaaggatggggtcagcctctaggaaaggaagagtgttctgtaatgcatgtgggaagacattctatgacaaaggtactctcaaaattcattacaatgctgttcacctgaagatcaaacatcgatgcaccattgaaggttgcaacatggtctttagctccctccgaagtcgtaatcgccacagtgcaaaccccaatcctcgccttcacatgcctatgctaaggaataaccgagataaagatttaattcgggccacctcaggagctgccacccctgtcatagcaagtacaaaatcaaatctggcactcacaagccctggccgacccccaatgggttttaccactccccctctagaccctgtcttgcaaaatcctctccctagccagctagtattttctgggctaaagactgtacaaccagttcctccattttatagaagtttactcactccaggggaaatggtgagtcctccaacctccctcccaaccagtcccatcattccaaccagtggtaccatagagcagcaccccccgccaccctctgagccagtagtgccagcagtgatgatggccacccatgagcccagtgctgacctggcacccaagaaaaagcccaggaagtcaagcatgcctgtgaagattgagaaggaaattattgataccgccgatgagtttgatgatgaagatgatgaccccaatgatggtggagctgtggtcaatgacatgagccatgacaatcattgtcactcccaagaggagatgagcccaggcatgtctgtgaaggacttttctaagcataacaggacccggtgcatttcaaggactgaaataaggagggccgacagcatgacttctgaagaccaagaacctgagcgggactatgagaacgagtctgagtcttcggagcccaaactgggcgaggaatccatggaaggggatgagcacattcacagcgaagtgagtgaaaaagtcctgatgaatagtgagaggcctgatgagaaccacagtgagccctctcaccaggacgtcatcaaggtgaaggaagaatttacagaccccacttacgacatgttttacatgagccagtatggactgtacaatggtgggggtgccagcatggccgccttgcatgagagctttacatcgtctctgaattatggcagccctcaaaagttctccccagaaggtgacctatgttctagcccagaccccaaaatctgttatgtgtgcaagaagagtttcaaaagctcctacagtgtgaaacttcactacaggaacgttcacttgaaagagatgcacgtctgcacagtggctggttgcaatgctgcattcccctctcgccgaagccgagacagacacagtgccaacataaacctacatcgtaaactgttgaccaaagaactcgatgacatgggcctggactcgtcgcagccctcccttagcaaggacctccgcgatgaatttttggtgaagatatatggtgcccagcaccccatggggctcgatgtcagggaagacgcctcctctcccgcagggactgaagactcccacctgaacgggtatgggagaggcatggcagaggactacatggtccttgacttgagcaccacctccagcctccagtccagcagcagtatccattcctccagagaatccgacgcaggcagcgatgaggggattcttctcgatgacattgacggggcgagtgacagtggggagtcggcacacaaggccgaggcccctgccctccctggcagcctaggggctgaagtttcaggatctcttatgttcagcagcttgtctgggagcaatggtgggatcatgtgcaacatttgccacaaaatgtacagcaacaaggggaccctgagagtgcactacaaaactgtgcatttgagagaaatgcacaagtgcaaagtcccaggttgcaatatgatgttttcctctgtacgaagccgaaatcggcacagtcagaaccctaatctccacaaaaacattcccttcacttcagtagattagtctcagaatggacactacaaatgccagctctcaccagatggcctacgtgtttgaactgccatagtcagtgtgcgcttatgtacttggggtgtgtgtgtgtgtgtgtgtgtgtgtgcatttatgtatgctctgtggctacatatacacacacgtatttccttgagataaacaagataaacact

SEQ ID NO: 194212 - DNA, 5941 bp, Artificial Sequence
  derived and/or modified sequence
gcggccgctaagaggagaccaagaggcgggggctgcacttgacaaccagcatgccgagatggcacaccttgggcccaccccacctccacatagccttaattacaaatcagaggacaggcttagtgagcaagactggccagcatatttcaaggtcccatgttgtggggttgatacatctcaaattgagtcagaagaggcagaagtggatgtgagagaaagagagacacagagagacagagagccaaagagggcaagagacttgactttaagagactcctgtactgacaactccatgcagttcggaaccagaacgactacggctgaaccagggttcatggggacatggcaaaacgctgatactaacctcttattcagaatgtcccaacaggccatccgttgcacactggtaaactgcacatgtgaatgttttcagccagggaagattaacctgaggacttgtgatcagtgtaaacatggctgggtggcacatgccttggataagctcagcacgcagcacctgtaccaccccacccaagtggagattgtgcagtccaacgtcgtgtttgacatcagcagcctgatgctctatgggacacaagcagtgcctgtgcggctaaagatcctgctggaccgtctcttcagcgtcctgaagcaagaggaggtactgcacatactgcacggccttggctggactctgcgggactatgtccgaggatacatccttcaggatgctgctggcaaggtgctggaccgctgggccatcatgtctcgagaagaggaaatcatcacccttcagcagtttctgcggtttggagaaaccaaatccattgtggagctgatggcaattcaggagaaagaagggcaggccgtggctgtaccatcttcaaagacagactcagatataaggactttcattgagagcaataatcgcaccaggagtcccagcctccttgctcacttagagaacagcaatccttccagcattcatcacttcgaaaacatcccaaacagccttgcatttctgcttccattccagtacataaaccctgtctcagcaccactgctagggttgcctccaaatgggctactgttagagcaaccagggttgaggctgcgggaacccagcctttcaactcagaatgaatataatgagagcagcgaatccgaagtttctcccacaccttataagaatgatcaaacacccaatagaaatgccctgaccagcattactaatgtggagcccaaaaccgagccagcctgtgtctctcccattcagaattctgccccagtcagtgatctaaccaaaactgaacacccaaaaagctcattccggattcatcggatgagaaggatggggtcagcctctaggaaaggaagagtgttctgtaatgcatgtgggaagacattctatgacaaaggtactctcaaaattcattacaatgctgttcacctgaagatcaaacatcgatgcaccattgaaggttgcaacatggtctttagctccctccgaagtcgtaatcgccacagtgcaaaccccaatcctcgccttcacatgcctatgctaaggaataaccgagataaagatttaattcgggccacctcaggagctgccacccctgtcatagcaagtacaaaatcaaatctggcactcacaagccctggccgacccccaatgggttttaccactccccctctagaccctgtcttgcaaaatcctctccctagccagctagtattttctgggctaaagactgtacaaccagttcctccattttatagaagtttactcactccaggggaaatggtgagtcctccaacctccctcccaaccagtcccatcattccaaccagtggtaccatagagcagcaccccccgccaccctctgagccagtagtgccagcagtgatgatggccacccatgagcccagtgctgacctggcacccaagaaaaagcccaggaagtcaagcatgcctgtgaagattgagaaggaaattattgataccgccgatgagtttgatgatgaagatgatgaccccaatgatggtggagctgtggtcaatgacatgagccatgacaatcattgtcactcccaagaggagatgagcccaggcatgtctgtgaaggacttttctaagcataacaggacccggtgcatttcaaggactgaaataaggagggccgacagcatgacttctgaagaccaagaacctgagcgggactatgagaacgagtctgagtcttcggagcccaaactgggcgaggaatccatggaaggggatgagcacattcacagcgaagtgagtgaaaaagtcctgatgaatagtgagaggcctgatgagaaccacagtgagccctctcaccaggacgtcatcaaggtgaaggaagaatttacagaccccacttacgacatgttttacatgagccagtatggactgtacaatggtgggggtgccagcatggccgccttgcatgagagctttacatcgtctctgaattatggcagccctcaaaagttctccccagaaggtgacctatgttctagcccagaccccaaaatctgttatgtgtgcaagaagagtttcaaaagctcctacagtgtgaaacttcactacaggaacgttcacttgaaagagatgcacgtctgcacagtggctggttgcaatgctgcattcccctctcgccgaagccgagacagacacagtgccaacataaacctacatcgtaaactgttgaccaaagaactcgatgacatgggcctggactcgtcgcagccctcccttagcaaggacctccgcgatgaatttttggtgaagatatatggtgcccagcaccccatggggctcgatgtcagggaagacgcctcctctcccgcagggactgaagactcccacctgaacgggtatgggagaggcatggcagaggactacatggtccttgacttgagcaccacctccagcctccagtccagcagcagtatccattcctccagagaatccgacgcaggcagcgatgaggggattcttctcgatgacattgacggggcgagtgacagtggggagtcggcacacaaggccgaggcccctgccctccctggcagcctaggggctgaagtttcaggatctcttatgttcagcagcttgtctgggagcaatggtgggatcatgtgcaacatttgccacaaaatgtacagcaacaaggggaccctgagagtgcactacaaaactgtgcatttgagagaaatgcacaagtgcaaagtcccaggttgcaatatgatgttttcctctgtacgaagccgaaatcggcacagtcagaaccctaatctccacaaaaacattcccttcacttcagtagattagtctcagaatggacactacaaatgccagctctcaccagatggcctacgtgtttgaactgccatagtcagtgtgcgcttatgtacttggggtgtgtgtgtgtgtgtgtgtgtgtgtgcatttatgtatgctctgtggctacatatacacacacgtatttccttgagataaacaagataaacactaggtgcttttgaatttttttcacttccctttatagttttgggaaaggagtgggatctttgatttcagggtgaaaacagagtacccctttaaacacacacacacacacatgcacatacacacacacacacacacacacacacagtgtgcaactagccccagttttgacagaataattcttggtcttccccaaagagacaatttgttgtacccatgactgttgcctgcaaaaataaaagggaaaaaaaagaaaaaagaaacaaaaaggaacttcttatagttgtcttttgtgaactttaaggttttgaaagaatcttcaattaaagcatggcagattcacctgtaaatatttagccttgaggggccattgatgtaaaacaattgtattgatggttgtttaacttttttgtttaatttttacagttacatccagctgttagatatgcaggaaaagatagtttgctggctagctctattcatttatgttagcattaatgcacatttttaaaaaaagaaaaaaacatggtcttgtttttactacctgttagatatagtgctaaagaggtgctggcatgctttacagcacagatctgattttttaaaatgtcctgtactagtacataaatcccgtcatgcactttttttcatacactacaaggggatgtgtaataaccatgcttcttttttatccttaaactattgccatacttcagtaagtgtcttttttaaaaaaaattcacttgtataaaaatggtctggtcagtatagggcacaaatgccaaacaaagtattagtgttaacacaaaactgccaactttgcacaagtttccagaaaagaaaatacaattagtcactcaacataaccacaggccaatttgttggccaccagaaaaccgctttttaaaaaaacacttggtgattctttcaagtgccgaatgttattagaatcaacattgcatccttcttgcttatacgttaagttacataaaaggaaaacaaaattatgtggtgtgaaacagccaaggcatttattcttcagaggcaggataatatttcaggatacaaaagcccaaattacccgctacggaacaaagatgaatacagtaaaagagtcgaacactcatttccaaggccctaacccttatcctttaaaaagaaatcctctgaactgggtcggtctgttgtatggctgtctaatttgttgcaaattctgcagtcgtactataattcaggcctgtttggtagacaaaatcaaaaggcatttaacagcagcagtacttggaagctttgaaaacatgtgctaaacttgaatggagcaacactcctttctgaaaagccagaagaagggggttttaaagcaggatctctcaatgttcagtgttttgtgtttccccacacgatttgtcagagagaaatgaaagcaagcctgaaaccaagcaattgagagtgagaaagaggagagagactattctccaaaccttttttgttttgttttgtttccgatgtttacacatgttgcctgagctggttaaccacatcggcagcctcagctaccacaacatactgactaaatgatgatatttactcaagttcagtctgcagccaaaaccattagggtgtgcattgcagactgttttgttgtcttttttttttcttttttcctttttttttaagtggaggggaaaagaagagataaacaaggaatattttgtcaaacagtacacaataatttaaagagaatgtatttcttttttgcatttaatggcctcagacatttctttcatcagtctaaaagttagaaatatccctttattttaacttttatgtcgtttccatttttcatgtttttgtaattattttttctatgttcacatcagcattcacttccgttaaatttgccaaaggaaactgttaatatgtttctgttgttattattcctgtaggatttattgtacctcacagtatttattgtttcccaaaataagcatcattagttggggattcagtatttttgttgtgaaaatttcagaaacaatagattcttaaagataagctagctatgtctaggagctttatcttttcacctccttcagaggatgctatggggtccattttaattcttcatttgttctacggggaggaaagaccaaaagtatttgcagtacaaaagaaactatatcaaacactatgttaaatgacaagtgtttatggtaaaaagctgaggaattagtaataatcgtttttgttttcttgtactttgaattccccaaagtcttaattgctttattttggtgttgtgttaaattgaacagacagatgttttcctttgttttataccatataagactctgtacagtatgtttgtgaaagattgaactagaataatgaaagtttgtttgcaaa

SEQ ID NO: 194213 - DNA, 3841 bp, Artificial Sequence
  derived and/or modified sequence
acttgacaaccagcatgccgagatggcacaccttgggcccaccccacctccacatagccttaattacaaatcagaggacaggcttagtgagcaagactggccagcatatttcaaggtcccatgttgtggggttgatacatctcaaattgagtcagaagaggcagaagtggatgtgagagaaagagagacacagagagacagagagccaaagagggcaagagacttgactttaagagactcctgtactgacaactccatgcagttcggaaccagaacgactacggctgaaccagggttcatggggacatggcaaaacgctgatactaacctcttattcagaatgtcccaacaggctggtctcaaactcctgacctcaggtgatccacccgtcttggacttccaaagtgctgggattacaggcgtgagccactgcacccggctgaaagttgctatgatttctaaggccatccgttgcacactggtaaactgcacatgtgaatgttttcagccagggaagattaacctgaggacttgtgatcagtgtaaacatggctgggtggcacatgccttggataagctcagcacgcagcacctgtaccaccccacccaagtggagattgtgcagtccaacgtcgtgtttgacatcagcagcctgatgctctatgggacacaagcagtgcctgtgcggctaaagatcctgctggaccgtctcttcagcgtcctgaagcaagaggaggtactgcacatactgcacggccttggctggactctgcgggactatgtccgaggatacatccttcaggatgctgctggcaaggtgctggaccgctgggccatcatgtctcgagaagaggaaatcatcacccttcagcagtttctgcggtttggagaaaccaaatccattgtggagctgatggcaattcaggagaaagaagggcaggccgtggctgtaccatcttcaaagacagactcagatataaggactttcattgagagcaataatcgcaccaggagtcccagcctccttgctcacttagagaacagcaatccttccagcattcatcacttcgaaaacatcccaaacagccttgcatttctgcttccattccagtacataaaccctgtctcagcaccactgctagggttgcctccaaatgggctactgttagagcaaccagggttgaggctgcgggaacccagcctttcaactcagaatgaatataatgagagcagcgaatccgaagtttctcccacaccttataagaatgatcaaacacccaatagaaatgccctgaccagcattactaatgtggagcccaaaaccgagccagcctgtgtctctcccattcagaattctgccccagtcagtgatctaaccaaaactgaacacccaaaaagctcattccggattcatcggatgagaaggatggggtcagcctctaggaaaggaagagtgttctgtaatgcatgtgggaagacattctatgacaaaggtactctcaaaattcattacaatgctgttcacctgaagatcaaacatcgatgcaccattgaaggttgcaacatggtctttagctccctccgaagtcgtaatcgccacagtgcaaaccccaatcctcgccttcacatgcctatgctaaggaataaccgagataaagatttaattcgggccacctcaggagctgccacccctgtcatagcaagtacaaaatcaaatctggcactcacaagccctggccgacccccaatgggttttaccactccccctctagaccctgtcttgcaaaatcctctccctagccagctagtattttctgggctaaagactgtacaaccagttcctccattttatagaagtttactcactccaggggaaatggtgagtcctccaacctccctcccaaccagtcccatcattccaaccagtggtaccatagagcagcaccccccgccaccctctgagccagtagtgccagcagtgatgatggccacccatgagcccagtgctgacctggcacccaagaaaaagcccaggaagtcaagcatgcctgtgaagattgagaaggaaattattgataccgccgatgagtttgatgatgaagatgatgaccccaatgatggtggagctgtggtcaatgacatgagccatgacaatcattgtcactcccaagaggagatgagcccaggcatgtctgtgaaggacttttctaagcataacaggacccggtgcatttcaaggactgaaataaggagggccgacagcatgacttctgaagaccaagaacctgagcgggactatgagaacgagtctgagtcttcggagcccaaactgggcgaggaatccatggaaggggatgagcacattcacagcgaagtgagtgaaaaagtcctgatgaatagtgagaggcctgatgagaaccacagtgagccctctcaccaggacgtcatcaaggtgaaggaagaatttacagaccccacttacgacatgttttacatgagccagtatggactgtacaatggtgggggtgccagcatggccgccttgcatgagagctttacatcgtctctgaattatggcagccctcaaaagttctccccagaaggtgacctatgttctagcccagaccccaaaatctgttatgtgtgcaagaagagtttcaaaagctcctacagtgtgaaacttcactacaggaacgttcacttgaaagagatgcacgtctgcacagtggctggttgcaatgctgcattcccctctcgccgaagccgagacagacacagtgccaacataaacctacatcgtaaactgttgaccaaagaactcgatgacatgggcctggactcgtcgcagccctcccttagcaaggacctccgcgatgaatttttggtgaagatatatggtgcccagcaccccatggggctcgatgtcagggaagacgcctcctctcccgcagggactgaagactcccacctgaacgggtatgggagaggcatggcagaggactacatggtccttgacttgagcaccacctccagcctccagtccagcagcagtatccattcctccagagaatccgacgcaggcagcgatgaggggattcttctcgatgacattgacggggcgagtgacagtggggagtcggcacacaaggccgaggcccctgccctccctggcagcctaggggctgaagtttcaggatctcttatgttcagcagcttgtctgggagcaatggtgggatcatgtgcaacatttgccacaaaatgtacagcaacaaggggaccctgagagtgcactacaaaactgtgcatttgagagaaatgcacaagtgcaaagtcccaggttgcaatatgatgttttcctctgtacgaagccgaaatcggcacagtcagaaccctaatctccacaaaaacattcccttcacttcagtagattagtctcagaatggacactacaaatgccagctctcaccagatggcctacgtgtttgaactgccatagtcagtgtgcgcttatgtacttggggtgtgtgtgtgtgtgtgtgtgtgtgtgcatttatgtatgctctgtggctacatatacacacacgtatttccttgagataaacaagataaacactaggtgcttttgaatttttttcacttccctttatagttttgggaaaggagtgggatctttgatttcagggtgaaaacagagtacccctttaaacacacacacacacacatgcacatacacacacacacacacacacacacacagtgtgcaactagccccagttttgacagaataattcttggtcttccccaaagagacaatttgttgtacccatgactgttgcctgc

SEQ ID NO: 194214 - DNA, 4841 bp, Artificial Sequence
  derived and/or modified sequence
gagagaaaggccgagacggagggagccagcggcggccgaggggctggtccaggcgcggccgctaagaggagaccaagaggcgggggctgcacttgacaaccagcatgccgagatggcacaccttgggcccaccccacctccacatagccttaattacaaatcagaggacaggcttagtgagcaagactggccagcatatttcaaggtcccatgttgtggggttgatacatctcaaattgagtcagaagaggcagaagtggatgtgagagaaagagagacacagagagacagagagccaaagagggcaagagacttgactttaagagactcctgtactgacaactccatgcagttcggaaccagaacgactacggctgaaccagggttcatggggacatggcaaaacgctgatactaacctcttattcagaatgtcccaacaggccatccgttgcacactggtaaactgcacatgtgaatgttttcagccagggaagattaacctgaggacttgtgatcagtgtaaacatggctgggtggcacatgccttggataagctcagcacgcagcacctgtaccaccccacccaagtggagattgtgcagtccaacgtcgtgtttgacatcagcagcctgatgctctatgggacacaagcagtgcctgtgcggctaaagatcctgctggaccgtctcttcagcgtcctgaagcaagaggaggtactgcacatactgcacggccttggctggactctgcgggactatgtccgaggatacatccttcaggatgctgctggcaaggtgctggaccgctgggccatcatgtctcgagaagaggaaatcatcacccttcagcagtttctgcggtttggagaaaccaaatccattgtggagctgatggcaattcaggagaaagaagggcaggccgtggctgtaccatcttcaaagacagactcagatataaggactttcattgagagcaataatcgcaccaggagtcccagcctccttgctcacttagagaacagcaatccttccagcattcatcacttcgaaaacatcccaaacagccttgcatttctgcttccattccagtacataaaccctgtctcagcaccactgctagggttgcctccaaatgggctactgttagagcaaccagggttgaggctgcgggaacccagcctttcaactcagaatgaatataatgagagcagcgaatccgaagtttctcccacaccttataagaatgatcaaacacccaatagaaatgccctgaccagcattactaatgtggagcccaaaaccgagccagcctgtgtctctcccattcagaattctgccccagtcagtgatctaaccaaaactgaacacccaaaaagctcattccggattcatcggatgagaaggatggggtcagcctctaggaaaggaagagtgttctgtaatgcatgtgggaagacattctatgacaaaggtactctcaaaattcattacaatgctgttcacctgaagatcaaacatcgatgcaccattgaaggttgcaacatggtctttagctccctccgaagtcgtaatcgccacagtgcaaaccccaatcctcgccttcacatgcctatgctaaggaataaccgagataaagatttaattcgggccacctcaggagctgccacccctgtcatagcaagtacaaaatcaaatctggcactcacaagccctggccgacccccaatgggttttaccactccccctctagaccctgtcttgcaaaatcctctccctagccagctagtattttctgggctaaagactgtacaaccagttcctccattttatagaagtttactcactccaggggaaatggtgagtcctccaacctccctcccaaccagtcccatcattccaaccagtggtaccatagagcagcaccccccgccaccctctgagccagtagtgccagcagtgatgatggccacccatgagcccagtgctgacctggcacccaagaaaaagcccaggaagtcaagcatgcctgtgaagattgagaaggaaattattgataccgccgatgagtttgatgatgaagatgatgaccccaatgatggtggagctgtggtcaatgacatgagccatgacaatcattgtcactcccaagaggagatgagcccaggcatgtctgtgaaggacttttctaagcataacaggacccggtgcatttcaaggactgaaataaggagggccgacagcatgacttctgaagaccaagaacctgagcgggactatgagaacgagtctgagtcttcggagcccaaactgggcgaggaatccatggaaggggatgagcacattcacagcgaagtgagtgaaaaagtcctgatgaatagtgagaggcctgatgagaaccacagtgagccctctcaccaggacgtcatcaaggtgaaggaagaatttacagaccccacttacgacatgttttacatgagccagtatggactgtacaatggtgggggtgccagcatggccgccttgcatgagagctttacatcgtctctgaattatggcagccctcaaaagttctccccagaaggtgacctatgttctagcccagaccccaaaatctgttatgtgtgcaagaagagtttcaaaagctcctacagtgtgaaacttcactacaggaacgttcacttgaaagagatgcacgtctgcacagtggctggttgcaatgctgcattcccctctcgccgaagccgagacagatactgggagaagagcaatgagcaaaacggtctccttgtatcatggggagagactctgtcaagcctaaagtgagcctcggatcttcctaatgacctcctgctggcccagctggatgcaagacaagctcgtttaagcctctgctgacctttcactcctccactacaagaactgcaccactcatttccaccgtcttcagaactgtgcaccaaatagaccacaaagcttcatggctgacgaatgatttccttttcatgatgcaaagagatttttacaaatttctattgatgagagttaacattaagtctcttgtggcattataacctctgttgcacaaatacaatgcttctatataactcttatttttaccttccttataaaggaacaatctactgttcttgccagcattatcttgaaaattcaggccaaaatatctgagcagaatgcacatactgagtgcaccggtggtatttttcatgaagagaccactttgaaagggtcttcctgatttccacctccctcagaatctatctgaccttctcacagactttattggtgtgaatctttcttatatttaaccatttatttgagatgctcatttttgtagcccatcttttctttttaaaaaacatgggctggtttctacccagaagagggtggtaagactgtacatgtacgttaacattcacttgtataactcagcaaaagattagaaagctgatcttattgtcacaagacacagtgccaacataaacctacatcgtaaactgttgaccaaagaactcgatgacatgggcctggactcgtcgcagccctcccttagcaaggacctccgcgatgaatttttggtgaagatatatggtgcccagcaccccatggggctcgatgtcagggaagacgcctcctctcccgcagggactgaagactcccacctgaacgggtatgggagaggcatggcagaggactacatggtccttgacttgagcaccacctccagcctccagtccagcagcagtatccattcctccagagaatccgacgcaggcagcgatgaggggattcttctcgatgacattgacggggcgagtgacagtggggagtcggcacacaaggccgaggcccctgccctccctggcagcctaggggctgaagtttcaggatctcttatgttcagcagcttgtctgggagcaatggtgggatcatgtgcaacatttgccacaaaatgtacagcaacaaggggaccctgagagtgcactacaaaactgtgcatttgagagaaatgcacaagtgcaaagtcccaggttgcaatatgatgttttcctctgtacgaagccgaaatcggcacagtcagaaccctaatctccacaaaaacattcccttcacttcagtagattagtctcagaatggacactacaaatgccagctctcaccagatggcctacgtgtttgaactgccatagtcagtgtgcgcttatgtacttggggtgtgtgtgtgtgtgtgtgtgtgtgtgcatttatgtatgctctgtggctacatatacacacacgtatttccttgagataaacaagataaacactaggtgcttttgaatttttttcacttccctttatagttttgggaaaggagtgggatctttgatttcagggtgaaaacagagtacccctttaaacacacacacacacacatgcacatacacacacacacacacacacacacacagtgtgcaactagccccagttttgacagaataattcttggtcttccccaaagagacaatttgttgtacccatgactgttgcctgcaaaaataaaagggaaaaaaaagaaaaaagaaacaaaaaggaacttcttatagttgtcttttgtgaactttaaggttttgaaagaatcttcaattaaagcatggcagattcacctgtaaatatttagccttgaggggccattgatgtaaaacaattgtattgatggttgtttaacttttttgtttaatttttacagttacatccagctgttagatatgcaggaaaagatagtttgctggctagctctattcatttatgttagcattaatgcacatttttaaaaaaaga

SEQ ID NO: 194215 - DNA, 2481 bp, Artificial Sequence
  derived and/or modified sequence
agtgtagtcactgctggtctgctggtaaggagtttcgtgggagggtgttgagaatgaaacacacagagctgtatcccgcttcgggtgaatgaatgggaggcaatatacaaaatagccttggataagctcagcacgcagcacctgtaccaccccacccaagtggagattgtgcagtccaacgtcgtgtttgacatcagcagcctgatgctctatgggacacaagcagtgcctgtgcggctaaagatcctgctggaccgtctcttcagcgtcctgaagcaagaggaggtactgcacatactgcacggccttggctggactctgcgggactatgtccgaggatacatccttcaggatgctgctggcaaggtgctggaccgctgggccatcatgtctcgagaagaggaaatcatcacccttcagcagtttctgcggtttggagaaaccaaatccattgtggagctgatggcaattcaggagaaagaagggcaggccgtggctgtaccatcttcaaagacagactcagatataaggactttcattgagagcaataatcgcaccaggagtcccagcctccttgctcacttagagaacagcaatccttccagcattcatcacttcgaaaacatcccaaacagccttgcatttctgcttccattccagtacataaaccctgtctcagcaccactgctagggttgcctccaaatgggctactgttagagcaaccagggttgaggctgcgggaacccagcctttcaactcagaatgaatataatgagagcagcgaatccgaagtttctcccacaccttataagaatgatcaaacacccaatagaaatgccctgaccagcattactaatgtggagcccaaaaccgagccagcctgtgtctctcccattcagaattctgccccagtcagtgatctaaccaaaactgaacacccaaaaagctcattccggattcatcggatgagaaggatggggtcagcctctaggaaaggaagagtgttctgtaatgcatgtgggaagacattctatgacaaaggtactctcaaaattcattacaatgctgttcacctgaagatcaaacatcgatgcaccattgaaggttgcaacatggtctttagctccctccgaagtcgtaatcgccacagtgcaaaccccaatcctcgccttcacatgcctatgctaaggaataaccgagataaagatttaattcgggccacctcaggagctgccacccctgtcatagcaagtacaaaatcaaatctggcactcacaagccctggccgacccccaatgggttttaccactccccctctagaccctgtcttgcaaaatcctctccctagccagctagtattttctgggctaaagactgtacaaccagttcctccattttatagaagtttactcactccaggggaaatggtgagtcctccaacctccctcccaaccagtcccatcattccaaccagtggtaccatagagcagcaccccccgccaccctctgagccagtagtgccagcagtgatgatggccacccatgagcccagtgctgacctggcacccaagaaaaagcccaggaagtcaagcatgcctgtgaagattgagaaggaaattattgataccgccgatgagtttgatgatgaagatgatgaccccaatgatggtggagctgtggtcaatgacatgagccatgacaatcattgtcactcccaagaggagatgagcccaggcatgtctgtgaaggacttttctaagcataacaggacccggtgcatttcaaggactgaaataaggagggccgacagcatgacttctgaagaccaagaacctgagcgggactatgagaacgagtctgagtcttcggagcccaaactgggcgaggaatccatggaaggggatgagcacattcacagcgaagtgagtgaaaaagtcctgatgaatagtgagaggcctgatgagaaccacagtgagccctctcaccaggacgtcatcaaggtgaaggaagaatttacagaccccacttacgacatgttttacatgagccagtatggactgtacaatggtgggggtgccagcatggccgccttgcatgagagctttacatcgtctctgaattatggcagccctcaagttctccccagaaggtgacctatgttctagcccagaccccaaaatctgttatgtgtgcaagaagagtttcaaaagctcctacagtgtgaaacttcactacaggaacgttcacttgaaagagatgcacgtctgcacagtggctggttgcaatgctgcattcccctctcgccgaagccgagacagcaaaagattagaaagctgatcttattgtcacaagacacagtgccaacataaacctacatcgtaaactgttgaccaaagaactcgatgacatgggcctggactcgtcgcagccctcccttagcaaggacctccgcgatgaatttttggtgaagatatatggtg

SEQ ID NO: 194216 - DNA, 2712 bp, Artificial Sequence
  derived and/or modified sequence
atggcccacctgggccccaccccccccccccacagcctgaactacaagagcgaggacagactgagcgagcaggactggcccgcctacttcaaggtgccctgctgcggcgtggacaccagccagatcgagagcgaggaggccgaggtggacgtgagagagagagagacccagagagacagagagcccaagagagccagagacctgaccctgagagacagctgcaccgacaacagcatgcagttcggcaccagaaccaccaccgccgagcccggcttcatgggcacctggcagaacgccgacaccaacctgctgttcagaatgagccagcaggccatcagatgcaccctggtgaactgcacctgcgagtgcttccagcccggcaagatcaacctgagaacctgcgaccagtgcaagcacggctgggtggcccacgccctggacaagctgagcacccagcacctgtaccaccccacccaggtggagatcgtgcagagcaacgtggtgttcgacatcagcagcctgatgctgtacggcacccaggccgtgcccgtgagactgaagatcctgctggacagactgttcagcgtgctgaagcaggaggaggtgctgcacatcctgcacggcctgggctggaccctgagagactacgtgagaggctacatcctgcaggacgccgccggcaaggtgctggacagatgggccatcatgagcagagaggaggagatcatcaccctgcagcagttcctgagattcggcgagaccaagagcatcgtggagctgatggccatccaggagaaggagggccaggccgtggccgtgcccagcagcaagaccgacagcgacatcagaaccttcatcgagagcaacaacagaaccagaagccccagcctgctggcccacctggagaacagcaaccccagcagcatccaccacttcgagaacatccccaacagcctggccttcctgctgcccttccagtacatcaaccccgtgagcgcccccctgctgggcctgccccccaacggcctgctgctggagcagcccggcctgagactgagagagcccagcctgagcacccagaacgagtacaacgagagcagcgagagcgaggtgagccccaccccctacaagaacgaccagacccccaacagaaacgccctgaccagcatcaccaacgtggagcccaagaccgagcccgcctgcgtgagccccatccagaacagcgcccccgtgagcgacctgaccaagaccgagcaccccaagagcagcttcagaatccacagaatgagaagaatgggcagcgccagcagaaagggcagagtgttctgcaacgcctgcggcaagaccttctacgacaagggcaccctgaagatccactacaacgccgtgcacctgaagatcaagcacagatgcaccatcgagggctgcaacatggtgttcagcagcctgagaagcagaaacagacacagcgccaaccccaaccccagactgcacatgcccatgctgagaaacaacagagacaaggacctgatcagagccaccagcggcgccgccacccccgtgatcgccagcaccaagagcaacctggccctgaccagccccggcagaccccccatgggcttcaccaccccccccctggaccccgtgctgcagaaccccctgcccagccagctggtgttcagcggcctgaagaccgtgcagcccgtgccccccttctacagaagcctgctgacccccggcgagatggtgagcccccccaccagcctgcccaccagccccatcatccccaccagcggcaccatcgagcagcacccccccccccccagcgagcccgtggtgcccgccgtgatgatggccacccacgagcccagcgccgacctggcccccaagaagaagcccagaaagagcagcatgcccgtgaagatcgagaaggagatcatcgacaccgccgacgagttcgacgacgaggacgacgaccccaacgacggcggcgccgtggtgaacgacatgagccacgacaaccactgccacagccaggaggagatgagccccggcatgagcgtgaaggacttcagcaagcacaacagaaccagatgcatcagcagaaccgagatcagaagagccgacagcatgaccagcgaggaccaggagcccgagagagactacgagaacgagagcgagagcagcgagcccaagctgggcgaggagagcatggagggcgacgagcacatccacagcgaggtgagcgagaaggtgctgatgaacagcgagagacccgacgagaaccacagcgagcccagccaccaggacgtgatcaaggtgaaggaggagttcaccgaccccacctacgacatgttctacatgagccagtacggcctgtacaacggcggcggcgccagcatggccgccctgcacgagagcttcaccagcagcctgaactacggcagcccccagaagttcagccccgagggcgacctgtgcagcagccccgaccccaagatctgctacgtgtgcaagaagagcttcaagagcagctacagcgtgaagctgcactacagaaacgtgcacctgaaggagatgcacgtgtgcaccgtggccggctgcaacgccgccttccccagcagaagaagcagagacagatactgggagaagagcaacgagcagaacggcctgctggtgagctggggcgagaccctgagcagcctgaagtag

SEQ ID NO: 194217 - DNA, 3099 bp, Artificial Sequence
  derived and/or modified sequence
atggcccacctgggccccaccccccccccccacagcctgaactacaagagcgaggacagactgagcgagcaggactggcccgcctacttcaaggtgccctgctgcggcgtggacaccagccagatcgaggccatcagatgcaccctggtgaactgcacctgcgagtgcttccagcccggcaagatcaacctgagaacctgcgaccagtgcaagcacggctgggtggcccacgccctggacaagctgagcacccagcacctgtaccaccccacccaggtggagatcgtgcagagcaacgtggtgttcgacatcagcagcctgatgctgtacggcacccaggccgtgcccgtgagactgaagatcctgctggacagactgttcagcgtgctgaagcaggaggaggtgctgcacatcctgcacggcctgggctggaccctgagagactacgtgagaggctacatcctgcaggacgccgccggcaaggtgctggacagatgggccatcatgagcagagaggaggagatcatcaccctgcagcagttcctgagattcggcgagaccaagagcatcgtggagctgatggccatccaggagaaggagggccaggccgtggccgtgcccagcagcaagaccgacagcgacatcagaaccttcatcgagagcaacaacagaaccagaagccccagcctgctggcccacctggagaacagcaaccccagcagcatccaccacttcgagaacatccccaacagcctggccttcctgctgcccttccagtacatcaaccccgtgagcgcccccctgctgggcctgccccccaacggcctgctgctggagcagcccggcctgagactgagagagcccagcctgagcacccagaacgagtacaacgagagcagcgagagcgaggtgagccccaccccctacaagaacgaccagacccccaacagaaacgccctgaccagcatcaccaacgtggagcccaagaccgagcccgcctgcgtgagccccatccagaacagcgcccccgtgagcgacctgaccaagaccgagcaccccaagagcagcttcagaatccacagaatgagaagaatgggcagcgccagcagaaagggcagagtgttctgcaacgcctgcggcaagaccttctacgacaagggcaccctgaagatccactacaacgccgtgcacctgaagatcaagcacagatgcaccatcgagggctgcaacatggtgttcagcagcctgagaagcagaaacagacacagcgccaaccccaaccccagactgcacatgcccatgctgagaaacaacagagacaaggacctgatcagagccaccagcggcgccgccacccccgtgatcgccagcaccaagagcaacctggccctgaccagccccggcagaccccccatgggcttcaccaccccccccctggaccccgtgctgcagaaccccctgcccagccagctggtgttcagcggcctgaagaccgtgcagcccgtgccccccttctacagaagcctgctgacccccggcgagatggtgagcccccccaccagcctgcccaccagccccatcatccccaccagcggcaccatcgagcagcacccccccccccccagcgagcccgtggtgcccgccgtgatgatggccacccacgagcccagcgccgacctggcccccaagaagaagcccagaaagagcagcatgcccgtgaagatcgagaaggagatcatcgacaccgccgacgagttcgacgacgaggacgacgaccccaacgacggcggcgccgtggtgaacgacatgagccacgacaaccactgccacagccaggaggagatgagccccggcatgagcgtgaaggacttcagcaagcacaacagaaccagatgcatcagcagaaccgagatcagaagagccgacagcatgaccagcgaggaccaggagcccgagagagactacgagaacgagagcgagagcagcgagcccaagctgggcgaggagagcatggagggcgacgagcacatccacagcgaggtgagcgagaaggtgctgatgaacagcgagagacccgacgagaaccacagcgagcccagccaccaggacgtgatcaaggtgaaggaggagttcaccgaccccacctacgacatgttctacatgagccagtacggcctgtacaacggcggcggcgccagcatggccgccctgcacgagagcttcaccagcagcctgaactacggcagcccccagaagttcagccccgagggcgacctgtgcagcagccccgaccccaagatctgctacgtgtgcaagaagagcttcaagagcagctacagcgtgaagctgcactacagaaacgtgcacctgaaggagatgcacgtgtgcaccgtggccggctgcaacgccgccttccccagcagaagaagcagagacagacacagcgccaacatcaacctgcacagaaagctgctgaccaaggagctggacgacatgggcctggacagcagccagcccagcctgagcaaggacctgagagacgagttcctggtgaagatctacggcgcccagcaccccatgggcctggacgtgagagaggacgccagcagccccgccggcaccgaggacagccacctgaacggctacggcagaggcatggccgaggactacatggtgctggacctgagcaccaccagcagcctgcagagcagcagcagcatccacagcagcagagagagcgacgccggcagcgacgagggcatcctgctggacgacatcgacggcgccagcgacagcggcgagagcgcccacaaggccgaggcccccgccctgcccggcagcctgggcgccgaggtgagcggcagcctgatgttcagcagcctgagcggcagcaacggcggcatcatgtgcaacatctgccacaagatgtacagcaacaagggcaccctgagagtgcactacaagaccgtgcacctgagagagatgcacaagtgcaaggtgcccggctgcaacatgatgttcagcagcgtgagaagcagaaacagacacagccagaaccccaacctgcacaagaacatccccttcaccagcgtggactag

SEQ ID NO: 194218 - DNA, 3300 bp, Artificial Sequence
  derived and/or modified sequence
atggcccacctgggccccaccccccccccccacagcctgaactacaagagcgaggacagactgagcgagcaggactggcccgcctacttcaaggtgccctgctgcggcgtggacaccagccagatcgagagcgaggaggccgaggtggacgtgagagagagagagacccagagagacagagagcccaagagagccagagacctgaccctgagagacagctgcaccgacaacagcatgcagttcggcaccagaaccaccaccgccgagcccggcttcatgggcacctggcagaacgccgacaccaacctgctgttcagaatgagccagcaggccatcagatgcaccctggtgaactgcacctgcgagtgcttccagcccggcaagatcaacctgagaacctgcgaccagtgcaagcacggctgggtggcccacgccctggacaagctgagcacccagcacctgtaccaccccacccaggtggagatcgtgcagagcaacgtggtgttcgacatcagcagcctgatgctgtacggcacccaggccgtgcccgtgagactgaagatcctgctggacagactgttcagcgtgctgaagcaggaggaggtgctgcacatcctgcacggcctgggctggaccctgagagactacgtgagaggctacatcctgcaggacgccgccggcaaggtgctggacagatgggccatcatgagcagagaggaggagatcatcaccctgcagcagttcctgagattcggcgagaccaagagcatcgtggagctgatggccatccaggagaaggagggccaggccgtggccgtgcccagcagcaagaccgacagcgacatcagaaccttcatcgagagcaacaacagaaccagaagccccagcctgctggcccacctggagaacagcaaccccagcagcatccaccacttcgagaacatccccaacagcctggccttcctgctgcccttccagtacatcaaccccgtgagcgcccccctgctgggcctgccccccaacggcctgctgctggagcagcccggcctgagactgagagagcccagcctgagcacccagaacgagtacaacgagagcagcgagagcgaggtgagccccaccccctacaagaacgaccagacccccaacagaaacgccctgaccagcatcaccaacgtggagcccaagaccgagcccgcctgcgtgagccccatccagaacagcgcccccgtgagcgacctgaccaagaccgagcaccccaagagcagcttcagaatccacagaatgagaagaatgggcagcgccagcagaaagggcagagtgttctgcaacgcctgcggcaagaccttctacgacaagggcaccctgaagatccactacaacgccgtgcacctgaagatcaagcacagatgcaccatcgagggctgcaacatggtgttcagcagcctgagaagcagaaacagacacagcgccaaccccaaccccagactgcacatgcccatgctgagaaacaacagagacaaggacctgatcagagccaccagcggcgccgccacccccgtgatcgccagcaccaagagcaacctggccctgaccagccccggcagaccccccatgggcttcaccaccccccccctggaccccgtgctgcagaaccccctgcccagccagctggtgttcagcggcctgaagaccgtgcagcccgtgccccccttctacagaagcctgctgacccccggcgagatggtgagcccccccaccagcctgcccaccagccccatcatccccaccagcggcaccatcgagcagcacccccccccccccagcgagcccgtggtgcccgccgtgatgatggccacccacgagcccagcgccgacctggcccccaagaagaagcccagaaagagcagcatgcccgtgaagatcgagaaggagatcatcgacaccgccgacgagttcgacgacgaggacgacgaccccaacgacggcggcgccgtggtgaacgacatgagccacgacaaccactgccacagccaggaggagatgagccccggcatgagcgtgaaggacttcagcaagcacaacagaaccagatgcatcagcagaaccgagatcagaagagccgacagcatgaccagcgaggaccaggagcccgagagagactacgagaacgagagcgagagcagcgagcccaagctgggcgaggagagcatggagggcgacgagcacatccacagcgaggtgagcgagaaggtgctgatgaacagcgagagacccgacgagaaccacagcgagcccagccaccaggacgtgatcaaggtgaaggaggagttcaccgaccccacctacgacatgttctacatgagccagtacggcctgtacaacggcggcggcgccagcatggccgccctgcacgagagcttcaccagcagcctgaactacggcagcccccagaagttcagccccgagggcgacctgtgcagcagccccgaccccaagatctgctacgtgtgcaagaagagcttcaagagcagctacagcgtgaagctgcactacagaaacgtgcacctgaaggagatgcacgtgtgcaccgtggccggctgcaacgccgccttccccagcagaagaagcagagacagacacagcgccaacatcaacctgcacagaaagctgctgaccaaggagctggacgacatgggcctggacagcagccagcccagcctgagcaaggacctgagagacgagttcctggtgaagatctacggcgcccagcaccccatgggcctggacgtgagagaggacgccagcagccccgccggcaccgaggacagccacctgaacggctacggcagaggcatggccgaggactacatggtgctggacctgagcaccaccagcagcctgcagagcagcagcagcatccacagcagcagagagagcgacgccggcagcgacgagggcatcctgctggacgacatcgacggcgccagcgacagcggcgagagcgcccacaaggccgaggcccccgccctgcccggcagcctgggcgccgaggtgagcggcagcctgatgttcagcagcctgagcggcagcaacggcggcatcatgtgcaacatctgccacaagatgtacagcaacaagggcaccctgagagtgcactacaagaccgtgcacctgagagagatgcacaagtgcaaggtgcccggctgcaacatgatgttcagcagcgtgagaagcagaaacagacacagccagaaccccaacctgcacaagaacatccccttcaccagcgtggactag

SEQ ID NO: 194219 - DNA, 1950 bp, Artificial Sequence
  derived and/or modified sequence
atgctgtacggcacccaggccgtgcccgtgagactgaagatcctgctggacagactgttcagcgtgctgaagcaggaggaggtgctgcacatcctgcacggcctgggctggaccctgagagactacgtgagaggctacatcctgcaggacgccgccggcaaggtgctggacagatgggccatcatgagcagagaggaggagatcatcaccctgcagcagttcctgagattcggcgagaccaagagcatcgtggagctgatggccatccaggagaaggagggccaggccgtggccgtgcccagcagcaagaccgacagcgacatcagaaccttcatcgagagcaacaacagaaccagaagccccagcctgctggcccacctggagaacagcaaccccagcagcatccaccacttcgagaacatccccaacagcctggccttcctgctgcccttccagtacatcaaccccgtgagcgcccccctgctgggcctgccccccaacggcctgctgctggagcagcccggcctgagactgagagagcccagcctgagcacccagaacgagtacaacgagagcagcgagagcgaggtgagccccaccccctacaagaacgaccagacccccaacagaaacgccctgaccagcatcaccaacgtggagcccaagaccgagcccgcctgcgtgagccccatccagaacagcgcccccgtgagcgacctgaccaagaccgagcaccccaagagcagcttcagaatccacagaatgagaagaatgggcagcgccagcagaaagggcagagtgttctgcaacgcctgcggcaagaccttctacgacaagggcaccctgaagatccactacaacgccgtgcacctgaagatcaagcacagatgcaccatcgagggctgcaacatggtgttcagcagcctgagaagcagaaacagacacagcgccaaccccaaccccagactgcacatgcccatgctgagaaacaacagagacaaggacctgatcagagccaccagcggcgccgccacccccgtgatcgccagcaccaagagcaacctggccctgaccagccccggcagaccccccatgggcttcaccaccccccccctggaccccgtgctgcagaaccccctgcccagccagctggtgttcagcggcctgaagaccgtgcagcccgtgccccccttctacagaagcctgctgacccccggcgagatggtgagcccccccaccagcctgcccaccagccccatcatccccaccagcggcaccatcgagcagcacccccccccccccagcgagcccgtggtgcccgccgtgatgatggccacccacgagcccagcgccgacctggcccccaagaagaagcccagaaagagcagcatgcccgtgaagatcgagaaggagatcatcgacaccgccgacgagttcgacgacgaggacgacgaccccaacgacggcggcgccgtggtgaacgacatgagccacgacaaccactgccacagccaggaggagatgagccccggcatgagcgtgaaggacttcagcaagcacaacagaaccagatgcatcagcagaaccgagatcagaagagccgacagcatgaccagcgaggaccaggagcccgagagagactacgagaacgagagcgagagcagcgagcccaagctgggcgaggagagcatggagggcgacgagcacatccacagcgaggtgagcgagaaggtgctgatgaacagcgagagacccgacgagaaccacagcgagcccagccaccaggacgtgatcaaggtgaaggaggagttcaccgaccccacctacgacatgttctacatgagccagtacggcctgtacaacggcggcggcgccagcatggccgccctgcacgagagcttcaccagcagcctgaactacggcagcccccaggtgctgcccagaagatag

SEQ ID NO: 194220 - protein, 2916 aa, Artificial Sequence
  derived and/or modified sequence
MRLDEITKSENEDGEKKMFTQQFESTDACVYEVYVKINSIVKSQSQCGLKRGSPETELWGAIVFRSQEENAKPVKETEVTASDADSGLYGFIEYSLYDGFLSYEAPQAFRIDPHDGQICVSQDIDRERDPATYDLLVEAKDGDEQRMTHLALVKGGLSAQAFVRVDLEDVNDNHPVFNPSTYVTSISDETQPGTEIINVLATDQDSGIYGTVAYELIPGNVSSLFTIDSTTGLYSPEVEILSAVNFSADKEVMNSLEMFLPLLRHFKKVERDEEAAEKKFEASRGWFMRFKGRRHLHYLKVQDEAASADGEAAARYVANLAKILGEGIIYLTLPLSHLESTTLSLMVSAQDGGGLTAVINADVTIHIFQTTLAPAEFERPKYTFLVYEDVPEDSPIGTVKAREPLNSSEPIFYRISSGDLGGKFSIHPRLGTIRTRKPLDHETQPVVVLTVQAQLGSAPACSSTEVNITVMDVNDNHPAFLRTSDEIRISQTTPPGTALYLARAEDRDSGRNGLIRYSIASPQPGVFAIDRALGVLFLNGSLGAGEQRELTLTLRAEDQGVHPQAALLVLTVVIEKREHSPSWTFEHLVYQVEVSESLSPMTQMLQTQAHPLGPQRAASPLRYSLEPSVDSAMFGIRPYTGWIYLRRQFDYESTQTYNFRVFAWIPEDGFLQNVSTTVIVRVWDENDNSPTFLHDVLFLKVEESPVPQGVIGKITAIDMDSGKNGQLLYFLLSDGKFFKMNPNTGPAGTIYVITWADGAAAFSGTDFAFSSDELQAFVLKSLFCELGEGELINWVALDREHRGHHEMTVLVTDRGSPPRNATMAVYVSVTDINDNRPFFPQCLPGKELHVKVLEGQPVNMLVTTVFAKDPDEGNNAEVTYSVSSEDSSDHFKIDANNGEIRTTTILSYDYRPSYRMSVIATDQGVPPLQGQAVVNIQVIPLSKGRAIMSQNIRHLIIPENLKPTKIMSLIKSSDHLQQHYNGKLHFSIVADDKDGHFEIDSSTGDLFLSKELDYETTSHYLFRVITTDHSKNLSLSSTVFLSIDVEDQNDHSPSFQDELIVISVEENVPIGTLVYVFNAKDDDGSFLNSRIQYYIESHNPGTNPFLIHPSFGTLVTVSRLDRESIPTVILTVTASDQAVNVTDRRLRSLTAQIVILDVNDHNPTFISFPNAHVKEDVTVGSLVHHITAHDPDEGRNGKVTYSILSGNENMTFMLDESSGLLTTTCPLDYEMKTQHILTVLALDDGTPALSSSQTLTVTVLDVNDEAPVFKQHLYEASVKENQNPGEFVTRVEALDRDSGVNSKLQFEIMPGASFELFEINSDTGEVVTTTILDREIQEVFTLRVLVRDGGFPSLSSTTTILCTVEDENDHAPEFIVSSYDIEVLENQEPEVVYTVLASDMDAGNNRAVEYHIIDGNTDECFTINEMSGELSTTRALDREQISNFTLVILCSDLGDPPRSSVIHLQVRVLDANDHSPSFPTLYYQSSVREDAEVGTVVLVLSAVDKDEGLNGQTEYFLTDEASGAFTIDPMSGTLKTSNTLDREARSQHTFSAVARDCSIQGSRSTTVIIKVYVTDVNDNDPVLEQNPFDVFLSPESPTNQTTVIVRADDLDLGPNGTVVFSFAETQSMFSIDKYTGEIQFQQNPSSEYFPIWLQLKVTDQGIPARTTTGLLVIHMEGEDVKISFSHHLYKGLVTENCEAGTSIVTVKAFAPDSIQDSMKYSIFSGNEDGVLSLCSKSGQLTVKEPKFLDFEVRNEVQLIVLAESSGHRAYCKVAVLIQDENDNSPCFEQSIYQASVSESQLYNAHVIQVFATDLDSGLNGLIEYSILSGNQEEAFQIDALSGVITTKAILDYELTSSYSLIVQATDKGMPRLSNTTVIKVQVTDINDNAPAFLPSEAVEITEDSLPGVIVTHVSVHDVDLNSAFIFSFAKESNPGTKFAIDQNTGVVVLVKTLDFEEMTEYELLIQISDSVHYTEGALVVRVLDVNDNPPVFSQDFYQVTVPESIPVGYSVLTLSATDLESNENISYRILSSSKEFSIDPKNGTIFTISPVLLLDTISTTQFLVEASDGGNPDLRALTLVEIGIEDMNNYAPEFTVKSYNLSLSEDALVGSTLVTFSNIDHDWTRENTYVEYSIISGNSQNNFHVETKFFHSEYPYKQVGYLVLLHSLDREASASHELVILASDSGCPPLSSTAVISIQVLDVNDNPPNFSSLSYHTHVKESTPLGSHITVVSANDRDTGSHAEIIYNIISGNEKGHFYLEENTGVLYLIKPLDYEKMTKFTLTVQASDAEKKHFSFAVVFVSVLDDNDHAPQFMFSSFSCIVPENLPISSTICSINALDFDAGPYGELTYSIVSPCFLTHGMSYDHDLFLIDPLTGDIHAKQILDYENGNKYCLTVQAKDKGDATASLVVWVDIEGIDEFEPIFTQDQYFFTLPEKNKDRQLIGRVEASDADAGIDGVILYSLGTSSPFFSVNKTNGNIYLIRALPLIKSQLNKEDTLEMKIIAHSPKSDSKFASCTVFVNVSFSSEGTPLAVFASSFSISLVVSFLVFLILICILIVMILRHKQKDTINNYEEKKTSSLDADLRVTRDASVLKAFQKTDDCSNEVVPVDATPEWLSLISIMEKDIVNLYRHSNSSGHCSVEGETAEDKEIQRINEHPYRKCSDSALSDHESRVPDSGIPRDSDQLSCLSGETDVMVTAETAEASQTFGEGDQGEGCSTTCAQNNVLPQTVQKREAKESILADVRKESVFISGDQEVRCAALSTQTTSDHDGKDNYHWNYLLSWEPKFQPLASVFNDIAKLKDEHLHMPGIPKEKKSFVFPPPLITAVAQPGIKAVPPRMPAVNLGQVPPKHPRSPIPYHLGSLPEGMTPNFSPSLSLLTMQPPALSPLLREGELLGTHISGTCHELKAEDEVQI

SEQ ID NO: 194221 - DNA, 8751 bp, Artificial Sequence
  derived and/or modified sequence
atgcgtctagacgagatcaccaaatctgagaacgaggacggtgagaagaagatgtttacgcagcaattcgaatctacagatgcttgcgtttacgaggtgtacgtgaaaatcaattccatcgtgaaaagccagagtcagtgcgggcttaagcggggatccccagaaactgagctctggggggctatagttttccgtagtcaagaggagaacgccaagccagttaaggagactgaagttactgcaagcgatgccgacagtggcttatacggattcatagagtatagcctgtacgacgggtttctctcgtatgaagcaccacaggcatttaggatcgacccgcatgacggacaaatttgcgtgagccaggacatagatagagagcgggatcctgcaacatatgacctcctggtggaggctaaggatggggacgaacagcggatgacgcacctggcacttgtgaagggagggctaagtgcccaggccttcgtgcgggttgacctcgaggatgtgaacgacaaccatcccgtcttcaacccttcaacatatgtcacctcaatatctgatgagacgcagccaggtacggaaattattaacgtcctcgccactgatcaggactccggaatttatggaaccgtggcttatgaactgattccggggaatgtgtcatctttgttcacgatcgattctacaacaggcttgtattcacctgaggttgagatcctgtcagccgtaaacttctctgcagataaggaggttatgaacagcttggagatgttccttcctcttcttcgacacttcaagaaggttgagagagacgaagaagcagccgagaagaaattcgaggcgagccgcgggtggtttatgcgatttaaaggtcgacgccacctgcactacctgaaggtgcaggacgaggctgctagcgctgatggcgaggccgcggcccggtacgttgccaacctcgctaagatcctgggggaaggcattatatacctgacattaccattgtcacatctggaaagcaccactctttctctgatggtttccgctcaagacggggggggccttactgcagttattaatgcggacgttaccatacacatttttcagactacactggctcccgcagagttcgagcgaccaaaatatacgttcttagtttatgaagacgtgcctgaggacagtccaattggcacagtcaaagcacgagagcctctgaattcatcagaacccattttctaccgcatttcctctggcgacttgggcggtaaattctcaatacatccccggctgggtaccatacgtactcggaaacctttggaccatgaaactcagccagtggtggtgctcactgttcaggcgcaacttggctcagccccagcctgctcatccactgaggtgaatatcaccgtcatggacgtcaatgataaccaccccgcctttctacggaccagtgacgagatccgcatttcccagaccactccccctggaactgccctctaccttgctagggccgaagatagagactcaggccgcaatggacttatcagatattccatagctagcccccagccgggcgtgtttgccattgaccgtgccttgggcgttctgtttcttaacggtagtttgggtgcaggcgagcagcgcgagctgacgctgaccctgagagccgaggatcagggggtccacccccaagctgccctgctcgtgctgacggtagtgattgagaagagggagcactctccaagctggacctttgagcacttggtatatcaagtcgaggtgtctgaatccttatcccctatgacacagatgttgcagacacaggcacaccccttaggcccccaacgggctgcaagtcctctcaggtactctctggagcctagcgtggatagcgctatgtttggcatcaggccttatacgggatggatatacctcagacgacagtttgactatgagtcgacccagacctacaacttccgggttttcgcgtggattcctgaagacgggttccttcagaatgtctctacgaccgtgatcgtccgcgtctgggacgaaaacgacaattctcctactttcctgcatgatgtactctttctgaaggtggaagagagtccagtgccccagggcgttatcggcaaaattacagccatagatatggactctggcaaaaacgggcagctactgtacttcctccttagtgacggtaagtttttcaaaatgaaccctaacacaggtccagcaggtaccatctatgttattacttgggccgatggcgcggcagcttttagcgggacggattttgccttcagttcggatgaactgcaagcatttgtgcttaaatctttgttctgcgaactcggagaaggagagctgattaattgggtggccctcgaccgcgagcatcgcggccatcacgagatgactgtccttgttacagaccgagggtctccaccacgtaatgccacaatggccgtttatgtctctgttacagatatcaatgacaatcggcccttcttcccacagtgtctcccaggtaaagaacttcacgtgaaggtgcttgaaggacagcccgtcaacatgttagtgacgacggtatttgctaaggacccagatgaaggaaacaacgccgaggtaacatatagcgtatcatcagaggactccagcgaccatttcaaaatcgatgccaataatggcgaaattcgaaccacgacaatcctctcatacgattatcgccctagttatcgcatgtcagtcatcgctaccgaccagggggtgccccctcttcagggccaggccgttgtgaacatccaggttatacctctgtccaaaggcagggccataatgtcgcagaacatcagacatctgatcattccggagaatttgaagcccaccaaaatcatgagcctgataaagtccagcgaccacctacagcaacactataatggtaaactccatttttccattgtcgctgacgacaaggatggtcacttcgagattgattcatctactggggatctgttcctcagtaaagaattagactacgagaccacatcccactatctctttagagttatcacaaccgatcatagcaagaatctctcactctcctcaaccgtcttcctgtcaattgacgtcgaggatcagaacgaccactcgccaagcttccaggacgaactcatcgtgatatctgtcgaagagaatgtgcccatagggaccctggtctacgtctttaatgccaaggatgacgatggctcttttctcaattcgcgtatacagtattatatcgagtcacacaatcccggaacaaatcctttccttatccacccttctttcggtactcttgtcacagtgagcaggcttgatcgcgaaagtatcccaactgtgatactcaccgttactgctagtgaccaggctgtcaatgtgactgaccgccggctgcggtctctgaccgcacagatcgtgattctcgacgttaacgatcataatcccaccttcatctcttttcctaatgctcacgtgaaggaggacgtgacagttgggtctctcgttcaccacatcaccgctcatgatcccgacgaagggcgaaatggcaaggtgacatactccatactgagtgggaacgaaaatatgaccttcatgttggatgaatcaagcggactcttgacaaccacatgtcccctcgattatgaaatgaagacccaacatattctaaccgtgctcgccctggatgacgggactccagctttgtctagctctcaaaccttgacagtaacagtcctagacgtgaatgacgaggcccctgtgttcaaacagcacctgtacgaagccagtgtgaaagaaaaccaaaaccccggcgaattcgtgactcgcgtagaggctctagaccgggattctggagtcaactccaaattgcagttcgaaatcatgcctggcgccagttttgagctcttcgaaattaacagcgatactggcgaagtcgtcaccaccaccattcttgacagggagatccaggaggtatttacccttcgcgtcctggtgcgtgacggcgggttcccttctcttagctccaccacaaccattctctgtaccgtggaggatgagaatgaccacgcgcccgaattcatcgtaagttcttacgacattgaggtgttagagaaccaggagccagaggtagtttacacagtcctggcgtctgatatggatgcaggcaacaatcgcgccgtggagtatcacatcatcgatggcaataccgatgagtgtttcactataaatgaaatgtctggcgagctgagtacgaccagagccctggatagagagcagatctccaatttcacactggtcattttgtgttcggatctgggcgatccacctcgcagttcagtgattcacctacaggtgagagtcttggatgccaacgaccattctccatcttttccaaccctgtattatcagtcttccgtgcgggaggatgccgaggtgggcactgtggtgttagttctttcagctgttgacaaggatgagggactgaatggccagacagagtatttcctgacagacgaagcatcgggcgcatttaccatagacccaatgagcggaacacttaagacgtcaaacacgctcgatagagaggcccggtcccagcataccttctcagcagtggcaagggactgctctattcagggctctaggtctaccaccgtcattatcaaagtgtatgtgaccgatgtcaacgacaacgaccccgtgcttgagcagaacccattcgatgtttttctgtcccccgagtcacccaccaatcagaccacagtgattgtgcgcgccgacgatttggatttagggccgaacggtaccgtggtattttcattcgcagaaactcaaagtatgttttctatcgacaaatacaccggcgagattcagttccagcagaatcctagctctgaatacttccccatatggttacagcttaaggtgacagaccaggggatcccagcgcgaaccactaccggcttgctcgtcatccacatggaaggcgaggacgttaagatctccttctctcaccacctttacaaagggctggttaccgagaactgcgaagctggcacgtccatcgtgactgtgaaggcctttgctcctgacagcattcaggattcaatgaaatactcgatattcagtggcaatgaggacggtgtcctttctctgtgctcaaaaagcggccagttgaccgtaaaggaacctaagtttctggatttcgaggtgcggaatgaggtgcagctgattgtgctcgcggagagtagtggacatcgcgcttattgcaaagtcgcagtactgatccaggacgagaatgacaacagtccctgcttcgagcagtccatatatcaggcaagcgtatcagaatcgcagctatacaatgcacatgtaattcaggtcttcgctacggaccttgactcgggattaaacggccttattgaatactctatcctgtcgggcaatcaggaagaagcattccaaatagatgcactgtcgggggtcattactacaaaggctatcctcgattacgagttgacatcaagttacagcctcatagtgcaagctactgataagggtatgcccagactgtccaacaccacggtcatcaaggtccaggtgaccgatattaatgataacgccccagccttcctgccatcagaagccgttgagatcacagaagacagcttgcccggcgtgatcgtcacccacgtttccgtccacgatgtggatctaaactccgcttttatcttctccttcgccaaggagagcaaccctgggactaagtttgcaatagaccagaacactggggtcgtcgtgcttgtgaaaaccctcgactttgaggagatgaccgagtacgaactgttgattcaaatctccgattccgtgcattatacagagggtgctctggtggtgcgtgtcctcgatgtcaacgacaaccctcctgtgttctcacaagatttctaccaagtcaccgtgccggagtctatacccgtgggctattcggtgcttactcttagtgcaaccgacctggaatccaacgagaatatctcttatcgcatcctgagttcttcaaaagaattctctattgaccctaagaatggcacaatcttcacaatatctcccgtcctgctgctcgacactatcagcaccacccagttccttgttgaggcaagtgacgggggaaacccagatctccgggcattgacactagttgaaattgggatcgaggatatgaacaactacgctccagagttcaccgtgaagagttataacctgagcctgtccgaggacgccctggtgggtagcactctggtcacattctccaacattgatcatgactggacccgcgaaaatacctatgtagagtactcgataatctccggaaatagccagaataacttccacgtggaaacgaaattctttcatagcgagtatccatacaagcaggtgggatatctcgttctcctgcactccctggacagggaagcctctgcgagccacgagctcgtgattcttgcatccgactccggctgtccacctctatcctctactgctgtcatttccatccaagttctagatgtgaacgataatcctccaaatttctcctctctctcatatcacactcatgtgaaggaaagtacgcccctaggatcacacatcactgttgtgtcagctaatgacagagacaccggcagccacgcagaaatcatctataacatcatctcagggaatgagaaggggcatttctaccttgaggagaacaccggggttctgtacctcatcaaaccacttgattacgagaaaatgaccaaattcacactgacagtccaggcatccgacgctgaaaagaaacacttcagtttcgccgtggtgttcgtaagtgtgctcgacgataacgaccacgctccgcagtttatgttctcatcattctcttgcatcgtgccagagaatctaccaatctcgtctacaatctgttccatcaacgcactggatttcgacgccggcccatacggcgaactgacctacagcatagtgagcccctgtttcctcacccacgggatgagctacgaccatgatctcttcctcatagaccctctgactggcgatatccatgccaaacagatcttggactacgaaaacgggaacaagtattgcctgaccgttcaggctaaagacaaaggagacgccacggcgtctctggtggtctgggttgacatcgagggcattgacgaatttgagcctatattcacacaggaccaatacttcttcaccctacccgagaagaataaggataggcaacttattggaagagtcgaagcctccgacgcggatgctgggattgatggcgtgatcctgtactccctcggaacctcctctcccttcttttcagtaaataagaccaatggaaacatctatcttatcagggcactacctctgatcaaaagtcagttaaacaaggaagacaccctggagatgaagattatagcacatagccccaagtccgactcaaagtttgccagctgtaccgtattcgttaatgtgtcctttagttcagaggggacccctttagcagtcttcgccagctccttctctataagcctagtggtatcctttttagtcttcttgatcctcatttgcatcctgatcgtgatgattctgcgccacaagcaaaaagacactatcaacaattacgaagagaagaaaacaagttcactcgatgcagacctaagagtaactcgagacgccagcgtgcttaaggccttccagaagaccgacgattgttcaaacgaagttgtcccagtggatgccaccccggagtggctgagcctgatctctataatggagaaggacatcgtgaacctgtacagacattctaattccagcgggcactgtagcgtggaaggggaaacggctgaggacaaggaaatccagagaattaatgagcacccctacaggaagtgcagtgactccgccttatcggaccacgagagcagagtacctgacagcgggatccctcgggatagcgatcagctgagttgtcttagcggcgaaaccgacgttatggtcacagccgaaaccgcagaggcctcacagaccttcggcgaaggggaccagggagagggctgttccacgacctgcgctcaaaataatgtgctgccccaaactgtccagaagcgcgaagctaaggagtctatcctagctgatgtgagaaaggagtcagtgtttattagcggtgatcaagaagtacgatgcgcagctctttccacgcagaccaccagtgatcatgacggcaaagacaactatcattggaactacctactgtcatgggagccaaagttccagcccctagcatcggtgtttaatgacatcgctaagcttaaagacgaacacctgcacatgccggggattcccaaggaaaagaagtcgttcgtgttcccccccccactgattactgctgtggcccagcccggtatcaaagcagtccctccccgcatgcctgcggtgaatctgggacaagtgcctcctaagcatcccaggtcccctatcccctaccatctggggtctctccctgagggtatgacacccaattttagccccagtctgagtctgctgacaatgcagcctccagctctgagccctctgttacgagaaggagagctgctgggtacccacataagcggcacttgtcatgagctgaaagcagaggacgaagtccagatttag

SEQ ID NO: 194222 - DNA, 8751 bp, Artificial Sequence
  derived and/or modified sequence
atgaggctggatgagatcaccaagtcagaaaatgaagatggagagaagaagatgttcacccagcagtttgagagcacagatgcctgtgtgtatgaggtgtatgtgaagatcaacagcatcgtgaagagccagagccagtgtggcctgaagaggggcagccctgagacagagctgtggggcgccatcgtgttccgcagccaggaggagaatgccaagcctgtgaaggagacagaggtgacagccagtgatgctgacagcggcctgtatggcttcatcgagtacagcctgtatgatggcttcctgtcctatgaggccccccaggccttcagaattgacccccatgatggccagatctgtgtgtcccaggacatcgaccgggagcgggaccctgccacctatgacctgctggtggaggccaaggatggagatgagcagaggatgacccacctggccctggtgaagggcggcctgagcgcccaggcctttgtgcgggtggacctggaggatgtgaatgacaaccaccctgtgttcaaccccagcacctacgtgaccagcatcagtgatgagacccagcccggcacagagatcatcaacgtgctggccacagaccaggacagcggcatctatggaacagtggcctatgagctgatccctggaaatgtgagcagcctcttcaccatcgacagcaccaccggcctgtacagccctgaggtggagatcctgtctgctgtgaacttctctgctgacaaggaggtgatgaacagcctggagatgttcctgcccctgctgcggcacttcaagaaggtggagagagatgaggaggccgctgagaagaagtttgaggccagccggggctggttcatgaggttcaagggcagaagacacctgcactacctgaaggtgcaggatgaagctgccagcgcagatggagaggccgccgcccgctacgtggccaacctggccaagatcctgggggagggcatcatctacctgaccctgcccctgagccacctggagagcaccaccctgagcctgatggtgtctgcccaggacggcggcggcctgacagctgtgatcaatgctgatgtgaccatccacatcttccagaccaccctggccccagctgagtttgagcggcccaagtacaccttcctggtgtatgaagatgtgcctgaggacagccccatcggcaccgtgaaggcccgggagcccctgaacagcagcgagcccatcttctaccgcatcagcagcggggacctgggcggcaagttcagcatccacccccggctgggcaccatccgcaccaggaagcccctggaccacgagacccagcctgtggtggtgctgactgtgcaggcccagctgggcagcgccccagcctgcagcagcacagaggtgaacatcaccgtgatggatgtgaatgacaaccacccagccttcctgcggaccagtgatgagatccgcatcagccagaccaccccacctggaacagccctgtacctggcccgggcagaagatcgggacagcggcagaaatggcctcatccgctacagcatcgccagcccccagcccggggtgtttgccatcgaccgggccctgggcgtgctcttcctgaatggcagcctgggcgctggggagcagcgggagctgaccctgaccctgcgggcagaggaccagggcgtgcacccccaggccgccctgctggtgctgactgtggtgattgagaagcgggagcacagccccagctggacctttgagcacctggtgtaccaggtggaggtgtctgagagcctgagccccatgacccagatgctgcagacccaggcccaccccctgggcccccagagagctgccagccccctgcgctacagcctggagcccagcgtggacagcgccatgtttggcatccggccctacacaggctggatctacctgcggcggcagtttgattatgagagcacccagacctacaacttccgggtgtttgcctggatcccagaagatggcttcctgcagaatgtgtccaccaccgtgattgtgcgggtgtgggatgaaaatgacaacagccccaccttcctgcatgatgtgctcttcctgaaggtggaggagagccctgtgccccagggcgtgattggcaagatcacagccatcgacatggattctgggaagaatggccagctgctgtacttcctgctgagtgatggcaagttcttcaagatgaaccccaacacaggccctgctggcaccatctacgtgatcacctgggcagatggagctgctgccttctctggaacagactttgccttcagcagtgatgagctgcaggcctttgtgctgaagagcctcttctgtgagctgggggagggggagctgatcaactgggtggccctggaccgggagcaccggggccaccacgagatgacagtgctggtgacagaccggggcagccccccaagaaatgccaccatggctgtgtatgtgtctgtgacagacatcaatgacaaccggcccttcttcccccagtgcctgcccgggaaggagctgcacgtgaaggtgctggagggccagcctgtgaacatgctggtgaccaccgtgtttgccaaggaccctgatgagggcaacaatgctgaggtgacctacagcgtgtcctctgaggacagcagtgaccacttcaagattgatgccaacaatggagagatccgcaccaccaccatcctgtcctatgactaccggcccagctacaggatgtctgtgattgccacagaccagggcgtgccccccctgcagggccaggccgtggtgaacatccaggtgatccccctgagcaagggccgggccatcatgagccagaacatccgccacctgatcatccctgagaacctgaagcccaccaagatcatgagcctcatcaagagcagtgaccacctgcagcagcactacaacgggaagctgcacttcagcatcgtggctgatgacaaggatggccactttgaaattgacagcagcactggagacctcttcctgagcaaggagctggactatgagaccaccagccactacctgttccgggtcatcaccacagaccacagcaagaacctgagcctgagcagcaccgtcttcctgagcattgatgtggaggaccagaatgaccacagccccagcttccaggatgagctgattgtcatctctgtggaggagaatgtgcccatcggcaccctggtgtatgtgttcaatgccaaggatgatgatggcagcttcctgaacagccgcatccagtactacatcgagagccacaaccctggcaccaaccccttcctgatccaccccagctttggcaccctggtgacagtgtcccggctggaccgggagagcatccccaccgtcatcctgactgtgacagccagtgaccaggccgtgaatgtgacagaccggcggctgcggagcctgacagcccagatcgtcatcctggatgtgaatgaccacaaccccaccttcatctccttccccaatgcccacgtgaaggaggatgtgacagtgggcagcctggtgcaccacatcacagcccatgaccctgatgagggcagaaatggcaaggtgacctacagcatcctgtctggaaatgaaaacatgaccttcatgctggatgagagcagcggcctgctgaccaccacctgccccctggactatgagatgaagacccagcacatcctgactgtgctggccctggatgatggcaccccagccctgagcagcagccagaccctgactgtgacagtgctggatgtgaatgatgaggcccctgtgttcaagcagcacctgtatgaggcctctgtgaaggagaaccagaaccctggagaatttgtgaccagggtggaggccctggaccgggacagcggcgtgaacagcaagctgcagtttgagatcatgcctggggccagctttgagctgtttgagatcaacagcgacacaggagaggtggtgaccaccaccatcctggaccgggagatccaggaggtgttcaccctgcgggtgctggtgagagatggcggcttccccagcctgagcagcaccaccaccatcctgtgcaccgtggaggatgaaaatgaccacgcccctgagttcatcgtgagcagctatgacatcgaggtgctggagaaccaggagcctgaggtggtgtacacagtgctggccagtgacatggatgctggcaacaacagagctgtggagtaccacatcattgatggcaacacagatgagtgcttcaccatcaatgagatgtctggagagctgagcaccacccgggccctggaccgggagcagatcagcaacttcaccctggtgatcctgtgcagcgacctgggggacccccccaggagcagcgtcatccacctgcaggtgcgggtgctggatgccaatgaccacagccccagcttccccaccctgtactaccagagctctgtgagagaagatgctgaggtgggcaccgtggtgctggtgctgtctgctgtggacaaggatgagggcctgaatggccagacagagtacttcctgacagatgaggccagcggggccttcaccatcgaccccatgagcggcaccctgaagaccagcaacaccctggaccgggaggcccggagccagcacaccttctctgctgtggcccgggactgcagcatccagggcagccgcagcaccaccgtcatcatcaaggtgtatgtgacagatgtgaatgacaatgaccctgtgctggagcagaacccctttgatgtgttcctgagccctgagagccccaccaaccagaccaccgtcatcgtgcgggcagatgacctggacctgggccccaatggaacagtggtgttctcctttgctgagacccagagcatgttcagcattgacaagtacacaggagagatccagttccagcagaaccccagcagcgagtacttccccatctggctgcagctgaaggtgacagaccagggcatcccagcccggaccaccaccggcctgctggtgatccacatggagggggaggatgtgaagatctccttcagccaccacctgtacaagggcctggtgacagagaactgtgaggccggcaccagcatcgtgacagtgaaggcctttgccccagacagcatccaggacagcatgaagtacagcatcttctctggaaatgaagatggagtgctgagcctgtgcagcaagagcggccagctgactgtgaaggagcccaagttcctggactttgaggtgagaaatgaggtgcagctgattgtgctggccgagagcagcggccaccgggcctactgcaaggtggccgtgctgatccaggatgaaaatgacaacagcccctgctttgagcagagcatctaccaggcctctgtgtctgagagccagctgtacaatgcccacgtgatccaggtgtttgccacagacctggacagcggcctgaatggcctcatcgagtacagcatcctgagcggcaaccaggaggaggccttccagattgatgccctgtctggagtcatcaccaccaaggccatcctggactatgagctgaccagcagctacagcctgattgtgcaggccacagacaagggcatgccccggctgagcaacaccaccgtcatcaaggtgcaggtgacagacatcaatgacaatgccccagccttcctgcccagcgaggccgtggagatcacagaggacagcctgcccggggtgattgtgacccacgtgtctgtgcatgatgtggacctgaacagcgccttcatcttctcctttgccaaggagagcaaccctggcaccaagtttgccatcgaccagaacacaggagtggtggtgctggtgaagaccctggactttgaggagatgacagaatatgagctgctgatccagatcagtgacagcgtgcactacacagagggcgccctggtggtgcgggtgctggatgtgaatgacaacccccctgtgttcagccaggacttctaccaggtgacagtgcctgagagcatccctgtgggctacagcgtgctgaccctgagcgccacagacctggagagcaatgaaaacatctcctaccgcatcctgagcagcagcaaggagttcagcattgaccccaagaatggcaccatcttcaccatcagccctgtgctgctgctggacaccatcagcaccacccagttcctggtggaggccagtgatggcggcaacccagacctgcgggccctgaccctggtggagatcggcatcgaggacatgaacaactatgcccctgagttcaccgtgaagagctacaacctgagcctgtctgaagatgccctggtgggcagcaccctggtgaccttcagcaacatcgaccatgactggacccgggagaacacctacgtggagtacagcatcatcagcggcaacagccagaacaacttccacgtggagaccaagttcttccacagcgagtacccctacaagcaggtgggctacctggtgctgctgcacagcctggaccgggaggccagcgccagccatgagctggtgatcctggccagtgacagcggctgcccccccctgagcagcacagctgtgatcagcatccaggtgctggatgtgaatgacaacccccccaacttcagcagcctgagctaccacacccacgtgaaggagagcacccccctgggcagccacatcaccgtggtgtctgccaatgaccgggacaccggcagccatgctgagatcatctacaacatcatctctggaaatgagaagggccacttctacctggaggagaacacaggagtgctgtacctgatcaagcccctggactatgagaagatgaccaagttcaccctgactgtgcaggccagtgatgctgagaagaagcacttctcctttgctgtggtgtttgtgtctgtgctggatgacaatgaccacgccccccagttcatgttcagcagcttcagctgcatcgtgcctgagaacctgcccatcagcagcaccatctgcagcatcaatgccctggactttgatgctggcccctacggggagctgacctacagcatcgtgagcccctgcttcctgacccacggcatgtcctatgaccatgacctcttcctgattgaccccctgaccggggacatccacgccaagcagatcctggactatgaaaatggaaacaagtactgcctgactgtgcaggccaaggacaagggagatgccacagccagcctggtggtgtgggtggacatcgagggcattgatgaatttgagcccatcttcacccaggaccagtacttcttcaccctgcctgagaagaacaaggaccggcagctgattggccgggtggaggccagtgatgctgatgctggcattgatggagtcatcctgtacagcctgggcaccagcagccccttcttctctgtgaacaagaccaatggaaacatctacctgatccgggccctgcccctcatcaagagccagctgaacaaggaggacaccctggagatgaagatcatcgcccacagccccaagagtgacagcaagtttgccagctgcaccgtgtttgtgaatgtgtccttcagcagcgagggcacccccctggccgtgtttgccagcagcttcagcatcagcctggtggtgtccttcctggtgttcctgatcctgatctgcatcctgattgtgatgatcctgcggcacaagcagaaggacaccatcaacaactatgaggagaagaagaccagcagcctggatgctgacctgcgggtgaccagagatgcctctgtgctgaaggccttccagaagacagatgactgcagcaatgaggtggtgcctgtggatgccaccccagagtggctgagcctcatcagcatcatggagaaggacatcgtgaacctgtaccgccacagcaacagcagcggccactgcagcgtggagggggagacagctgaggacaaggagatccagaggatcaatgagcacccctacaggaagtgcagcgacagcgccctgagtgaccacgagagccgggtgcctgacagcggcatcccccgggacagcgaccagctgagctgcctgtctggagaaacagatgtgatggtgacagctgagacagctgaggccagccagacctttggagagggggaccagggcgagggctgcagcaccacctgtgcccagaacaacgtgctgccccagacagtgcagaagcgggaggccaaggagagcatcctggctgatgtgaggaaggagagcgtcttcatcagcggggaccaggaggtgcgctgtgccgccctgagcacccagaccaccagtgaccatgatggcaaggacaactaccactggaactacctgctgtcctgggagcccaagttccagcccctggccagcgtcttcaatgacatcgccaagctgaaggatgagcacctgcacatgcctggcatccccaaggagaagaagagctttgtgttccccccacccctcatcacagctgtggcccagcccggcatcaaggctgtgccccccaggatgcctgctgtgaacctgggccaggtgccccccaagcaccccaggagccccatcccctaccacctgggcagcctgcctgagggcatgacccccaacttcagccccagcctgagcctgctgaccatgcagcccccagccctgagccccctgctgcgggagggggagctgctgggcacccacatcagcggcacctgccacgagctgaaggcagaagatgaggtgcagatctag

SEQ ID NO: 194223 - DNA, 8751 bp, Artificial Sequence
  derived and/or modified sequence
atgcggctggacgagatcaccaagagcgagaacgaggacggcgagaagaagatgtttactcaacaatttgagagtactgacgcctgcgtgtatgaggtctatgtgaaaattaattccattgtgaagtcacagtctcagtgtggactgaagcgcgggagcccggagactgagctgtggggggccatagtctttcgaagtcaggaagaaaacgcgaagccagtgaaagagaccgaagttaccgccagcgacgccgactcagggttgtacggcttcatcgaatattcactctatgacggctttttaagttatgaggctcctcaggccttccgcattgaccctcacgacggacagatctgtgtgtctcaggacatcgatcgagaacgcgaccccgcaacgtacgacttgctggtggaggcaaaagacggagatgagcaaaggatgacccacctcgccctagtcaaggggggcctgtcagctcaagcattcgttagagtggatcttgaggacgtcaacgacaatcacccagtgttcaacccatctacatatgtgacaagtatttccgacgaaacccagcctggcacagaaataataaatgtgctggccacggaccaggacagcgggatctacggaacagtcgcctatgagctcattcccggaaatgtgagctccctttttaccattgactccaccactgggttatacagcccagaggtggaaattctttctgcagtcaacttctcagcagacaaagaggtgatgaactctttagaaatgttcctgcctctgctcaggcacttcaaaaaagtggaaagggacgaagaggcggccgagaaaaaatttgaggcgtcacgtgggtggtttatgagattcaaagggcggcgtcacctgcactatctgaaagtccaggacgaagcggctagcgccgacggcgaggctgcagcccgatatgttgcgaatctggcaaaaatcctgggcgaaggaatcatctatctgactctcccgctgtctcatctcgagagcaccactttatctctgatggtcagtgcacaggacggagggggtttgacagccgtcattaatgcagacgttacaattcatatcttccagactacccttgcccctgcagagttcgagagacctaaatacacctttcttgtgtacgaagacgtgccagaggactcaccaatcggcactgtcaaagcccgggagccactcaacagctcagaaccaattttttaccgcatctcaagcggggatcttggtgggaagttttctatacatcctaggctcggcaccattcggacacggaagccacttgaccatgagacacagcccgtggtcgtcctaactgtacaagcccagctcgggtccgccccagcctgttccagtacagaggtcaatataacagttatggatgtcaatgacaatcacccagcgttcctgcgcacatccgacgagatccgaatcagccaaactactccaccgggaacagcgctttatctggccagagccgaggatcgcgattcaggtaggaacggcctcattcgctatagtattgcttcaccccaacctggagtctttgccatagatcgcgctctgggtgtgctgtttctgaacgggtcactgggggccggggagcagagagaactgacactgacactgcgtgccgaggatcagggggttcacccccaggcagcattgctcgtgttgacagtcgtgatcgaaaagagagagcattcaccgagctggacattcgagcatctggtttatcaagttgaggtgtccgagtccctgtcaccaatgacccagatgctccagacacaggcccacccattgggacctcagagggcggcctctcccctgagatactcactagagccttcagtcgattctgcaatgtttggcatccgaccctataccggttggatttacctgcgtagacagttcgactacgagtccacccagacttacaactttcgcgtgtttgcttggatcccagaggacggtttcctgcagaatgtttcgacaacagtaattgtgcgggtctgggacgaaaatgacaactcccctacatttttgcatgacgttctcttcttgaaggtcgaagaaagccccgtgccacagggcgttattggcaaaatcactgcaattgatatggatagcgggaaaaatggtcagttgctttatttcctgttgagcgacggcaagttctttaaaatgaaccccaacaccggaccagcggggactatctacgttatcacttgggctgatggagccgcggcattctctggaaccgacttcgcgttttcctccgatgaactccaggcttttgtgctcaagtcactcttctgtgagctcggggagggagagctgatcaattgggtagcactcgacagggagcacaggggccaccatgagatgacggtactagtgacagataggggaagtcctccacgaaacgctacaatggccgtttatgtttcggtgacggatatcaacgacaacagaccattttttccccaatgcctcccagggaaggagctgcatgtcaaggtcctagaggggcagccggtaaacatgctggtcaccacagtgttcgctaaagatccagacgagggtaataatgcggaagtcacatattcggtgtcatctgaggacagcagtgatcacttcaagatcgacgcaaataacggagagatccggactaccaccatcctttcatacgattataggccatcctaccggatgtcggtcatagcgacagatcagggcgtcccaccgctgcaggggcaagctgtggtcaacatccaggttatccccctgtccaagggccgcgccatcatgagccaaaacatcagacatctgataatccccgagaacctgaagcctacgaagattatgtcactgatcaaatcatcagaccacctccagcagcattacaatggcaagcttcacttctctatcgttgctgacgacaaggacggacacttcgaaattgacagctcaactggcgatctgttcttgagtaaagagctggactacgagaccacctcacattatctattccgtgttatcacaacggatcatagcaagaacctcagtctgagtagcacagtctttctgtctattgacgtggaagatcagaacgatcacagcccctcttttcaggacgaactgattgtgatctccgtcgaagagaacgtgcccatcggtaccctcgtgtacgtctttaatgcgaaggacgatgacggttcttttctgaattctaggatccagtactacatcgaaagtcacaacccaggcaccaaccctttcctgatccacccctcctttggcacattagtcaccgtcagtcgcttggaccgtgaatcaatccccaccgtcatcctgacagtaacggcctcagaccaggctgtaaacgtaactgataggcggttgagatctctgaccgcacagatcgtgatactcgacgtgaacgaccacaatccaacgtttatctccttcccaaatgcccacgtcaaggaagacgtgaccgtaggctcactggtgcatcatattaccgcacatgaccctgatgaggggcggaatggcaaggtgacgtactcaatcctgagcgggaacgagaacatgacattcatgctggacgagtcaagcggcctactgaccactacttgtcctttggattatgagatgaagacacagcatatactgaccgtgctcgccctagatgacggtacacctgcactgagcagctcccagacattgaccgttaccgtgctggatgtgaacgacgaagcaccagtttttaagcagcacttatatgaggcgtcagtaaaggagaatcaaaaccccggggaatttgtgacccgtgtcgaggctctggacagggactctggagtaaactccaaactccaattcgagatcatgccgggcgccagtttcgagctgtttgagatcaactcagatactggcgaagtggttacaactacaatccttgacagagaaatccaggaagtattcacgctgcgggttctcgtcagggacggagggtttccatcactaagctctactaccactatactttgcactgtcgaagatgagaacgaccatgctcccgaatttatagtttcctcctacgacattgaagtgttggagaaccaggaacctgaagtggtgtacacagtgcttgcatctgatatggatgctgggaataatagagctgtggagtaccacatcatagacgggaacactgacgagtgctttacgataaacgaaatgtccggggagctgtccaccacgcgcgctctggacagagagcagatttccaacttcaccctcgtgattctatgcagtgatttgggggaccccccgagatcctccgtgatacaccttcaagtgagagtgttggatgcaaacgaccactctccaagttttcccaccctgtactatcaatctagcgtcagggaagatgcggaagttggcactgtggtcctggtcctgtccgccgtggacaaagacgaggggctcaatggacagacagagtactttctcacagacgaagcgagcggggccttcactatcgatcccatgagcggcaccctgaagacctcgaacaccctggatagggaggctagatctcagcacacattttccgcagtcgcgcgcgactgtagcattcaaggatccagaagcaccacggtaatcattaaagtgtatgttacagatgtcaatgataatgatcccgttctggaacagaacccatttgatgttttcctgtctccggaatcccccacaaaccagacaaccgtcattgtccgggcggacgacctggacctcggacccaatggcacagtagtgttcagtttcgcggagactcagtccatgttctccatagataagtacactggagaaattcaattccagcagaaccccagttcagagtacttccccatctggttgcagctgaaagtgacagatcagggcattcctgcacgaaccaccacgggtctcctggtgatccatatggaaggcgaggacgtcaagatcagtttctcccaccacttatacaaaggtctggtcaccgaaaattgtgaggccggaacatcaatagttactgttaaggctttcgcccccgacagtatacaggactccatgaagtactccatcttctctggcaatgaagatggcgttctctcactctgcagcaaatccgggcaactgaccgtcaaggagcccaagttcctggattttgaggtccggaacgaggtgcagcttatcgtgcttgcagagagctccggtcaccgggcctattgcaaggtggccgtcctgatccaggatgaaaatgataacagcccatgcttcgaacagtccatatatcaggcctccgtttctgagtctcagctatataacgcccacgtgattcaggtgtttgcaaccgatcttgactccggcctgaacgggctcatagagtacagcatcctgagtggcaatcaagaagaagcgtttcaaatcgacgctctgagtggagtcatcaccacaaaagcaattctcgattatgagctgacctcctcttactcactcatagtccaagctactgataagggaatgccacgtctgtctaacactaccgtaattaaagtgcaggtgaccgacatcaatgataacgctccagcattcctcccatccgaggccgttgagatcaccgaagattccttacctggcgtcatagtgacccacgtgtctgtgcatgacgtggatctgaacagcgccttcatcttttctttcgctaaggagtcaaaccccggtacgaagtttgctatcgaccagaataccggagtcgtcgtccttgtgaagaccctggatttcgaggagatgacagagtatgagttgctgatccaaatttctgactccgtccattacaccgaaggggcgctagtcgtccgcgtgttagacgtgaatgacaatccgcccgtgttcagtcaagatttctaccaggtaacagtgccagagtccatccccgttgggtacagcgtgctgacgctctccgctactgacctggaaagtaatgagaacatcagctaccgcatcctgtcatcttcaaaggagttttccattgacccaaagaacgggacgatctttactatatctccagtattactcctcgacacgatcagcaccactcagttcttagtggaagctagcgatggcggcaaccccgacctcagggcattaactttagttgagattggcattgaagatatgaacaactacgccccggagttcacagtaaagtcctacaatctgtccctgtccgaggacgcccttgtgggctcaaccctcgtgactttttccaatatcgaccacgactggacacgcgagaacacctacgtcgagtactccatcataagcggcaactcccagaacaacttccacgttgaaactaagttcttccacagtgaatacccgtataagcaagtaggctatctcgtacttctgcattctttggatcgagaggccagcgcatcccatgagcttgtgatattagctagtgactcgggatgtccaccattgagttccactgccgtaattagtatccaagtgctggatgtcaacgataacccacccaacttcagttcactaagctaccatacacatgtgaaggaatctacacccctcgggtcccacatcacagttgtgtcagcaaacgaccgggacaccggcagccatgcagaaatcatttataacatcatttcaggcaacgaaaaaggtcatttctatctcgaggagaatacaggagtgctgtacctcatcaagcccctggattacgagaagatgactaaatttacgctgactgtgcaggcaagtgacgctgaaaaaaaacactttagtttcgccgtggtgttcgtgtccgtcctggacgataatgatcatgccccccagttcatgtttagttcctttagttgtattgtccccgaaaatttgcctatcagtagcaccatctgttctatcaatgcgttggacttcgacgctggaccatacggggaactgacatactcgattgttagcccatgcttcttgacccacggcatgagctacgatcacgacctgttcctgatcgatcccctgactggggacatccatgcaaaacaaatattggactacgaaaatggaaataaatattgcctgaccgtccaggctaaagacaaaggggacgccacagcgtcgttggttgtctgggttgatattgagggcatagacgagtttgagcctattttcacacaggaccagtacttttttactctgccagagaagaacaaagacaggcagctgatcggtcgagtggaggccagcgatgccgatgctggcatcgatggcgtgatactgtacagtctcggcacgtcttcccccttcttcagcgtgaataaaacaaacgggaacatctaccttatccgggctctccccctaatcaaaagccaactcaacaaggaggacacgctagagatgaagattatcgctcatagcccaaaaagcgatagtaaattcgcttcttgtactgtatttgttaacgtgagttttagttctgaagggactcctctggccgtgttcgctagctcgttttcaatcagcctggttgtgtcttttttagttttcctgatcctgatctgtatactaattgtaatgatcctccggcataaacagaaagacactattaataactacgaagaaaagaagacctcttctcttgacgctgacctgcgcgtgactagggatgcctcagtcctcaaagcttttcagaagacagacgattgttccaacgaggtggttcccgtggatgcaacacctgagtggctctctttgatcagcataatggagaaggatatcgtgaacctgtatcggcatagcaacagcagcggacactgttccgtcgaaggcgagacggcggaggacaaagagatccagaggatcaacgagcacccgtacagaaaatgcagcgactccgcactctcagaccacgaatctcgagtcccagattctggtataccacgagactcagaccaactgagctgcctatccggggagacggatgtcatggtgactgcggagacagctgaagcgagccagacatttggagagggagatcagggagaggggtgtagtactacttgcgcacagaacaatgtactgccacaaactgtgcagaagagggaggccaaggaaagtattctggccgacgtgcggaaagagagcgtctttatctctggtgatcaggaggtgagatgcgctgcgttgagcacccagacaacttcagaccacgacggaaaggataactaccactggaattacctactgagctgggagccgaagttccagcctctggcctctgtcttcaatgatattgccaaactcaaggacgaacacctccatatgcctggtatccctaaagaaaagaagagctttgtgtttccacccccattgattaccgcagttgcccaacccggaatcaaggccgtaccacctaggatgccggcggtgaatctggggcaggttccacctaagcaccccagatctcccataccatatcatctagggtcgctgcccgaaggtatgacaccaaatttctccccctctctgtccctgttaacaatgcaaccgccggccctgagtccactgctccgcgaaggagagctgctgggtacccatatcagcgggacctgccatgaacttaaagcagaggacgaggtgcaaatatag

SEQ ID NO: 194224 - DNA, 8750 bp, Artificial Sequence
  derived and/or modified sequence
atgaggctggatgagatcaccaaatccgaaaacgaggacggagaaaaaaagatgttcacacagcagttcgagtcaacagacgcctgcgtgtatgaggtttatgttaaaattaattctatagttaaatcacagagtcagtgtggacttaagagggggtctcccgaaaccgaattgtggggcgcaattgttttccgctcccaggaagagaacgcaaagcccgtcaaagagacagaggtcaccgcttccgatgccgactccggactgtatgggtttatcgagtattccctgtatgatgggttcttgagttacgaggctccgcaagcattccgaatcgatccccacgatgggcagatctgcgtaagccaagatatcgatcgggaacgcgaccctgctacttacgacctgctcgttgaggccaaggacggggacgaacagcggatgacccacctggccctggtgaaagggggactctccgcccaagccttcgtccgggtagacctggaggacgtgaatgataaccacccagtgtttaatccttctacctatgtgacttccattagcgatgaaactcagccaggtaccgaaattatcaacgtcttagctacagatcaggactctggcatttacggcacagtggcctacgagctgattccagggaatgtcagttcgctctttacaatcgatagcacaaccgggctgtacagccctgaagtggagatcctctctgctgtgaatttcagcgcagacaaggaggtgatgaactcgcttgaaatgtttctcccattacttagacattttaaaaaagttgagcgcgatgaggaagccgcagaaaaaaagttcgaagctagcagggggtggtttatgcgctttaaaggcaggcgccatctccactacctgaaggtccaggatgaagccgctagcgccgatggtgaggccgcagccaggtatgtagctaatctggcgaagatcctgggagaggggattatttatctcacattgcccctgagtcacctggagagtaccactctaagccttatggtttctgcccaggacggcggtggcctaaccgccgtgatcaatgccgatgttaccatccatattttccagactacactagcccctgccgagttcgagaggcccaaatacacttttctggtatacgaagacgttccagaggattcccccataggcactgtgaaggctcgtgagcccctcaacagcagtgagccaatcttttaccgcatctcttcaggcgacctcgggggaaagttctcaattcacccacggcttgggactatcaggactaggaagccactagatcacgagacccagcccgtggttgttctgacagtacaggcccagctgggatcagctccagcatgttccagcaccgaggtcaatataactgtgatggatgtcaatgataatcatcctgcgtttctccggacatcagatgagatccgcatctctcagacaacccctccaggcacagccttgtaccttgctagggctgaggaccgggacagcggtaggaatggattgatacgttatagcattgcgtccccccagccgggagtcttcgccattgatagagcgctgggagtcctgttcctgaatggatcgctgggagccggagaacagcgggaactcacgcttaccctgcgcgctgaggaccagggcgtccacccacaggccgcactgctggtcttaactgtggtgatcgaaaagagggagcattcccctagttggacatttgaacacctcgtctaccaggtcgaagtaagcgaatctctgtcacctatgacccagatgctccagacacaggcgcatccattggggcctcagcgggctgcgagcccacttaggtacagtctcgagccttccgtggactcggcaatgttcgggataagaccctataccggatggatataccttaggagacagttcgattacgagtccacccaaacatataactttcgagtattcgcttggattcctgaggatgggttccttcagaacgtgagcacgacagtgatagttcgcgtgtgggatgagaatgataatagcccaacattcctccatgacgttttgtttttgaaggttgaagaatcgccagtgccacaaggggttatcgggaagatcactgctattgacatggactcagggaaaaacggccagctgctgtactttctactttcggacggaaaatttttcaaaatgaacccgaatacaggtccggcaggcactatctacgtgattacctgggcggatggcgctgccgcattctcaggtaccgactttgccttctcaagtgatgagctgcaggctttcgtgttgaagagtttattctgtgaactgggtgaaggcgagttgattaactgggtcgcgcttgaccgcgagcacaggggtcatcatgagatgactgtccttgtgacggacagaggatcgccccctagaaacgcaaccatggcagtgtatgtgagtgtgaccgacatcaacgataatcggccattctttccacagtgcctgcccggaaaggaactccatgtgaaagtgttagaagggcaaccagtgaacatgctggttaccaccgtttttgcaaaggatccagatgaaggtaacaacgcagaggtgacatattcagtatccagtgaggacagcagtgatcactttaaaattgatgctaacaatggtgagatccgtactacgacaatcctgagctacgattatcgtccatcttatcgcatgagtgtgattgccactgaccaaggggtcccccctctgcagggacaggcagttgtcaatatccaggttatccctctgagtaaggggcgagcgattatgagccagaatatcaggcacctcattattcctgagaacctgaaacccaccaagattatgtcgctcattaaatcttctgaccatctgcagcaacactacaacggcaagttgcatttttccatcgtggccgacgacaaggatggacacttcgagattgactcttcaacaggggacttgttcctatccaaggagttggactacgaaaccactagccattatctgtttagagtgataaccactgaccattcgaagaatctctccctgagttcgacagtcttcctgagcatcgacgttgaggaccagaatgatcatagcccatcattccaggatgagttgatcgtgatttccgtcgaagaaaacgtgccaataggcaccttagtgtatgtatttaacgctaaagatgacgatgggtctttcttgaacagccgaatccagtattacatcgaatcccataaccccggaactaatccttttctcattcacccctctttcggtaccctggtcactgtgagcaggctggaccgtgaaagcatacctacagtcatcctcactgtgactgcctccgatcaggcagttaacgtgacggataggcgactgcggtcactgacagcacagatcgtcatccttgacgttaacgaccataatcctacattcattagctttcctaatgctcacgtgaaggaggatgttaccgtaggctccctcgtgcatcatattacagcccacgaccccgatgaaggccgtaatggtaaggttacatactcaatacttagtggcaatgaaaatatgacttttatgttggatgaatcctcaggcctgctaaccacaacctgccccctggactacgagatgaaaacacagcatattctgaccgtactggccctggacgatggtacacccgcactgagctcatctcaaacccttaccgttaccgtgttggatgtcaatgatgaggcccctgtattcaaacaacacctgtatgaagccagcgtgaaggaaaaccagaatcccggagaatttgtgacccgcgtggaggcattggacagggactctggcgtcaacagcaagctgcagtttgaaatcatgcctggagcaagtttcgaactctttgagattaactctgacacaggagaagtggtgaccaccacgatactggatcgggagatccaggaggtgtttacgctcagggtcttggtgagagacggcggtttcccaagcttatcgagtacgaccacaatcctctgcacagtggaggacgagaacgaccacgcccctgagtttatcgtgagttcctatgatatcgaagttcttgagaatcaggagccagaggtcgtatatactgtgctggctagcgatatggatgccggaaataatcgagccgtagagtaccatatcatcgacggcaacaccgacgagtgtttcacaatcaacgagatgtccggggagttatcaactacgagggccttggaccgtgagcagatctccaactttaccctcgtgatactttgcagcgacctgggtgatccccctagatccagcgttatccatctccaggtccgcgtcctggacgccaacgatcatagccctagctttccaaccctctattatcagtccagcgttcgcgaagatgccgaagttggcaccgtggtcctagtgctatccgctgtagataaagacgaagggctgaacgggcagaccgagtactttctgactgatgaggcatccggggctttcacaattgaccctatgtctggaaccctgaaaacctctaacaccctggatagagaggcccgaagtcagcatacattctctgctgttgccagggactgctcaatccaagggtcccgaagtacaactgtgattattaaagtttacgtaactgacgtaaacgataacgatcctgtattggagcagaatccctttgatgttttcctgtcaccagagagccctacaaatcaaaccactgtgattgtgcgcgcagatgatttagacctgggaccaaacggcacggtcgtgttttcctttgctgaaacccaaagcatgttttctatcgacaaatatacaggtgaaatccagttccaacagaatcccagttctgaatattttccgatatggctgcaactcaaggtcacagatcagggcatacctgccaggactactacgggcctactggtcattcacatggagggtgaagacgtcaagatttccttcagccaccacctgtataagggactggtaacagagaactgtgaggccggtaccagtattgttaccgttaaggcgttcgcacccgattctattcaggacagcatgaaatactcgatcttttctggcaacgaagatggcgtgttgtctctctgttccaaaagcgggcagttgactgttaaggagccaaaatttctggattttgaggtgaggaacgaggtacagctgattgtactggctgaatcgtccggccaccgggcatactgcaaggtggctgtccttatccaggatgagaacgacaatagcccatgttttgagcagagtatctatcaagcttccgtttcagagagccagttgtacaacgcacacgtgatacaggtgtttgctaccgaccttgattccggtctgaatgggctgattgagtactccatcctgtctggcaaccaggaggaggcctttcagatagacgctctttctggcgtgatcactaccaaagctatcctcgattacgaacttacctccagctatagcctcatcgtccaagccactgataaaggaatgcctagactcagcaacaccaccgtgattaaggtgcaggttacagatatcaatgataatgcacctgccttcctcccaagcgaggctgtcgagatcactgaagacagtttaccaggtgtcattgtcacacatgtttccgtgcatgatgttgaccttaattcagcattcatctttagttttgccaaagagtctaatcccggaactaagtttgctattgaccagaacaccggtgtcgtcgtcctggtcaaaacattagatttcgaggaaatgacagagtacgaactgctgatccaaattagcgacagcgtccattacaccgaaggtgctctcgtggtgcgcgtactagacgtgaacgacaacccacccgtgtttagtcaggacttctaccaggtaacagtgcctgaaagcatcccagtgggatactctgtgttgacacttagcgcgaccgacctggagtctaacgaaaatatctcctatcggatactgtccagttccaaggaattttccattgatccaaaaaatgggacgatctttaccatctcaccagtgctgctgctggacaccatcagcaccacacaatttttagtagaggcttccgacggagggaatccggatctaagagccttaactcttgtagagattggcatcgaagatatgaacaattatgcgcctgagttcactgttaagagctataacctgtccttaagtgaagacgccctcgtgggaagtacactggtgactttctccaacatcgaccatgattggacaagggagaacacctatgtggaatactctattatctccggcaacagccagaataacttccatgtcgagacgaaattctttcatagcgaatacccttacaagcaggtgggctatttggtcttattgcattctctagatcgagaggcaagtgcttctcatgaactcgtaatcctggccagcgattccggctgtcctcccctcagcagtaccgctgtaatttccatacaggtgctggacgtcaatgataatccgcctaacttctcgagtttatcttaccacacacacgtcaaggagtcaacgcccttgggtagccatatcacagtagtaagcgctaacgatcgggataccggtagccacgctgaaatcatttataacattatttccgggaacgaaaaaggccatttctacttggaagagaacaccggagtcctctacctcatcaagccccttgactatgagaagatgactaaatttactctgacggtccaggcatccgacgctgagaagaagcacttctcattcgcagttgtgttcgtgtcagtgctggatgataacgaccacgccccacaatttatgttcagctctttctcctgtattgtgcctgaaaacctccccatcagcagtactatatgcagtataaatgcacttgactttgatgccggtccctacggtgagctgacctacagcattgtgagcccctgtttccttactcacgggatgtcctacgaccatgatctttttctgatcgaccccttgaccggcgacatccacgcaaagcaaattttggactatgaaaatggtaataagtattgcttaacggtgcaagctaaggacaaaggcgacgcaaccgccagtctggtggtatgggtcgacattgaaggaatcgatgagttcgaacctatctttacccaggatcaatattttttcaccctccctgagaagaataaagaccggcagcttattggaagagttgaggcctccgacgccgatgcaggtattgacggggtgattttgtattctctgggcacatcctcacccttctttagtgtaaataagactaatgggaacatatatctgattcgagccctgccgctcattaaaagtcagttaaacaaggaagataccctggaaatgaaaattatcgctcattcacctaaatcggactccaaatttgcctcctgcacagtattcgtcaatgtatcgttctctagcgaagggactccccttgcagtttttgcttcttccttttctatcagtcttgttgtgagctttctcgttttccttatcctgatctgcatcctgattgtcatgattctgaggcataagcagaaggacaccatcaacaactacgaagaaaaaaagacgagcagtctggatgccgatctgcgcgtgaccagggacgcttctgtactgaaggccttccagaaaacggacgactgtagcaatgaagtcgtgccagtggacgctactcccgaatggctcagtctcatctctatcatggagaaagatatagtgaacttgtacagacactctaattcttcgggacattgtagcgttgagggagaaacagcagaagacaaagagatacagaggattaacgagcatccgtaccgtaaatgctctgattctgctctgtctgatcatgagtcaagagtgccggactccggcatccccagggactccgatcagctgtcttgcctctcaggggagactgacgtcatggtcacagctgaaacagccgaggcaagtcagaccttcggagagggcgaccaaggcgaggggtgctcaactacctgcgcccagaacaacgtcctgcctcaaacagtgcagaaacgggaagcaaaggagtctatcctggctgacgtgcggaaggagtcggtctttattagcggcgaccaggaagtccgatgtgccgctcttagtactcaaacaacctcagaccacgacggtaaggataactaccattggaattacttgctgtcttgggagcctaagttccagcctctggcctcagtgttcaacgacattgccaaactaaaggacgaacatctgcatatgcccggaatccctaaagagaagaaatcattcgtgttccctccaccattgattaccgctgtagcccagcccggaatcaaggccgtgcctccacggatgcccgctgtcaacttggggcaggtaccacctaagcacccacgcagccccatcccatatcacctgggctccctccctgaaggaatgaccccaaacttttccccttccctttctctgctcactatgcaaccgccagctctgtctcctctgctgagagagggcgaactcttaggtacgcatatcagtggcacgtgtcacgaactgaaagctgaagacgaggtacagattta

SEQ ID NO: 194225 - DNA, 8912 bp, Artificial Sequence
  derived and/or modified sequence
atgagactggatgagataacgaaatcagagaatgaagacggagaaaagaagatgtttactcagcagtttgaaagtactgatgcctgtgtatatgaggtgtatgtgaaaataaattccattgtgaaatctcagagtcagtgtggattgaaaagaggtagtcccgagactgagctctggggtgctatagtgttcagaagccaggaagagaacgcaaaaccagtgaaggaaactgaggtgacagcctctgatgcagattcaggactctatggctttattgaatattctctttatgatggattcctgagctatgaagcacctcaggcattccggatcgaccctcatgatgggcaaatctgtgtttctcaagatatcgacagggaaagggatccagctacctatgatctcctggtggaagctaaggatggggatgagcagagaatgacacatttagccctggtgaagggtgggctaagtgcccaagcctttgttcgtgtggacctggaggacgtgaatgataatcatcctgtgtttaacccatcaacctatgtgacgagcatcagtgatgagacccagccaggcaccgagatcatcaatgttcttgccactgaccaggactctgggatatatgggacagtggcttatgagcttattccaggaaacgtgtcgtccctttttaccattgactccaccacaggactctatagtccagaggtagaaattctgagtgctgtcaacttttcagcagacaaggaagtaatgaacagtttagagatgtttttacctctgctaaggcacttcaagaaggttgaaagagatgaggaagctgcagaaaaaaaatttgaagctagcagaggttggttcatgaggtttaagggaagacgccatctccattacctaaaagtgcaagatgaagcagcaagtgctgatggagaagctgcagcaaggtatgtagcaaatctagctaagattcttggtgaaggaattatttacttaacattacctcttagtcatttggaatctaccacactttcgttgatggtctctgctcaagacggtggtgggctcacagctgtcattaatgccgatgtcaccatacacattttccagacaactctggcacctgctgagtttgaaaggcctaagtacactttcttagtttatgaagatgtgcctgaagatagtcccattggaacagtgaaagcaagagagcccttgaactcctcagaaccaatcttttacaggatttcttctggtgatctcggcggaaagttctccattcacccgcggctgggcactattcgcacccggaagcccctggatcacgagacgcagcccgtggttgtgctcacggtgcaggcgcagctcggcagcgccccagcctgcagcagcaccgaggtcaacataacagtcatggatgtcaatgacaaccacccagcgttcctcaggacctcggatgagattagaatatcccagaccacgccccctggcacagccttgtacctcgcacgtgcggaagacagagacagtgggcggaacggactcatccggtactccatcgccagcccgcagccaggcgtctttgccatcgacagagccctgggggtgctgttcctcaacggcagcctgggcgcgggcgagcagcgggagctcacgctgactctcagggccgaggaccaaggcgtgcatcctcaggcagccctgctggtgctgacagtcgttatcgagaaacgcgaacacagcccatcctggactttcgaacatttggtctatcaagtggaagtcagtgagtctctctcaccgatgacacaaatgctgcaaacacaggcgcacccacttggcccccagcgtgcagcctcgcctcttaggtactcgctggaacccagcgtagactctgctatgtttggaatccgcccttacacgggctggatttatttgcggcgacagtttgactatgaatccacccaaacatataattttagagtgtttgcttggatccccgaggacggattcttgcaaaatgtgagcactacagtcattgttcgtgtctgggatgagaatgacaattcccccaccttcttgcatgatgtgttgtttttgaaagtcgaagagagccctgttccccaaggggtaataggcaaaattacagctattgacatggactctggaaagaatggacagctattatatttccttttgtctgatggaaaattcttcaagatgaatcctaatacaggtccagcaggcaccatctatgtcataacctgggcagatggtgctgctgcctttagtgggacagactttgcattcagttctgatgaacttcaagcctttgttctcaagtctctgttctgtgaattaggagaaggagagttaatcaattgggtggcactggatcgtgagcaccgggggcaccatgagatgactgtgctagtgacagaccgcggctccccaccacgaaacgccaccatggcggtttacgtctcagttactgacatcaatgataacaggcccttcttcccccagtgtctccctggaaaggagttacacgtgaaggttctggaaggtcaaccagtaaatatgttggttacaactgtgtttgcaaaggatcctgatgaaggaaataatgcagaagttacatactcagtatcttcagaagatagttctgatcactttaagattgacgccaacaatggtgaaataagaacaaccacaatactttcgtatgattatagaccttcctacagaatgagtgtcattgccactgaccagggagtgcctcctcttcaaggacaggcagttgttaatattcaggtgatcccactatccaaagggagagcaatcatgtctcagaatattagacatttaattataccagaaaatttgaagcccacaaaaataatgagcttgataaagtcatctgatcaccttcaacaacattataatggaaagttacattttagtattgttgcagatgataaggatggacactttgaaatagacagctcaaccggagacttgtttctttctaaggaacttgattatgagacgacatctcattatcttttcagagtgattactacagaccatagcaaaaacctttccctgagtagcacagtcttccttagtatcgatgtggaagatcagaatgaccattccccatctttccaggatgagctcattgtgatcagtgtagaggagaatgttcccataggaaccctggtgtatgtcttcaatgccaaagatgatgacggcagttttttgaacagtagaatacaatactacattgaatcccacaaccctggcacgaatccatttctcatccacccctcatttggcacactagtcactgtgtcccgtcttgacagagaaagcattccaactgtcatcctgacagtaacagcatctgatcaggctgtgaatgtgacagaccggcgactgagatcactgacagcacaaatagtgattttggatgtaaatgaccacaaccccacttttatttctttccccaatgcccatgtcaaagaggatgtcacagtgggctccttggtccaccacataactgctcacgatccagacgaaggaaggaatggaaaagtaacatacagcatcctctcaggaaatgaaaacatgacgtttatgctagatgagtcatcaggcttactaaccacaacctgtcctttggattatgaaatgaaaactcagcatattctgactgttctggcactggatgatggcacaccagcactttcttcatcccagactttgacagttactgttcttgatgtaaatgatgaagctccagtatttaagcagcacctgtatgaagcctcagtgaaagaaaaccaaaatccaggggagtttgttaccagggttgaagctctggacagagattcaggagtcaattccaagcttcagtttgaaatcatgccaggtgcttcatttgaattattcgagataaattctgacactggagaggtagtgacaaccaccatacttgacagagaaattcaagaagtcttcacccttcgagtactagtacgagatgggggattcccttcattgtccagcaccacaacaatcctctgcactgttgaagatgaaaacgatcacgcaccagagtttattgtttccagttatgacattgaggttctggaaaaccaggaaccagaggttgtctatacggttttagcctctgatatggatgctggcaataacagagctgttgaatatcacataattgatggaaatactgatgagtgctttactataaatgagatgtcaggagaactctcaaccactcgtgctttggaccgggagcaaatcagcaattttacccttgtcattctgtgctctgacctgggagatccacctaggagctctgtaatacacctgcaagttagagttttggatgccaatgaccacagtccttcttttcccacactttattaccagtcctctgtgagagaagatgctgaagtgggaacagtggttcttgtgctttcagctgtggacaaggatgaaggcctgaatgggcaaactgagtattttctgactgatgaggcttctggtgcattcaccattgatcctatgtcaggcacattgaaaaccagcaacaccctcgaccgtgaagccagatctcagcatacatttagtgctgtggccagagactgtagcatccagggttcacgaagcaccactgtaattataaaagtatatgtcactgatgttaatgacaatgatccagttttggaacagaacccttttgatgtgtttctttcccccgagtcgcctacaaaccagacaactgtcattgtgagagctgatgacctggacttggggcccaatggaactgtggtttttagttttgcagagacccagtcaatgttttctattgataaatacacaggagaaattcaatttcagcaaaatccatcttcagaatacttccctatctggctgcagttaaaagttacagaccagggcattccagccaggacaaccacgggtctcttggtcattcacatggaaggagaagatgtaaagatttccttcagccaccacctgtataaagggctcgtgactgaaaattgtgaggcaggtacttctattgtgactgttaaagcttttgctcctgactcaattcaggacagcatgaaatattcaatttttagtggaaatgaagatggagttctttccctgtgctctaagtcaggacaactcactgtgaaagaacccaagtttcttgattttgaagtcagaaatgaggttcaactcatcgttttagctgaaagtagtgggcatagagcctattgcaaagtagcagtcttgatacaggatgagaatgataattcaccatgctttgaacaaagcatttaccaggcatcagtgtctgaaagccaactctacaatgctcatgtcatacaggtttttgctaccgacttggacagtggtttgaacggcctgattgagtattctattctgtctggcaaccaagaagaagcattccagattgatgcactgagtggtgtgataacaacaaaagcgattctagattacgagctcaccagctcctacagcttgattgtccaagccacagataaagggatgcccaggctttctaatacgactgtaatcaaggtacaggtgactgatataaatgacaatgccccagcttttctcccctctgaagcagtggaaattacagaagattctttgcctggtgtaattgtgactcatgtgtcagttcatgatgtggatttgaattcagctttcatattcagttttgccaaagagagtaatcctggaaccaagtttgctattgatcagaacactggagtggtggtgttggtgaaaacattggattttgaagaaatgactgaatatgagctgctcatccaaatttctgattcagtgcactacacagagggagcacttgtagtccgtgtgctggatgtcaatgataatccaccagtgttttctcaagatttctatcaggtcacagttcctgaatcaatacctgtggggtattcagtgctgactctgtcagccacagacttagaaagcaatgagaacatttcttacagaattctatcctcttctaaggaattctccattgatcctaagaatggcacaatatttactatcagtcccgtattacttctggatacaatatcaacaactcaatttcttgtggaagccagtgatggtggaaatcctgacctgagagctcttactttagtggagataggaatagaagatatgaacaattatgcccctgaattcacagtcaaatcctataatcttagcctaagtgaggatgctctggttggaagcacgcttgttacattttcaaacatcgaccatgactggacccgtgaaaacacatatgttgaatattccatcatcagtggtaattcacagaacaattttcatgtggaaactaagttctttcattcagaatatccttataagcaagtcggttatcttgtgttgcttcacagtctggacagagaagcaagtgctagccatgagcttgtcattctggcatctgacagtggctgccctccattgagttccacagctgtcatatcaatacaagtacttgatgtcaatgacaatcccccaaacttcagcagcctgagctatcacacccatgtcaaggaaagcacccctctagggagtcacatcactgtggtctcagcaaatgaccgtgacacagggtcacatgcagaaatcatctacaacatcatctctggaaatgagaagggacatttttacttagaagaaaacactggagttctttatttgattaaacctctggattatgaaaaaatgacaaaattcaccttaactgtccaagcttcagatgcagaaaagaaacatttttcttttgcagttgtgtttgtcagtgtcctggatgataacgaccatgcacctcagtttatgttctcaagcttcagctgtattgttccagaaaatctgcctatttcctctaccatatgctctataaatgctctggattttgatgctggtccgtatggagaattgacctattctattgtatcaccctgttttctcactcatggaatgtcttatgatcatgatctcttcctcattgaccctttgacaggggatattcatgctaagcaaatccttgactatgaaaatggcaataaatactgcctcacagtccaagccaaagacaaaggtgatgcaactgcctccttagtggtctgggtggatattgaagggatagatgaatttgagcccattttcactcaagatcagtattttttcaccctcccagaaaagaataaagacagacagttgattggcagagtggaagcctcagatgcagatgctggtattgatggagtcattctttactcccttggaacctcatctcctttcttttcagtaaataaaaccaatggaaatatttatttgattagagcccttcccctaataaaaagtcaactcaacaaagaagacaccttggaaatgaaaataatcgctcatagtcccaaatcagattccaagtttgcatcttgcactgtttttgtgaatgtgtctttctcctctgaaggaacacccttggcagtgttcgccagcagcttttcaatcagcctggtggtctcctttttagtgtttctgatactcatctgcattctaattgtaatgattttaagacataaacaaaaagacacaataaacaattatgaggagaagaaaacctcatctttagatgcggacttgagagtgacccgggatgccagtgtgctcaaagccttccagaaaactgacgactgcagtaacgaggtggtccctgtggatgccactccggaatggttgagtttaataagtatcatggagaaggatattgtcaatctgtacagacactcaaactccagtggccactgttctgtggaaggagaaactgcagaagataaggaaatccagaggataaatgagcatccctacagaaagtgctcagactcagctctgagtgaccacgagtccagggtgccagactcgggtatcccgagggactcagaccagctctcctgcctatctggggaaactgatgtgatggtgactgccgaaacagcagaagccagccaaacatttggggaaggagatcaaggggaaggctgcagcaccacctgtgctcaaaataatgtgttaccccagacagttcagaagagagaggcaaaagagagcatcctggctgacgttagaaaagagtctgtctttatttcaggtgatcaggaagtaaggtgtgcagctctttcaactcagacgacctctgatcatgatggaaaagacaactatcactggaattatcttcttagttgggagcccaaattccaacctcttgcctcagtatttaatgatattgcaaaactaaaggatgaacatttgcatatgcctggcattccaaaagagaagaaatcttttgtttttccaccccctttgataacagcagtagcccagcctgggattaaagcagtcccaccaagaatgccggcagtaaacctggggcaggtgcctccgaaacacccacgctctcccatcccctaccatcttggttctctgccagaaggcatgactcccaatttttctccatctctttccctattgacgatgcagcctcctgccttgtctccactgttgagagaaggagaattattaggaacacacatcagtggtacatgccatgaacttaaagcagaagatgaagttcaaatatgaaaccactgggatgccaagtacctgctcaccattggtcatgaatgaatgaacaaaatgttttcaagccagcaactcgagattgggctcatttttatctaaaagcaagtgatgtaatttagttagagtttttaaaacttccccattaaagtttctccaatttc

SEQ ID NO: 194226 - DNA, 8751 bp, Artificial Sequence
  derived and/or modified sequence
atgagactggacgagatcaccaagagcgagaacgaggacggcgagaagaagatgttcacccagcagttcgagagcaccgacgcctgcgtgtacgaggtgtacgtgaagatcaacagcatcgtgaagagccagagccagtgcggcctgaagagaggcagccccgagaccgagctgtggggcgccatcgtgttcagaagccaggaggagaacgccaagcccgtgaaggagaccgaggtgaccgccagcgacgccgacagcggcctgtacggcttcatcgagtacagcctgtacgacggcttcctgagctacgaggccccccaggccttcagaatcgacccccacgacggccagatctgcgtgagccaggacatcgacagagagagagaccccgccacctacgacctgctggtggaggccaaggacggcgacgagcagagaatgacccacctggccctggtgaagggcggcctgagcgcccaggccttcgtgagagtggacctggaggacgtgaacgacaaccaccccgtgttcaaccccagcacctacgtgaccagcatcagcgacgagacccagcccggcaccgagatcatcaacgtgctggccaccgaccaggacagcggcatctacggcaccgtggcctacgagctgatccccggcaacgtgagcagcctgttcaccatcgacagcaccaccggcctgtacagccccgaggtggagatcctgagcgccgtgaacttcagcgccgacaaggaggtgatgaacagcctggagatgttcctgcccctgctgagacacttcaagaaggtggagagagacgaggaggccgccgagaagaagttcgaggccagcagaggctggttcatgagattcaagggcagaagacacctgcactacctgaaggtgcaggacgaggccgccagcgccgacggcgaggccgccgccagatacgtggccaacctggccaagatcctgggcgagggcatcatctacctgaccctgcccctgagccacctggagagcaccaccctgagcctgatggtgagcgcccaggacggcggcggcctgaccgccgtgatcaacgccgacgtgaccatccacatcttccagaccaccctggcccccgccgagttcgagagacccaagtacaccttcctggtgtacgaggacgtgcccgaggacagccccatcggcaccgtgaaggccagagagcccctgaacagcagcgagcccatcttctacagaatcagcagcggcgacctgggcggcaagttcagcatccaccccagactgggcaccatcagaaccagaaagcccctggaccacgagacccagcccgtggtggtgctgaccgtgcaggcccagctgggcagcgcccccgcctgcagcagcaccgaggtgaacatcaccgtgatggacgtgaacgacaaccaccccgccttcctgagaaccagcgacgagatcagaatcagccagaccaccccccccggcaccgccctgtacctggccagagccgaggacagagacagcggcagaaacggcctgatcagatacagcatcgccagcccccagcccggcgtgttcgccatcgacagagccctgggcgtgctgttcctgaacggcagcctgggcgccggcgagcagagagagctgaccctgaccctgagagccgaggaccagggcgtgcacccccaggccgccctgctggtgctgaccgtggtgatcgagaagagagagcacagccccagctggaccttcgagcacctggtgtaccaggtggaggtgagcgagagcctgagccccatgacccagatgctgcagacccaggcccaccccctgggcccccagagagccgccagccccctgagatacagcctggagcccagcgtggacagcgccatgttcggcatcagaccctacaccggctggatctacctgagaagacagttcgactacgagagcacccagacctacaacttcagagtgttcgcctggatccccgaggacggcttcctgcagaacgtgagcaccaccgtgatcgtgagagtgtgggacgagaacgacaacagccccaccttcctgcacgacgtgctgttcctgaaggtggaggagagccccgtgccccagggcgtgatcggcaagatcaccgccatcgacatggacagcggcaagaacggccagctgctgtacttcctgctgagcgacggcaagttcttcaagatgaaccccaacaccggccccgccggcaccatctacgtgatcacctgggccgacggcgccgccgccttcagcggcaccgacttcgccttcagcagcgacgagctgcaggccttcgtgctgaagagcctgttctgcgagctgggcgagggcgagctgatcaactgggtggccctggacagagagcacagaggccaccacgagatgaccgtgctggtgaccgacagaggcagcccccccagaaacgccaccatggccgtgtacgtgagcgtgaccgacatcaacgacaacagacccttcttcccccagtgcctgcccggcaaggagctgcacgtgaaggtgctggagggccagcccgtgaacatgctggtgaccaccgtgttcgccaaggaccccgacgagggcaacaacgccgaggtgacctacagcgtgagcagcgaggacagcagcgaccacttcaagatcgacgccaacaacggcgagatcagaaccaccaccatcctgagctacgactacagacccagctacagaatgagcgtgatcgccaccgaccagggcgtgccccccctgcagggccaggccgtggtgaacatccaggtgatccccctgagcaagggcagagccatcatgagccagaacatcagacacctgatcatccccgagaacctgaagcccaccaagatcatgagcctgatcaagagcagcgaccacctgcagcagcactacaacggcaagctgcacttcagcatcgtggccgacgacaaggacggccacttcgagatcgacagcagcaccggcgacctgttcctgagcaaggagctggactacgagaccaccagccactacctgttcagagtgatcaccaccgaccacagcaagaacctgagcctgagcagcaccgtgttcctgagcatcgacgtggaggaccagaacgaccacagccccagcttccaggacgagctgatcgtgatcagcgtggaggagaacgtgcccatcggcaccctggtgtacgtgttcaacgccaaggacgacgacggcagcttcctgaacagcagaatccagtactacatcgagagccacaaccccggcaccaaccccttcctgatccaccccagcttcggcaccctggtgaccgtgagcagactggacagagagagcatccccaccgtgatcctgaccgtgaccgccagcgaccaggccgtgaacgtgaccgacagaagactgagaagcctgaccgcccagatcgtgatcctggacgtgaacgaccacaaccccaccttcatcagcttccccaacgcccacgtgaaggaggacgtgaccgtgggcagcctggtgcaccacatcaccgcccacgaccccgacgagggcagaaacggcaaggtgacctacagcatcctgagcggcaacgagaacatgaccttcatgctggacgagagcagcggcctgctgaccaccacctgccccctggactacgagatgaagacccagcacatcctgaccgtgctggccctggacgacggcacccccgccctgagcagcagccagaccctgaccgtgaccgtgctggacgtgaacgacgaggcccccgtgttcaagcagcacctgtacgaggccagcgtgaaggagaaccagaaccccggcgagttcgtgaccagagtggaggccctggacagagacagcggcgtgaacagcaagctgcagttcgagatcatgcccggcgccagcttcgagctgttcgagatcaacagcgacaccggcgaggtggtgaccaccaccatcctggacagagagatccaggaggtgttcaccctgagagtgctggtgagagacggcggcttccccagcctgagcagcaccaccaccatcctgtgcaccgtggaggacgagaacgaccacgcccccgagttcatcgtgagcagctacgacatcgaggtgctggagaaccaggagcccgaggtggtgtacaccgtgctggccagcgacatggacgccggcaacaacagagccgtggagtaccacatcatcgacggcaacaccgacgagtgcttcaccatcaacgagatgagcggcgagctgagcaccaccagagccctggacagagagcagatcagcaacttcaccctggtgatcctgtgcagcgacctgggcgacccccccagaagcagcgtgatccacctgcaggtgagagtgctggacgccaacgaccacagccccagcttccccaccctgtactaccagagcagcgtgagagaggacgccgaggtgggcaccgtggtgctggtgctgagcgccgtggacaaggacgagggcctgaacggccagaccgagtacttcctgaccgacgaggccagcggcgccttcaccatcgaccccatgagcggcaccctgaagaccagcaacaccctggacagagaggccagaagccagcacaccttcagcgccgtggccagagactgcagcatccagggcagcagaagcaccaccgtgatcatcaaggtgtacgtgaccgacgtgaacgacaacgaccccgtgctggagcagaaccccttcgacgtgttcctgagccccgagagccccaccaaccagaccaccgtgatcgtgagagccgacgacctggacctgggccccaacggcaccgtggtgttcagcttcgccgagacccagagcatgttcagcatcgacaagtacaccggcgagatccagttccagcagaaccccagcagcgagtacttccccatctggctgcagctgaaggtgaccgaccagggcatccccgccagaaccaccaccggcctgctggtgatccacatggagggcgaggacgtgaagatcagcttcagccaccacctgtacaagggcctggtgaccgagaactgcgaggccggcaccagcatcgtgaccgtgaaggccttcgcccccgacagcatccaggacagcatgaagtacagcatcttcagcggcaacgaggacggcgtgctgagcctgtgcagcaagagcggccagctgaccgtgaaggagcccaagttcctggacttcgaggtgagaaacgaggtgcagctgatcgtgctggccgagagcagcggccacagagcctactgcaaggtggccgtgctgatccaggacgagaacgacaacagcccctgcttcgagcagagcatctaccaggccagcgtgagcgagagccagctgtacaacgcccacgtgatccaggtgttcgccaccgacctggacagcggcctgaacggcctgatcgagtacagcatcctgagcggcaaccaggaggaggccttccagatcgacgccctgagcggcgtgatcaccaccaaggccatcctggactacgagctgaccagcagctacagcctgatcgtgcaggccaccgacaagggcatgcccagactgagcaacaccaccgtgatcaaggtgcaggtgaccgacatcaacgacaacgcccccgccttcctgcccagcgaggccgtggagatcaccgaggacagcctgcccggcgtgatcgtgacccacgtgagcgtgcacgacgtggacctgaacagcgccttcatcttcagcttcgccaaggagagcaaccccggcaccaagttcgccatcgaccagaacaccggcgtggtggtgctggtgaagaccctggacttcgaggagatgaccgagtacgagctgctgatccagatcagcgacagcgtgcactacaccgagggcgccctggtggtgagagtgctggacgtgaacgacaacccccccgtgttcagccaggacttctaccaggtgaccgtgcccgagagcatccccgtgggctacagcgtgctgaccctgagcgccaccgacctggagagcaacgagaacatcagctacagaatcctgagcagcagcaaggagttcagcatcgaccccaagaacggcaccatcttcaccatcagccccgtgctgctgctggacaccatcagcaccacccagttcctggtggaggccagcgacggcggcaaccccgacctgagagccctgaccctggtggagatcggcatcgaggacatgaacaactacgcccccgagttcaccgtgaagagctacaacctgagcctgagcgaggacgccctggtgggcagcaccctggtgaccttcagcaacatcgaccacgactggaccagagagaacacctacgtggagtacagcatcatcagcggcaacagccagaacaacttccacgtggagaccaagttcttccacagcgagtacccctacaagcaggtgggctacctggtgctgctgcacagcctggacagagaggccagcgccagccacgagctggtgatcctggccagcgacagcggctgcccccccctgagcagcaccgccgtgatcagcatccaggtgctggacgtgaacgacaacccccccaacttcagcagcctgagctaccacacccacgtgaaggagagcacccccctgggcagccacatcaccgtggtgagcgccaacgacagagacaccggcagccacgccgagatcatctacaacatcatcagcggcaacgagaagggccacttctacctggaggagaacaccggcgtgctgtacctgatcaagcccctggactacgagaagatgaccaagttcaccctgaccgtgcaggccagcgacgccgagaagaagcacttcagcttcgccgtggtgttcgtgagcgtgctggacgacaacgaccacgccccccagttcatgttcagcagcttcagctgcatcgtgcccgagaacctgcccatcagcagcaccatctgcagcatcaacgccctggacttcgacgccggcccctacggcgagctgacctacagcatcgtgagcccctgcttcctgacccacggcatgagctacgaccacgacctgttcctgatcgaccccctgaccggcgacatccacgccaagcagatcctggactacgagaacggcaacaagtactgcctgaccgtgcaggccaaggacaagggcgacgccaccgccagcctggtggtgtgggtggacatcgagggcatcgacgagttcgagcccatcttcacccaggaccagtacttcttcaccctgcccgagaagaacaaggacagacagctgatcggcagagtggaggccagcgacgccgacgccggcatcgacggcgtgatcctgtacagcctgggcaccagcagccccttcttcagcgtgaacaagaccaacggcaacatctacctgatcagagccctgcccctgatcaagagccagctgaacaaggaggacaccctggagatgaagatcatcgcccacagccccaagagcgacagcaagttcgccagctgcaccgtgttcgtgaacgtgagcttcagcagcgagggcacccccctggccgtgttcgccagcagcttcagcatcagcctggtggtgagcttcctggtgttcctgatcctgatctgcatcctgatcgtgatgatcctgagacacaagcagaaggacaccatcaacaactacgaggagaagaagaccagcagcctggacgccgacctgagagtgaccagagacgccagcgtgctgaaggccttccagaagaccgacgactgcagcaacgaggtggtgcccgtggacgccacccccgagtggctgagcctgatcagcatcatggagaaggacatcgtgaacctgtacagacacagcaacagcagcggccactgcagcgtggagggcgagaccgccgaggacaaggagatccagagaatcaacgagcacccctacagaaagtgcagcgacagcgccctgagcgaccacgagagcagagtgcccgacagcggcatccccagagacagcgaccagctgagctgcctgagcggcgagaccgacgtgatggtgaccgccgagaccgccgaggccagccagaccttcggcgagggcgaccagggcgagggctgcagcaccacctgcgcccagaacaacgtgctgccccagaccgtgcagaagagagaggccaaggagagcatcctggccgacgtgagaaaggagagcgtgttcatcagcggcgaccaggaggtgagatgcgccgccctgagcacccagaccaccagcgaccacgacggcaaggacaactaccactggaactacctgctgagctgggagcccaagttccagcccctggccagcgtgttcaacgacatcgccaagctgaaggacgagcacctgcacatgcccggcatccccaaggagaagaagagcttcgtgttccccccccccctgatcaccgccgtggcccagcccggcatcaaggccgtgccccccagaatgcccgccgtgaacctgggccaggtgccccccaagcaccccagaagccccatcccctaccacctgggcagcctgcccgagggcatgacccccaacttcagccccagcctgagcctgctgaccatgcagccccccgccctgagccccctgctgagagagggcgagctgctgggcacccacatcagcggcacctgccacgagctgaaggccgaggacgaggtgcagatctag

SEQ ID NO: 194227 - protein, 1371 aa, Artificial Sequence
  derived and/or modified sequence
MTEESSDVPRELIESIKDVIGRKIKISVKKKVKLEVKGDKVENKVLVLTSCRAFLVTARIPTKLELTFSYLEIHGVVCSKSAQMIVETEKCSISMKMASPEDVSEVLAHIGTCLRKIFPGLSPVRIMKKVSMEPSERLASLQALWDSQTVAEQGPCGGFSQMYACVCDWLGFSYREEVQWDVDTIYLTQDTRELNLQDFSHLDHRDLIPIIAALEYNQWFTKLSSKDLKLSTDVCEQILRVVSRSNRLEELVLENAGLRTDFAQKLASALAHNPNSGLHTINLAGNPLEDRGVSSLSIQFAKLPKGLKHLNLSKTSLSPKGVNSLSQSLSANPLTASTLVHLDLSGNVLRGDDLSHMYNFLAQPNAIVHLDLSNTECSLDMVCGALLRGCLQYLAVLNLSRTVFSHRKGKEVPPSFKQFFSSSLALMHINLSGTKLSPEPLKALLLGLACNHNLKGVSLDLSNCELRSGGAQVLEGCIAEIHNITSLDISDNGLESDLSTLIVWLSKNRSIQHLALGKNFNNMKSKNLTPVLDNLVQMIQDEESPLQSLSLADSKLKTEVTIIINALGSNTSLTKVDISGNGMGDMGAKMLAKALQINTKLRTVIWDKNNITAQGFQDIAVAMEKNYTLRFMPIPMYDASQALKTNPEKTEDALQKIENYLLRNHETRKYLQEQAYRLQQGIVTSTTQQMIDRICVKVQDHLNSLRNCGGDAIQEDLKSAERLMRDAKNSKTLLPNLYHVGGASWAGASGLLSSPIQETLESMAGEVTRVVDEQLKALLESMVDAAENLCPNVMKKAHIRQDLIHASTEKISIPRTFVKNVLLEQSGIDILNKISEVKLTVASFLSDRIVDEILDALSHCHHKLADHFSRRGKTLPQQESLEIELAEEKPVKRSIITVEELTEIERLEDLDTCMMTPKSKRKSIHSRMLRPVSRAFEMEFDLDKALEEVPIHIEDPPFPSLRQEKRSSGFISELPSEEGKKLEHFTKLRPKRNKKQQPTQAAVCAANIVSQDGEQNGLMGRVDEGVDEFFTKKVTKMDSKKWSTRGSESHELNEGGDEKKKRDSRKSSGFLNLIKSRSKSERPPTILMTEEPSSPKGAVRSPPVDCPRKDTKAAEHNGNSERIEEIKTPDSFEESQGEEIGKVERSDSKSSPQAGRRYGVQVMGSGLLAEMKAKQEKRAACAQKKLGNDAVSQDSSSPALSGVERSDGGGAVPKLHPGLPENRFGLGTPEKNTKAEPKAEAGSRSRSSSSTPTSPKPLLQSPKPSLAARPVIPQKPRTASRPDDIPDSPSSPKVALLPPVLKKVPSDKERDGQSSPQPSPRTFSQEVSRRSWGQQAQEYQEQKQRSSSKDGHQGSKSNDSGEEAEKEFIFV

SEQ ID NO: 194228 - DNA, 4116 bp, Artificial Sequence
  derived and/or modified sequence
atgaccgaggagagtagtgacgtgccccgggaactcatcgaatcaatcaaggatgtgattgggcgcaaaataaagatctcagttaagaagaaggttaaactggaggtgaagggagataaggtcgagaataaggtcctggtcctgacttcctgtcgcgcctttctagtgactgccaggatcccaacgaagctcgagttgacttttagttatttggaaatccacggagtggtctgtagtaagtccgcacagatgatcgtcgagaccgaaaagtgttctatatctatgaaaatggctagccctgaggatgtgtccgaagttttggcacacatcggaacctgcctcagaaagattttccccggtctatctcccgtgaggattatgaaaaaagtgtctatggaacccagcgagaggctagcctccctgcaggccctgtgggacagccaaacagtagccgagcaggggccatgtggtgggtttagccagatgtacgcctgtgtttgcgattggctcggttttagctaccgggaagaggttcagtgggatgtggacaccatctacctcacacaagacacccgagagctcaacttgcaagatttctcccatttggatcaccgcgatctgatccccatcattgctgcactggagtacaaccagtggtttaccaagctgtcaagcaaagatctgaaactgagcaccgatgtttgtgagcaaatactgcgcgtggttagcagaagtaatcggctcgaagagctagtcctcgagaatgccggcttgcgaactgatttcgcccaaaagctcgcgtcagcattagcgcacaatcccaacagcgggctccatacaataaacctggccggaaacccattagaggatcggggcgtgtcatcactgtccatacaatttgccaaactcccaaagggcctgaagcatcttaatctgagcaagacatctctctccccaaagggcgtgaatagtctgtctcaatctctctcggcaaatccactgactgctagcacccttgttcatctggacctgtcgggcaatgtcttgagaggagatgatctttcacacatgtataacttcttggcacagcctaatgcaattgttcatctcgacctatccaatacagagtgctccctcgacatggtgtgcggagcactcctcagaggctgtctgcagtacctggctgtgctcaacttgagcaggaccgtcttttctcaccgcaaaggcaaggaggtccccccatcctttaagcagtttttcagctcctcactggcacttatgcacattaacctgagtggcacaaaacttagtccagagccacttaaggcgctactgctgggactcgcctgcaaccacaacttgaaaggtgtgtcactggatctctcaaactgcgaactacgttctgggggtgcccaggtcttagagggatgcattgcagagatccacaatataaccagccttgatatcagtgacaatgggctggagagcgatctttcaacactgatcgtctggctgagtaagaatcggtcgatccagcatctggctctcggaaaaaatttcaacaatatgaaaagtaagaacctgacccctgttctggacaacctggtacaaatgattcaggacgaggagtcccctctgcagtctctttctttggctgatagtaaattaaagacagaagtgaccatcatcatcaacgccctgggctccaacacttccctgactaaggttgatatctctggcaacggaatgggggatatgggcgccaaaatgctggcaaaggctctccagatcaatactaagcttaggactgtgatttgggataagaacaacatcacagcccaggggttccaggatatcgctgtcgcaatggagaaaaattacaccctgaggtttatgccaattcccatgtatgatgcaagccaagccttgaagaccaatcccgaaaagactgaggatgctctgcagaagatcgagaattatctgttgcgaaaccatgagactcgcaaatacctgcaggagcaggcctacaggcttcagcagggcattgtgacttccacaactcagcagatgatcgacagaatctgtgttaaagtgcaagatcacctcaatagtcttcggaattgcggcggcgatgcaatccaggaggatctaaagtcagcagagcggctgatgcgggatgctaaaaactctaagactctcctgcccaacctctaccacgtcggtggggcctcttgggccggcgccagtggtctgctgtccagcccaatccaggagaccttggaatctatggcgggtgaggtaacaagagtcgttgacgaacaactcaaggctctgttggagtctatggttgacgcagctgaaaatctttgccctaacgtgatgaagaaggctcacattcggcaggacctgatacatgcaagtaccgagaaaatctccattcctcgtaccttcgtcaaaaatgttcttctggagcagtccggcatcgacattcttaacaagatatctgaagtcaaacttactgttgcgtcttttctgtccgaccggatcgtggacgagatcctcgatgctctctctcattgccatcataaactggctgaccacttctcccggcgcggaaaaacactcccacagcaagagagtctggagatagagctggctgaggaaaagcccgtgaagaggtctattatcacagtagaggaactgaccgagatcgaacgtctggaagatctggacacatgcatgatgacgccgaaatccaagcgcaagagcatccatagcaggatgctgaggcctgtgtcaagagccttcgagatggaattcgatttagacaaagccctagaagaagtacctatccatattgaagacccaccctttccctctttgcggcaggaaaagagatccagcggtttcatctctgagctccccagcgaggaaggtaaaaagttggagcacttcacaaagttgagaccgaagcggaacaagaagcaacagcccacccaggcagcggtgtgtgctgcgaacatcgtctcacaagacggcgagcagaacgggcttatgggccgggttgacgaaggagttgatgagttctttactaagaaggtcactaaaatggattctaagaaatggagcacaaggggttccgaatcccatgagcttaatgaaggtggagatgagaaaaagaagcgggattcaaggaaatcaagcggatttctgaacctcatcaagagcagaagcaagtcggagaggccgccaactattcttatgactgaagagccatcttcacccaagggcgcagtaaggtcgcctcctgtcgattgtccaaggaaagatactaaggcagccgagcacaatgggaactcagagcggatcgaggagattaaaacaccggattctttcgaagagtctcagggggaagaaatcggcaaagtcgagcgcagtgacagtaagagctctcctcaggcgggccgccgatacggggtccaagtgatgggcagcggtcttttagcggaaatgaaggccaagcaggaaaaacgcgccgcgtgtgcacagaaaaaactcggcaacgacgcagtgagccaggatagttccagtcccgcattatctggagtcgaacgaagcgacgggggtggcgcagtgccaaaactgcacccagggctgccagagaatagatttggtctcggaacaccagagaagaacaccaaagcggagccaaaggcagaagctggatcacggtcaaggagtagctccagcaccccaaccagtcctaagccactattgcaaagccccaaaccctcgttggctgcccgaccagtaatccctcaaaagccacggactgcgagcagacccgatgatatcccagactctccgtcatcgcccaaagtcgccctgctgcctcccgtgctgaagaaagtgccatctgacaaggaaagagatgggcaatccagcccccagccttcccccagaaccttcagccaggaagtgagccggcgcagctgggggcagcaggctcaggaataccaagaacaaaaacaacgtagctcatccaaagacggacaccagggcagcaagtccaacgattctggggaggaggcagaaaaagagttcatttttgtatag

SEQ ID NO: 194229 - DNA, 4116 bp, Artificial Sequence
  derived and/or modified sequence
atgacagaggagagcagtgatgtgccccgggagctgattgagagcatcaaggatgtgattggaaggaagatcaagatctctgtgaagaagaaggtgaagctggaggtgaagggggacaaggtggagaacaaggtgctggtgctgaccagctgccgggccttcctggtgacagcccgcatccccaccaagctggagctgaccttctcctacctggagatccacggcgtggtgtgcagcaagagcgcccagatgattgtggagacagagaagtgcagcatctccatgaagatggccagcccagaagatgtgtctgaggtgctggcccacatcggcacctgcctgaggaagatcttccctggcctgagccctgtgcgcatcatgaagaaggtgtccatggagcccagcgagcggctggccagcctgcaggccctgtgggacagccagacagtggccgagcagggcccctgtggcggcttcagccagatgtatgcctgtgtgtgtgactggctgggcttctcctaccgggaggaggtgcagtgggatgtggacaccatctacctgacccaggacacccgggagctgaacctgcaggacttcagccacctggaccaccgggacctgatccccatcatcgccgccctggagtacaaccagtggttcaccaagctgagcagcaaggacctgaagctgagcacagatgtgtgtgagcagatcctgcgggtggtgagccgcagcaaccggctggaggagctggtgctggagaatgccggcctgaggacagactttgcccagaagctggccagcgccctggcccacaaccccaacagcggcctgcacaccatcaacctggccggcaaccccctggaggaccggggcgtgagcagcctgagcatccagtttgccaagctgcccaagggcctgaagcacctgaacctgagcaagaccagcctgagccccaagggcgtgaacagcctgagccagagcctgagcgccaaccccctgacagccagcaccctggtgcacctggacctgtctggaaatgtgctgcggggagatgacctgagccacatgtacaacttcctggcccagcccaatgccatcgtgcacctggacctgagcaacacagagtgcagcctggacatggtgtgtggggccctgctgcggggctgcctgcagtacctggccgtgctgaacctgagcaggacagtgttcagccacaggaagggcaaggaggtgcccccatccttcaagcagttcttcagcagcagcctggccctgatgcacatcaacctgagcggcaccaagctgagccctgagcccctgaaggccctgctgctgggcctggcctgcaaccacaacctgaagggcgtgtccctggacctgagcaactgtgagctgcggagcggcggggcccaggtgctggagggctgcatcgccgagatccacaacatcaccagcctggacatcagtgacaatggcctggagagtgacctgagcaccctcatcgtgtggctgagcaagaacagaagcatccagcacctggccctgggcaagaacttcaacaacatgaagagcaagaacctgacccctgtgctggacaacctggtgcagatgatccaggatgaggagagccccctgcagagcctgagcctggccgacagcaagctgaagacagaggtgaccatcatcatcaatgccctgggcagcaacaccagcctgaccaaggtggacatctctggaaatggcatgggagacatgggcgccaagatgctggccaaggccctgcagatcaacaccaagctgaggacagtcatctgggacaagaacaacatcacagcccagggcttccaggacattgctgtggccatggagaagaactacaccctgcgcttcatgcccatccccatgtatgatgccagccaggccctgaagaccaaccctgagaagacagaagatgccctgcagaagattgagaactacctgctgagaaatcatgagaccaggaagtacctgcaggagcaggcctaccgcctgcagcagggcatcgtgaccagcaccacccagcagatgattgaccgcatctgtgtgaaggtgcaggaccacctgaacagcctgaggaactgtggaggagatgccatccaggaggacctgaagtctgctgagcggctgatgagagatgccaagaacagcaagaccctgctgcccaacctgtaccacgtgggcggggcctcctgggccggggccagcggcctgctgagcagccccatccaggagaccctggagagcatggccggggaggtgaccagggtggtggatgagcagctgaaggccctgctggagagcatggtggatgctgctgagaacctgtgccccaacgtgatgaagaaggcccacatccggcaggacctgattcatgccagcacagagaagatcagcatccccaggacctttgtgaagaatgtgctgctggagcagagcggcatcgacatcctgaacaagatcagcgaggtgaagctgactgtggccagcttcctgagtgacagaattgtggatgagatcctggatgccctgagccactgccaccacaagctggccgaccacttcagccggcggggcaagaccctgccccagcaggagagcctggagattgagctggccgaggagaagcctgtgaagaggagcatcatcaccgtggaggagctgacagaaattgaaaggctggaggacctggacacctgcatgatgacccccaagagcaagaggaagagcatccacagcaggatgctgcggcctgtgtcccgggcctttgagatggagtttgacctggacaaggccctggaggaggtgcccatccacatcgaggacccccccttccccagcctgcggcaggagaagaggagcagcggcttcatcagcgagctgcccagcgaggagggcaagaagctggagcacttcaccaagctgcggcccaagaggaacaagaagcagcagcccacccaggccgctgtgtgtgccgccaacatcgtgtcccaggatggagagcagaatggcctgatgggccgggtggatgaaggagtggatgagttcttcaccaagaaggtgaccaagatggacagcaagaagtggagcacccggggcagcgagagccatgagctgaatgaaggaggagatgagaagaagaagagggacagcaggaagagcagcggcttcctgaacctgatcaagagccgcagcaagtctgagaggcctcccaccatcctgatgacagaggagcccagcagccccaagggagctgtgcgcagcccccctgtggactgccccaggaaggacaccaaggctgctgagcacaatggaaacagcgagagaattgaggagatcaagaccccagacagctttgaggagagccagggcgaggagatcggcaaggtggagaggagtgacagcaagagcagcccccaggccggccgccgctatggagtgcaggtgatgggcagcggcctgctggccgagatgaaggccaagcaggagaagagagctgcctgtgcccagaagaagctgggcaatgatgctgtgtcccaggacagcagcagccctgccctgtctggagtggagaggagtgatggcggcggcgctgtgcccaagctgcaccctggcctgcctgaaaatcgcttcggcctgggcaccccagagaagaacaccaaggccgagcccaaggccgaggccggcagccgcagccgcagcagcagcagcacccccaccagccccaagcccctgctgcagagccccaagcccagcctggccgcccggcctgtgatcccccagaagcccaggacagccagcaggccagatgacatcccagacagccccagcagccccaaggtggccctgctgccccctgtgctgaagaaggtgcccagcgacaaggagagagatggccagagcagcccccagcccagccccaggaccttcagccaggaggtgtccagaagatcctggggccagcaggcccaggagtaccaggagcagaagcagaggagcagcagcaaggatggccaccagggcagcaagagcaatgacagcggggaggaggccgagaaggagttcatctttgtgtag

SEQ ID NO: 194230 - DNA, 5431 bp, Artificial Sequence
  derived and/or modified sequence
tgggcgggagctacgccggcccaagccccgccggggaccagcgagccgggaggaggagcaggcgccacagccgccccgcgccccgcgcccgcttgtaatccggtccgctccttattcagccgccgggaactgcgaggaggcgtcatgtagcagcagcagcaaatccgcctcgcatttgcaactcttttttttttttttggtggggcggggggcgcgcggcaaaattctgtctccgcccccccttttcttgcccacttccatttgcaagctgcatctgcctctctaaaaaaattgaggagttcggggaagggcagggggccataaatcagagttggacctgcaataacccccacacctacagggcaaccatgaccgaggagagctctgacgttcccagggagttgatagaaagcataaaggatgttattggcagaaagataaaaatttcagtgaagaagaaagtaaagttggaagttaagggagacaaagttgaaaacaaagtgctggtccttacatcatgccgagccttccttgtaacagcgcgaatccccaccaagctcgagttaaccttcagctacttggagattcatggcgtcgtttgcagcaagtcagctcagatgattgtggaaactgagaagtgcagcatttccatgaagatggcgtcacccgaggacgtgagtgaggtgctggctcacataggcacctgcctgaggaagatatttcctggcctctctccagtgagaatcatgaaaaaagtctccatggagccatctgagcgcctggctagtctccaggcgctgtgggacagccagaccgtggctgagcagggcccctgtggtggattttctcagatgtatgcctgtgtttgtgactggcttggattttcatacagggaagaagtacaatgggatgtggatacaatttatcttacccaagacaccagggaattgaatttacaagattttagtcatcttgaccacagggacctaatacctatcattgctgctctggaatataatcagtggttcacaaaactgtcctctaaggatctaaaactgtccactgatgtctgtgaacagatcttgagggtggtgagtaggtccaatcgactggaagaattggtgttggaaaatgctggacttagaacagattttgcacaaaaactggccagtgctctagcacataatcccaactcaggactccacacaattaaccttgctggcaacccactggaggatagaggtgtgtcctctttaagtattcaatttgccaaactcccaaagggattaaagcacttaaatttatctaaaacctcattatcacctaaaggggtgaacagcctttctcagtcactcagtgccaatccattgaccgcctctacccttgtccacctcgacctctcagggaacgtccttcgtggagatgacctctcacacatgtataattttttggcccagccaaatgccattgttcatctggatttatccaatacagaatgttccctggacatggtctgtggagctcttctccgtggatgccttcaatatttagctgtgctcaacctctccagaactgtcttctctcaccggaaaggaaaagaagtacctccatctttcaagcaattttttagtagttctctggctttgatgcacatcaacctttcaggcacaaaactgtctcctgagcccttaaaagcactgttattgggcctggcttgtaatcataacttgaaaggggtttctctggatctcagcaactgtgagctgagatcaggaggtgctcaagtattagaaggttgcattgctgaaatacacaacatcaccagcttagacatctctgacaatggtttagaatctgacctatctaccttaatagtgtggctcagtaaaaacagatcaatacaacacctggcgttaggcaaaaattttaataatatgaaatccaaaaatctgacacctgtattggacaacttagtacagatgattcaagatgaagaatcacctctgcagtccttgtccctggctgactcgaaactcaagactgaggtcaccatcatcatcaatgccctgggaagcaacacctccctgaccaaagtggacattagcggcaacggaatgggggacatgggagcgaagatgctggccaaagcactgcagatcaacactaagctcaggactgtaatatgggacaagaacaacatcactgcacaaggctttcaggatatagctgttgctatggaaaagaactacacattaagatttatgccaattcctatgtatgatgcttctcaagccctaaaaacaaaccctgaaaaaacagaagacgctctgcaaaagatagaaaactacctgctacgaaatcacgagactagaaaataccttcaagagcaggcctaccgcctgcagcagggtattgtcaccagcaccacccagcagatgattgacagaatatgtgtgaaagtacaagatcatctcaactccttacgaaattgtgggggagacgctatccaggaagatttaaaatcagcagagcggctcatgcgtgatgctaagaactctaaaacgttgttaccaaatttataccatgttggtggtgcatcttgggcgggagccagtggcttactatccagtccaattcaggagaccctggaatcaatggctggagaagttacaagagtagtagatgaacaactaaaggcgttgcttgagtccatggttgatgctgctgagaatctttgtcccaatgtgatgaaaaaagcccacattcgacaagacttgattcatgccagcaccgaaaagatttctattccacgtacctttgttaaaaatgtcctgttggagcagtctggaattgatatccttaacaaaattagtgaagtaaaattgacagtggcctcgttcctgtctgatagaattgtggatgaaatcctggatgcactctcacattgccatcataaactggctgaccatttcagcagacgtggcaagacccttcctcaacaagaatccttagagatcgagctggctgaggagaagccagttaaacgttccatcatcacagtggaggagctaacagagatagagcgtttggaagatctggatacctgtatgatgacccctaaatccaaaaggaagagtatccatagccgaatgctgcggcctgtttctagggcttttgaaatggagtttgatctagataaagcgctggaagaggtaccaattcacatcgaagacccgcccttcccatccctcagacaggagaagcggagctcgggatttatctctgagttgccctctgaagaggggaagaagctggaacactttaccaagttaaggccaaaaaggaataagaagcagcaacccacccaagcagcggtctgtgctgccaacatagtctcacaagatggtgaacagaatggtctcatggggagagtggatgaaggtgtagatgaattttttaccaagaaggtgaccaaaatggattccaagaaatggtcaacaagaggctcagagtcccatgagcttaatgaaggaggagatgaaaagaaaaagcgagattctcggaaaagtagtggctttctcaatttaatcaaatcccggtccaaatccgagcgaccaccaacgatcttgatgacagaagaaccctcctcaccaaaaggggcagtcagaagtccacctgtggactgtcccaggaaggacacaaaggccgccgagcacaatggcaattctgaacggatagaggagataaaaacacctgactcctttgaagagagtcaaggggaagaaatagggaaggtggaacggagtgacagcaagagcagcccacaggcagggcggaggtatggggtccaggtgatgggcagtggtctgctggcagagatgaaagccaagcaagagaagagagctgcgtgtgcgcagaagaagcttgggaatgatgccgtatcccaggattcttccagcccagctttgagcggcgtagaacggtcggatggaggtggggcagtgcctaaactgcacccaggtcttccagagaaccgctttggtttgggaacaccagaaaagaataccaaagcagaacccaaagcggaagcaggctccaggtctcggagctcatccagcacacctacgagcccgaagcccctcctgcagtcccccaaacccagtctggcagcacggcccgtcatcccgcagaaaccaagaaccgcctcacggcctgatgacattccagactctccatctagcccgaaagttgcccttcttccacctgtcctgaaaaaagttccttcagacaaagagagagatggccagagtagcccccagcccagccccaggacattttcacaggaagtttcaaggagaagctggggccagcaggcccaggagtatcaagaacaaaagcaacggtcctccagtaaagatggccatcaaggcagcaaatctaatgactccggggaagaagcagaaaaagagtttatttttgtgtaaaggtcacccacgcagaagtcttcctgtgcagggtgctttggtagccatcagagaggaaccaagggcaacatcttttcttcccaggcgttcttctctgggtgctttattctcttctttttctttatttcgcccccacccccatcccctgccttttttttttttttttttttttttttttgtatagaaacagatccatttcttggtaatcaaagcacatttgtttggtcttcctccaaccctttgcatttgatttctaaacattccttcatatgcctttaatgaaagccagcaattatcccatgggccctacttgaatttatctgaggcagctacagattgccctgcaagatgagtttttggagataaatgaaataactggacacacactcacacaagtaacaccacagcagacctcggagtactgctaagtgtacctgtgtcaaatccgcacaggactcaatatagcaatttattcttgatgtatgcaattgcacattgtaattatattaacagagcacactaataatttgtatagattatatatattagatcttgggtatggtttttaccttctcccatggggaacttcttccttcctgatgtggaattgtacatttaaagcttggtcggtgacctttgcataccatcaacgagcacagctaagaacagagtgagagaggcccatggctgattttaccatgtgcccagattaatgtatatagttgattggaatgaggttttatgaatattcatgtttttgaaggcctttaatttctgtctgcatattagcttttaatgtgtgattttaagagagaatactttgacacctgtaaaaatcaaaatactactctttataagacatttcacaaatattcacttacattacaggctggaagtattttattcatatgtatatttataccaataaaatgattttacaagtggaa

SEQ ID NO: 194231 - DNA, 4116 bp, Artificial Sequence
  derived and/or modified sequence
atgaccgaggagagcagcgacgtgccccgggagctgatcgagagcattaaagacgtcataggtaggaagattaaaatctcggttaagaagaaggtaaagctggaggtcaagggcgataaagttgagaacaaagttttagtgctgacctcctgtagggccttccttgtgaccgcgagaataccgactaagctcgagctgaccttttcatatcttgaaatccatggcgtggtgtgtagcaaaagcgcccagatgatcgtggagacggaaaaatgtagcatttcaatgaaaatggcgtctcccgaggacgtgtccgaagttctggcccatatcggcacatgtctcaggaagattttcccagggctgagccccgtccgtatcatgaaaaaggtatccatggagccatccgagcgcttggcttccttgcaggcattatgggattctcagactgtcgctgaacagggcccatgcggtggattcagtcaaatgtacgcctgcgtgtgcgactggctaggttttagctacagagaggaagttcagtgggatgtggataccatctatctaacacaagacacaagagagctcaaccttcaggacttctcccaccttgatcaccgcgacttgatcccaattatcgctgccctcgagtacaaccagtggttcactaaactctccagcaaagacctaaaattgtctactgatgtttgcgaacagatcctgcgggttgtcagccggagtaataggctggaggaactggtgctcgagaacgctggactgcgcacggacttcgcccagaaattggcttccgccctcgcacacaatcccaacagtggcctccacactataaacctggctggaaaccccttggaggatagaggagttagtagcctcagtatccaatttgcaaagctgcctaaagggttaaaacacttgaacttgagtaaaacctccctgagtcctaaaggcgttaattccttgagccagtccctgagcgccaaccctcttacagcttctaccctggtgcacttagacctgtcaggcaacgtgttacgcggggatgatttgagtcacatgtacaattttctcgcccagcccaacgctattgtgcacctggacctcagcaacaccgaatgtagcctcgatatggtgtgtggagctttgctgagaggctgccttcaatatttggcggtcttaaatctgtcgcgtaccgttttcagccacagaaaaggcaaggaagtcccaccgtctttcaaacagttcttctcctctagcctggcacttatgcacatcaacctgtcaggaacgaagctgagccccgagccgctgaaggccctgctgttgggcctggcttgtaatcacaacctcaagggggtgagcctggatttgtctaactgcgaattgcggtctggcggagcccaggtcctggagggttgcatcgccgagatacataacatcacaagcctggatattagcgacaacggactagaatcagacttgtcaacgctcattgtctggctgtccaagaatcggagcatacaacacttggccttgggcaagaactttaataatatgaaatctaaaaatctgacgcctgtgttggacaacttggtacagatgattcaggatgaggagtcccctctgcagagtctcagcctcgcagactccaagttgaagaccgaggtgactataattataaatgctctgggatccaacaccagcttaactaaggtggacatctcaggaaatgggatgggtgatatgggcgcaaagatgttggccaaagcgctgcagatcaatactaagctgcgcactgtgatttgggacaagaataatattaccgcacaagggttccaggacattgccgtggccatggaaaagaactatacgctgcgcttcatgcctatccccatgtatgacgcctcccaagcactaaaaactaatcctgaaaaaaccgaggacgccttacaaaaaattgaaaactatctattgcgcaaccacgaaacccggaagtacctgcaggagcaggcataccgtctgcaacaagggatcgtgacttccacgacacagcagatgattgacagaatctgcgtgaaggtccaggaccatctgaatagccttcgcaactgtggcggggatgcaatacaggaggacttgaaatctgcggaacgtctgatgagggacgctaaaaactccaagacactgcttcccaatttgtatcatgtcggcggcgcctcttgggcaggagcttctggtctgctgagctcacccattcaggagacactagagtcaatggcaggagaggtgactagagtggtcgacgaacagcttaaggctctcctggaatctatggttgatgctgcagagaacctgtgccccaacgtgatgaagaaagcacacattaggcaggatctgatccacgccagcacagagaaaatctctatccccaggactttcgtcaaaaacgtgcttttagaacagagcgggattgatatcctgaataaaatctcggaggtcaagctcaccgtcgcctccttcctgtcggaccgaattgttgatgaaatcctggacgccctaagtcattgtcatcacaagctggccgatcacttctcccggaggggcaagaccctccctcaacaggagtcactggaaatcgagctggctgaagaaaagcccgtgaaacgcagtatcatcacagtggaggagctcactgaaatcgagcgacttgaagacctcgacacatgcatgatgacaccaaagagcaaaagaaagagcatccacagccggatgctgcgccccgtgtcccgggccttcgaaatggagtttgacctagataaagcactcgaggaggtcccaattcacattgaagacccaccctttccctcactcagacaagaaaagcggagctccggttttatttctgagctgccgtctgaagagggaaaaaagttggaacactttacgaagctgagaccgaaaagaaataagaagcaacagcccacccaggctgcagtgtgtgccgccaacattgtctctcaggacggcgaacagaatgggcttatgggacgcgtggatgaaggtgtagacgagtttttcaccaaaaaggtaacaaaaatggattcaaaaaaatggtcaacacggggctcagagtcccacgagctcaacgaaggaggcgacgagaagaaaaaacgtgatagtcgcaaaagttctggatttttaaacctcatcaagagcaggtccaaatcagagcggccaccaactatactgatgacggaggaaccttcatcaccaaaaggtgcagttagaagcccgcctgtcgactgcccccgcaaagataccaaggctgcagagcacaatggcaacagcgaaaggatcgaggagatcaagactccagattccttcgaggagagtcaaggggaggagattggcaaggtcgagagatccgattccaaaagttccccccaggccggacggcggtatggcgtccaggtaatggggagcggcctgctggctgagatgaaggctaagcaggaaaagagagcggcctgcgctcagaaaaaactggggaacgacgctgttagccaggactctagttcccccgcccttagtggggtggaaagaagcgacggcggcggtgcagttcctaagctccatcccgggctccccgagaaccgcttcggactgggaacacccgaaaagaataccaaagcagaacccaaggcagaggccgggagccggagtagaagcagtagcagcacccccacatctccaaagcctcttctccaatctcccaaacccagcctcgccgcacgcccagtcattcctcaaaagcctagaactgcttcacggccagacgacattccagactcccctagctcccccaaagtcgcacttctcccgccggtgctgaagaaagtcccgtctgataaggagcgagacggccagtcctcccctcagcccagccctcgcactttctctcaggaggtttctcggcgtagctgggggcagcaggcccaggaatatcaggaacagaaacaaaggagtagttcaaaagacggccaccagggatcgaagagcaatgatagcggggaagaggcagagaaggagttcattttcgtgtag

SEQ ID NO: 194232 - DNA, 4116 bp, Artificial Sequence
  derived and/or modified sequence
atgaccgaagagtcgtctgatgtccccagggagcttattgagagtatcaaagacgtcattggcaggaaaattaagatatctgtaaaaaagaaagtaaagttggaagtgaagggcgataaagtcgaaaataaagtgttggtactaactagctgtagggctttcctggtgaccgcacgcataccaaccaaactggaacttaccttctcctaccttgagattcacggcgttgtgtgctcaaaatccgctcagatgatcgtagaaactgagaaatgcagcatctctatgaaaatggcctctcctgaggatgtgtccgaggtgttggcacacattggtacatgtctaagaaagatctttccagggttgtccccagtccggattatgaagaaggtctcaatggagccgtccgagagactagcctcactccaggcattgtgggactctcagacagtggcagagcaaggcccttgcggcggattctcccagatgtatgcctgcgtgtgcgactggctcggattttcataccgcgaagaggtgcagtgggacgtcgataccatatatttaacacaggatacgcgtgagcttaatctgcaggatttctctcatctggaccatcgcgatctgattcctatcattgccgcattggagtataaccagtggttcacaaagctgtctagcaaggacttgaagctttctactgacgtctgcgagcaaattctgcgcgtggtgagccggtccaacagactggaggaactcgtgcttgagaatgctggcctacgcaccgactttgctcaaaaactggcctctgcgctggcccataaccctaactcaggtctacacacgatcaatctcgccggtaatccacttgaggaccgcggtgtgtcttcactttcgattcagttcgccaaactgcccaagggactaaaacacctcaacctgtccaagacgtcattgtcacccaaaggggtgaatagcctgtcccagtcgctgagtgctaacccgctaactgcatccaccctggtgcacctcgatttgagcggcaatgtgttgcggggtgacgacttatctcacatgtataactttctggctcagcctaacgccatagtgcatctcgatctcagcaacacagagtgctctcttgacatggtgtgcggggcactcttaaggggttgtctgcaatacttggcggtgctcaacctgtcccgcaccgtgtttagtcatcgaaaaggaaaagaggtgccaccctcctttaaacaattcttttctagcagcctggccctcatgcatatcaatttgtccggtacaaaattatctccagagccactcaaggccctactgctgggactggcgtgcaaccataacctaaaaggagtctccttggatctgtctaactgtgaactgcggtccggcggtgcccaggttctggaaggatgtattgccgagatacacaacattacctctctggacatcagcgataatggcctggaatccgacttaagtactctgattgtatggctgtcaaagaataggagtattcaacatttagctctgggtaagaacttcaacaatatgaaaagtaaaaatctgaccccagtcttggataacctggtgcagatgattcaagatgaggagtcacctctgcaaagcctctccctcgccgatagtaagctcaaaacagaggtaaccataattataaatgctcttggcagtaatacctctctgacaaaggtggacatcagcggcaatggaatgggggacatgggagccaagatgctagcaaaggctctccaaattaacacaaaactgaggacagtgatctgggacaaaaataacattacagcacagggtttccaggatatagctgtcgctatggaaaagaactatacactgcgcttcatgcctatcccaatgtacgatgcatcgcaggctctcaaaactaacccggagaagaccgaagacgccctgcagaaaattgaaaattacttactgagaaaccacgaaactcgaaaatatctgcaagagcaggcctacagacttcagcaagggatcgtaacgagtaccacacagcaaatgatcgatcggatctgcgtaaaagtgcaagaccaccttaactctctgcgcaattgcggtggcgatgctatccaagaggatttgaaatcagccgagaggctgatgcgtgacgctaagaatagcaaaaccctactccctaacctgtaccatgtcggcggtgcttcttgggcaggggcttcaggactgctctccagccccatacaggagactctggagtccatggccggagaggtgacacgggtggttgacgagcaattgaaggccctgctggagtccatggtggacgcagctgagaatctctgcccaaacgtgatgaaaaaggcacatatacgacaagacctgatccatgcatctacagagaagatttccattcccaggaccttcgttaagaatgtgttacttgagcaatccggaattgacattttgaacaaaattagcgaagtgaaactgacggttgctagtttcctgagtgatcggatcgttgacgaaattcttgacgcacttagtcactgccatcataagctagctgaccacttctcaagaagagggaagactttaccacagcaggaaagccttgaaattgagctagccgaggagaaaccagtgaagcggagtataattacagtcgaggagctgaccgaaatcgaacggctggaagatctcgacacatgtatgatgacacccaagagtaaacgaaagagcatccacagtagaatgctgcgccctgttagcagagcgtttgagatggagtttgatctggacaaggctcttgaggaggtgccaatccatattgaagatccaccatttccctcgctgcggcaagagaaaagatcctccggatttatttctgagttgccttccgaggagggtaaaaaacttgagcatttcaccaagttgcggcctaagaggaacaaaaagcaacaacccacgcaagctgcggtgtgcgccgctaacattgtgagtcaggacggggaacagaatggattgatgggacgggtggacgaaggcgtcgacgagtttttcacaaaaaaagtgacaaaaatggactctaagaagtggagcacccggggttcagagtcgcacgagttaaacgagggcggagacgaaaagaaaaagcgggactctcggaagtcttccggctttctcaatctgatcaaaagccgcagtaaatcggaacgtccacctacgattcttatgaccgaagagccaagcagccctaaaggggcagtgcggagtcctcccgtcgattgtccaaggaaggacaccaaagctgccgagcacaatggaaatagcgaaagaatcgaggaaatcaagacccctgacagttttgaggaatctcaaggcgaagaaatcggtaaagtggagaggtctgacagcaagtcatccccccaggcaggaaggcgttatggcgtccaggttatgggatctggactgctggccgagatgaaagccaagcaagagaaaagggccgcttgtgcccaaaagaaactcggtaatgatgctgtatcccaagacagcagcagccccgcacttagcggcgtggaaaggagtgacggaggcggtgcagtccctaaactgcaccccggactacctgagaaccgattcggcctgggaacccccgaaaaaaatactaaagccgagccaaaggcagaagctggctccagatccagaagctctagtagcacacccacttcacccaagcctctgctgcagtccccaaagccatcacttgctgctcggcctgttatcccacagaagcccaggacagcatcccgcccagatgacattcctgacagtcctagcagccccaaggttgccctacttccacccgtgcttaaaaaagtcccaagcgataaggagagggacggtcagtcctcaccacaacctagtccccgtaccttttcccaggaggtgagtcgcagatcatggggtcagcaggcacaggaataccaggagcagaaacaacggagtagcagcaaagacggtcatcaggggtcgaagtccaacgactcgggtgaagaggccgaaaaggagttcatttttgtatag

SEQ ID NO: 194233 - DNA, 4116 bp, Artificial Sequence
  derived and/or modified sequence
atgaccgaggagagcagcgacgtgcccagagagctgatcgagagcatcaaggacgtgatcggcagaaagatcaagatcagcgtgaagaagaaggtgaagctggaggtgaagggcgacaaggtggagaacaaggtgctggtgctgaccagctgcagagccttcctggtgaccgccagaatccccaccaagctggagctgaccttcagctacctggagatccacggcgtggtgtgcagcaagagcgcccagatgatcgtggagaccgagaagtgcagcatcagcatgaagatggccagccccgaggacgtgagcgaggtgctggcccacatcggcacctgcctgagaaagatcttccccggcctgagccccgtgagaatcatgaagaaggtgagcatggagcccagcgagagactggccagcctgcaggccctgtgggacagccagaccgtggccgagcagggcccctgcggcggcttcagccagatgtacgcctgcgtgtgcgactggctgggcttcagctacagagaggaggtgcagtgggacgtggacaccatctacctgacccaggacaccagagagctgaacctgcaggacttcagccacctggaccacagagacctgatccccatcatcgccgccctggagtacaaccagtggttcaccaagctgagcagcaaggacctgaagctgagcaccgacgtgtgcgagcagatcctgagagtggtgagcagaagcaacagactggaggagctggtgctggagaacgccggcctgagaaccgacttcgcccagaagctggccagcgccctggcccacaaccccaacagcggcctgcacaccatcaacctggccggcaaccccctggaggacagaggcgtgagcagcctgagcatccagttcgccaagctgcccaagggcctgaagcacctgaacctgagcaagaccagcctgagccccaagggcgtgaacagcctgagccagagcctgagcgccaaccccctgaccgccagcaccctggtgcacctggacctgagcggcaacgtgctgagaggcgacgacctgagccacatgtacaacttcctggcccagcccaacgccatcgtgcacctggacctgagcaacaccgagtgcagcctggacatggtgtgcggcgccctgctgagaggctgcctgcagtacctggccgtgctgaacctgagcagaaccgtgttcagccacagaaagggcaaggaggtgccccccagcttcaagcagttcttcagcagcagcctggccctgatgcacatcaacctgagcggcaccaagctgagccccgagcccctgaaggccctgctgctgggcctggcctgcaaccacaacctgaagggcgtgagcctggacctgagcaactgcgagctgagaagcggcggcgcccaggtgctggagggctgcatcgccgagatccacaacatcaccagcctggacatcagcgacaacggcctggagagcgacctgagcaccctgatcgtgtggctgagcaagaacagaagcatccagcacctggccctgggcaagaacttcaacaacatgaagagcaagaacctgacccccgtgctggacaacctggtgcagatgatccaggacgaggagagccccctgcagagcctgagcctggccgacagcaagctgaagaccgaggtgaccatcatcatcaacgccctgggcagcaacaccagcctgaccaaggtggacatcagcggcaacggcatgggcgacatgggcgccaagatgctggccaaggccctgcagatcaacaccaagctgagaaccgtgatctgggacaagaacaacatcaccgcccagggcttccaggacatcgccgtggccatggagaagaactacaccctgagattcatgcccatccccatgtacgacgccagccaggccctgaagaccaaccccgagaagaccgaggacgccctgcagaagatcgagaactacctgctgagaaaccacgagaccagaaagtacctgcaggagcaggcctacagactgcagcagggcatcgtgaccagcaccacccagcagatgatcgacagaatctgcgtgaaggtgcaggaccacctgaacagcctgagaaactgcggcggcgacgccatccaggaggacctgaagagcgccgagagactgatgagagacgccaagaacagcaagaccctgctgcccaacctgtaccacgtgggcggcgccagctgggccggcgccagcggcctgctgagcagccccatccaggagaccctggagagcatggccggcgaggtgaccagagtggtggacgagcagctgaaggccctgctggagagcatggtggacgccgccgagaacctgtgccccaacgtgatgaagaaggcccacatcagacaggacctgatccacgccagcaccgagaagatcagcatccccagaaccttcgtgaagaacgtgctgctggagcagagcggcatcgacatcctgaacaagatcagcgaggtgaagctgaccgtggccagcttcctgagcgacagaatcgtggacgagatcctggacgccctgagccactgccaccacaagctggccgaccacttcagcagaagaggcaagaccctgccccagcaggagagcctggagatcgagctggccgaggagaagcccgtgaagagaagcatcatcaccgtggaggagctgaccgagatcgagagactggaggacctggacacctgcatgatgacccccaagagcaagagaaagagcatccacagcagaatgctgagacccgtgagcagagccttcgagatggagttcgacctggacaaggccctggaggaggtgcccatccacatcgaggacccccccttccccagcctgagacaggagaagagaagcagcggcttcatcagcgagctgcccagcgaggagggcaagaagctggagcacttcaccaagctgagacccaagagaaacaagaagcagcagcccacccaggccgccgtgtgcgccgccaacatcgtgagccaggacggcgagcagaacggcctgatgggcagagtggacgagggcgtggacgagttcttcaccaagaaggtgaccaagatggacagcaagaagtggagcaccagaggcagcgagagccacgagctgaacgagggcggcgacgagaagaagaagagagacagcagaaagagcagcggcttcctgaacctgatcaagagcagaagcaagagcgagagaccccccaccatcctgatgaccgaggagcccagcagccccaagggcgccgtgagaagcccccccgtggactgccccagaaaggacaccaaggccgccgagcacaacggcaacagcgagagaatcgaggagatcaagacccccgacagcttcgaggagagccagggcgaggagatcggcaaggtggagagaagcgacagcaagagcagcccccaggccggcagaagatacggcgtgcaggtgatgggcagcggcctgctggccgagatgaaggccaagcaggagaagagagccgcctgcgcccagaagaagctgggcaacgacgccgtgagccaggacagcagcagccccgccctgagcggcgtggagagaagcgacggcggcggcgccgtgcccaagctgcaccccggcctgcccgagaacagattcggcctgggcacccccgagaagaacaccaaggccgagcccaaggccgaggccggcagcagaagcagaagcagcagcagcacccccaccagccccaagcccctgctgcagagccccaagcccagcctggccgccagacccgtgatcccccagaagcccagaaccgccagcagacccgacgacatccccgacagccccagcagccccaaggtggccctgctgccccccgtgctgaagaaggtgcccagcgacaaggagagagacggccagagcagcccccagcccagccccagaaccttcagccaggaggtgagcagaagaagctggggccagcaggcccaggagtaccaggagcagaagcagagaagcagcagcaaggacggccaccagggcagcaagagcaacgacagcggcgaggaggccgagaaggagttcatcttcgtgtag

SEQ ID NO: 194234 - protein, 1661 aa, Artificial Sequence
  derived and/or modified sequence
MLGAPDESSVRVAVRIRPQLAKEKIEGCHICTSVTPGEPQVFLGKDKAFTFDYVFDIDSQQEQIYIQCIEKLIEGCFEGYNATVFAYGQTGAGKTYTMGTGFDVNIVEEELGIISRAVKHLFKSIEEKKHIAIKNGLPAPDFKVNAQFLELYNEEVLDLFDTTRDIDAKSKKSNIRIHEDSTGGIYTVGVTTRTVNTESEMMQCLKLGALSRTTASTQMNVQSSRSHAIFTIHVCQTRVCPQIDADNATDNKIISESAQMNEFETLTAKFHFVDLAGSERLKRTGATGERAKEGISINCGLLALGNVISALGDKSKRATHVPYRDSKLTRLLQDSLGGNSQTIMIACVSPSDRDFMETLNTLKYANRARNIKNKVMVNQDRASQQINALRSEITRLQMELMEYKTGKRIIDEEGVESINDMFHENAMLQTENNNLRVRIKAMQETVDALRSRITQLVSDQANHVLARAGEGNEEISNMIHSYIKEIEDLRAKLLESEAVNENLRKNLTRATARAPYFSGSSTFSPTILSSDKETIEIIDLAKKDLEKLKRKEKRKKKSVAGKEDNTDTDQEKKEEKGVSERENNELEVEESQEVSDHEDEEEEEEEEEDDIDGGESSDESDSESDEKANYQADLANITCEIAIKQKLIDELENSQKRLQTLKKQYEEKLMMLQHKIRDTQLERDQVLQNLGSVESYSEEKAKKVRSEYEKKLQAMNKELQRLQAAQKEHARLLKNQSQYEKQLKKLQQDVMEMKKTKVRLMKQMKEEQEKARLTESRRNREIAQLKKDQRKRDHQLRLLEAQKRNQEVVLRRKTEEVTALRRQVRPMSDKVAGKVTRKLSSSDAPAQDTGSSAAAVETDASRTGAQQKMRIPVARVQALPTPATNGNRKKYQRKGLTGRVFISKTARMKWQLLERRVTDIIMQKMTISNMEADMNRLLKQREELTKRREKLSKRREKIVKENGEGDKNVANINEEMESLTANIDYINDSISDCQANIMQMEEAKEEGETLDVTAVINACTLTEARYLLDHFLSMGINKGLQAAQKEAQIKVLEGRLKQTEITSATQNQLLFHMLKEKAELNPELDALLGHALQDLDSVPLENVEDSTDEDAPLNSPGSEGSTLSSDLMKLCGEVKPKNKARRRTTTQMELLYADSSELASDTSTGDASLPGPLTPVAEGQEIGMNTETSGTSAREKELSPPPGLPSKIGSISRQSSLSEKKIPEPSPVTRRKAYEKAEKSKAKEQKHSDSGTSEASLSPPSSPPSRPRNELNVFNRLTVSQGNTSVQQDKSDESDSSLSEVHRSSRRGIINPFPASKGIRAFPLQCIHIAEGHTKAVLCVDSTDDLLFTGSKDRTCKVWNLVTGQEIMSLGGHPNNVVSVKYCNYTSLVFTVSTSYIKVWDIRDSAKCIRTLTSSGQVTLGDACSASTSRTVAIPSGENQINQIALNPTGTFLYAASGNAVRMWDLKRFQSTGKLTGHLGPVMCLTVDQISSGQDLIITGSKDHYIKMFDVTEGALGTVSPTHNFEPPHYDGIEALTIQGDNLFSGSRDNGIKKWDLTQKDLLQQVPNAHKDWVCALGVVPDHPVLLSGCRGGILKVWNMDTFMPVGEMKGHDSPINAICVNSTHIFTAADDRTVRIWKARNLQDGQISDTGDLGEDIASN

SEQ ID NO: 194235 - DNA, 4986 bp, Artificial Sequence
  derived and/or modified sequence
atgctgggggcccccgacgagtcctccgtccgggtcgcagttcggatccgaccccaactggccaaggagaaaatcgaggggtgtcacatctgcacatctgtgactcccggagaaccacaggtgtttcttggcaaagataaggccttcacgtttgactacgtgttcgacatcgattcccaacaagagcagatctacatccagtgtatagagaaacttatcgaggggtgttttgaaggatacaatgccaccgtgttcgcctacggccagactggcgcagggaaaacttacactatgggtaccggtttcgatgtgaatattgtcgaggaagaactcggcatcatcagtcgcgcagtgaagcatttgtttaagagtatcgaagagaagaaacatatcgcaatcaaaaacggcttgcccgcgcctgattttaaggttaatgcccagtttttggagctgtacaacgaagaggtgctggacctcttcgacaccacaagggatatcgatgccaagtcgaagaagtccaacatacggatccacgaggacagcaccgggggaatctatactgtgggagtcactactcgcacagttaatactgagtccgaaatgatgcaatgtctaaagttgggggctctatccagaaccactgccagtactcagatgaacgtgcaaagcagtagatcccacgccatctttactatccacgtgtgtcagactcgcgtctgtcctcaaatcgacgccgacaacgcgacagataataagattatcagcgagagtgcccagatgaatgagttcgaaaccctgacagcaaagtttcacttcgtcgacctcgccggatccgaacgactcaaacgaaccggagcaactggagaacgtgctaaagagggcatctctattaattgcggtttgctggcactcggaaatgttatctccgcactgggggataaatcaaagcgcgcaacacacgtgccatatcgagacagtaagctgactagactgctgcaggatagcctgggcggcaattcacagactataatgattgcctgcgtgtctccctcggacagggactttatggagactcttaatacactgaagtacgccaatcgagcccggaatattaagaataaagtgatggtgaatcaggacagagcaagccaacagataaacgccctcagaagcgagataacacggcttcagatggaactgatggagtataagactggaaagaggatcattgatgaggagggtgtggagtccatcaacgacatgttccacgaaaatgccatgcttcagaccgagaacaataatctgagggtcagaataaaggcgatgcaagaaaccgtggatgcgctgcgctctagaatcacacagctggtgtcagatcaggccaaccacgtgttggctcgagcaggcgaggggaatgaagaaatctccaacatgatccactcctacattaaggaaattgaagatctgcgagcaaaactgctcgaaagcgaggctgtgaacgagaatctgcgaaaaaacctgactcgggctacggcacgggccccatactttagtggctccagcactttttccccgaccatactgagcagtgacaaagaaacaattgagatcatcgatttggctaagaaggacctcgaaaagttgaaaaggaaagaaaagaggaagaaaaagtcagtggccgggaaggaggataataccgacactgatcaggaaaaaaaggaggaaaagggagtcagcgagagggaaaataacgaacttgaggtggaggaatcccaggaggtaagtgaccacgaggacgaggaggaagaagaagaggaagaagaggatgatattgatggcggcgagtccagcgacgagtccgacagcgaaagtgatgagaaggctaattaccaggccgatctcgccaacataacatgcgagatcgctattaaacaaaagctgatcgacgagctggaaaactcacaaaagcggctgcaaaccctcaagaaacagtatgaggaaaaactgatgatgctgcagcataagatccgggacactcagctggaacgagaccaggtactccagaatcttggcagcgtggagtcctattcggaagagaaggcaaaaaaagtgcgctctgagtatgaaaaaaagttgcaggccatgaacaaggagttgcagagactccaagctgcccagaaagaacacgccaggctgctgaagaatcagagccagtacgaaaagcagctgaagaagctgcagcaggacgtcatggaaatgaagaagacaaaggtccgcttgatgaaacagatgaaggaagaacaggaaaaggcaaggttgactgagtcacgtagaaatagggagattgctcaattgaaaaaagaccagcgtaagagagatcatcagttacgcttgctggaggcacagaagagaaatcaggaggtggtgctgaggcggaagaccgaagaggtgactgctctccgtcggcaggtacggccaatgagcgataaggttgccgggaaggtcacccgcaaactctccagcagcgatgccccggcccaggataccggaagttctgctgctgctgtggagaccgacgcaagccgaacaggtgcccagcagaaaatgcgcattcctgtggctcgcgttcaggccctgcctacaccggctaccaatggcaaccgcaagaagtaccaaaggaaaggcctgacaggccgcgtgttcatcagcaaaactgcccggatgaagtggcaactcctggagcggcgggtaacagatattatcatgcaaaagatgacaatttccaacatggaagcagacatgaaccgattgctgaaacagcgcgaagagctgacaaagaggagggagaagctctccaaacgccgggaaaaaatcgtcaaggagaacggcgagggggacaaaaacgtagccaacatcaacgaggagatggaaagcctgaccgcaaatatagattatatcaacgactcgatctccgattgccaggcaaatataatgcagatggaggaagcaaaggaggagggcgaaaccctggacgtaacagccgtaataaatgcctgcactctgacggaggctcggtaccttctcgatcacttcctgagtatggggatcaacaaaggcttacaggctgcgcagaaggaggcccagataaaagttctggagggtcggctgaaacagactgaaatcacttctgcaacgcagaaccaactgctgtttcacatgctgaaagaaaaggccgagctcaatccggagctggacgccctacttggccatgcattgcaagatctggattcggttcccctagaaaatgtggaggactctacagacgaggacgctccgctgaattcgcccggctctgaagggtctactttgtcctcagacctaatgaagctgtgcggtgaggtaaaaccgaagaacaaggcccgaagaagaacgaccactcagatggaactcctttacgcagattcttctgaattagcgtctgatacatcgaccggagatgcatctctccccggtcctctcacccccgtcgcggaggggcaggaaattggcatgaacacagaaacaagtggtacttccgcccgcgagaaggaactgagtcctcctccaggcctgcccagtaagatcggatctattagccgacaaagcagcctcagcgaaaaaaagataccagaaccgagccccgtcactcgcagaaaggcctatgaaaaggcggaaaaaagcaaggcaaaggaacaaaagcactcagatagtgggacatccgaggcctccctgtcccccccttcgtccccaccgtcccgcccacgtaacgaactgaatgtctttaatcgcctgaccgtgtcgcaaggaaatacttctgtgcagcaggacaagtcagacgagtctgacagctccctcagcgaagtgcatcgctcctctcgcaggggaataattaatcctttcccagcctcaaagggtatcagagcctttcctctgcaatgtatccatatcgccgaaggccatactaaagccgtgctgtgcgtggattccactgacgaccttttgtttacgggcagtaaagaccggacttgtaaggtgtggaacctcgttacgggtcaagagatcatgagcctaggaggacatccaaacaacgtggtttctgtcaagtactgcaattatacttctctggtgttcacagtgtcgaccagctatatcaaagtgtgggacattcgcgactctgcaaaatgtataagaactcttacttcaagcggacaggttactttgggcgatgcctgttccgccagtacatctagaactgttgcgataccctccggagagaaccagattaaccagatcgcactcaacccaacgggcacttttctctatgccgcttctgggaacgcagtgcgcatgtgggacctgaagcggtttcagagtactggaaagctcaccgggcacctcggccccgtgatgtgcttgaccgttgaccagatctcttccggccaggatctcatcattacagggtctaaggatcactatatcaagatgtttgacgtgacagagggggccctgggaacagtgtccccgacccataatttcgagcctccacattacgacgggatagaggcactgacgatccagggggataacctcttttccggatcccgtgacaatggcatcaaaaaatgggaccttacacagaaagaccttctccaacaggtccctaatgcgcataaagattgggtgtgcgccttgggagtcgtgccggatcacccggtattgctctctggatgtcgcggaggtattctgaaggtgtggaatatggacacgttcatgcccgttggcgaaatgaaaggacatgactcaccaattaacgctatttgcgtgaactccacacatatcttcaccgccgccgatgatcgtacggtcaggatatggaaggccagaaacctgcaagacggccagatcagcgacaccggcgacctcggggaagatattgccagcaattag

SEQ ID NO: 194236 - DNA, 6601 bp, Artificial Sequence
  derived and/or modified sequence
gaggagcccggagcgccctggcgggcgtggagtccccagcctggccgctgggaggccgcgtccccaccggagggggcagggcgcactcacccggccgccctgaggccgctggcggcctgttggcttctccacaggcgcgctcgccgttcaagcgcgctttgtccccgccccagatcctggggggtgagcggtggagaaggggcgggcgcccgcgagccgtgaatcacctcctcctcttgctgcctcagcgccgccgccacctttccattcagtcgcccaacatggctggagcgcggcggaggtgagccggccgcccgcccgcagacgccccagcctactgcgcccgagtcccgcggccccagtggcgcctcagctctgcggtgccgaggcccaacggctcgatcgctgcccgccgccagcatgttgggcgccccggacgagagctccgtgcgggtggctgtcagaataagaccacagcttgccaaagagaagattgaaggatgccatatttgtacatctgtcacaccaggagagcctcaggtcttcctagggaaagataaggcttttacttttgactatgtatttgacattgactcccagcaagagcagatctacattcaatgtatagaaaaactaattgaaggttgctttgaaggatacaatgctacagtttttgcttatggacaaactggagctggtaaaacatacacaatgggaacaggatttgatgttaacattgttgaggaagaactgggtattatttctcgagctgttaaacacctttttaagagtattgaagaaaaaaaacacatagcaattaaaaatgggcttcctgctccagattttaaagtgaatgcccaattcttagagctctataatgaagaggtccttgacttatttgataccactcgtgatattgatgcaaaaagtaaaaaatcaaatataagaattcatgaagattcaactggaggaatttatactgtgggcgttacaacacgtactgtgaatacagaatcagagatgatgcagtgtttgaagttgggtgctttatcccggacaactgccagtacccagatgaatgttcagagctctcgttcacatgccatttttaccattcatgtgtgtcaaaccagagtgtgtccccaaatagatgctgacaatgcaactgataataaaattatttctgaatcagcacagatgaatgaatttgaaaccctgactgcaaagttccattttgttgatctcgcaggatctgaaagactgaagcgtactggagctacaggcgagagggcaaaagaaggcatttctatcaactgtggacttttggcacttggcaatgtaataagtgccttgggagacaagagcaagagggccacacatgtcccctatagagattccaagctaacaagactactacaggattccctcgggggtaatagccaaacaatcatgatagcatgtgtcagcccttcagacagagactttatggaaacgttaaacaccctgaaatacgccaatcgagctagaaatatcaagaataaggtgatggtcaatcaggacagagctagtcagcaaatcaatgcacttcgtagtgaaatcacacgacttcagatggagctcatggagtacaaaacaggtaaaagaataattgacgaagagggtgtggaaagcatcaatgacatgtttcatgagaatgctatgctacagactgaaaataataacctgcgtgtaagaattaaagccatgcaagagacggttgatgcattgaggtccagaattacacagcttgttagtgatcaggccaaccatgttcttgccagagcaggtgaaggaaatgaggagattagtaatatgattcatagttatataaaagaaatcgaagatctcagggcaaaattattagaaagtgaagcagtgaatgagaaccttcgaaaaaacttgacaagagccacagcaagagcgccatatttcagcggatcatcaactttttctcctaccatactatcctcagacaaagaaaccattgaaattatagacctagcaaaaaaagatttagagaagttgaaaagaaaagaaaagaggaagaaaaaaagtgtggctggtaaagaggataatacagacactgaccaagagaagaaagaagaaaagggtgtttcggaaagagaaaacaatgaattagaagtggaagaaagtcaagaagtgagtgatcatgaggatgaagaagaggaggaggaggaggaggaagatgacattgatgggggtgaaagttctgatgaatcagattctgaatcagatgaaaaagccaattatcaagcagacttggcaaacattacttgtgaaattgcaattaagcaaaagctgattgatgaactagaaaacagccagaaaagactgcagactctgaaaaagcagtatgaagagaagctaatgatgctgcaacataaaattcgggatactcagcttgaaagagaccaggtgcttcaaaacttaggctcggtagaatcttactcagaagaaaaagcaaaaaaagttaggtctgaatatgaaaagaaactccaagccatgaacaaagaactgcagagacttcaagcagctcaaaaagaacatgcaaggttgcttaaaaatcagtctcagtatgaaaagcaattgaagaaattgcagcaggatgtgatggaaatgaaaaaaacaaaggttcgcctaatgaaacaaatgaaagaagaacaagagaaagccagactgactgagtctagaagaaacagagagattgctcagttgaaaaaggatcaacgtaaaagagatcatcaacttagacttctggaagcccaaaaaagaaaccaagaagtggttctacgtcgcaaaactgaagaggttacggctcttcgtcggcaagtaagacccatgtcagataaagtggctgggaaagttactcggaagctgagttcatctgatgcacctgctcaggacacaggttccagtgcagctgctgtcgaaacagatgcatcaaggacaggagcccagcagaaaatgagaattcctgtggcgagagtccaggccttaccaacgccggcaacaaatggaaacaggaaaaaatatcagaggaaaggattgactggccgagtgtttatttccaagacagctcgcatgaagtggcagctccttgagcgcagggtcacagacatcatcatgcagaagatgaccatttccaacatggaggcagatatgaatagactcctcaagcaacgggaggaactcacaaaaagacgagagaaactttcaaaaagaagggagaagatagtcaaggagaatggagagggagataaaaatgtggctaatatcaatgaagagatggagtcactgactgctaatatcgattacatcaatgacagtatttctgattgtcaggccaacataatgcagatggaagaagcaaaggaagaaggtgagacattggatgttactgcagtcattaatgcctgcacccttacagaagcccgatacctgctagatcacttcctgtcaatgggcatcaataagggtcttcaggctgcccagaaagaggctcaaattaaagtactggaaggtcgactcaaacaaacagaaataaccagtgctacccaaaaccagctcttattccatatgttgaaagagaaggcagaattaaatcctgagctagatgctttactaggccatgctttacaagatctagatagcgtaccattagaaaatgtagaggatagtactgatgaggatgctcctttaaacagcccaggatcagaaggaagcacgctgtcttcagatctcatgaagctttgtggtgaagtgaaacctaagaacaaggcccgaaggagaaccaccactcagatggaattgctgtatgcagatagcagtgaactagcttcagacactagtacaggagatgcctccttgcctggccctctcacacctgttgcagaagggcaagagattggaatgaatacagagacaagtggtacttctgctagggaaaaagagctctctcccccacctggcttaccttctaagataggcagcatttccaggcagtcatctctatcagaaaaaaaaattccagagccttctcctgtaacaaggagaaaggcatatgagaaagcagaaaaatcaaaggccaaggaacaaaagcactcagattctggaacttcagaggctagtctttcacctccttcttccccaccaagccggccccgtaatgaactgaatgtttttaatcgtcttactgtttctcagggaaacacatcagttcagcaggataagtctgatgaaagtgactcctctctctcggaggtacacagatcctccagaaggggcataatcaacccatttcctgcttcaaaaggaatcagagcttttccacttcagtgtattcacatagctgaagggcatacaaaagctgtgctctgtgtggattctactgatgatctcctcttcactggatcaaaagatcgtacttgtaaagtatggaatctggtgactgggcaggaaataatgtcactggggggtcatcccaacaatgtcgtgtctgtaaaatactgtaattataccagtttggtcttcactgtatcaacatcttatattaaggtgtgggatatcagagattcagcaaagtgcattcgaacactaacgtcttcaggtcaagttactcttggagatgcttgttctgcaagtaccagtcgaacagtagctattccttctggagagaaccagatcaatcaaattgccctaaacccaactggcaccttcctctatgctgcttctggaaatgctgtcaggatgtgggatcttaaaaggtttcagtctacaggaaagttaacaggacacctaggccctgttatgtgccttactgtggatcagatttccagtggacaagatctaatcatcactggctccaaggatcattacatcaaaatgtttgatgttacagaaggagctcttgggactgtgagtcccacccacaattttgaaccccctcattatgatggcatagaagcactaaccattcaaggggataacctatttagtgggtctagagataatggaatcaagaaatgggacttaactcaaaaagaccttcttcagcaagttccaaatgcacataaggattgggtctgtgccctgggagtggtgccagaccacccagttttgctcagtggctgcagagggggcattttgaaagtctggaacatggatacttttatgccagtgggagagatgaagggtcatgatagtcctatcaatgccatatgtgttaattccacccacatttttactgcagctgatgatcgaactgtgagaatttggaaggctcgcaatttgcaagatggtcagatctctgacacaggagatctgggggaagatattgccagtaattaaacatgaatgaagataggttgtaaactgaatgctgtgataatactctgtattctttatggaaaatgttgtcctgtacttactaggcaaaacgtatgaatcggattaactggaaaatatatctgaattcaactgctgactataaatggtattctaataaaattgtgtactatcctgtgtgcttagttttaagatcaaccaatagatatatatcctacaattgatatattgctttattcacacttttattgtggctgaatttttgtgcctatctataaaacacactttcaaattatttgaattaccaagacgtctgcttttgtgacagtcagaaaacacacctggaatacgatgcagcccaccattaactcattcatgtagtttattcaagtgatttatgtatttaaactaaatattgaaaatgttagtcaaattgtggtttgcttgtcaggtatttatatcagtctgtagtggattcccaaatttcaaagctcttttaatgtaatggacaaaaataagatatgagaatattattgatgaattttcataaggtggaattgatcttaatctactaacagagaagggtagacagtttgtgttaaatgttggcatttacttgtattgaccaaagttttgcagctctactatattctgtgctcaggactaaaatgctgttaatttttttttttttttccagtgctgtgcatatattctgtgatgggaaacattgttgatgtcctaacagaaatatattttgatctattttcctatggagttgtttctattatgaccatttaattttgtttttatttaatagtagtatttccttcccttttatctaattttttatatgctgctaaatatattttaaatatactatgtttgcgaaccttggtagctatgatgagagctattatcatctgtggtgggaaaagctatgtaaataggtagattgtatagagagactatcttgtgttgtgcctgtatgaatttttaaaagttgttgactggattttgcaaaaggatgtataatatttctgtctgctcagaatattaatttgtaaattctgcaagtttaatttttatgtagatggtataacatttgaaaatattgtcttatgtgattttttcccctgaaaatatttgcttgtaaatgaaaacttagctagggcttaaataaacatgttgctatgaaatt

SEQ ID NO: 194237 - DNA, 4986 bp, Artificial Sequence
  derived and/or modified sequence
atgctgggcgccccagatgagagctctgtgcgggtggccgtgcgcatccggccccagctggccaaggagaagattgagggctgccacatctgcacctctgtgaccccaggagagccccaggtgttcctgggcaaggacaaggccttcacctttgattatgtgtttgatattgacagccagcaggagcagatctacatccagtgcatcgagaagctgattgagggctgctttgagggctacaatgccaccgtgtttgcctacggccagacaggagctgggaagacctacaccatgggcaccggctttgatgtgaacatcgtggaggaggagctgggcatcatcagcagagctgtgaagcacctgttcaagagcattgaggagaagaagcacatcgccatcaagaatggcctgcctgccccagacttcaaggtgaatgcccagttcctggagctgtacaatgaggaggtgctggacctgtttgacaccacccgggacattgatgccaagagcaagaagagcaacatccgcatccacgaggacagcactggaggcatctacacagtgggcgtgaccaccaggacagtgaacacagaaagtgagatgatgcagtgcctgaagctgggcgccctgagcaggaccacagccagcacccagatgaatgtgcagagcagccgcagccacgccatcttcaccatccacgtgtgccagaccagggtgtgcccccagattgatgctgacaatgccacagacaacaagatcatcagcgagagcgcccagatgaatgaatttgagaccctgacagccaagttccactttgtggacctggccggcagcgagcggctgaagaggactggagccactggagagcgggccaaggagggcatcagcatcaactgtggcctgctggccctgggcaatgtcatcagcgccctgggggacaagagcaagagggccacccacgtgccctacagagacagcaagctgacccggctgctgcaggacagcctgggcggcaacagccagaccatcatgattgcctgtgtgagccccagcgaccgggacttcatggagaccctgaacaccctgaagtatgccaacagagccaggaacatcaagaacaaggtgatggtgaaccaggaccgggccagccagcagatcaatgccctgcggtctgagatcacccggctgcagatggagctgatggagtacaagacaggcaagaggatcattgatgaggagggcgtggagagcatcaatgacatgtttcatgaaaatgccatgctgcagacagagaacaacaacctgcgggtgcgcatcaaggccatgcaggagaccgtggatgccctgcggagccgcatcacccagctggtgtctgaccaggccaaccacgtgctggcccgggccggggagggcaatgaggagatcagcaacatgatccacagctacatcaaggagattgaggacctgcgggccaagctgctggagagcgaggccgtgaatgaaaacctgaggaagaacctgacccgggccacagcccgggccccctacttcagcggcagcagcaccttcagccccaccatcctgagcagtgacaaggagaccatcgagatcatcgacctggccaagaaggacctggagaagctgaagaggaaggagaagaggaagaagaagtctgtggccggcaaggaggacaacacagacacagaccaggagaagaaggaggagaagggcgtgtctgagcgggagaacaatgagctggaggtggaggagagccaggaggtgtctgaccatgaagatgaggaggaggaggaggaggaggaggaggatgacattgatggaggagagagcagtgatgaaagtgacagcgagagtgatgagaaggccaactaccaggccgacctggccaacatcacctgtgaaattgccatcaagcagaagctgattgatgagctggagaacagccagaagaggctgcagaccctgaagaagcagtatgaggagaagctgatgatgctgcagcacaagatccgggacacccagctggagcgggaccaggtgctgcagaacctgggctctgtggagagctacagcgaggagaaggccaagaaggtgcgctcagaatatgagaagaagctgcaggccatgaacaaggagctgcagaggctgcaggccgcccagaaggagcacgcccggctgctgaagaaccagagccagtatgagaagcagctgaagaagctgcagcaggatgtgatggagatgaagaagaccaaggtgcggctgatgaagcagatgaaggaggagcaggagaaggcccggctgacagagagcagaagaaaccgggagatcgcccagctgaagaaggaccagaggaagagggaccaccagctgcggctgctggaggcccagaagaggaaccaggaggtggtgctgcggaggaagacagaggaggtgacagccctgcggcggcaggtgcggcccatgtctgacaaggtggccggcaaggtgaccaggaagctgagcagcagtgatgccccagcccaggacaccggcagcagcgctgctgctgtggagacagatgccagcaggactggagcccagcagaagatgagaattcctgtggcccgggtgcaggccctgcccaccccagccaccaatggaaacaggaagaagtaccagaggaagggcctgaccggccgggtcttcatcagcaagacagccaggatgaagtggcagctgctggagaggagagtgacagacatcatcatgcagaagatgaccatcagcaacatggaggccgacatgaaccggctgctgaagcagcgggaggagctgaccaagagaagagagaagctgagcaagaggcgggagaagatcgtgaaggaaaatggagagggggacaagaatgtggccaacatcaatgaggagatggagagcctgacagccaacatcgactacatcaatgacagcatcagtgactgccaggccaacatcatgcagatggaggaggccaaggaggagggggagaccctggatgtgacagctgtgatcaatgcctgcaccctgacagaggcccgctacctgctggaccacttcctgtccatgggcatcaacaagggcctgcaggccgcccagaaggaggcccagatcaaggtgctggagggccgcctgaagcagacagagatcaccagcgccacccagaaccagctgctcttccacatgctgaaggagaaggccgagctgaaccctgagctggatgccctgctgggccacgccctgcaggacctggacagcgtgcccctggagaatgtggaggacagcacagatgaagatgcccccctgaacagccctggcagcgagggcagcaccctgagcagtgacctgatgaagctgtgtggggaggtgaagcccaagaacaaggcccggcggaggaccaccacccagatggagctgctgtatgctgacagcagcgagctggccagtgacaccagcactggagatgccagcctgcccggccccctgacccctgtggccgagggccaggagatcggcatgaacacagagaccagcggcaccagcgcccgggagaaggagctgagccccccacctggcctgcccagcaagattggcagcatcagccggcagagcagcctgtctgagaagaagatccctgagcccagccctgtgaccaggaggaaggcctatgagaaggccgagaagagcaaggccaaggagcagaagcacagcgacagcggcaccagcgaggccagcctgagcccccccagcagcccccccagccggcccagaaatgagctgaatgtgttcaaccggctgactgtgtcccagggcaacacctctgtgcagcaggacaagagtgatgaaagtgacagcagcctgtctgaggtgcacaggagcagccggcggggcatcatcaaccccttccctgccagcaagggcatccgggccttccccctgcagtgcatccacatcgccgagggccacaccaaggctgtgctgtgtgtggacagcacagatgacctgctcttcaccggcagcaaggacaggacctgcaaggtgtggaacctggtgacaggccaggagatcatgagcctgggcggccaccccaacaacgtggtgtctgtgaagtactgcaactacaccagcctggtgttcaccgtgtccaccagctacatcaaggtgtgggacatccgggacagcgccaagtgcatccgcaccctgaccagcagcggccaggtgaccctgggagatgcctgcagcgccagcaccagcaggacagtggccatccccagcggggagaaccagatcaaccagatcgccctgaaccccaccggcaccttcctgtatgctgccagcggaaatgctgtgaggatgtgggacctgaagcgcttccagagcacaggcaagctgaccggccacctgggccctgtgatgtgcctgactgtggaccagatcagcagcggccaggacctgatcatcaccggcagcaaggaccactacatcaagatgtttgatgtgacagagggcgccctgggcaccgtgagccccacccacaactttgagcccccccactatgatggcatcgaggccctgaccatccagggcgacaacctcttcagcggcagccgggacaatggcatcaagaagtgggacctgacccagaaggacctgctgcagcaggtgcccaatgcccacaaggactgggtgtgtgccctgggcgtggtgcctgaccaccctgtgctgctgagcggctgccggggcggcatcctgaaggtgtggaacatggacaccttcatgcctgtgggggagatgaagggccatgacagccccatcaatgccatctgtgtgaacagcacccacatcttcaccgctgctgatgacagaacagtgcgcatctggaaggccaggaacctgcaggacggccagatcagtgacacaggagacctgggggaggacatcgccagcaactag

SEQ ID NO: 194238 - DNA, 4986 bp, Artificial Sequence
  derived and/or modified sequence
atgctgggcgcccccgacgagagcagcgtgcgggtggccgtgcggatccgtccccaacttgccaaggagaagatcgaaggatgtcatatctgcacctctgtaactcctggcgagccgcaggtgttcctaggcaaagacaaggcttttaccttcgattacgtgttcgatatcgacagtcagcaagagcagatctatatccagtgtatcgagaaactaatcgaagggtgttttgaagggtataacgcaaccgtgtttgcgtacggacagacgggtgcggggaaaacttatacgatgggcacaggattcgacgttaacatcgttgaggaagaactgggaatcatctctagggccgtaaaacatctgtttaaaagcatcgaagaaaagaagcatattgcaataaagaacgggctccccgctcctgattttaaagttaacgcccagttcttggagctgtacaacgaagaagtgcttgatctttttgacacaacccgcgacattgacgccaagtctaaaaaatcaaatatacggattcacgaggactctactggagggatctacacagtcggagtcaccactaggacggtgaataccgagtcagaaatgatgcagtgtctgaagctgggtgctctgagcagaacaactgctagcactcagatgaacgtccaaagcagccgcagtcatgccatcttcaccattcatgtctgccaaactcgggtctgtccgcagatcgacgctgataatgcgacggacaacaaaattatcagcgagtccgcacagatgaatgaatttgagactctaaccgcaaagtttcattttgttgacctggccggcagtgagcgactaaaaagaacaggcgccactggggaacgggcaaaggagggaatcagcatcaattgcggcctgttggccctcggtaatgtaatctccgccctcggcgacaaaagcaagagggccactcacgtcccatatagagactccaagctcacacgtctgctgcaagattcattaggaggaaactcacagaccatcatgatagcctgtgtctcgcccagcgatcgcgatttcatggagaccctcaataccctgaagtacgctaaccgggcacggaacatcaaaaataaggttatggtgaatcaggaccgggccagccagcaaattaatgcacttcgatctgaaattaccaggttgcaaatggagctgatggagtataagactggaaaacggatcattgatgaggaaggagtcgagtctatcaacgacatgtttcatgagaacgcaatgctccagaccgaaaacaataatcttcgggttagaatcaaggcaatgcaggagacagtggatgccctaaggtccagaattacacagctggtcagcgatcaggccaaccatgttctggcgagggcaggggaaggcaatgaagagatcagtaacatgatccactcctacattaaggaaattgaggacctgagagccaaacttctggaatctgaggcagtgaacgaaaacctacgaaagaacctgacccgtgctactgcaagagctccctacttctctggatcctcaactttcagccccacaatcctgagcagcgacaaggaaaccatcgagattattgacctggcaaagaaagacctggaaaagcttaaaagaaaagaaaaaagaaagaaaaagagcgtggctggaaaggaggacaacaccgacaccgatcaagagaaaaaggaagagaagggggttagtgagagggaaaataacgaattggaagttgaggagagccaggaagttagcgaccatgaagacgaagaagaggaggaggaggaggaggaagatgacatcgacggaggggaatcaagtgacgagtctgattctgaatctgacgagaaggccaattatcaggcagacctcgctaatatcacttgcgaaattgcaatcaagcagaagctaatcgatgaactcgaaaattctcagaaacggctgcagaccctgaaaaaacaatatgaggaaaagctgatgatgcttcagcacaaaataagggacacccagctggaacgagaccaggtgctccagaatctggggagtgtggagagctactccgaagagaaggctaaaaaggtgcgctccgaatacgagaagaaattacaggctatgaataaggaactgcaaagattgcaggcagcacagaaagaacacgctaggcttcttaagaatcaatcacagtatgaaaagcagctgaaaaagctacaacaggacgttatggaaatgaagaagaccaaagttcggttgatgaagcaaatgaaggaagaacaggaaaaggcgaggctgacagaaagccgtcggaaccgagagatcgctcaattaaaaaaggatcagaggaagcgggaccaccagctccggctgctggaagcacagaagcggaaccaggaggtagtgctaaggcgcaagacggaggaagtgactgctcttaggagacaggtccgcccaatgtccgacaaggtggctggaaaggtgactaggaaattgagctcctctgatgcccccgcgcaggacacaggaagttccgccgctgctgtggaaacagatgcatcccgaaccggcgctcagcagaaaatgaggattcctgttgctcgcgttcaggccctcccaactcctgcaacgaatggtaatcgcaaaaagtaccagagaaaggggctaacagggcgcgtgttcatctccaagaccgctaggatgaagtggcagttgctggaaaggagagttactgacattatcatgcaaaagatgacaatctcaaacatggaggctgacatgaatagactgcttaaacagcgcgaggaattgaccaagcgccgggaaaagctgtctaagagacgagaaaagattgtgaaggaaaacggggagggcgacaagaatgtcgcgaatattaatgaagaaatggaatccttgactgcaaatatcgactacattaatgatagcatctcagattgccaggccaacattatgcagatggaggaggcaaaggaagaaggagagactctggacgtcaccgccgttatcaatgcctgtaccctgacggaggctcgatatctcttagatcactttctctctatgggcattaacaaggggcttcaggcagctcaaaaagaagcccagattaaggttctcgagggacgcttgaagcagactgagattacaagtgctacccagaaccagctgctttttcacatgctgaaagagaaggctgagttgaaccctgaactggacgcccttctaggccatgcattgcaagacttagacagcgtgccactggaaaacgtagaggacagtacggacgaagatgcccctctgaactctcccggctccgaaggttcgaccctgtcgagtgatctgatgaaactgtgcggcgaagtgaagcccaagaacaaggccaggagacggacaactacccagatggagctgttatatgccgactctagcgaactcgcctcagacacctcaacaggcgatgcctcactcccaggacctctcactccagtggctgaaggccaggagattggaatgaacacagagacaagtgggaccagcgccagggagaaagaattgtctccccctccgggtctccctagcaagatcggttcgattagccggcagagcagtttatctgaaaagaaaatacccgaacccagtccagtgactcggcggaaggcttatgagaaagccgagaaatctaaggccaaggaacagaaacactctgattccggcacttccgaagcttccctgtccccacccagctcaccgccaagcaggccacggaacgaactgaatgtgtttaatcgtctcacagtctcacagggtaatacctctgtccagcaggataaatcagatgaatctgatagctccctatcagaggtacaccgctcgagccgccgaggaattatcaatcctttccctgcatcgaaaggcatcagagcttttcctctacagtgtattcatatcgctgagggtcataccaaggccgtcctctgtgtggacagcaccgacgatttgttgttcacagggtcaaaggacagaacatgtaaggtctggaacctggtaactggacaggagataatgtccttgggaggtcaccccaacaacgtcgtgtccgtgaagtactgcaactacacgtccctggttttcacagtttcaacttcgtatatcaaagtgtgggacatccgagactctgctaaatgtattcggacactgacgtctagtgggcaagtgacattgggggatgcctgcagcgcgtcaacctcacgtaccgttgccattcctagcggtgagaaccagattaaccagattgccttgaaccctacaggtactttcctttatgctgctagcggcaatgccgtgcgcatgtgggacctcaagcggtttcagtccactggtaagctaaccggacacctgggtcctgtcatgtgtctgacagtggatcaaatctcatccggacaggatcttattattacagggtccaaagaccactatattaagatgttcgatgtgacagagggagcactgggcactgtctccccaacccataatttcgagcctccccattacgatggaatagaggctctgaccattcagggcgacaacctattttctggctcccgcgacaacggcattaagaaatgggacctgacccagaaagacctcctccagcaggttcccaatgcccataaagattgggtgtgcgcactgggggtggttcctgatcatccagtactgctgagcgggtgtcgcgggggaattctgaaagtatggaacatggacacatttatgcccgtgggcgagatgaaaggccatgatagcccgattaacgcaatctgtgttaactccacccacatatttacagccgctgacgaccgcacggtccggatctggaaggcgagaaatctccaggatgggcaaatctctgacaccggtgatctgggggaggacatagcctcgaactag

SEQ ID NO: 194239 - DNA, 4985 bp, Artificial Sequence
  derived and/or modified sequence
atgctgggagccccagatgagagctctgttagggtcgcagtccgcattcggcctcagctggccaaagaaaagatcgaagggtgccatatttgcaccagcgtcaccccgggtgaaccccaagtgtttttgggaaaggataaggcctttactttcgactacgtgtttgacatcgattcacagcaggagcagatatacattcagtgtatcgaaaaacttatagaggggtgcttcgaaggttacaacgctaccgtcttcgcctacggacagacaggcgctggaaagacctatacaatgggtaccgggtttgacgtgaatattgtggaagaagaattggggatcatctcacgcgcagtgaagcacctctttaagtccattgaggagaaaaaacatattgccatcaagaatggccttcctgcgccagactttaaagtaaacgcgcagttcctagagctgtacaacgaggaggtcttggacctgtttgataccactagggacatcgatgcaaaaagcaagaagtcgaatatcagaattcacgaggactccactggaggaatttacaccgtcggagtcacgactaggacagtgaacacagagtctgaaatgatgcaatgcctcaagctgggggcactctctcgaaccactgcatcgacacagatgaacgtgcagagttctcgctctcacgctatctttactattcacgtgtgtcagacacgggtttgccctcagattgacgctgataacgcaaccgataataagattatttctgaaagcgcacagatgaatgaattcgaaacattgactgctaagtttcatttcgtcgatctagccggaagcgaacgactgaagagaactggagccactggcgagcgggctaaagaggggattagcatcaactgcggcttgctggccctgggaaacgtcatatccgccctcggagacaaatctaaacgtgccacccacgtgccttatcgagatagcaaactgacacggttgttgcaggacagtctcggtggcaacagccagacaatcatgattgcctgcgtctccccttccgacagggacttcatggagacactcaatacgctgaagtatgctaaccgcgcacgcaacattaagaataaggttatggtgaaccaggaccgggcttcccagcagataaatgctctccggtctgaaattactcgcctccaaatggaactgatggagtataagactggcaagcgaatcatcgacgaagagggcgttgaatcaattaacgatatgtttcatgagaacgccatgctgcaaacagaaaacaataacctgcgagtgaggattaaggcaatgcaggagaccgtggacgcccttcggagtagaatcacacaattagtaagtgaccaagcaaaccacgtgctggcacgcgcaggcgagggaaatgaagagatctcaaacatgattcatagttacatcaaagagatcgaagacctcagagccaaattattagagtcagaagccgtcaacgagaacttgcgcaagaacctgacaagggcaacagccagggcaccctatttctcaggaagtagcacattctctccaactattctcagtagcgataaggagacaatagaaatcatcgatcttgccaaaaaggatctggagaaactgaagcggaaggagaagcgtaagaagaagtctgtggctggtaaggaggataacacagataccgatcaggagaaaaaggaggaaaagggtgtttcagagcgcgaaaataatgagctggaggtggaagaaagtcaggaggtgtctgaccacgaggacgaggaggaagaggaggaagaggaggaagacgacatagacggaggtgaatcttctgatgagagcgacagtgaatccgacgaaaaggctaactatcaggcagatctcgctaatatcacatgtgaaatcgctattaagcaaaagctgatagatgaactggagaactctcagaaacgcctgcagacactcaagaagcagtacgaggagaagctgatgatgttgcaacataaaatccgggatacgcagctcgaacgcgaccaagtgttgcaaaaccttggaagcgtggagtcatactcagaggagaaggccaaaaaagtgaggagcgagtacgaaaagaagcttcaagccatgaataaagaattacagaggttgcaggccgctcagaaggagcatgccaggctgctgaagaaccagtcccagtacgagaagcagcttaagaagctccagcaggatgtgatggaaatgaaaaagacaaaggtgagattgatgaaacaaatgaaagaggagcaggagaaggccaggctcacagaatcacggaggaaccgcgaaatagctcagctcaagaaagatcaacgtaaacgtgatcatcaactgcgtctgctggaagcccagaagcgaaatcaggaagtcgtgctcagacggaaaactgaagaagtgactgcattacgaaggcaggtacggcctatgtccgataaagtcgccggtaaagtgacgcggaagctgtcgagtagtgacgcgccagcccaagacacgggcagcagtgctgcggctgtcgagaccgatgcgtccagaacaggcgctcagcaaaagatgcgtatcccagtggcacgggtgcaagccctacccactccagccaccaacgggaacaggaagaagtatcagagaaaaggactgaccggtagagtgttcatctctaaaacagctcggatgaaatggcagcttctggagcggagagtgaccgacattataatgcaaaaaatgacgataagtaacatggaagccgatatgaaccggctcctgaagcagcgcgaagagttaaccaagcgtagggagaaactgtcaaagcgcagggaaaaaatagtgaaggagaacggtgagggcgacaaaaatgttgctaacatcaacgaggaaatggagtcactgactgcgaacatcgattacataaacgactccatcagcgattgtcaggctaacatcatgcagatggaggaagccaaagaagagggcgagacactggatgtgacagctgtgataaatgcgtgtactctgactgaggccagatatctgctggaccacttcctctctatgggaattaacaagggcctccaggctgcccagaaagaggcccagatcaaggtgctcgagggacggctgaaacagactgaaattacgtctgctacccaaaatcaactcttgttccacatgctgaaagagaaagccgaactaaatccagagctcgatgctctgctggggcacgctttacaagacctggatagcgtgccactggaaaacgtggaagattcaaccgatgaagatgccccattaaactcccctggatccgaagggtcgaccttaagctcggacctcatgaaactgtgcggcgaggttaagcctaagaataaggcccgacggaggactacgacgcagatggaattgctttacgccgacagtagtgagctggcgtctgacacgagcacaggagacgcatctcttccgggtccattgactccagttgcagagggccaggagataggaatgaatacagagacaagtgggacgtctgctcgggaaaaggaattgagccctcccccaggtcttcccagtaaaatcggatcaatcagtaggcagagctccctgtccgaaaaaaagatcccggaaccttcccccgtgacccggagaaaggcctatgagaaagctgaaaaaagtaaagctaaagaacagaaacactctgactctgggaccagcgaggccagcctgtcacccccatccagccctcccagccgccctaggaatgaattaaatgttttcaacaggttaacagtgtctcaaggcaacactagtgtgcagcaagacaagtcagacgagagtgactcgtccctcagcgaggttcatcgttccagtcgcaggggcataatcaatccgtttcccgctagcaaaggcattagagcctttccgctgcagtgtatccacattgctgaaggccacaccaaagcagtcctgtgtgtggactcaaccgacgatctactctttaccggcagtaaagatagaacttgtaaggtctggaacctggttacaggccaggagataatgtcgctgggaggccaccctaacaatgtggtgtctgttaagtactgtaattacacaagccttgtgttcactgtttccacctcctacattaaggtttgggatattcgggactccgctaagtgcattcgtactctgacttcttccggacaggtcacattgggggacgcctgttctgccagcacatccagaactgttgccattccctccggagagaaccaaatcaaccaaattgccttaaaccctaccggcactttcctgtatgccgcaagcggtaacgctgtgagaatgtgggatctgaagcgcttccagagcactggcaagttaacaggccatcttggcccagttatgtgcctaaccgtcgaccagatcagctcagggcaggacctgatcatcacaggctccaaagatcattatattaaaatgttcgacgtgactgagggagcacttggaacagtgagtcccacccataactttgagccaccacactatgatgggatcgaagcgctcactatccagggtgataatctcttctctggctcaagagataatggaatcaagaaatgggatctcacacaaaaagacctcctgcaacaggtccccaacgcgcacaaagattgggtttgcgctttgggagtcgtgccggaccacccagtactgctgagcggatgtcgtggagggatcttgaaggtgtggaatatggatacgtttatgccggtaggtgaaatgaaaggccacgattcccccattaatgccatctgtgtcaactccacacatatcttcactgccgctgacgatcgaacagtcagaatttggaaggcgcgaaaccttcaggacggccaaatctcagacacaggggatttaggagaggacattgccagtaacta

SEQ ID NO: 194240 - DNA, 4986 bp, Artificial Sequence
  derived and/or modified sequence
atgctgggcgcccccgacgagagcagcgtgagagtggccgtgagaatcagaccccagctggccaaggagaagatcgagggctgccacatctgcaccagcgtgacccccggcgagccccaggtgttcctgggcaaggacaaggccttcaccttcgactacgtgttcgacatcgacagccagcaggagcagatctacatccagtgcatcgagaagctgatcgagggctgcttcgagggctacaacgccaccgtgttcgcctacggccagaccggcgccggcaagacctacaccatgggcaccggcttcgacgtgaacatcgtggaggaggagctgggcatcatcagcagagccgtgaagcacctgttcaagagcatcgaggagaagaagcacatcgccatcaagaacggcctgcccgcccccgacttcaaggtgaacgcccagttcctggagctgtacaacgaggaggtgctggacctgttcgacaccaccagagacatcgacgccaagagcaagaagagcaacatcagaatccacgaggacagcaccggcggcatctacaccgtgggcgtgaccaccagaaccgtgaacaccgagagcgagatgatgcagtgcctgaagctgggcgccctgagcagaaccaccgccagcacccagatgaacgtgcagagcagcagaagccacgccatcttcaccatccacgtgtgccagaccagagtgtgcccccagatcgacgccgacaacgccaccgacaacaagatcatcagcgagagcgcccagatgaacgagttcgagaccctgaccgccaagttccacttcgtggacctggccggcagcgagagactgaagagaaccggcgccaccggcgagagagccaaggagggcatcagcatcaactgcggcctgctggccctgggcaacgtgatcagcgccctgggcgacaagagcaagagagccacccacgtgccctacagagacagcaagctgaccagactgctgcaggacagcctgggcggcaacagccagaccatcatgatcgcctgcgtgagccccagcgacagagacttcatggagaccctgaacaccctgaagtacgccaacagagccagaaacatcaagaacaaggtgatggtgaaccaggacagagccagccagcagatcaacgccctgagaagcgagatcaccagactgcagatggagctgatggagtacaagaccggcaagagaatcatcgacgaggagggcgtggagagcatcaacgacatgttccacgagaacgccatgctgcagaccgagaacaacaacctgagagtgagaatcaaggccatgcaggagaccgtggacgccctgagaagcagaatcacccagctggtgagcgaccaggccaaccacgtgctggccagagccggcgagggcaacgaggagatcagcaacatgatccacagctacatcaaggagatcgaggacctgagagccaagctgctggagagcgaggccgtgaacgagaacctgagaaagaacctgaccagagccaccgccagagccccctacttcagcggcagcagcaccttcagccccaccatcctgagcagcgacaaggagaccatcgagatcatcgacctggccaagaaggacctggagaagctgaagagaaaggagaagagaaagaagaagagcgtggccggcaaggaggacaacaccgacaccgaccaggagaagaaggaggagaagggcgtgagcgagagagagaacaacgagctggaggtggaggagagccaggaggtgagcgaccacgaggacgaggaggaggaggaggaggaggaggaggacgacatcgacggcggcgagagcagcgacgagagcgacagcgagagcgacgagaaggccaactaccaggccgacctggccaacatcacctgcgagatcgccatcaagcagaagctgatcgacgagctggagaacagccagaagagactgcagaccctgaagaagcagtacgaggagaagctgatgatgctgcagcacaagatcagagacacccagctggagagagaccaggtgctgcagaacctgggcagcgtggagagctacagcgaggagaaggccaagaaggtgagaagcgagtacgagaagaagctgcaggccatgaacaaggagctgcagagactgcaggccgcccagaaggagcacgccagactgctgaagaaccagagccagtacgagaagcagctgaagaagctgcagcaggacgtgatggagatgaagaagaccaaggtgagactgatgaagcagatgaaggaggagcaggagaaggccagactgaccgagagcagaagaaacagagagatcgcccagctgaagaaggaccagagaaagagagaccaccagctgagactgctggaggcccagaagagaaaccaggaggtggtgctgagaagaaagaccgaggaggtgaccgccctgagaagacaggtgagacccatgagcgacaaggtggccggcaaggtgaccagaaagctgagcagcagcgacgcccccgcccaggacaccggcagcagcgccgccgccgtggagaccgacgccagcagaaccggcgcccagcagaagatgagaatccccgtggccagagtgcaggccctgcccacccccgccaccaacggcaacagaaagaagtaccagagaaagggcctgaccggcagagtgttcatcagcaagaccgccagaatgaagtggcagctgctggagagaagagtgaccgacatcatcatgcagaagatgaccatcagcaacatggaggccgacatgaacagactgctgaagcagagagaggagctgaccaagagaagagagaagctgagcaagagaagagagaagatcgtgaaggagaacggcgagggcgacaagaacgtggccaacatcaacgaggagatggagagcctgaccgccaacatcgactacatcaacgacagcatcagcgactgccaggccaacatcatgcagatggaggaggccaaggaggagggcgagaccctggacgtgaccgccgtgatcaacgcctgcaccctgaccgaggccagatacctgctggaccacttcctgagcatgggcatcaacaagggcctgcaggccgcccagaaggaggcccagatcaaggtgctggagggcagactgaagcagaccgagatcaccagcgccacccagaaccagctgctgttccacatgctgaaggagaaggccgagctgaaccccgagctggacgccctgctgggccacgccctgcaggacctggacagcgtgcccctggagaacgtggaggacagcaccgacgaggacgcccccctgaacagccccggcagcgagggcagcaccctgagcagcgacctgatgaagctgtgcggcgaggtgaagcccaagaacaaggccagaagaagaaccaccacccagatggagctgctgtacgccgacagcagcgagctggccagcgacaccagcaccggcgacgccagcctgcccggccccctgacccccgtggccgagggccaggagatcggcatgaacaccgagaccagcggcaccagcgccagagagaaggagctgagccccccccccggcctgcccagcaagatcggcagcatcagcagacagagcagcctgagcgagaagaagatccccgagcccagccccgtgaccagaagaaaggcctacgagaaggccgagaagagcaaggccaaggagcagaagcacagcgacagcggcaccagcgaggccagcctgagcccccccagcagcccccccagcagacccagaaacgagctgaacgtgttcaacagactgaccgtgagccagggcaacaccagcgtgcagcaggacaagagcgacgagagcgacagcagcctgagcgaggtgcacagaagcagcagaagaggcatcatcaaccccttccccgccagcaagggcatcagagccttccccctgcagtgcatccacatcgccgagggccacaccaaggccgtgctgtgcgtggacagcaccgacgacctgctgttcaccggcagcaaggacagaacctgcaaggtgtggaacctggtgaccggccaggagatcatgagcctgggcggccaccccaacaacgtggtgagcgtgaagtactgcaactacaccagcctggtgttcaccgtgagcaccagctacatcaaggtgtgggacatcagagacagcgccaagtgcatcagaaccctgaccagcagcggccaggtgaccctgggcgacgcctgcagcgccagcaccagcagaaccgtggccatccccagcggcgagaaccagatcaaccagatcgccctgaaccccaccggcaccttcctgtacgccgccagcggcaacgccgtgagaatgtgggacctgaagagattccagagcaccggcaagctgaccggccacctgggccccgtgatgtgcctgaccgtggaccagatcagcagcggccaggacctgatcatcaccggcagcaaggaccactacatcaagatgttcgacgtgaccgagggcgccctgggcaccgtgagccccacccacaacttcgagcccccccactacgacggcatcgaggccctgaccatccagggcgacaacctgttcagcggcagcagagacaacggcatcaagaagtgggacctgacccagaaggacctgctgcagcaggtgcccaacgcccacaaggactgggtgtgcgccctgggcgtggtgcccgaccaccccgtgctgctgagcggctgcagaggcggcatcctgaaggtgtggaacatggacaccttcatgcccgtgggcgagatgaagggccacgacagccccatcaacgccatctgcgtgaacagcacccacatcttcaccgccgccgacgacagaaccgtgagaatctggaaggccagaaacctgcaggacggccagatcagcgacaccggcgacctgggcgaggacatcgccagcaactag

SEQ ID NO: 194241 - protein, 847 aa, Artificial Sequence
  derived and/or modified sequence
MGKKGKVGKSRRDKFYHLAKETGYRSRSAFKLIQLNRRFQFLQKARALLDLCAAPGGWLQVAAKFMPVSSLIVGVDLVPIKPLPNVVTLQQDITTERCRQALRKELKTWKVDVVLNDGAPNVGASWVHDAYSQAHLTLMALRLACDFLARGGSFITKVFRSRDYQPLLWIFQQLFRRVQATKPQASRHESAEIFVVCQGFLAPDKVDSKFFDPKFAFKEVEVQAKTVTELVTKKKPKAEGYAEGDLTLYHRTSVTDFLRAANPVDFLSKASEIMVDDEELAQHPATTEDIRVCCQDIRVLGRKELRSLLNWRTKLRRYVAKKLKEQAKALDISLSSGEEDEGDEEDSTAGTTKQPSKEEEEEEEEEQLNQTLAEMKAQEVAELKRKKKKLLREQRKQRERVELKMDLPGVSIADEGETGMFSLSTIRGHQLLEEVTQGDMSAADTFLSDLPRDDIYVSDVEDDGDDTSLDSDLDPEELAGVRGHQGLRDQKRMRLTEVQDDKEEEEEENPLLVPLEEKAVLQEEQANLWFSKGSFAGIEDDADEALEISQAQLLFENRRKGRQQQQKQQLPQTPPSCLKTEIMSPLYQDEAPKGTEASSGTEAATGLEGEEKDGISDSDSSTSSEEEESWEPLRGKKRSRGPKSDDDGFEIVPIEDPAKHRILDPEGLALGAVIASSKKAKRDLIDNSFNRYTFNEDEGELPEWFVQEEKQHRIRQLPVGKKEVEHYRKRWREINARPIKKVAEAKARKKRRMLKRLEQTRKKAEAVVNTVDISEREKVAQLRSLYKKAGLGKEKRHVTYVVAKKGVGRKVRRPAGVRGHFKVVDSRMKKDQRAQQRKEQKKKHKRK

SEQ ID NO: 194242 - DNA, 2544 bp, Artificial Sequence
  derived and/or modified sequence
atgggaaaaaaaggcaaagtggggaagtcacggcgggataaattttatcacttagccaaagagacaggctacagaagcaggtcagcgttcaaactgattcagcttaatcgtagatttcaattcctgcagaaggcccgggctctcctcgacttgtgcgcagctccaggggggtggcttcaggtggccgcaaagtttatgccagtttcatcactgatagtcggtgtcgacctggtgcccataaaaccactcccgaatgttgttaccctgcaacaggatatcactacagagcggtgccggcaggctctcagaaaggagttgaagacttggaaggtggacgtggtcctgaatgacggtgcccccaatgtgggggcctcctgggtccacgacgcctacagccaggcacacctgaccctgatggcccttcgtctcgcgtgtgactttctcgcgcgcggcggcagctttattactaaagtgtttcggtctagggactaccagcccctcctgtggatttttcagcaactttttcggcgagtccaagccacaaagccccaggcatcccgccacgagtcagctgaaatcttcgtggtgtgccagggattcctggctccagataaggtggacagcaaattttttgaccctaagttcgccttcaaggaggttgaggtgcaagctaagaccgttaccgagttggtcaccaagaagaagcccaaggcagaaggctacgcggaaggtgacctgacactataccataggacctcagtcactgattttcttagagctgcgaacccagtcgactttctgtcaaaagctagcgagataatggtggatgatgaggagctggctcagcatcctgccacaaccgaagatattagagtgtgttgtcaggatattcgggtgctcggccggaaggaattgcgctcccttctgaattggcgtacaaagcttcgtcggtacgtagccaagaagctgaaagagcaggcaaaggctctagacatctccttgagctccggcgaagaagacgaaggagatgaggaagattcaacagcagggaccaccaagcagccctctaaagaagaggaggaggaggaggaagaagagcagctgaaccagacactggccgaaatgaaggcccaggaagtggccgaactgaagaggaagaagaagaaactgttaagagaacagcgcaagcagagagagcgcgtcgagctaaagatggacctgcctggcgtgtcgatcgccgacgaaggggagacaggcatgttcagcctctctacaatccgcggacaccaactacttgaagaagttactcagggggatatgtccgctgcagatactttcctgagcgatttgccccgcgacgacatctacgtatcggacgtcgaggacgacggggatgatacgtcactggattccgatttggaccctgaagagctcgccggagtgagagggcatcaaggtctgcgagatcagaagaggatgcgcctcaccgaggtgcaggacgataaggaggaggaagaggaggagaaccctctgctggtgccacttgaagaaaaggcggttctgcaggaagaacaggcaaatctctggttttctaaaggtagcttcgctggcatcgaagatgatgccgacgaggcgttggaaattagccaggcccagctgctcttcgagaacaggagaaaaggacgccagcaacagcaaaaacagcagctgccacagacgccccccagctgtttgaagacagaaataatgtcaccgctttatcaagacgaggcccccaagggtactgaagccagctcaggcacagaggcggcaactggtttggaaggggaagaaaaagacggaatatccgattccgactcttcaacctctagcgaggaggaagaaagttgggaaccattgagagggaaaaagagatccaggggacctaaaagcgatgacgacggcttcgagatcgttcccattgaggatcccgccaaacataggatcctggacccagaggggcttgccctgggggctgtcattgcttctagtaagaaagccaagagggatctcatcgataactccttcaaccgatatacttttaatgaggacgagggcgaattacccgaatggtttgtgcaagaagaaaaacagcaccgaatacgccaactcccagtggggaagaaggaggtggaacactaccggaaacgctggcgagaaattaatgctagaccaattaaaaaggttgcggaggctaaggcccgaaagaaacgccgcatgctgaagaggcttgaacaaacccggaaaaaggcagaggcagtggtgaacacagtcgatataagcgagcgggagaaagtagctcagctgcgcagtctttataagaaagcagggctgggaaaagagaaaaggcacgtgacgtacgttgttgccaagaaaggcgtgggccgcaaagtccgcagacccgcgggggttcgagggcattttaaggtggtagattcaagaatgaaaaaagaccagcgcgcccagcagcgcaaggaacagaagaagaagcacaagcggaagtag

SEQ ID NO: 194243 - DNA, 2544 bp, Artificial Sequence
  derived and/or modified sequence
atgggcaagaagggcaaggtgggcaagagcagaagagacaagttctaccacctggccaaggagaccggctaccgcagccgcagcgccttcaagctgatccagctgaacagacgcttccagttcctgcagaaggcccgggccctgctggacctgtgtgccgcccctgggggctggctgcaggtggccgccaagttcatgcctgtgagcagcctcatcgtgggcgtggacctggtgcccatcaagcccctgcccaacgtggtgaccctgcagcaggacatcaccacagagcgctgccggcaggccctgaggaaggagctgaagacctggaaggtggatgtggtgctgaatgatggagccccaaatgtgggcgcctcctgggtgcatgatgcctacagccaggcccacctgaccctgatggccctgcggctggcctgtgacttcctggcccggggcggcagcttcatcaccaaggtgttccgcagccgggactaccagcccctgctgtggatcttccagcagctgttccggcgggtgcaggccaccaagccccaggccagcagacatgagagcgctgagatctttgtggtgtgccagggcttcctggccccagacaaggtggacagcaagttctttgaccccaagtttgccttcaaggaggtggaggtgcaggccaagacagtgacagagctggtgaccaagaagaagcccaaggccgagggctacgccgagggggacctgaccctgtaccacaggacctctgtgacagacttcctgcgggccgccaaccctgtggacttcctgagcaaggccagcgagatcatggtggatgatgaggagctggcccagcacccagccaccacagaggacatccgggtgtgctgccaggacatccgggtgctgggcaggaaggagctgcggagcctgctgaactggaggaccaagctgcggcgctacgtggccaagaagctgaaggagcaggccaaggccctggacatcagcctgagcagcggggaggaggatgaaggagatgaggaggacagcacagctggcaccaccaagcagcccagcaaggaggaggaggaggaggaggaggaggagcagctgaaccagaccctggccgagatgaaggcccaggaggtggccgagctgaagaggaagaagaagaagctgctgcgggagcagaggaagcagcgggagcgggtggagctgaagatggacctgcccggggtgtccattgctgatgaaggagagaccggcatgttcagcctgagcaccatccggggccaccagctgctggaggaggtgacccagggcgacatgtctgctgctgacaccttcctgagtgacctgcccagagatgacatctacgtgtctgatgtggaggatgatggagatgacaccagcctggacagcgacctggaccctgaggagctggccggcgtgcggggccaccagggcctgcgggaccagaagaggatgaggctgacagaggtgcaggatgacaaggaggaggaggaggaggagaaccccctgctggtgcccctggaggagaaggctgtgctgcaggaggagcaggccaacctgtggttcagcaagggcagctttgctggcattgaagatgatgctgatgaggccctggagatcagccaggcccagctgctgtttgagaacagaaggaagggccggcagcagcagcagaagcagcagctgccccagaccccacccagctgcctgaagacagagatcatgagccccctgtaccaggatgaggcccccaagggcacagaggccagcagcggcacagaagctgccaccggcctggagggggaggagaaggatggcatcagtgacagcgacagcagcaccagcagcgaggaggaggagagctgggagcccctgcggggcaagaagaggagccggggccccaagagtgatgatgatggctttgaaattgtgcccattgaagatcctgccaagcaccgcatcctggaccctgagggcctggccctgggcgccgtcatcgccagcagcaagaaggccaagagggacctgattgacaacagcttcaaccgctacaccttcaatgaagatgaaggagagctgcctgagtggtttgtgcaggaggagaagcagcaccgcatccggcagctgcctgtgggcaagaaggaggtggagcactacaggaagcgctggagggagatcaatgcccggcccatcaagaaggtggccgaggccaaggccaggaagaagaggaggatgctgaagaggctggagcagaccaggaagaaggccgaggccgtggtgaacacagtggacatcagcgagcgggagaaggtggcccagctgcggagcctgtacaagaaggccggcctgggcaaggagaagagacatgtgacctacgtggtggccaagaagggcgtgggcaggaaggtgcggcggcctgctggggtgcggggccacttcaaggtggtggacagcaggatgaagaaggaccagagggcccagcagaggaaggagcagaagaagaagcacaagaggaagtag

SEQ ID NO: 194244 - DNA, 2544 bp, Artificial Sequence
  derived and/or modified sequence
atgggcaagaagggcaaggtgggcaagagccggcgggacaagttctatcaccttgcaaaagagaccggatacaggtctagatcagccttcaaactgatccagctgaatagacgcttccaattcttgcagaaggctcgagcccttctggacttgtgtgctgcgccagggggttggttgcaggtggcggcaaagttcatgccggtcagctccctgatcgtcggcgttgaccttgttccaatcaagcctctccccaacgtggtaacgctacagcaggatatcacgactgaacgctgtcgccaggccctgaggaaagagctgaaaacttggaaggtggatgtggttctgaacgacggcgccccaaacgtgggggcctcctgggtgcatgatgcttacagtcaagctcatttgaccctcatggctctgagactggcatgcgatttcttagccagaggcggctcctttatcacaaaagtgttcagaagcagagattatcagccgctcctttggatttttcagcagctgtttagacgggtccaagctacaaaaccacaggcttccagacatgagagcgccgaaatctttgtagtctgccaaggatttcttgcaccggacaaggtggactctaagttttttgaccctaagttcgcgtttaaggaagttgaggttcaagcgaagacagttacggaactagtcactaagaaaaaaccaaaagccgaaggatacgcggagggggacctcactctgtaccatcgcacctcggtgacagattttctaagggccgctaaccccgttgactttctgtccaaagcctccgaaatcatggttgacgatgaggaactggctcagcacccggctaccaccgaggatatccgggtgtgttgtcaggacattcgcgttctcggtagaaaggaactgaggtcactcctcaattggaggaccaagcttagaagatatgtcgccaagaaactgaaagagcaagccaaggcgctcgatatcagcctgtcttctggagaggaagacgaaggcgacgaagaagatagcacggctgggacaacaaagcagccctctaaagaggaagaagaagaggaagaggaagagcaactgaaccagacattagcagaaatgaaggcacaagaggtcgctgaacttaaaagaaaaaagaaaaagctcctgagagagcaacgaaaacaaagggaacgtgtcgaactaaagatggatttgcccggtgtttctatagcagatgagggagagactggcatgttttccctgtcaactatacgcggccaccaacttctggaagaagtgacacaaggggatatgagcgcggccgatacattcctgtctgacctgccaagagatgacatttatgtgtcggacgtggaagacgatggcgatgacacatccctggattccgacttggatcccgaggagctagccggcgtgcgagggcatcaaggtctccgcgatcagaaacgtatgaggctgaccgaggtgcaggacgacaaggaggaggaggaagaagagaaccctttactagtccccctggaggaaaaggcggtgctgcaggaggaacaggctaacctgtggtttagtaaaggaagcttcgcaggtatagaagatgacgccgatgaggccttagagatctcacaagcacagctactctttgaaaaccgacgcaaaggtcgccagcaacagcaaaagcagcaacttccccaaactcctccttcatgtttgaagacggagatcatgagccccctctatcaagatgaggctccaaaaggcacagaggccagcagcggtactgaggctgctaccgggctagaaggcgaggaaaaggacggtatatcggactccgattcctcaaccagttcagaggaagaggagtcatgggagcccttgaggggcaagaagaggtccaggggtcccaaatcagacgatgacgggtttgagattgtgccaattgaggaccctgcaaaacaccggatcttggaccctgaaggactggccctgggggccgtcattgcgagctctaaaaaggccaaaagagacttgatcgacaattcatttaatagatacacttttaatgaggatgagggcgagctgcccgagtggttcgtccaggaggaaaaacagcatcggatcaggcaattgccggtgggcaagaaagaggtcgagcattatcgaaagcggtggcgcgaaataaatgctaggccaattaaaaaagtggccgaggctaaagcacgaaaaaagaggagaatgttgaaacggctggagcagactaggaaaaaggccgaagcggtggtgaacacggtggatattagtgagcgcgagaaggtggcacagctaagatctctgtataagaaggctgggctgggcaaggagaagcggcatgtgacctacgttgttgctaaaaagggcgtcgggcgcaaagtacggcgccccgctggcgtgcgggggcatttcaaggtggtagattcacgaatgaagaaggaccaacgggctcaacagagaaaggagcaaaagaaaaaacacaaacgcaagtag

SEQ ID NO: 194245 - DNA, 2544 bp, Artificial Sequence
  derived and/or modified sequence
atgggaaaaaagggaaaagtcggaaaaagcaggcgggataaattttaccatctggctaaagaaacgggatataggtcaagaagcgccttcaagttaatccagcttaatcgcaggtttcagttcctgcagaaggcccgagctctgctcgacctatgtgccgcacctggcggatggctgcaggtggccgcaaagttcatgccggtctcctcactgattgtgggtgtagacctagtccctatcaagcctctgcccaatgttgtaacactccagcaagacattacaaccgaacggtgccgacaggctctgagaaaagaactcaagacttggaaggtggacgtggtgctcaatgacggagccccaaatgtcggagcgagctgggtacacgacgcatattcccaagctcacttaactctgatggctttgagactagcttgcgactttctggctcgcggtggaagcttcattaccaaagtgtttcgctcccgagattatcagcctctgttgtggatcttccagcagctgtttcgacgggttcaggcgacaaagcctcaggcctcaaggcacgagagcgcagaaatcttcgttgtttgccaaggattcctggcgcctgataaagtggactccaagttcttcgatccgaagtttgcctttaaagaggtagaagttcaggccaaaaccgtaactgaattggtcaccaagaagaagccgaaagcggagggctacgcagaaggggatctaactctgtatcacagaacttcggtgaccgactttcttcgcgcagccaatccagtggatttcttgtccaaggcttcagaaataatggtggacgacgaagagctggctcagcaccctgctaccaccgaagatatccgggtgtgctgccaggatattcgggtgctgggtcggaaggaactaaggtcgttgctgaattggcggacgaagcttcggagatacgtggccaaaaaactaaaggagcaggccaaagcacttgatataagcctgtcaagtggtgaggaagacgagggtgacgaggaagatagcacggccggtacaaccaagcagcccagtaaggaggaggaggaggaggaggaggaagaacaacttaaccagaccctcgccgagatgaaggcccaggaggtggctgagttgaaacgtaagaagaaaaagctcctgagggagcagcgaaaacagcgggagagggtggaactcaagatggacctgccaggcgtgagtatcgctgatgagggggaaaccggtatgtttagcctctccacaatcagagggcaccagctgctggaagaggtgactcagggtgatatgagcgccgcagatactttcctctcggacttgccacgcgacgacatttacgtaagcgatgttgaagacgacggtgatgatacaagtttggactcagacctcgatcctgaagagctggctggggttcgcggacaccagggattaagggaccaaaaacgtatgaggctcaccgaggtgcaggacgacaaggaggaggaggaggaggagaatccgctccttgtaccgctggaggaaaaggctgtcctccaggaggagcaggcgaacctgtggttttcaaagggttctttcgcgggtatcgaggacgatgccgacgaagccctcgagatctcacaagcacagttattgtttgaaaataggcggaaaggcaggcagcaacagcagaagcagcagctaccgcagacgcccccttcctgtctcaagactgagattatgtcacctctgtatcaggacgaggcgccaaagggcaccgaggcctctagcggcaccgaagctgcaaccggcttggaaggggaagagaaagatgggatctctgattccgatagctcaactagttctgaagaggaagagtcatgggagcctctccggggtaaaaagagaagccgtggcccaaagagtgatgatgatgggtttgagatcgtgccaatcgaggaccctgctaagcatagaatcctggaccccgaaggactggccctaggcgctgtcatagcttctagtaagaaagccaagcgagacttgatcgacaacagcttcaacaggtacacctttaacgaggacgagggagagctgccagaatggtttgtccaggaggaaaagcagcatcggattcggcagcttcctgttggtaagaaagaagtggagcactatcgcaagagatggagggagattaatgcgcgtccaattaagaaggtggcagaagctaaggccaggaagaaacgaagaatgctgaagaggttagaacagactcgcaaaaaggctgaggcagttgttaatacggtcgatattagcgagagggaaaaggtggcacagttgagaagtctgtacaagaaagcaggtctggggaaggagaaaagacacgtgacttatgtggtcgcgaaaaagggggtgggtaggaaggttcggaggcccgctggagtccgaggccacttcaaagtcgtagattcacgcatgaagaaagaccaacgcgcacagcagaggaaggagcagaaaaagaaacacaagcgcaagtag

SEQ ID NO: 194246 - DNA, 3557 bp, Artificial Sequence
  derived and/or modified sequence
gacacagcagatccggtcgcaggcagcgtccagcatggactggtccaggcacctccgacccacccgacgctcctgccccggcccgctctccactcagatcacgctcgctccgcacccagccccgtaacctgccgggccgccactgcacccgccatacctgctctggtccgtcaagcgccatcttctctcttcagcagagaccgccggcatccgagccgtcttggcgcgcaagcgcggaagcggaggattgggacctgaagaccaggcagagaagaattccgggtcaatgggcggggtgtgcggcgagaccacactaagggaaccatgatgggaggggcggctactcgagttcaggggctttggaaggggatgaggaaggagtagaactcctcctcagtgttgcctcattgaaactctgtttatagttcttgtgatatgccttcctagtctcaactttcaacttacaaaacccaaggacagagtattgagaacaatctagggccacactcaaaatggcggaaaacctcgagccagggacgcaggggacgcaagcggaagcggaagtagttagctgcatacttgtgcggttccaagtgtggagaaagcggctctgggtctagattgagggatactccccctttccaccatgggcaagaagggcaaagttggcaagagccgacgagacaagttttatcacttggcgaaggagacgggttaccgttcccgatctgctttcaagctgatccagctcaatcgccgctttcagttcctgcagaaagcccgagccttgctggacctgtgtgctgcgccagggggatggctgcaggtagctgccaagtttatgcctgtatccagccttattgtgggagtggacctggttccaatcaagcctctccccaatgtggtgactctccagcaggacatcacaacagaacgttgtaggcaggccctgaggaaggagctgaagacctggaaggttgatgttgtgctcaatgatggggcccccaacgttggggctagctgggtccatgatgcttactcacaagcccatttgacactgatggctctacgtttggcttgtgactttttggcccgtggtggcagcttcatcacaaaggttttccgttctcgtgactatcagcctctgctatggatctttcagcagctgttccgccgtgtccaggccaccaagccccaagcctctcgccatgaatctgcagagatctttgtagtctgccaaggattcctggcccctgacaaggttgacagtaaattctttgaccccaaatttgcctttaaggaggttgaagttcaggctaagaccgttactgaattggttactaagaagaagccaaaggctgaaggctatgctgagggtgacctcactctctatcaccgtacctcagtcactgacttcctccgagctgccaaccctgttgacttcctctccaaggccagcgaaatcatggtagatgatgaagagttggcacagcatccagctaccactgaggacatacgggtgtgctgtcaggacatcagagtgttggggcgcaaggagctcaggtcgctactaaactggagaacaaaacttcggcgatatgtggccaagaagctgaaagaacaagcaaaggcactggacatcagcctcagctctggagaggaagatgaaggtgatgaggaggactcaacagctggaaccacaaagcagccctctaaggaggaggaggaagaggaggaggaggaacaactgaaccagaccttggcagaaatgaaggcccaggaggtggcggaattgaagaggaagaaaaagaagctgttgcgtgagcagagaaagcagcgggagcgtgtggagctgaagatggatctgcctggggtttccattgcagacgagggggagactggcatgttctccttgagcaccatccggggtcaccagttattagaggaagtaacacaaggggatatgagtgcagcagacacatttctgtccgatctgccaagggatgatatctatgtgtcagatgttgaggacgacggtgatgacacatctctggatagtgacctggatccagaggagctggcaggagtcaggggacatcagggtctaagggaccaaaagcgtatgcgacttactgaagtgcaagatgataaagaggaggaggaggaggagaatccactgctggtaccactggaggaaaaggcagtactgcaggaagaacaagccaacctgtggttctcaaagggcagctttgctgggatcgaggacgatgccgatgaggccctggagatcagtcaggcccagctgttatttgagaaccggcggaagggacggcagcagcagcagaagcagcagctgccacagacacccccttcctgtttgaagactgagataatgtctcccctgtaccaagatgaagcccctaagggaacagaggcttcttcggggacagaagctgccactggccttgaaggggaagaaaaggatggcatctcagacagtgatagcagtactagcagtgaggaagaagagagctgggaacccctccgtggtaagaagcgaagccgtgggcctaagtcagatgatgacgggtttgagatagtgcctattgaggacccagcgaaacatcggatactggaccccgaaggccttgctctaggtgctgttattgcctcttccaaaaaggccaagagagacctcatagataactccttcaaccggtacacatttaatgaggatgagggggagcttccggagtggtttgtgcaagaggaaaagcagcaccggatacgacagttgcctgttggtaagaaggaggtggagcattaccggaaacgctggcgggaaatcaatgcacgtcccatcaagaaggtggctgaggctaaggctagaaagaaaaggaggatgctgaagaggctggagcagaccaggaagaaggcagaagccgtggtgaacacagtggacatctcagaacgagagaaagtggcacagctgcgaagtctctacaagaaggctgggcttggcaaggagaaacgccatgtcacctacgttgtagccaaaaaaggtgtgggccgcaaagtgcgccggccagctggagtcagaggtcatttcaaggtggtggactcaaggatgaagaaggaccaaagagcacagcaacgtaaggaacaaaagaaaaaacacaaacggaagtaagcagagctgccaggctcccaggagagcatggggactaggaggaagggtgtggcatggctcagtctggcccccttgattaccggcctagcccctgctcacatcacagctgtctgaagaacagtgaggtggagtgcctagaactcccgtggtggtcctgagcagagaggaggatgtcctcctgcctgcctgaaggtctcccatgaaaacactgctgaactgtgttgacactcatgaccctttttttaaaccgttaaagggaagttcggtgttggagcgatactcaatgtagtcagtctacacctggacgtgtgggccacttaagccctccccacccccatcctattcctgaataaaaccaggataatgg

SEQ ID NO: 194247 - DNA, 2544 bp, Artificial Sequence
  derived and/or modified sequence
atgggcaagaagggcaaggtgggcaagagcagaagagacaagttctaccacctggccaaggagaccggctacagaagcagaagcgccttcaagctgatccagctgaacagaagattccagttcctgcagaaggccagagccctgctggacctgtgcgccgcccccggcggctggctgcaggtggccgccaagttcatgcccgtgagcagcctgatcgtgggcgtggacctggtgcccatcaagcccctgcccaacgtggtgaccctgcagcaggacatcaccaccgagagatgcagacaggccctgagaaaggagctgaagacctggaaggtggacgtggtgctgaacgacggcgcccccaacgtgggcgccagctgggtgcacgacgcctacagccaggcccacctgaccctgatggccctgagactggcctgcgacttcctggccagaggcggcagcttcatcaccaaggtgttcagaagcagagactaccagcccctgctgtggatcttccagcagctgttcagaagagtgcaggccaccaagccccaggccagcagacacgagagcgccgagatcttcgtggtgtgccagggcttcctggcccccgacaaggtggacagcaagttcttcgaccccaagttcgccttcaaggaggtggaggtgcaggccaagaccgtgaccgagctggtgaccaagaagaagcccaaggccgagggctacgccgagggcgacctgaccctgtaccacagaaccagcgtgaccgacttcctgagagccgccaaccccgtggacttcctgagcaaggccagcgagatcatggtggacgacgaggagctggcccagcaccccgccaccaccgaggacatcagagtgtgctgccaggacatcagagtgctgggcagaaaggagctgagaagcctgctgaactggagaaccaagctgagaagatacgtggccaagaagctgaaggagcaggccaaggccctggacatcagcctgagcagcggcgaggaggacgagggcgacgaggaggacagcaccgccggcaccaccaagcagcccagcaaggaggaggaggaggaggaggaggaggagcagctgaaccagaccctggccgagatgaaggcccaggaggtggccgagctgaagagaaagaagaagaagctgctgagagagcagagaaagcagagagagagagtggagctgaagatggacctgcccggcgtgagcatcgccgacgagggcgagaccggcatgttcagcctgagcaccatcagaggccaccagctgctggaggaggtgacccagggcgacatgagcgccgccgacaccttcctgagcgacctgcccagagacgacatctacgtgagcgacgtggaggacgacggcgacgacaccagcctggacagcgacctggaccccgaggagctggccggcgtgagaggccaccagggcctgagagaccagaagagaatgagactgaccgaggtgcaggacgacaaggaggaggaggaggaggagaaccccctgctggtgcccctggaggagaaggccgtgctgcaggaggagcaggccaacctgtggttcagcaagggcagcttcgccggcatcgaggacgacgccgacgaggccctggagatcagccaggcccagctgctgttcgagaacagaagaaagggcagacagcagcagcagaagcagcagctgccccagaccccccccagctgcctgaagaccgagatcatgagccccctgtaccaggacgaggcccccaagggcaccgaggccagcagcggcaccgaggccgccaccggcctggagggcgaggagaaggacggcatcagcgacagcgacagcagcaccagcagcgaggaggaggagagctgggagcccctgagaggcaagaagagaagcagaggccccaagagcgacgacgacggcttcgagatcgtgcccatcgaggaccccgccaagcacagaatcctggaccccgagggcctggccctgggcgccgtgatcgccagcagcaagaaggccaagagagacctgatcgacaacagcttcaacagatacaccttcaacgaggacgagggcgagctgcccgagtggttcgtgcaggaggagaagcagcacagaatcagacagctgcccgtgggcaagaaggaggtggagcactacagaaagagatggagagagatcaacgccagacccatcaagaaggtggccgaggccaaggccagaaagaagagaagaatgctgaagagactggagcagaccagaaagaaggccgaggccgtggtgaacaccgtggacatcagcgagagagagaaggtggcccagctgagaagcctgtacaagaaggccggcctgggcaaggagaagagacacgtgacctacgtggtggccaagaagggcgtgggcagaaaggtgagaagacccgccggcgtgagaggccacttcaaggtggtggacagcagaatgaagaaggaccagagagcccagcagagaaaggagcagaagaagaagcacaagagaaagtag

SEQ ID NO: 194248 - protein, 875 aa, Artificial Sequence
  derived and/or modified sequence
MIGCGACEPKVKMAGGQAAAALPTWKMAARRSLSARGRGILQAAAGRLLPLLLLSCCCGAGGCAAVGENEETVIIGLRLEDTNDVSFMEGGALRVSERTRVKLRVYGQNINNETWSRIAFTEHERRRHSPGERGLGGPAPPEPDSGPQRCGIRTSDIIILPHIILNRRTSGIIEIEIKPLRKMEKSKSYYLCTSLSTPALGAGGSGSTGGAVGGKGGSGVAGLPPPPWAETTWIYHDGEDTKMIVGEEKKFLLPFWLQVIFISLLLCLSGMFSGLNLGLMALDPMELRIVQNCGTEKEKNYAKRIEPVRRQGNYLLCSLLLGNVLVNTTLTILLDDIAGSGLVAVVVSTIGIVIFGEIVPQAICSRHGLAVGANTIFLTKFFMMMTFPASYPVSKLLDCVLGQEIGTVYNREKLLEMLRVTDPYNDLVKEELNIIQGALELRTKTVEDVMTPLRDCFMITGEAILDFNTMSEIMESGYTRIPVFEGERSNIVDLLFVKDLAFVDPDDCTPLKTITKFYNHPLHFVFNDTKLDAMLEEFKKGKSHLAIVQRVNNEGEGDPFYEVLGIVTLEDVIEEIIKSEILDETDLYTDNRTKKKVAHRERKQDFSAFKQTDSEMKVKISPQLLLAMHRFLATEVEAFSPSQMSEKILLRLLKHPNVIQELKYDEKNKKAPEYYLYQRNKPVDYFVLILQGKVEVEAGKEGMKFEASAFSYYGVMALTASPVPLSLSRTFVVSRTELLAAGSPGENKSPPRPCGLNHSDSLSRSDRIDAVTPTLGSSNNQLNSSLLQVYIPDYSVRALSDLQFVKISRQQYQNALMASRMDKTPQSSDSENTKIELTLTELHDGLPDETANLLNEQNCVTHSKANHSLHNEGAI

SEQ ID NO: 194249 - protein, 876 aa, Artificial Sequence [sequence omitted]

SEQ ID NO: 194250 - DNA, 2628 bp, Artificial Sequence
  derived and/or modified sequence
atgattggatgtggtgcctgtgagcccaaggtcaaaatggcagggggccaagcagctgccgctctgcccacatggaaaatggctgctagaaggagtctcagtgcacgagggcgtgggatcttgcaggccgcggctggccgactccttccactcctgctgctgagctgttgttgtggggccggaggttgtgctgcggtgggagagaatgaggaaaccgtcattattgggttgaggcttgaagacaccaatgatgtgagcttcatggaagggggcgctcttcgggtctcagaacggactagggtgaaacttagggtatatggacagaatattaacaatgaaacatggtcccggatcgcctttacagaacacgagaggagaaggcattctcccggtgaaagggggctgggaggccctgcccctccagagccagattcaggcccccagcgatgcggtatccggactagtgacattattatactgcctcacattatccttaatcgtcgcacttctggcatcattgagattgagatcaaaccactccggaagatggaaaaatctaaatcatactatctttgtacctccctaagcactcccgccttgggcgccggaggatctgggagtactggtggagcggtcggcggaaaaggcgggagcggagtggctgggctacccccgcctccatgggccgaaactacatggatctatcatgacggagaggatacaaaaatgatagtgggagaggagaaaaaatttctgcttcccttttggttacaggtcatttttatttccctgctgctgtgccttagcgggatgttctctgggttgaacctcggcctgatggccttggaccccatggagcttaggatagtccagaattgtggcacagagaaagagaaaaactacgcaaagcggatcgagccagttaggagacagggcaattacctgttatgtagcctgctcctgggaaatgttctagtcaacacgaccctgacgatcctgttggatgacatcgcaggatcgggtctggtcgctgtggtagtgagcactataggaattgttattttcggcgagatcgtgcctcaggcaatctgctcccgtcacggactcgccgtgggagccaacaccattttcctcacgaagttttttatgatgatgacctttccagcctcctaccctgtttctaaacttctggactgcgtgttaggacaggaaatagggaccgtgtacaaccgagagaagctgctggagatgctgagggtcacggacccgtacaacgacctggtaaaggaggagttgaatataatccagggagccctggagctgagaaccaaaacggtagaagatgtgatgaccccgctcagggattgctttatgatcacaggagaagctatcctggatttcaacactatgtccgagattatggaaagtggttacaccagaatcccggtgtttgagggggagcgctccaacatcgtggacctgctgtttgtgaaggatctggccttcgtggacccggatgactgtacaccgttgaaaaccattaccaaattctataaccaccccttgcacttcgtcttcaacgacacaaaacttgacgcaatgctggaagagtttaaaaaaggcaaaagccacctggccatcgtgcagagggtaaataatgaaggtgaaggcgatcctttttatgaggttttaggcattgtgaccctggaggatgttattgaagaaatcatcaagagtgaaattttagacgaaactgacttatataccgacaaccgtaccaagaagaaagtggcccacagagaacgaaagcaggactttagtgctttcaagcagaccgactccgaaatgaaggtcaaaatctcccctcaactcctgcttgcaatgcacaggttccttgctacagaagtagaggcattctcccctagtcagatgagtgagaaaatactgttgcgcctactcaagcatcccaacgtcatccaggagcttaaatacgatgagaaaaacaaaaaggctccagagtactacctgtaccaacggaacaaaccagtcgactacttcgttttgatcctacaggggaaggtggaggtggaggccggtaaggaaggcatgaagttcgaggcctccgccttttcttactatggcgttatggcactgactgcatctccagtgccgctgtcactctctagaactttcgtggtgtcacgaacagagttacttgcagcaggctccccgggagagaataaatcgccaccccgcccttgcggtctgaaccactcagattccctgtccaggagtgaccgcattgatgccgtcactcccacgctggggagcagcaataaccaactcaattcaagcttactgcaggtatacattccggattattcggtgagagcactgtccgatctgcagttcgttaagatctctaggcagcagtaccagaatgctcttatggctagtagaatggacaagactccacagtcctcggatagtgagaacacgaagatagagcttactttaacagagctgcatgacggactgccggacgaaacagctaacctgcttaacgaacagaactgtgtgacccacagtaaagccaaccactctctccacaatgagggggcgatatag

SEQ ID NO: 194251 - DNA, 2631 bp, Artificial Sequence
  derived and/or modified sequence
atgatcggttgtggggcttgtgagccaaaggtcaagatggccggcggacaggccgcggctgccctccccacctggaaaatggccgctcgcaggagtctgagcgcacgaggacggggcatcttacaggcagctgcagggcggctcctccctctactgttactgtcctgctgttgcggagccggcgggtgcgctgccgtaggagagaatgaagagactgtgattatcggccttcggttggaagatacaaacgatgttagtttcatggagggaggcgctctccgcgttagtgaacgcacaagagtcaagctgagggtctacggccagaatattaacaacgaaacatggagtagaattgcattcacagagcatgagaggcgaagacacagcccgggtgaacggggtttggggggacctgctccccccgaaccagacagtggaccccagcggtgcgggatccggacatccgacatcattattctaccccacattattctcaatagacgcaccagcgggattatagagatagaaatcaagccactgagaaagatggagaagtccaaaagttattacctctgtacgtctttatccacacctgccctgggcgccggggggtctggctctacagggggtgccgttggcggcaaaggaggatcaggtgtagcagggcttcctccccccccttgggccgaaactacatggatctatcacgatggtgaggatactaagatgatcgtgggggaggagaagaagtttctcctgcccttttggctgcaggttatcttcatatctttgctgctttgccttagcggcatgttttccggtctcaacctggggcttatggccctagacccaatggagctaaggattgttcagaactgcgggactgaaaaagaaaaaaactacgctaaacgaattgaaccagtccggagacaggggaattacttgctttgctctcttcttttgggtaatgtgctcgtgaataccacactaacaatcctcctggatgacatcgccggcagcggtctggtggctgtcgtcgtgagcacaatcggcattgtgatcttcggcgaaattgtgccgcaggctatttgttctaggcacggactagctgtgggagctaatactatcttcctcaccaagttttttatgatgatgaccttcccggccagctacccagtgagtaaacttctggactgcgtgttggggcaggagattggaaccgtgtacaacagagagaagctgttagaaatgttgagagttacagatccttataatgatcttgttaaagaagagctgaatatcattcagggcgctctcgagctgaggaccaaaactgtcgaggacgtgatgaccccactccgagattgttttatgatcactggggaagccattttagactttaacacaatgtccgagatcatggagtccggctacactaggatacctgtttttgaaggcgaaagaagcaatattgtggatctcttgtttgtgaaagacctcgccttcgtcgacccagacgactgtacaccgctcaaaactatcacaaagttctataaccatcccctgcacttcgttttcaatgacacaaaactcgacgcgatgctggaagaattcaagaagggcaagtctcatttggctattgtacaaagagtgaataatgaaggcgagggggacccattctatgaagtgctggggattgtaacccttgaggacgttatcgaggagatcatcaaatccgagatccttgatgagacagacctatatacagataatcgcacaaagaagaaagttgctcacagggagcgcaaacaggatttttccgccttcaagcagactgacagcgagatgaaggtcaaaattagcccacagttattattggccatgcacctagtgttcataagcattgaagtcgaagcctttagcccctcccagatgtcggagaagattctcctgaggctcttgaagcacccgaacgtcatacaggagctcaaatatgatgagaagaacaaaaaagcgcctgagtattatctctaccagcgaaataagccagtggattatttcgtgttgatcttgcaggggaaagtggaagtcgaagccggcaaggagggaatgaagtttgaagcgtctgccttctcgtattacggcgtgatggccttgacagcatctccagtccccctgtcgctgtcacgcacctttgtcgtatctagaacagagctgctggccgccggaagtccgggggagaataaatccccacctcggccatgcggcctgaatcactcagactcactctccagaagtgatcgcatcgacgccgtgacacctactcttggtagctccaataatcagctgaattcaagcctcttacaggtgtacatcccagactacagcgttcgagcattatctgacctacagttcgtgaagattagtagacagcagtaccagaatgccttgatggcatctagaatggataagaccccccagtcctccgatagcgaaaacacgaaaatagagcttaccctgacagaactccacgatgggctccccgatgaaacggccaatcttcttaatgaacaaaattgcgtcactcattctaaagctaaccacagtttacataatgagggggccatttag

SEQ ID NO: 194252 - DNA, 2628 bp, Artificial Sequence
  derived and/or modified sequence
atgattggctgtggggcctgtgagcccaaggtgaagatggccggcggccaggccgccgccgccctgcccacctggaagatggccgcccggcgcagcctgagcgcccggggccggggcatcctgcaggccgctgctggccgcctgctgcccctgctgctgctgagctgctgctgcggggccggcggctgtgccgctgtgggggagaatgaggagaccgtcatcatcggcctgcggctggaggacaccaatgatgtgtccttcatggagggcggggccctgcgggtgtctgagaggaccagggtgaagctgcgggtgtatggccagaacatcaacaatgagacctggagccgcatcgccttcacagaacatgaaagaagaagacacagccctggagagcggggcctgggcggccctgcccctcctgagccagattctggcccccagagatgtggcatccgcaccagtgacatcatcatcctgccccacatcatcctgaacagaaggaccagcggcatcattgaaattgagatcaagcccctgaggaagatggagaagagcaagagctactacctgtgcaccagcctgagcaccccagccctgggcgctgggggcagcggcagcactggaggagctgtgggcggcaaaggaggcagcggcgtggccggcctgcccccaccaccctgggccgagaccacctggatctaccatgatggagaggacaccaagatgattgtgggggaggagaagaagttcctgctgcccttctggctgcaggtgatcttcatcagcctgctgctgtgcctgagcggcatgttttctggcctgaacctgggcctgatggccctggaccccatggagctgagaattgtgcagaactgtggcacagagaaggagaagaactatgccaagagaattgagcctgtgcggcggcagggcaactacctgctgtgcagcctgctgctgggcaatgtgctggtgaacaccaccctgaccatcctgctggatgacattgctggcagcggcctggtggccgtggtggtgtccaccatcggcatcgtcatctttggagagatcgtgccccaggccatctgcagcagacatggcctggccgtgggcgccaacaccatcttcctgaccaagttcttcatgatgatgaccttccctgccagctaccctgtgtccaagctgctggactgtgtgctgggccaggagattggaacagtgtacaaccgggagaagctgctggagatgctgcgggtgacagacccctacaatgacctggtgaaggaggagctgaacatcatccagggcgccctggagctgcggaccaagacagtggaggatgtgatgacccccctgcgggactgcttcatgatcaccggggaggccatcctggacttcaacaccatgtctgagatcatggagagcggctacacccgcatccctgtgtttgaaggagagaggagcaacatcgtggacctgctgtttgtgaaggacctggcctttgtggaccctgatgactgcacccccctgaagaccatcaccaagttctacaaccaccccctgcactttgtgttcaatgacaccaagctggatgccatgctggaggagttcaagaagggcaagagccacctggccatcgtgcagagggtgaacaatgaaggagagggggaccccttctatgaggtgctgggcatcgtgaccctggaggatgtgattgaggagatcatcaagtctgagatcctggatgaaacagacctgtacacagacaacagaaccaagaagaaggtggcccaccgggagaggaagcaggacttcagcgccttcaagcagacagacagcgagatgaaggtgaagatcagcccccagctgctgctggccatgcaccgcttcctggccacagaggtggaggccttcagccccagccagatgtctgagaagatcctgctgcggctgctgaagcaccccaacgtcatccaggagctgaagtatgatgagaagaacaagaaggcccctgagtactacctgtaccagaggaacaagcctgtggactactttgtgctgatcctgcagggcaaggtggaggtggaggccggcaaggagggcatgaagtttgaggccagcgccttctcctactatggagtgatggccctgacagccagccctgtgcccctgagcctgagcaggacctttgtggtgtccaggacagagctgctggccgccggcagccctggagagaacaagagccccccccggccctgtggcctgaaccacagcgacagcctgagcagaagtgacagaattgatgctgtgacccccaccctgggcagcagcaacaaccagctgaacagcagcctgctgcaggtgtacatcccagactacagcgtgcgggccctgagtgacctgcagtttgtgaagatcagccggcagcagtaccagaatgccctgatggccagcaggatggacaagaccccccagagcagtgacagcgagaacaccaagattgagctgaccctgacagagctgcatgatggcctgcctgatgaaacagccaacctgctgaatgagcagaactgtgtgacccacagcaaggccaaccacagcctgcacaatgaaggagccatctag

SEQ ID NO: 194253 - DNA, 2631 bp, Artificial Sequence
  derived and/or modified sequence
atgattggctgtggggcctgtgagcccaaggtgaagatggccggcggccaggccgccgccgccctgcccacctggaagatggccgcccggcgcagcctgagcgcccggggccggggcatcctgcaggccgctgctggccgcctgctgcccctgctgctgctgagctgctgctgcggggccggcggctgtgccgctgtgggggagaatgaggagaccgtcatcatcggcctgcggctggaggacaccaatgatgtgtccttcatggagggcggggccctgcgggtgtctgagaggaccagggtgaagctgcgggtgtatggccagaacatcaacaatgagacctggagccgcatcgccttcacagaacatgaaagaagaagacacagccctggagagcggggcctgggcggccctgcccctcctgagccagattctggcccccagagatgtggcatccgcaccagtgacatcatcatcctgccccacatcatcctgaacagaaggaccagcggcatcattgaaattgagatcaagcccctgaggaagatggagaagagcaagagctactacctgtgcaccagcctgagcaccccagccctgggcgctgggggcagcggcagcactggaggagctgtgggcggcaaaggaggcagcggcgtggccggcctgcccccaccaccctgggccgagaccacctggatctaccatgatggagaggacaccaagatgattgtgggggaggagaagaagttcctgctgcccttctggctgcaggtgatcttcatcagcctgctgctgtgcctgagcggcatgttttctggcctgaacctgggcctgatggccctggaccccatggagctgagaattgtgcagaactgtggcacagagaaggagaagaactatgccaagagaattgagcctgtgcggcggcagggcaactacctgctgtgcagcctgctgctgggcaatgtgctggtgaacaccaccctgaccatcctgctggatgacattgctggcagcggcctggtggccgtggtggtgtccaccatcggcatcgtcatctttggagagatcgtgccccaggccatctgcagcagacatggcctggccgtgggcgccaacaccatcttcctgaccaagttcttcatgatgatgaccttccctgccagctaccctgtgtccaagctgctggactgtgtgctgggccaggagattggaacagtgtacaaccgggagaagctgctggagatgctgcgggtgacagacccctacaatgacctggtgaaggaggagctgaacatcatccagggcgccctggagctgcggaccaagacagtggaggatgtgatgacccccctgcgggactgcttcatgatcaccggggaggccatcctggacttcaacaccatgtctgagatcatggagagcggctacacccgcatccctgtgtttgaaggagagaggagcaacatcgtggacctgctgtttgtgaaggacctggcctttgtggaccctgatgactgcacccccctgaagaccatcaccaagttctacaaccaccccctgcactttgtgttcaatgacaccaagctggatgccatgctggaggagttcaagaagggcaagagccacctggccatcgtgcagagggtgaacaatgaaggagagggggaccccttctatgaggtgctgggcatcgtgaccctggaggatgtgattgaggagatcatcaagtctgagatcctggatgaaacagacctgtacacagacaacagaaccaagaagaaggtggcccaccgggagaggaagcaggacttcagcgccttcaagcagacagacagcgagatgaaggtgaagatcagcccccagctgctgctggccatgcacctggtgttcatcagcattgaggtggaggccttcagccccagccagatgtctgagaagatcctgctgcggctgctgaagcaccccaacgtcatccaggagctgaagtatgatgagaagaacaagaaggcccctgagtactacctgtaccagaggaacaagcctgtggactactttgtgctgatcctgcagggcaaggtggaggtggaggccggcaaggagggcatgaagtttgaggccagcgccttctcctactacggcgtgatggccctgacagccagccctgtgcccctgagcctgagcaggacctttgtggtgtccaggacagagctgctggccgccggcagccctggagagaacaagagccccccccggccctgtggcctgaaccacagcgacagcctgagcagaagtgacagaattgatgctgtgacccccaccctgggcagcagcaacaaccagctgaacagcagcctgctgcaggtgtacatcccagactacagcgtgcgggccctgagtgacctgcagtttgtgaagatcagccggcagcagtaccagaatgccctgatggccagcaggatggacaagaccccccagagcagtgacagcgagaacaccaagattgagctgaccctgacagagctgcatgatggcctgcctgatgaaacagccaacctgctgaatgagcagaactgtgtgacccacagcaaggccaaccacagcctgcacaatgaaggagccatctag

SEQ ID NO: 194254 - DNA, 2628 bp, Artificial Sequence
  derived and/or modified sequence
atgatcggctgcggcgcctgcgagcccaaggtgaagatggccggcggacaggctgccgccgcactgcccacttggaagatggccgcgcgccgtagcttatccgcccgcggaagaggaatcctgcaggccgccgcaggccggctccttcctctgctcttgttgtcctgctgctgcggcgcgggagggtgtgctgctgtcggtgagaatgaagagaccgtgatcattggtctaaggttggaagacacaaatgacgtgagttttatggaggggggagcacttcgcgtgtcagaacgcaccagggtgaaactcagggtttacggacaaaatatcaataatgaaacctggtcacggattgcattcaccgaacatgagaggagaaggcacagtccaggcgaaagagggctggggggccccgccccgccagagcccgacagcgggccccaacggtgcggtatacgaactagcgatattataatccttccacacatcatcctgaaccgccggacatccggaattattgagattgagattaagcctttgagaaagatggaaaagagcaagagctattacctgtgtacctctttgtcaacccctgctttgggagcagggggctcgggctcaaccgggggcgcagtgggtggcaagggtggatccggtgtggctgggctacctccaccaccctgggctgaaactacctggatctaccatgacggagaggacaccaagatgatagttggggaagaaaagaagtttctgctgccgttttggcttcaggttattttcatatccctactactttgcctttcagggatgttcagtggactaaatcttggcctgatggccctggatcccatggaactgcggatcgtacagaactgtggcacagaaaaagagaaaaactatgcaaagagaatagaacctgtgagacgccaagggaattatctcctctgtagcctgctgttggggaatgtcctggtcaacacgacgctgacaatactgttggatgatattgcaggctctggcttagtggcagttgtcgtgtctactataggcatagtgattttcggcgagattgtgccccaagccatctgctcacgccacggtcttgccgtgggagctaataccatctttctcaccaagttctttatgatgatgaccttcccggcgtcttacccggtatcgaaattacttgactgtgtgctggggcaagagatcggcacagtttataacagagaaaagttgctggagatgttgcgcgtgacagacccctacaacgacctggtgaaggaggagcttaacataatccagggcgcccttgagctgcggactaaaaccgtcgaagatgtgatgacccccttgcgtgattgttttatgataaccggtgaggctatcctcgattttaatacaatgtctgagatcatggagtcaggttacactcgcatccccgtgttcgagggcgaacggtctaatatcgtggatctcctgttcgtgaaagatctggcattcgtagatccagatgactgtactcccttaaaaactatcaccaagttctacaaccacccactgcatttcgtgtttaacgatacaaagcttgatgctatgctcgaagaattcaaaaaggggaagtcccacttggccatcgtgcaaagagtgaacaacgagggcgagggcgacccattttatgaagtgttgggaatcgtaaccctcgaggacgtgatcgaggaaattatcaaatctgaaattctggacgaaactgatctgtatacagataaccggacaaagaaaaaagtggcacatcgtgagagaaaacaggatttctccgcttttaagcaaaccgattctgagatgaaggtcaaaataagcccccagctcttgctggccatgcaccgctttctggcgactgaagtggaagctttctccccctcccaaatgagtgaaaaaatcctgctgcgtcttctcaagcatcctaatgtaatccaggaactcaagtatgacgaaaaaaataaaaaggcgccagaatattatctataccagaggaataagcccgtagactatttcgtcctcatcctccagggaaaggtcgaagtggaagcaggaaaggagggtatgaaattcgaggccagcgcttttagttattacggcgtaatggctctcactgcttcgcccgttcccctttccctgtctaggaccttcgtggttagcagaacagagctcttagcagctggctctccaggtgagaacaagtcacccccacgcccatgtggcctgaaccactctgacagcctgtcccgatcagatcggattgatgctgttactcctacgctggggtccagcaataatcagctcaacagtagccttctgcaggtctatattccagattacagcgtgcgggccctgtctgatctgcagtttgtgaagatcagtcgacaacaataccagaatgcactcatggcatcccggatggacaaaactcctcaatcttctgatagcgagaacactaaaatcgaattgacattaactgagcttcatgacgggctgcccgatgagactgcaaacctcctgaacgaacaaaactgtgtcacccactcaaaagcaaaccactccctgcacaatgagggagccatttag

SEQ ID NO: 194255 - DNA, 2631 bp, Artificial Sequence
  derived and/or modified sequence
atgatcggctgcggcgcctgcgagcccaaggtgaagatggccggcgggcaagctgcggctgccctgccaacctggaaaatggcagctcgtagatctctttcagctcgcggccgagggattctgcaagcggctgcaggacggctgttgcctcttctcctgctgagttgttgctgtggtgctggggggtgcgctgctgtcggcgagaatgaagagaccgtgattatcggcctccgtctggaagacaccaacgacgtcagcttcatggaaggcggagcccttcgtgtgtccgagcggacaagagtaaagctaagggtgtacggacagaacatcaataacgaaacgtggtctaggatcgccttcactgaacacgagagaagaagacattcccctggcgaacggggactggggggacccgcccctcccgagccagatagcggtccacaaaggtgtgggataaggacgtccgacataattatcctgccacatatcattctcaataggcgaaccagtggaatcattgaaattgaaattaaacccttgcgtaagatggaaaagtcgaagagctattacttgtgcacctccttaagcacccccgccctgggcgccggcgggagtggttctaccggaggagccgtggggggaaagggcgggtcgggcgttgctgggctgcccccacctccctgggcggaaaccacctggatataccatgacggagaggacacaaagatgattgtcggcgaggaaaagaaattcctcctcccattttggctgcaggtgattttcatctccttgctgctttgtctgagcggaatgtttagcgggctgaacctgggcttgatggctctggatcctatggagctccggatagtccagaactgtgggacggaaaaagaaaagaactatgctaagcgtattgagcctgttagaagacaggggaactatttgctgtgtagcctcctgctcggaaacgtcctggtgaacacaactctgactatcctcctggatgacattgcgggtagcgggctggtggccgttgttgtctccaccatcggaattgtgatcttcggagaaattgtgcctcaggctatctgcagtcgccatggccttgcggtcggcgcaaataccattttcctgactaaattcttcatgatgatgacattcccagcttcataccctgtgagcaagctgctcgactgcgtcctgggtcaggaaatcggcaccgtgtacaaccgagaaaaactgttggagatgcttagagtgaccgatccatataatgacctagtgaaggaagagctgaatatcatccagggcgccttagaactgaggaccaagaccgtggaggatgttatgaccccactcagagattgcttcatgatcacgggtgaagccatattggactttaacaccatgtcggagataatggaatccggatacacaagaataccagtctttgaaggggagcgctctaatatcgtggatctgctgtttgtaaaggatctcgcatttgtcgacccagatgactgcacgccgcttaaaacaatcacaaaattctataatcacccactacactttgtctttaatgacaccaaactcgacgctatgctggaagagttcaagaaaggcaagagccaccttgctatcgtgcagcgcgtaaacaatgagggagaaggcgaccccttttacgaggtgttaggcattgtcacccttgaggatgtgattgaggaaatcatcaagtccgagattctggacgagacagacctgtatacagataaccgaactaagaaaaaagtggcacaccgcgagaggaagcaagattttagtgcatttaagcagactgactctgaaatgaaagtaaagatatccccacaactgctgctcgccatgcacctagtattcatttcgatagaagtggaggccttctccccttcccagatgtccgagaagattcttctcagattattgaaacaccccaatgttatccaggaattaaaatatgatgagaagaataaaaaagcccccgagtattacctttaccagcgtaacaagcccgttgattattttgtgttgattctgcagggcaaagtcgaagtggaggctgggaaggaggggatgaagttcgaagctagcgccttcagttactatggcgttatggcgctcacggcatcacctgtgcctctgtccctttcaaggacctttgtggtttccagaacggagctgctcgccgccggctcacctggggaaaacaaatcacccccacgaccttgcggcctcaaccactccgattctttgtcccgctccgatcgtatagatgcggtaacccccacactcggctcttctaacaaccaactaaacagctctctactgcaggtgtatataccggactatagtgtgcgggcgctcagcgacttgcagttcgtcaaaatatctcggcaacaataccaaaacgcactcatggcatcccgaatggacaagacacctcaatcctcggactcagagaacacaaaaattgagttgaccctgactgaattgcacgacggcctcccagatgagacagctaatctgttaaatgagcaaaattgtgtgacccattccaaggctaatcactccctgcataacgagggcgcaatctag

SEQ ID NO: 194256 - DNA, 2628 bp, Artificial Sequence
  derived and/or modified sequence
atgatcggctgtggcgcatgtgagcccaaggtgaaaatggcaggcggacaggccgctgctgccctccctacatggaagatggcggcacggaggagcctgtcagcaagagggcgagggatattgcaggcagcagcgggtcggctgctacctctgctcctccttagttgctgctgcggcgctggcggttgcgctgctgttggagagaacgaagagaccgtcataattggcctgcggctggaggataccaatgatgttagctttatggaagggggtgcactgagagtgtcagagagaacaagagtcaagttacgtgtgtatggccaaaacataaacaatgagacctggagtcgcatcgcctttactgaacacgagaggcgtagacattccccaggagaacgaggactaggcggaccagccccaccagaacctgacagcgggcctcagcggtgtggaattcgaacctctgacatcatcatcctaccacatataattttgaaccggagaacatcaggcattattgagatcgagataaagccccttcggaagatggagaaatccaaatcttattacttgtgcacaagcctttctacaccggctctgggggctgggggatccgggagcacgggaggggctgtgggaggaaagggagggagcggtgtggccggtttacctccccctccctgggccgaaaccacatggatatatcatgatggcgaggacacaaagatgattgtgggcgaggaaaaaaagtttttgctgccattctggctgcaggtgatctttatttctcttcttctgtgtctctccggcatgttcagcgggctaaatcttgggctaatggctttagaccctatggagctgagaatagtccaaaactgtggtaccgagaaagaaaaaaactacgcaaagcgcatcgagcctgtgaggagacagggtaattatctgctgtgctcactgctactggggaatgtcttggtgaacaccacactaactatcctcttggatgacattgcaggttctggcctggttgctgtggtcgtttccacaatcggcattgtcatttttggcgaaatcgtgccccaagccatctgctcgcgccacggtttggccgtgggggctaatactatctttttgaccaagttcttcatgatgatgacgttccccgcttcataccctgtctccaagctcctggattgcgtgctcggccaggaaatcggaactgtatacaacagagagaaactactcgagatgctgcgcgtgaccgacccgtataatgatctcgtcaaagaagagctgaatatcattcagggagccctggaactgaggacaaagaccgtggaagacgtgatgaccccactccgcgattgtttcatgattaccggagaagccattttagacttcaataccatgtccgagattatggagtcagggtacacccgcatcccggtgttcgaaggcgaacggagcaacatagttgatctgttattcgtaaaggatctagcgttcgtagaccctgatgattgtacacctctgaaaacaatcacaaaattttataaccaccccctacacttcgtgtttaacgatactaagttagatgcaatgttagaggagttcaaaaaagggaagtcgcatctcgcgatcgttcagcgagtgaataacgaaggggagggcgatcccttttacgaagtactgggcatcgtgacactggaggacgtcatcgaggaaataatcaagagcgagattctggatgagacagacctgtacactgataatcggactaaaaagaaagtagcccatcgtgagcggaagcaggacttctccgcatttaagcagacggattccgaaatgaaggtgaagattagcccccaacttctcctggccatgcaccggtttctcgccaccgaagtcgaggccttttcaccgtcacagatgtccgagaaaattctgctgaggctgctcaaacaccctaatgtcattcaggagttaaaatacgacgagaagaataagaaggcacccgagtactatttgtaccaaagaaacaaacctgtcgactacttcgttctgatcctacaggggaaggtcgaggtggaagctggaaaggagggcatgaagtttgaagcatcagccttctcttactatggggttatggctttaactgcatcccctgtgcctttaagcttatcccgaactttcgtagtcagtagaacggaattattggctgcgggaagtccaggcgaaaacaaatccccccctcggccttgtggcctgaaccatagtgattcattaagcaggtcggataggatcgacgcagtgacacccactcttggttcatcaaataaccagctgaattcatctctccttcaagtgtatataccagactattctgtgcgtgcgctgagcgacttgcagtttgttaaaatttctaggcagcagtatcagaacgcacttatggcttcccggatggacaagacgccacaaagctcagattctgagaataccaagatcgagttaaccctcaccgagttacatgatggtctgccagacgaaacggctaatttgctgaatgaacaaaattgtgtcacccatagtaaggcaaaccactctcttcataacgaaggggctatctag

SEQ ID NO: 194257 - DNA, 2631 bp, Artificial Sequence
  derived and/or modified sequence
atgatcgggtgtggtgcatgtgaaccaaaggtaaaaatggccggtggacaggcagctgcagctctcccaacatggaagatggctgctcgacgatcgctgtccgccagagggagaggcatcctccaagccgctgcgggaagattgctccctctgctcctcctgagctgctgctgcggcgctgggggatgcgccgctgttggcgagaatgaagaaactgtaataatcggactacgactggaggatacaaacgacgtgagctttatggagggaggcgcattaagagtgtcagagcgcacccgcgtaaaactgagggtctacggacagaacattaataatgaaacctggagccgcatcgctttcaccgaacacgagcgtcggcgacactcgcctggcgagagaggtctgggcggacccgcacctcccgaaccagatagcggcccacagcgatgcggcattcggacctctgacatcatcatcctacctcacataatcctaaaccggaggacttcggggattattgagatagaaatcaaacccctccgcaagatggaaaaaagcaagagctattatctctgtaccagtctgtcaacgccagctctgggcgcaggcggtagcgggtcaacggggggagcggtgggtgggaagggtggatccggcgtggccggtctgccgcctcctccgtgggctgagactacctggatctatcatgatggcgaggacaccaagatgatagtgggtgaagaaaaaaagttcctgctgccattttggttacaggtgatttttatctctcttctgctctgccttagcggcatgtttagtggcctcaatctgggccttatggcccttgaccctatggagttgcgcatcgttcaaaattgcggcaccgagaaggagaaaaattatgcaaaacggatcgagcccgtgcggaggcagggaaactacctcttgtgcagtcttctcttaggtaacgtcctcgtgaataccaccttaacgatcctgctggatgatatcgctggctccggccttgtggcagttgtggttagtaccattggtatcgtgatctttggcgagatagtcccacaagcaatatgttcaagacatggcctggccgtgggcgcaaacacaattttcctcaccaagttttttatgatgatgacatttccggcaagctatccagtctccaaactgttggattgtgtactcggtcaggagatcggcaccgtctataaccgcgaaaaactgctggagatgctgcgcgtaactgacccatacaatgatcttgtgaaagaagagctgaacattatacagggtgccctggagctgcggaccaagaccgtggaggatgtgatgactcccctaagggactgttttatgatcacaggcgaagctatcctagatttcaatactatgtccgagatcatggaaagtgggtacaccaggattccagtctttgaaggcgaacggagtaacatagtcgacctactctttgttaaagatttagcttttgtcgatccagacgattgcacacctctgaagaccatcaccaaattctataaccacccacttcactttgtgttcaacgatacaaagctcgatgctatgctggaggagtttaaaaaaggaaagagtcatttggcaattgtacagagggttaacaacgagggagaaggcgaccctttttacgaagttcttggtatcgtgaccctagaagacgtaatcgaggaaatcatcaagagcgaaatcctggatgaaaccgatctctatacagacaaccgtactaaaaagaaggtggcgcaccgcgaacgcaagcaagatttttccgccttcaaacagaccgactccgagatgaaagtcaaaatctctcctcagcttctcttggcaatgcaccttgtgttcatctccatagaggtggaagcattcagtcccagccagatgagcgagaagatcctgctgagattactcaagcatcccaacgtgatacaggaactaaagtacgatgaaaagaataaaaaagcacccgagtattatctgtaccaaagaaataaaccagtagattattttgtgttgatcctgcaggggaaagttgaggtggaagctggcaaagaagggatgaagttcgaggccagcgcgttcagctattacggggttatggccctaaccgccagccctgtaccactgtcactctccaggacctttgttgtgagtagaaccgaacttctcgccgctgggagccccggagaaaataaatctcccccacggccttgtggacttaaccattccgacagtctctcccggagtgataggatcgatgccgtgactccaactttaggctcttcaaacaaccagctgaatagctcactcctgcaggtgtacataccggactactctgttagagcgctgagtgatctgcaatttgtgaaaatcagtagacaacaatatcagaatgccctcatggcttcgcggatggataaaaccccacaaagttcagatagcgaaaacaccaaaatcgaactgacactgactgaactgcatgatggtctccccgatgaaacggccaatctccttaatgaacagaattgtgtcacacactcaaaagcaaatcacagtctgcacaatgagggcgctatctag

SEQ ID NO: 194258 - DNA, 4053 bp, Artificial Sequence
  derived and/or modified sequence
agtcagggaggcgaactgctgagcactggccgcggacgctccgttgcagtctcgcccaggggccggtacctgcgctcgcgccgccgggttgaaaggatgaagccgcagctggagcagccaccctatgattggctgtggcgcttgtgaacccaaagtaaagatggcgggcgggcaggcagccgccgcactgcccacttggaagatggcggcgcgccgcagcctcagcgctcgcggccgggggatcctgcaggcggctgcggggcggctgctgccgctgctcctgctgagctgctgctgcggtgcgggcggctgcgcagcggtgggcgagaatgaggagacggtgatcatcgggctgcgactggaggacacgaacgacgtgtcgttcatggaagggggggcgctgcgggtgagcgaacggacccgggtcaagctgcgggtgtacgggcagaacatcaataacgagacgtggtcccgcatcgccttcaccgagcacgagcggcggcgccacagcccgggggagcgcgggctggggggccccgcgccgccagagccggacagcggcccccagcgatgcggcatccgcacctcagacatcatcatcttgccccacatcattctcaaccgccgcacctcgggcatcatcgagatcgagatcaaaccgctacgcaagatggagaagagcaagtcctattacctgtgcacgtcgctctccacgcccgccctgggcgccggcggctcggggtccacgggtggcgccgtcgggggcaagggtggctcgggggtggccgggctcccgccgcccccgtgggccgagaccacctggatttaccacgacggcgaggacaccaagatgatcgtaggcgaagagaagaagttcctgctgcccttctggctgcaggtgatcttcatttcgctgctgctgtgcctgtcgggcatgttcagcggcctcaacctggggctcatggccctggacccgatggagctgcgcatcgtgcagaactgcggcacggagaaggagaagaattacgccaagcgcatcgagccggtgcgcaggcagggcaactacctgctgtgctcactgctgctgggcaacgtgctggtcaacaccacgctcaccatcctgctcgacgacatcgccggctcgggcctcgtggccgtggtagtctccaccatcggtatcgtcatcttcggagagatcgtgccccaggccatctgctcccggcatggcctggctgtgggggccaacaccatcttcctcaccaagtttttcatgatgatgaccttccccgcttcctacccggtcagcaagctgctggactgcgtcctgggccaggagataggcaccgtctataaccgggaaaaactgctggagatgctccgggtcaccgatccctacaacgacctcgttaaggaggagctgaacatcatccaaggggcgctggagctccgcaccaagacggtggaggacgtgatgaccccactccgggactgcttcatgatcaccggcgaagccatcctggacttcaacaccatgtctgagatcatggagagcggctacacccgcattccagtgtttgaaggggagcgctccaatatcgtggacctgctgtttgtcaaagacttggccttcgtggatcccgatgactgtacccccctgaaaaccatcaccaaattttataaccaccccttgcactttgttttcaatgacaccaagttggacgctatgctggaagaatttaagaaaggtaaatctcacctggctatcgtgcagcgggtaaacaatgagggagaaggggatccattttatgaagttctgggaatcgtcaccttagaagatgtgattgaagaaatcatcaaatctgagattcttgatgaaacagatttatacactgacaacagaacgaaaaagaaagtggctcaccgggaacgaaagcaagatttttctgcctttaagcagacagacagtgagatgaaggttaaaatatcaccacagctcctcctggccatgcaccgtttcctagcaacagaagtagaagcatttagcccatcccagatgtcagagaagatccttctaaggctgctaaagcaccccaatgtcatccaggaactgaaatatgatgagaagaacaagaaagcccccgaatactacctctaccagcgcaacaagccagtagactacttcgttctcattctgcaggggaaagtggaagttgaagctgggaaagaaggtatgaagtttgaagcgagcgccttctcatactatggcgtgatggccctgacagcctctccagttcctttgtccctgtctcgtacctttgttgtcagcagaacagagttgttagcagcaggttctccaggtgaaaataagtcccctcctcgcccatgtggcttgaatcactcagactctctcagtcgaagcgaccggattgacgccgtcacaccaacactggggagcagcaataaccagctcaattcttcgctcctccaagtctacatccccgattactcggtgcgagccctttcggatctgcagtttgttaagatctcaagacagcaataccaaaatgccttgatggcatcccggatggacaaaaccccccagtcttcagacagtgaaaacactaaaatcgaattgactcttacggagctgcatgacgggttgccagacgagacagccaacctgctcaacgaacagaactgtgtgacgcacagtaaggccaaccacagcctgcacaacgaaggcgccatctaggccgcgctggctgcacccgcccaggcccgcacccgcccagtcccgagggcccggccctgtctgcccatgacttcactggtgtgagcttgtccgccatgctgtaccctgcaacatcctgagaccaaagaccttgtgcccttcccaggagccgcggaggaggacagtgagggaggaatggaaacgagagatgtgaagttggcagccggggcatggcgttcaagattttggagatgaactgattccgcccaaatagaatcatgtttattttttcagctctcccttttatcattattcacactcctctgccctcgatttgcatgaagttgaaaattgttgcgatttattttttcaagagatcatgtttttaaagtgtcttttgcagagttttaagttgttctgtctgaactctgctgtgatcccatgatgtgaccctgatgggctggacttgcccctccggtagccttccttggccctcccagcgaggggcacccttcctctgtgccccagtgggcatcaccgtcgatctcgctggctgaatgaagaagaccgtgttactgcagaacctgccaagtctgtcatcactgtggggtgtagcctgcctcagagggacctgcaatcacctctctgagctcagtggtattttgagaatttaatgtttaactgtacccctttccctcaggaagatttaacatttgcttgggaatgtgattttgctcccaccctaaggaatttttatcaccaaaatgaatgttaatgaatttaaaacccatggtttatcattggcaagaggcaagttgacttcatcctgtcattccagcctggggtctgccagccagccctcctccccgacccagcgcctaagctcacagagtgtcgtcgcccacctccctggtccttgctcttgttaacccaagatgctgctacacagatgccaaatggaaatcttccacagggctttttcagtaaacacgtgatgtggagtgcaagctcctccccttcccactagaacatactttaacagaaaacgagtcggaccttctagctgcactctgtactgtgtgccgagaaggcatttctagacccgtgtttttaaaggagggaactttggggattgccagcccctgctcctcctcccagggagccaactgtccctcctcccctgtccctgggcccatggggcccggcagtggctgtgtcccctgcctgagggctctgtgcctcctgcctcagatgcggcctgtgccagagaggctgcctgtacagccagggtcagtttggccccaaacagggattcagaaacc

SEQ ID NO: 194259 - DNA, 4205 bp, Artificial Sequence
  derived and/or modified sequence
cgagcctcggggttcctcagctggctgaggtggagtcagtgtcagtcagggaggcgaactgctgagcactggccgcggacgctccgttgcagtctcgcccaggggccggtacctgcgctcgcgccgccgggttgaaaggatgaagccgcagctggagcagccaccctatgattggctgtggcgcttgtgaacccaaagtaaagatggcgggcgggcaggcagccgccgcactgcccacttggaagatggcggcgcgccgcagcctcagcgctcgcggccgggggatcctgcaggcggctgcggggcggctgctgccgctgctcctgctgagctgctgctgcggtgcgggcggctgcgcagcggtgggcgagaatgaggagacggtgatcatcgggctgcgactggaggacacgaacgacgtgtcgttcatggaagggggggcgctgcgggtgagcgaacggacccgggtcaagctgcgggtgtacgggcagaacatcaataacgagacgtggtcccgcatcgccttcaccgagcacgagcggcggcgccacagcccgggggagcgcgggctggggggccccgcgccgccagagccggacagcggcccccagcgatgcggcatccgcacctcagacatcatcatcttgccccacatcattctcaaccgccgcacctcgggcatcatcgagatcgagatcaaaccgctacgcaagatggagaagagcaagtcctattacctgtgcacgtcgctctccacgcccgccctgggcgccggcggctcggggtccacgggtggcgccgtcgggggcaagggtggctcgggggtggccgggctcccgccgcccccgtgggccgagaccacctggatttaccacgacggcgaggacaccaagatgatcgtaggcgaagagaagaagttcctgctgcccttctggctgcaggtgatcttcatttcgctgctgctgtgcctgtcgggcatgttcagcggcctcaacctggggctcatggccctggacccgatggagctgcgcatcgtgcagaactgcggcacggagaaggagaagaattacgccaagcgcatcgagccggtgcgcaggcagggcaactacctgctgtgctcactgctgctgggcaacgtgctggtcaacaccacgctcaccatcctgctcgacgacatcgccggctcgggcctcgtggccgtggtagtctccaccatcggtatcgtcatcttcggagagatcgtgccccaggccatctgctcccggcatggcctggctgtgggggccaacaccatcttcctcaccaagtttttcatgatgatgaccttccccgcttcctacccggtcagcaagctgctggactgcgtcctgggccaggagataggcaccgtctataaccgggaaaaactgctggagatgctccgggtcaccgatccctacaacgacctcgttaaggaggagctgaacatcatccaaggggcgctggagctccgcaccaagacggtggaggacgtgatgaccccactccgggactgcttcatgatcaccggcgaagccatcctggacttcaacaccatgtctgagatcatggagagcggctacacccgcattccagtgtttgaaggggagcgctccaatatcgtggacctgctgtttgtcaaagacttggccttcgtggatcccgatgactgtacccccctgaaaaccatcaccaaattttataaccaccccttgcactttgttttcaatgacaccaagttggacgctatgctggaagaatttaagaaaggtaaatctcacctggctatcgtgcagcgggtaaacaatgagggagaaggggatccattttatgaagttctgggaatcgtcaccttagaagatgtgattgaagaaatcatcaaatctgagattcttgatgaaacagatttatacactgacaacagaacgaaaaagaaagtggctcaccgggaacgaaagcaagatttttctgcctttaagcagacagacagtgagatgaaggttaaaatatcaccacagctcctcctggccatgcaccttgtgtttatatctatagaagtagaagcatttagcccatcccagatgtcagagaagatccttctaaggctgctaaagcaccccaatgtcatccaggaactgaaatatgatgagaagaacaagaaagcccccgaatactacctctaccagcgcaacaagccagtagactacttcgttctcattctgcaggggaaagtggaagttgaagctgggaaagaaggtatgaagtttgaagcgagcgccttctcatactatggcgtgatggccctgacagcctctccagttcctttgtccctgtctcgtacctttgttgtcagcagaacagagttgttagcagcaggttctccaggtgaaaataagtcccctcctcgcccatgtggcttgaatcactcagactctctcagtcgaagcgaccggattgacgccgtcacaccaacactggggagcagcaataaccagctcaattcttcgctcctccaagtctacatccccgattactcggtgcgagccctttcggatctgcagtttgttaagatctcaagacagcaataccaaaatgccttgatggcatcccggatggacaaaaccccccagtcttcagacagtgaaaacactaaaatcgaattgactcttacggagctgcatgacgggttgccagacgagacagccaacctgctcaacgaacagaactgtgtgacgcacagtaaggccaaccacagcctgcacaacgaaggcgccatctaggccgcgctggctgcacccgcccaggcccgcacccgcccagtcccgagggcccggccctgtctgcccatgacttcactggtgtgagcttgtccgccatgctgtaccctgcaacatcctgagaccaaagaccttgtgcccttcccaggagccgcggaggaggacagtgagggaggaatggaaacgagagatgtgaagttggcagccggggcatggcgttcaagattttggagatgaactgattccgcccaaatagaatcatgtttattttttcagctctcccttttatcattattcacactcctctgccctcgatttgcatgaagttgaaaattgttgcgatttattttttcaagagatcatgtttttaaagtgtcttttgcagagttttaagttgttctgtctgaactctgctgtgatcccatgatgtgaccctgatgggctggacttgcccctccggtagccttccttggccctcccagcgaggggcacccttcctctgtgccccagtgggcatcaccgtcgatctcgctggctgaatgaagaagaccgtgttactgcagaacctgccaagtctgtcatcactgtggggtgtagcctgcctcagagggacctgcaatcacctctctgagctcagtggtattttgagaatttaatgtttaactgtacccctttccctcaggaagatttaacatttgcttgggaatgtgattttgctcccaccctaaggaatttttatcaccaaaatgaatgttaatgaatttaaaacccatggtttatcattggcaagaggcaagttgacttcatcctgtcattccagcctggggtctgccagccagccctcctccccgacccagcgcctaagctcacagagtgtcgtcgcccacctccctggtccttgctcttgttaacccaagatgctgctacacagatgccaaatggaaatcttccacagggctttttcagtaaacacgtgatgtggagtgcaagctcctccccttcccactagaacatactttaacagaaaacgagtcggaccttctagctgcactctgtactgtgtgccgagaaggcatttctagacccgtgtttttaaaggagggaactttggggattgccagcccctgctcctcctcccagggagccaactgtccctcctcccctgtccctgggcccatggggcccggcagtggctgtgtcccctgcctgagggctctgtgcctcctgcctcagatgcggcctgtgccagagaggctgcctgtacagccagggtcagtttggccccaaacagggattcagaaaccaaatgtgtgttgtggccattttatgtgtgtctccgtcttattttaataccaaattcatcatgtagtgaaattatgtcaggaggtatatgagtgactgaattcttaa

SEQ ID NO: 194260 - DNA, 2628 bp, Artificial Sequence
  derived and/or modified sequence
atgatcggctgcggcgcctgcgagcccaaggtgaagatggccggcggccaggccgccgccgccctgcccacctggaagatggccgccagaagaagcctgagcgccagaggcagaggcatcctgcaggccgccgccggcagactgctgcccctgctgctgctgagctgctgctgcggcgccggcggctgcgccgccgtgggcgagaacgaggagaccgtgatcatcggcctgagactggaggacaccaacgacgtgagcttcatggagggcggcgccctgagagtgagcgagagaaccagagtgaagctgagagtgtacggccagaacatcaacaacgagacctggagcagaatcgccttcaccgagcacgagagaagaagacacagccccggcgagagaggcctgggcggccccgccccccccgagcccgacagcggcccccagagatgcggcatcagaaccagcgacatcatcatcctgccccacatcatcctgaacagaagaaccagcggcatcatcgagatcgagatcaagcccctgagaaagatggagaagagcaagagctactacctgtgcaccagcctgagcacccccgccctgggcgccggcggcagcggcagcaccggcggcgccgtgggcggcaagggcggcagcggcgtggccggcctgcccccccccccctgggccgagaccacctggatctaccacgacggcgaggacaccaagatgatcgtgggcgaggagaagaagttcctgctgcccttctggctgcaggtgatcttcatcagcctgctgctgtgcctgagcggcatgttcagcggcctgaacctgggcctgatggccctggaccccatggagctgagaatcgtgcagaactgcggcaccgagaaggagaagaactacgccaagagaatcgagcccgtgagaagacagggcaactacctgctgtgcagcctgctgctgggcaacgtgctggtgaacaccaccctgaccatcctgctggacgacatcgccggcagcggcctggtggccgtggtggtgagcaccatcggcatcgtgatcttcggcgagatcgtgccccaggccatctgcagcagacacggcctggccgtgggcgccaacaccatcttcctgaccaagttcttcatgatgatgaccttccccgccagctaccccgtgagcaagctgctggactgcgtgctgggccaggagatcggcaccgtgtacaacagagagaagctgctggagatgctgagagtgaccgacccctacaacgacctggtgaaggaggagctgaacatcatccagggcgccctggagctgagaaccaagaccgtggaggacgtgatgacccccctgagagactgcttcatgatcaccggcgaggccatcctggacttcaacaccatgagcgagatcatggagagcggctacaccagaatccccgtgttcgagggcgagagaagcaacatcgtggacctgctgttcgtgaaggacctggccttcgtggaccccgacgactgcacccccctgaagaccatcaccaagttctacaaccaccccctgcacttcgtgttcaacgacaccaagctggacgccatgctggaggagttcaagaagggcaagagccacctggccatcgtgcagagagtgaacaacgagggcgagggcgaccccttctacgaggtgctgggcatcgtgaccctggaggacgtgatcgaggagatcatcaagagcgagatcctggacgagaccgacctgtacaccgacaacagaaccaagaagaaggtggcccacagagagagaaagcaggacttcagcgccttcaagcagaccgacagcgagatgaaggtgaagatcagcccccagctgctgctggccatgcacagattcctggccaccgaggtggaggccttcagccccagccagatgagcgagaagatcctgctgagactgctgaagcaccccaacgtgatccaggagctgaagtacgacgagaagaacaagaaggcccccgagtactacctgtaccagagaaacaagcccgtggactacttcgtgctgatcctgcagggcaaggtggaggtggaggccggcaaggagggcatgaagttcgaggccagcgccttcagctactacggcgtgatggccctgaccgccagccccgtgcccctgagcctgagcagaaccttcgtggtgagcagaaccgagctgctggccgccggcagccccggcgagaacaagagcccccccagaccctgcggcctgaaccacagcgacagcctgagcagaagcgacagaatcgacgccgtgacccccaccctgggcagcagcaacaaccagctgaacagcagcctgctgcaggtgtacatccccgactacagcgtgagagccctgagcgacctgcagttcgtgaagatcagcagacagcagtaccagaacgccctgatggccagcagaatggacaagaccccccagagcagcgacagcgagaacaccaagatcgagctgaccctgaccgagctgcacgacggcctgcccgacgagaccgccaacctgctgaacgagcagaactgcgtgacccacagcaaggccaaccacagcctgcacaacgagggcgccatctag

SEQ ID NO: 194261 - DNA, 2631 bp, Artificial Sequence
  derived and/or modified sequence
atgatcggctgcggcgcctgcgagcccaaggtgaagatggccggcggccaggccgccgccgccctgcccacctggaagatggccgccagaagaagcctgagcgccagaggcagaggcatcctgcaggccgccgccggcagactgctgcccctgctgctgctgagctgctgctgcggcgccggcggctgcgccgccgtgggcgagaacgaggagaccgtgatcatcggcctgagactggaggacaccaacgacgtgagcttcatggagggcggcgccctgagagtgagcgagagaaccagagtgaagctgagagtgtacggccagaacatcaacaacgagacctggagcagaatcgccttcaccgagcacgagagaagaagacacagccccggcgagagaggcctgggcggccccgccccccccgagcccgacagcggcccccagagatgcggcatcagaaccagcgacatcatcatcctgccccacatcatcctgaacagaagaaccagcggcatcatcgagatcgagatcaagcccctgagaaagatggagaagagcaagagctactacctgtgcaccagcctgagcacccccgccctgggcgccggcggcagcggcagcaccggcggcgccgtgggcggcaagggcggcagcggcgtggccggcctgcccccccccccctgggccgagaccacctggatctaccacgacggcgaggacaccaagatgatcgtgggcgaggagaagaagttcctgctgcccttctggctgcaggtgatcttcatcagcctgctgctgtgcctgagcggcatgttcagcggcctgaacctgggcctgatggccctggaccccatggagctgagaatcgtgcagaactgcggcaccgagaaggagaagaactacgccaagagaatcgagcccgtgagaagacagggcaactacctgctgtgcagcctgctgctgggcaacgtgctggtgaacaccaccctgaccatcctgctggacgacatcgccggcagcggcctggtggccgtggtggtgagcaccatcggcatcgtgatcttcggcgagatcgtgccccaggccatctgcagcagacacggcctggccgtgggcgccaacaccatcttcctgaccaagttcttcatgatgatgaccttccccgccagctaccccgtgagcaagctgctggactgcgtgctgggccaggagatcggcaccgtgtacaacagagagaagctgctggagatgctgagagtgaccgacccctacaacgacctggtgaaggaggagctgaacatcatccagggcgccctggagctgagaaccaagaccgtggaggacgtgatgacccccctgagagactgcttcatgatcaccggcgaggccatcctggacttcaacaccatgagcgagatcatggagagcggctacaccagaatccccgtgttcgagggcgagagaagcaacatcgtggacctgctgttcgtgaaggacctggccttcgtggaccccgacgactgcacccccctgaagaccatcaccaagttctacaaccaccccctgcacttcgtgttcaacgacaccaagctggacgccatgctggaggagttcaagaagggcaagagccacctggccatcgtgcagagagtgaacaacgagggcgagggcgaccccttctacgaggtgctgggcatcgtgaccctggaggacgtgatcgaggagatcatcaagagcgagatcctggacgagaccgacctgtacaccgacaacagaaccaagaagaaggtggcccacagagagagaaagcaggacttcagcgccttcaagcagaccgacagcgagatgaaggtgaagatcagcccccagctgctgctggccatgcacctggtgttcatcagcatcgaggtggaggccttcagccccagccagatgagcgagaagatcctgctgagactgctgaagcaccccaacgtgatccaggagctgaagtacgacgagaagaacaagaaggcccccgagtactacctgtaccagagaaacaagcccgtggactacttcgtgctgatcctgcagggcaaggtggaggtggaggccggcaaggagggcatgaagttcgaggccagcgccttcagctactacggcgtgatggccctgaccgccagccccgtgcccctgagcctgagcagaaccttcgtggtgagcagaaccgagctgctggccgccggcagccccggcgagaacaagagcccccccagaccctgcggcctgaaccacagcgacagcctgagcagaagcgacagaatcgacgccgtgacccccaccctgggcagcagcaacaaccagctgaacagcagcctgctgcaggtgtacatccccgactacagcgtgagagccctgagcgacctgcagttcgtgaagatcagcagacagcagtaccagaacgccctgatggccagcagaatggacaagaccccccagagcagcgacagcgagaacaccaagatcgagctgaccctgaccgagctgcacgacggcctgcccgacgagaccgccaacctgctgaacgagcagaactgcgtgacccacagcaaggccaaccacagcctgcacaacgagggcgccatctag

SEQ ID NO: 194262 - protein, 1098 aa, Artificial Sequence
  derived and/or modified sequence
MLKTESSGERTTLRSASPHRNAYRTEFQALKSTFDKPKSDGEQKTKEGEGSQQSRGRKYGSNVNRIKNLFMQMGMEPNENAAVIAKTRGKGGHSSPQRRMKPKEFLEKTDGSVVKLESSVSERISRFDTMYDGPSYSKFTETRKMFERSVHESGQNNRYSPKKEKAGGSEPQDEWGGSKSNRGSTDSLDSLSSRTEAVSPTVSQLSAVFENTDSPSAIISEKAENNEYSVTGHYPLNLPSVTVTNLDTFGHLKDSNSWPPSNKRGVDTEDAHKSNATPVPEVASKSTSLASIPGEEIQQSKEPEDSTSNQQTPDSIDKDGPEEPCAESKAMPKSEIPSPQSQLLEDAEANLVGREAAKQQRKELAGGDFTSPDASASSCGKEVPEDSNNFDGSHVYMHSDYNVYRVRSRYNSDWGETGTEQDEEEDSDENSYYQPDMEYSEIVGLPEEEEIPANRKIKFSSAPIKVFNTYSNEDYDRRNDEVDPVAASAEYELEKRVEKLELFPVELEKDEDGLGISIIGMGVGADAGLEKLGIFVKTVTEGGAAQRDGRIQVNDQIVEVDGISLVGVTQNFAATVLRNTKGNVRFVIGREKPGQVSEVAQLISQTLEQERRQRELLEQHYAQYDADDDETGEYATDEEEDEVGPVLPGSDMAIEVFELPENEDMFSPSELDTSKLSHKFKELQIKHAVTEAEIQKLKTKLQAAENEKVRWELEKTQLQQNIEENKERMLKLESYWIEAQTLCHTVNEHLKETQSQYQALEKKYNKAKKLIKDFQQKELDFIKRQEAERKKIEDLEKAHLVEVQGLQVRIRDLEAEVFRLLKQNGTQVNNNNNIFERRTSLGEVSKGDTMENLDGKQTSCQDGLSQDLNEAVPETERLDSKALKTRAQLSVKNRRQRPSRTRLYDSVSSTDGEDSLERKNFTFNDDFSPSSTSSADLSGLGAEPKTPGLSQSLALSSDESLDMIDDEILDDGQSPKHSQCQNRAVQEWSVQQVSHWLMSLNLEQYVSEFSAQNITGEQLLQLDGNKLKALGMTASQDRAVVKKKLKEMKMSLEKARKAQEKMEKQREKLRRKEQEQMQRKSKKTEKMTSTTAEGAGEQ

SEQ ID NO: 194263 - protein, 41 aa, Artificial Sequence
  derived and/or modified sequence
MLKTESSGERTTLRSASPHRNAYRTEFQALKSTFDKPKSDG

SEQ ID NO: 194264 - DNA, 3297 bp, Artificial Sequence
  derived and/or modified sequence
atgctgaagactgagtctagcggagagagaaccacactaagatctgctagcccccataggaacgcttaccggacagagtttcaggccctaaagtccacgttcgataagccaaaaagcgatggagagcagaagacgaaagagggggaggggtcacagcagtcacgagggcggaagtacggcagtaatgtcaataggatcaaaaacctctttatgcagatgggcatggaacccaacgagaatgctgccgtgattgcaaagacccgcggaaagggaggtcactcttcaccccagaggcggatgaaaccgaaggagttcttagaaaaaacggatgggtctgtggtcaagcttgaatccagtgtttcggagcggatttcacgttttgacactatgtatgacggcccctcttattctaaattcacagagactcggaagatgtttgagcgttctgttcacgaatccggtcagaataatcggtacagccctaagaaggagaaggccggaggctccgagccacaggatgagtgggggggctccaagtcgaatcgaggcagtacggattccctggactcactttccagtcggacggaagcagtgtcccccactgtaagtcaactatccgctgtcttcgaaaacaccgatagcccgagcgccatcatcagcgagaaggctgaaaacaatgaatacagcgtaaccggccattatcctctgaacttgcccagcgtcaccgttaccaaccttgataccttcggacatttaaaagactcaaactcttggccgccctcgaacaaacgcggggtggacaccgaggatgctcacaaatctaacgctacccccgttcccgaggtggccagcaagagtacatctcttgcttcgattccaggggaggagattcaacagagtaaggaacccgaagatagcacgtcaaatcagcagacacctgattcaattgacaaggatggaccagaagagccatgcgccgagtccaaagctatgcctaaatcggagattccttcacctcaatcccagctactggaggacgccgaggcaaacctagttgggcgcgaggccgccaagcaacaacgaaaagagctggcaggtggagacttcaccagtcccgatgcttccgcttcatcctgcggtaaggaagtcccggaagactccaataacttcgacgggtcgcatgtgtacatgcactctgattacaacgtctatcgggtccggtcccggtacaattctgactggggcgagacaggtactgagcaagatgaagaggaggattccgatgaaaacagttactaccaacccgatatggaatactcggagatcgtgggtctccctgaagaggaggagatccctgcaaaccggaagattaagttctcttcggccccaatcaaggtgttcaacacatatagcaacgaagattacgatcggcgcaatgacgaggtcgatcccgtggcggcgtctgcagaatatgaactggaaaagagagtcgaaaaactcgaactgttccccgtcgagcttgagaaggacgaagatggcctcggaatatctattatcggcatgggtgttggagcagacgccggtctggagaaacttggaatcttcgtcaaaacagtcactgaaggaggcgcagctcagcgcgacggtagaatccaggttaacgatcaaatagtggaggtggatggtatctcactagtgggcgtaacccagaacttcgccgccacagtgctgagaaacacaaaagggaatgtgagatttgttattggaagggagaaaccgggccaggtgtcagaagtcgctcagctcatctcccagacactggagcaggaaaggaggcagcgagagttgttggagcagcattatgcgcaatatgacgctgacgacgacgagacaggagagtacgcaaccgatgaagaggaggacgaagttggtcccgtgctgccggggtctgatatggcaatcgaagtgtttgagctgcctgaaaacgaagatatgtttagcccctctgagctggatacctccaagttatcgcataagttcaaggagttacagataaagcatgcagtgaccgaggccgaaatccagaagttgaaaaccaagctgcaggcggctgaaaacgagaaggtgagatgggagctggagaaaactcaattgcagcaaaacatcgaggagaacaaggaacgcatgctcaaattagaatcatactggattgaggctcagacactgtgccatactgtgaatgagcatttgaaggaaacccaatcccagtatcaggctctcgaaaagaagtacaataaagccaagaaactgatcaaggacttccagcagaaggagctggactttattaagagacaagaggcagaacggaaaaaaattgaagacctcgagaaggctcatttggtggaagtccagggtctacaagtaagaattcgcgatctcgaggccgaggtctttaggctgctcaagcagaacgggacccaggtgaataataacaacaacatcttcgaaagacgtacctccctgggcgaggtgagcaagggcgacacgatggagaatctggacggcaaacagacctcatgccaagatggcctcagccaggacctcaatgaggccgtccccgaaacggagcgcctggatagtaaagcattgaagaccagagcccagctgagtgtcaagaatcgacgacagagaccttctaggacgcgactatacgatagtgtgtcttctacagacggggaggattctctggaacgaaaaaattttacatttaacgacgatttcagcccgtcaagcacctcatccgccgacttgagcggactcggtgccgagcctaagactccaggcctctcacaatctctcgctctgtcctcagacgaatctcttgacatgatcgacgacgaaatactggacgacgggcagtcacctaaacactctcagtgtcaaaaccgggccgtccaggaatggagcgtgcagcaggtgagccactggctgatgtccctgaacctagaacaatacgtttcggagttctctgcacagaatataacgggggagcagctgctgcagctcgacggcaacaaactgaaggctttaggcatgactgcgtcccaagaccgggccgtggttaagaaaaaactcaaagagatgaaaatgtccctggagaaagcccgaaaggcccaggagaaaatggaaaaacagagagaaaagctccgaaggaaggagcaggagcagatgcagcgtaagagcaagaagaccgagaagatgacatctacaaccgctgaaggggctggagagcaatag

SEQ ID NO: 194265 - DNA, 3297 bp, Artificial Sequence
  derived and/or modified sequence
atgctgaagaccgaatcgagcggtgaacggaccaccctccggagcgccagcccacaccgtaacgcatataggaccgagtttcaagccctcaagtcaactttcgataaaccgaaatcagacggcgagcaaaaaactaaggagggggagggcagtcagcaatcccgcggtaggaaatacggatctaacgtgaaccgaattaagaatctgttcatgcaaatggggatggaacccaacgagaatgccgcggtcattgctaagactaggggcaagggaggacacagtagcccccaacgccgaatgaagccaaaggagtttctagaaaaaaccgatggtagcgtggttaagctcgagagcagtgtgtccgaacggatctcaaggttcgatacaatgtatgatgggccttcctacagcaaattcaccgagacaaggaaaatgttcgagcggagcgtacatgagagcgggcaaaataatagatattctccaaaaaaggagaaggctggggggtccgagccacaggacgaatggggcggctccaagtcaaacaggggctctacagattcccttgactctctttctagccggacagaggctgtcagccccaccgtgtcacagctgagcgctgtttttgagaatacagacagtccctccgcaataatctccgagaaggctgaaaataatgagtactccgtgacgggacattaccccctcaacctcccctccgtgactgtgactaacttagatacatttgggcacctgaaagattccaatagttggcccccgagcaataaacgcggcgttgacaccgaggatgcccacaaatcaaatgcaacaccggtgccagaggtcgctagtaaatctacgtccctagccagtattccgggggaagaaatacagcagagtaaggaacccgaggactctacgtccaatcagcaaacacctgactctatagacaaagacggtcctgaagaaccttgtgccgagagcaaggccatgcccaaatccgagatcccctcgcctcagagtcagctcctcgaggatgccgaggctaacctggtcgggagagaggctgcgaagcagcagcgaaaggagctcgctggcggagattttactagtcccgacgctagtgccagctcctgcggcaaggaggtacccgaagactctaataactttgatggttcccacgtttatatgcattccgattataatgtgtatagggtgcggagtcgctacaactctgactggggcgagacggggactgagcaagacgaagaggaggattccgatgagaatagttactatcaacccgatatggaatacagcgaaattgtcggtttacccgaggaggaagagatcccggcaaaccggaaaatcaagttctcctctgctccaataaaagtttttaacacctacagtaacgaggattatgataggcggaacgatgaggttgaccccgtggccgcttcagctgagtacgagttggagaaacgagtcgagaagctagagcttttccctgtagagttggaaaaagacgaagacggcctaggaatctctattatcgggatgggcgttggagccgacgctgggctggaaaagctgggaatcttcgtgaagaccgtgaccgaggggggtgcagcccagagggacggacgaattcaagttaacgaccagatcgtggaggtagacggcattagcctggtgggcgtgactcagaatttcgccgcaaccgtgctccggaacaccaaaggaaacgtcagattcgtaattggaagagagaaacctggacaagtgagcgaggttgctcagctaatctcccagacacttgaacaggagagaaggcagcgggaacttctcgagcagcactatgctcagtacgacgcggacgacgacgaaaccggggagtatgccacagatgaagaggaggatgaggtcggtccggttctcccaggctccgatatggccatcgaagtgtttgaattgccagaaaatgaggatatgttctctccttcggagctggataccagtaagctcagccataagttcaaggagctgcagattaagcatgctgtgaccgaggcagagattcagaaactgaagacgaaactccaagcagcggagaacgagaaggttcggtgggagttggaaaaaactcagttgcagcaaaatatcgaagaaaataaggaacggatgctgaagctcgaatcctactggatcgaggctcagaccctttgtcacacagtcaatgaacaccttaaagaaacccagtcccagtatcaggccttagagaagaaatacaacaaagcaaaaaaattgattaaagatttccagcagaaggaattagatttcattaagagacaggaagccgagcggaagaagatagaggacctggaaaaagctcaccttgtggaagttcagggacttcaagtgaggattcgcgaccttgaggccgaggtttttcgcctgctgaaacagaacgggacacaggtgaacaacaataacaatatcttcgagaggcggacttcactcggggaggtgagcaagggcgatacaatggagaatctcgacgggaaacaaaccagctgtcaggatgggctcagccaagacctaaatgaggccgtgcctgagaccgagagattggactccaaagcattgaagacgagggcgcagctttcagtgaagaatcggcgtcagaggccgtcccgtacacgcctgtacgacagtgtgagctcgactgacggggaggattccttggagcgcaagaacttcacattcaacgacgacttctctccaagtagcacctcttccgccgacctctccggcctgggagctgaacccaagacacctgggttatctcagagccttgccctctcgtccgatgagagccttgacatgatagacgacgagattttggacgatggacagtctcctaagcactcccagtgccaaaatagggccgtgcaggagtggtctgtccagcaagtaagtcactggcttatgtccttgaacttggagcaatacgtgtctgagttttccgcccagaacataacaggcgagcagctcctgcagctggatggtaacaaactaaaggcactgggaatgacagcctctcaggacagagctgttgtgaagaaaaaattgaaggaaatgaagatgtctctggaaaaggccagaaaagcccaggaaaaaatggagaaacagagggaaaaactgaggcggaaggaacaggaacagatgcagaggaaatctaagaagacggaaaaaatgacctctactaccgcagagggcgctggggaacagtag

SEQ ID NO: 194266 - DNA, 3297 bp, Artificial Sequence
  derived and/or modified sequence
atgctgaagacagagagcagtggagagaggaccaccctgcggagcgccagcccccacagaaatgcctacagaacagagttccaggccctgaagagcacctttgacaagcccaagagtgatggagagcagaagaccaaggagggggagggcagccagcagagccggggcaggaaatatggcagcaatgtgaaccgcatcaagaacctcttcatgcagatgggcatggagcccaatgaaaatgctgctgtgattgccaagacccggggcaagggcggccacagcagcccccagaggaggatgaagcccaaggagttcctggagaagacagatggctctgtggtgaagctggagagctctgtgtctgagcgcatcagcagatttgacaccatgtatgatggccccagctacagcaagttcacagagaccaggaagatgtttgagaggtctgtgcatgaaagtggccagaacaaccgctacagccccaagaaggagaaggccggcggcagcgagccccaggatgagtggggcggcagcaagagcaacagaggcagcacagacagcctggacagcctgagcagcaggacagaagctgtgagccccaccgtgtcccagctgtctgctgtgtttgagaacacagacagccccagcgccatcatcagcgagaaggccgagaacaatgagtacagcgtgacaggccactaccccctgaacctgcccagcgtgacagtgaccaacctggacaccttcggccacctgaaggacagcaacagctggccacccagcaacaagaggggcgtggacacagaagatgcccacaagagcaatgccacccctgtgcctgaggtggccagcaagagcaccagcctggccagcatccctggagaggagatccagcagagcaaggagcctgaggacagcaccagcaaccagcagaccccagacagcattgacaaggatggccctgaggagccctgtgccgagagcaaggccatgcccaagtctgagatccccagcccccagagccagctgctggaggatgctgaggccaacctggtgggccgggaggccgccaagcagcagaggaaggagctggccggcggggacttcaccagcccagatgccagcgccagcagctgtgggaaggaggtgcctgaggacagcaacaactttgatggcagccacgtgtacatgcacagcgactacaacgtgtacagagtgcgcagccgctacaacagcgactggggcgagactggaacagagcaggatgaggaggaggacagtgatgaaaattcctactaccagcctgacatggagtacagcgagatcgtgggcctgcctgaggaggaggagatcccagccaacaggaagatcaagttcagcagcgcccccatcaaggtgttcaacacctacagcaatgaagattatgacagaagaaatgatgaggtggaccctgtggccgccagcgcagaatatgagctggagaagagggtggagaagctggagctgtttcctgtggagctggagaaggatgaagatggcctgggcatcagcatcatcggcatgggcgtgggcgcagatgctggcctggagaagctgggcatctttgtgaagacagtgacagagggcggggccgcccagagagatggccgcatccaggtgaatgaccagatcgtggaggtggatggcatcagcctggtgggcgtgacccagaactttgctgccaccgtgctgaggaacaccaagggaaatgtgcgcttcgtcatcggccgggagaagccaggccaggtgtctgaggtggcccagctgatcagccagaccctggagcaggagcggcggcagcgggagctgctggagcagcactacgcccagtatgatgctgatgatgatgaaacaggagaatatgccacagatgaggaggaggatgaggtgggccctgtgctgcccggcagtgacatggccatcgaggtgtttgagctgcctgaaaatgaagacatgttcagccccagcgagctggacaccagcaagctgagccacaagttcaaggagctgcagatcaagcatgctgtgacagaggccgagatccagaagctgaagaccaagctgcaggccgcagaaaatgagaaggtgcgctgggagctggagaagacccagctgcagcagaacatcgaggagaacaaggagaggatgctgaagctggagagctactggattgaggcccagaccctgtgccacacagtgaatgagcacctgaaggagacccagagccagtaccaggccctggagaagaagtacaacaaggccaagaagctgatcaaggacttccagcagaaggagctggacttcatcaagaggcaggaggccgagaggaagaagattgaggacctggagaaggcccacctggtggaggtgcagggcctgcaggtgcgcatccgggacctggaggccgaggtgttccggctgctgaagcagaatggcacccaggtgaacaacaacaacaacatctttgaaagaaggaccagcctgggggaggtgtccaagggggacaccatggagaacctggatggcaagcagaccagctgccaggacggcctgagccaggacctgaatgaagctgtgcctgagacagagcggctggacagcaaggccctgaagacccgggcccagctgtctgtgaagaacagacggcagaggcccagcaggacccggctgtatgacagcgtgagcagcacagatggagaggacagcctggagaggaagaacttcaccttcaatgatgacttcagccccagcagcaccagcagcgctgacctgagcggcctgggcgctgagcccaagaccccaggcctgagccagagcctggccctgagcagtgatgagagcctggacatgattgatgatgagatcctggatgatggccagagccccaagcacagccagtgccagaacagagctgtgcaggagtggagcgtgcagcaggtgagccactggctgatgagcctgaacctggagcagtatgtgtctgagttcagcgcccagaacatcactggagagcagctgctgcagctggatggcaacaagctgaaggccctgggcatgacagccagccaggacagagctgtggtgaagaagaagctgaaggagatgaagatgagcctggagaaggccaggaaggcccaggagaagatggagaagcagcgggagaagctgcggaggaaggagcaggagcagatgcagaggaagagcaagaagacagagaagatgaccagcaccacagctgagggcgctggggagcagtag

SEQ ID NO: 194267 - DNA, 3297 bp, Artificial Sequence
  derived and/or modified sequence
atgctgaagaccgagagcagcggcgagcggaccaccctgcggagcgcatcacctcacagaaatgcatatcgaaccgaatttcaggccctcaaatctacctttgataaaccaaaatcagacggcgagcagaagactaaagagggggaaggctctcagcagtctcgcggacggaagtacggctccaacgtcaatagaatcaaaaacctgttcatgcagatgggcatggaacccaacgagaatgcagccgtgatcgctaagacgcgaggcaaaggcggccacagcagcccgcaaagacggatgaaaccaaaggaattcctggagaagaccgatggttcagtagtaaagcttgaatcatccgtgagcgagaggatctcaaggtttgacaccatgtacgacggccccagttatagcaagtttacggagacaaggaaaatgtttgaacgcagcgtgcacgagagcggccagaacaatcggtattctcctaagaaagaaaaagcagggggctccgagccccaggatgaatggggaggaagcaagagcaaccgtggttccacggactctctggacagtctgagcagtaggaccgaggccgtcagcccaactgtgtcccagctctcagccgtgtttgagaacaccgattctccctccgccatcatctcagagaaggctgaaaataacgagtattctgtcactgggcactatcctttgaatctccccagtgtgaccgtgacgaatctggacactttcgggcatctcaaagactcgaactcatggccgcctagcaacaagcgcggggtcgacactgaggacgcccataagtctaacgccacgccagtcccagaggtcgccagtaagtcaaccagtctcgctagtattcctggagaagagatacagcaatccaaggagccggaggatagcacgtctaaccaacagacaccagactccatcgataaggatgggccagaggagccttgtgctgagtccaaggccatgcccaagagcgaaattccgtcaccacaatcccaactgctcgaggatgccgaagctaatttggtgggtagagaagctgcaaagcagcagcgtaaggagctggctggtggtgattttacttccccagacgctagcgcctcatcgtgcggaaaagaagtgcctgaagactccaataactttgatgggtcccatgtttatatgcattccgactataacgtctatcgagtcagatcacgatacaattcggactggggcgagaccgggacagagcaagacgaagaggaagattccgacgaaaattcctactatcagccagacatggaatattctgagatagtcgggctacctgaggaggaggagattccagcgaacaggaagataaagttctcaagtgcccctatcaaggtctttaatacctactcaaatgaagattatgataggcgaaacgacgaggtcgaccccgttgctgcctccgccgagtacgagctggaaaaacgtgtggaaaagctcgagttgtttcctgtcgaactcgaaaaagatgaagatggccttggaatttcaatcattgggatgggggtcggagcagatgccgggctggagaaactaggcatctttgtgaagaccgtgacagagggtggcgcagctcaaagggacggccggatccaagttaatgaccagatcgttgaggtggatggaatctcattggtcggagtaacccagaatttcgcagcaaccgtcttgcggaacactaaaggtaacgtacggtttgtcatcggaagagaaaaacccggacaggttagcgaggttgcccagctgatctcacagactttagaacaggagaggcgtcaaagggaactgcttgagcagcactacgcccagtacgacgcggatgatgacgaaaccggtgaatacgccactgatgaagaggaggatgaagtcgggcctgtgctgcctggaagcgatatggcaattgaggtgtttgaattgcccgagaacgaagatatgttcagcccctccgaacttgatactagcaagctgtctcacaagtttaaagaactgcagataaagcatgccgtgacagaggctgagattcagaagcttaagacaaaactgcaggccgccgagaacgagaaagttcgctgggaactggaaaagacgcaactgcagcaaaatatcgaggagaacaaagagaggatgctgaagctcgaatcttactggatcgaagcccagaccctgtgccacacggtgaacgagcacctcaaggagacccagagccaataccaggccctggagaaaaaatacaataaagctaagaaattgataaaagatttccagcagaaagagctcgatttcatcaagcgtcaggaggccgaacgcaaaaagattgaagacctggagaaggcccacctggtggaggtgcaaggactgcaggtgagaatcagggaccttgaggccgaagtctttagactgctgaaacagaatgggacccaggttaataacaataataacattttcgaacggcgcacttccctgggtgaggtgtccaaaggagacaccatggagaacttggatggtaagcagacttcttgccaggatggtctctcccaggacctgaacgaggccgtacccgagacagagcgactcgattctaaagcgctcaagactcgagcccaactgagcgtgaaaaatcgcaggcaacgacctagccgaacccgcctatacgattctgtgtcttctaccgacggggaagactccctggagcgcaaaaacttcactttcaatgacgatttctcaccatcttcaacgtcttctgctgatctgtccggcctgggagctgaaccaaaaactcctggcctttcacagtccctagccctgtccagcgacgaatccctggatatgatcgatgatgagattctggacgatggacaaagtcctaaacactcgcagtgccagaacagagccgtgcaagaatggtcagtacagcaggtgtctcactggcttatgtccttgaatctagagcagtatgtctcagaattcagtgcccagaatatcactggcgaacagctgctgcagctggatggaaacaagctcaaagctctcgggatgacagcttctcaagacagagcagtcgtaaagaagaagctcaaagagatgaagatgtctctggagaaagcaaggaaagcgcaggaaaagatggaaaaacagcgagaaaaactgcggcgcaaagagcaggagcaaatgcaacgaaaaagtaagaagaccgagaagatgaccagcacaacagccgaaggagccggggaacagtag

SEQ ID NO: 194268 - DNA, 3297 bp, Artificial Sequence
  derived and/or modified sequence
atgctgaagaccgagagcagcggcgagcggaccaccctgcggagcgctagccctcacaggaacgcctatagaactgaattccaagcactgaaatcaacgtttgataaacctaaaagcgacggggagcagaagaccaaggagggcgagggtagtcagcagtccagaggacgaaagtacgggagcaatgtgaatcgcattaaaaacctctttatgcagatggggatggaaccaaatgagaacgcagctgttatcgccaaaacccgggggaagggtgggcactcttcaccacagcgcagaatgaagcctaaggaattcctggagaagaccgatggttccgtcgtaaagctggagagcagtgtatccgagcggatttcccgattcgatactatgtacgacggacctagctacagtaagtttaccgagacccgcaagatgttcgaacggtccgtccatgagagcggtcagaataaccgctactctcctaagaaagagaaggcagggggatccgaaccacaggacgagtggggcggcagtaagagcaaccgcgggagcacggactccttggatagtctcagcagccgtacggaggcagtatcaccgacagtctcacagctctcggctgttttcgaaaacacagacagcccttctgctatcatttcagagaaagccgagaacaacgagtactctgtgactggccattatcctctgaacctcccaagcgtgaccgtgaccaacctcgatacgttcggccacttgaaagacagcaatagctggccgcccagcaacaaacgcggtgtagacaccgaggacgcccacaaatccaacgctactcctgtccccgaagttgcttcaaagagtactagcttagcctccatccccggcgaagaaatccaacagtcaaaagagcctgaggacagtactagtaatcaacagacacctgatagtattgataaggatggcccagaagagccctgtgcggagtcaaaggctatgcccaagtctgaaatcccgagtccccaatcccaactgttggaggacgccgaagctaacctggtaggacgcgaggcggcaaagcagcagaggaaagaactggcagggggggatttcacgagcccagacgcctccgcatccagctgcggtaaagaagtcccagaggacagcaataactttgacggcagtcatgtgtacatgcactccgactataacgtgtaccgcgtgcgaagtaggtataacagcgactggggcgagacaggaaccgaacaagacgaggaggaagactccgacgaaaattcctactatcagcctgatatggaatattcagaaattgttgggttgcccgaagaagaggagatcccagcaaaccggaaaattaaatttagctctgcacccataaaggtgtttaatacctattctaatgaggattatgacaggcgaaacgacgaggtggatcccgtcgcagcaagcgccgaatacgagctcgagaagagagttgagaagctggagctgtttcctgtcgaactcgaaaaggatgaagacggcctgggcatctctattatcgggatgggcgtcggtgccgatgctgggctcgagaagctaggaattttcgtgaagactgtgactgaaggcggggccgcacagcgggacggccggatccaggtgaatgaccagatcgtggaggttgatggtatttcgctggtaggcgttacacagaactttgccgcaaccgttttacgaaatacaaagggaaatgtgcggtttgttattggacgggaaaagcccgggcaggtgtcagaggtagcccagcttatcagccagacgctggaacaggagcgtaggcagcgcgagctactcgagcaacattacgcccagtacgatgcagatgacgacgaaaccggagagtacgctaccgatgaggaggaagacgaggtcggacccgtgctgcccgggtccgatatggcgatcgaagtgttcgaactacctgagaacgaagacatgtttagtccttcagaactcgacaccagcaaactgagccataaatttaaggaactccagatcaagcacgcagtgaccgaggccgagatccagaagctgaaaaccaaactccaggctgctgaaaatgaaaaggttcggtgggagctggaaaaaactcagttgcagcagaacattgaggaaaacaaggagaggatgctcaagctcgagtcctactggattgaagctcaaacactgtgccataccgtcaatgagcacctgaaggagactcagagccaatatcaggcactcgaaaaaaagtacaacaaggcaaaaaaactcatcaaagactttcagcaaaaggagctggattttatcaagagacaggaggctgaaagaaaaaagatagaagacctggaaaaggctcacctggtcgaagtgcagggactacaggttagaatacgcgacctggaagctgaagtattccgccttctgaagcagaacggcacacaggtgaacaacaataataacatattcgagagacgcacatctctgggtgaggtatcaaaaggggacaccatggagaatctcgacggcaagcagacctcctgtcaggatggtctgtcacaggatctcaacgaagcggtacctgaaacggagagactcgattcaaaggcgctgaaaactcgggctcagctgtcggtcaagaatcgccgtcagagaccatcacggactagactgtatgactcagtaagtagcacagacggcgaggattccctggaacggaagaatttcacttttaacgatgatttcagccccagtagcacctcttcagcagacctatccggactgggagcagagccaaaaacaccaggtctgtctcagagcttggccctgtccagcgatgagtctttagatatgattgatgatgagattctggacgacggtcagagcccaaagcatagtcagtgccagaacagagctgtgcaggagtggtctgtgcaacaagtgtcccattggctgatgtcccttaatctcgagcagtacgtaagcgaattttccgcccaaaatatcaccggcgagcagctgctccagcttgacgggaacaagctcaaagcactgggcatgactgcgtcccaggatcgggctgtagtgaaaaagaagctcaaggaaatgaagatgagcctggaaaaggctcgcaaagcccaagaaaagatggagaaacagcgggaaaaactgcgaaggaaagaacaggaacagatgcaaagaaagtcaaagaagaccgaaaaaatgacgtccactacagctgagggcgcgggcgagcagtag

SEQ ID NO: 194269 - DNA, 3297 bp, Artificial Sequence
  derived and/or modified sequence
atgctgaaaacggaatcgagcggagagaggactaccttacgatcagcatctccacaccgcaacgcttataggactgaatttcaagccctgaaaagcacctttgataagcctaagtccgacggggagcaaaagacaaaggaaggcgaaggcagccagcagtcacgcggaaggaagtatgggtccaatgtcaaccgcattaagaacttattcatgcagatgggcatggagccaaacgagaatgcagcggttatcgcaaagactagaggaaaggggggacacagttctccccagagacgcatgaagcctaaagagttcctggagaagactgacgggtccgtggtgaagctggaatcaagcgtctcggagaggatctctaggttcgatactatgtacgatggcccaagctactccaagtttactgaaacccgcaagatgttcgaaagaagtgttcatgaaagcggacagaataaccggtattcgcccaaaaaggagaaagccggaggctcggaacctcaggatgagtggggtggctctaaatctaataggggttcaactgactctctcgatagtttatcaagtcggacggaggctgttagcccaaccgtctctcagctgagcgcggtgttcgaaaatactgattctcccagtgccataatctcagagaaggcagagaacaacgagtattctgtgactggccactaccccctgaacctgcccagtgttaccgtaaccaacttggatacctttggtcatctgaaagattctaattcctggcccccttctaataagcgaggggtggacactgaggacgcacacaaatcaaatgccactcctgtgcctgaggtagcatcgaagtcaacctcgctggcatccataccgggagaggagatccagcaatctaaagagccggaggattctacttctaatcaacaaacacccgatagtatcgataaagatggcccagaagaaccatgcgccgagtcgaaggccatgcctaaatctgagattccatcaccccaatctcaattgttggaggatgctgaagctaacctggttggtcgcgaagctgccaaacagcagagaaaggagctagccggaggagacttcacctccccagatgcctccgcttcttcatgcggaaaagaggtgcccgaggacagtaataactttgatgggagccatgtgtacatgcattcagactataatgtctatcgagtgcgatcccgatataattccgactggggggaaactggcactgagcaggacgaggaagaggattctgacgaaaacagctattaccaacctgacatggaatactctgaaatcgtgggactgcccgaggaggaggagatcccagctaatagaaaaattaaattctcctctgctccaattaaggtctttaacacatattccaatgaggactatgacagacgtaatgatgaagtggaccctgtcgcggcttccgctgagtacgaacttgaaaagcgggtcgagaagcttgagctattccctgttgagctggaaaaagacgaagatggcctggggatttccatcattggaatgggcgtgggtgcagatgccggtctggaaaaactgggaatctttgtgaaaacagtgaccgagggcggtgcggcacagcgcgacggccgtatccaagtcaatgaccagattgtggaggttgatggtatcagcctggtcggagttacccagaacttcgcggctactgtattacggaacactaagggaaatgtgagattcgtgattggaagggagaaaccgggtcaagttagcgaggttgctcaattgatatcacagacactagagcaagaacgcagacagagagagctgcttgagcaacactacgcccaatacgacgctgacgatgacgagacgggggaatatgcaactgatgaggaggaagacgaggtgggccctgtgctgcccggatcagatatggctatcgaagtattcgagctccctgaaaacgaggacatgttctcaccgagtgagctcgatacaagcaagttgagtcacaagtttaaagagctccagatcaaacacgctgttactgaagccgaaatccagaaactaaagactaagctgcaggcagcggagaatgagaaggtcagatgggaacttgagaagacccaactccaacaaaatatcgaagagaacaaagagagaatgctcaaactggaatcttattggatcgaggctcagactctgtgtcacaccgttaatgagcacctcaaggagacccagagccaatatcaagctttggagaaaaagtataataaagccaaaaaactcattaaagattttcaacagaaagagctggatttcataaaacgtcaagaggctgagcgaaagaaaatcgaggacctagagaaggcccatcttgtcgaggtgcagggcctacaggtccgcattcgcgacctggaggccgaggtgtttcgcctcctcaaacaaaatggcacgcaggtgaacaataataacaatatcttcgagcgacggaccagtttgggagaggttagcaaaggggacacaatggagaatctggacggcaaacagacctcatgccaggacggcttgtctcaggatctcaacgaagcggttcctgagacggaacggctcgattccaaggcgttaaaaacaagggcgcaattgagtgtgaaaaataggcgccaacggccatcaagaaccagactgtatgattctgtgtcgtctaccgatggagaagatagcctggagcgtaaaaactttacattcaacgacgacttctctccctcctccacatctagcgccgatctcagcggcctgggagctgaacccaaaacccccggactttcccagtcccttgccttgtctagtgatgaaagcctggacatgatcgacgatgagatcttagacgacggccagtcaccgaaacattcacagtgtcagaatagagccgtacaagagtggagtgtgcagcaggtgtctcactggcttatgagcctgaacctcgagcagtacgttagcgagttctccgcacagaatatcaccggcgaacagttactgcagcttgacggcaacaaactgaaggcactggggatgacagcaagccaggaccgggcagtggtgaagaagaaactcaaggagatgaagatgtcccttgagaaggcccgaaaagctcaggaaaagatggagaagcagagagagaagctgcgaagaaaggagcaagagcagatgcagcgaaagagtaagaagaccgagaagatgacatccacaaccgctgaaggagcaggtgagcagtag

SEQ ID NO: 194270 - DNA, 3297 bp, Artificial Sequence
  derived and/or modified sequence
atgctgaagaccgagagcagcggggagagaacaacgctgaggtctgcttctcctcataggaacgcttacaggactgaattccaggccctgaagtccaccttcgataaacccaagtccgacggggagcagaagactaaagagggtgagggttctcaacagagcaggggtcgcaaatatggatctaacgtgaatcggatcaaaaatctctttatgcagatgggtatggaacctaatgagaatgccgcagtgatcgcaaagactagaggcaaagggggacactctagcccccagcgaaggatgaaacccaaggaatttctggagaagactgacggatctgtggttaaactggagtccagcgtgagtgaaaggatcagccgctttgatactatgtacgacggtccgagctatagcaagtttacggagacaaggaagatgtttgagaggagtgtgcacgaatctggccagaataacaggtacagtccaaagaaagaaaaggccggtggctccgaacctcaggatgaatgggggggatccaaaagcaaccggggtagtactgattccctggacagcctatcctctagaactgaagcagtaagccccaccgtctcccagttaagtgccgtgttcgagaacaccgactccccgtcagcgattattagcgagaaggccgaaaataacgagtactccgtcacaggacattacccactaaacctgcccagcgtaactgtgaccaatctggatacatttgggcaccttaaggattccaattcatggcccccttccaacaagaggggggtcgacacagaggacgctcataaaagtaatgcaacacctgttcccgaggtggcgagtaagtcaactagcctggccagcattcctggagaagagatacagcagagcaaggaacccgaggattccacttctaaccagcagacgcccgacagtatcgacaaagatggcccagaagagccttgtgcggaatctaaggcgatgccaaagtccgaaatcccctcccctcagagccaactattggaggatgcagaggcaaatctggtgggccgagaggcggctaagcaacagagaaaggaacttgcaggcggagattttacttcaccggatgcttccgcctctagttgcgggaaagaagtaccagaggactcaaacaacttcgacggaagtcacgtttatatgcatagcgattataatgtgtatagagtcagatcccggtacaactcagattggggggagacagggacagagcaggacgaggaagaggacagtgacgaaaactcatattaccagcctgatatggaatactctgagatcgtgggactgccagaggaagaagagatccctgcaaatcgaaaaattaaatttagctccgctcccatcaaggtttttaatacctacagcaatgaagactatgacaggcgaaatgacgaggtggaccccgtggccgctagcgctgagtatgagttggaaaagcgggtcgaaaaactggaattattcccggtcgaactggaaaaagatgaagatggactgggtatctctataataggcatgggtgtcggggctgatgccggactagaaaagttgggcatatttgtaaagaccgtcactgagggaggtgccgctcagcgagacgggcgaattcaggttaacgaccaaatcgttgaggtggacggaattagcctggtgggggtcacccagaactttgctgctactgtgctacgcaatacaaagggcaacgtgcggttcgtcattggtagggagaaaccaggccaagtgtccgaagtggcccagctgatcagccagacactggagcaggaaaggagacagcgtgaactcctagaacagcattatgcacagtatgatgcggacgatgacgaaaccggggagtatgcaaccgatgaggaggaggacgaggtcggccctgtgctacctgggtcggatatggctatcgaggtgttcgaattgccggagaacgaagacatgtttagcccttctgagctcgacacaagcaaattgtcccacaagttcaaagagttgcaaattaaacacgctgtcactgaggctgagatacagaagcttaagaccaaattgcaagcagcggaaaacgaaaaggtgaggtgggaactagaaaagactcagcttcagcaaaacatagaagaaaataaagagcggatgctcaaattggagtcttactggatcgaggcgcagacactatgccatactgtgaacgaacacctgaaggagacccagtcgcagtaccaggcacttgagaagaaatacaacaaagcaaagaagctgatcaaagacttccaacaaaaagagcttgactttattaagcgccaagaagcagagaggaaaaaaatcgaagaccttgaaaaggcccacctggtcgaagtccagggccttcaggttaggatccgcgatctggaagccgaagtgttcaggctactcaaacaaaacggtacacaggtcaacaacaataacaatattttcgagagacggacaagcctgggcgaagtgagtaagggtgatacaatggaaaacctcgatggaaaacagacaagttgtcaagatggcctttcacaggacctcaacgaagccgtgcccgaaacagagaggcttgattctaaggccctgaagacaagggctcagctatccgttaaaaaccgcagacagaggccatcgcggacaagactctatgattctgtctcctcaaccgatggcgaagactccctggagaggaaaaatttcacctttaacgatgacttctccccaagctcaacctctagcgctgacctgtcaggattaggagctgaaccaaaaacacctggcctgagtcagagcctggctttatcttcagatgaatctcttgatatgatcgacgacgagatactcgacgacggccaatctcctaaacattcgcagtgccagaacagggctgtgcaggagtggtcggtccagcaagtgtctcactggctcatgagtctcaacctcgagcagtacgtgagcgagttcagcgctcaaaatatcacaggtgagcagctcctccagttggacggaaataaattgaaggccctgggcatgactgcctctcaggatagggccgtggtgaagaaaaaactcaaggagatgaagatgtcgctggaaaaggcccgaaaagcacaggaaaaaatggagaagcagagggagaagctgcgcagaaaagagcaagagcagatgcagagaaagagtaaaaagacagagaaaatgacctccaccacggcggagggcgctggtgaacaatag

SEQ ID NO: 194271 - DNA, 9689 bp, Artificial Sequence
  derived and/or modified sequence
ctctcccgggattttgctgccgggctccctctctctgcggccctagagttaatcccatcagccgagatgaacctctagtcttgctttgaaaaaatcattctgtgtaactcttgactgtgactaagttcctaatacacctgttgggacgatcactgacaccgtataccatttgagaggtacttttcttgacccaatactggtgattagagaagagaggtatcttggtttttggtttttttctttgatcattatgaacattggcttttcacccctgaagtgaaaatgttgaaaactgagtcttcaggtgaacgaaccactctcagaagtgcctctcctcacaggaatgcatatcgaactgagtttcaggcactgaaaagtacctttgacaaacccaagtcagatggggaacaaaaaacaaaagaaggtgagggctcccagcagagcagggggaggaaatatggctccaatgtcaacagaattaaaaacctatttatgcagatgggtatggaacccaacgagaatgctgcagtcattgccaaaacaagggggaaaggtggacattcatctcctcagagaagaatgaagcccaaagaatttctggaaaaaacagatggctcagttgttaagttggagtcttctgtttctgaacgaattagtagatttgacactatgtacgatggcccttcatattccaagttcactgagactcgaaagatgtttgagagaagtgtgcatgaatcaggacagaacaaccgctattccccaaagaaagagaaagctggagggagtgaacctcaggatgaatggggaggttccaagtccaacagaggcagtactgattccttggacagccttagctcccgaactgaggctgtctccccaactgtgagtcaactgagtgcagtatttgagaacactgattctcccagtgccatcatttctgagaaggctgaaaacaatgaatactcagtgactgggcattatcccttgaatttaccatctgttactgttacaaatcttgacacatttggtcacctgaaggattctaattcctggcctccttcaaacaagcgaggtgttgatacagaggatgctcacaagagtaatgcaactccagtaccagaagtggcttctaaaagtacctctctagcttcgatacctggtgaagagatccagcagagcaaggaacccgaggactccacatctaatcaacagactcccgacagcattgacaaagatggtcctgaagaaccttgtgctgaaagtaaggcaatgccaaagtccgaaatcccttcaccacaaagccaactgttagaagatgctgaagctaatttggttggaagggaggcagcaaagcaacagaggaaagaacttgcaggtggtgatttcacctctcctgatgcttctgcatccagttgtggaaaagaagtacctgaagattcaaataattttgatggttcccatgtgtacatgcacagtgactataatgtgtatagggtgagatccaggtataattcagactggggagagacaggcactgagcaggatgaggaggaagatagtgatgagaacagttactatcagcctgatatggagtactcggaaattgttggattgccagaagaagaagaaatcccagcaaataggaaaattaagtttagtagtgctcctattaaggttttcaacacatactccaatgaagactatgacaggagaaatgacgaagttgaccctgtggctgcttcagctgagtatgaacttgaaaaacgtgtagaaaagctggaacttttcccagtggagctagagaaagatgaggatggtcttggtataagtattattggaatgggtgttggagcagatgctggacttgaaaagctgggaatattcgtcaagacagtaacagaaggtggtgctgctcaacgggatggcagaatacaagtcaatgaccagattgtggaagtggatggaatcagcttggtgggtgtgacacagaattttgcagcaacagttctcagaaacaccaagggcaacgtcagatttgttattgggcgggaaaaaccaggacaagtgagcgaggttgcccagttgataagccagacactggaacaggagaggcgccagagagagctgctggaacagcactatgcccagtatgatgccgacgatgacgagacaggagaatatgccacagatgaagaagaagatgaggtaggacctgtccttcctggcagcgacatggccattgaagtctttgagctgcctgagaatgaggacatgttttccccatcagaactggacacaagcaagctcagtcacaagttcaaagagttgcaaatcaaacatgcagttacagaagcagagattcaaaaattgaagaccaagctgcaggcagcagaaaatgagaaagtgaggtgggaactagaaaaaacccaactccaacaaaacatagaagagaataaggaaagaatgttgaagttggaaagctactggattgaggcccaaacattatgccacacagtgaatgagcatctcaaagagactcaaagccagtatcaggccttggaaaagaaatacaacaaggcaaagaagttgatcaaggattttcaacaaaaagagcttgatttcatcaaaagacaggaagcagaaagaaagaaaatagaagatttggaaaaagctcatcttgtggaagtgcaaggcctccaagtgcggattagagatttggaagctgaggtattcaggctactgaagcaaaatgggactcaagttaacaataataacaacatctttgagagaagaacatctcttggtgaagtctctaaaggggataccatggagaacttggatggcaagcagacatcttgccaagatggcctaagtcaagacttgaatgaagcagtcccagagacagagcgcctggattcaaaagcactgaaaactcgagcccagctctctgtgaagaacagacgccagagaccctctaggacaagactgtatgatagtgttagttccacagatggggaggacagtctagagagaaagaattttaccttcaatgatgacttcagtcccagcagtaccagttcagcagacctcagcggcttaggagcagaacctaaaacaccagggctctctcagtccttagcactgtcatcagatgagagcctggatatgatagatgacgagatccttgatgatggacagtctcccaaacacagtcagtgtcagaatcgggccgttcaggaatggagtgtgcagcaggtttctcactggttaatgagcctaaatctggagcagtatgtatctgaattcagtgcccaaaacatcactggagaacagctcctgcagttggatggaaataaacttaaggctcttggaatgacagcatcccaggaccgagcagtggtcaaaaagaaactcaaggaaatgaagatgtctctagagaaggctcggaaggcccaagagaaaatggaaaaacaaagagaaaagctaaggagaaaggagcaagagcaaatgcagaggaagtccaaaaagacagaaaagatgacgtcaactacagccgagggtgctggtgagcagtaacacataccctcttacagatgatggagatgctccaagagaagtccccacctcttcctgccctgctctcctccagaggatgaaaaagaaactaaatgataagggtaatgcggctctaggccggctgaggaactgtgtgttgaataactgcattttctgcaatagaatgcactcttaattttaactactaaaataatcccaagccacctttggttcattaacaaaccagagatttcatttaagtagctgtgttttgctcttctctaacttaccaacatcttgtgttgtgttgggtgtgttttgtcacttggagaactagtgtgaccccacccaagagcatgacacaccctggtgttgttaatggagcgccgtgaattttcagtgtgggatcctgaaatggcaattgcacatgtctgcatggcagagagcaccctgccatgagatctgagaccagtacttaacttctaggactgcaacacctactccaatgtgtgggaaagatttgctcttaattctcagtctggacagtgagaccaccccgctgtggaaacatgggtgctctgctctgtagttacctactaagggaaaaggcaagcaagtcattctgcttgctaggcatcaaaaagaaagaaaataaattatagctatttgttaaccactgaaaaaagcaaaagccttaagaatgtggatgtgggtattaccttggggttctgagggtaatatttatcctctagatacggctgaacaagaaagaaaaaaatcagacattaatgcagccatgggatattgggatctgttgaccttgctactgctgtgtgttcagcatttcagcaacactggcaaacacaacacagttcctcttccccctacctaacccaagaaattgaacaggaaattgatttttaaggaaaccaccattttcaggtttcctctcctggggaacattctggctggtcttcagcctgcctatgtcacaatcaggaactcatcacatattttctactcaagatttcccaggtgggctcagttagtattttaacaaatgtacttttaagaaaaatagaaataccagttagaggaaactgtcagttaacattttagagagattttgaatggtttttccgaaccattcctttccatacttcaaagattctcaattttacagaaaaagtttgtttaaggcagtgcataggtatactttagtagtggaggaacttatactaattttaagccagcattaaggatttccatgtttcaccaaactaagtcaagtgcaggagactggggcagaagaaggagaaaataaactcgttttgagaaatttcatgtgatgagggttttttgttttttatgctcatgtatctggttctctttgctgcgttgactctaaaaatgaggttatccactttccaaaggacaagtttcagaataagacttgaggccacatgaattcttggacagtattttacttcttttactttatgggaatctctgctctgttcccagcatctcgtatcttccactagaagtattccatatttagagcctcggcaaggcttttgagtgtaacagattaagggaactcccttgtagccccatcttgtattttaataacagtgtgatttttttttatctgaaaatctgaattcagaaattatctaaactggacatttttaattctgttttacccccaaggcctgttttcttttcattgccagagtattgtcggttatgcgtcagctcttttgtcattaggtacagacccttcattcaatcctcagaaacgttgacatgaagtaacattgtgttttacagttatcaaagtcaccattatgtttttctgtctgtcttcattaggggtatgataatgaaactgccgtattggatactctattaatgtcttgagatgtctggtgctttgttattttttcacatcatgagaaataagaagccactattaatgagtgatacaatttggcaaaacttttcaaatactaaaacactaaattagtaaaaatctggtaatattagtgcttgctattgtaaatttttgccatttttgcttatctttgggaaaaaagtgacctggatcacactggaagtttcactgtattcaagagtagaaatagaaggatgattatcttaagttatgtttacactttggtaatatttgaaaatggatgtatatactggaaatgtctgtaagtgtcttgtttttgcacctaatttatgatctattatattgcattttcttaaatatcttagaagtatttttctttataactttgtatattgaatgtttagataaatgtccaactgacaatgttataaatcaaattcttattcctaaaatcatttagtattataagtattttgattttttaagttaaattatagtaattttaggccgaagtgagttattttaacattaccacttaaaacggatgaaattgtaaaagtcatttggtttgattgccccacaaagcataagatgtaaactgattaagggtatgaaagcaaagtgaaagacctcagatcttgtgcacattttgttttcctattatttcttttattgactgtagtgcatgatacctaatcaaggctccaatgtcttgcacaattcctactttaatgctagtggttttcagtgtccttacaatttaacacagaattgttatttcatcaaccttaaaaactgcagtttttattatcagaaaatgaacaaaaagggaatatctggttgctatgaactgattccctaaaggagagctcagtatgattctaacaatagccaaaagtgttttggggtataggttatgctttgttgggagggaatgtgtggtgaggaggccaagctgcagacagaaagcattgtatgagctgtatctgggtcagggtttcccattaaaggatgttagttttataacagattactttgtttaagaccatctcccttcaagtaactcacagtttatgtaatactaatctcattctttttttacctgaatcaggaattttctgcagaatgttaagttagggaagaaacctcatttcatccattctaacactcctgatgaagtccccctttagtttcatgacaataaagctgttctgtggctatcatcctttagctgggattgacaattgatttcacaccctcaacatcacaagctttttttaacccacagcagttcatgattgcagtatgataggtactaaagccaaactcagctttcaactggcacaaaatgggactgtcaccttttgctccattgttgttggaaacaaagtggcaagagggaaaatgaggaaccagatttacctttgccactatctgtgaccctgtaatcatcactagcctgaaatcttaaaatatcccagtcccaagctacaaaaatggtcacaggtggtttgatctagcacctcggccgttagagtttgtgctgaagacaaatttgtctgggttcattgtgcaccagaattagcatgtgcttgaaaattgcattttataaaagggaaatgaaaatttgcatttatatagatactctgattcatgtttaagtgttaaaggttatgcagactaaacttcaagaggagatccagtgtttaacaatagtgttctagaggattctaaaggaagctgccccagcagccctgagagaaccatctatactttggatatgttgtagccccatcattacactgagatatttccatttgagtaactaaaggtactcctgacagagctggagatgaggggcattttggtgggcagtggtcactagggttcacgtcacctacttaatgcaaagaccttagtggtctcagaatgaaaaggtaaaatggaagagaaaagcacagtcctttcctgtcttttcaaatttactttttattaaggatgtacctgtgcactattctaaagctaagcatttaaggataaagtccagaaataaaatgtccatattttcttttcttttctttttttttttttttttctgtcatctgtcacccagactggactgcagtggtgccatcatgtcttactgcagcctcaaactcctgggctcaagtggtcctcctgcttcagcttcccaagtagctgggactacaggcatgtgccaccacccccagccaaaacatccatattttctattagaatggtttacattatgatgggggatggggagctgggggagggctgtacattcccaaaagaaagtagtgttataggaaatccaaatgcgcttcagtgattcactcctgaaaagcagcctgggtatgttggcagattttgtttgcatttgtcttgcgtatttaaagtctcaggaaatctagtcttggtccaaaacactggagaaaaaaataacaccagacaaaacacatttgagtaacttgaagtagcagcatagaataggcccaactaagaagttggaggggcaaagagaaagccgacagaatcagcttctcctggaaagtgaaagcatcaagttctatttatggtagacagagggtccttatttgcttgtccgtggtgtctatgtgggcctattgagggaatggtagttacttgaaggttcacatatgtaagcgtgtggacccagcacagtctgtgacctgattccagatcctcaagagtggagaaggaaagaaatatgatgatttcctatgcttgaccctaacccaaccccaaaactgctagggattcaacagtgagtaagatgtatgcaataagagaacagataacttctcaacaatgtgcatgccgtttgtgtagatgttcagaactacatatgtgtgaatatcactcccaccttacacacgcacacacactgcaatcacatggcattaaaaaatatattgtgtatggaacttggcgaggtcagtcaggacctggagctgtaatcatagccttattgccacttcttgcgttgtgtatacattgaatggctcatagattttaagagatttttttattgtaagtatttctactaaatgcacttatccttctatatgtttatatattttggtaaaattgatttatcagatacttggtattttagtaagaaaatttcctcaaatatttggctaatgctttgatgtcaagattgcatattgctgagttggagctcagaagaaatgtatgcagctaaaaattgcactgtgtgttcttgtgaatttgctcacaattctaaaatgacataattggtggctgtgatgcttacagtcactgcctactggctctcttatgatgaatgttgccatcatatgatcatttatttactttttgtgcaagcaatggcattttggttgttgccaaaaacaacacaagtggttgggagtgtatgttgttggaaggtgtacacttctgtttctttcagctgtattatttatacacccaggttttctgttaaggatgtaatcattcattcaagaaagaacaattggcaagaaataattaaattaccttaaaaagaattaagaggcactccagccagataacacctcccaacaacatgaaatttagttagtgcttagtgaaattccttaaatatatatgtatatgttttcttcaacattatttaatataactactgcttttatattttttaatggtgttgcaaccacttgtacacctgctacaccttactgacaaaactgggcagctgaaaataaaagagaataaattctattccactgtaagaagttgatttcttttcagctttctttgtatatcagtaaagaacacgaattgtttgaaaataattttaagtctgataagtatggatagcatgttacctaagcttttaatttgtacattttgatgtctgatcatttgcatggaagagacaatagtgccacgtctgaattgttctcttgtgcttggttaatatgtacttctctagattgttcaaaaagtttcaaatgacattccttactctttggttttcagaggcattcaagcaaaatatcacagtggtcttttgttttctgaccaatctaacaatacctgtgattaaatttaatttgttagtgtaaataaatttcttgccaatgagtattattgttgttagacaacgaatgcaataaaaagaaatactgaggtctgttgaagc

SEQ ID NO: 194272 - DNA, 9928 bp, Artificial Sequence
  derived and/or modified sequence
attatcagtgggatctattgtttcctggcacattgggaggaaaaacaaagggatttattttcattaccctgtaattttttttcttttctatttttttaaatgtggccagggagctcgtctctctccgtgtcacagtgggatccgcctggcagccgccgggagctgcagccaatgtgttaggacttcaggtgcttcttggcacaaagctagactgcgacctcctaccatagcgcttggcgtcacctgctctcccggtcctgccccagggccgagggattgcgtcccgaaccgggcttgggaatcggctgcctctcaaatgaacctctagtcttgctttgaaaaaatcattctgtgtaactcttgactgtgactaagttcctaatacacctgttgggacgatcactgacaccgtataccatttgagaggtacttttcttgacccaatactggtgattagagaagagaggtatcttggtttttggtttttttctttgatcattatgaacattggcttttcacccctgaagtgaaaatgttgaaaactgagtcttcaggtgaacgaaccactctcagaagtgcctctcctcacaggaatgcatatcgaactgagtttcaggcactgaaaagtacctttgacaaacccaagtcagatggggaacaaaaaacaaaagaaggtgagggctcccagcagagcagggggaggaaatatggctccaatgtcaacagaattaaaaacctatttatgcagatgggtatggaacccaacgagaatgctgcagtcattgccaaaacaagggggaaaggtggacattcatctcctcagagaagaatgaagcccaaagaatttctggaaaaaacagatggctcagttgttaagttggagtcttctgtttctgaacgaattagtagatttgacactatgtacgatggcccttcatattccaagttcactgagactcgaaagatgtttgagagaagtgtgcatgaatcaggacagaacaaccgctattccccaaagaaagagaaagctggagggagtgaacctcaggatgaatggggaggttccaagtccaacagaggcagtactgattccttggacagccttagctcccgaactgaggctgtctccccaactgtgagtcaactgagtgcagtatttgagaacactgattctcccagtgccatcatttctgagaaggctgaaaacaatgaatactcagtgactgggcattatcccttgaatttaccatctgttactgttacaaatcttgacacatttggtcacctgaaggattctaattcctggcctccttcaaacaagcgaggtgttgatacagaggatgctcacaagagtaatgcaactccagtaccagaagtggcttctaaaagtacctctctagcttcgatacctggtgaagagatccagcagagcaaggaacccgaggactccacatctaatcaacagactcccgacagcattgacaaagatggtcctgaagaaccttgtgctgaaagtaaggcaatgccaaagtccgaaatcccttcaccacaaagccaactgttagaagatgctgaagctaatttggttggaagggaggcagcaaagcaacagaggaaagaacttgcaggtggtgatttcacctctcctgatgcttctgcatccagttgtggaaaagaagtacctgaagattcaaataattttgatggttcccatgtgtacatgcacagtgactataatgtgtatagggtgagatccaggtataattcagactggggagagacaggcactgagcaggatgaggaggaagatagtgatgagaacagttactatcagcctgatatggagtactcggaaattgttggattgccagaagaagaagaaatcccagcaaataggaaaattaagtttagtagtgctcctattaaggttttcaacacatactccaatgaagactatgacaggagaaatgacgaagttgaccctgtggctgcttcagctgagtatgaacttgaaaaacgtgtagaaaagctggaacttttcccagtggagctagagaaagatgaggatggtcttggtataagtattattggaatgggtgttggagcagatgctggacttgaaaagctgggaatattcgtcaagacagtaacagaaggtggtgctgctcaacgggatggcagaatacaagtcaatgaccagattgtggaagtggatggaatcagcttggtgggtgtgacacagaattttgcagcaacagttctcagaaacaccaagggcaacgtcagatttgttattgggcgggaaaaaccaggacaagtgagcgaggttgcccagttgataagccagacactggaacaggagaggcgccagagagagctgctggaacagcactatgcccagtatgatgccgacgatgacgagacaggagaatatgccacagatgaagaagaagatgaggtaggacctgtccttcctggcagcgacatggccattgaagtctttgagctgcctgagaatgaggacatgttttccccatcagaactggacacaagcaagctcagtcacaagttcaaagagttgcaaatcaaacatgcagttacagaagcagagattcaaaaattgaagaccaagctgcaggcagcagaaaatgagaaagtgaggtgggaactagaaaaaacccaactccaacaaaacatagaagagaataaggaaagaatgttgaagttggaaagctactggattgaggcccaaacattatgccacacagtgaatgagcatctcaaagagactcaaagccagtatcaggccttggaaaagaaatacaacaaggcaaagaagttgatcaaggattttcaacaaaaagagcttgatttcatcaaaagacaggaagcagaaagaaagaaaatagaagatttggaaaaagctcatcttgtggaagtgcaaggcctccaagtgcggattagagatttggaagctgaggtattcaggctactgaagcaaaatgggactcaagttaacaataataacaacatctttgagagaagaacatctcttggtgaagtctctaaaggggataccatggagaacttggatggcaagcagacatcttgccaagatggcctaagtcaagacttgaatgaagcagtcccagagacagagcgcctggattcaaaagcactgaaaactcgagcccagctctctgtgaagaacagacgccagagaccctctaggacaagactgtatgatagtgttagttccacagatggggaggacagtctagagagaaagaattttaccttcaatgatgacttcagtcccagcagtaccagttcagcagacctcagcggcttaggagcagaacctaaaacaccagggctctctcagtccttagcactgtcatcagatgagagcctggatatgatagatgacgagatccttgatgatggacagtctcccaaacacagtcagtgtcagaatcgggccgttcaggaatggagtgtgcagcaggtttctcactggttaatgagcctaaatctggagcagtatgtatctgaattcagtgcccaaaacatcactggagaacagctcctgcagttggatggaaataaacttaaggctcttggaatgacagcatcccaggaccgagcagtggtcaaaaagaaactcaaggaaatgaagatgtctctagagaaggctcggaaggcccaagagaaaatggaaaaacaaagagaaaagctaaggagaaaggagcaagagcaaatgcagaggaagtccaaaaagacagaaaagatgacgtcaactacagccgagggtgctggtgagcagtaacacataccctcttacagatgatggagatgctccaagagaagtccccacctcttcctgccctgctctcctccagaggatgaaaaagaaactaaatgataagggtaatgcggctctaggccggctgaggaactgtgtgttgaataactgcattttctgcaatagaatgcactcttaattttaactactaaaataatcccaagccacctttggttcattaacaaaccagagatttcatttaagtagctgtgttttgctcttctctaacttaccaacatcttgtgttgtgttgggtgtgttttgtcacttggagaactagtgtgaccccacccaagagcatgacacaccctggtgttgttaatggagcgccgtgaattttcagtgtgggatcctgaaatggcaattgcacatgtctgcatggcagagagcaccctgccatgagatctgagaccagtacttaacttctaggactgcaacacctactccaatgtgtgggaaagatttgctcttaattctcagtctggacagtgagaccaccccgctgtggaaacatgggtgctctgctctgtagttacctactaagggaaaaggcaagcaagtcattctgcttgctaggcatcaaaaagaaagaaaataaattatagctatttgttaaccactgaaaaaagcaaaagccttaagaatgtggatgtgggtattaccttggggttctgagggtaatatttatcctctagatacggctgaacaagaaagaaaaaaatcagacattaatgcagccatgggatattgggatctgttgaccttgctactgctgtgtgttcagcatttcagcaacactggcaaacacaacacagttcctcttccccctacctaacccaagaaattgaacaggaaattgatttttaaggaaaccaccattttcaggtttcctctcctggggaacattctggctggtcttcagcctgcctatgtcacaatcaggaactcatcacatattttctactcaagatttcccaggtgggctcagttagtattttaacaaatgtacttttaagaaaaatagaaataccagttagaggaaactgtcagttaacattttagagagattttgaatggtttttccgaaccattcctttccatacttcaaagattctcaattttacagaaaaagtttgtttaaggcagtgcataggtatactttagtagtggaggaacttatactaattttaagccagcattaaggatttccatgtttcaccaaactaagtcaagtgcaggagactggggcagaagaaggagaaaataaactcgttttgagaaatttcatgtgatgagggttttttgttttttatgctcatgtatctggttctctttgctgcgttgactctaaaaatgaggttatccactttccaaaggacaagtttcagaataagacttgaggccacatgaattcttggacagtattttacttcttttactttatgggaatctctgctctgttcccagcatctcgtatcttccactagaagtattccatatttagagcctcggcaaggcttttgagtgtaacagattaagggaactcccttgtagccccatcttgtattttaataacagtgtgatttttttttatctgaaaatctgaattcagaaattatctaaactggacatttttaattctgttttacccccaaggcctgttttcttttcattgccagagtattgtcggttatgcgtcagctcttttgtcattaggtacagacccttcattcaatcctcagaaacgttgacatgaagtaacattgtgttttacagttatcaaagtcaccattatgtttttctgtctgtcttcattaggggtatgataatgaaactgccgtattggatactctattaatgtcttgagatgtctggtgctttgttattttttcacatcatgagaaataagaagccactattaatgagtgatacaatttggcaaaacttttcaaatactaaaacactaaattagtaaaaatctggtaatattagtgcttgctattgtaaatttttgccatttttgcttatctttgggaaaaaagtgacctggatcacactggaagtttcactgtattcaagagtagaaatagaaggatgattatcttaagttatgtttacactttggtaatatttgaaaatggatgtatatactggaaatgtctgtaagtgtcttgtttttgcacctaatttatgatctattatattgcattttcttaaatatcttagaagtatttttctttataactttgtatattgaatgtttagataaatgtccaactgacaatgttataaatcaaattcttattcctaaaatcatttagtattataagtattttgattttttaagttaaattatagtaattttaggccgaagtgagttattttaacattaccacttaaaacggatgaaattgtaaaagtcatttggtttgattgccccacaaagcataagatgtaaactgattaagggtatgaaagcaaagtgaaagacctcagatcttgtgcacattttgttttcctattatttcttttattgactgtagtgcatgatacctaatcaaggctccaatgtcttgcacaattcctactttaatgctagtggttttcagtgtccttacaatttaacacagaattgttatttcatcaaccttaaaaactgcagtttttattatcagaaaatgaacaaaaagggaatatctggttgctatgaactgattccctaaaggagagctcagtatgattctaacaatagccaaaagtgttttggggtataggttatgctttgttgggagggaatgtgtggtgaggaggccaagctgcagacagaaagcattgtatgagctgtatctgggtcagggtttcccattaaaggatgttagttttataacagattactttgtttaagaccatctcccttcaagtaactcacagtttatgtaatactaatctcattctttttttacctgaatcaggaattttctgcagaatgttaagttagggaagaaacctcatttcatccattctaacactcctgatgaagtccccctttagtttcatgacaataaagctgttctgtggctatcatcctttagctgggattgacaattgatttcacaccctcaacatcacaagctttttttaacccacagcagttcatgattgcagtatgataggtactaaagccaaactcagctttcaactggcacaaaatgggactgtcaccttttgctccattgttgttggaaacaaagtggcaagagggaaaatgaggaaccagatttacctttgccactatctgtgaccctgtaatcatcactagcctgaaatcttaaaatatcccagtcccaagctacaaaaatggtcacaggtggtttgatctagcacctcggccgttagagtttgtgctgaagacaaatttgtctgggttcattgtgcaccagaattagcatgtgcttgaaaattgcattttataaaagggaaatgaaaatttgcatttatatagatactctgattcatgtttaagtgttaaaggttatgcagactaaacttcaagaggagatccagtgtttaacaatagtgttctagaggattctaaaggaagctgccccagcagccctgagagaaccatctatactttggatatgttgtagccccatcattacactgagatatttccatttgagtaactaaaggtactcctgacagagctggagatgaggggcattttggtgggcagtggtcactagggttcacgtcacctacttaatgcaaagaccttagtggtctcagaatgaaaaggtaaaatggaagagaaaagcacagtcctttcctgtcttttcaaatttactttttattaaggatgtacctgtgcactattctaaagctaagcatttaaggataaagtccagaaataaaatgtccatattttcttttcttttctttttttttttttttttctgtcatctgtcacccagactggactgcagtggtgccatcatgtcttactgcagcctcaaactcctgggctcaagtggtcctcctgcttcagcttcccaagtagctgggactacaggcatgtgccaccacccccagccaaaacatccatattttctattagaatggtttacattatgatgggggatggggagctgggggagggctgtacattcccaaaagaaagtagtgttataggaaatccaaatgcgcttcagtgattcactcctgaaaagcagcctgggtatgttggcagattttgtttgcatttgtcttgcgtatttaaagtctcaggaaatctagtcttggtccaaaacactggagaaaaaaataacaccagacaaaacacatttgagtaacttgaagtagcagcatagaataggcccaactaagaagttggaggggcaaagagaaagccgacagaatcagcttctcctggaaagtgaaagcatcaagttctatttatggtagacagagggtccttatttgcttgtccgtggtgtctatgtgggcctattgagggaatggtagttacttgaaggttcacatatgtaagcgtgtggacccagcacagtctgtgacctgattccagatcctcaagagtggagaaggaaagaaatatgatgatttcctatgcttgaccctaacccaaccccaaaactgctagggattcaacagtgagtaagatgtatgcaataagagaacagataacttctcaacaatgtgcatgccgtttgtgtagatgttcagaactacatatgtgtgaatatcactcccaccttacacacgcacacacactgcaatcacatggcattaaaaaatatattgtgtatggaacttggcgaggtcagtcaggacctggagctgtaatcatagccttattgccacttcttgcgttgtgtatacattgaatggctcatagattttaagagatttttttattgtaagtatttctactaaatgcacttatccttctatatgtttatatattttggtaaaattgatttatcagatacttggtattttagtaagaaaatttcctcaaatatttggctaatgctttgatgtcaagattgcatattgctgagttggagctcagaagaaatgtatgcagctaaaaattgcactgtgtgttcttgtgaatttgctcacaattctaaaatgacataattggtggctgtgatgcttacagtcactgcctactggctctcttatgatgaatgttgccatcatatgatcatttatttactttttgtgcaagcaatggcattttggttgttgccaaaaacaacacaagtggttgggagtgtatgttgttggaaggtgtacacttctgtttctttcagctgtattatttatacacccaggttttctgttaaggatgtaatcattcattcaagaaagaacaattggcaagaaataattaaattaccttaaaaagaattaagaggcactccagccagataacacctcccaacaacatgaaatttagttagtgcttagtgaaattccttaaatatatatgtatatgttttcttcaacattatttaatataactactgcttttatattttttaatggtgttgcaaccacttgtacacctgctacaccttactgacaaaactgggcagctgaaaataaaagagaataaattctattccactgtaagaagttgatttcttttcagctttctttgtatatcagtaaagaacacgaattgtttgaaaataattttaagtctgataagtatggatagcatgttacctaagcttttaatttgtacattttgatgtctgatcatttgcatggaagagacaatagtgccacgtctgaattgttctcttgtgcttggttaatatgtacttctctagattgttcaaaaagtttcaaatgacattccttactctttggttttcagaggcattcaagcaaaatatcacagtggtcttttgttttctgaccaatctaacaatacctgtgattaaatttaatttgttagtgtaaataaatttcttgccaatgagtattattgttgttagacaacgaatgcaataaaaagaaatactgagg

SEQ ID NO: 194273 - DNA, 3297 bp, Artificial Sequence
  derived and/or modified sequence
atgctgaagaccgagagcagcggcgagagaaccaccctgagaagcgccagcccccacagaaacgcctacagaaccgagttccaggccctgaagagcaccttcgacaagcccaagagcgacggcgagcagaagaccaaggagggcgagggcagccagcagagcagaggcagaaagtacggcagcaacgtgaacagaatcaagaacctgttcatgcagatgggcatggagcccaacgagaacgccgccgtgatcgccaagaccagaggcaagggcggccacagcagcccccagagaagaatgaagcccaaggagttcctggagaagaccgacggcagcgtggtgaagctggagagcagcgtgagcgagagaatcagcagattcgacaccatgtacgacggccccagctacagcaagttcaccgagaccagaaagatgttcgagagaagcgtgcacgagagcggccagaacaacagatacagccccaagaaggagaaggccggcggcagcgagccccaggacgagtggggcggcagcaagagcaacagaggcagcaccgacagcctggacagcctgagcagcagaaccgaggccgtgagccccaccgtgagccagctgagcgccgtgttcgagaacaccgacagccccagcgccatcatcagcgagaaggccgagaacaacgagtacagcgtgaccggccactaccccctgaacctgcccagcgtgaccgtgaccaacctggacaccttcggccacctgaaggacagcaacagctggccccccagcaacaagagaggcgtggacaccgaggacgcccacaagagcaacgccacccccgtgcccgaggtggccagcaagagcaccagcctggccagcatccccggcgaggagatccagcagagcaaggagcccgaggacagcaccagcaaccagcagacccccgacagcatcgacaaggacggccccgaggagccctgcgccgagagcaaggccatgcccaagagcgagatccccagcccccagagccagctgctggaggacgccgaggccaacctggtgggcagagaggccgccaagcagcagagaaaggagctggccggcggcgacttcaccagccccgacgccagcgccagcagctgcggcaaggaggtgcccgaggacagcaacaacttcgacggcagccacgtgtacatgcacagcgactacaacgtgtacagagtgagaagcagatacaacagcgactggggcgagaccggcaccgagcaggacgaggaggaggacagcgacgagaacagctactaccagcccgacatggagtacagcgagatcgtgggcctgcccgaggaggaggagatccccgccaacagaaagatcaagttcagcagcgcccccatcaaggtgttcaacacctacagcaacgaggactacgacagaagaaacgacgaggtggaccccgtggccgccagcgccgagtacgagctggagaagagagtggagaagctggagctgttccccgtggagctggagaaggacgaggacggcctgggcatcagcatcatcggcatgggcgtgggcgccgacgccggcctggagaagctgggcatcttcgtgaagaccgtgaccgagggcggcgccgcccagagagacggcagaatccaggtgaacgaccagatcgtggaggtggacggcatcagcctggtgggcgtgacccagaacttcgccgccaccgtgctgagaaacaccaagggcaacgtgagattcgtgatcggcagagagaagcccggccaggtgagcgaggtggcccagctgatcagccagaccctggagcaggagagaagacagagagagctgctggagcagcactacgcccagtacgacgccgacgacgacgagaccggcgagtacgccaccgacgaggaggaggacgaggtgggccccgtgctgcccggcagcgacatggccatcgaggtgttcgagctgcccgagaacgaggacatgttcagccccagcgagctggacaccagcaagctgagccacaagttcaaggagctgcagatcaagcacgccgtgaccgaggccgagatccagaagctgaagaccaagctgcaggccgccgagaacgagaaggtgagatgggagctggagaagacccagctgcagcagaacatcgaggagaacaaggagagaatgctgaagctggagagctactggatcgaggcccagaccctgtgccacaccgtgaacgagcacctgaaggagacccagagccagtaccaggccctggagaagaagtacaacaaggccaagaagctgatcaaggacttccagcagaaggagctggacttcatcaagagacaggaggccgagagaaagaagatcgaggacctggagaaggcccacctggtggaggtgcagggcctgcaggtgagaatcagagacctggaggccgaggtgttcagactgctgaagcagaacggcacccaggtgaacaacaacaacaacatcttcgagagaagaaccagcctgggcgaggtgagcaagggcgacaccatggagaacctggacggcaagcagaccagctgccaggacggcctgagccaggacctgaacgaggccgtgcccgagaccgagagactggacagcaaggccctgaagaccagagcccagctgagcgtgaagaacagaagacagagacccagcagaaccagactgtacgacagcgtgagcagcaccgacggcgaggacagcctggagagaaagaacttcaccttcaacgacgacttcagccccagcagcaccagcagcgccgacctgagcggcctgggcgccgagcccaagacccccggcctgagccagagcctggccctgagcagcgacgagagcctggacatgatcgacgacgagatcctggacgacggccagagccccaagcacagccagtgccagaacagagccgtgcaggagtggagcgtgcagcaggtgagccactggctgatgagcctgaacctggagcagtacgtgagcgagttcagcgcccagaacatcaccggcgagcagctgctgcagctggacggcaacaagctgaaggccctgggcatgaccgccagccaggacagagccgtggtgaagaagaagctgaaggagatgaagatgagcctggagaaggccagaaaggcccaggagaagatggagaagcagagagagaagctgagaagaaaggagcaggagcagatgcagagaaagagcaagaagaccgagaagatgaccagcaccaccgccgagggcgccggcgagcagtag

SEQ ID NO: 194274 - protein, 669 aa, Artificial Sequence
  derived and/or modified sequence
MGSNSSRIGDLPKNEYLKKLSGTESISENDPFWNQLLSFSFPAPTSSSELKLLEEATISVCRSLVENNPRTGNLGALIKVFLSRTKELKLSAECQNHIFIWQTHNALFIICCLLKVFICQMSEEELQLHFTYEEKSPGNYSSDSEDLLEELLCCLMQLITDIPLLDITYEISVEAISTMVVFLSCQLFHKEVLRQSISHKYLMRGPCLPYTSKLVKTLLYNFIRQEKPPPPGAHVFPQQSDGGGLLYGLASGVATGLWTVFTLGGVGSKAAASPELSSPLANQSLLLLLVLANLTDASDAPNPYRQAIMSFKNTQDSSPFPSSIPHAFQINFNSLYTALCEQQTSDQATLLLYTLLHQNSNIRTYMLARTDMENLVLPILEILYHVEERNSHHVYMALIILLILTEDDGFNRSIHEVILKNITWYSERVLTEISLGSLLILVVIRTIQYNMTRTRDKYLHTNCLAALANMSAQFRSLHQYAAQRIISLFSLLSKKHNKVLEQATQSLRGSLSSNDVPLPDYAQDLNVIEEVIRMMLEIINSCLTNSLHHNPNLVYALLYKRDLFEQFRTHPSFQDIMQNIDLVISFFSSRLLQAGAELSVERVLEIIKQGVVALPKDRLKKFPELKFKYVEEEQPEEFFIPYVWSLVYNSAVGLYWNPQDIQLFTMDSD

SEQ ID NO: 194275 - protein, 479 aa, Artificial Sequence
  derived and/or modified sequence
MGSNSSRIGDLPKNEYLKKLSGTESISENDPFWNQLLSFSFPAPTSSSELKLLEEATISVCRSLAGLWTVFTLGGVGSKAAASPELSSPLANQSLLLLLVLANLTDASDAPNPYRQAIMSFKNTQDSSPFPSSIPHAFQINFNSLYTALCEQQTSDQATLLLYTLLHQNSNIRTYMLARTDMENLVLPILEILYHVEERNSHHVYMALIILLILTEDDGFNRSIHEVILKNITWYSERVLTEISLGSLLILVVIRTIQYNMTRTRDKYLHTNCLAALANMSAQFRSLHQYAAQRIISLFSLLSKKHNKVLEQATQSLRGSLSSNDVPLPDYAQDLNVIEEVIRMMLEIINSCLTNSLHHNPNLVYALLYKRDLFEQFRTHPSFQDIMQNIDLVISFFSSRLLQAGAELSVERVLEIIKQGVVALPKDRLKKFPELKFKYVEEEQPEEFFIPYVWSLVYNSAVGLYWNPQDIQLFTMDSD

SEQ ID NO: 194276 - DNA, 2010 bp, Artificial Sequence
  derived and/or modified sequence
atggggagcaactcttcgcggatcggagatttgccaaaaaatgaatacctaaagaagttatctgggaccgaatctattagtgagaatgatccattctggaaccagctccttagctttagcttccccgcccctacctcgtcatctgagttaaaactgctagaggaggccaccatctctgtctgccgatccctggtggaaaacaacccccggacaggcaacctgggagccctgatcaaagtgtttctgtccagaacgaaggagctgaagctgtctgcagaatgccagaaccacatattcatatggcagacgcacaatgccctgttcataatctgctgtctgctcaaggtattcatctgtcagatgtctgaggaagagcttcagctgcactttacatacgaggaaaagtccccgggcaactatagctctgattccgaagatcttctggaggaactgctgtgttgtttaatgcagctgatcacagacattccgctcctggatatcacgtatgagatttctgtagaggcaataagtacaatggtggtgtttctttcttgccagctgtttcataaggaagtgttacgacagagcatttcacacaaatatctgatgaggggcccctgcctcccttacacatctaaactcgttaagactctgctttacaactttatacggcaggaaaaaccaccgcctccaggtgcccatgtctttccccaacaatctgatggcggtggattactctacgggcttgcgtcaggtgtcgcaaccgggctgtggactgtttttactctcggaggcgtggggagtaaagcagctgccagccccgagttatccagccctctggctaaccagagcttgctgctcctgttggtgctggcaaacctgacggatgcatccgatgcacccaatccctatcggcaggccattatgagtttcaagaacacccaggatagcagtccattcccttcctcgattccccacgcttttcagatcaactttaattccctgtacactgctctctgtgagcagcaaacctcggatcaagccactctgctgttgtacacccttcttcatcagaacagtaacatccgaacttatatgcttgccagaaccgatatggagaatctggttcttcctattctggaaattctgtatcatgtggaagaaaggaattcacaccacgtgtatatggctctcatcatcctcttgatcctgactgaagacgatgggttcaataggtccattcatgaagtcattctcaagaatatcacctggtacagcgaacgggtgctcaccgaaatttcgctcggtagcctgctcattctggtggtcataaggactattcagtacaacatgacccgcaccagagacaaatatcttcacacaaactgcttggccgctttggcgaatatgtctgcccagttccggtcactccaccaatacgctgctcagcgcatcatctccctttttagcctgctgtcgaagaaacacaacaaggtgctggaacaggcaacccagagtttaagggggtccctgtccagtaacgatgtgcccctcccggactatgctcaggacctgaacgttatagaagaagtgatccggatgatgcttgagatcataaacagttgtctcacgaattcacttcatcataacccaaacctggtatacgccctactttacaagcgagatttattcgagcagttcagaacacacccctccttccaggatattatgcagaatatcgatctggtgatttccttcttctcatctcggcttctccaagcaggagctgagctcagtgtggagagggttctggagataatcaaacaaggcgtcgtggccctgcccaaggacagactcaagaagttccccgaactgaagttcaagtacgtggaagaggaacaacccgaagaattctttatcccgtacgtgtggtcgttggtctataattccgccgtgggcttgtattggaatccccaggacatccagctgtttactatggactcggactag

SEQ ID NO: 194277 - DNA, 1440 bp, Artificial Sequence
  derived and/or modified sequence
atgggatctaattcgtcaagaattggagacctccccaagaatgagtacctaaagaaattgagtgggaccgaaagcatcagtgagaatgaccccttctggaaccagttgctatcattttcgtttccagcgcccaccagttctagcgagctcaagttgttagaggaggccaccatcagcgtgtgccggtcgttggccggcctttggacggtttttactctgggaggtgtcggctcgaaagccgcggcatctcccgaactgtcaagccccctggcgaatcagagcctgctgctgctccttgtgttagccaacctcacggatgcaagcgatgcacctaacccttacaggcaggctatcatgagctttaagaacacacaagactcctcacccttcccaagcagcatccctcacgcttttcaaattaactttaatagcctttacaccgctctttgtgagcagcagacttctgaccaagctacactgctgctgtatactctgctccaccagaatagtaacatccgcacgtacatgctcgcacgaacagacatggagaacctggtgctgccaatcttagagatcctgtatcacgtcgaggaacggaattctcaccacgtttacatggcgctcataatactgcttatcctgaccgaagacgacgggttcaacaggtcaatccacgaggtcatacttaagaacatcacctggtactcagagagagttcttaccgagataagccttggctccttgctgattcttgtggtcatccgtaccattcagtacaacatgacccgcacccgtgataaatatttgcacactaattgtctcgccgccttggccaacatgagtgcccagtttcgatcccttcatcaatatgccgctcaaaggataattagtctgttctctctcttatcaaaaaagcataataaggtactggaacaggcaacgcaatcactccgagggtctctgtcctccaacgacgtgcccttacctgattacgctcaggacctgaacgttatcgaagaagtcatacgaatgatgttggaaattatcaattcatgtctgactaattctctccatcacaatccaaatttggtgtatgccctgctatacaagagggatcttttcgaacagttccgcacccaccctagcttccaagatatcatgcagaatatcgacctggttatctcctttttcagtagtcgcttattgcaagcaggggccgaactttccgtcgaacgcgtgctggagattataaagcagggagttgtggccttacctaaagatcgcctgaaaaaatttccagagctgaaatttaagtacgtcgaagaagaacagccagaggaattctttattccctacgtgtggtcactggtttacaatagtgctgtgggcctctattggaatccccaggacattcagttattcactatggatagtgactag

SEQ ID NO: 194278 - DNA, 2010 bp, Artificial Sequence
  derived and/or modified sequence
atgggcagcaacagcagccgcatcggggacctgcccaagaatgagtacctgaagaagctgtctggaacagagagcatcagtgaaaatgaccccttctggaaccagctgctgtccttctccttccctgcccccaccagcagcagcgagctgaagctgctggaggaggccaccatctctgtgtgccgcagcctggtggagaacaaccccaggactggaaacctgggcgccctgatcaaggtgttcctgagcaggaccaaggagctgaagctgtctgctgagtgccagaaccacatcttcatctggcagacccacaatgccctcttcatcatctgctgcctgctgaaggtgttcatctgccagatgtctgaggaggagctgcagctgcacttcacctatgaggagaagagccctggcaactacagcagtgacagcgaggacctgctggaggagctgctgtgctgcctgatgcagctgatcacagacatccccctgctggacatcacctatgagatctctgtggaggccatcagcaccatggtggtgttcctgagctgccagctgttccacaaggaggtgctgcggcagagcatcagccacaagtacctgatgaggggcccctgcctgccctacaccagcaagctggtgaagaccctgctgtacaacttcatccggcaggagaagcccccacctcctggggcccacgtgttcccccagcagagtgatggcggcggcctgctgtatggcctggccagcggcgtggccaccggcctgtggacagtgttcaccctgggcggcgtgggcagcaaggctgctgccagccctgagctgagcagccccctggccaaccagagcctgctgctgctgctggtgctggccaacctgacagatgccagtgatgcccccaacccctaccggcaggccatcatgtccttcaagaacacccaggacagcagccccttccccagcagcatcccccacgccttccagatcaacttcaacagcctgtacacagccctgtgtgagcagcagaccagtgaccaggccaccctgctgctgtacaccctgctgcaccagaacagcaacatccgcacctacatgctggccaggacagacatggagaacctggtgctgcccatcctggagatcctgtaccacgtggaggagaggaacagccaccacgtgtacatggccctgatcatcctgctgatcctgacagaagatgatggcttcaacagaagcatccatgaagtcatcctgaagaacatcacctggtacagcgagcgggtgctgacagagatcagcctgggcagcctgctgatcctggtggtgatccgcaccatccagtacaacatgaccaggacccgggacaagtacctgcacaccaactgcctggccgccctggccaacatgtctgcccagttccgcagcctgcaccagtatgctgcccagaggatcatcagcctcttcagcctgctgagcaagaagcacaacaaggtgctggagcaggccacccagagcctgcggggcagcctgagcagcaatgatgtgcccctgcctgactatgcccaggacctgaatgtcatcgaggaggtgatccgcatgatgctggagatcatcaacagctgcctgaccaacagcctgcaccacaaccccaacctggtgtatgccctgctgtacaagagggacctgtttgagcagttccgcacccaccccagcttccaggacatcatgcagaacatcgacctggtgatctccttcttcagcagccggctgctgcaggccggggctgagctgtctgtggagcgggtgctggagatcatcaagcagggcgtggtggccctgcccaaggaccggctgaagaagtttcctgagctgaagttcaagtatgtggaggaggagcagcctgaggagttcttcatcccctacgtgtggagcctggtgtacaacagcgctgtgggcctgtactggaacccccaggacatccagctgttcaccatggacagcgactag

SEQ ID NO: 194279 - DNA, 1440 bp, Artificial Sequence
  derived and/or modified sequence
atgggcagcaacagcagccgcatcggggacctgcccaagaatgagtacctgaagaagctgtctggaacagagagcatcagtgaaaatgaccccttctggaaccagctgctgtccttctccttccctgcccccaccagcagcagcgagctgaagctgctggaggaggccaccatctctgtgtgccgcagcctggccggcctgtggacagtgttcaccctgggcggcgtgggcagcaaggctgctgccagccctgagctgagcagccccctggccaaccagagcctgctgctgctgctggtgctggccaacctgacagatgccagtgatgcccccaacccctaccggcaggccatcatgtccttcaagaacacccaggacagcagccccttccccagcagcatcccccacgccttccagatcaacttcaacagcctgtacacagccctgtgtgagcagcagaccagtgaccaggccaccctgctgctgtacaccctgctgcaccagaacagcaacatccgcacctacatgctggccaggacagacatggagaacctggtgctgcccatcctggagatcctgtaccacgtggaggagaggaacagccaccacgtgtacatggccctgatcatcctgctgatcctgacagaagatgatggcttcaacagaagcatccatgaagtcatcctgaagaacatcacctggtacagcgagcgggtgctgacagagatcagcctgggcagcctgctgatcctggtggtgatccgcaccatccagtacaacatgaccaggacccgggacaagtacctgcacaccaactgcctggccgccctggccaacatgtctgcccagttccgcagcctgcaccagtatgctgcccagaggatcatcagcctcttcagcctgctgagcaagaagcacaacaaggtgctggagcaggccacccagagcctgcggggcagcctgagcagcaatgatgtgcccctgcctgactatgcccaggacctgaatgtcatcgaggaggtgatccgcatgatgctggagatcatcaacagctgcctgaccaacagcctgcaccacaaccccaacctggtgtatgccctgctgtacaagagggacctgtttgagcagttccgcacccaccccagcttccaggacatcatgcagaacatcgacctggtgatctccttcttcagcagccggctgctgcaggccggggctgagctgtctgtggagcgggtgctggagatcatcaagcagggcgtggtggccctgcccaaggaccggctgaagaagtttcctgagctgaagttcaagtatgtggaggaggagcagcctgaggagttcttcatcccctacgtgtggagcctggtgtacaacagcgctgtgggcctgtactggaacccccaggacatccagctgttcaccatggacagcgactag

SEQ ID NO: 194280 - DNA, 2010 bp, Artificial Sequence
  derived and/or modified sequence
atgggcagcaacagcagccggatcggcgacctgcccaagaacgagtacctgaagaaactgagcggaaccgagagtatttccgagaacgacccattttggaaccaactcttatcgttttcattcccagcgccaacaagctcctccgagctgaaacttctcgaggaggccaccatctctgtttgccgttctctggtggagaacaatcctcgtacaggcaacctgggggctctcattaaagtgtttctgagccggacaaaagagctgaagttaagtgccgagtgccagaatcacattttcatatggcaaacgcacaatgcactgttcatcatatgctgtctgttaaaagtcttcatctgtcagatgagcgaggaggagctgcagctccactttacatatgaggagaagtcccctggcaactacagttccgactccgaggatctgttggaggagctgctgtgctgcttgatgcagctcatcactgatatcccgctactggatattacctatgaaatatcggtcgaagctatcagcaccatggtggtctttcttagctgccaacttttccacaaggaagttctgaggcagtccataagtcataagtacttaatgcgcggtccatgcctgccatataccagtaagctggtaaagaccctcttgtacaactttattaggcaggaaaaaccaccacctccaggcgctcacgttttcccccaacagagcgatggcgggggtctcctgtatggcctggcttccggcgttgccacaggtctatggacggttttcaccctcggaggcgtcggttctaaagcagcagccagtccagaattgtcgtcaccactggcgaatcagtcgctcctcctgttgctcgtgctcgctaacctgaccgatgcgtccgacgcccctaacccgtaccgtcaggctattatgtcctttaagaacacacaggactcttctccatttccatccagcatccctcacgccttccagattaacttcaatagcctttacaccgctctatgcgaacagcagacctcggaccaagctactcttctactgtacacactcctacaccagaactcaaacatcagaacatacatgctagcccgaactgatatggagaaccttgtgttgcctatcctggagattctgtaccacgtggaggagagaaactcccaccatgtttacatggcactgataatcctcctcattctgactgaggacgacgggttcaatagatctatccacgaagtcatccttaaaaacattacttggtactctgagcgcgtgctgacagaaatttccctgggctccctcttaatactagttgtcataaggaccatccagtacaacatgacaagaacaagagataaatacttgcatacgaattgcctggccgctctagctaacatgtccgcacagttcagatccctgcaccagtatgcggctcaacggatcatcagcctgttttccttactgtcaaagaaacacaataaggtcctggaacaggctacacaatccctaagggggagcctgtctagcaacgatgtgcctctcccagactacgctcaggatctaaatgtgattgaagaagtgatccgcatgatgctggagattatcaattcttgtctgactaattccttacatcacaaccctaatttagtttacgctctcctgtataagcgcgacctgttcgagcagttcagaacacacccttcctttcaggacattatgcagaacatcgatttagtgatctcttttttcagcagcagattgctccaggccggcgctgaactatcggtggaacgcgtgcttgagatcattaaacaaggagtcgtggcattaccaaaagatcgtctcaagaagttccccgaactcaaatttaagtacgtggaggaggagcagcccgaagagttctttattccgtacgtttggtcccttgtctacaatagtgctgtcggtctgtactggaaccctcaagatattcagctgttcaccatggactctgattag

SEQ ID NO: 194281 - DNA, 1440 bp, Artificial Sequence
  derived and/or modified sequence
atgggcagcaacagcagccggatcggcgacctgcccaagaacgagtacttaaaaaagctaagcggcaccgaatccatatcagaaaatgacccgttttggaaccagctgctatctttcagctttcctgccccgacaagcagctccgagctcaagttattagaggaggcgacaatttcagtatgcaggtctttggccgggttgtggacggtgttcactttggggggtgtcggaagcaaagcagctgcctctccagagctctcgagcccattggccaatcagtccttactgctgcttttagtcttggccaacctgaccgatgcttccgatgcacctaacccgtaccgccaagcaattatgagctttaagaatactcaagacagctcccccttcccgtctagcatcccacatgcctttcaaatcaacttcaatagcctctacacggcactttgtgaacagcagacatcagaccaggcaactctgcttctgtataccctcttacaccagaacagcaacattaggacttacatgctggctagaaccgacatggagaaccttgttctgcccatcttggagatcctttaccacgtggaagaacgtaattctcaccacgtgtacatggccctgattatcctgctgatattaaccgaggatgacggatttaataggtctatacatgaggttattctgaaaaacataacttggtacagtgagcgagtcctgacagagatcagcctcggcagcctcctgattctggtggttattcggactattcaatacaatatgaccaggacgagggataaatatcttcacaccaattgccttgcggctttagccaatatgagtgcacagtttcgaagcctgcatcagtacgctgcccaaaggattatctccctgttctcgctcttgtcaaaaaagcacaacaaagtactggaacaggcaacacagtcgcttcgtggaagcctgagttcaaatgacgtcccgctccctgattatgctcaggacctgaacgtcatagaggaagtaattcggatgatgctggaaattataaacagctgcttgaccaattcgctccatcataatccaaatcttgtgtatgctctgctgtataagcgggacctgttcgagcagtttcgtacccacccatccttccaggacatcatgcaaaacattgacctggtcatttctttcttcagttcacgactgctacaagccggtgccgaacttagtgtcgagagggtgctggagattattaagcagggagtagtcgcattacccaaagaccgcttgaagaagtttccagaattgaagttcaagtatgtcgaggaagaacagccagaggaattcttcatcccttatgtatggagcctcgtctacaacagtgcagtcggcctgtactggaacccacaggatatccagcttttcaccatggatagtgattag

SEQ ID NO: 194282 - DNA, 2010 bp, Artificial Sequence
  derived and/or modified sequence
atgggcagcaattccagccggattggcgacttacctaagaacgaatacctcaaaaaactgtccggtaccgagagtatttctgagaatgatcctttttggaatcagttgctgtcatttagctttcctgcccctacgagcagcagcgagctgaagttgttggaggaagcaaccatctcggtgtgccgctccctggtggagaacaatcccagaaccggcaatctgggagccctgatcaaagtgttccttagccggactaaggagctgaaactctccgcagaatgtcagaaccacatctttatctggcaaacacacaacgccctctttatcatctgctgtctgctaaaggtgttcatatgccagatgagcgaagaggagctgcaactgcacttcacctatgaagagaagtcccccggtaactactcgtcagactccgaggacctgttggaggaactcctgtgttgtctcatgcagctgatcaccgacattcctcttctggacatcacctacgaaattagcgtggaagcaatctccacaatggttgtgttcttgtcttgccagctttttcacaaggaggttctccggcagtctatttctcataagtacctcatgagaggaccatgcctaccatatacctccaagcttgttaagacactgctatataatttcatcagacaggagaagcccccaccacctggcgcacacgtttttccccagcagtccgatgggggaggactgctgtacggtctggcatctggcgtggctaccggactatggactgtattcacactcggaggtgtaggaagcaaggccgcagccagtcccgagctttctagtcctcttgcaaatcagtcacttctgctgttgctggtgctggccaacttgacagacgcttccgatgccccaaatccctatagacaagccattatgtcattcaagaacacacaagactcttcaccattccctagcagcattccacatgccttccagatcaacttcaactctctgtataccgctctgtgcgaacagcagacgtctgaccaggccacactgttattgtatactctgttgcaccagaactcaaacattaggacatacatgttagctcggacagatatggaaaacttagtactgcccatcctggagatcctgtaccacgtggaagagaggaattctcatcatgtctatatggctctgataatattactgattctgactgaggatgacggatttaatcgctccattcatgaagtgattctgaagaatatcacttggtacagtgaaagagtccttacagagataagtcttgggtcccttttaatcttggtggtgataagaacgattcagtacaacatgacaagaacccgagacaaataccttcacactaattgcctcgctgccttagctaatatgagcgcccagtttcgaagcctgcatcaatatgcagcgcaacgtatcatcagtttgttctcactgttatctaaaaagcataataaggtgcttgagcaagccacgcaaagtctcagaggctcgctgtccagtaacgacgttccattgcccgattacgcccaggacctcaatgtaatagaagaggtgatcaggatgatgctggaaatcataaactcatgtctcactaatagtctgcaccacaatcctaatctggtgtacgctctgctatacaaacgagatttgttcgaacagttcagaactcaccccagtttccaggacatcatgcagaacatagatttggtgataagcttcttctctagccgattactccaggcgggagccgagctatccgtggaaagagtgctggagataattaaacagggcgtcgtggccttacctaaagacagactgaaaaagttccctgagctgaagtttaaatacgtcgaggaggagcagccagaagagttttttatcccttacgtctggtcactggtgtacaactccgctgttgggctttattggaacccacaagacatccagctattcaccatggattctgactag

SEQ ID NO: 194283 - DNA, 1440 bp, Artificial Sequence
  derived and/or modified sequence
atgggctccaactcgagtcgcatcggggatttgccaaagaacgaatatctcaagaagctgagcggaacagaatccatcagcgagaacgatcccttttggaaccagttgctcagcttctcttttccggctcctacctcatcctccgaactgaaactcttagaagaggcgacgatctctgtgtgccgctctctggcgggtctttggaccgtcttcacattaggtggtgttggaagtaaggctgcagccagtcctgagctcagctcacctctagcaaaccagagcctgcttctgctgctggtcttagccaatttaaccgatgctagcgatgccccaaacccatatagacaggccattatgtcatttaagaacactcaagactcctctccgtttccgagctccattcctcacgcattccagattaatttcaattcactgtacactgctctgtgcgaacagcagacatcagaccaagccacactgttactgtacactctgttacaccagaacagcaatataaggacatatatgcttgcaagaacggatatggaaaacctggttctcccaattcttgagattctttaccacgtggaggagagaaattcgcatcacgtgtacatggcacttattattctcctcatcctgaccgaagatgatggtttcaatcgttctatccacgaggtgatactgaagaatattacttggtattctgagcgcgtattaaccgaaataagtctaggaagtctcttaattcttgtcgtgatccgcactattcaatacaacatgacaaggactcgggacaagtatctgcatacaaattgtctggccgctctggctaatatgtcagcccagtttcgcagccttcatcagtacgctgcccagaggattatcagcttgtttagcctgctgagcaaaaagcacaataaagttctggagcaggccacccagagtctcaggggcagcctatcatccaatgatgttcctttaccagactatgctcaggacctgaacgtgattgaggaggtgattcggatgatgctcgaaatcatcaacagctgtttaaccaacagcctgcaccataatccaaatctggtgtacgcgctcctatataaaagggatctgttcgaacagttccgcactcacccatccttccaggatatcatgcagaatattgatctcgtaatttcattcttcagttctaggctgctgcaggctggggcagaactgtcggtggagagagtcctggaaattatcaagcagggggtagtcgcccttccaaaggaccgcttgaagaaatttccagagctaaaatttaaatatgtggaagaggagcagcccgaagagttctttatcccctacgtttggagcctggtgtataacagcgctgtggggctttattggaatcctcaggatatccagctgtttactatggactcagactag

SEQ ID NO: 194284 - DNA, 2010 bp, Artificial Sequence
  derived and/or modified sequence
atgggcagcaacagcagcagaatcggcgacctgcccaagaacgagtacctgaagaagctgagcggcaccgagagcatcagcgagaacgaccccttctggaaccagctgctgagcttcagcttccccgcccccaccagcagcagcgagctgaagctgctggaggaggccaccatcagcgtgtgcagaagcctggtggagaacaaccccagaaccggcaacctgggcgccctgatcaaggtgttcctgagcagaaccaaggagctgaagctgagcgccgagtgccagaaccacatcttcatctggcagacccacaacgccctgttcatcatctgctgcctgctgaaggtgttcatctgccagatgagcgaggaggagctgcagctgcacttcacctacgaggagaagagccccggcaactacagcagcgacagcgaggacctgctggaggagctgctgtgctgcctgatgcagctgatcaccgacatccccctgctggacatcacctacgagatcagcgtggaggccatcagcaccatggtggtgttcctgagctgccagctgttccacaaggaggtgctgagacagagcatcagccacaagtacctgatgagaggcccctgcctgccctacaccagcaagctggtgaagaccctgctgtacaacttcatcagacaggagaagccccccccccccggcgcccacgtgttcccccagcagagcgacggcggcggcctgctgtacggcctggccagcggcgtggccaccggcctgtggaccgtgttcaccctgggcggcgtgggcagcaaggccgccgccagccccgagctgagcagccccctggccaaccagagcctgctgctgctgctggtgctggccaacctgaccgacgccagcgacgcccccaacccctacagacaggccatcatgagcttcaagaacacccaggacagcagccccttccccagcagcatcccccacgccttccagatcaacttcaacagcctgtacaccgccctgtgcgagcagcagaccagcgaccaggccaccctgctgctgtacaccctgctgcaccagaacagcaacatcagaacctacatgctggccagaaccgacatggagaacctggtgctgcccatcctggagatcctgtaccacgtggaggagagaaacagccaccacgtgtacatggccctgatcatcctgctgatcctgaccgaggacgacggcttcaacagaagcatccacgaggtgatcctgaagaacatcacctggtacagcgagagagtgctgaccgagatcagcctgggcagcctgctgatcctggtggtgatcagaaccatccagtacaacatgaccagaaccagagacaagtacctgcacaccaactgcctggccgccctggccaacatgagcgcccagttcagaagcctgcaccagtacgccgcccagagaatcatcagcctgttcagcctgctgagcaagaagcacaacaaggtgctggagcaggccacccagagcctgagaggcagcctgagcagcaacgacgtgcccctgcccgactacgcccaggacctgaacgtgatcgaggaggtgatcagaatgatgctggagatcatcaacagctgcctgaccaacagcctgcaccacaaccccaacctggtgtacgccctgctgtacaagagagacctgttcgagcagttcagaacccaccccagcttccaggacatcatgcagaacatcgacctggtgatcagcttcttcagcagcagactgctgcaggccggcgccgagctgagcgtggagagagtgctggagatcatcaagcagggcgtggtggccctgcccaaggacagactgaagaagttccccgagctgaagttcaagtacgtggaggaggagcagcccgaggagttcttcatcccctacgtgtggagcctggtgtacaacagcgccgtgggcctgtactggaacccccaggacatccagctgttcaccatggacagcgactag

SEQ ID NO: 194285 - DNA, 1440 bp, Artificial Sequence
  derived and/or modified sequence
atgggcagcaacagcagcagaatcggcgacctgcccaagaacgagtacctgaagaagctgagcggcaccgagagcatcagcgagaacgaccccttctggaaccagctgctgagcttcagcttccccgcccccaccagcagcagcgagctgaagctgctggaggaggccaccatcagcgtgtgcagaagcctggccggcctgtggaccgtgttcaccctgggcggcgtgggcagcaaggccgccgccagccccgagctgagcagccccctggccaaccagagcctgctgctgctgctggtgctggccaacctgaccgacgccagcgacgcccccaacccctacagacaggccatcatgagcttcaagaacacccaggacagcagccccttccccagcagcatcccccacgccttccagatcaacttcaacagcctgtacaccgccctgtgcgagcagcagaccagcgaccaggccaccctgctgctgtacaccctgctgcaccagaacagcaacatcagaacctacatgctggccagaaccgacatggagaacctggtgctgcccatcctggagatcctgtaccacgtggaggagagaaacagccaccacgtgtacatggccctgatcatcctgctgatcctgaccgaggacgacggcttcaacagaagcatccacgaggtgatcctgaagaacatcacctggtacagcgagagagtgctgaccgagatcagcctgggcagcctgctgatcctggtggtgatcagaaccatccagtacaacatgaccagaaccagagacaagtacctgcacaccaactgcctggccgccctggccaacatgagcgcccagttcagaagcctgcaccagtacgccgcccagagaatcatcagcctgttcagcctgctgagcaagaagcacaacaaggtgctggagcaggccacccagagcctgagaggcagcctgagcagcaacgacgtgcccctgcccgactacgcccaggacctgaacgtgatcgaggaggtgatcagaatgatgctggagatcatcaacagctgcctgaccaacagcctgcaccacaaccccaacctggtgtacgccctgctgtacaagagagacctgttcgagcagttcagaacccaccccagcttccaggacatcatgcagaacatcgacctggtgatcagcttcttcagcagcagactgctgcaggccggcgccgagctgagcgtggagagagtgctggagatcatcaagcagggcgtggtggccctgcccaaggacagactgaagaagttccccgagctgaagttcaagtacgtggaggaggagcagcccgaggagttcttcatcccctacgtgtggagcctggtgtacaacagcgccgtgggcctgtactggaacccccaggacatccagctgttcaccatggacagcgactag

SEQ ID NO: 194286 - DNA, 2610 bp, Artificial Sequence
  derived and/or modified sequence
acgtgaccacctggctggcgcgcgcgcctgggggtctggtccctagccgcgttctcggtcgcttccctcttctctcgccgcctcctggcctccgcaccgacgcggcccgggctggagccgagccggggccgagctgcaggccggaccggagccggatctgtacccgctgagacgtggaaacatggaggcctgagccggtgtgcgccacctgggctgcggcggcgacagcgacttctcctgacccctctgccaccctcccatccgtccgcgggtccgtggagctggagcagatcccccagccggctgagacaggttgtcttttggaaatgcaggtttaaggacaaattatctgcttaagctagaagatgggatcgaatagcagcagaatcggcgatcttcctaaaaatgagtacttgaaaaagttatcaggcacggaatctatctctgagaatgacccgttctggaatcagcttctctcattttctttccctgcaccaactagcagtagtgagttgaaactcttggaggaagcaaccatttcagtctgcaggtcattagttgaaaacaatcctcgaacaggaaatcttggtgcactaattaaggtcttcctttctagaaccaaagaactaaaactttcagcagaatgtcagaaccacatcttcatttggcagacacacaatgctttgtttattatttgctgtttgctgaaagtgttcatctgtcagatgtcagaggaggaattacaacttcattttacttatgaagaaaaatctcctggcaattacagttctgactcagaagatcttttggaagaattgctgtgctgtttgatgcagttgatcactgatattccactcttagatattacatatgaaatatcagtagaagctatatcaacaatggttgttttcctttcctgccaactcttccacaaagaagttttgcgacagagcatcagccacaagtatttgatgcgaggtccatgtcttccatacaccagcaaacttgtgaagaccttattatataactttatcagacaagaaaagccacctcctccaggggcccatgttttccctcagcagtcggatgggggaggactgctttatggacttgcatcaggagtagcaacaggactctggactgtcttcacactaggtggtgtgggcagcaaagcggctgcctctccagagctttcttcccctctggccaaccagagtctcctgcttctgctggtgttggccaatctgacagatgcctcagatgcgccaaacccctacagacaagccattatgtccttcaagaacacacaagatagcagtcctttcccctcatcaattccacatgccttccagatcaactttaatagtttgtacacagctctttgtgaacagcagacatctgatcaagcaactctcctcttgtataccttgctccatcaaaatagtaatattagaacatacatgttggctcgcacagatatggaaaatcttgttttaccaattcttgagattctgtatcatgttgaagaaaggaattcacaccatgtgtatatggcccttataatattgttgatccttacggaagatgatggcttcaacagatccattcatgaagtgatactaaaaaatattacttggtattcagaacgagttttaactgaaatctccttggggagtctcctgatcctggtggtaataagaaccattcaatacaacatgactaggacacgagacaagtaccttcacacaaattgtttggcagctttagcaaatatgtcggcacagtttcgttctctccatcagtatgctgcccagaggatcatcagtttattttctttgctgtctaaaaaacacaacaaagttctggaacaagccacacagtccttgagaggttcgctgagttctaatgatgttcctctaccagattatgcacaagacctaaatgtcattgaagaagtgattcgaatgatgttagagatcatcaactcctgcctgacaaattcccttcaccacaacccaaacttggtatacgccctgctttacaaacgcgatctctttgaacaatttcgaactcatccttcatttcaggatataatgcaaaatattgatctggtgatctccttctttagctcaaggttgctgcaagctggagctgagctgtcagtggaacgggtcctggaaatcattaagcaaggcgtcgttgcgctgcccaaagacagactgaagaaatttccagaattgaaattcaaatatgtggaagaggagcagcccgaggagttttttatcccctatgtctggtctcttgtctacaactcagcagtcggcctgtactggaatccacaggacatccagctgttcaccatggattccgactgagggcaggatgctctcccacccggacccctccagccaagcagcccttcaagttcttttatttctgggtaacagaagtagacagacaggttacttggtgtatcttctgttaaagaggattgcacgagtgtgttttcctcacacactttgatttggagaattggtgctagttggcaatagataactcagcgtagatagtattgcaaaaaggggaggaaatacacaacaataataaatg

SEQ ID NO: 194287 - DNA, 2793 bp, Artificial Sequence
  derived and/or modified sequence
acgtgaccacctggctggcgcgcgcgcctgggggtctggtccctagccgcgttctcggtcgcttccctcttctctcgccgcctcctggcctccgcaccgacgcggcccgggctggagccgagccggggccgagctgcaggccggaccggagccggatctgtacccgctgagacgtggaaacatggaggcctgagccggtgtgcgccacctgggctgcggcggcgacagcgacttctcctgacccctctgccaccctcccatccgtccgcgggtccgtggagctggagcagatcccccagccggctgagacaggttgtcttttggaaatgcaggtttaaggacaaattatctgcttaagctagaagatgggatcgaatagcagcagaatcggcgatcttcctaaaaatgagtacttgaaaaagttatcaggcacggaatctatctctgagaatgacccgttctggaatcagcttctctcattttctttccctgcaccaactagcagtagtgagttgaaactcttggaggaagcaaccatttcagtctgcaggtcattagttgaaaacaatcctcgaacaggaaatcttggtgcactaattaaggtcttcctttctagaaccaaagaactaaaactttcagcagaatgtcagaaccacatcttcatttggcagacacacaatgctttgtttattatttgctgtttgctgaaagtgttcatctgtcagatgtcagaggaggaattacaacttcattttacttatgaagaaaaatctcctggcaattacagttctgactcagaagatcttttggaagaattgctgtgctgtttgatgcagttgatcactgatattccactcttagatattacatatgaaatatcagtagaagctatatcaacaatggttgttttcctttcctgccaactcttccacaaagaagttttgcgacagagcatcagccacaagtatttgatgcgaggtccatgtcttccatacaccagcaaacttgtgaagaccttattatataactttatcagacaagaaaagccacctcctccaggggcccatgttttccctcagcagtcggatgggggaggactgctttatggacttgcatcaggagtagcaacaggactctggactgtcttcacactaggtggtgtgggcagcaaagcggctgcctctccagagctttcttcccctctggccaaccagagtctcctgcttctgctggtgttggccaatctgacagatgcctcagatgcgccaaacccctacagacaagccattatgtccttcaagaacacacaagatagcagtcctttcccctcatcaattccacatgccttccagatcaactttaatagtttgtacacagctctttgtgaacagcagacatctgatcaagcaactctcctcttgtataccttgctccatcaaaatagtaatattagaacatacatgttggctcgcacagatatggaaaatcttgttttaccaattcttgagattctgtatcatgttgaagaaaggaattcacaccatgtgtatatggcccttataatattgttgatccttacggaagatgatggcttcaacagatccattcatgaagtgatactaaaaaatattacttggtattcagaacgagttttaactgaaatctccttggggagtctcctgatcctggtggtaataagaaccattcaatacaacatgactaggacacgagacaagtaccttcacacaaattgtttggcagctttagcaaatatgtcggcacagtttcgttctctccatcagtatgctgcccagaggatcatcagttatacctgccgccacttgcggagatatgtttatgtgttggacaaactgtatttcccccactctcactgttctacgcttcagcattgcttctcgaccctcagtgacaatggagaggaactcttgtctttaacttgctctcacattctcagatcctatgcttccagtttattttctttgctgtctaaaaaacacaacaaagttctggaacaagccacacagtccttgagaggttcgctgagttctaatgatgttcctctaccagattatgcacaagacctaaatgtcattgaagaagtgattcgaatgatgttagagatcatcaactcctgcctgacaaattcccttcaccacaacccaaacttggtatacgccctgctttacaaacgcgatctctttgaacaatttcgaactcatccttcatttcaggatataatgcaaaatattgatctggtgatctccttctttagctcaaggttgctgcaagctggagctgagctgtcagtggaacgggtcctggaaatcattaagcaaggcgtcgttgcgctgcccaaagacagactgaagaaatttccagaattgaaattcaaatatgtggaagaggagcagcccgaggagttttttatcccctatgtctggtctcttgtctacaactcagcagtcggcctgtactggaatccacaggacatccagctgttcaccatggattccgactgagggcaggatgctctcccacccggacccctccagccaagcagcccttcaagttcttttatttctgggtaacagaagtagacagacaggttacttggtgtatcttctgttaaagaggattgcacgagtgtgttttcctcacacactttgatttggagaattggtgctagttggcaatagataactcagcgtagatagtattgcaaaaaggggaggaaatacacaacaataataaatgtaaaaacctgctattcaa

SEQ ID NO: 194288 - DNA, 2058 bp, Artificial Sequence
  derived and/or modified sequence
acgtgaccacctggctggcgcgcgcgcctgggggtctggtccctagccgcgttctcggtcgcttccctcttctctcgccgcctcctggcctccgcaccgacgcggcccgggctggagccgagccggggccgagctgcaggccggaccggagccggatctgtacccgctgagacgtggaaacatggaggcctgagccggtgtgcgccacctgggctgcggcggcgacagcgacttctcctgacccctctgccaccctcccatccgtccgcgggtccgtggagctggagcagatcccccagccggctgagacaggttgtcttttggaaatgcaggtttaaggacaaattatctgcttaagctagaagatgggatcgaatagcagcagaatcggcgatcttcctaaaaatgagtacttgaaaaagttatcaggcacggaatctatctctgagaatgacccgttctggaatcagcttctctcattttctttccctgcaccaactagcagtagtgagttgaaactcttggaggaagcaaccatttcagtctgcaggtcattagcaggactctggactgtcttcacactaggtggtgtgggcagcaaagcggctgcctctccagagctttcttcccctctggccaaccagagtctcctgcttctgctggtgttggccaatctgacagatgcctcagatgcgccaaacccctacagacaagccattatgtccttcaagaacacacaagatagcagtcctttcccctcatcaattccacatgccttccagatcaactttaatagtttgtacacagctctttgtgaacagcagacatctgatcaagcaactctcctcttgtataccttgctccatcaaaatagtaatattagaacatacatgttggctcgcacagatatggaaaatcttgttttaccaattcttgagattctgtatcatgttgaagaaaggaattcacaccatgtgtatatggcccttataatattgttgatccttacggaagatgatggcttcaacagatccattcatgaagtgatactaaaaaatattacttggtattcagaacgagttttaactgaaatctccttggggagtctcctgatcctggtggtaataagaaccattcaatacaacatgactaggacacgagacaagtaccttcacacaaattgtttggcagctttagcaaatatgtcggcacagtttcgttctctccatcagtatgctgcccagaggatcatcagtttattttctttgctgtctaaaaaacacaacaaagttctggaacaagccacacagtccttgagaggttcgctgagttctaatgatgttcctctaccagattatgcacaagacctaaatgtcattgaagaagtgattcgaatgatgttagagatcatcaactcctgcctgacaaattcccttcaccacaacccaaacttggtatacgccctgctttacaaacgcgatctctttgaacaatttcgaactcatccttcatttcaggatataatgcaaaatattgatctggtgatctccttctttagctcaaggttgctgcaagctggagctgagctgtcagtggaacgggtcctggaaatcattaagcaaggcgtcgttgcgctgcccaaagacagactgaagaaatttccagaattgaaattcaaatatgtggaagaggagcagcccgaggagttttttatcccctatgtctggtctcttgtctacaactcagcagtcggcctgtactggaatccacaggacatccagctgttcaccatggattccgactgagggcaggatgctctcccacccggacccctccagccaagcagcccttcaagttcttttatttctgggtaacagaagtagacagacaggttacttggtgtatcttctgttaaagaggattgcacgagtgtgttttcctcacacactttgatttggagaattggtgctagttggcaatagataactcagcgtagatagtattgcaaaaaggggaggaaatacacaacaataataaatgtaaaaacctgctattcaa

SEQ ID NO: 194289 - protein, 1589 aa, Artificial Sequence
  derived and/or modified sequence
MAKQLNLPENTDDWTKEDVNQWLESHKIDQKHREILTEQDVNGAVLKWLKKEHLVDMGITHGPAIQIEELFKELRKTAIEDSIQTSKMGKPSKNAPKDQTVSQKERRETSKQKQKGKENPDMANPSAMSTTAKGSKSLKVELIEDKIDYTKERQPSIDLTCVSYPFDEFSNPYRYKLDFSLQPETGPGNLIDPIHEFKAFTNTATATEEDVKMKFSNEVFRFASACMNSRTNGTIHFGVKDKPHGKIVGIKVTNDTKEALINHFNLMINKYFEDHQVQQAKKCIREPRFVEVLLPNSTLSDRFVIEVDIIPQFSECQYDYFQIKMQNYNNKIWEQSKKFSLFVRDGTSSKDITKNKVDFRAFKADFKTLAESRKAAEEKFRAKTNKKEREGPKLVKLLTGNQDLLDNSYYEQYILVTNKCHPDQTKHLDFLKEIKWFAVLEFDPESNINGVVKAYKESRVANLHFPSVYVEQKTTPNETISTLNLYHQPSWIFCNGRLDLDSEKYKPFDPSSWQRERASDVRKLISFLTHEDIMPRGKFLVVFLLLSSVDDPRDPLIETFCAFYQDLKGMENILCICVHPHIFQGWKDLLEARLIKHQDEISSQCISALSLEEINGTILKLKSVTQSSKRLLPSIGLSTVLLKKEEDIMTALEIICENECEGTLLEKDKNKFLEFKASKEEDFYRGGKVSWWNFYFSSESYSSPFVKRDKYERLEAMIQNCADSSKPTSTKIIHLYHHPGCGGTTLAMHILWELRKKFRCAVLKNKTVDFSEIGEQVTSLITYGAMNRQEYVPVLLLVDDFEEQDNVYLLQYSIQTAIAKKYIRYEKPLVIILNCMRSQNPEKSARIPDSIAVIQQLSPKEQRAFELKLKEIKEQHKNFEDFYSFMIMKTNFNKEYIENVVRNILKGQNIFTKEAKLFSFLALLNSYVPDTTISLSQCEKFLGIGNKKAFWGTEKFEDKMGTYSTILIKTEVIECGNYCGVRIIHSLIAEFSLEELKKSYHLNKSQIMLDMLTENLFFDTGMGKSKFLQDMHTLLLTRHRDEHEGETGNWFSPFIEALHKDEGNEAVEAVLLESIHRFNPNAFICQALARHFYIKKKDFGNALNWAKQAKIIEPDNSYISDTLGQVYKSKIRWWIEENGGNGNISVDDLIALLDLAEHASSAFKESQQQSEDREYEVKERLYPKSKRRYDTYNIAGYQGEIEVGLYTIQILQLIPFFDNKNELSKRYMVNFVSGSSDIPGDPNNEYKLALKNYIPYLTKLKFSLKKSFDFFDEYFVLLKPRNNIKQNEEAKTRRKVAGYFKKYVDIFCLLEESQNNTGLGSKFSEPLQVERCRRNLVALKADKFSGLLEYLIKSQEDAISTMKCIVNEYTFLLEQCTVKIQSKEKLNFILANIILSCIQPTSRLVKPVEKLKDQLREVLQPIGLTYQFSEPYFLASLLFWPENQQLDQHSEQMKEYAQALKNSFKGQYKHMHRTKQPIAYFFLGKGKRLERLVHKGKIDQCFKKTPDINSLWQSGDVWKEEKVQELLLRLQGRAENNCLYIEYGINEKITIPITPAFLGQLRSGRSIEKVSFYLGFSIGGPLAYDIEIV

SEQ ID NO: 194290 - protein, 1283 aa, Artificial Sequence
  derived and/or modified sequence
MAKQLNLPENTDDWTKEDVNQWLESHKIDQKHREILTEQDVNGAVLKWLKKEHLVDMGITHGPAIQIEELFKELRKTAIEDSIQTSKMGKPSKNAPKDQTVSQKERRETSKQKQKGKENPDMANPSAMSTTAKGSKSLKVELIEDKIDYTKERQPSIDLTCVSYPFDEFSNPYRYKLDFSLQPETGPGNLIDPIHEFKAFTNTATATEEDVKMKFSNEVFRFASACMNSRTNGTIHFGVKDKPHGKIVGIKVTNDTKEALINHFNLMINKYFEDHQVQQAKKCIREPRFVEVLLPNSTLSDRFVIEVDIIPQFSECQYDYFQIKMQNYNNKIWEQSKKFSLFVRDGTSSKDITKNKVDFRAFKADFKTLAESRKAAEEKFRAKTNKKEREGPKLVKLLTGNQDLLDNSYYEQYILVTNKCHPDQTKHLDFLKEIKWFAVLEFDPESNINGVVKAYKESRVANLHFPSVYVEQKTTPNETISTLNLYHQPSWIFCNGRLDLDSEKYKPFDPSSWQRERASDVRKLISFLTHEDIMPRGKFLVVFLLLSSVDDPRDPLIETFCAFYQDLKGMENILCICVHPHIFQGWKDLLEARLIKHQDEISSQCISALSLEEINGTILKLKSVTQSSKRLLPSIGLSTVLLKKEEDIMTALEIICENECEGTLLEKDKNKFLEFKASKEEDFYRGGKVSWWNFYFSSESYSSPFVKRDKYERLEAMIQNCADSSKPTSTKIIHLYHHPGCGGTTLAMHILWELRKKFRCAVLKNKTVDFSEIGEQVTSLITYGAMNRQEYVPVLLLVDDFEEQDNVYLLQYSIQTAIAKKYIRYEKPLVIILNCMRSQNPEKSARIPDSIAVIQQLSPKEQRAFELKLKEIKEQHKNFEDFYSFMIMKTNFNKEYIENVVRNILKGQNIFTKEAKLFSFLALLNSYVPDTTISLSQCEKFLGIGNKKAFWGTEKFEDKMGTYSTILIKTEVIECGNYCGVRIIHSLIAEFSLEELKKSYHLNKSQIMLDMLTENLFFDTGMGKSKFLQDMHTLLLTRHRDEHEGETGNWFSPFIEALHKDEGNEAVEAVLLESIHRFNPNAFICQALARHFYIKKKDFGNALNWAKQAKIIEPDNSYISDTLGQVYKSKIRWWIEENGGNGNISVDDLIALLDLAEHASSAFKESQQQSEDREYEVKERLYPKSKRRYDTYNIAGYQGEIEVGLYTIQILQLIPFFDNKNELSKRYMVNFVSGSSDIPGDPNNEYKLALKNYIPYLTKLKFSLKKSFDFFDEYFVLLKPRNN

SEQ ID NO: 194291 - DNA, 674 bp, Artificial Sequence
  derived and/or modified sequence
agagcagctggacatgggggagcttgcagcgtcagcaaatcatggacactcaccctgctacccagagagaaaagggacccctggagacttgagcaaaagaaaaatgctggtacatttttaccccaggaggcacagccaccccagagccacacagcaatggatacttaagaataagactctctgcaggaggatcaaggagtaataaaaagagcagaatatctgcagctgccaagacctcggctctaattctagatttgcagcccatggctgcacaataggcacaagaatgaaccaacgtcaccaccaaggaaagtggcacagctgagctgcacccacgtctgactccaagggaccagctattgacagctattcaccatttggtttctgtgtgtcccagtcctcacgtggaaaatgggcaaatattatctgcttcatcggtattcctgggaacctagaggaagcactagccaatatcattcacttagcataccggagttatctttccattttcttaattcaagaaccttgctctttttgccaattatcttagtagtttttcagtgacctctcagtaaaagcaatgtattttgtagccttgtctttcacagaaatcgccttataaattgtttgatatacaattaaacaaaaactttatttctgcattgctcaaagaa

SEQ ID NO: 194292 - DNA, 4770 bp, Artificial Sequence
  derived and/or modified sequence
atggccaagcagctgaacctgcccgagaacaccgacgactggaccaaggaggacgtgaaccagtggctggagagccacaagatcgaccagaagcacagagagatcctgaccgagcaggacgtgaacggcgccgtgctgaagtggctgaagaaggagcacctggtggacatgggcatcacccacggccccgccatccagatcgaggagctgttcaaggagctgagaaagaccgccatcgaggacagcatccagaccagcaagatgggcaagcccagcaagaacgcccccaaggaccagaccgtgagccagaaggagagaagagagaccagcaagcagaagcagaagggcaaggagaaccccgacatggccaaccccagcgccatgagcaccaccgccaagggcagcaagagcctgaaggtggagctgatcgaggacaagatcgactacaccaaggagagacagcccagcatcgacctgacctgcgtgagctaccccttcgacgagttcagcaacccctacagatacaagctggacttcagcctgcagcccgagaccggccccggcaacctgatcgaccccatccacgagttcaaggccttcaccaacaccgccaccgccaccgaggaggacgtgaagatgaagttcagcaacgaggtgttcagattcgccagcgcctgcatgaacagcagaaccaacggcaccatccacttcggcgtgaaggacaagccccacggcaagatcgtgggcatcaaggtgaccaacgacaccaaggaggccctgatcaaccacttcaacctgatgatcaacaagtacttcgaggaccaccaggtgcagcaggccaagaagtgcatcagagagcccagattcgtggaggtgctgctgcccaacagcaccctgagcgacagattcgtgatcgaggtggacatcatcccccagttcagcgagtgccagtacgactacttccagatcaagatgcagaactacaacaacaagatctgggagcagagcaagaagttcagcctgttcgtgagagacggcaccagcagcaaggacatcaccaagaacaaggtggacttcagagccttcaaggccgacttcaagaccctggccgagagcagaaaggccgccgaggagaagttcagagccaagaccaacaagaaggagagagagggccccaagctggtgaagctgctgaccggcaaccaggacctgctggacaacagctactacgagcagtacatcctggtgaccaacaagtgccaccccgaccagaccaagcacctggacttcctgaaggagatcaagtggttcgccgtgctggagttcgaccccgagagcaacatcaacggcgtggtgaaggcctacaaggagagcagagtggccaacctgcacttccccagcgtgtacgtggagcagaagaccacccccaacgagaccatcagcaccctgaacctgtaccaccagcccagctggatcttctgcaacggcagactggacctggacagcgagaagtacaagcccttcgaccccagcagctggcagagagagagagccagcgacgtgagaaagctgatcagcttcctgacccacgaggacatcatgcccagaggcaagttcctggtggtgttcctgctgctgagcagcgtggacgaccccagagaccccctgatcgagaccttctgcgccttctaccaggacctgaagggcatggagaacatcctgtgcatctgcgtgcacccccacatcttccagggctggaaggacctgctggaggccagactgatcaagcaccaggacgagatcagcagccagtgcatcagcgccctgagcctggaggagatcaacggcaccatcctgaagctgaagagcgtgacccagagcagcaagagactgctgcccagcatcggcctgagcaccgtgctgctgaagaaggaggaggacatcatgaccgccctggagatcatctgcgagaacgagtgcgagggcaccctgctggagaaggacaagaacaagttcctggagttcaaggccagcaaggaggaggacttctacagaggcggcaaggtgagctggtggaacttctacttcagcagcgagagctacagcagccccttcgtgaagagagacaagtacgagagactggaggccatgatccagaactgcgccgacagcagcaagcccaccagcaccaagatcatccacctgtaccaccaccccggctgcggcggcaccaccctggccatgcacatcctgtgggagctgagaaagaagttcagatgcgccgtgctgaagaacaagaccgtggacttcagcgagatcggcgagcaggtgaccagcctgatcacctacggcgccatgaacagacaggagtacgtgcccgtgctgctgctggtggacgacttcgaggagcaggacaacgtgtacctgctgcagtacagcatccagaccgccatcgccaagaagtacatcagatacgagaagcccctggtgatcatcctgaactgcatgagaagccagaaccccgagaagagcgccagaatccccgacagcatcgccgtgatccagcagctgagccccaaggagcagagagccttcgagctgaagctgaaggagatcaaggagcagcacaagaacttcgaggacttctacagcttcatgatcatgaagaccaacttcaacaaggagtacatcgagaacgtggtgagaaacatcctgaagggccagaacatcttcaccaaggaggccaagctgttcagcttcctggccctgctgaacagctacgtgcccgacaccaccatcagcctgagccagtgcgagaagttcctgggcatcggcaacaagaaggccttctggggcaccgagaagttcgaggacaagatgggcacctacagcaccatcctgatcaagaccgaggtgatcgagtgcggcaactactgcggcgtgagaatcatccacagcctgatcgccgagttcagcctggaggagctgaagaagagctaccacctgaacaagagccagatcatgctggacatgctgaccgagaacctgttcttcgacaccggcatgggcaagagcaagttcctgcaggacatgcacaccctgctgctgaccagacacagagacgagcacgagggcgagaccggcaactggttcagccccttcatcgaggccctgcacaaggacgagggcaacgaggccgtggaggccgtgctgctggagagcatccacagattcaaccccaacgccttcatctgccaggccctggccagacacttctacatcaagaagaaggacttcggcaacgccctgaactgggccaagcaggccaagatcatcgagcccgacaacagctacatcagcgacaccctgggccaggtgtacaagagcaagatcagatggtggatcgaggagaacggcggcaacggcaacatcagcgtggacgacctgatcgccctgctggacctggccgagcacgccagcagcgccttcaaggagagccagcagcagagcgaggacagagagtacgaggtgaaggagagactgtaccccaagagcaagagaagatacgacacctacaacatcgccggctaccagggcgagatcgaggtgggcctgtacaccatccagatcctgcagctgatccccttcttcgacaacaagaacgagctgagcaagagatacatggtgaacttcgtgagcggcagcagcgacatccccggcgaccccaacaacgagtacaagctggccctgaagaactacatcccctacctgaccaagctgaagttcagcctgaagaagagcttcgacttcttcgacgagtacttcgtgctgctgaagcccagaaacaacatcaagcagaacgaggaggccaagaccagaagaaaggtggccggctacttcaagaagtacgtggacatcttctgcctgctggaggagagccagaacaacaccggcctgggcagcaagttcagcgagcccctgcaggtggagagatgcagaagaaacctggtggccctgaaggccgacaagttcagcggcctgctggagtacctgatcaagagccaggaggacgccatcagcaccatgaagtgcatcgtgaacgagtacaccttcctgctggagcagtgcaccgtgaagatccagagcaaggagaagctgaacttcatcctggccaacatcatcctgagctgcatccagcccaccagcagactggtgaagcccgtggagaagctgaaggaccagctgagagaggtgctgcagcccatcggcctgacctaccagttcagcgagccctacttcctggccagcctgctgttctggcccgagaaccagcagctggaccagcacagcgagcagatgaaggagtacgcccaggccctgaagaacagcttcaagggccagtacaagcacatgcacagaaccaagcagcccatcgcctacttcttcctgggcaagggcaagagactggagagactggtgcacaagggcaagatcgaccagtgcttcaagaagacccccgacatcaacagcctgtggcagagcggcgacgtgtggaaggaggagaaggtgcaggagctgctgctgagactgcagggcagagccgagaacaactgcctgtacatcgagtacggcatcaacgagaagatcaccatccccatcacccccgccttcctgggccagctgagaagcggcagaagcatcgagaaggtgagcttctacctgggcttcagcatcggcggccccctggcctacgacatcgagatcgtgtag

SEQ ID NO: 194293 - DNA, 3852 bp, Artificial Sequence
  derived and/or modified sequence
atggccaagcagctgaacctgcccgagaacaccgacgactggaccaaggaggacgtgaaccagtggctggagagccacaagatcgaccagaagcacagagagatcctgaccgagcaggacgtgaacggcgccgtgctgaagtggctgaagaaggagcacctggtggacatgggcatcacccacggccccgccatccagatcgaggagctgttcaaggagctgagaaagaccgccatcgaggacagcatccagaccagcaagatgggcaagcccagcaagaacgcccccaaggaccagaccgtgagccagaaggagagaagagagaccagcaagcagaagcagaagggcaaggagaaccccgacatggccaaccccagcgccatgagcaccaccgccaagggcagcaagagcctgaaggtggagctgatcgaggacaagatcgactacaccaaggagagacagcccagcatcgacctgacctgcgtgagctaccccttcgacgagttcagcaacccctacagatacaagctggacttcagcctgcagcccgagaccggccccggcaacctgatcgaccccatccacgagttcaaggccttcaccaacaccgccaccgccaccgaggaggacgtgaagatgaagttcagcaacgaggtgttcagattcgccagcgcctgcatgaacagcagaaccaacggcaccatccacttcggcgtgaaggacaagccccacggcaagatcgtgggcatcaaggtgaccaacgacaccaaggaggccctgatcaaccacttcaacctgatgatcaacaagtacttcgaggaccaccaggtgcagcaggccaagaagtgcatcagagagcccagattcgtggaggtgctgctgcccaacagcaccctgagcgacagattcgtgatcgaggtggacatcatcccccagttcagcgagtgccagtacgactacttccagatcaagatgcagaactacaacaacaagatctgggagcagagcaagaagttcagcctgttcgtgagagacggcaccagcagcaaggacatcaccaagaacaaggtggacttcagagccttcaaggccgacttcaagaccctggccgagagcagaaaggccgccgaggagaagttcagagccaagaccaacaagaaggagagagagggccccaagctggtgaagctgctgaccggcaaccaggacctgctggacaacagctactacgagcagtacatcctggtgaccaacaagtgccaccccgaccagaccaagcacctggacttcctgaaggagatcaagtggttcgccgtgctggagttcgaccccgagagcaacatcaacggcgtggtgaaggcctacaaggagagcagagtggccaacctgcacttccccagcgtgtacgtggagcagaagaccacccccaacgagaccatcagcaccctgaacctgtaccaccagcccagctggatcttctgcaacggcagactggacctggacagcgagaagtacaagcccttcgaccccagcagctggcagagagagagagccagcgacgtgagaaagctgatcagcttcctgacccacgaggacatcatgcccagaggcaagttcctggtggtgttcctgctgctgagcagcgtggacgaccccagagaccccctgatcgagaccttctgcgccttctaccaggacctgaagggcatggagaacatcctgtgcatctgcgtgcacccccacatcttccagggctggaaggacctgctggaggccagactgatcaagcaccaggacgagatcagcagccagtgcatcagcgccctgagcctggaggagatcaacggcaccatcctgaagctgaagagcgtgacccagagcagcaagagactgctgcccagcatcggcctgagcaccgtgctgctgaagaaggaggaggacatcatgaccgccctggagatcatctgcgagaacgagtgcgagggcaccctgctggagaaggacaagaacaagttcctggagttcaaggccagcaaggaggaggacttctacagaggcggcaaggtgagctggtggaacttctacttcagcagcgagagctacagcagccccttcgtgaagagagacaagtacgagagactggaggccatgatccagaactgcgccgacagcagcaagcccaccagcaccaagatcatccacctgtaccaccaccccggctgcggcggcaccaccctggccatgcacatcctgtgggagctgagaaagaagttcagatgcgccgtgctgaagaacaagaccgtggacttcagcgagatcggcgagcaggtgaccagcctgatcacctacggcgccatgaacagacaggagtacgtgcccgtgctgctgctggtggacgacttcgaggagcaggacaacgtgtacctgctgcagtacagcatccagaccgccatcgccaagaagtacatcagatacgagaagcccctggtgatcatcctgaactgcatgagaagccagaaccccgagaagagcgccagaatccccgacagcatcgccgtgatccagcagctgagccccaaggagcagagagccttcgagctgaagctgaaggagatcaaggagcagcacaagaacttcgaggacttctacagcttcatgatcatgaagaccaacttcaacaaggagtacatcgagaacgtggtgagaaacatcctgaagggccagaacatcttcaccaaggaggccaagctgttcagcttcctggccctgctgaacagctacgtgcccgacaccaccatcagcctgagccagtgcgagaagttcctgggcatcggcaacaagaaggccttctggggcaccgagaagttcgaggacaagatgggcacctacagcaccatcctgatcaagaccgaggtgatcgagtgcggcaactactgcggcgtgagaatcatccacagcctgatcgccgagttcagcctggaggagctgaagaagagctaccacctgaacaagagccagatcatgctggacatgctgaccgagaacctgttcttcgacaccggcatgggcaagagcaagttcctgcaggacatgcacaccctgctgctgaccagacacagagacgagcacgagggcgagaccggcaactggttcagccccttcatcgaggccctgcacaaggacgagggcaacgaggccgtggaggccgtgctgctggagagcatccacagattcaaccccaacgccttcatctgccaggccctggccagacacttctacatcaagaagaaggacttcggcaacgccctgaactgggccaagcaggccaagatcatcgagcccgacaacagctacatcagcgacaccctgggccaggtgtacaagagcaagatcagatggtggatcgaggagaacggcggcaacggcaacatcagcgtggacgacctgatcgccctgctggacctggccgagcacgccagcagcgccttcaaggagagccagcagcagagcgaggacagagagtacgaggtgaaggagagactgtaccccaagagcaagagaagatacgacacctacaacatcgccggctaccagggcgagatcgaggtgggcctgtacaccatccagatcctgcagctgatccccttcttcgacaacaagaacgagctgagcaagagatacatggtgaacttcgtgagcggcagcagcgacatccccggcgaccccaacaacgagtacaagctggccctgaagaactacatcccctacctgaccaagctgaagttcagcctgaagaagagcttcgacttcttcgacgagtacttcgtgctgctgaagcccagaaacaactag

SEQ ID NO: 194294 - DNA, 4770 bp, Artificial Sequence
  derived and/or modified sequence
atggccaaacagctcaatcttcccgaaaacactgacgactggacgaaagaggatgtgaatcaatggctcgaaagtcacaagatcgaccaaaaacaccgcgagatcctgacggaacaggatgttaatggagccgtcctgaagtggttaaagaaagagcatcttgtcgacatgggcatcactcacgggccagctattcagatagaagaactattcaaggaactgaggaaaacagccatagaagactctattcagacaagcaagatgggcaagcctagcaagaacgcaccaaaagatcagactgtatcacagaaggagcgcagagaaacctcgaaacagaagcagaaggggaaagagaacccggatatggcaaaccctagcgccatgtcaacgactgcaaaggggtctaagtctctgaaagtagagctgattgaggacaagattgactacacgaaagagcgccaaccctctatcgatctcacttgtgtatcttaccctttcgacgaattctccaatccctacagatataaacttgacttttcgttacagcccgagacaggcccggggaacctgatcgatcctatccatgagtttaaagctttcacaaacactgctactgccaccgaggaagacgtcaagatgaagttctctaatgaagtctttcgtttcgcctctgcctgcatgaactcgagaaccaacggtacaatccacttcggtgtcaaggacaaacctcatgggaaaatagtgggtatcaaggtcacaaatgacacaaaggaggctctgatcaaccattttaacttgatgatcaataagtatttcgaggaccatcaggttcagcaagccaaaaagtgtattagggagccccggtttgtggaggtcctgctgccgaactcaaccttatctgacaggtttgtgattgaagtcgatataatccctcagttttccgaatgtcagtacgactatttccagatcaagatgcagaattacaacaataagatttgggaacagtctaaaaagttttccctctttgttcgggacgggacatcctccaaggatattacaaagaataaggtagattttagagctttcaaagcagatttcaaaacattggccgagtcccgaaaggccgccgaagaaaaattccgggccaaaaccaataaaaaagaaagggagggccctaaattagtaaagctgctaacaggcaatcaagacctactggacaacagctattatgaacagtacattttggtaacgaacaagtgccatccggaccagacgaaacacctggattttctgaaggaaattaagtggttcgctgtcttagagttcgaccctgagagcaatattaacggcgtggtgaaggcctacaaggagtcccgggtagcaaatctgcattttccaagcgtgtacgtggaacaaaaaacaacccccaacgaaacaatctcaacactcaatttataccatcagccaagctggatattctgtaatggtcggttggacctggattccgaaaagtacaaacctttcgatccctcttcgtggcaaagggaaagagcaagtgatgtgaggaagctaataagtttcctgacgcacgaggacatcatgcccaggggaaaatttctggtagtttttttgctgctgtcgtccgtggatgacccaagggatccccttatcgagacattctgcgcgttttaccaagacttaaaggggatggagaatatcctgtgtatctgtgttcatccacacatttttcagggatggaaagatctcctcgaagcccggttgataaaacaccaggatgagatttccagtcagtgcatcagcgcattatcgctggaagaaattaacgggacaattctcaagctcaagagtgtgacccagagtagcaagaggctgctgcccagcatagggctgtccaccgtgttgttgaagaaggaagaagacatcatgacagcactcgaaattatttgcgagaacgagtgcgaagggactctcttggaaaaggataaaaacaaattcctcgagtttaaggctagtaaagaagaagatttctatcgtggaggaaaagtatcttggtggaacttttatttctcttcagagtcctattcttccccttttgtgaagagagacaaatatgagaggttggaagctatgatccagaattgtgccgattctagcaaacctacctcaaccaagataatccacctgtatcatcatccaggatgtgggggaactactctggctatgcacatcctgtgggagctgcggaagaagttccgctgcgcggttttgaagaacaaaaccgtcgatttctcagagatcggcgagcaagttacttccctgattacatacggcgctatgaacagacaggagtatgtccccgtacttctgctggtggacgattttgaggaacaggacaacgtgtacctgttgcagtattccattcagacagccatcgccaagaagtacattcgatacgagaagccacttgtgattatactgaattgtatgcggtcacagaatccagagaagagcgcacgcatccctgacagtattgctgtaattcagcaactttcaccgaaagaacagagggccttcgagctgaagttgaaggagatcaaggaacagcataaaaacttcgaggacttctatagttttatgatcatgaaaactaacttcaataaagaatatattgagaatgtggtgcgcaatattctgaaagggcagaatattttcacaaaagaggcaaaactgttcagctttctcgctctcctgaattcttatgttcctgatactacaatctctctctctcagtgtgaaaagtttttggggattggaaataaaaaagcattttggggaaccgagaagttcgaagacaagatgggaacgtattcaacgatcctgattaagacagaagtaattgaatgtgggaactactgtggcgtccggatcatacattcactgattgccgagttttccctagaggaattgaagaaatcgtatcatttgaataagtcacagatcatgctggatatgttaactgagaacttgttcttcgacactggaatgggtaaatccaaatttctgcaggatatgcataccttgcttctgaccagacatcgagacgaacatgagggtgagacagggaactggttcagcccatttattgaggctctgcacaaagacgagggcaacgaagcagtcgaagctgtgttattggagtccatccataggtttaatcccaatgccttcatctgccaggctctcgcacgacatttctacattaaaaaaaaagatttcggtaacgcgttaaactgggcaaagcaggctaaaattatcgagcctgacaacagttatatatcagacaccctcgggcaggtgtacaagagtaaaatacggtggtggattgaggagaacggaggaaatggaaacatctccgtggatgatctaatagcgttacttgatttggctgagcatgcctcatcagccttcaaggaaagccagcagcaatccgaggaccgagagtatgaggtgaaggagaggctctatcccaagagcaagaggaggtatgatacttataatatcgcggggtaccagggcgaaattgaggtcggcctctacaccatccaaatacttcagctaatccccttctttgacaacaaaaatgaactatctaagcgctacatggttaatttcgtgtctggctcttccgacataccaggcgaccctaacaatgaatacaaactggccctcaagaactatatcccgtacttgacgaaattaaaattttcactgaaaaagtccttcgacttcttcgacgaatatttcgtgttactcaagcctcgcaacaacatcaaacagaatgaagaggcaaaaacgcgtcgcaaggttgccggatactttaagaagtacgtcgatatcttctgcctcctcgaagagagccagaataacacagggctgggcagtaagttttcagagccccttcaggtcgaaaggtgtcgacggaacttggtggcccttaaagcagacaagttcagtgggttacttgagtacctgatcaaatcccaggaggatgcaatatctactatgaaatgcatcgtgaacgagtacaccttcctattagaacagtgtaccgtgaagatacaaagcaaggagaaactgaactttattctggctaacattatcttgtcatgtattcagccgacatcccggctcgtgaaacccgtagaaaaactcaaagaccagcttagggaagtgttacagccgattggccttacctatcagttctctgagccttactttctcgcttcgctccttttctggcctgagaatcagcagttggatcaacattcagagcagatgaaggagtacgctcaggccctgaagaattcttttaaaggccagtataaacacatgcacagaaccaagcaaccaattgcttattttttcctcggcaaaggcaagcgacttgaacgcctggtacacaaggggaagatcgaccagtgttttaaaaagaccccagatattaacagcctttggcagtcgggcgacgtttggaaagaggaaaaggtccaggaactgctgctcagactccagggcagagctgaaaacaactgtctgtacattgagtatgggatcaacgaaaaaatcaccatcccaataactccggcctttctgggccagctccggtcggggcggagcattgaaaaggtctctttctatctgggcttctcaatcggcggcccactagcttacgatattgagattgtctag

SEQ ID NO: 194295 - DNA, 3852 bp, Artificial Sequence
  derived and/or modified sequence
atggccaaacaattgaatcttcctgaaaacactgacgattggacaaaggaagacgtgaaccagtggctagaatcccataaaatagaccagaagcacagagagattcttacagagcaggacgtgaatggagccgtgttaaagtggttgaaaaaggagcaccttgtagacatgggtattacacacggacccgctatccagatcgaggagctgttcaaagagctgagaaagacagccatcgaggactctattcagaccagcaagatgggcaagccctcaaagaacgccccaaaagaccagactgtcagccagaaggagcgcagagagacctcaaagcaaaagcaaaaaggaaaggaaaaccccgacatggcgaacccgtctgccatgtccaccaccgcaaaagggagcaagtcgcttaaggtcgagttaatcgaggataaaatagactacaccaaggagcgccagccatccatcgacctgacttgtgtctcatacccttttgacgagttttctaacccatacaggtataaattggacttctccctccaaccagaaaccggccctggcaatttgatcgaccccattcacgaatttaaagctttcactaacacggccacagccactgaagaggatgtgaaaatgaaatttagtaatgaagtattcagattcgctagtgcctgcatgaactccagaaccaatggtactattcatttcggagtcaaggataagccccatggaaagatcgtgggcattaaggttaccaacgatacaaaggaagccctaatcaaccattttaatctcatgatcaataaatacttcgaggaccaccaggtgcagcaggcaaagaagtgcatcagggagccaaggttcgtggaggtcttactccccaattctacgctcagcgatcgttttgttattgaggttgatattatcccccagttttcagaatgtcaatatgactactttcagattaagatgcagaactataacaacaaaatttgggaacagagcaaaaagttttccctgttcgtgcgagacggcacaagcagcaaagacatcaccaaaaataaggtagacttcagagcctttaaagccgatttcaaaacccttgccgagtctaggaaggccgctgaggagaagttcagggccaagaccaataaaaaggaacgagagggccccaaattagttaaattgcttaccggtaatcaggatctgttggacaatagttattacgagcagtatatcctggttacaaataagtgccaccctgaccaaaccaaacatcttgacttcctgaaggagatcaagtggtttgccgtcctggaattcgaccccgagtctaatatcaatggtgtggtgaaggcttacaaggagagcagggtggctaatttgcatttcccatctgtgtatgttgaacagaaaacaacccccaatgagacaatatctaccctcaatctgtaccatcagcctagttggattttctgcaatgggaggctggatctcgattccgaaaagtacaaaccgtttgacccgtcgtcgtggcagagagagcgggcctccgacgtccgcaaactgatcagcttcctaacacacgaggatattatgccccgcgggaagttcctggtggtttttctcctcctgtccagcgttgatgacccgcgggatccgctgatagaaactttctgcgccttctatcaagatctgaagggaatggaaaatatcctgtgtatctgcgtacaccctcatattttccagggttggaaagatctactggaggcacgattgatcaagcaccaggatgaaatcagctcacaatgcatctcagctctatcacttgaggagattaacggcactattctcaaattaaagtctgtgacacaatcctctaagaggctgctgccgtctatcggtctatcgacagtgctgttgaagaaggaagaggacattatgacagctcttgagatcatatgcgagaacgagtgcgaaggaactctgttggaaaaagacaagaacaagttcttggaatttaaggcctccaaagaggaagatttttaccgaggcggaaaggtgtcatggtggaatttttacttttccagcgaatcatattcaagtcctttcgtgaaacgagacaagtacgagcgactggaggccatgattcagaactgtgcagatagcagcaaaccaacgtctacaaagatcatccacctctaccaccaccccggatgtggtgggacaaccctggcaatgcacatactctgggagcttagaaaaaaatttcgctgtgccgttctgaagaataagactgtcgacttttccgagataggcgaacaggttacaagtcttattacctatggtgcaatgaaccgccaggaatacgttccagtgctcttgctcgtggacgattttgaggagcaggataatgtttacctgctgcagtatagtatacagacagcgatcgctaaaaagtatattagatatgagaagcccttggtgattatcttgaactgtatgagatctcaaaaccccgagaaatctgcaaggattcccgactccatcgcggtaatccagcagttgtcacctaaagagcagagggcctttgagctgaaacttaaggaaatcaaggagcagcataagaacttcgaggacttctatagtttcatgattatgaagaccaacttcaacaaggagtatattgagaatgtggttcggaacattcttaaggggcagaacatctttaccaaagaggcaaaactcttcagttttctggccttactgaattcatacgtgccagacacgacaatttctctttcacagtgcgagaagtttctgggtatcggcaacaaaaaagccttttggggcactgaaaagtttgaggacaaaatggggacatactctactatcctaatcaagacagaggtcatcgaatgtggaaattactgtggcgtacgcatcattcactctcttatcgccgagttctctctggaggagttgaagaaatcataccatctcaataagtcgcagattatgctggatatgcttactgaaaatctcttttttgacactggcatgggcaagtccaagtttttacaggatatgcacaccctactactgacacgacaccgggacgagcacgaaggcgagacaggcaattggttctctccattcattgaggctctccataaggacgagggcaatgaggcagtcgaagcagtgcttctggagtccatccaccgcttcaacccgaacgcattcatttgtcaggccctggcgcgacacttctatataaaaaaaaaggactttggcaatgctttgaattgggccaaacaagccaagatcatcgaacctgataatagttatattagcgatactctgggccaggtatataagtctaaaatcagatggtggatcgaggaaaatggcggcaatggaaacatcagtgtggatgacttgatcgccttgctggatctcgcagaacatgctagctctgcctttaaggagagccagcagcaatccgaggacagggaatacgaagtgaaggagagactttaccctaaatccaaacgaaggtacgatacctataatatcgctgggtaccaaggagaaattgaagttggcctttatactatccagattctccagttgatcccattctttgataataaaaacgaactgagtaagagatatatggtcaatttcgtgtctggcagctcagacatccctggtgaccctaacaacgagtacaaactagctctgaagaactatattccatacctgactaaattaaagttttcgttgaaaaaatcatttgactttttcgatgaatactttgtgttgcttaaacctaggaacaactag

SEQ ID NO: 194296 - DNA, 4770 bp, Artificial Sequence
  derived and/or modified sequence
atggccaagcagctgaacctgcctgaaaatacagatgactggaccaaggaggatgtgaaccagtggctggagagccacaagattgaccagaagcaccgggagatcctgacagagcaggatgtgaatggagctgtgctgaagtggctgaagaaggagcacctggtggacatgggcatcacccacggccctgccatccagatcgaggagctgttcaaggagctgaggaagacagccatcgaggacagcatccagaccagcaagatgggcaagcccagcaagaatgcccccaaggaccagacagtgtcccagaaggagcggcgggagaccagcaagcagaagcagaagggcaaggagaacccagacatggccaaccccagcgccatgagcaccacagccaagggcagcaagagcctgaaggtggagctgattgaggacaagattgactacaccaaggagcggcagcccagcattgacctgacctgtgtgtcctacccctttgatgagttcagcaacccctaccgctacaagctggacttcagcctgcagcctgagactggacctggcaacctgattgaccccatccacgagttcaaggccttcaccaacacagccacagccacagaagaagatgtgaagatgaagttcagcaatgaggtgttccgctttgccagcgcctgcatgaacagcaggaccaacggcaccatccactttggagtgaaggacaagccccacggcaagatcgtgggcatcaaggtgaccaatgacaccaaggaggccctgatcaaccacttcaacctgatgatcaacaagtactttgaggaccaccaggtgcagcaggccaagaagtgcatccgggagcccaggtttgtggaggtgctgctgcccaacagcaccctgagtgacagatttgtgattgaggtggacatcatcccccagttcagcgagtgccagtatgactacttccagatcaagatgcagaactacaacaacaagatctgggagcagagcaagaagttcagcctgtttgtgagagatggcaccagcagcaaggacatcaccaagaacaaggtggacttccgggccttcaaggctgacttcaagaccctggccgagagcaggaaggctgctgaggagaagttccgggccaagaccaacaagaaggagcgggagggccccaagctggtgaagctgctgactggaaaccaggacctgctggacaacagctactatgagcagtacatcctggtgaccaacaagtgccacccagaccagaccaagcacctggacttcctgaaggagatcaagtggtttgctgtgctggagtttgatcctgagagcaacatcaatggagtggtgaaggcctacaaggagagccgggtggccaacctgcacttccccagcgtgtatgtggagcagaagaccaccccaaatgagaccatcagcaccctgaacctgtaccaccagcccagctggatcttctgcaatggccgcctggacctggacagcgagaagtacaagccctttgaccccagctcctggcagcgggagcgggccagtgatgtgaggaagctgatctccttcctgacccatgaggacatcatgccccggggcaagttcctggtggtgttcctgctgctgagctctgtggatgacccccgggaccccctgattgagaccttctgtgccttctaccaggacctgaagggcatggagaacatcctgtgcatctgtgtgcacccccacatcttccagggctggaaggacctgctggaggcccggctcatcaagcaccaggatgagatcagcagccagtgcatcagcgccctgagcctggaggagatcaatggcaccatcctgaagctgaagtctgtgacccagagcagcaagaggctgctgcccagcatcggcctgagcacagtgctgctgaagaaggaggaggacatcatgacagccctggagatcatctgtgaaaatgaatgtgagggcaccctgctggagaaggacaagaacaagttcctggagttcaaggccagcaaggaggaggacttctaccggggcggcaaggtgtcctggtggaacttctacttcagcagcgagagctacagcagcccctttgtgaagagggacaagtatgagcggctggaggccatgatccagaactgtgccgacagcagcaagcccaccagcaccaagatcatccacctgtaccaccaccctggctgcggcggcaccaccctggccatgcacatcctgtgggagctgaggaagaagttccgctgtgctgtgctgaagaacaagacagtggacttcagcgagattggagagcaggtgaccagcctcatcacctatggagccatgaaccggcaggagtatgtgcctgtgctgctgctggtggatgactttgaggagcaggacaacgtgtacctgctgcagtacagcatccagacagccatcgccaagaagtacatccgctatgagaagcccctggtgatcatcctgaactgcatgaggagccagaaccctgagaagagcgcccgcatcccagacagcattgctgtgatccagcagctgagccccaaggagcagagggcctttgagctgaagctgaaggagatcaaggagcagcacaagaactttgaggacttctacagcttcatgatcatgaagaccaacttcaacaaggagtacattgaaaatgtggtgaggaacatcctgaagggccagaacatcttcaccaaggaggccaagctgttctccttcctggccctgctgaacagctatgtgcctgacaccaccatcagcctgagccagtgtgagaagttcctgggcatcggcaacaagaaggccttctggggcacagagaagtttgaggacaagatgggcacctacagcaccatcctgatcaagacagaggtgattgaatgtggcaactactgcggcgtgcgcatcatccacagcctgattgctgagttcagcctggaggagctgaagaagagctaccacctgaacaagagccagatcatgctggacatgctgacagagaacctcttctttgacaccggcatgggcaagagcaagttcctgcaggacatgcacaccctgctgctgaccaggcacagagatgaacatgaaggagaaacaggcaactggttcagccccttcatcgaggccctgcacaaggatgagggcaatgaggccgtggaggccgtgctgctggagagcatccaccgcttcaaccccaatgccttcatctgccaggccctggcccggcacttctacatcaagaagaaggactttggaaatgccctgaactgggccaagcaggccaagatcatcgagccagacaacagctacatcagtgacaccctgggccaggtgtacaagagcaagatccgctggtggattgaagaaaatggaggaaatggaaacatctctgtggatgacctgattgccctgctggacctggccgagcacgccagcagcgccttcaaggagagccagcagcagagtgaagatcgggagtatgaggtgaaggagcggctgtaccccaagagcaagagaagatatgacacctacaacattgctggctaccagggcgagattgaggtgggcctgtacaccatccagatcctgcagctgatccccttctttgacaacaagaatgagctgagcaagcgctacatggtgaactttgtgtctggcagcagtgacatccctggggaccccaacaatgagtacaagctggccctgaagaactacatcccctacctgaccaagctgaagttcagcctgaagaagagctttgacttctttgatgagtactttgtgctgctgaagcccaggaacaacatcaagcagaatgaggaggccaagaccaggaggaaggtggccggctacttcaagaagtatgtggacatcttctgcctgctggaggagagccagaacaacacaggcctgggcagcaagttcagcgagcccctgcaggtggagcgctgcagaagaaacctggtggccctgaaggctgacaagttcagcggcctgctggagtacctgatcaagagccaggaggatgccatcagcaccatgaagtgcatcgtgaatgagtacaccttcctgctggagcagtgcaccgtgaagatccagagcaaggagaagctgaacttcatcctggccaacatcatcctgagctgcatccagcccaccagccggctggtgaagcctgtggagaagctgaaggaccagctgcgggaggtgctgcagcccatcggcctgacctaccagttcagcgagccctacttcctggccagcctgctcttctggccagagaaccagcagctggaccagcacagcgagcagatgaaggagtatgcccaggccctgaagaacagcttcaagggccagtacaagcacatgcacaggaccaagcagcccatcgcctacttcttcctgggcaagggcaagaggctggagcggctggtgcacaagggcaagattgaccagtgcttcaagaagaccccagacatcaacagcctgtggcagagcggagatgtgtggaaggaggagaaggtgcaggagctgctgctgcggctgcagggccgggcagagaacaactgcctgtacattgaatatggcatcaatgagaagatcaccatccccatcaccccagccttcctgggccagctgcggagcggccgcagcattgagaaggtgtccttctacctgggcttcagcatcggcggccccctggcctatgacatcgagatcgtgtag

SEQ ID NO: 194297 - DNA, 3852 bp, Artificial Sequence
  derived and/or modified sequence
atggccaagcagctgaacctgcctgaaaatacagatgactggaccaaggaggatgtgaaccagtggctggagagccacaagattgaccagaagcaccgggagatcctgacagagcaggatgtgaatggagctgtgctgaagtggctgaagaaggagcacctggtggacatgggcatcacccacggccctgccatccagatcgaggagctgttcaaggagctgaggaagacagccatcgaggacagcatccagaccagcaagatgggcaagcccagcaagaatgcccccaaggaccagacagtgtcccagaaggagcggcgggagaccagcaagcagaagcagaagggcaaggagaacccagacatggccaaccccagcgccatgagcaccacagccaagggcagcaagagcctgaaggtggagctgattgaggacaagattgactacaccaaggagcggcagcccagcattgacctgacctgtgtgtcctacccctttgatgagttcagcaacccctaccgctacaagctggacttcagcctgcagcctgagactggacctggcaacctgattgaccccatccacgagttcaaggccttcaccaacacagccacagccacagaagaagatgtgaagatgaagttcagcaatgaggtgttccgctttgccagcgcctgcatgaacagcaggaccaacggcaccatccactttggagtgaaggacaagccccacggcaagatcgtgggcatcaaggtgaccaatgacaccaaggaggccctgatcaaccacttcaacctgatgatcaacaagtactttgaggaccaccaggtgcagcaggccaagaagtgcatccgggagcccaggtttgtggaggtgctgctgcccaacagcaccctgagtgacagatttgtgattgaggtggacatcatcccccagttcagcgagtgccagtatgactacttccagatcaagatgcagaactacaacaacaagatctgggagcagagcaagaagttcagcctgtttgtgagagatggcaccagcagcaaggacatcaccaagaacaaggtggacttccgggccttcaaggctgacttcaagaccctggccgagagcaggaaggctgctgaggagaagttccgggccaagaccaacaagaaggagcgggagggccccaagctggtgaagctgctgactggaaaccaggacctgctggacaacagctactatgagcagtacatcctggtgaccaacaagtgccacccagaccagaccaagcacctggacttcctgaaggagatcaagtggtttgctgtgctggagtttgatcctgagagcaacatcaatggagtggtgaaggcctacaaggagagccgggtggccaacctgcacttccccagcgtgtatgtggagcagaagaccaccccaaatgagaccatcagcaccctgaacctgtaccaccagcccagctggatcttctgcaatggccgcctggacctggacagcgagaagtacaagccctttgaccccagctcctggcagcgggagcgggccagtgatgtgaggaagctgatctccttcctgacccatgaggacatcatgccccggggcaagttcctggtggtgttcctgctgctgagctctgtggatgacccccgggaccccctgattgagaccttctgtgccttctaccaggacctgaagggcatggagaacatcctgtgcatctgtgtgcacccccacatcttccagggctggaaggacctgctggaggcccggctcatcaagcaccaggatgagatcagcagccagtgcatcagcgccctgagcctggaggagatcaatggcaccatcctgaagctgaagtctgtgacccagagcagcaagaggctgctgcccagcatcggcctgagcacagtgctgctgaagaaggaggaggacatcatgacagccctggagatcatctgtgaaaatgaatgtgagggcaccctgctggagaaggacaagaacaagttcctggagttcaaggccagcaaggaggaggacttctaccggggcggcaaggtgtcctggtggaacttctacttcagcagcgagagctacagcagcccctttgtgaagagggacaagtatgagcggctggaggccatgatccagaactgtgccgacagcagcaagcccaccagcaccaagatcatccacctgtaccaccaccctggctgcggcggcaccaccctggccatgcacatcctgtgggagctgaggaagaagttccgctgtgctgtgctgaagaacaagacagtggacttcagcgagattggagagcaggtgaccagcctcatcacctatggagccatgaaccggcaggagtatgtgcctgtgctgctgctggtggatgactttgaggagcaggacaacgtgtacctgctgcagtacagcatccagacagccatcgccaagaagtacatccgctatgagaagcccctggtgatcatcctgaactgcatgaggagccagaaccctgagaagagcgcccgcatcccagacagcattgctgtgatccagcagctgagccccaaggagcagagggcctttgagctgaagctgaaggagatcaaggagcagcacaagaactttgaggacttctacagcttcatgatcatgaagaccaacttcaacaaggagtacattgaaaatgtggtgaggaacatcctgaagggccagaacatcttcaccaaggaggccaagctgttctccttcctggccctgctgaacagctatgtgcctgacaccaccatcagcctgagccagtgtgagaagttcctgggcatcggcaacaagaaggccttctggggcacagagaagtttgaggacaagatgggcacctacagcaccatcctgatcaagacagaggtgattgaatgtggcaactactgcggcgtgcgcatcatccacagcctgattgctgagttcagcctggaggagctgaagaagagctaccacctgaacaagagccagatcatgctggacatgctgacagagaacctcttctttgacaccggcatgggcaagagcaagttcctgcaggacatgcacaccctgctgctgaccaggcacagagatgaacatgaaggagaaacaggcaactggttcagccccttcatcgaggccctgcacaaggatgagggcaatgaggccgtggaggccgtgctgctggagagcatccaccgcttcaaccccaatgccttcatctgccaggccctggcccggcacttctacatcaagaagaaggactttggaaatgccctgaactgggccaagcaggccaagatcatcgagccagacaacagctacatcagtgacaccctgggccaggtgtacaagagcaagatccgctggtggattgaagaaaatggaggaaatggaaacatctctgtggatgacctgattgccctgctggacctggccgagcacgccagcagcgccttcaaggagagccagcagcagagtgaagatcgggagtatgaggtgaaggagcggctgtaccccaagagcaagagaagatatgacacctacaacattgctggctaccagggcgagattgaggtgggcctgtacaccatccagatcctgcagctgatccccttctttgacaacaagaatgagctgagcaagcgctacatggtgaactttgtgtctggcagcagtgacatccctggggaccccaacaatgagtacaagctggccctgaagaactacatcccctacctgaccaagctgaagttcagcctgaagaagagctttgacttctttgatgagtactttgtgctgctgaagcccaggaacaactag

SEQ ID NO: 194298 - DNA, 4770 bp, Artificial Sequence
  derived and/or modified sequence
atggccaagcagctgaacctgcccgagaacaccgacgactggaccaaggaagacgttaaccagtggcttgaatcacacaagatagaccagaagcaccgggaaattctgaccgagcaggacgttaatggagcggtgttaaaatggctcaagaaggaacacctggtggacatggggatcacacacggaccagccattcaaattgaagaattatttaaggagctgcggaagacggctattgaggatagcatccaaaccagcaaaatgggcaagccttccaagaacgcacctaaagaccagactgtgagccaaaaggaaaggagagaaacttcaaaacagaagcagaaaggcaaagaaaaccccgatatggcaaaccccagcgctatgtctacaacggctaaagggagcaaatcattgaaggtagaacttatcgaagataagatagactatacaaaagagcgtcagcccagcatcgacttaacctgtgttagttatcccttcgatgagttctctaacccttatcgttacaaattagatttctcactccagccagagacgggccctggcaacctcattgaccccatccatgagttcaaagcattcaccaataccgcaaccgccacagaagaggacgtcaagatgaagttctcaaatgaggtcttccggttcgcctcggcatgtatgaattctaggaccaacggtacaattcatttcggagtgaaggacaaacctcatggaaagatcgtgggtattaaggtgaccaatgatacaaaagaggccctcattaaccattttaaccttatgattaacaagtatttcgaagaccatcaggtacagcaagcaaagaagtgtatcagggagcctcgatttgtggaagtccttctccccaatagcactctgtccgacaggttcgtcatcgaagtagacatcattccccagttcagcgaatgtcagtatgattactttcagataaaaatgcagaactacaacaataagatctgggagcagtctaagaagttttcactattcgtacgagacgggacctccagtaaggatatcaccaagaacaaggttgattttcgggcgttcaaggccgatttcaaaactctagccgaatctcggaaagccgctgaagagaagtttcgcgccaagactaataagaaggaaagggaaggcccgaagctggtgaagctgttaacaggcaatcaggacttactcgataatagctattatgaacagtacattctggtcaccaacaaatgtcaccctgaccagaccaaacatctggacttcctcaaggaaataaagtggttcgcagtactggaattcgacccagagagcaacatcaacggggtcgtgaaagcttataaggagtcccgggtggctaacctccacttcccttctgtgtacgtagagcaaaaaaccacccccaatgagaccatttctacactgaacctgtatcatcagccaagttggattttttgtaacggccgtctcgatctggactcagagaagtataagccgttcgatccctcttcatggcagagagaacgcgccagtgacgtgaggaagcttatcagctttcttacccacgaagacatcatgccccggggtaaattcctggtcgtgtttctgctcctgagttctgtagacgacccgagagaccccctgatcgaaacattctgtgcgttctaccaagatttaaaggggatggagaatatcctgtgcatctgtgtgcatccccacatttttcaggggtggaaagacctgctggaggcacgcctgataaaacaccaggacgaaattagtagtcagtgtatcagcgcccttagcttggaagagattaacggaaccattctcaagctaaagtcagtcactcagtcgagtaagaggctactcccttcaattggactgtcaacagtgctgctgaagaaagaggaggacattatgacagcgctcgagataatttgcgagaacgagtgtgaggggacgctgctagaaaaagacaagaacaagtttctggaatttaaggcttccaaggaggaagacttttacagagggggtaaggtgtcttggtggaatttctatttcagttctgagagttattctagcccttttgtgaagagggataagtatgaaaggctcgaagcgatgatacaaaactgtgccgactccagcaaaccaacgtcaacaaagattatccatttataccaccatccgggctgtggtggcacaaccctggccatgcatattctgtgggaactccgcaagaaatttaggtgcgcggtcttgaaaaacaaaactgtagatttttccgagataggggagcaggtcacaagtctcatcacatacggcgccatgaaccggcaagaatacgtgcctgtgctcctactagtggacgactttgaggagcaagacaacgtctatttgctgcaatatagcattcaaaccgcaatcgccaagaaatacatccgttacgaaaagcccctggtcatcatactgaattgcatgcgctctcagaaccctgaaaagagtgccagaatccccgacagcatcgcagtgattcagcagctgtcacccaaggaacaacgggcattcgagctgaaactgaaggagattaaggagcagcacaaaaactttgaagacttttacagctttatgatcatgaagacaaacttcaataaggagtacatcgaaaacgtagttaggaatatcctgaaaggacagaacatctttaccaaagaagctaagctcttctcctttcttgccctactgaatagctacgtacctgatacaaccatttcactgtcccagtgcgagaaatttcttgggatcggaaacaaaaaagctttctggggaaccgaaaaatttgaagataagatgggtacctactccacaattctcatcaaaactgaggttatcgaatgcggcaattactgcggagttcggatcattcacagtctcatcgctgaattctcccttgaggaactgaagaaaagctaccacctgaataagagccagatcatgctggatatgctgacagagaatttgttctttgacaccggtatgggcaagagcaaatttttacaggacatgcacactctgctgctcacacgacaccgggacgaacacgaaggagagaccggaaattggttcagtccattcatagaagcccttcacaaagatgaaggtaatgaagctgtcgaagcggtgctgttggagagcattcaccgcttcaacccgaacgcgtttatctgccaagctttggccagacatttttatattaagaaaaaggacttcggtaacgccctgaactgggccaagcaagctaaaatcatcgaacccgacaacagctatatatccgatacactggggcaggtgtataaatccaagatcagatggtggattgaagagaacgggggcaacggaaacatctcggtggacgaccttattgccctcctggatttagctgagcacgctagctctgcctttaaggagagccagcagcagtcagaagatcgggagtatgaggtgaaagagaggctgtaccccaagtccaagagacgctatgacacctacaatatcgcagggtaccaaggggaaatcgaggtggggctgtataccattcagatcctgcagcttatcccattttttgacaataagaacgagttgagcaagcgctatatggtgaacttcgtctcaggatcctcggatattccaggcgacccgaacaacgaatacaagctggcattgaaaaactacataccctaccttactaagctgaagttcagcttgaaaaaatctttcgacttcttcgatgagtactttgtgttgctgaagcccaggaacaatattaaacagaacgaggaggccaaaactagaagaaaggtcgctggatactttaagaagtatgtggacatcttctgtctcctcgaagagtcccagaacaacacggggctgggatccaaattctcagagcctctccaagtcgaacgatgtagaaggaatctagtcgctttgaaagccgacaagtttagtggcttgctggagtacctgattaagtcacaagaggacgctatctccaccatgaaatgtatcgtaaatgagtacactttcctgttggaacagtgtacagtgaagatccagtcaaaagagaagctaaatttcatcctggccaacattatcctctcttgtatccagcctacatcgcggctagttaagccagtggaaaagcttaaggatcagcttagggaagtcctacagcctattgggttaacttaccagttctccgagccctatttcctggcgtctctcttgttttggcccgagaaccagcagctcgaccaacacagcgaacagatgaaggagtatgcacaagcccttaagaattcgtttaagggccaatacaaacacatgcaccgtaccaaacaacccatcgcgtactttttcctggggaagggtaaacggctcgagaggttggtgcacaaaggtaaaatcgaccagtgttttaaaaagacgcctgatatcaacagcttgtggcagtcaggcgacgtatggaaggaagaaaaagttcaggaactgctgcttagactgcaagggagggccgaaaataactgcttatacatcgaatacggcatcaacgagaaaatcactatcccgataacacccgcgttccttgggcagttgagatctggacggtcaatagaaaaagtctccttttatcttggctttagcattggaggccctttagcctatgatatcgagatcgtgtag

SEQ ID NO: 194299 - DNA, 3852 bp, Artificial Sequence
  derived and/or modified sequence
atggccaagcagctgaacctgcccgagaacaccgacgactggaccaaagaagacgttaatcagtggcttgagtcgcacaaaatcgatcagaaacaccgggaaatccttacggaacaggacgtgaatggggccgtgctgaaatggcttaaaaaggagcacctggtggatatgggcattacgcacgggcctgctatacagattgaagaacttttcaaggagctgagaaaaactgctattgaggacagtattcaaaccagtaaaatgggcaagcccagcaaaaacgccccaaaagaccagaccgtctcacagaaggaaaggagagaaacctctaagcaaaaacaaaaaggaaaagaaaaccccgatatggccaaccccagtgctatgagtacaaccgccaaggggagcaagagtctgaaggtagaattgatcgaggacaagatagattataccaaggaaaggcagccctctattgacttgacatgcgtgagctacccattcgatgagttcagcaacccttaccggtacaagttggacttcagcttgcagcctgagaccgggccaggcaacttgatagaccctatccatgaattcaaggcatttacaaacactgcaactgcaacagaggaggatgtcaaaatgaaattctctaacgaagtgttcaggtttgcgagcgcatgtatgaactcccgcacaaacggcacgattcacttcggcgtgaaggacaagcctcatgggaaaattgtgggaattaaagtgaccaacgatactaaggaggccctcataaatcattttaacctcatgattaataagtactttgaggaccaccaggttcaacaagccaaaaagtgtatacgtgagccccgattcgtagaagtcctcttgccaaactcaaccctgagcgaccgtttcgtgattgaggtggatattatcccgcagttttcggagtgccagtacgattattttcaaatcaagatgcaaaattacaacaataagatctgggagcaatctaagaagttttccctgttcgtccgggatggaacaagctcgaaggacattactaaaaataaagtggacttccgggcattcaaagcagatttcaagactttggcggagtcacgcaaagccgctgaggaaaagttccgcgcaaagaccaataagaaggaaagggagggccccaaactggtcaagcttctcaccggtaaccaggaccttctggataatagttattatgagcagtacatccttgtgaccaataagtgtcaccctgaccagaccaagcacttggatttcttgaaagaaattaagtggtttgccgtgctcgaatttgaccctgagtctaacattaatggagtagtcaaagcttacaaagagtcacgtgttgcaaatcttcacttccccagtgtctatgtggagcagaaaacaactccaaatgagactattagtacattgaatttgtaccaccagccatcttggatcttttgtaatggcagactggatttggattctgaaaaatacaaaccgtttgatccttcctcctggcagagagagagggccagcgacgttcgaaagctaatatcatttttgacccacgaggacatcatgcctagagggaagttcctcgtggtctttctgcttctgtccagcgtggatgacccaagggaccctctgatagaaaccttctgtgcattttaccaggatttgaagggcatggaaaatattctatgtatctgtgttcatccccacatcttccaaggctggaaagacctgctcgaagcccggttaatcaagcatcaggacgagataagctcccaatgtatctctgcccttagtttagaggagattaacggcacaattcttaagcttaagtccgtgactcagagctcaaagagattgcttcctagtattggccttagcaccgtcctgctgaagaaggaagaggacataatgacggccctggaaattatttgcgaaaatgaatgtgaaggaaccctgctcgagaaggacaaaaacaagttcctggagttcaaagctagtaaggaggaagacttctaccgaggaggcaaagtgtcttggtggaacttctatttctcctctgaatcatactcctctccctttgttaaacgcgataaatatgaacggcttgaagcaatgatccaaaactgcgcagattcttctaaaccgacctccacaaagattatccacctttatcaccaccccggatgcggtggcaccaccctcgcaatgcacatcctgtgggaattaaggaagaagtttagatgcgccgttttgaaaaataagaccgtggacttcagtgaaatcggggagcaggtcacctccctgatcacatatggagcaatgaacaggcaggagtatgttcccgtattgctgctggtggacgactttgaggagcaggacaatgtatatctcctccaatacagtattcaaactgccatcgccaagaaatatattagatatgagaagccgctggtcatcattcttaattgtatgcgctctcagaaccccgagaagtccgctaggatccctgactcaattgccgtcatccagcagctatccccgaaagagcaaagagcattcgagctgaagctcaaagagattaaggagcagcacaagaatttcgaggatttttactccttcatgatcatgaagactaattttaacaaagagtacatagaaaatgtggtgaggaacatccttaaaggtcagaatattttcaccaaggaggccaagctttttagcttcctggctctgctgaactcctacgtccccgacacaacgatctctttgagtcagtgcgagaagttcctgggaataggaaacaagaaagctttctgggggactgaaaagtttgaggataagatggggacatacagtacaattctgattaagacagaggttatagaatgtgggaactactgtggcgtgcgaattatacacagcctcatcgcggaattttccctggaggaactgaaaaagagctaccacttgaataagtctcaaatcatgctcgatatgctcacggaaaacctcttctttgatactggcatgggcaagtccaaatttctgcaggatatgcacacactgttactcactcggcaccgagacgagcacgagggggagacggggaattggttctccccgtttattgaagccttgcataaggacgaagggaatgaagccgtggaagcggtccttctggagagcatccaccggttcaacccaaacgcctttatatgccaagcactggccagacatttctacatcaagaagaaggactttggtaacgctctgaattgggccaaacaggccaaaatcatcgaacccgataacagctacatatccgacactttgggccaggtgtataaatccaagatccgatggtggatcgaggagaatggaggcaacggcaacatttctgtggatgacctgatcgctttgctggacctggcagaacatgccagctccgccttcaaggagagccaacaacagagtgaagaccgggagtatgaagtcaaggaacgcctctaccccaaaagtaagcggcgttacgatacctataacattgcaggctatcagggcgaaatcgaggtcggtctgtatacaattcagatcctgcagctgatacctttcttcgacaataagaatgagctgagcaaaagatacatggtgaacttcgtcagcggctcatctgatatccccggggatcccaacaatgaatataaactggctctaaaaaattacatcccctatctgactaaattaaagtttagtctgaaaaagtcctttgacttttttgacgagtacttcgtactgttaaagccgaggaacaactag

SEQ ID NO: 194300 - DNA, 4770 bp, Artificial Sequence
  derived and/or modified sequence
atggctaagcagttgaatttaccggagaacactgacgactggaccaaggaagacgtgaatcagtggttggaaagccacaagatagatcagaagcacagggagatcctcacagaacaggacgtcaatggagccgtgcttaagtggctgaaaaaagagcacctggttgatatgggtatcacccacgggcctgccatccagattgaggaactgttcaaagagcttcgcaaaacagccattgaggattccatccagactagtaagatgggcaagccctccaaaaatgctccaaaggatcagacagtgtctcagaaggagaggagggaaaccagcaaacagaaacagaaaggtaaagagaatcctgatatggcgaatccctccgccatgtctactaccgcaaaaggaagcaagagtctaaaggtcgaactaatagaggataaaattgactatactaaggaacggcagccctcaattgatctcacttgcgtgtcctaccctttcgacgaattttcaaacccgtatcggtacaaattagattttagtctccagcccgagaccggacctgggaatcttattgaccccattcatgaattcaaggcatttacaaacaccgctactgccaccgaagaagatgttaagatgaaatttagtaacgaggtgttcagatttgccagcgcctgtatgaacagcaggaccaatggaactattcacttcggcgtgaaggataagccgcatggcaaaattgtaggcatcaaagtgacaaatgacactaaagaagccctgatcaatcatttcaacttgatgatcaacaaatactttgaggaccatcaggtccagcaggcgaagaagtgtattcgggaacctagattcgtcgaggttttgctgcctaactccaccttgagtgaccgctttgtcatcgaagtagacatcattccacagtttagcgaatgtcagtatgattacttccagatcaagatgcagaattataacaataaaatttgggagcagagcaaaaaatttagcctgtttgtccgcgatggaacctccagcaaggatataacaaagaacaaggttgatttccgggcttttaaggcagatttcaaaactcttgcggagagcagaaaggctgcagaagagaaatttcgtgctaaaacaaacaaaaaagagcgtgaaggccctaaactagttaaactgctcaccggaaaccaggatttgcttgataacagctattatgaacagtacatccttgtgacaaacaagtgtcacccagatcagaccaaacacctggattttcttaaagagataaagtggtttgccgtgctcgagtttgaccctgaatcgaatatcaacggagtggttaaggcctacaaagaatccagagtcgccaacctgcactttcctagtgtttacgtggagcaaaagactaccccaaacgagacaatctccaccctgaatctttatcaccagccctcatggattttttgcaatggacggctggatttagacagtgaaaagtacaagccttttgatccatcttcgtggcagagagagagagcttccgatgtgaggaaacttattagcttcctgacacatgaagatattatgcccagaggcaaattcctggtggtcttcctgctcctaagtagcgtggatgaccctagagatcccctgatcgagactttctgtgctttttaccaggatctaaaggggatggagaacatcctgtgtatatgtgtgcacccacacatcttccaggggtggaaagatctgctcgaggctagactgataaaacaccaggacgaaatctcctcacagtgcatttcagcactcagcctggaggagataaatggcaccatcttgaagcttaaatcggttactcaaagtagcaagcgtctcctcccatccatcgggctgtcgacagtgctgttaaaaaaagaagaggacatcatgaccgcgctggagattatctgcgaaaacgaatgcgaaggtactctactggagaaggataagaacaagttcctggagttcaaagcgtcaaaggaggaggacttctacagaggaggcaaagtgagctggtggaatttctacttcagttccgagagttattcttctcctttcgtgaaacgcgataaatatgagcgcttggaggctatgatccagaattgtgctgactccagcaagccaacgtctacgaagataattcacctctatcaccatccgggatgcgggggaacaaccctagccatgcacattctctgggagctgagaaaaaagtttaggtgtgcagttctgaaaaataaaaccgttgacttttctgaaatcggagaacaagtcacaagtctcataacatatggcgctatgaatcgccaagagtatgtacctgtcctgctgttagttgacgattttgaagagcaggataacgtgtacctgctgcagtattccatacaaacggctatcgcaaaaaagtatattcgctacgagaaaccgctggtaataatcttaaactgcatgaggtctcagaatcccgaaaagagtgcgaggatacccgattctattgcagtaattcagcagctgtctccaaaggaacagcgcgctttcgaactgaaactcaaggagataaaagaacagcacaaaaacttcgaagatttctacagtttcatgataatgaagacgaactttaacaaggaatacatcgaaaatgtggtccgcaatatccttaagggtcaaaacatatttacaaaagaagccaaacttttctcgttcctggcactcttaaactcgtacgtccctgatactactattagtctgtctcaatgcgaaaaatttctaggaatagggaataagaaggcattttggggtacagagaaatttgaggacaagatgggtacctattccaccattttaattaagacagaggtaatcgagtgtggtaattactgcggcgtgcgaatcatacattccttgatagcggaatttagtctcgaggagttgaagaaatcctatcacttgaacaagtcccagattatgctcgatatgctgactgagaatctgttttttgacaccggaatgggcaagtcaaaatttctgcaggatatgcacaccttactgctgaccagacacagggacgagcatgaaggggagactggaaactggttctctccgtttatcgaagcactgcacaaggacgagggcaacgaagctgtcgaagcagttctgttggagtcgattcacagattcaaccccaacgcgttcatttgtcaggccctcgcgaggcacttttacattaaaaagaaggatttcggtaatgccctgaattgggctaagcaagctaagatcatcgagcctgataattcatacatcagcgacacactgggacaggtctataagtctaagatcaggtggtggattgaagagaacggagggaacgggaacatcagtgtggacgacctgatcgcgctgctcgatcttgcggagcacgctagctctgcttttaaagagtctcagcagcagtccgaggaccgggagtacgaggtgaaagagagactgtaccccaagagtaagcggagatacgacacctacaatattgcgggatatcaaggagaaatcgaggttggtctgtacaccattcagatcttacagttaatccctttttttgataacaaaaacgagctgtctaagcgttacatggttaacttcgtgtcaggtagcagtgacataccaggcgatcctaacaacgaatataagttggcactgaagaactatatcccttacttaacaaagctgaagttctcactgaagaagagctttgatttcttcgacgagtatttcgtgcttttgaagcccagaaataatatcaagcagaacgaagaagccaagacccgcaggaaagtggccggatatttcaaaaaatacgttgacatcttctgtttactggaagagagccaaaacaacaccgggctgggttccaagttttcagaaccactacaggtggaaaggtgtaggaggaacttggtggccctcaaggcagacaaattctccggtctgttagagtatttaattaagtctcaggaggatgctatcagcacaatgaagtgcattgtgaacgaatatacatttctcctggagcaatgcaccgtgaaaatccagagcaaagagaaactcaacttcatacttgccaacatcatacttagctgcattcagcctacctcaagactggttaaacctgtcgagaagttaaaagaccagcttagggaggtgctacagccaataggcctaacgtaccaattctctgagccctactttcttgcaagtctgctgttctggccggaaaaccaacagctcgatcagcattccgaacagatgaaagagtatgcacaggcactaaagaacagctttaaggggcaatataagcatatgcaccgcacaaagcaacccatcgcttactttttcctggggaaggggaagagactcgaaaggttggtgcataaaggaaaaatcgatcagtgtttcaagaagaccccggacataaattccctgtggcagtcaggcgatgtttggaaggaagagaaagtgcaggaattattgctgcgcttgcagggtcgcgctgaaaacaattgtttgtatatcgagtacggcattaacgagaagattaccatccccattacacctgcgtttcttggacagctccgttccgggaggtcaatagagaaggtgagcttctatctgggattcagcatcggaggccctctggcatacgacatcgaaatcgtgtag

SEQ ID NO: 194301 - DNA, 3852 bp, Artificial Sequence
  derived and/or modified sequence
atggccaaacaactgaatttaccagagaatactgatgactggacaaaagaggacgtcaaccagtggttagaatcacataaaatcgatcagaaacatcgggagattctgaccgaacaggatgtcaatggcgctgtgcttaaatggttaaaaaaagaacatctggtagatatggggattacgcacggaccggcaattcagatcgaggagctttttaaggaactgcgcaagactgccattgaagactccatacagacgtccaagatgggcaagcctagcaagaacgcaccaaaggatcagaccgtatcgcaaaaagagcggagagagactagcaaacagaagcagaaaggtaaggagaacccggacatggcaaacccttcagccatgtctacgaccgccaagggctcaaagtccttaaaggtggagctcatagaagataagatcgactatacgaaagaacgccagccatccattgacctcacatgcgtcagctaccctttcgatgaattttccaatccttaccggtataagctagacttcagcctgcaaccagagaccggaccaggaaacctgatagatccaattcatgagtttaaggcctttacgaacactgccaccgcaactgaagaggatgttaaaatgaagttcagcaatgaggtctttcgctttgcttcagcatgtatgaatagtcggaccaatggcaccatccactttggggtaaaagacaaaccacatgggaagatcgtgggcattaaggtgactaacgataccaaagaggctctgataaatcacttcaacttgatgatcaacaaatatttcgaggaccaccaggtgcaacaggctaagaaatgtatccgggaaccccgattcgtggaggtgctcctccctaactctacgctgtcagatcgatttgtcatcgaggtggacatcatcccccagttctccgaatgccagtacgactactttcaaatcaaaatgcagaactataataataagatctgggaacagtccaaaaaattcagcttgttcgtgcgcgacggaaccagttcaaaggatatcactaagaacaaagtggactttcgtgcctttaaggccgactttaagacattagccgagtctagaaaggctgcagaagagaagttccgggctaaaacaaacaaaaaggagcgggaagggcctaaactcgttaagctgctgactgggaaccaggatctgcttgataacagctattacgagcagtatatactcgtgaccaataaatgccaccctgaccagacaaaacacctggactttctcaaagagatcaaatggtttgcggtgttggaattcgaccctgaaagtaatatcaatggcgtagtgaaggcatataaagagagcagagtagcaaatctgcactttcccagcgtttatgtggaacagaagactactccaaacgaaacaataagcactctcaatctctatcatcagccatcctggatcttttgtaacggtagattggacttagattcagagaagtacaaaccctttgatccttcaagctggcaaagagaacgggcttccgatgtcaggaaactgataagtttccttacgcacgaagatattatgcctagggggaagttcctggtggtttttttactcctaagctcagttgatgaccctagagaccctttaatcgagacattctgcgccttttaccaggatctgaaggggatggagaatatactgtgcatctgtgtgcatccacatattttccagggatggaaagacttgctggaggcccgtctgatcaaacaccaggatgagatatcgtcacagtgtatcagtgccctgagcttggaagaaattaatggcacaatactgaaacttaaatctgtgacacaaagttccaaaagactcctccccagtatcggcctcagcaccgtgctgctgaaaaaggaagaagatattatgaccgctctggagataatttgcgaaaatgagtgtgaggggactctgctggaaaaagataagaataagttcctggaattcaaagcctctaaagaggaggatttctatagaggcggaaaggtttcgtggtggaacttctacttttcttccgaatcctacagctcaccatttgtcaagcgcgacaaatacgagaggctggaggctatgatccaaaattgcgcagacagttcaaagcccacctcaaccaagatcattcacctgtatcatcaccccggttgtggaggtactaccctggcaatgcacatcctgtgggaacttaggaaaaaatttcggtgcgcggttctcaagaacaagaccgtggatttctcggagatcggagagcaagtcacatccctaattacttacggcgctatgaatagacaggagtatgtcccagtactgcttctagtggatgactttgaggagcaagataatgtgtacttgcttcaatattctattcagacagccatagctaagaagtatatccgatacgagaaacctctggtgattattctcaactgtatgcgctcccaaaaccctgagaaaagcgcccgaattcctgacagtatcgctgtgattcagcagttatcacccaaagagcaacgggcttttgaactgaaactgaaagagatcaaagagcagcacaagaattttgaagacttttattccttcatgatcatgaagacaaactttaacaaagaatatattgagaatgtcgtgaggaatatcctaaagggccaaaatattttcacaaaggaagcaaagttgttcagctttctagcccttctaaattcatatgtgcctgacactaccattagcctctcccagtgcgagaaatttctgggaatcggtaacaagaaggcattctgggggacagagaaattcgaggacaaaatgggaacatactctactatcttgataaagacagaggtgatcgagtgtggtaattactgtggagtcagaataatacattccctgatcgccgaattcagcctggaggaacttaaaaaatcttaccatctgaacaaatcccagattatgcttgatatgctcacggaaaaccttttcttcgacacaggtatgggaaagtctaagtttctgcaggatatgcataccctgctacttacgagacacagagatgaacacgaaggggaaacaggaaactggttttctccttttatcgaggccttacataaggacgaaggtaatgaggcagtcgaggctgtgttactggagagcatccaccgctttaatcccaacgccttcatttgccaggctctcgctcgtcacttctatataaagaagaaagactttggcaatgcacttaactgggccaagcaggccaagatcatcgaacctgataatagttacatatcagatacgctgggacaagtctacaagagcaaaatcaggtggtggatagaggaaaacgggggaaacgggaacatatctgtcgatgatctaatcgctttactggacctggccgagcatgcctcatcggccttcaaggagagccagcaacagagcgaggacagggagtacgaagttaaagaaagattgtacccaaagagcaaacgcaggtatgacacatataatatcgccggataccaaggagaaattgaggtgggcctgtacaccattcaaattctgcagctgatccccttcttcgacaataaaaacgagctgtctaaacgctacatggtgaacttcgtctccggttcctcagatatccccggagatccaaacaacgaatacaagctggcacttaaaaattacatcccctacctgactaagctcaagtttagcctgaagaagagtttcgatttcttcgacgaatatttcgtactcttgaagcccaggaacaattag

SEQ ID NO: 194302 - DNA, 6852 bp, Artificial Sequence
  derived and/or modified sequence
gacagaagcagagaatacatagacttccgttaaaaccagaatgaggaaaatacttttctctagcatcgtaggaggaagaaaacaaacacatcagatattttcagcactaaaagagatggttttccccacatatatgtaaaagaaatttgcaagactactggattttgatctcatggttgcagtgggtgaataggtggccttttgtgatctcctacatcaccctggaagtgagacttcttcggtttcttctagagtcagtttggtatcagaatggcaaagcaacttaaccttccagaaaatacagatgattggacaaaagaggatgtaaatcagtggttagaaagtcataagattgaccaaaaacacagggaaattttgactgaacaagacgtgaatggagcagtcttgaagtggttaaaaaaagaacatcttgttgatatgggcatcacacatggaccagctattcaaatagaagaactattcaaagaattgcggaaaacagccattgaagattcgattcagacatctaagatgggaaagcccagtaaaaatgctcctaaagaccaaactgtgtctcaaaaggaacgtagagaaacttcaaagcaaaaacaaaagggtaaagagaacccagatatggctaatccgtctgcaatgagtacaactgctaaaggttctaagtcactaaaagttgagctcatagaagataaaatagattatacaaaggaaaggcaaccatccatagacctgacatgtgtatcatatccatttgatgaattcagtaatccatatcgttacaagttggattttagtctacagcctgaaacaggaccaggcaatctcattgatccgatacatgaattcaaagccttcacaaatacagcaacagccacagaagaggatgtcaagatgaaatttagcaatgaggttttccgatttgcttcagcttgtatgaattcacgtaccaatggcactattcattttggagtcaaagacaaaccccatgggaaaattgttggcatcaaagtcaccaatgataccaaggaagccctcattaaccatttcaatctgatgataaacaagtattttgaagaccatcaagtccaacaagcaaagaagtgcattcgagagccaagatttgtggaagttttactgccaaatagtactctatctgacagatttgttattgaagtggacattattccacagttctctgaatgccaatatgattatttccagattaaaatgcaaaattacaacaacaaaatatgggaacaaagtaaaaaattctcactatttgtgcgagatgggaccagctctaaggacattacgaaaaataaagttgatttcagagcatttaaagcagattttaaaacactggcagagtccagaaaagcagcagaagaaaaattcagagcaaaaacaaataaaaaagaaagagagggaccaaagttggttaaattattgacaggaaatcaagatttgttagataattcatactatgaacagtacattcttgtaacaaataaatgccacccagatcaaacaaaacacttagatttcctgaaggaaattaaatggtttgctgtattggagtttgatcctgagtctaacatcaatggagtggtcaaagcttacaaagaaagccgagtagcaaaccttcactttccaagtgtatatgtagaacagaaaaccacaccaaatgagacgatttctactctaaatctttaccatcaacccagctggattttctgcaatggcaggttagaccttgacagtgaaaaatataaaccctttgatccaagttcctggcaaagagaaagagcttctgatgtcaggaaactgatttcatttcttacacatgaagacataatgccaagagggaagtttttggtggtatttctattactgtcctctgtggatgacccaagagatcccctcattgagactttctgtgctttctaccaggatctcaaaggaatggaaaatatactgtgtatttgtgtgcacccacacatatttcagggatggaaagatctacttgaagcaagattaataaaacaccaagatgaaatttcaagccaatgtatttctgctttaagccttgaagagatcaatggcactattcttaaactaaaatctgtgactcaatcttcaaaaaggcttttgccatctattggtttatcgactgtccttctgaaaaaggaagaagatatcatgactgctctggaaattatctgtgaaaatgaatgtgagggtacactgttagagaaggacaaaaataaattccttgaattcaaggcatcaaaagaggaagacttctatcgaggtggcaaagtgtcatggtggaacttctacttctcttctgaaagttattcttcaccttttgtcaaaagggataaatatgaaagacttgaagcaatgattcaaaactgtgcagattcttctaaaccaacaagtaccaaaattattcatctgtatcatcatccaggctgtgggggaactaccttggctatgcacattctctgggaactaaggaagaaattcagatgtgctgtgctgaaaaacaagacagtggatttttctgaaattggagaacaggtaaccagtttaatcacctatggggcaatgaaccgtcaggaatacgtacctgtactactccttgttgatgattttgaagaacaagataatgtctatcttctgcagtactctattcaaacagctatagctaaaaagtacattcgatatgaaaaacctctggtgattatcctaaattgtatgagatcacaaaatcctgaaaaaagtgcaaggatcccagacagtattgccgtaatacagcaactctctcccaaagaacagagagcttttgagcttaaattgaaagaaatcaaagaacagcataaaaactttgaggatttttattcctttatgatcatgaaaaccaattttaataaagaatacatagaaaatgtggtccggaatatcctgaaagggcagaatattttcaccaaggaagcaaagctcttttcttttctggctcttcttaattcatatgtgcctgataccaccatttcactatcacagtgtgaaaaattcttaggaattggaaacaagaaggctttctgggggacagaaaaatttgaagacaagatgggcacctactctacaattctgataaaaacagaggtcatcgaatgtgggaactactgtggagtacgcatcattcactctttgattgcagagttctcactggaagaattgaagaaaagctatcacctgaataaaagtcaaattatgttggatatgctaactgagaatttgttcttcgatactggtatgggaaaaagtaaatttttgcaagatatgcacacactcctactcacaagacaccgcgatgaacatgaaggtgaaacaggaaattggttttccccatttattgaagcattacataaagatgaaggaaatgaagcagttgaagctgtattgcttgaaagtatccatcggttcaacccaaatgcattcatttgccaagcgttggcaagacatttctacattaaaaagaaggactttggcaatgctctaaactgggcaaaacaagcaaaaatcatagaacctgacaattcttatatctcagatacactgggtcaagtctacaaaagtaaaataagatggtggatagaggaaaacggaggaaacgggaacatttcagttgatgatctaattgctcttttggatttagcagaacatgcctcaagtgcattcaaagaatctcaacagcaaagtgaagatagagagtatgaagtgaaggaaagattgtatccgaagtcaaaaaggcggtatgatacttacaatatagctggttatcaaggagagatagaagttgggctttacacaatccaaattctccagctcattcctttttttgataataaaaatgagctatctaaaagatatatggtcaattttgtatcaggaagtagtgatattccaggggatccaaacaatgaatataaattagccctcaaaaactatattccttatttaactaaattgaaattttctttgaaaaagtcctttgatttttttgatgaatactttgtcctgctaaaacccaggaacaatattaagcaaaatgaagaggccaaaactcggagaaaggtggctggatattttaagaaatatgtagatatattttgtctcttagaagaatcacaaaacaacacaggtcttggatcaaagttcagtgagccacttcaagtagagagatgcaggagaaacctagtagctttaaaagcagacaagttttctgggctcttggaatatcttatcaaaagtcaagaggatgctataagcactatgaaatgtatagtgaacgaatatacttttctcttagaacaatgcactgtcaaaatccagtcaaaagaaaagctaaatttcatcttggccaacattattctctcctgtatccaacctacctccagattagtaaagccagttgaaaaactaaaagatcagcttcgagaagtcttgcaaccaataggactgacttatcagttttcagaaccgtattttctagcttccctcttattctggccagaaaatcaacaactagatcaacattctgaacaaatgaaagagtatgctcaagcactaaaaaattctttcaaggggcaatataaacatatgcatcgtacaaagcaaccaattgcatatttctttcttggaaaaggtaaaagactggaaagacttgttcacaaaggaaaaattgaccagtgctttaagaagacaccagatattaattccttgtggcagagtggagatgtgtggaaggaggaaaaagtccaagaacttttgcttcgtttacaaggtcgagctgaaaacaattgtttatatatagaatatggaatcaatgaaaaaatcacaatacccatcactcccgcttttttaggtcaacttagaagtggcagaagcatagagaaggtgtctttttacctgggattttccattggaggcccacttgcttatgacattgaaattgtttaagagcctgatattcttcctccaagaatttgatctcagtacccatttaatttttttggactcaagatctatgctttaaaccggcaaggttatagatacagcctctagctcttcagatctgtacatgcagtatttaatttcctcttaaacatgttatgagttctacaaagacaatagtgaaaaaggaaggagtgagatatatgaaaagtagcaaatatgttccttggtttggttaacatcattgatgacaaaataataaggagctatgactggagtcaggagaagttagtgtaataagctggctacacagaaccccactacttaccaggcatggattgaagaagattgtctactcaaatggcatttagacattagaatgtctgggaaaatatttctcaaagacagcaaaaacctctcaaactgaggagcaacatttattcttactaagcagatcatcaatgtatcatgtgcttggcactcaaggatcttccaaaacagaggaccaaccagtcttctgaaggtcatgcccacagaagtcatcagaccttaccaaagtaggttggagaattagattgccttttcatgcagtgagattcagttaagcaaaaatgaaatttgtctctatagctaattagcttatcaactcccctccaaacaaacaattaaaaaaaaaacatacagacactcaaattccacaagctaatgaacaaaagggactcttgtgagaagactaatgagtccctcatccagaagatgccaatgtactggcagattaacatacaacctatgttttgaacaaaaacaaccagcgatacgtaatcaaaatgtaattttcccctaataaaattatggatatgggcagtcatcaatggctgccaaaaccattaagtggaaagctgattaaaaaacaaaaatttctaatggatttatcaaactgtcccaaatcctgataaatattaacatcacagaggaagaccagacattatgggcctggaagtactataggagtgcacacatcacccgtgacatggtcttgccaaataattaaacctgaatttgatcaggtctctggatcttatttgcaattcaaaagaaattttaaaaaaatcctactaacaccaccacaaatatgcaatcagcaatatccagaaaggggaaattcacaggacaaaaacctggttttcttttttggtttcttcaaccaaaaaagaaagaaattgcaaaggaccaaaaaaatgttggggaatctatacattataagggacttaacaactaaagggcaacatatagactttagatcctaatttgagcaaaatctaaaatcaattattaggcaatcagaaaaatttgaacacagactagatatttgaggatattaaggtactatattattgaagattccatggttatgttttttaaagagttcatgccttttagagatacatactaaagtatttgtaaataaatgacatgatctagaatcagtaattttgtgtttggggtgtgggggtggtgaaagggaagtagaaccgaaacaagattagtcctgagttaacaatggctgcaagctggatacatggaattcagcacacttttctccctcttactgattatgcttttgaaattttctcttgtaaaacatttagaaaacaaaaacaaaaaaaatgtgatttgtttctgtcttcaaaatctcattagaattttttcactggaggaagattttcccttgcttctgcataaaattttaactccataacttataagctcactctttattgttactttctaattgacaaataaaaattgtatattatt

SEQ ID NO: 194303 - DNA, 3957 bp, Artificial Sequence
  derived and/or modified sequence
agcatcgtaggaggaagaaaacaaacacatcagatattttcagcactaaaagagatggttttccccacatatatgtaaaagaaatttgcaagactactgggtatcagaatggcaaagcaacttaaccttccagaaaatacagatgattggacaaaagaggatgtaaatcagtggttagaaagtcataagattgaccaaaaacacagggaaattttgactgaacaagacgtgaatggagcagtcttgaagtggttaaaaaaagaacatcttgttgatatgggcatcacacatggaccagctattcaaatagaagaactattcaaagaattgcggaaaacagccattgaagattcgattcagacatctaagatgggaaagcccagtaaaaatgctcctaaagaccaaactgtgtctcaaaaggaacgtagagaaacttcaaagcaaaaacaaaagggtaaagagaacccagatatggctaatccgtctgcaatgagtacaactgctaaaggttctaagtcactaaaagttgagctcatagaagataaaatagattatacaaaggaaaggcaaccatccatagacctgacatgtgtatcatatccatttgatgaattcagtaatccatatcgttacaagttggattttagtctacagcctgaaacaggaccaggcaatctcattgatccgatacatgaattcaaagccttcacaaatacagcaacagccacagaagaggatgtcaagatgaaatttagcaatgaggttttccgatttgcttcagcttgtatgaattcacgtaccaatggcactattcattttggagtcaaagacaaaccccatgggaaaattgttggcatcaaagtcaccaatgataccaaggaagccctcattaaccatttcaatctgatgataaacaagtattttgaagaccatcaagtccaacaagcaaagaagtgcattcgagagccaagatttgtggaagttttactgccaaatagtactctatctgacagatttgttattgaagtggacattattccacagttctctgaatgccaatatgattatttccagattaaaatgcaaaattacaacaacaaaatatgggaacaaagtaaaaaattctcactatttgtgcgagatgggaccagctctaaggacattacgaaaaataaagttgatttcagagcatttaaagcagattttaaaacactggcagagtccagaaaagcagcagaagaaaaattcagagcaaaaacaaataaaaaagaaagagagggaccaaagttggttaaattattgacaggaaatcaagatttgttagataattcatactatgaacagtacattcttgtaacaaataaatgccacccagatcaaacaaaacacttagatttcctgaaggaaattaaatggtttgctgtattggagtttgatcctgagtctaacatcaatggagtggtcaaagcttacaaagaaagccgagtagcaaaccttcactttccaagtgtatatgtagaacagaaaaccacaccaaatgagacgatttctactctaaatctttaccatcaacccagctggattttctgcaatggcaggttagaccttgacagtgaaaaatataaaccctttgatccaagttcctggcaaagagaaagagcttctgatgtcaggaaactgatttcatttcttacacatgaagacataatgccaagagggaagtttttggtggtatttctattactgtcctctgtggatgacccaagagatcccctcattgagactttctgtgctttctaccaggatctcaaaggaatggaaaatatactgtgtatttgtgtgcacccacacatatttcagggatggaaagatctacttgaagcaagattaataaaacaccaagatgaaatttcaagccaatgtatttctgctttaagccttgaagagatcaatggcactattcttaaactaaaatctgtgactcaatcttcaaaaaggcttttgccatctattggtttatcgactgtccttctgaaaaaggaagaagatatcatgactgctctggaaattatctgtgaaaatgaatgtgagggtacactgttagagaaggacaaaaataaattccttgaattcaaggcatcaaaagaggaagacttctatcgaggtggcaaagtgtcatggtggaacttctacttctcttctgaaagttattcttcaccttttgtcaaaagggataaatatgaaagacttgaagcaatgattcaaaactgtgcagattcttctaaaccaacaagtaccaaaattattcatctgtatcatcatccaggctgtgggggaactaccttggctatgcacattctctgggaactaaggaagaaattcagatgtgctgtgctgaaaaacaagacagtggatttttctgaaattggagaacaggtaaccagtttaatcacctatggggcaatgaaccgtcaggaatacgtacctgtactactccttgttgatgattttgaagaacaagataatgtctatcttctgcagtactctattcaaacagctatagctaaaaagtacattcgatatgaaaaacctctggtgattatcctaaattgtatgagatcacaaaatcctgaaaaaagtgcaaggatcccagacagtattgccgtaatacagcaactctctcccaaagaacagagagcttttgagcttaaattgaaagaaatcaaagaacagcataaaaactttgaggatttttattcctttatgatcatgaaaaccaattttaataaagaatacatagaaaatgtggtccggaatatcctgaaagggcagaatattttcaccaaggaagcaaagctcttttcttttctggctcttcttaattcatatgtgcctgataccaccatttcactatcacagtgtgaaaaattcttaggaattggaaacaagaaggctttctgggggacagaaaaatttgaagacaagatgggcacctactctacaattctgataaaaacagaggtcatcgaatgtgggaactactgtggagtacgcatcattcactctttgattgcagagttctcactggaagaattgaagaaaagctatcacctgaataaaagtcaaattatgttggatatgctaactgagaatttgttcttcgatactggtatgggaaaaagtaaatttttgcaagatatgcacacactcctactcacaagacaccgcgatgaacatgaaggtgaaacaggaaattggttttccccatttattgaagcattacataaagatgaaggaaatgaagcagttgaagctgtattgcttgaaagtatccatcggttcaacccaaatgcattcatttgccaagcgttggcaagacatttctacattaaaaagaaggactttggcaatgctctaaactgggcaaaacaagcaaaaatcatagaacctgacaattcttatatctcagatacactgggtcaagtctacaaaagtaaaataagatggtggatagaggaaaacggaggaaacgggaacatttcagttgatgatctaattgctcttttggatttagcagaacatgcctcaagtgcattcaaagaatctcaacagcaaagtgaagatagagagtatgaagtgaaggaaagattgtatccgaagtcaaaaaggcggtatgatacttacaatatagctggttatcaaggagagatagaagttgggctttacacaatccaaattctccagctcattcctttttttgataataaaaatgagctatctaaaagatatatggtcaattttgtatcaggaagtagtgatattccaggggatccaaacaatgaatataaattagccctcaaaaactatattccttatttaactaaattgaaattttctttgaaaaagtcctttgatttttttgatgaatactttgtcctgctaaaacccaggaacaat

SEQ ID NO: 194304 - protein, 382 aa, Artificial Sequence
  derived and/or modified sequence
MRSGGRGRPRLRLGERGLMEPLLPPKRRLLPRVRLLPLLLALAVGSAFYTIWSGWHRRTEELPLGRELRVPLIGSLPEARLRRVVGQLDPQRLWSTYLRPLLVVRTPGSPGNLQVRKFLEATLRSLTAGWHVELDPFTASTPLGPVDFGNVVATLDPRAARHLTLACHYDSKLFPPGSTPFVGATDSAVPCALLLELAQALDLELSRAKKQAAPVTLQLLFLDGEEALKEWGPKDSLYGSRHLAQLMESIPHSPGPTRIQAIELFMLLDLLGAPNPTFYSHFPRTVRWFHRLRSIEKRLHRLNLLQSHPQEVMYFQPGEPFGSVEDDHIPFLRRGVPVLHLISTPFPAVWHTPADTEVNLHPPTVHNLCRILAVFLAEYLGL

SEQ ID NO: 194305 - DNA, 1149 bp, Artificial Sequence
  derived and/or modified sequence
atgagaagcggcggcagaggcagacccagactgagactgggcgagagaggcctgatggagcccctgctgccccccaagagaagactgctgcccagagtgagactgctgcccctgctgctggccctggccgtgggcagcgccttctacaccatctggagcggctggcacagaagaaccgaggagctgcccctgggcagagagctgagagtgcccctgatcggcagcctgcccgaggccagactgagaagagtggtgggccagctggacccccagagactgtggagcacctacctgagacccctgctggtggtgagaacccccggcagccccggcaacctgcaggtgagaaagttcctggaggccaccctgagaagcctgaccgccggctggcacgtggagctggaccccttcaccgccagcacccccctgggccccgtggacttcggcaacgtggtggccaccctggaccccagagccgccagacacctgaccctggcctgccactacgacagcaagctgttcccccccggcagcacccccttcgtgggcgccaccgacagcgccgtgccctgcgccctgctgctggagctggcccaggccctggacctggagctgagcagagccaagaagcaggccgcccccgtgaccctgcagctgctgttcctggacggcgaggaggccctgaaggagtggggccccaaggacagcctgtacggcagcagacacctggcccagctgatggagagcatcccccacagccccggccccaccagaatccaggccatcgagctgttcatgctgctggacctgctgggcgcccccaaccccaccttctacagccacttccccagaaccgtgagatggttccacagactgagaagcatcgagaagagactgcacagactgaacctgctgcagagccacccccaggaggtgatgtacttccagcccggcgagcccttcggcagcgtggaggacgaccacatccccttcctgagaagaggcgtgcccgtgctgcacctgatcagcacccccttccccgccgtgtggcacacccccgccgacaccgaggtgaacctgcacccccccaccgtgcacaacctgtgcagaatcctggccgtgttcctggccgagtacctgggcctgtag

SEQ ID NO: 194306 - DNA, 2303 bp, Artificial Sequence
  derived and/or modified sequence
catttgggtcgtgccattctcaggggaaccaaccccaatacctaagggaggctgggaggcgtgtcctcaggaccgtagttcttattggtttcgctgctcgctgtggggtgggctggtgcagccgcagctgttgcttattggcccaccgattccatggggaggaacttggctgggcctaaactcaatccgtggtctggtacaggtttcagggcaaagcggccatgcgttccgggggccgcgggcgaccccgcctgcggctgggggaacgtggcctcatggagccactcttgccgccgaagcgccgcctgctaccgcgggttcggctcttgcctctgttgctggcgctggccgtgggctcggcgttctacaccatttggagcggctggcaccgcaggactgaggagctgccgctgggccgggagctgcgggtcccattgatcggaagcctccccgaagcccggctgcggagggtggtgggacaactggatccacagcgtctctggagcacttatctgcgccccctgctggttgtgcgaaccccgggcagcccgggaaatctccaagtcagaaagttcctggaggccacgctgcggtccctgacagcaggttggcacgtggagctggatcccttcacagcctcaacacccctggggccagtggactttggcaatgtggtggccacactggacccaagggctgcccgtcacctcacccttgcctgccattatgactcgaagctcttcccacccggatcgaccccctttgtaggggccacggattcggctgtgccctgtgccctgctgctggagctggcccaagcacttgacctggagctgagcagggccaaaaaacaggcagccccggtgaccctgcaactgctcttcttggatggtgaagaggcgctgaaggagtggggacccaaggactccctttacggttcccggcacctggcccagctcatggagtctatacctcacagccccggccccaccaggatccaggctattgagctctttatgcttcttgatctcctgggagcccccaatcccaccttctacagccacttccctcgcacggtccgctggttccatcggctgaggagcattgagaagcgtctgcaccgtttgaacctgctgcagtctcatccccaggaagtgatgtacttccaacccggggagccctttggctctgtggaagacgaccacatccccttcctccgcagaggggtacccgtgctccatctcatctccacgcccttccctgctgtctggcacacccctgcggacaccgaggtcaatctccacccacccacggtacacaacttgtgccgcattctcgctgtgttcctggctgaatacctggggctctagcgtgcttggccaatgactgtggagaggactgtgagagagaaggtcccagcgggggccagtgaagctcaggcaggatctgcctagggtgtgctggtttgtccttttcatacctttgtctcctaattgtgctacaattggaagaccttctttcttttgattgtctcaagctgccacccttcaaggacagggaagagaccactgtgggatgacagccagaggaataagaacttgctccctccccagaggtaaacacttggtccaaaggtttgcagggaccaaatactgttctttttttttttgagacggagtctcactgtgttgcccaggctggagtgcagtggtgcgatctcggctcactgcaaactccgcctcctgggttcacgccattctcctgcctcagcctcccaagtagctgggactacaggtgcccgccaccacgctggctaattttttgtatttttagtagagacggggtttcaccgtgttagccaggatggtctcgatctcctgaccttgtaatccgccagcctcggcctcccaaagtgctgggattacaggtgtgagccaccgcacctggcaaaatgctgttctttaagtcagcgaactgaaaaagtaaaagactgctgggtgtggtggctcacacctgtaatcccaacactttgagaggctgagggggaaggatcacccgaggtcaggagtttgagaccagcctggtcaacatggcgaaaccctgtctctactaaaaatacaataattagctgggcatggtggtgggcgcctgtaatctcagctgcttgggaggctgaggcaggagaatcacttgtacgcaggaggcggaggttgcagtgagccaagatcacaccactgcactccagcctgggcaacagagcgagactccatctcaataaataaataaataaataaatatttttt

SEQ ID NO: 194307 - DNA, 1149 bp, Artificial Sequence
  derived and/or modified sequence
atgcgaagcggtgggcgcggtaggccccggctgcgactcggtgagcgagggttgatggaaccccttcttcctccaaaacggcgcttgctccctagggtgcggctactgcccttgttactggccctggccgtgggaagtgctttttacaccatctggagcggatggcaccggaggactgaggagttgccactcggcagagaattgagggtgcccctcattggctctctgccagaagcaagactgcgaagagtagttggtcaactagacccccagaggctttggtctacgtacttgaggcctctgctcgtcgtcaggaccccaggcagtccaggcaaccttcaggtgagaaaattcttagaagctacccttcgaagcttgactgccggatggcatgtggagctcgaccccttcacggcctcaaccccgctggggcccgtggacttcggaaacgtcgtggccacgctcgatccacgcgcggccaggcacttaactctagcctgccactacgacagcaagctctttcctcctggctcaacacccttcgtgggagccacggacagcgccgttccttgtgctctcctcctggagcttgctcaggcccttgacctggaactgtcccgcgctaagaagcaggctgcgcctgtgaccctgcagttactgttcttggatggagaggaggcactcaaagagtgggggccgaaggactcactgtatgggtctaggcatctagcccagctgatggaatcaatccctcactcaccgggtcctactcgcattcaggctatagaactcttcatgctgctcgatctacttggagcaccaaatcctaccttttatagccatttccctcggacggtgaggtggtttcatcggctgcgttccatagagaagaggctccaccgcctaaatctgttgcagtcccaccctcaggaagttatgtatttccagccaggcgagccattcggatctgtcgaagacgatcacattcccttcctaaggaggggcgttcccgtgctgcaccttatcagcacaccctttccggcggtgtggcataccccagccgatacagaagtgaatctccatccccctactgtccacaatctctgcaggatccttgctgtgtttctggccgagtatctggggctctag

SEQ ID NO: 194308 - DNA, 1149 bp, Artificial Sequence
  derived and/or modified sequence
atgaggtctgggggccggggccggccccggctgcggctgggggagcggggcctgatggagcccctgctgccccccaagaggcggctgctgccccgggtgcggctgctgcccctgctgctggccctggccgtgggcagcgccttctacaccatctggagcggctggcacagaagaacagaggagctgcccctgggccgggagctgcgggtgcccctgattggcagcctgcctgaggcccggctgcggcgggtggtgggccagctggacccccagaggctgtggagcacctacctgcggcccctgctggtggtgaggaccccaggcagccctggcaacctgcaggtgaggaagttcctggaggccaccctgcggagcctgacagctggctggcacgtggagctggaccccttcaccgccagcacccccctgggccctgtggactttggaaatgtggtggccaccctggaccccagggctgcccggcacctgaccctggcctgccactatgacagcaagctgtttcctcctggcagcaccccatttgtgggcgccacagattctgctgtgccctgtgccctgctgctggagctggcccaggccctggacctggagctgagccgggccaagaagcaggccgcccctgtgaccctgcagctgctcttcctggatggagaggaggccctgaaggagtggggccccaaggacagcctgtatggcagccgccacctggcccagctgatggagagcatcccccacagccctggccccacccgcatccaggccatcgagctgttcatgctgctggacctgctgggcgcccccaaccccaccttctacagccacttccccaggacagtgcgctggttccaccggctgcggagcattgagaagaggctgcaccggctgaacctgctgcagagccacccccaggaggtgatgtacttccagcctggagagccctttggatctgtggaggatgaccacatccccttcctgcggcggggcgtgcctgtgctgcacctgatcagcacccccttccctgctgtgtggcacaccccagctgacacagaggtgaacctgcacccccccaccgtgcacaacctgtgccgcatcctggccgtgttcctggccgagtacctgggcctgtag

SEQ ID NO: 194309 - DNA, 1149 bp, Artificial Sequence
  derived and/or modified sequence
atgcggagcggcggccggggccggccccggctgcggctgggcgagcgcggactaatggagccacttcttccgcctaagcgccgcttactccccagagtccgcctgctgccactgttgttggctttagcggtcggttcggccttctataccatttggtctggatggcaccgccggacagaggagctcccgctgggtcgggaactaagagttcccctgatcggaagtctacccgaggccagactgagaagggtggtaggtcaactagatccacaacggctgtggagcacttaccttagaccactcttagtggtgaggactcccggcagccctggcaacctccaggtgagaaagttcctcgaagccacactgagatccctgacagctggttggcacgtggaattggatccgttcactgcctccactccgctgggccctgtggacttcggcaacgtagtcgcaacactggacccccgtgcggctcggcatctgacccttgcttgccactatgattccaagctctttccaccgggctctacgcctttcgtgggcgcaacggactctgcagtgccttgtgccttactattagagctcgctcaagccctggaccttgaactgagccgcgctaagaagcaggccgcaccagtaacattgcaactactgttcttggacggagaagaagcactcaaggagtggggccctaaagattctctctatggcagtcgtcatctggctcaactgatggagtccattcctcatagtcccggaccaactcggatccaagctatcgaactcttcatgctgctggaccttctgggtgcgcccaatcctaccttctacagccacttccctaggacggtgcggtggttccacagacttcgtagtatcgagaagcgcctgcaccggctgaatcttttgcagtctcaccctcaggaggtcatgtacttccagcccggcgagccatttgggagtgtcgaagacgaccacattccgttcctgaggcggggagtccctgtcttacatctgattagcaccccatttcccgccgtatggcacaccccggctgacactgaagtgaacttacatcccccaactgtccacaatctgtgcaggatactggctgtcttcctcgctgagtatttaggtctgtag

SEQ ID NO: 194310 - DNA, 1149 bp, Artificial Sequence
  derived and/or modified sequence
atgagatctgggggtagagggaggccgcgtttgagattgggggagagggggctgatggaaccattgctgccccctaagagaaggctgctaccccgtgttcggttgctacctctgctgctggccctggccgtgggatcagcattttacactatctggagtgggtggcatcggagaacagaggaactgcccctgggtcgagagttgagagtgccactaatcggaagcctaccggaagctagattaagacgtgtggtaggacaactcgacccccagcggctctggagtacttacctgcggccattgctggtggtgcgaacaccgggttctcctggaaatctgcaggttcgtaagttcctggaggcaaccctgagaagtcttaccgctggatggcacgtggaactggatccatttaccgcaagcaccccattgggaccagtggatttcggcaacgtcgtggctaccttggatcctcgcgctgctcgtcacctgactcttgcatgccactacgatagtaaactattcccaccaggctcaaccccttttgtgggtgctactgattctgcggtgccatgtgccctactgcttgagttagctcaagcgctggacctggagctttcgagagccaagaagcaagctgcgcctgtgaccttgcagttactcttcttggacggcgaagaggcactgaaggaatggggcccaaaagactctctctatggcagtcgccatcttgcccagctcatggagagcatacctcattcaccagggccaacccggattcaggccatcgagttatttatgcttcttgatctgcttggcgcacccaaccctactttttacagccacttcccgcgtaccgtcaggtggtttcatagactcagaagcattgaaaagcggctgcatagattgaacctcctccagtcacaccctcaagaagttatgtattttcagccgggagagccgttcggcagcgttgaggatgatcatatccctttcctgaggaggggggtaccagtgttacacctgatctccacaccttttccagctgtgtggcacacgcccgcagatacggaggtcaaccttcatccacctacagtccataacctctgtagaattttggccgtcttccttgcggaatatctgggcctgtag

SEQ ID NO: 194311 - DNA, 1149 bp, Artificial Sequence
  derived and/or modified sequence
atgaggtccggaggtcggggaaggcctcggctgcgcctgggagagcgcggtcttatggaacccctcctgccacccaaacgtcgactactgccacgcgtaaggctccttcccttgttgctggcccttgctgtaggatctgccttttataccatctggtccggatggcatcggcgaacagaggaactgccacttggcagagaactgcgcgtgcccctgatcggatccctcccagaagcccgactcaggagggtggttggacaactcgaccctcagcgtctctggagcacttatctgagaccacttctggtcgtccggacccctgggagccctggaaatcttcaagtccgcaagtttctggaagccacacttaggtcactaactgcaggctggcacgttgaactcgacccattcactgccagcacccccctaggacctgtagacttcggcaacgtcgtcgcaacccttgaccccagggcagcccggcacctcactttggcttgccattacgattccaaattgtttccgccaggctctaccccattcgtgggcgctacggattccgccgtaccttgcgcactgctgttggaactcgcccaggcgcttgacttggagctcagcagggccaaaaaacaagccgcccccgtcaccctgcagctcttattccttgacggagaggaggcgttgaaagagtggggacctaaagactctctgtatggttccagacaccttgcccagctcatggagagcatcccccacagccccggcccaacccgaattcaagcaatcgaactatttatgctattagaccttttgggtgctcccaaccccacattctacagccactttcctcgaacagtccgctggtttcaccggctccgatccattgagaagaggcttcatcgcttaaacctcctccagagccaccctcaggaggtgatgtactttcagcccggggagccatttggcagtgtggaagacgatcacattccattccttaggagaggcgtgcctgtacttcacctgatttctacaccattccctgctgtctggcatacccccgcagacactgaggtcaatctgcaccctccaactgtgcataatctttgtagaattctcgccgtgtttctggccgagtatttaggactgtag

SEQ ID NO: 194312 - DNA, 1149 bp, Artificial Sequence
  derived and/or modified sequence
atgagatccggcggcagaggcagaccacgcctccgattaggagagagaggcctaatggagcccctactacccccaaagagaaggttgctgcctcgcgtgcggttgctgcccctcttactggctttggcagtcggatcagctttttataccatctggagcggctggcacagaaggacggaggaactgccactcgggagagaactgagagtgcctcttattggttcattaccggaagcccgtctacgcagggtcgtcggacagctggaccctcaacgcctgtggagtacatatctgagacctctgctcgtagttcggaccccgggaagtccaggaaatctgcaggttaggaagttccttgaggctacgctccgctcccttactgctggctggcacgtcgagctggaccccttcaccgcaagcacacctcttggccccgtggacttcggcaatgtggtggcaacactagacccgcgggctgcacgccacttgactctcgcttgtcactacgacagtaagctttttcctcccggatcaaccccgttcgtgggcgctaccgactcagcagttccttgtgcacttcttctggaactcgcccaagctttagatctggaactctcgcgcgcgaaaaaacaggccgcccccgtcaccctacagctgttgttccttgacggcgaggaagctctgaaagaatggggccccaaagattcactgtacggatcaagacacttggcacaactgatggagagtatcccgcattcccctggccctacaagaatccaggccatcgaactctttatgctgttggacttactcggtgcaccgaatcctactttttactcgcacttcccacgtaccgtgcggtggttccacagactgaggtcaatcgagaagcggctccacaggctcaacctcttacagtcccacccgcaggaggtcatgtattttcagcccggtgaacctttcggtagcgtggaagacgaccatatcccttttctgagacgaggagttcccgtcctgcatcttatttccacccccttcccagccgtatggcacacgccagcagataccgaggttaatttgcatcctccaacagtgcataacctctgtagaatactcgccgtttttctagcagagtatctcggcttgtag

SEQ ID NO: 194313 - RNA, 1149 nt, Artificial Sequence
  derived and/or modified sequence
augagguccggaggucggggaaggccucggcugcgccugggagagcgcggucuuauggaaccccuccugccacccaaacgucgacuacugccacgcguaaggcuccuucccuuguugcuggcccuugcuguaggaucugccuuuuauaccaucugguccggauggcaucggcgaacagaggaacugccacuuggcagagaacugcgcgugccccugaucggaucccucccagaagcccgacucaggagggugguuggacaacucgacccucagcgucucuggagcacuuaucugagaccacuucuggucguccggaccccugggagcccuggaaaucuucaaguccgcaaguuucuggaagccacacuuaggucacuaacugcaggcuggcacguugaacucgacccauucacugccagcaccccccuaggaccuguagacuucggcaacgucgucgcaacccuugaccccagggcagcccggcaccucacuuuggcuugccauuacgauuccaaauuguuuccgccaggcucuaccccauucgugggcgcuacggauuccgccguaccuugcgcacugcuguuggaacucgcccaggcgcuugacuuggagcucagcagggccaaaaaacaagccgcccccgucacccugcagcucuuauuccuugacggagaggaggcguugaaagaguggggaccuaaagacucucuguaugguuccagacaccuugcccagcucauggagagcaucccccacagccccggcccaacccgaauucaagcaaucgaacuauuuaugcuauuagaccuuuugggugcucccaaccccacauucuacagccacuuuccucgaacaguccgcugguuucaccggcuccgauccauugagaagaggcuucaucgcuuaaaccuccuccagagccacccucaggaggugauguacuuucagcccggggagccauuuggcaguguggaagacgaucacauuccauuccuuaggagaggcgugccuguacuucaccugauuucuacaccauucccugcugucuggcauacccccgcagacacugaggucaaucugcacccuccaacugugcauaaucuuuguagaauucucgccguguuucuggccgaguauuuaggacuguag

SEQ ID NO: 194314 - RNA, 1149 nt, Artificial Sequence
  derived and/or modified sequence
augagauccggcggcagaggcagaccacgccuccgauuaggagagagaggccuaauggagccccuacuacccccaaagagaagguugcugccucgcgugcgguugcugccccucuuacuggcuuuggcagucggaucagcuuuuuauaccaucuggagcggcuggcacagaaggacggaggaacugccacucgggagagaacugagagugccucuuauugguucauuaccggaagcccgucuacgcagggucgucggacagcuggacccucaacgccuguggaguacauaucugagaccucugcucguaguucggaccccgggaaguccaggaaaucugcagguuaggaaguuccuugaggcuacgcuccgcucccuuacugcuggcuggcacgucgagcuggaccccuucaccgcaagcacaccucuuggccccguggacuucggcaaugugguggcaacacuagacccgcgggcugcacgccacuugacucucgcuugucacuacgacaguaagcuuuuuccucccggaucaaccccguucgugggcgcuaccgacucagcaguuccuugugcacuucuucuggaacucgcccaagcuuuagaucuggaacucucgcgcgcgaaaaaacaggccgcccccgucacccuacagcuguuguuccuugacggcgaggaagcucugaaagaauggggccccaaagauucacuguacggaucaagacacuuggcacaacugauggagaguaucccgcauuccccuggcccuacaagaauccaggccaucgaacucuuuaugcuguuggacuuacucggugcaccgaauccuacuuuuuacucgcacuucccacguaccgugcggugguuccacagacugaggucaaucgagaagcggcuccacaggcucaaccucuuacagucccacccgcaggaggucauguauuuucagcccggugaaccuuucgguagcguggaagacgaccauaucccuuuucugagacgaggaguucccguccugcaucuuauuuccacccccuucccagccguauggcacacgccagcagauaccgagguuaauuugcauccuccaacagugcauaaccucuguagaauacucgccguuuuucuagcagaguaucucggcuuguag

SEQ ID NO: 194315 - protein, 633 aa, Artificial Sequence
  derived and/or modified sequence
MTEEACRTRSQKRALERDPTEDDVESKKIKMERGLLASDLNTDGDMRVTPEPGAGPTQGLLRATEATAMAMGRGEGLVGDGPVDMRTSHSDMKSERRPPSPDVIVLSDNEQPSSPRVNGLTTVALKETSTEALMKSSPEERERMIKQLKEELRLEEAKLVLLKKLRQSQIQKEATAQKPTGSVGSTVTTPPPLVRGTQNIPAGKPSLQTSSARMPGSVIPPPLVRGGQQASSKLGPQASSQVVMPPLVRGAQQIHSIRQHSSTGPPPLLLAPRASVPSVQIQGQRIIQQGLIRVANVPNTSLLVNIPQPTPASLKGTTATSAQANSTPTSVASVVTSAESPASRQAAAKLALRKQLEKTLLEIPPPKPPAPEMNFLPSAANNEFIYLVGLEEVVQNLLETQGRMSAATVLSREPYMCAQCKTDFTCRWREEKSGAIMCENCMTTNQKKALKVEHTSRLKAAFVKALQQEQEIEQRLLQQGTAPAQAKAEPTAAPHPVLKQVIKPRRKLAFRSGEARDWSNGAVLQASSQLSRGSATTPRGVLHTFSPSPKLQNSASATALVSRTGRHSERTVSAGKGSATSNWKKTPLSTGGTLAFVSPSLAVHKSSSAVDRQREYLLDMIPPRSIPQSATWK

SEQ ID NO: 194316 - DNA, 1902 bp, Artificial Sequence
  derived and/or modified sequence
atgacggaggaggcatgtcggacccgcagccagaaacgagctttagaaagagaccccacggaagatgacgtagagagcaaaaaaattaaaatggaaagagggcttctggccagcgacctgaatacagacggcgatatgcgagtcacgccggaacccggagccggaccaacacagggcctccttcgagcaaccgaggctacagccatggccatggggcgcggcgaaggattggtaggggacggacccgtcgacatgcgcacctcacactctgatatgaaatctgaacggaggccccccagcccggatgtcatcgttctctccgacaacgagcagccctcaagccctagagtgaatgggctcacaaccgtggcactgaaagagacttccacagaggctctgatgaagagtagcccggaggagcgggagcgaatgatcaagcagcttaaggaggaactgaggctggaagaggccaagctagtcctcctgaagaagttgaggcagtcccaaatccagaaagaggccactgctcaaaaacctaccggctctgtggggtcaacagtgacaactcctccgcctctcgtgcgaggcacacagaatatacccgccggtaagcccagcctgcagacaagtagtgctcgaatgccaggatcggtgattcccccacccctcgtgcgcggtggtcagcaggcaagtagcaagctggggccacaggcctcatcccaagttgtgatgcctcccctagtgcggggtgcccagcaaatacactctatacgtcaacactctagcacggggcctccacccctactcctggctcctagagcgagtgtcccttcagtacagatacaagggcagagaatcatccaacagggacttatacgtgtggctaacgtccctaacaccagcctgctggtgaatatacctcagccgactcctgcctctctcaaggggaccaccgcaacatctgcccaggctaatagtacccccacctccgtcgcctccgtagtgacaagcgcggagagccctgcttctagacaggccgcggccaaattggcattgagaaagcaactggaaaagacacttctcgaaatcccccccccaaagccaccggcccccgaaatgaacttcttgcctagcgcagccaacaacgagttcatttatcttgtggggctggaggaagtggtgcaaaacctgctcgagacccagggcagaatgtcggcagccaccgtgctttcaagagagccctacatgtgcgcacagtgtaagaccgattttacttgccggtggcgagaggagaaatccggtgctataatgtgcgagaactgcatgactacaaaccaaaagaaagcactgaaagtggagcatacatcacgtcttaaggccgcattcgtaaaggcactgcagcaagagcaggaaatagagcaacgcctgctccagcagggaaccgctcctgcgcaggctaaggcagagcccacagccgccccgcacccagtcctgaagcaggttatcaaacctcgccggaagctagccttccggagcggggaagcccgtgattggtccaacggtgctgtcctgcaggccagcagtcagctctcccgcggcagtgcaactacacccagaggggtgctgcatactttctccccctctcctaagctgcagaacagcgccagtgcgactgcgctggttagccggacaggccggcactccgagcgcactgtttccgcagggaaaggctctgctaccagcaattggaaaaagacacctttatctacaggtgggactcttgccttcgtctccccgagccttgctgtgcacaaaagcagcagtgcggtggaccgacaacgcgaatacctcctggacatgatccccccaagatctattccacagtcagcaacctggaagtag

SEQ ID NO: 194317 - DNA, 1902 bp, Artificial Sequence
  derived and/or modified sequence
atgactgaggaggcttgtagaacacggtcccagaagagggccctcgaacgcgacccaacggaggacgatgtcgaatccaagaaaattaagatggagcgaggcttgttggcaagcgatctaaatacagatggggatatgcgtgttacaccagagccaggagcagggcccacacagggcctcttacgcgccacggaggccaccgcgatggcaatgggaaggggggaggggctggtaggggacggacccgtggacatgcggacatcccactccgatatgaaatccgagaggcggccccccagtccagatgtgattgtgctttcggataatgagcagcctagcagcccgcgcgtgaatggcctgaccaccgtggcccttaaagagacctccactgaagctcttatgaagagtagcccggaggagcgcgaaagaatgattaaacagctaaaagaggaactgcggcttgaagaagctaagttggtgttgttaaagaaactgcgtcaatcccagatccagaaggaagctaccgcacagaagcccactggcagtgtcggttctacggtgaccacccccccgcccctggtcaggggtacccaaaatattcctgcggggaagccgtctctgcaaacatcctctgccaggatgcccgggagcgtaatcccccccccacttgtgcggggcggacagcaagcaagcagcaaactgggcccccaggcttcttcacaagtggtaatgccacctctggtccggggcgcccaacagatacactcgatcaggcaacatagcagtacgggaccaccaccactgctgttggctcccagggccagcgtccctagtgtccaaattcagggccagcggattatccagcagggtctgatccgggttgccaatgtgcccaatacgtctctcctcgtgaacatcccacagccaactcccgcaagcctcaaaggcacaactgcaacttcagcccaggccaactcgacacccacaagtgtcgccagtgtggtgacttctgccgagtcccctgcctcccgacaggcagccgccaagctcgccctgcgcaagcagttagagaagaccctcctagaaatcccaccgcccaaaccaccagctccggaaatgaatttcctcccctccgcggcaaacaacgaattcatctacctggtcggactcgaagaagtggtccagaacttactggagacccagggcagaatgtccgccgctactgttttgtcaagggagccatatatgtgtgcacagtgtaagacagatttcacctgccgatggcgcgaagagaagagtggcgcaataatgtgcgagaactgtatgacgacaaaccagaaaaaggcccttaaggtcgagcacactagccgacttaaagcggccttcgttaaggctctacaacaggaacaggagatcgagcagaggctcctgcagcagggaacggcccctgctcaggctaaggcagagccaaccgctgctccccatccagtgcttaaacaggtgattaaacctagaagaaaattagcctttcggagtggggaagccagagactggagcaacggggctgtattgcaggcctccagccagctatctcgcgggtctgcaacaacccctcggggggtgctacatacattctcgcctagcccaaaactccaaaactctgcgagcgctactgccctggtgtctagaactggccgccattcagagcggacagtgtcagcgggaaaaggtagcgccacgtctaattggaagaagacgccgctgtccactggaggaacactcgcttttgtctcaccctctctcgccgttcacaaatctagcagcgctgttgacaggcagcgagagtatctcctggatatgattccccctcgtagcattccccaatcagctacttggaagtag

SEQ ID NO: 194318 - DNA, 1902 bp, Artificial Sequence
  derived and/or modified sequence
atgacagaggaggcctgcaggaccaggagccagaagagggccctggagcgggaccccacagaagatgatgtggagagcaagaagatcaagatggagcggggcctgctggccagtgacctgaacacagatggagacatgagggtgaccccagagcccggggccggccccacccagggcctgctgcgggccacagaggccacagccatggccatgggccgcggggagggcctggtgggagatggccctgtggacatgaggaccagccacagcgacatgaagtctgagcggcggccccccagcccagatgtgattgtgctgagtgacaatgagcagcccagcagcccccgggtgaatggcctgaccaccgtggccctgaaggagaccagcacagaggccctgatgaagagcagccctgaggagcgggagaggatgatcaagcagctgaaggaggagctgcggctggaggaggccaagctggtgctgctgaagaagctgcggcagagccagatccagaaggaggccacagcccagaagcccaccggctctgtgggcagcacagtgaccaccccaccacccctggtgcggggcacccagaacatcccagctgggaagcccagcctgcagaccagcagcgccaggatgcctggcagcgtcatccccccacccctggtgcggggcggccagcaggccagcagcaagctgggcccccaggccagcagccaggtggtgatgccacccctggtgcggggggcccagcagatccacagcatccggcagcacagcagcactggacctccacccctgctgctggccccccgggcctctgtgcccagcgtgcagatccagggccagaggatcatccagcagggcctcatccgggtggccaacgtgcccaacaccagcctgctggtgaacatcccccagcccaccccagccagcctgaagggcaccacagccaccagcgcccaggccaacagcacccccacctctgtggcctctgtggtgaccagcgctgagagccctgccagccggcaggccgccgccaagctggccctgaggaagcagctggagaagaccctgctggagatccccccacccaagcccccagcccctgagatgaacttcctgcccagcgctgccaacaatgagttcatctacctggtgggcctggaggaggtggtgcagaacctgctggagacccagggccgcatgtctgctgccaccgtgctgagccgggagccctacatgtgtgcccagtgcaagacagacttcacctgccgctggagggaggagaagagcggggccatcatgtgtgagaactgcatgaccaccaaccagaagaaggccctgaaggtggagcacaccagccggctgaaggccgcctttgtgaaggccctgcagcaggagcaggagattgagcagaggctgctgcagcagggcacagccccagcccaggccaaggccgagcccacagctgccccccaccctgtgctgaagcaggtgatcaagcccaggaggaagctggccttccgcagcggggaggcccgggactggagcaatggagctgtgctgcaggccagcagccagctgagccggggcagcgccaccaccccccggggcgtgctgcacaccttcagccccagccccaagctgcagaacagcgccagcgccacagccctggtgtccaggacaggccgccacagcgagaggacagtgtctgctgggaagggcagcgccaccagcaactggaagaagacccccctgagcactggaggcaccctggcctttgtgagccccagcctggccgtgcacaagagcagcagcgctgtggaccggcagcgggagtacctgctggacatgatcccccccaggagcatcccccagagcgccacctggaagtag

SEQ ID NO: 194319 - DNA, 1902 bp, Artificial Sequence
  derived and/or modified sequence
atgaccgaggaggcctgccggacccggagccagaagcgggccctggagcgggacccaaccgaagacgacgtagagtctaaaaaaataaagatggaaagaggcctcctagcttctgatctcaacactgatggagacatgcgtgtcacacctgagccgggtgctggtcccactcagggcctgctacgggcgactgaggccaccgccatggccatggggcgcggtgaaggcctagtgggggacggacctgtggatatgcgtacatctcactccgacatgaaatccgaaaggcgacctccttccccagatgtgattgtgctcagcgataatgaacaaccttcatccccccgcgtgaacgggttgactacggtcgctctgaaggagacaagtacagaagcactcatgaagagcagccctgaggaacgcgaacgaatgataaaacaactgaaggaagagcttcgcttagaagaagccaaattggttttattgaagaagctgcggcagagccagatccagaaggaggctactgcccaaaaacccaccgggtcagttgggtctacagtcaccacccccccccccctcgtgaggggcactcagaacatcccagctggaaagccaagcctgcagacgtccagtgcgcgtatgcctggttccgtaatccctccacctctggttcgcggagggcagcaggccagcagtaaactgggacctcaggcttcctcccaggtcgtgatgcccccactcgttcgaggagcccagcagattcatagtattcgtcagcattcaagcacaggtccccctcctctgctactggcccctagagccagtgtaccctctgtccagatccagggtcagagaataatccagcaggggctgatccgggtggccaatgtacctaacaccagtctccttgtcaacataccccaacctacccccgctagtttaaagggtacgacggcaacctcagcacaggcgaacagcacccctacttctgtggcgagcgttgtgacatccgccgagagcccggcatccagacaagctgctgcaaaactggcactgcggaagcagctcgaaaagacgctgctggagatcccaccgccaaaaccgcccgccccggaaatgaacttcttgcctagcgccgcgaataatgagttcatctacttagtagggctggaggaagttgtgcaaaacttactggaaacgcagggccggatgagcgcggccaccgtgctgtctagagagccctatatgtgtgctcaatgtaagaccgattttacctgcagatggagggaggagaagtctggagctattatgtgtgaaaactgtatgaccacaaaccagaagaaagccctgaaggttgaacatacatctaggctaaaggctgcattcgtgaaagccctgcagcaggaacaggagattgagcagaggctccttcaacaggggaccgctccggcgcaggccaaggccgaacccactgctgctcctcatcctgtgcttaaacaggtgattaaaccaaggcgaaaactcgcctttcgttcaggagaggcaagagactggagtaacggagctgttctccaagcctccagccaattgtctcgggggagcgcgactacccctcggggtgttcttcacaccttctcgccctcccctaagttgcagaatagtgcgagtgccacggctctcgtgtcaaggaccggacggcatagtgagaggaccgtgagcgcagggaaggggagtgcaacttctaattggaaaaaaacgccgctgtcaacgggagggactctcgcattcgtgtctccctctcttgcagtgcacaagagtagcagcgctgtggaccgccagcgcgagtatctgcttgacatgattcctccccgtagtatcccgcagagtgccacttggaaatag

SEQ ID NO: 194320 - DNA, 1902 bp, Artificial Sequence
  derived and/or modified sequence
atgaccgaggaggcctgccggacccggagccagaagcgggccctggagcgagatcccaccgaagacgacgtcgagtcaaaaaagataaaaatggagaggggtttgctcgcctctgacttaaacacagacggcgacatgagggtcacgcccgagcctggagccggacccacgcaaggcttactgcgtgccaccgaagcaacagctatggcgatgggtaggggcgagggactggtgggggatggtcccgttgacatgagaacctcacacagtgatatgaagtcagagagacggccacctagccctgatgtgatagtcctatcagacaacgaacagcccagctcccctagagttaatggccttacaaccgtagccctgaaggagacaagcactgaggccctgatgaagagctcgcctgaagagagagagcgcatgattaaacagctgaaggaagaattgcgcttggaagaggccaaactcgtgctgttaaaaaaactgaggcagtctcaaattcagaaggaggccacagcacagaagcctacaggcagcgtgggttctacagtaaccacacctcctcccctggtacgaggcactcaaaatattccagcagggaaaccatcattgcagacatcatctgctcgaatgcctggctcagtgattccgcctccgttggtgcggggcgggcaacaggcctcttctaagctggggccccaagcctccagtcaggtcgtcatgccaccgttggtgcgcggtgcacagcagatccactcaatccgccagcactcatcaaccgggcccccgccactcttactagcgccccgagcctccgtgcctagcgtgcagattcagggccaaaggattatccagcaaggcctcattcgggtggctaatgtcccgaataccagcctgttagtgaacataccacagcccactcccgcatctctaaaaggcacaaccgccacttccgcccaggccaattccactccaaccagcgtggcgagtgttgtgaccagtgcagagtccccagctagccggcaggctgccgccaaacttgctctgcgaaagcagctcgagaaaacactgctggagatccccccccctaaaccccccgctcccgaaatgaattttcttccttcggccgccaacaatgagttcatctacctggtcggcctggaggaagtggtccagaaccttctcgaaacacaggggaggatgagtgcagctaccgtgctctcacgggagccatatatgtgtgctcaatgtaagacggatttcacatgcaggtggagggaggagaagtcaggggccattatgtgcgagaactgtatgacaacaaatcagaaaaaggcactgaaggtagagcacactagccggctcaaggcagctttcgtgaaggccctgcagcaagagcaggagattgaacagaggctcctgcagcaggggacagcccctgcacaggccaaggccgagcccactgccgcccctcaccccgttctgaaacaggtgataaaacctagaaggaaattggcatttcgcagcggcgaggctagagactggagtaacggagctgtcctgcaggcaagcagccagctctctagggggtctgcgaccactcctcgaggcgtgctgcatacattctctccatccccaaaactgcaaaactctgcttccgctaccgcgcttgtgtcccggactggtaggcacagcgaacgcaccgtatccgcagggaagggatccgcgacctcaaactggaagaagacccctctgagcaccggcggcaccctggccttcgtgtccccgtcgctggccgtccataaatcaagctcagccgtggacagacagcgggagtatttactggacatgatccctccaaggagtatccctcagtccgccacctggaaatag

SEQ ID NO: 194321 - DNA, 1902 bp, Artificial Sequence
  derived and/or modified sequence
atgactgaagaggcatgtcggaccaggtcccagaagagagcacttgagagggatcctacagaagatgacgtggaaagcaaaaagattaagatggaaagaggactgctggcaagtgacctgaataccgacggagacatgagagtgacccccgaaccgggtgccggtccaacacagggcctgctgagggccactgaggctaccgccatggcgatggggagaggagaaggtctcgttggcgacgggccagtcgacatgagaacgagccatagcgacatgaagagcgagcgcaggcccccttcccccgacgtgattgtgcttagtgataacgagcaacccagcagtccccgagtcaatgggttgacaactgtcgcgttaaaggagaccagcaccgaggctttgatgaaaagctcccctgaggaaagggaacggatgatcaaacagctgaaggaggaactccgactagaggaagcaaaacttgtgctgctcaagaagttaagacaaagccaaattcagaaagaggcaacagcccaaaaacctacagggtcggttggctcaaccgtgacaacgccgccacccctcgtgcggggtacccagaatatcccagctggcaagccatcgctacagaccagttcagcccgtatgccagggtcagtaatcccacccccactcgttcgaggcggacaacaggcatcttcgaagctgggccctcaggcctcctcccaggtcgtgatgccccctcttgtccgcggagcacagcagatacactctatcaggcaacattcatcaacagggcctccccctctcctgctcgcaccacgtgcctctgtcccgagtgtgcagattcaggggcagagaatcatccaacagggccttatacgggtggccaatgtcccaaacacctcactgctcgtcaacatcccccaaccaacaccagcctcattgaagggaaccacagccactagcgcccaggccaattctactccaacctctgtcgcaagcgtggtcactagcgcagagtctcccgcaagccgacaagccgctgctaagcttgcccttcggaaacagttggagaaaacgttactggaaataccccctcccaagccgccagctcccgaaatgaatttcctgcccagcgccgctaacaacgaatttatctatctggtcggcctggaagaggtggtccaaaacctgctagaaacccagggtaggatgagcgccgctaccgtattatctcgggagccatacatgtgtgcccagtgtaagactgacttcacttgtagatggcgggaagagaagagcggagcgatcatgtgtgagaattgcatgacgaccaatcaaaagaaggccctaaaagtggagcatacaagcagactcaaggctgctttcgttaaggctctccaacaagagcaggaaatagagcaaagactcctgcaacagggaaccgcccctgcccaggcaaaggctgaacccactgccgcacctcatcctgtgctcaaacaagtgatcaaacctcgcaggaagttagcattccgcagcggagaggcacgtgactggtctaatggcgctgtgctccaagcctcctcacagctgagcaggggatccgccaccactccgaggggtgtgttgcacacgtttagcccttctccaaaactgcagaatagcgctagcgcgactgccctggtctcaaggacgggtcgacacagcgaaagaaccgttagcgcaggtaagggcagcgccacatcaaattggaaaaaaaccccactctcaaccggaggcacccttgcctttgtcagtccaagcctggccgtccataagagttcatcagcagtggatagacaacgggagtatcttttggacatgatacctcctagaagcatcccccagtcggcgacctggaaatag

SEQ ID NO: 194322 - DNA, 1902 bp, Artificial Sequence
  derived and/or modified sequence
atgaccgaagaggcgtgtagaacacgatctcagaaacgagccctagagagagatcctactgaagatgacgtggaatccaaaaagattaagatggaaagggggctgctggcgtccgacctgaataccgacggtgacatgcgggtaacaccggaaccgggtgccggaccaacccagggcctgctcagggctacagaggcaacggccatggccatgggaagaggagagggactcgtgggtgacggccctgtagatatgcgaacatcccacagcgatatgaaaagcgagcggaggcctccctcccctgacgtcatagtactctcagataacgaacagcccagcagtcccagggtcaacggactaaccactgtggccttgaaggaaacttctaccgaggccctgatgaaatcctcacctgaagagcgggagcggatgattaagcagctgaaggaggaactgaggttggaggaggccaaactggtgttgctgaagaaactcagacaaagtcagattcagaaagaggccacggcccagaaacctaccgggtccgtgggctcgacagtcacaactcccccaccgctagtgagggggacgcagaacattccagcaggcaagccaagcctgcagacttctagcgcacggatgcctggttctgtaatccctccacctctggtccgcggtggccaacaagcgagctctaaactagggcctcaggcttcaagccaggttgtgatgccacccttagtgcgcggtgctcagcaaattcacagcattaggcagcacagctccaccggccctcctccccttctgcttgcccctcgggcatctgtcccttccgtgcaaattcaggggcagcgaataatccaacaggggctaatcagagttgccaatgttcctaatacctctctgctggtaaatatcccccagcccacacctgcttctttaaaaggcacaacagctacttccgcacaggcaaactctacccctacgtccgtggcttcagtggtaacctctgctgaaagtcctgcatctcgacaggcagccgctaagctcgctctgcgaaagcagctggagaaaactctgcttgaaatccctccgccaaagccccctgcccctgaaatgaacttcctgccaagcgcagccaataacgagtttatatacctagtgggacttgaggaggtggttcaaaacttactggaaacacaagggagaatgagcgcggctaccgtgctgtcacgcgagccttatatgtgtgcacagtgcaaaaccgacttcacatgccgttggcgtgaggaaaagagcggtgctattatgtgtgagaactgtatgactacgaatcaaaagaaagctctgaaagtcgaacatacctcccggctgaaagcggcatttgtgaaagcattgcaacaggagcaggaaatagagcaacggcttctgcagcaagggactgcccctgcacaggccaaagctgaacctactgctgctccccatccagttctcaaacaggtgatcaaaccaagaaggaaattagcatttcggtccggagaggcgagggattggagcaacggggcagtcctccaggcctcatcacagctgagcagaggatccgccacaacaccgaggggggtgctacacacattctcacctagccccaagctgcagaattcagctagtgccactgcgcttgttagcagaacgggcagacactcagagagaactgtgtctgcgggaaaggggagtgccacaagtaactggaaaaagaccccactgtccaccgggggtacactagcatttgtctccccttctctggccgtgcataagtcaagctcagcggtagatagacagagagaataccttctggatatgatcccccctaggagcatccctcagagcgcaacatggaagtag

SEQ ID NO: 194323 - DNA, 5510 bp, Artificial Sequence
  derived and/or modified sequence
gtgcataccaagcccatactgtttgctctacactgaaaatgaagatgaatggtgaaaaaaagtttctgccattgagagcttaacattgagttgcagtgagagatgaagctcctgagtggcacggagattgttgccagggctctggtgagttcagaatgaccgaagaagcatgccgaacacggagtcagaaacgagcgcttgaacgggacccaacagaggacgatgtggagagcaagaaaataaaaatggagagaggattgttggcttcagatttaaacactgacggagacatgagggtgacacctgagccgggagcaggtccaacccaaggattgctgagggcaacagaggccacggccatggccatgggcagaggcgaagggctggtgggcgatgggcccgtggacatgcgcacctcacacagtgacatgaagtccgagaggagacccccctcacctgacgtgattgtgctctccgacaacgagcagccctcgagcccgagagtgaatgggctgaccacggtggccttgaaggagactagcaccgaggccctcatgaaaagcagtcctgaagaacgagaaaggatgatcaagcagctgaaggaagaattgaggttagaagaagcaaaactcgtgttgttgaaaaagttgcggcagagtcaaatacaaaaggaagccaccgcccagaagcccacaggttctgttgggagcaccgtgaccacccctcccccgcttgttcggggcactcagaacattcctgctggcaagccatcactccagacctcttcagctcggatgcccggcagtgtcatacccccgcccctggtccgaggtgggcagcaggcgtcctcgaagctggggccacaggcgagctcacaggtcgtcatgcccccactcgtcaggggggctcagcaaatccacagcattaggcaacattccagcacagggccaccgcccctcctcctggccccccgggcgtcggtgcccagtgtgcagattcagggacagaggatcatccagcagggcctcatccgcgtcgccaatgttcccaacaccagcctgctcgtcaacatcccacagcccaccccagcatcactgaaggggacaacagccacctccgctcaggccaactccacccccactagtgtggcctctgtggtcacctctgccgagtctccagcaagccgacaggcggccgccaagctggcgctgcgcaaacagctggagaagacgctactcgagatccccccacccaagcccccagccccagagatgaacttcctgcccagcgccgccaacaacgagttcatctacctggtcggcctggaggaggtggtgcagaacctactggagacacaaggcaggatgtcggccgccactgtgctgtcccgggagccctacatgtgtgcacagtgcaagacggacttcacgtgccgctggcgggaggagaagagcggcgccatcatgtgtgagaactgcatgacaaccaaccagaagaaggcgctcaaggtggagcacaccagccggctgaaggccgcctttgtgaaggcgctgcagcaggaacaggagattgagcagcggctcctgcagcagggcacggcccctgcacaggccaaggccgagcccaccgctgccccacaccccgtgctgaagcaggtcataaaaccccggcgtaagttggcgttccgctcaggagaggcccgcgactggagtaacggggctgtgctacaggcctccagccagctgtcccggggttcggccacgacgccccgaggtgtcctgcacacgttcagtccgtcacccaaactgcagaactcagcctcggccacagccctggtcagcaggaccggcagacattctgagagaaccgtgagcgccggcaagggcagcgccacctccaactggaagaagacgcccctcagcacaggcgggacccttgcgtttgtcagcccaagcctggcggtgcacaagagctcctcggccgtggaccgccagcgagagtacctcctggacatgatcccaccccgctccatcccccagtcagccacgtggaaatagtgcgagccaggccccgtggaagacgggctccctcctcccccacctggcccctggtctagaaggacccactgcaccaccctccgctggctcgggaagacaccgtgcccgccccaagagcaagcaccggccatgctgcagaggcaagacctcaattcttggctgcaaagtttcatcagggctagggggctggtgccgcctcataggcagacgaggatcatcgctgggggacctttcccgtgggctttcttcctttctctctttgcctttagtttgcccgacaccagcagaaaagtggaccttgggggctggttctgctcctggcccccttgttcagcccctgccggcacacgggcggctcaccctggacactgtgatgcgcatgggcaaggccagcgcccggggcttctgaaccgagcggggtgtttcatttttttgcttttccctgtcttaggctcccagtctttgactgccttcccatggcgatctataagttgaaagattttttttttttttaatcacctcatgatgatggagttaaaagtaaaccgtgcagaccctggggtccctgttgtacgctgcatcatcccgctggccctgtgccctggagggtgggcggctcatggtgccacagcccctggcagggacggccggcccgcccccgtgactgactgacagatgcagggatggccgaggcagccctcgctccagctgaacgcctccattgctgcttgttctggagacccccgcccccgcaccttccagacttagcagaagaacaaactgaagaacagacccagccagagaagcagggattccagaagctgcccattaagggagaaggagaggatccggtcggcagcagccctgagcagaaagctggaggggggactgtcgcggggtttttctgttgtggtttattttattaaattttttccttttttctattcatttcgatggacgcaatcttaagccaccctggccttgctcctgggaggtgagcgtgcacaggtgtgtgcaggtcaggaggtgccgtccaggtgtgcggcgagccgctgcgcacagatgtcaggatttccgtttgggtctagtttagaacctgtccttaaacctaggggttgctgtcaggatttgctttcagactttttttttttttgtaattccctttagagtctacaaaaatgtttttaaaaggatcaggtctgcttttagtttcatttttgtttctttcccgtcccactctttaaaaactggttccgtgaggaaaggcagaagccgttccgtgtctcttgcaggctgggccggcttcatgccagtgcgagggcgtcccgtgcccacgtacatacgtatgtctccatgagttctgggctccactggttccaattgagctccagccctggttttcctacccatgcagttagggactttaatttaattttttttttgtagggccaccgccttcaaacacaactgctacaacattctaataaaggctcatttaacccccaggctcctgtcgtgtgaatatcctcagtctgtaggaaactttttttgacacagcatagaagacctagttttggaaaacattatctaattttttgttgtgcaaatccccaaatttctcactaatttttgtttttttgtgcataacttggatgggctgaaggaggtgaggacagattggggaagggtggctttcattccaagatccagggatttggggaaaaggaaggaatttgatgttttttggggtgggaggggagggtgtgttttttacaccaaaaaaaaaaaaaaaaatcaagagtatgcaagcatttctattcctcgcatttttctgtgtgcctggcaaataaatacctgtctcctacgaccctgagctgttagccctctctgttccatgacaggggccagatcttccagctcctcccagaaggagcacccaggctggcttcttcccactgaaagccctccccagcgaaccaacctcagttctatgcagtggctggggatcaggcatccagaccgaagtcacctctgcctgctccagcttgggtcagctgggtctgaccagggggccagatccgagccgcacctgccggcccccagccccagctccagctcctgacctctcccagcctggcctggctgttcctccagggctgatggctgtcaacccatccttgtgagttcatatggactgctgcccctcgaaagggagagggtcggccccatgtccccagggagcattccatcagggacaacgtacatactgtgatgtaaactttttttttttccccccagggggcaaaagtgtgagatgccttaatctttccttcatttctgctgtctcgaacactctagcccattatttcctttcagttccttgcagcataacctctacgataagccccaagcgggttgttgtattatgacgtttatgatgttccaggtgaaggcattattaagtacctctctgggtgtggggtttggacgcaccaggatagctattgattaatgttaagggtgttctacccacagcaaagcacaccctcttaaaccaggcactgcctgggtcctggtcccgagagccctaccaggatcaggttcctgcaagccgtcagaatgtgggagcccccagcccaactgattgtaactgtcccctgttacctgtgacatgaacctccaacagcacctggaaacggttccctctgtcagctgctctgtagacagggctggggagatctcagagttcacacctcgcctgttgtaggggaggttgggggtagggtttggaatggccaagtgcccttggaacctcccacagctatggccgtcctgacctcatcccaggaactctacggtgaccaggaaccacccctctgacgaggtctgtagcggcccttctcagagtggaacagcccacagtgctagttgtgcctggtcttacctgtactccacggacctcggtgaagcaaaagcttcagggcagagggaatgaggcaacccagtggcagccccgctgggccccgtggctcctgctctcctattggacgtagaggcaggggagagacttctctatacaaatattctcatcacagaagggatgatccttgctgctctgccgtagggtttttgatgctgagctatgctgcacatgacgttaacctaaagaacttggactgagcttttaaaaaaggacagcaaacaattttataatccttaaagtgtaatagacggttacactagtgcagggtattggggaggctctttgggtgtggaggctgtcacttgtatttattgtgactctaaatctttgatagtaaaacaaatgtaaaaagaaatgtttgccaccagatgggaatagaagttccaataagcaggctggaatgggtggctatacgttgtatcacgaggaagttttagactctgaaggataataaatggatgatgtgtcaa

SEQ ID NO: 194324 - DNA, 5671 bp, Artificial Sequence
  derived and/or modified sequence
gggcaatttcagtgtgagactgagccgcgagactgagctgcggctccgagcgctgcgcggcggctcctcccgcccagggtcagcgccccggcgcgcgcacgcgcacccccgccgcccgagcgcgccccgcgccgcccgcgcagtcggtcggtcggtcgtctgtcctgtcgccgctgccgccgccgccacagcggccgccgcgggcgccacctgagggagtcgcctccgcgggacgccacaagacctgaccggactgcgccgcccgaggccgtcggccgccgtcagcgagggcgccgagcaacttcgttcagaatgaccgaagaagcatgccgaacacggagtcagaaacgagcgcttgaacgggacccaacagaggacgatgtggagagcaagaaaataaaaatggagagaggattgttggcttcagatttaaacactgacggagacatgagggtgacacctgagccgggagcaggtccaacccaaggattgctgagggcaacagaggccacggccatggccatgggcagaggcgaagggctggtgggcgatgggcccgtggacatgcgcacctcacacagtgacatgaagtccgagaggagacccccctcacctgacgtgattgtgctctccgacaacgagcagccctcgagcccgagagtgaatgggctgaccacggtggccttgaaggagactagcaccgaggccctcatgaaaagcagtcctgaagaacgagaaaggatgatcaagcagctgaaggaagaattgaggttagaagaagcaaaactcgtgttgttgaaaaagttgcggcagagtcaaatacaaaaggaagccaccgcccagaagcccacaggttctgttgggagcaccgtgaccacccctcccccgcttgttcggggcactcagaacattcctgctggcaagccatcactccagacctcttcagctcggatgcccggcagtgtcatacccccgcccctggtccgaggtgggcagcaggcgtcctcgaagctggggccacaggcgagctcacaggtcgtcatgcccccactcgtcaggggggctcagcaaatccacagcattaggcaacattccagcacagggccaccgcccctcctcctggccccccgggcgtcggtgcccagtgtgcagattcagggacagaggatcatccagcagggcctcatccgcgtcgccaatgttcccaacaccagcctgctcgtcaacatcccacagcccaccccagcatcactgaaggggacaacagccacctccgctcaggccaactccacccccactagtgtggcctctgtggtcacctctgccgagtctccagcaagccgacaggcggccgccaagctggcgctgcgcaaacagctggagaagacgctactcgagatccccccacccaagcccccagccccagagatgaacttcctgcccagcgccgccaacaacgagttcatctacctggtcggcctggaggaggtggtgcagaacctactggagacacaaggcaggatgtcggccgccactgtgctgtcccgggagccctacatgtgtgcacagtgcaagacggacttcacgtgccgctggcgggaggagaagagcggcgccatcatgtgtgagaactgcatgacaaccaaccagaagaaggcgctcaaggtggagcacaccagccggctgaaggccgcctttgtgaaggcgctgcagcaggaacaggagattgagcagcggctcctgcagcagggcacggcccctgcacaggccaaggccgagcccaccgctgccccacaccccgtgctgaagcaggtcataaaaccccggcgtaagttggcgttccgctcaggagaggcccgcgactggagtaacggggctgtgctacaggcctccagccagctgtcccggggttcggccacgacgccccgaggtgtcctgcacacgttcagtccgtcacccaaactgcagaactcagcctcggccacagccctggtcagcaggaccggcagacattctgagagaaccgtgagcgccggcaagggcagcgccacctccaactggaagaagacgcccctcagcacaggcgggacccttgcgtttgtcagcccaagcctggcggtgcacaagagctcctcggccgtggaccgccagcgagagtacctcctggacatgatcccaccccgctccatcccccagtcagccacgtggaaatagtgcgagccaggccccgtggaagacgggctccctcctcccccacctggcccctggtctagaaggacccactgcaccaccctccgctggctcgggaagacaccgtgcccgccccaagagcaagcaccggccatgctgcagaggcaagacctcaattcttggctgcaaagtttcatcagggctagggggctggtgccgcctcataggcagacgaggatcatcgctgggggacctttcccgtgggctttcttcctttctctctttgcctttagtttgcccgacaccagcagaaaagtggaccttgggggctggttctgctcctggcccccttgttcagcccctgccggcacacgggcggctcaccctggacactgtgatgcgcatgggcaaggccagcgcccggggcttctgaaccgagcggggtgtttcatttttttgcttttccctgtcttaggctcccagtctttgactgccttcccatggcgatctataagttgaaagattttttttttttttaatcacctcatgatgatggagttaaaagtaaaccgtgcagaccctggggtccctgttgtacgctgcatcatcccgctggccctgtgccctggagggtgggcggctcatggtgccacagcccctggcagggacggccggcccgcccccgtgactgactgacagatgcagggatggccgaggcagccctcgctccagctgaacgcctccattgctgcttgttctggagacccccgcccccgcaccttccagacttagcagaagaacaaactgaagaacagacccagccagagaagcagggattccagaagctgcccattaagggagaaggagaggatccggtcggcagcagccctgagcagaaagctggaggggggactgtcgcggggtttttctgttgtggtttattttattaaattttttccttttttctattcatttcgatggacgcaatcttaagccaccctggccttgctcctgggaggtgagcgtgcacaggtgtgtgcaggtcaggaggtgccgtccaggtgtgcggcgagccgctgcgcacagatgtcaggatttccgtttgggtctagtttagaacctgtccttaaacctaggggttgctgtcaggatttgctttcagactttttttttttttgtaattccctttagagtctacaaaaatgtttttaaaaggatcaggtctgcttttagtttcatttttgtttctttcccgtcccactctttaaaaactggttccgtgaggaaaggcagaagccgttccgtgtctcttgcaggctgggccggcttcatgccagtgcgagggcgtcccgtgcccacgtacatacgtatgtctccatgagttctgggctccactggttccaattgagctccagccctggttttcctacccatgcagttagggactttaatttaattttttttttgtagggccaccgccttcaaacacaactgctacaacattctaataaaggctcatttaacccccaggctcctgtcgtgtgaatatcctcagtctgtaggaaactttttttgacacagcatagaagacctagttttggaaaacattatctaattttttgttgtgcaaatccccaaatttctcactaatttttgtttttttgtgcataacttggatgggctgaaggaggtgaggacagattggggaagggtggctttcattccaagatccagggatttggggaaaaggaaggaatttgatgttttttggggtgggaggggagggtgtgttttttacaccaaaaaaaaaaaaaaaaatcaagagtatgcaagcatttctattcctcgcatttttctgtgtgcctggcaaataaatacctgtctcctacgaccctgagctgttagccctctctgttccatgacaggggccagatcttccagctcctcccagaaggagcacccaggctggcttcttcccactgaaagccctccccagcgaaccaacctcagttctatgcagtggctggggatcaggcatccagaccgaagtcacctctgcctgctccagcttgggtcagctgggtctgaccagggggccagatccgagccgcacctgccggcccccagccccagctccagctcctgacctctcccagcctggcctggctgttcctccagggctgatggctgtcaacccatccttgtgagttcatatggactgctgcccctcgaaagggagagggtcggccccatgtccccagggagcattccatcagggacaacgtacatactgtgatgtaaactttttttttttccccccagggggcaaaagtgtgagatgccttaatctttccttcatttctgctgtctcgaacactctagcccattatttcctttcagttccttgcagcataacctctacgataagccccaagcgggttgttgtattatgacgtttatgatgttccaggtgaaggcattattaagtacctctctgggtgtggggtttggacgcaccaggatagctattgattaatgttaagggtgttctacccacagcaaagcacaccctcttaaaccaggcactgcctgggtcctggtcccgagagccctaccaggatcaggttcctgcaagccgtcagaatgtgggagcccccagcccaactgattgtaactgtcccctgttacctgtgacatgaacctccaacagcacctggaaacggttccctctgtcagctgctctgtagacagggctggggagatctcagagttcacacctcgcctgttgtaggggaggttgggggtagggtttggaatggccaagtgcccttggaacctcccacagctatggccgtcctgacctcatcccaggaactctacggtgaccaggaaccacccctctgacgaggtctgtagcggcccttctcagagtggaacagcccacagtgctagttgtgcctggtcttacctgtactccacggacctcggtgaagcaaaagcttcagggcagagggaatgaggcaacccagtggcagccccgctgggccccgtggctcctgctctcctattggacgtagaggcaggggagagacttctctatacaaatattctcatcacagaagggatgatccttgctgctctgccgtagggtttttgatgctgagctatgctgcacatgacgttaacctaaagaacttggactgagcttttaaaaaaggacagcaaacaattttataatccttaaagtgtaatagacggttacactagtgcagggtattggggaggctctttgggtgtggaggctgtcacttgtatttattgtgactctaaatctttgatagtaaaacaaatgtaaaaagaaatgtttgccaccagatgggaatagaagttccaataagcaggctggaatgggtggctatacgttgtatcacgaggaagttttagactctgaaggataataaatggatgatgtgtcaactgg

SEQ ID NO: 194325 - DNA, 1902 bp, Artificial Sequence
  derived and/or modified sequence
atgaccgaggaggcctgcagaaccagaagccagaagagagccctggagagagaccccaccgaggacgacgtggagagcaagaagatcaagatggagagaggcctgctggccagcgacctgaacaccgacggcgacatgagagtgacccccgagcccggcgccggccccacccagggcctgctgagagccaccgaggccaccgccatggccatgggcagaggcgagggcctggtgggcgacggccccgtggacatgagaaccagccacagcgacatgaagagcgagagaagaccccccagccccgacgtgatcgtgctgagcgacaacgagcagcccagcagccccagagtgaacggcctgaccaccgtggccctgaaggagaccagcaccgaggccctgatgaagagcagccccgaggagagagagagaatgatcaagcagctgaaggaggagctgagactggaggaggccaagctggtgctgctgaagaagctgagacagagccagatccagaaggaggccaccgcccagaagcccaccggcagcgtgggcagcaccgtgaccacccccccccccctggtgagaggcacccagaacatccccgccggcaagcccagcctgcagaccagcagcgccagaatgcccggcagcgtgatccccccccccctggtgagaggcggccagcaggccagcagcaagctgggcccccaggccagcagccaggtggtgatgccccccctggtgagaggcgcccagcagatccacagcatcagacagcacagcagcaccggccccccccccctgctgctggcccccagagccagcgtgcccagcgtgcagatccagggccagagaatcatccagcagggcctgatcagagtggccaacgtgcccaacaccagcctgctggtgaacatcccccagcccacccccgccagcctgaagggcaccaccgccaccagcgcccaggccaacagcacccccaccagcgtggccagcgtggtgaccagcgccgagagccccgccagcagacaggccgccgccaagctggccctgagaaagcagctggagaagaccctgctggagatccccccccccaagccccccgcccccgagatgaacttcctgcccagcgccgccaacaacgagttcatctacctggtgggcctggaggaggtggtgcagaacctgctggagacccagggcagaatgagcgccgccaccgtgctgagcagagagccctacatgtgcgcccagtgcaagaccgacttcacctgcagatggagagaggagaagagcggcgccatcatgtgcgagaactgcatgaccaccaaccagaagaaggccctgaaggtggagcacaccagcagactgaaggccgccttcgtgaaggccctgcagcaggagcaggagatcgagcagagactgctgcagcagggcaccgcccccgcccaggccaaggccgagcccaccgccgccccccaccccgtgctgaagcaggtgatcaagcccagaagaaagctggccttcagaagcggcgaggccagagactggagcaacggcgccgtgctgcaggccagcagccagctgagcagaggcagcgccaccacccccagaggcgtgctgcacaccttcagccccagccccaagctgcagaacagcgccagcgccaccgccctggtgagcagaaccggcagacacagcgagagaaccgtgagcgccggcaagggcagcgccaccagcaactggaagaagacccccctgagcaccggcggcaccctggccttcgtgagccccagcctggccgtgcacaagagcagcagcgccgtggacagacagagagagtacctgctggacatgatcccccccagaagcatcccccagagcgccacctggaagtag

SEQ ID NO: 194326 - protein, 2022 aa, Artificial Sequence
  derived and/or modified sequence
MKEQPVLERLQSQKSWIKGVFDKRECSTIIPSSKNPHRCTPVCQVCQNLIRCYCGRLIGDHAGIDYSWTISAAKGKESEQWSVEKHTTKSPTDTFGTINFQDGEHTHHAKYIRTSYDTKLDHLLHLMLKEWKMELPKLVISVHGGIQNFTMPSKFKEIFSQGLVKAAETTGAWIITEGINTGVSKHVGDALKSHSSHSLRKIWTVGIPPWGVIENQRDLIGKDVVCLYQTLDNPLSKLTTLNSMHSHFILSDDGTVGKYGNEMKLRRNLEKYLSLQKIHCRSRQGVPVVGLVVEGGPNVILSVWETVKDKDPVVVCEGTGRAADLLAFTHKHLADEGMLRPQVKEEIICMIQNTFNFSLKQSKHLFQILMECMVHRDCITIFDADSEEQQDLDLAILTALLKGTNLSASEQLNLAMAWDRVDIAKKHILIYEQHWKPDALEQAMSDALVMDRVDFVKLLIEYGVNLHRFLTIPRLEELYNTKQGPTNTLLHHLVQDVKQHTLLSGYRITLIDIGLVVEYLIGRAYRSNYTRKHFRALYNNLYRKYKHQRHSSGNRNESAESTLHSQFIRTAQPYKFKEKSIVLHKSRKKSKEQNVSDDPESTGFLYPYNDLLVWAVLMKRQKMAMFFWQHGEEATVKAVIACILYRAMAHEAKESHMVDDASEELKNYSKQFGQLALDLLEKAFKQNERMAMTLLTYELRNWSNSTCLKLAVSGGLRPFVSHTCTQMLLTDMWMGRLKMRKNSWLKIIISIILPPTILTLEFKSKAEMSHVPQSQDFQFMWYYSDQNASSSKESASVKEYDLERGHDEKLDENQHFGLESGHQHLPWTRKVYEFYSAPIVKFWFYTMAYLAFLMLFTYTVLVEMQPQPSVQEWLVSIYIFTNAIEVVREICISEPGKFTQKVKVWISEYWNLTETVAIGLFSAGFVLRWGDPPFHTAGRLIYCIDIIFWFSRLLDFFAVNQHAGPYVTMIAKMTANMFYIVIIMAIVLLSFGVARKAILSPKEPPSWSLARDIVFEPYWMIYGEVYAGEIDVCSSQPSCPPGSFLTPFLQAVYLFVQYIIMVNLLIAFFNNVYLDMESISNNLWKYNRYRYIMTYHEKPWLPPPLILLSHVGLLLRRLCCHRAPHDQEEGDVGLKLYLSKEDLKKLHDFEEQCVEKYFHEKMEDVNCSCEERIRVTSERVTEMYFQLKEMNEKVSFIKDSLLSLDSQVGHLQDLSALTVDTLKVLSAVDTLQEDEALLAKRKHSTCKKLPHSWSNVICAEVLGSMEIAGEKKYQYYSMPSSLLRSLAGGRHPPRVQRGALLEITNSKREATNVRNDQERQETQSSIVVSGVSPNRQAHSKYGQFLLVPSNLKRVPFSAETVLPLSRPSVPDVLATEQDIQTEVLVHLTGQTPVVSDWASVDEPKEKHEPIAHLLDGQDKAEQVLPTLSCTPEPMTMSSPLSQAKIMQTGGGYVNWAFSEGDETGVFSIKKKWQTCLPSTCDSDSSRSEQHQKQAQDSSLSDNSTRSAQSSECSEVGPWLQPNTSFWINPLRRYRPFARSHSFRFHKEEKLMKICKIKNLSGSSEIGQGAWVKAKMLTKDRRLSKKKKNTQGLQVPIITVNACSQSDQLNPEPGENSISEEEYSKNWFTVSKFSHTGVEPYIHQKMKTKEIGQCAIQISDYLKQSQEDLSKNSLWNSRSTNLNRNSLLKSSIGVDKISASLKSPQEPHHHYSAIERNNLMRLSQTIPFTPVQLFAGEEITVYRLEESSPLNLDKSMSSWSQRGRAAMIQVLSREEMDGGLRKAMRVVSTWSEDDILKPGQVFIVKSFLPEVVRTWHKIFQESTVLHLCLREIQQQRAAQKLIYTFNQVKPQTIPYTPRFLEVFLIYCHSANQWLTIEKYMTGEFRKYNNNNGDEITPTNTLEELMLAFSHWTYEYTRGELLVLDLQGVGENLTDPSVIKPEVKQSRGMVFGPANLGEDAIRNFIAKHHCNSCCRKLKLPDLKRNDYSPERINSTFGLEIKIESAEEPPARETGRNSPEDDMQL

SEQ ID NO: 194327 - protein, 1947 aa, Artificial Sequence
  derived and/or modified sequence
MKEQPVLERLQSQKSWIKGVFDKRECSTIIPSSKNPHRCTPVCQVCQNLIRCYCGRLIGDHAGIDYSWTISAAKGKESEQWSVEKHTTKSPTDTFGTINFQDGEHTHHAKYIRTSYDTKLDHLLHLMLKEWKMELPKLVISVHGGIQNFTMPSKFKEIFSQGLVKAAETTGAWIITEGINTGVSKHVGDALKSHSSHSLRKIWTVGIPPWGVIENQRDLIGKDVVCLYQTLDNPLSKLTTLNSMHSHFILSDDGTVGKYGNEMKLRRNLEKYLSLQKIHCRSRQGVPVVGLVVEGGPNVILSVWETVKDKDPVVVCEGTGRAADLLAFTHKHLADEGMLRPQVKEEIICMIQNTFNFSLKQSKHLFQILMECMVHRDCITIFDADSEEQQDLDLAILTALLKGTNLSASEQLNLAMAWDRVDIAKKHILIYEQHWKPDALEQAMSDALVMDRVDFVKLLIEYGVNLHRFLTIPRLEELYNTKQGPTNTLLHHLVQDVKQHTLLSGYRITLIDIGLVVEYLIGRAYRSNYTRKHFRALYNNLYRKYKHQRHSSGNRNESAESTLHSQFIRTAQPYKFKEKSIVLHKSRKKSKEQNVSDDPESTGFLYPYNDLLVWAVLMKRQKMAMFFWQHGEEATVKAVIACILYRAMAHEAKESHMVDDASEELKNYSKQFGQLALDLLEKAFKQNERMAMTLLTYELRNWSNSTCLKLAVSGGLRPFVSHTCTQMLLTDMWMGRLKMRKNSWLKIIISIILPPTILTLEFKSKAEMSHVPQSQDFQFMWYYSDQNASSSKESASVKEYDLERGHDEKLDENQHFGLESGHQHLPWTRKVYEFYSAPIVKFWFYTMAYLAFLMLFTYTVLVEMQPQPSVQEWLVSIYIFTNAIEVVREICISEPGKFTQKVKVWISEYWNLTETVAIGLFSAGFVLRWGDPPFHTAGRLIYCIDIIFWFSRLLDFFAVNQHAGPYVTMIAKMTANMFYIVIIMAIVLLSFGVARKAILSPKEPPSWSLARDIVFEPYWMIYGEVYAGEIDVCSSQPSCPPGSFLTPFLQAVYLFVQYIIMVNLLIAFFNNVYLDMESISNNLWKYNRYRYIMTYHEKPWLPPPLILLSHVGLLLRRLCCHRAPHDQEEGDVGLKLYLSKEDLKKLHDFEEQCVEKYFHEKMEDVNCSCEERIRVTSERVTEMYFQLKEMNEKVSFIKDSLLSLDSQVGHLQDLSALTVDTLKVLSAVDTLQEDEALLAKRKHSTCKKLPHSWSNVICAEVLGSMEIAGEKKYQYYSMPSSLLRSLAGGRHPPRVQRGALLEITNSKREATNVRNDQERQETQSSIVVSGVSPNRQAHSKYGQFLLVPSNLKRVPFSAETVLPLSRPSVPDVLATEQDIQTEVLVHLTGQTPVVSDWASVDEPKEKHEPIAHLLDGQDKAEQVLPTLSCTPEPMTMSSPLSQAKIMQTGGGYVNWAFSEGDETGVFSIKKKWQTCLPSTCDSDSSRSEQHQKQAQDSSLSDNSTRSAQSSECSEVGPWLQPNTSFWINPLRRYRPFARSHSFRFHKEEKLMKICKIKNLSGSSEIGQGAWVKAKMLTKDRRLSKKKKNTQGLQVPIITVNACSQSDQLNPEPGENSISEEEYSKNWFTVSKFSHTGVEPYIHQKMKTKEIGQCAIQISDYLKQSQEDLSKNSLWNSRSTNLNRNSLHVIKMPISSLISEISASLKSPQEPHHHYSAIERNNLMRLSQTIPFTPVQLFAGEEITVYRLEESSPLNLDKSMSSWSQRGRAAMIQVLSREEMDGGLRKAMRVVSTWSEDDILKPGQVFIVKSFLPEVVRTWHKIFQESTVLHLCLREIQQQRAAQKLIYTFNQVKPQTIPYTPRFLEVFLIYCHSANQWLTIEKYMTGEFRKYNNNNGDEITPTNTLEELMLAFSHWTYEYTRGELLVLDLQALWFWDSMLKARLGGWRM

SEQ ID NO: 194328 - protein, 2026 aa, Artificial Sequence
  derived and/or modified sequence
MKEQPVLERLQSQKSWIKGVFDKRECSTIIPSSKNPHRCTPVCQVCQNLIRCYCGRLIGDHAGIDYSWTISAAKGKESEQWSVEKHTTKSPTDTFGTINFQDGEHTHHAKYIRTSYDTKLDHLLHLMLKEWKMELPKLVISVHGGIQNFTMPSKFKEIFSQGLVKAAETTGAWIITEGINTGVSKHVGDALKSHSSHSLRKIWTVGIPPWGVIENQRDLIGKDVVCLYQTLDNPLSKLTTLNSMHSHFILSDDGTVGKYGNEMKLRRNLEKYLSLQKIHCRSRQGVPVVGLVVEGGPNVILSVWETVKDKDPVVVCEGTGRAADLLAFTHKHLADEGMLRPQVKEEIICMIQNTFNFSLKQSKHLFQILMECMVHRDCITIFDADSEEQQDLDLAILTALLKGTNLSASEQLNLAMAWDRVDIAKKHILIYEQHWKPDALEQAMSDALVMDRVDFVKLLIEYGVNLHRFLTIPRLEELYNTKQGPTNTLLHHLVQDVKQHTLLSGYRITLIDIGLVVEYLIGRAYRSNYTRKHFRALYNNLYRKYKHQRHSSGNRNESAESTLHSQFIRTAQPYKFKEKSIVLHKSRKKSKEQNVSDDPESTGFLYPYNDLLVWAVLMKRQKMAMFFWQHGEEATVKAVIACILYRAMAHEAKESHMVDDASEELKNYSKQFGQLALDLLEKAFKQNERMAMTLLTYELRNWSNSTCLKLAVSGGLRPFVSHTCTQMLLTDMWMGRLKMRKNSWLKIIISIILPPTILTLEFKSKAEMSHVPQSQDFQFMWYYSDQNASSSKESASVKEYDLERGHDEKLDENQHFGLESGHQHLPWTRKVYEFYSAPIVKFWFYTMAYLAFLMLFTYTVLVEMQPQPSVQEWLVSIYIFTNAIEVVREICISEPGKFTQKVKVWISEYWNLTETVAIGLFSAGFVLRWGDPPFHTAGRLIYCIDIIFWFSRLLDFFAVNQHAGPYVTMIAKMTANMFYIVIIMAIVLLSFGVARKAILSPKEPPSWSLARDIVFEPYWMIYGEVYAGEIDVCSSQPSCPPGSFLTPFLQAVYLFVQYIIMVNLLIAFFNNVYLDMESISNNLWKYNRYRYIMTYHEKPWLPPPLILLSHVGLLLRRLCCHRAPHDQEEGDVGLKLYLSKEDLKKLHDFEEQCVEKYFHEKMEDVNCSCEERIRVTSERVTEMYFQLKEMNEKVSFIKDSLLSLDSQVGHLQDLSALTVDTLKVLSAVDTLQEDEALLAKRKHSTCKKLPHSWSNVICAEVLGSMEIAGEKKYQYYSMPSSLLRSLAGGRHPPRVQRGALLEITNSKREATNVRNDQERQETQSSIVVSGVSPNRQAHSKYGQFLLVPSNLKRVPFSAETVLPLSRPSVPDVLATEQDIQTEVLVHLTGQTPVVSDWASVDEPKEKHEPIAHLLDGQDKAEQVLPTLSCTPEPMTMSSPLSQAKIMQTGGGYVNWAFSEGDETGVFSIKKKWQTCLPSTCDSDSSRSEQHQKQAQDSSLSDNSTRSAQSSECSEVGPWLQPNTSFWINPLRRYRPFARSHSFRFHKEEKLMKICKIKNLSGSSEIGQGAWVKAKMLTKDRRLSKKKKNTQGLQVPIITVNACSQSDQLNPEPGENSISEEEYSKNWFTVSKFSHTGVEPYIHQKMKTKEIGQCAIQISDYLKQSQEDLSKNSLWNSRSTNLNRNSLHVIKMPISSLISEISASLKSPQEPHHHYSAIERNNLMRLSQTIPFTPVQLFAGEEITVYRLEESSPLNLDKSMSSWSQRGRAAMIQVLSREEMDGGLRKAMRVVSTWSEDDILKPGQVFIVKSFLPEVVRTWHKIFQESTVLHLCLREIQQQRAAQKLIYTFNQVKPQTIPYTPRFLEVFLIYCHSANQWLTIEKYMTGEFRKYNNNNGDEITPTNTLEELMLAFSHWTYEYTRGELLVLDLQGVGENLTDPSVIKPEVKQSRGMVFGPANLGEDAIRNFIAKHHCNSCCRKLKLPDLKRNDYSPERINSTFGLEIKIESAEEPPARETGRNSPEDDMQL

SEQ ID NO: 194329 - DNA, 6069 bp, Artificial Sequence
  derived and/or modified sequence
atgaaggagcagcccgtgctggagagactgcagagccagaagagctggatcaagggcgtgttcgacaagagagagtgcagcaccatcatccccagcagcaagaacccccacagatgcacccccgtgtgccaggtgtgccagaacctgatcagatgctactgcggcagactgatcggcgaccacgccggcatcgactacagctggaccatcagcgccgccaagggcaaggagagcgagcagtggagcgtggagaagcacaccaccaagagccccaccgacaccttcggcaccatcaacttccaggacggcgagcacacccaccacgccaagtacatcagaaccagctacgacaccaagctggaccacctgctgcacctgatgctgaaggagtggaagatggagctgcccaagctggtgatcagcgtgcacggcggcatccagaacttcaccatgcccagcaagttcaaggagatcttcagccagggcctggtgaaggccgccgagaccaccggcgcctggatcatcaccgagggcatcaacaccggcgtgagcaagcacgtgggcgacgccctgaagagccacagcagccacagcctgagaaagatctggaccgtgggcatccccccctggggcgtgatcgagaaccagagagacctgatcggcaaggacgtggtgtgcctgtaccagaccctggacaaccccctgagcaagctgaccaccctgaacagcatgcacagccacttcatcctgagcgacgacggcaccgtgggcaagtacggcaacgagatgaagctgagaagaaacctggagaagtacctgagcctgcagaagatccactgcagaagcagacagggcgtgcccgtggtgggcctggtggtggagggcggccccaacgtgatcctgagcgtgtgggagaccgtgaaggacaaggaccccgtggtggtgtgcgagggcaccggcagagccgccgacctgctggccttcacccacaagcacctggccgacgagggcatgctgagaccccaggtgaaggaggagatcatctgcatgatccagaacaccttcaacttcagcctgaagcagagcaagcacctgttccagatcctgatggagtgcatggtgcacagagactgcatcaccatcttcgacgccgacagcgaggagcagcaggacctggacctggccatcctgaccgccctgctgaagggcaccaacctgagcgccagcgagcagctgaacctggccatggcctgggacagagtggacatcgccaagaagcacatcctgatctacgagcagcactggaagcccgacgccctggagcaggccatgagcgacgccctggtgatggacagagtggacttcgtgaagctgctgatcgagtacggcgtgaacctgcacagattcctgaccatccccagactggaggagctgtacaacaccaagcagggccccaccaacaccctgctgcaccacctggtgcaggacgtgaagcagcacaccctgctgagcggctacagaatcaccctgatcgacatcggcctggtggtggagtacctgatcggcagagcctacagaagcaactacaccagaaagcacttcagagccctgtacaacaacctgtacagaaagtacaagcaccagagacacagcagcggcaacagaaacgagagcgccgagagcaccctgcacagccagttcatcagaaccgcccagccctacaagttcaaggagaagagcatcgtgctgcacaagagcagaaagaagagcaaggagcagaacgtgagcgacgaccccgagagcaccggcttcctgtacccctacaacgacctgctggtgtgggccgtgctgatgaagagacagaagatggccatgttcttctggcagcacggcgaggaggccaccgtgaaggccgtgatcgcctgcatcctgtacagagccatggcccacgaggccaaggagagccacatggtggacgacgccagcgaggagctgaagaactacagcaagcagttcggccagctggccctggacctgctggagaaggccttcaagcagaacgagagaatggccatgaccctgctgacctacgagctgagaaactggagcaacagcacctgcctgaagctggccgtgagcggcggcctgagacccttcgtgagccacacctgcacccagatgctgctgaccgacatgtggatgggcagactgaagatgagaaagaacagctggctgaagatcatcatcagcatcatcctgccccccaccatcctgaccctggagttcaagagcaaggccgagatgagccacgtgccccagagccaggacttccagttcatgtggtactacagcgaccagaacgccagcagcagcaaggagagcgccagcgtgaaggagtacgacctggagagaggccacgacgagaagctggacgagaaccagcacttcggcctggagagcggccaccagcacctgccctggaccagaaaggtgtacgagttctacagcgcccccatcgtgaagttctggttctacaccatggcctacctggccttcctgatgctgttcacctacaccgtgctggtggagatgcagccccagcccagcgtgcaggagtggctggtgagcatctacatcttcaccaacgccatcgaggtggtgagagagatctgcatcagcgagcccggcaagttcacccagaaggtgaaggtgtggatcagcgagtactggaacctgaccgagaccgtggccatcggcctgttcagcgccggcttcgtgctgagatggggcgacccccccttccacaccgccggcagactgatctactgcatcgacatcatcttctggttcagcagactgctggacttcttcgccgtgaaccagcacgccggcccctacgtgaccatgatcgccaagatgaccgccaacatgttctacatcgtgatcatcatggccatcgtgctgctgagcttcggcgtggccagaaaggccatcctgagccccaaggagccccccagctggagcctggccagagacatcgtgttcgagccctactggatgatctacggcgaggtgtacgccggcgagatcgacgtgtgcagcagccagcccagctgcccccccggcagcttcctgacccccttcctgcaggccgtgtacctgttcgtgcagtacatcatcatggtgaacctgctgatcgccttcttcaacaacgtgtacctggacatggagagcatcagcaacaacctgtggaagtacaacagatacagatacatcatgacctaccacgagaagccctggctgcccccccccctgatcctgctgagccacgtgggcctgctgctgagaagactgtgctgccacagagccccccacgaccaggaggagggcgacgtgggcctgaagctgtacctgagcaaggaggacctgaagaagctgcacgacttcgaggagcagtgcgtggagaagtacttccacgagaagatggaggacgtgaactgcagctgcgaggagagaatcagagtgaccagcgagagagtgaccgagatgtacttccagctgaaggagatgaacgagaaggtgagcttcatcaaggacagcctgctgagcctggacagccaggtgggccacctgcaggacctgagcgccctgaccgtggacaccctgaaggtgctgagcgccgtggacaccctgcaggaggacgaggccctgctggccaagagaaagcacagcacctgcaagaagctgccccacagctggagcaacgtgatctgcgccgaggtgctgggcagcatggagatcgccggcgagaagaagtaccagtactacagcatgcccagcagcctgctgagaagcctggccggcggcagacacccccccagagtgcagagaggcgccctgctggagatcaccaacagcaagagagaggccaccaacgtgagaaacgaccaggagagacaggagacccagagcagcatcgtggtgagcggcgtgagccccaacagacaggcccacagcaagtacggccagttcctgctggtgcccagcaacctgaagagagtgcccttcagcgccgagaccgtgctgcccctgagcagacccagcgtgcccgacgtgctggccaccgagcaggacatccagaccgaggtgctggtgcacctgaccggccagacccccgtggtgagcgactgggccagcgtggacgagcccaaggagaagcacgagcccatcgcccacctgctggacggccaggacaaggccgagcaggtgctgcccaccctgagctgcacccccgagcccatgaccatgagcagccccctgagccaggccaagatcatgcagaccggcggcggctacgtgaactgggccttcagcgagggcgacgagaccggcgtgttcagcatcaagaagaagtggcagacctgcctgcccagcacctgcgacagcgacagcagcagaagcgagcagcaccagaagcaggcccaggacagcagcctgagcgacaacagcaccagaagcgcccagagcagcgagtgcagcgaggtgggcccctggctgcagcccaacaccagcttctggatcaaccccctgagaagatacagacccttcgccagaagccacagcttcagattccacaaggaggagaagctgatgaagatctgcaagatcaagaacctgagcggcagcagcgagatcggccagggcgcctgggtgaaggccaagatgctgaccaaggacagaagactgagcaagaagaagaagaacacccagggcctgcaggtgcccatcatcaccgtgaacgcctgcagccagagcgaccagctgaaccccgagcccggcgagaacagcatcagcgaggaggagtacagcaagaactggttcaccgtgagcaagttcagccacaccggcgtggagccctacatccaccagaagatgaagaccaaggagatcggccagtgcgccatccagatcagcgactacctgaagcagagccaggaggacctgagcaagaacagcctgtggaacagcagaagcaccaacctgaacagaaacagcctgctgaagagcagcatcggcgtggacaagatcagcgccagcctgaagagcccccaggagccccaccaccactacagcgccatcgagagaaacaacctgatgagactgagccagaccatccccttcacccccgtgcagctgttcgccggcgaggagatcaccgtgtacagactggaggagagcagccccctgaacctggacaagagcatgagcagctggagccagagaggcagagccgccatgatccaggtgctgagcagagaggagatggacggcggcctgagaaaggccatgagagtggtgagcacctggagcgaggacgacatcctgaagcccggccaggtgttcatcgtgaagagcttcctgcccgaggtggtgagaacctggcacaagatcttccaggagagcaccgtgctgcacctgtgcctgagagagatccagcagcagagagccgcccagaagctgatctacaccttcaaccaggtgaagccccagaccatcccctacacccccagattcctggaggtgttcctgatctactgccacagcgccaaccagtggctgaccatcgagaagtacatgaccggcgagttcagaaagtacaacaacaacaacggcgacgagatcacccccaccaacaccctggaggagctgatgctggccttcagccactggacctacgagtacaccagaggcgagctgctggtgctggacctgcagggcgtgggcgagaacctgaccgaccccagcgtgatcaagcccgaggtgaagcagagcagaggcatggtgttcggccccgccaacctgggcgaggacgccatcagaaacttcatcgccaagcaccactgcaacagctgctgcagaaagctgaagctgcccgacctgaagagaaacgactacagccccgagagaatcaacagcaccttcggcctggagatcaagatcgagagcgccgaggagccccccgccagagagaccggcagaaacagccccgaggacgacatgcagctgtag

SEQ ID NO: 194330 - DNA, 5844 bp, Artificial Sequence
  derived and/or modified sequence
atgaaggagcagcccgtgctggagagactgcagagccagaagagctggatcaagggcgtgttcgacaagagagagtgcagcaccatcatccccagcagcaagaacccccacagatgcacccccgtgtgccaggtgtgccagaacctgatcagatgctactgcggcagactgatcggcgaccacgccggcatcgactacagctggaccatcagcgccgccaagggcaaggagagcgagcagtggagcgtggagaagcacaccaccaagagccccaccgacaccttcggcaccatcaacttccaggacggcgagcacacccaccacgccaagtacatcagaaccagctacgacaccaagctggaccacctgctgcacctgatgctgaaggagtggaagatggagctgcccaagctggtgatcagcgtgcacggcggcatccagaacttcaccatgcccagcaagttcaaggagatcttcagccagggcctggtgaaggccgccgagaccaccggcgcctggatcatcaccgagggcatcaacaccggcgtgagcaagcacgtgggcgacgccctgaagagccacagcagccacagcctgagaaagatctggaccgtgggcatccccccctggggcgtgatcgagaaccagagagacctgatcggcaaggacgtggtgtgcctgtaccagaccctggacaaccccctgagcaagctgaccaccctgaacagcatgcacagccacttcatcctgagcgacgacggcaccgtgggcaagtacggcaacgagatgaagctgagaagaaacctggagaagtacctgagcctgcagaagatccactgcagaagcagacagggcgtgcccgtggtgggcctggtggtggagggcggccccaacgtgatcctgagcgtgtgggagaccgtgaaggacaaggaccccgtggtggtgtgcgagggcaccggcagagccgccgacctgctggccttcacccacaagcacctggccgacgagggcatgctgagaccccaggtgaaggaggagatcatctgcatgatccagaacaccttcaacttcagcctgaagcagagcaagcacctgttccagatcctgatggagtgcatggtgcacagagactgcatcaccatcttcgacgccgacagcgaggagcagcaggacctggacctggccatcctgaccgccctgctgaagggcaccaacctgagcgccagcgagcagctgaacctggccatggcctgggacagagtggacatcgccaagaagcacatcctgatctacgagcagcactggaagcccgacgccctggagcaggccatgagcgacgccctggtgatggacagagtggacttcgtgaagctgctgatcgagtacggcgtgaacctgcacagattcctgaccatccccagactggaggagctgtacaacaccaagcagggccccaccaacaccctgctgcaccacctggtgcaggacgtgaagcagcacaccctgctgagcggctacagaatcaccctgatcgacatcggcctggtggtggagtacctgatcggcagagcctacagaagcaactacaccagaaagcacttcagagccctgtacaacaacctgtacagaaagtacaagcaccagagacacagcagcggcaacagaaacgagagcgccgagagcaccctgcacagccagttcatcagaaccgcccagccctacaagttcaaggagaagagcatcgtgctgcacaagagcagaaagaagagcaaggagcagaacgtgagcgacgaccccgagagcaccggcttcctgtacccctacaacgacctgctggtgtgggccgtgctgatgaagagacagaagatggccatgttcttctggcagcacggcgaggaggccaccgtgaaggccgtgatcgcctgcatcctgtacagagccatggcccacgaggccaaggagagccacatggtggacgacgccagcgaggagctgaagaactacagcaagcagttcggccagctggccctggacctgctggagaaggccttcaagcagaacgagagaatggccatgaccctgctgacctacgagctgagaaactggagcaacagcacctgcctgaagctggccgtgagcggcggcctgagacccttcgtgagccacacctgcacccagatgctgctgaccgacatgtggatgggcagactgaagatgagaaagaacagctggctgaagatcatcatcagcatcatcctgccccccaccatcctgaccctggagttcaagagcaaggccgagatgagccacgtgccccagagccaggacttccagttcatgtggtactacagcgaccagaacgccagcagcagcaaggagagcgccagcgtgaaggagtacgacctggagagaggccacgacgagaagctggacgagaaccagcacttcggcctggagagcggccaccagcacctgccctggaccagaaaggtgtacgagttctacagcgcccccatcgtgaagttctggttctacaccatggcctacctggccttcctgatgctgttcacctacaccgtgctggtggagatgcagccccagcccagcgtgcaggagtggctggtgagcatctacatcttcaccaacgccatcgaggtggtgagagagatctgcatcagcgagcccggcaagttcacccagaaggtgaaggtgtggatcagcgagtactggaacctgaccgagaccgtggccatcggcctgttcagcgccggcttcgtgctgagatggggcgacccccccttccacaccgccggcagactgatctactgcatcgacatcatcttctggttcagcagactgctggacttcttcgccgtgaaccagcacgccggcccctacgtgaccatgatcgccaagatgaccgccaacatgttctacatcgtgatcatcatggccatcgtgctgctgagcttcggcgtggccagaaaggccatcctgagccccaaggagccccccagctggagcctggccagagacatcgtgttcgagccctactggatgatctacggcgaggtgtacgccggcgagatcgacgtgtgcagcagccagcccagctgcccccccggcagcttcctgacccccttcctgcaggccgtgtacctgttcgtgcagtacatcatcatggtgaacctgctgatcgccttcttcaacaacgtgtacctggacatggagagcatcagcaacaacctgtggaagtacaacagatacagatacatcatgacctaccacgagaagccctggctgcccccccccctgatcctgctgagccacgtgggcctgctgctgagaagactgtgctgccacagagccccccacgaccaggaggagggcgacgtgggcctgaagctgtacctgagcaaggaggacctgaagaagctgcacgacttcgaggagcagtgcgtggagaagtacttccacgagaagatggaggacgtgaactgcagctgcgaggagagaatcagagtgaccagcgagagagtgaccgagatgtacttccagctgaaggagatgaacgagaaggtgagcttcatcaaggacagcctgctgagcctggacagccaggtgggccacctgcaggacctgagcgccctgaccgtggacaccctgaaggtgctgagcgccgtggacaccctgcaggaggacgaggccctgctggccaagagaaagcacagcacctgcaagaagctgccccacagctggagcaacgtgatctgcgccgaggtgctgggcagcatggagatcgccggcgagaagaagtaccagtactacagcatgcccagcagcctgctgagaagcctggccggcggcagacacccccccagagtgcagagaggcgccctgctggagatcaccaacagcaagagagaggccaccaacgtgagaaacgaccaggagagacaggagacccagagcagcatcgtggtgagcggcgtgagccccaacagacaggcccacagcaagtacggccagttcctgctggtgcccagcaacctgaagagagtgcccttcagcgccgagaccgtgctgcccctgagcagacccagcgtgcccgacgtgctggccaccgagcaggacatccagaccgaggtgctggtgcacctgaccggccagacccccgtggtgagcgactgggccagcgtggacgagcccaaggagaagcacgagcccatcgcccacctgctggacggccaggacaaggccgagcaggtgctgcccaccctgagctgcacccccgagcccatgaccatgagcagccccctgagccaggccaagatcatgcagaccggcggcggctacgtgaactgggccttcagcgagggcgacgagaccggcgtgttcagcatcaagaagaagtggcagacctgcctgcccagcacctgcgacagcgacagcagcagaagcgagcagcaccagaagcaggcccaggacagcagcctgagcgacaacagcaccagaagcgcccagagcagcgagtgcagcgaggtgggcccctggctgcagcccaacaccagcttctggatcaaccccctgagaagatacagacccttcgccagaagccacagcttcagattccacaaggaggagaagctgatgaagatctgcaagatcaagaacctgagcggcagcagcgagatcggccagggcgcctgggtgaaggccaagatgctgaccaaggacagaagactgagcaagaagaagaagaacacccagggcctgcaggtgcccatcatcaccgtgaacgcctgcagccagagcgaccagctgaaccccgagcccggcgagaacagcatcagcgaggaggagtacagcaagaactggttcaccgtgagcaagttcagccacaccggcgtggagccctacatccaccagaagatgaagaccaaggagatcggccagtgcgccatccagatcagcgactacctgaagcagagccaggaggacctgagcaagaacagcctgtggaacagcagaagcaccaacctgaacagaaacagcctgcacgtgatcaagatgcccatcagcagcctgatcagcgagatcagcgccagcctgaagagcccccaggagccccaccaccactacagcgccatcgagagaaacaacctgatgagactgagccagaccatccccttcacccccgtgcagctgttcgccggcgaggagatcaccgtgtacagactggaggagagcagccccctgaacctggacaagagcatgagcagctggagccagagaggcagagccgccatgatccaggtgctgagcagagaggagatggacggcggcctgagaaaggccatgagagtggtgagcacctggagcgaggacgacatcctgaagcccggccaggtgttcatcgtgaagagcttcctgcccgaggtggtgagaacctggcacaagatcttccaggagagcaccgtgctgcacctgtgcctgagagagatccagcagcagagagccgcccagaagctgatctacaccttcaaccaggtgaagccccagaccatcccctacacccccagattcctggaggtgttcctgatctactgccacagcgccaaccagtggctgaccatcgagaagtacatgaccggcgagttcagaaagtacaacaacaacaacggcgacgagatcacccccaccaacaccctggaggagctgatgctggccttcagccactggacctacgagtacaccagaggcgagctgctggtgctggacctgcaggccctgtggttctgggacagcatgctgaaggccagactgggcggctggagaatgtag

SEQ ID NO: 194331 - DNA, 6081 bp, Artificial Sequence
  derived and/or modified sequence
atgaaggagcagcccgtgctggagagactgcagagccagaagagctggatcaagggcgtgttcgacaagagagagtgcagcaccatcatccccagcagcaagaacccccacagatgcacccccgtgtgccaggtgtgccagaacctgatcagatgctactgcggcagactgatcggcgaccacgccggcatcgactacagctggaccatcagcgccgccaagggcaaggagagcgagcagtggagcgtggagaagcacaccaccaagagccccaccgacaccttcggcaccatcaacttccaggacggcgagcacacccaccacgccaagtacatcagaaccagctacgacaccaagctggaccacctgctgcacctgatgctgaaggagtggaagatggagctgcccaagctggtgatcagcgtgcacggcggcatccagaacttcaccatgcccagcaagttcaaggagatcttcagccagggcctggtgaaggccgccgagaccaccggcgcctggatcatcaccgagggcatcaacaccggcgtgagcaagcacgtgggcgacgccctgaagagccacagcagccacagcctgagaaagatctggaccgtgggcatccccccctggggcgtgatcgagaaccagagagacctgatcggcaaggacgtggtgtgcctgtaccagaccctggacaaccccctgagcaagctgaccaccctgaacagcatgcacagccacttcatcctgagcgacgacggcaccgtgggcaagtacggcaacgagatgaagctgagaagaaacctggagaagtacctgagcctgcagaagatccactgcagaagcagacagggcgtgcccgtggtgggcctggtggtggagggcggccccaacgtgatcctgagcgtgtgggagaccgtgaaggacaaggaccccgtggtggtgtgcgagggcaccggcagagccgccgacctgctggccttcacccacaagcacctggccgacgagggcatgctgagaccccaggtgaaggaggagatcatctgcatgatccagaacaccttcaacttcagcctgaagcagagcaagcacctgttccagatcctgatggagtgcatggtgcacagagactgcatcaccatcttcgacgccgacagcgaggagcagcaggacctggacctggccatcctgaccgccctgctgaagggcaccaacctgagcgccagcgagcagctgaacctggccatggcctgggacagagtggacatcgccaagaagcacatcctgatctacgagcagcactggaagcccgacgccctggagcaggccatgagcgacgccctggtgatggacagagtggacttcgtgaagctgctgatcgagtacggcgtgaacctgcacagattcctgaccatccccagactggaggagctgtacaacaccaagcagggccccaccaacaccctgctgcaccacctggtgcaggacgtgaagcagcacaccctgctgagcggctacagaatcaccctgatcgacatcggcctggtggtggagtacctgatcggcagagcctacagaagcaactacaccagaaagcacttcagagccctgtacaacaacctgtacagaaagtacaagcaccagagacacagcagcggcaacagaaacgagagcgccgagagcaccctgcacagccagttcatcagaaccgcccagccctacaagttcaaggagaagagcatcgtgctgcacaagagcagaaagaagagcaaggagcagaacgtgagcgacgaccccgagagcaccggcttcctgtacccctacaacgacctgctggtgtgggccgtgctgatgaagagacagaagatggccatgttcttctggcagcacggcgaggaggccaccgtgaaggccgtgatcgcctgcatcctgtacagagccatggcccacgaggccaaggagagccacatggtggacgacgccagcgaggagctgaagaactacagcaagcagttcggccagctggccctggacctgctggagaaggccttcaagcagaacgagagaatggccatgaccctgctgacctacgagctgagaaactggagcaacagcacctgcctgaagctggccgtgagcggcggcctgagacccttcgtgagccacacctgcacccagatgctgctgaccgacatgtggatgggcagactgaagatgagaaagaacagctggctgaagatcatcatcagcatcatcctgccccccaccatcctgaccctggagttcaagagcaaggccgagatgagccacgtgccccagagccaggacttccagttcatgtggtactacagcgaccagaacgccagcagcagcaaggagagcgccagcgtgaaggagtacgacctggagagaggccacgacgagaagctggacgagaaccagcacttcggcctggagagcggccaccagcacctgccctggaccagaaaggtgtacgagttctacagcgcccccatcgtgaagttctggttctacaccatggcctacctggccttcctgatgctgttcacctacaccgtgctggtggagatgcagccccagcccagcgtgcaggagtggctggtgagcatctacatcttcaccaacgccatcgaggtggtgagagagatctgcatcagcgagcccggcaagttcacccagaaggtgaaggtgtggatcagcgagtactggaacctgaccgagaccgtggccatcggcctgttcagcgccggcttcgtgctgagatggggcgacccccccttccacaccgccggcagactgatctactgcatcgacatcatcttctggttcagcagactgctggacttcttcgccgtgaaccagcacgccggcccctacgtgaccatgatcgccaagatgaccgccaacatgttctacatcgtgatcatcatggccatcgtgctgctgagcttcggcgtggccagaaaggccatcctgagccccaaggagccccccagctggagcctggccagagacatcgtgttcgagccctactggatgatctacggcgaggtgtacgccggcgagatcgacgtgtgcagcagccagcccagctgcccccccggcagcttcctgacccccttcctgcaggccgtgtacctgttcgtgcagtacatcatcatggtgaacctgctgatcgccttcttcaacaacgtgtacctggacatggagagcatcagcaacaacctgtggaagtacaacagatacagatacatcatgacctaccacgagaagccctggctgcccccccccctgatcctgctgagccacgtgggcctgctgctgagaagactgtgctgccacagagccccccacgaccaggaggagggcgacgtgggcctgaagctgtacctgagcaaggaggacctgaagaagctgcacgacttcgaggagcagtgcgtggagaagtacttccacgagaagatggaggacgtgaactgcagctgcgaggagagaatcagagtgaccagcgagagagtgaccgagatgtacttccagctgaaggagatgaacgagaaggtgagcttcatcaaggacagcctgctgagcctggacagccaggtgggccacctgcaggacctgagcgccctgaccgtggacaccctgaaggtgctgagcgccgtggacaccctgcaggaggacgaggccctgctggccaagagaaagcacagcacctgcaagaagctgccccacagctggagcaacgtgatctgcgccgaggtgctgggcagcatggagatcgccggcgagaagaagtaccagtactacagcatgcccagcagcctgctgagaagcctggccggcggcagacacccccccagagtgcagagaggcgccctgctggagatcaccaacagcaagagagaggccaccaacgtgagaaacgaccaggagagacaggagacccagagcagcatcgtggtgagcggcgtgagccccaacagacaggcccacagcaagtacggccagttcctgctggtgcccagcaacctgaagagagtgcccttcagcgccgagaccgtgctgcccctgagcagacccagcgtgcccgacgtgctggccaccgagcaggacatccagaccgaggtgctggtgcacctgaccggccagacccccgtggtgagcgactgggccagcgtggacgagcccaaggagaagcacgagcccatcgcccacctgctggacggccaggacaaggccgagcaggtgctgcccaccctgagctgcacccccgagcccatgaccatgagcagccccctgagccaggccaagatcatgcagaccggcggcggctacgtgaactgggccttcagcgagggcgacgagaccggcgtgttcagcatcaagaagaagtggcagacctgcctgcccagcacctgcgacagcgacagcagcagaagcgagcagcaccagaagcaggcccaggacagcagcctgagcgacaacagcaccagaagcgcccagagcagcgagtgcagcgaggtgggcccctggctgcagcccaacaccagcttctggatcaaccccctgagaagatacagacccttcgccagaagccacagcttcagattccacaaggaggagaagctgatgaagatctgcaagatcaagaacctgagcggcagcagcgagatcggccagggcgcctgggtgaaggccaagatgctgaccaaggacagaagactgagcaagaagaagaagaacacccagggcctgcaggtgcccatcatcaccgtgaacgcctgcagccagagcgaccagctgaaccccgagcccggcgagaacagcatcagcgaggaggagtacagcaagaactggttcaccgtgagcaagttcagccacaccggcgtggagccctacatccaccagaagatgaagaccaaggagatcggccagtgcgccatccagatcagcgactacctgaagcagagccaggaggacctgagcaagaacagcctgtggaacagcagaagcaccaacctgaacagaaacagcctgcacgtgatcaagatgcccatcagcagcctgatcagcgagatcagcgccagcctgaagagcccccaggagccccaccaccactacagcgccatcgagagaaacaacctgatgagactgagccagaccatccccttcacccccgtgcagctgttcgccggcgaggagatcaccgtgtacagactggaggagagcagccccctgaacctggacaagagcatgagcagctggagccagagaggcagagccgccatgatccaggtgctgagcagagaggagatggacggcggcctgagaaaggccatgagagtggtgagcacctggagcgaggacgacatcctgaagcccggccaggtgttcatcgtgaagagcttcctgcccgaggtggtgagaacctggcacaagatcttccaggagagcaccgtgctgcacctgtgcctgagagagatccagcagcagagagccgcccagaagctgatctacaccttcaaccaggtgaagccccagaccatcccctacacccccagattcctggaggtgttcctgatctactgccacagcgccaaccagtggctgaccatcgagaagtacatgaccggcgagttcagaaagtacaacaacaacaacggcgacgagatcacccccaccaacaccctggaggagctgatgctggccttcagccactggacctacgagtacaccagaggcgagctgctggtgctggacctgcagggcgtgggcgagaacctgaccgaccccagcgtgatcaagcccgaggtgaagcagagcagaggcatggtgttcggccccgccaacctgggcgaggacgccatcagaaacttcatcgccaagcaccactgcaacagctgctgcagaaagctgaagctgcccgacctgaagagaaacgactacagccccgagagaatcaacagcaccttcggcctggagatcaagatcgagagcgccgaggagccccccgccagagagaccggcagaaacagccccgaggacgacatgcagctgtag

SEQ ID NO: 194332 - DNA, 6069 bp, Artificial Sequence
  derived and/or modified sequence
atgaaggaacagccagtgctggaacgattgcagagccagaagagttggattaaaggcgttttcgataaaagggagtgctccacaatcatcccttccagcaaaaacccccacaggtgcactccagtgtgccaggtttgccagaatttgattcgctgctattgcggtaggctgattggcgaccacgccggcatcgattattcttggacaatttccgcggctaaaggtaaggagagtgagcagtggagcgttgaaaagcacactacgaaatcacctaccgatacttttggaaccattaactttcaggatggggaacatacccaccacgcgaagtatatccgaacgtcttatgacacaaagttagatcacctactgcacctcatgcttaaagagtggaagatggaattacctaagcttgtgatcagcgtgcacgggggcatccagaattttaccatgccctccaagttcaaagagatcttttcccagggactggtgaaagctgcagaaaccaccggcgcctggattataaccgagggcattaacacaggcgtttccaaacacgttggagacgccctgaaatcccactcaagtcattccctacgcaagatttggaccgtaggaatccctccctggggtgttatcgagaatcagagggacctcataggcaaggacgtagtgtgtctgtatcagaccctggataacccactctctaaactgactacactgaactctatgcatagccatttcattttgtcagacgacggcaccgtcggcaagtacgggaacgagatgaaacttcgcaggaatctcgaaaagtacctaagtttgcagaaaattcactgccggtctcgccagggcgttcccgtcgttgggctagtggtagagggcgggccaaacgtcattctgtcagtctgggagacggtaaaagacaaggatcccgttgtggtgtgcgaggggacaggacgggctgcagatcttctggcattcactcataaacaccttgcggacgaggggatgcttaggcctcaggtgaaggaagagataatttgtatgattcagaatacattcaacttttcccttaagcagtccaagcatctcttccagatccttatggaatgcatggtccatagagattgcattacgatctttgatgcggacagcgaagaacagcaggatcttgatcttgccattctgactgctttactcaagggtaccaacctgtccgccagcgagcagttaaacctggcaatggcgtgggatagggtagacatcgcgaagaagcacattttgatctacgagcagcattggaaacctgatgccttagagcaggcgatgagtgacgctcttgtgatggatcgggttgatttcgtgaagctgctgattgagtatggtgtgaacctacaccggtttctgacaattcccagactggaggagctgtataatacaaaacagggtcctaccaacaccctgttgcatcatctggtgcaggacgtgaagcaacataccctcctgtcaggctacaggatcaccctgatcgacatagggctggttgtggaatacctgataggacgcgcgtatcgcagcaattataccaggaagcactttcgggcactgtacaataacttgtatcgaaaatataaacatcagaggcatagcagcggtaatcgaaacgaaagtgccgaaagcaccctgcatagccagtttatccgtactgcccaaccatacaagttcaaagagaagtctattgtccttcataagtctaggaaaaaatctaaagaacagaacgttagcgatgacccggagtccaccggattcctctatccctacaatgatctgctggtgtgggcggtcttgatgaaaagacagaagatggccatgttcttctggcagcacggcgaagaagctactgtcaaagctgtgattgcttgtattttatacagggcaatggcccacgaagctaaagagtctcacatggttgacgacgcctcagaggaactcaagaattactctaagcagttcggccaattggccctggatctgttggagaaggcgttcaaacagaatgagagaatggcaatgactttactcacttacgagttgaggaattggagcaattcaacctgcctcaaactggctgtgtctggtggcttgaggccattcgtgtcacatacctgcacacagatgctgctgactgatatgtggatgggtagactcaagatgcgcaagaactcttggctgaagatcataatcagcatcattctacctcccacgatcctgaccctcgaattcaaaagcaaggcagaaatgagtcacgtcccccagtctcaggacttccaatttatgtggtattacagtgatcagaatgcaagctcaagcaaggagtctgcgtctgtcaaggaatatgacctggaacgcggtcatgacgagaagttggatgaaaaccagcactttgggttggaatccggacatcagcacctgccctggacacggaaagtgtacgagttctactccgctcccatagtcaagttctggttctataccatggcctacctggcattcctcatgctgttcacatacaccgttctggtggaaatgcaaccacagccatccgtccaggagtggttggtctctatctatatcttcactaacgcgatcgaggtcgtgagagaaatctgcatcagtgaacctggcaaatttacgcagaaggtgaaggtgtggataagcgaatactggaatttaaccgagaccgtggctatcggcttgttttccgctggctttgtgctgaggtggggggatccaccttttcatactgctggccgattaatttattgcatcgatatcatcttctggttttccaggctcctggacttcttcgctgtcaatcagcatgctggcccatacgtaactatgatcgctaagatgaccgctaacatgttctacatcgtgatcattatggcaatcgtgctgctcagtttcggagtcgcccgcaaggctattctgagcccaaaggaacctccctcatggagcctcgcgcgggatattgtgtttgagccctattggatgatttacggagaggtctacgcgggcgagatcgacgtctgctcctctcagcccagctgcccgccaggatctttcctgactccttttctgcaggccgtctatctctttgtgcagtatattatcatggtaaatctcttgatcgcctttttcaacaatgtctacttggatatggagagcattagcaacaatctttggaaatacaacagatataggtatataatgacatatcacgagaagccttggctgcccccacctctcattctcctctcccatgtgggattactcttaaggagattgtgttgtcaccgtgctccccatgatcaggaagaaggcgacgttggcttaaagctgtatctttccaaggaagacctgaagaaacttcatgacttcgaagagcaatgcgtcgagaagtacttccacgaaaagatggaggatgtgaattgtagttgtgaggagaggattcgggtgacctcagaacgagtgacggaaatgtacttccagttaaaggagatgaatgaaaaagtgagcttcattaaagattctcttctctccctcgatagtcaagtggggcaccttcaggacctcagcgctctcaccgtcgataccctgaaagttctgtcagccgtagatactttgcaggaagatgaggccctattggcaaagaggaaacactccacctgcaagaagctcccccattcctggtctaacgtaatctgcgctgaggtacttggctcgatggagatcgccggggaaaagaaataccaatactattccatgccctctagtttactgaggtccctggctggaggacggcaccctccacgtgtgcaacgcggcgctctgctggaaattacaaactccaaacgagaggcaaccaacgtgcggaacgatcaagaacgccaagagacacagagctcaatagttgtctctggagtgtctcccaacagacaggcacactccaagtatggacagtttttgctcgttccctccaatctgaagcgagttccatttagcgcagaaacagtgctcccactgtcacggccttctgtgcccgatgtgttagccacagaacaggatattcagaccgaagtcctggtgcacctgacggggcaaacgccggttgtttccgactgggcctctgtggatgaaccaaaagaaaaacacgagcctattgctcatcttctggacggacaggataaagcggagcaggtcctgccaactctctcttgcaccccagaaccgatgactatgtctagcccactctcacaggctaagatcatgcagacaggcggagggtacgtgaattgggccttctccgagggtgatgaaacaggggtgttctccatcaagaagaagtggcagacatgtttgcctagcacatgtgatagcgactcttctcgcagcgagcagcaccagaaacaggcccaggattcgtcactgagtgataactcgaccagatcagcccagtcctctgaatgcagcgaggtgggtccatggctacagcctaatacaagtttctggattaatcccctgaggcgatatcggcctttcgctcggagccacagtttccggttccacaaagaggaaaagcttatgaaaatttgcaagataaagaacctgtctggttcgagcgagataggtcaaggcgcctgggtaaaggctaaaatgctcaccaaggataggaggctgtcaaaaaagaaaaagaatacccaggggctgcaggtacctataatcactgttaacgcgtgttcacagagcgaccagctgaatccagagccaggggagaatagtatttccgaggaggaatatagtaaaaactggttcactgtaagtaaattctcacacaccggcgtggaaccgtacatccaccagaagatgaaaactaaggagataggacaatgcgccattcagattagtgactacctgaaacagtcccaggaggacctgagtaaaaactccctgtggaacagccggtctactaatcttaaccgaaacagtctgcttaagagtagtataggcgtggacaagatttctgcatcactgaaaagcccccaggagccccaccaccattatagtgccatagagaggaacaacctgatgcggctatcgcagactattcccttcacccccgtccagctattcgccggcgaggaaatcactgtctaccgcctggaggaatcctcaccactgaacctggataagtccatgtcctcatggtcgcagaggggccgagctgcgatgatacaggtgctgtcaagggaagaaatggacggcggcctccgtaaagctatgcgcgtagtgtccacatggagcgaagatgatatcttaaagccagggcaggtgttcatagtcaagagctttctgcctgaagtcgttcgcacttggcacaagattttccaagagagtacggtgctgcacctgtgcctgcgggaaatacagcagcagcgggcggcacaaaaactcatttatacattcaaccaagtaaaaccacagacaattccctacactcctaggtttctggaggtatttttgatctattgtcattcagccaatcagtggcttaccatcgaaaaatatatgacgggggaattcagaaagtataataacaataatggggatgaaataacgcccaccaacacactcgaggagctcatgttggccttttcacactggacttatgaatacactcgaggggagttacttgtgttggacctgcagggcgtcggcgagaacctgactgacccgagcgtgatcaagccagaggtgaagcaatctaggggaatggtcttcggccctgccaatctcggagaagacgcaatccgaaattttatcgccaaacatcactgtaattcctgttgtcggaaattgaaactgccagacctgaaacgtaacgactattcacctgagagaattaacagtacatttggcttggaaataaaaattgagtccgctgaggaacctccagcccgggagaccggaaggaactcgcccgaggacgacatgcagttatag

SEQ ID NO: 194333 - DNA, 5844 bp, Artificial Sequence
  derived and/or modified sequence
atgaaggagcaacctgtgctggagcgtctgcagagtcagaagagctggatcaaaggagtcttcgataagcgcgagtgcagcactatcatcccgagtagcaagaacccacataggtgtaccccggtgtgccaggtgtgtcagaacctgataaggtgttattgtggtagactcattggtgaccatgccgggatagactatagctggactatctcagccgctaaaggcaaggagtccgagcaatggtctgtggagaaacacacaactaagtcacctacagatacatttggaaccattaattttcaagacggggagcacacgcaccatgctaaatatattagaacctcatacgatactaagctggatcatctcctccacttgatgctgaaggagtggaaaatggaactgcccaagttagtaatctccgtccacggcggcatacagaactttactatgccttctaaattcaaagagattttcagccagggtctagtcaaggctgctgaaacaaccggcgcttggataattacagaggggattaacaccggagtgagcaaacacgtgggagatgccctgaaaagccatagctcgcacagtctaaggaaaatatggactgtgggaattcctccatggggggtgattgagaatcagagagacctgattggaaaggatgtggtgtgcctgtaccaaacacttgataacccgttaagcaagctgacaacactgaacagcatgcatagccatttcattctgtctgatgacggcacagtggggaagtacgggaacgagatgaagctaagacggaacctcgaaaagtatctgagtctccaaaaaatacattgccgaagtaggcagggagttcctgtcgtaggtctggtcgttgaaggtgggcccaatgttatcctgagtgtctgggagacagtgaaagacaaggaccccgttgtggtttgcgagggaaccgggagagcagctgacctgctggccttcacacacaaacaccttgccgatgaggggatgcttcggccccaggttaaggaggaaatcatttgtatgattcagaacacctttaatttcagcctgaagcagagcaagcatctttttcagatactcatggagtgtatggtccacagggactgtatcacaatctttgacgccgactctgaagagcagcaggacctggacctggctatcctgacagcgttgcttaaagggacgaatctgagtgcttctgaacagctgaacctagccatggcttgggacagagtggacattgccaagaaacacattttgatttatgaacaacattggaaacccgatgccctcgagcaggctatgtccgatgctctggtgatggatcgcgtggacttcgtgaagctgttgattgagtatggagtcaatctgcatagattcctgaccattcccaggctcgaggagctgtataataccaagcaaggtccgaccaacactctattgcatcacctcgtacaggacgtgaaacaacacacactcctctccgggtaccggataaccctcatagacatcggactggttgtggagtacctgattgggcgagcttaccgcagcaattatacaaggaagcactttcgcgccctctacaacaatctgtatcgcaaatataagcaccagcgacatagtagtggaaatcgaaatgagagtgccgagtcaactctccacagtcagttcattcgtaccgctcaaccatacaagttcaaggaaaagagtatcgtgctccataagtcacggaaaaagtcaaaggaacaaaacgtgtctgatgaccctgaatctaccggtttcttatacccctacaatgatctgctggtatgggcagtactaatgaagaggcagaaaatggccatgtttttttggcagcacggggaagaagccacagttaaggccgtcatcgcttgtatcctgtacagagctatggcacatgaggctaaggagagccatatggtagatgatgcttcagaagagttaaagaactattctaagcagttcggtcagttggcactcgacctcttagagaaggcttttaaacagaatgagcgcatggccatgaccttactgacttacgagctgcggaattggtcaaacagcacttgtctgaaactggccgttagtggaggtctgagaccattcgtgtcccacacatgtacgcagatgctgctgactgatatgtggatgggacggctaaaaatgcgcaaaaactcctggctgaagattatcattagtatcattcttcccccaacaatcttgactctagaattcaagtctaaggccgaaatgagccacgtcccccagagccaggattttcaattcatgtggtactatagcgaccagaacgcaagcagcagcaaggagagcgcctcagtgaaagagtacgacttggagagagggcacgacgaaaaacttgacgaaaaccagcattttggtctggaatctgggcatcagcacctcccttggacaaggaaagtttacgagttttatagcgctcctatcgtcaaattttggttctatactatggcctacttggcattcctcatgctgtttacttacaccgttctggtcgaaatgcaacctcagcctagtgttcaagagtggttggtgtctatttacatcttcacaaacgctatcgaagtggtacgggaaatttgtatcagtgagccggggaaatttacacagaaagtaaaggtgtggatcagtgaatactggaatctgactgagacagtcgctattggcctctttagcgctgggtttgtcctgcgctggggagaccccccatttcacactgccgggcgtttgatttactgcatagacattattttctggtttagcagactgttggattttttcgcagtaaatcagcatgcaggaccatacgttacgatgattgccaagatgaccgccaatatgttctatattgtcattattatggccatcgtgctcctgtcgtttggcgtggcgcgcaaggccatcttaagccccaaagaaccaccctcttggtcactggcgagagacatagtgttcgagccttattggatgatctatggcgaggtgtacgcaggggagatcgacgtgtgtagctcacagccaagctgtcccccaggaagctttttgacgccattccttcaagccgtatatctgttcgtgcagtacattatcatggtgaatcttttgattgcttttttcaataacgtgtacctcgacatggagtctattagcaacaatttatggaagtacaataggtatcggtacatcatgacataccacgagaagccgtggctccctccgccattgattctcttgtcccacgtggggctgctcctaagacggctttgctgccaccgcgctcctcacgaccaggaagaaggagacgtcgggttaaagctgtacctaagcaaagaggatttgaaaaagctgcatgattttgaagagcagtgtgttgagaaatacttccatgagaagatggaggatgtcaattgtagttgcgaagagcggattcgtgtgacctctgagcgtgtgactgaaatgtacttccagctgaaggagatgaacgaaaaagtgtccttcatcaaagactccctgttgagcctggacagtcaagtcggccatttgcaagacttaagcgctctcactgtagatacactcaaagttctctctgctgtcgatacattgcaagaagatgaagcactcctggcaaaaagaaagcacagtacctgcaagaagttaccgcacagctggagcaatgtgatctgcgctgaggttcttggatcaatggagattgccggcgagaaaaagtaccagtattatagcatgccctcttcgcttctccggagtctggctggcggccgccacccacctcgcgtgcagcgaggcgctctcttggagatcactaactccaaacgggaggccactaatgttcgaaacgatcaagagcgtcaggagactcagtcttccatcgtggtgtcaggggtgagcccgaatcgccaggctcacagcaaatacgggcaattccttctggttcctagcaatcttaaacgcgtccctttcagcgcggaaaccgtcctacccctgtctcggcccagtgtgccagatgtcctggctaccgagcaggatattcagactgaggttctagtccacctgaccggccaaacgcctgtggtctctgactgggcatctgtggacgaacctaaagagaagcatgagccgattgcacacctgttagacggccaggataaagccgagcaggtgctgcctacactttcgtgtactcccgaacctatgacaatgagttcgcccctctcacaagccaaaataatgcagactggagggggttacgtgaactgggcctttagtgagggggacgaaacaggagtgttttcaattaaaaaaaagtggcaaacgtgcttaccctcaacctgcgacagtgattcatcacgtagcgagcaacaccagaaacaggcgcaggactcctccttatcagataacagcacgcggtctgcccagagcagcgagtgctcagaggtgggaccctggctgcagcccaacacttcattttggatcaatcctctgagacgttatagaccctttgccagatcacactctttcaggtttcacaaggaggagaagctgatgaaaatctgcaaaattaagaacctctcgggcagctctgagattgggcagggcgcctgggttaaagctaagatgctgacgaaggacagacgactctccaagaaaaagaagaacacgcagggtctacaggtgccaatcatcactgtgaatgcctgctcacagtctgaccagctcaacccagagcctggcgagaacagcatcagtgaggaggagtacagcaagaattggtttaccgtttcaaagttcagccatacgggggtggagccatatatacaccaaaagatgaagactaaggagatcggccagtgtgccatccagatctccgactatctcaagcaatcccaagaagatctgagcaagaacagtctgtggaatagcaggagcaccaatcttaacagaaacagtctgcatgtgattaagatgccaatctccagccttatctctgaaatctctgccagtcttaaatcgccccaggaaccgcaccaccattatagtgcaattgagaggaacaacttaatgcggctgtcacaaaccattcccttcacgcccgtgcaactgttcgccggcgaagaaataaccgtgtaccgcttggaagagtcctcacctttaaatctcgataagagcatgtcttcctggagccagcgggggcgcgccgcaatgattcaggtgctatcaagagaagagatggacggcgggctgaggaaagccatgcgggtggtgagtacctggtccgaggacgacattctgaaaccgggccaggtgtttatcgtaaaatccttcttgcctgaagtggtaagaacatggcacaaaatattccaggaatcaaccgtccttcatctctgcctgcgagaaatccaacaacagagagcagcacagaagctcatatacacatttaatcaagtaaaaccccagaccattccgtatactcctcgattcctggaggtgtttctaatctactgtcattccgccaaccagtggctgaccattgagaagtacatgacaggagaatttaggaagtacaataataataatggagatgagattactcccacaaataccctggaggaactaatgctggccttctcgcactggacgtatgaatatactcggggggaactgctggtgttagatctccaggcactttggttctgggatagcatgctcaaggcacgcctcggagggtggaggatgtag

SEQ ID NO: 194334 - DNA, 6081 bp, Artificial Sequence
  derived and/or modified sequence
atgaaggagcagccagtgttggaacgcctgcagtctcagaaaagttggataaagggagtgtttgataagcgggaatgttcaacgattatcccatctagtaagaatccacacaggtgcacacccgtgtgtcaggtgtgtcagaatctcatcagatgctactgtgggaggctaattggggatcacgcgggtatagactacagctggaccattagtgccgctaaagggaaagagtcagagcagtggagcgtggaaaaacacacaaccaaaagccctacagataccttcggcaccattaattttcaggatggagagcacactcatcatgccaagtatattcggacctcctacgatacgaagcttgaccatttgctgcacttaatgcttaaggagtggaagatggaactgcctaagttggtcatttcggttcacggcggcattcagaattttactatgccctctaagtttaaagagatcttctctcagggcctggtaaaggccgccgagacaacgggggcgtggatcattaccgaaggcatcaatacaggtgtctctaaacacgtgggtgatgctctgaagagccatagcagccatagtctgcgcaagatctggaccgtggggatcccaccctggggcgtcatcgaaaaccagagagacctgatcggtaaggacgtcgtttgtctctaccagactctggataatcccctgtctaagctgacaaccctcaattccatgcactcgcatttcatactgagcgatgatgggacagtgggcaagtatgggaatgagatgaaactccggaggaatctcgaaaagtacctgtcgctacagaaaatacactgtaggtcaaggcagggggtgcccgtcgtgggcctcgtggtggaaggtggccccaacgtgatcctgtctgtctgggagactgtgaaggataaggatcctgtagtggtttgcgaaggaacaggtagagcagccgatctcctggccttcactcataaacacctcgctgatgagggcatgctcagaccacaagttaaagaggagattatctgcatgatccagaatacctttaacttttccctgaaacagagtaagcatctgtttcagatcctcatggaatgtatggtccaccgggactgtatcactatcttcgatgcagacagcgaggagcagcaagacctggatctggccatcctcacagctctgctgaaaggcacaaacctaagcgcctcagagcaactgaatctggcgatggcatgggacagagtggacatagcgaagaagcacattttgatctatgaacagcactggaagcccgatgctttggagcaagcaatgtcggacgcgctggtgatggacagagtcgactttgttaaactgctgatcgagtacggggtcaacctgcaccggttcctaacaatcccacgacttgaggagttatacaacaccaagcaggggccaacgaacacgctgctccaccatcttgtccaagatgttaagcaacacacactgctttctggctaccggatcacacttatcgatattgggttggttgtggagtacctaatcggccgcgcatatcgtagcaactatacccgtaaacatttcagagccctatataataatctgtatagaaaatataagcaccagcgacacagctcaggtaataggaacgaatctgccgagagcactttgcatagtcagttcatccgtaccgcccagccatacaagttcaaggaaaagagcattgtcctgcacaagtcccgaaagaagtctaaagagcaaaacgtcagtgacgacccagagtccaccgggttcttatacccttacaatgacctactggtgtgggcagtactaatgaagcgtcagaagatggccatgtttttttggcagcacggtgaggaggccactgtcaaagcagtgattgcgtgtattctctatcgcgcaatggcacacgaggctaaagagagccatatggtcgacgatgcctctgaggaattaaaaaactactccaagcagttcggccaactggctctagatctactggagaaggctttcaaacaaaacgagagaatggctatgacgctactgacttacgaactgaggaactggtctaactccacctgtctaaagctagccgtgtcaggaggtttacgaccttttgtatcacatacctgtacccaaatgttattgaccgatatgtggatgggaaggttgaaaatgaggaagaacagttggttaaaaataattatcagtatcatactgcctccaaccatccttacactagaattcaagtccaaggccgagatgtcacacgttccccaatcccaggactttcagtttatgtggtattattctgaccagaacgcctcctcaagcaaagagagcgcttcggttaaggagtatgacttagagcgaggccatgacgagaaactggacgagaatcagcattttggcctagagagcggacatcagcacttaccgtggacacgaaaggtgtatgagttttatagcgcacctattgtcaagttctggttttacacaatggcatacctggcatttctcatgctgttcacttacacggtgttagtggagatgcagcctcagccatccgtgcaggagtggctggtatcaatttatatattcaccaatgcaattgaggttgtccgcgaaatttgcatttctgagccaggtaaattcacacagaaggttaaggtctggattagcgagtactggaacctcacggaaacagttgcgataggccttttttccgctggctttgtgctgcggtggggagatcctcctttccatacagcgggtaggctgatctactgcatcgacatcatcttttggttctctcggctgctggactttttcgccgtcaaccagcacgcgggtccatatgtgaccatgattgcaaagatgacagctaatatgttctacatcgtgataatcatggcgattgtcttactgagctttggtgtggcaagaaaggccatcttatctccaaaagagcccccaagctggtccctggctagagatatcgtttttgagccttattggatgatttacggggaggtctatgccggcgaaatcgacgtatgttcctctcagccttcatgtccaccgggaagcttccttaccccattcctccaggccgtgtatttgttcgtacagtatataattatggtcaaccttcttattgccttcttcaataatgtttatctggatatggagagtatcagcaacaacctgtggaagtacaatcgctacagatatatcatgacctatcacgaaaaaccatggctcccaccacctctgatccttctgagccacgttggactcctgctgcgtaggctctgctgccatcgtgcaccacatgaccaggaggaaggagatgtaggcctgaaactttatctgtccaaagaggacctgaaaaaactgcacgattttgaggagcaatgtgtggagaagtatttccacgaaaagatggaagacgtgaattgttcatgtgaagagagaatacgagtcactagtgaacgagtgaccgagatgtacttccagctaaaagagatgaacgagaaggtatcctttattaaggattcccttttgtccctggactcacaggtagggcatctccaagatctgagcgcgttgactgtagacactctcaaggtgctctcggccgtagacacactccaggaagacgaggcgctgttggctaaacggaagcattccacatgtaaaaagttgccgcattcctggagtaacgtcatctgcgcggaggtgctcggctcaatggagattgccggcgagaagaaatatcagtattactcaatgccctcctccctgcttagaagccttgccggcggcaggcatccgccgagggtccaaagaggagcactccttgagataaccaactccaagagggaggctaccaatgtgcgaaatgatcaggaacgccaagagacacaatcctcaattgttgtgtcaggcgtgtctcccaataggcaggcacactccaagtatggccaattcttactcgtcccaagcaacctgaagagagtacctttctcagcagagacggtcctgccgctgagcagacctagcgtgcctgacgttcttgcaactgagcaggatatccagacagaggtactagtccacctcaccgggcaaacacccgtcgtctcggactgggcttcggttgatgagcctaaagagaagcacgagcctatagcgcaccttctcgacgggcaggacaaggctgagcaggtgcttcctaccctgtcgtgcacgcccgagcccatgacgatgtcctctccccttagtcaggctaaaattatgcagaccggcggtggttacgtgaactgggctttcagtgagggtgatgaaaccggggtcttctccattaagaaaaagtggcagacatgtcttccttccacttgcgatagcgactctagtcgctcagaacagcaccagaaacaagcacaggattcttctttgagtgacaactccacccgtagcgcccagagcagcgaatgttcagaggtcggcccgtggctgcaacccaacacctccttctggatcaaccctttgaggcgttacagaccctttgcgagatcacacagttttagatttcacaaagaggaaaaacttatgaaaatctgtaagatcaagaatctctccggcagcagtgagatcggtcagggcgcttgggtcaaggcaaagatgctgaccaaagaccgccgcctgagcaaaaagaaaaagaatactcaaggtctgcaggtcccaataatcactgtcaacgcctgtagccaaagtgaccagttgaaccctgagcccggtgaaaattccatctcagaggaggagtactccaagaattggttcactgttagtaaattctcccacacgggcgtcgagccctatatccaccagaagatgaagacaaaagagatcggacagtgtgccatccagatctctgactacctgaagcagtcgcaggaagatctcagcaaaaatagcctgtggaacagccggagtactaatctcaacagaaactcattacatgtgatcaaaatgccaatttccagcctgatttctgaaatatctgccagtctgaaaagcccgcaggaaccccaccaccattatagcgcgattgaaaggaataatctgatgcgtctgtctcagactatccccttcacgcctgttcaactgttcgctggtgaagaaatcaccgtttaccgcctggaggagagcagccccctgaatctagataaatctatgtcctcgtggagccagcggggaagggcggctatgatacaggtgctgtctagggaagaaatggacggcggattaagaaaggcaatgagagtggtttccacttggagcgaagatgatattctgaagccaggacaagtttttattgtgaaaagttttcttccagaagtcgtgagaacctggcataagatctttcaggaatcaaccgtgttacacttatgtttaagggagatccagcagcaacgcgctgcccaaaagctgatctatacgtttaatcaagttaagcctcagacaattccttatacgccgcgctttctggaggtgtttctcatctactgtcattcagcgaatcagtggcttacgatcgaaaaatatatgaccggcgaattccgtaaatataataacaacaatggggacgagatcacacctaccaatacactagaagaactcatgctggctttcagtcactggacctacgagtatacacgcggcgagctgctcgtgctggacctacagggtgtgggtgagaatctcactgatcccagcgttataaagcccgaagtcaagcaaagtagagggatggttttcggacccgctaacctgggcgaggatgcaattcggaatttcatagccaaacatcattgcaacagttgttgtcgaaagctgaaattgcccgatctgaagcgaaacgattactcccccgaaagaattaatagcacctttggtctagagatcaagatagaaagtgctgaggaaccccctgctcgcgaaacaggccgcaatagccccgaagatgacatgcagctttag

SEQ ID NO: 194335 - DNA, 6069 bp, Artificial Sequence
  derived and/or modified sequence
atgaaggagcagcctgtgctggagcggctgcagagccagaagtcctggatcaagggcgtgtttgacaagagagaatgttccaccatcatccccagcagcaagaacccccaccgctgcacccctgtgtgccaggtgtgccagaacctgatccgctgctactgcggccgcctcatcggggaccacgccggcatcgactacagctggaccatctctgctgccaagggcaaggagagcgagcagtggagcgtggagaagcacaccaccaagagccccacagacaccttcggcaccatcaacttccaggatggagagcacacccaccacgccaagtacatccgcaccagctatgacaccaagctggaccacctgctgcacctgatgctgaaggagtggaagatggagctgcccaagctggtgatctctgtgcatggaggcatccagaacttcaccatgcccagcaagttcaaggagatcttcagccagggcctggtgaaggctgctgagaccaccggggcctggatcatcacagagggcatcaacacaggagtgtccaagcacgtgggagatgccctgaagagccacagcagccacagcctgaggaagatctggacagtgggcatccccccctggggcgtgattgagaaccagagggacctgattggcaaggatgtggtgtgcctgtaccagaccctggacaaccccctgagcaagctgaccaccctgaacagcatgcacagccacttcatcctgagtgatgatggcaccgtgggcaagtatggaaatgagatgaagctgcggaggaacctggagaagtacctgagcctgcagaagatccactgccgcagccggcagggcgtgcctgtggtgggcctggtggtggagggcggccccaacgtcatcctgtctgtgtgggagaccgtgaaggacaaggaccctgtggtggtgtgtgagggcaccggccgggctgctgacctgctggccttcacccacaagcacctggctgatgagggcatgctgcggccccaggtgaaggaggagatcatctgcatgatccagaacaccttcaacttcagcctgaagcagagcaagcacctgttccagatcctgatggagtgcatggtgcaccgggactgcatcaccatctttgatgctgacagcgaggagcagcaggacctggacctggccatcctgacagccctgctgaagggcaccaacctgagcgccagcgagcagctgaacctggccatggcctgggacagagtggacatcgccaagaagcacatcctgatctatgagcagcactggaagccagatgccctggagcaggccatgtctgatgccctggtgatggacagagtggactttgtgaagctgctgattgaatatggagtgaacctgcaccgcttcctgaccatcccccggctggaggagctgtacaacaccaagcagggccccaccaacaccctgctgcaccacctggtgcaggatgtgaagcagcacaccctgctgagcggctaccgcatcaccctgattgatattggcctggtggtggagtacctgattggccgggcctaccgcagcaactacaccaggaagcacttccgggccctgtacaacaacctgtacaggaagtacaagcaccagaggcacagcagcggcaacagaaatgaatctgctgagagcaccctgcacagccagttcatcagaacagcccagccctacaagttcaaggagaagagcatcgtgctgcacaagagcaggaagaagagcaaggagcagaatgtgtctgatgatcctgagagcacaggcttcctgtacccctacaatgacctgctggtgtgggccgtgctgatgaagaggcagaagatggccatgttcttctggcagcacggggaggaggccaccgtgaaggccgtcatcgcctgcatcctgtaccgggccatggcccacgaggccaaggagagccacatggtggatgatgccagcgaggagctgaagaactacagcaagcagtttggccagctggccctggacctgctggagaaggccttcaagcagaatgaaagaatggccatgaccctgctgacctatgagctgaggaactggagcaacagcacctgcctgaagctggccgtgtctgggggcctgcggccctttgtgagccacacctgcacccagatgctgctgacagacatgtggatgggccgcctgaagatgaggaagaacagctggctgaagatcatcatcagcatcatcctgccccccaccatcctgaccctggagttcaagagcaaggccgagatgagccacgtgccccagagccaggacttccagttcatgtggtactacagcgaccagaatgccagcagcagcaaggagagcgcctctgtgaaggagtatgacctggagcggggccatgatgagaagctggatgagaaccagcacttcggcctggagagcggccaccagcacctgccctggaccaggaaggtgtatgagttctacagcgcccccatcgtgaagttctggttctacaccatggcctacctggccttcctgatgctgttcacctacacagtgctggtggagatgcagccccagcccagcgtgcaggagtggctggtgtccatctacatcttcaccaatgccatcgaggtggtgcgggagatctgcatcagcgagcccgggaagttcacccagaaggtgaaggtgtggatcagcgagtactggaacctgacagaaacagtggccatcggcctcttctctgctggctttgtgctgcgctggggagacccccccttccacacagctggccgcctcatctactgcatcgacatcatcttctggttcagccggctgctggacttctttgctgtgaaccagcacgccggcccctacgtgaccatgattgccaagatgacagccaacatgttctacatcgtcatcatcatggccatcgtgctgctgagctttggagtggccaggaaggccatcctgagccccaaggagccccccagctggagcctggcccgggacatcgtgtttgagccctactggatgatctacggggaggtgtatgctggggagattgatgtgtgcagcagccagcccagctgccccccaggcagcttcctgacccccttcctgcaggccgtgtacctgtttgtgcagtacatcatcatggtgaacctgctgattgccttcttcaacaacgtgtacctggacatggagagcatcagcaacaacctgtggaagtacaaccgctaccgctacatcatgacctaccacgagaagccctggctgcccccacccctcatcctgctgagccacgtgggcctgctgctgcggcggctgtgctgccaccgggcccctcatgaccaggaggagggagatgtgggcctgaagctgtacctgagcaaagaagacctgaagaagctgcatgactttgaggagcagtgtgtggagaagtacttccacgagaagatggaggatgtgaactgcagctgtgaggagcgcatccgggtgaccagcgagcgggtgacagagatgtacttccagctgaaggagatgaatgagaaggtgtccttcatcaaggacagcctgctgagcctggacagccaggtgggccacctgcaggacctgagcgccctgactgtggacaccctgaaggtgctgtctgctgtggacaccctgcaggaggatgaggccctgctggccaagaggaagcacagcacctgcaagaagctgccccacagctggagcaatgtcatctgtgccgaggtgctgggctccatggagattgctggggagaagaagtaccagtactacagcatgcccagcagcctgctgcggagcctggccggcggccgccaccccccccgggtgcagagaggagccctgctggagatcaccaacagcaagcgggaggccaccaacgtgagaaatgaccaggagcggcaggagacccagagcagcatcgtggtgtctggagtgagccccaaccggcaggcccacagcaaatatggccagttcctgctggtgcccagcaacctgaagagggtgcccttctctgctgagaccgtgctgcccctgagccggcccagcgtgcctgatgtgctggccacagagcaggacatccagacagaggtgctggtgcacctgaccggccagacccctgtggtgtctgactgggcctctgtggatgagcccaaggagaagcatgagcccatcgcccacctgctggatggccaggacaaggccgagcaggtgctgcccaccctgagctgcaccccagagcccatgaccatgagcagccccctgagccaggccaagatcatgcagacaggaggcggctacgtgaactgggccttctctgaaggagatgaaacaggagtcttcagcatcaagaagaagtggcagacctgcctgcccagcacctgtgacagcgacagcagccgctctgagcagcaccagaagcaggcccaggacagcagcctgagtgacaacagcaccaggtctgcccagagcagtgaatgttctgaggtgggcccctggctgcagcccaacaccagcttctggatcaaccccctgcggcgctaccggccctttgcccggagccacagcttccgcttccacaaggaggagaagctgatgaagatctgcaagatcaagaacctgagcggcagcagcgagatcggccagggcgcctgggtgaaggccaagatgctgaccaaggaccggcggctgagcaagaagaagaagaacacccagggcctgcaggtgcccatcatcaccgtgaatgcctgcagccagagcgaccagctgaaccctgagcccggggagaacagcatcagcgaggaggagtacagcaagaactggttcaccgtgtccaagttcagccacactggagtggagccctacatccaccagaagatgaagaccaaggagatcggccagtgtgccatccagatcagtgactacctgaagcagagccaggaggacctgagcaagaacagcctgtggaacagccgcagcaccaacctgaacagaaacagcctgctgaagagcagcattggagtggacaagatcagcgccagcctgaagagcccccaggagccccaccaccactacagcgccattgaaagaaacaacctgatgaggctgagccagaccatccccttcacccctgtgcagctgtttgctggggaggagatcaccgtgtaccgcctggaggagagcagccccctgaacctggacaagtccatgagctcctggagccagaggggccgggccgccatgatccaggtgctgagccgggaggagatggatggcggcctgaggaaggccatgagggtggtgtccacctggagcgaagatgacatcctgaagccaggccaggtgttcatcgtgaagagcttcctgcctgaggtggtgaggacctggcacaagatcttccaggagagcacagtgctgcacctgtgcctgcgggagatccagcagcagagagctgcccagaagctgatctacaccttcaaccaggtgaagccccagaccatcccctacaccccccgcttcctggaggtgttcctgatctactgccacagcgccaaccagtggctgaccatcgagaagtacatgaccggggagttcaggaagtacaacaacaacaatggagatgagatcacccccaccaacaccctggaggagctgatgctggccttcagccactggacctatgagtacaccagaggagagctgctggtgctggacctgcagggcgtgggggagaacctgacagaccccagcgtcatcaagccagaggtgaagcagagccggggcatggtgtttggacctgccaacctgggggaggatgccatccggaacttcatcgccaagcaccactgcaacagctgctgcaggaagctgaagctgcctgacctgaagagaaatgactacagccctgagcgcatcaacagcaccttcggcctggagatcaagattgagagcgctgaggagcccccagcccgggagactggaagaaacagcccagaagatgacatgcagctgtag

SEQ ID NO: 194336 - DNA, 5844 bp, Artificial Sequence
  derived and/or modified sequence
atgaaggagcagcctgtgctggagcggctgcagagccagaagtcctggatcaagggcgtgtttgacaagagagaatgttccaccatcatccccagcagcaagaacccccaccgctgcacccctgtgtgccaggtgtgccagaacctgatccgctgctactgcggccgcctcatcggggaccacgccggcatcgactacagctggaccatctctgctgccaagggcaaggagagcgagcagtggagcgtggagaagcacaccaccaagagccccacagacaccttcggcaccatcaacttccaggatggagagcacacccaccacgccaagtacatccgcaccagctatgacaccaagctggaccacctgctgcacctgatgctgaaggagtggaagatggagctgcccaagctggtgatctctgtgcatggaggcatccagaacttcaccatgcccagcaagttcaaggagatcttcagccagggcctggtgaaggctgctgagaccaccggggcctggatcatcacagagggcatcaacacaggagtgtccaagcacgtgggagatgccctgaagagccacagcagccacagcctgaggaagatctggacagtgggcatccccccctggggcgtgattgagaaccagagggacctgattggcaaggatgtggtgtgcctgtaccagaccctggacaaccccctgagcaagctgaccaccctgaacagcatgcacagccacttcatcctgagtgatgatggcaccgtgggcaagtatggaaatgagatgaagctgcggaggaacctggagaagtacctgagcctgcagaagatccactgccgcagccggcagggcgtgcctgtggtgggcctggtggtggagggcggccccaacgtcatcctgtctgtgtgggagaccgtgaaggacaaggaccctgtggtggtgtgtgagggcaccggccgggctgctgacctgctggccttcacccacaagcacctggctgatgagggcatgctgcggccccaggtgaaggaggagatcatctgcatgatccagaacaccttcaacttcagcctgaagcagagcaagcacctgttccagatcctgatggagtgcatggtgcaccgggactgcatcaccatctttgatgctgacagcgaggagcagcaggacctggacctggccatcctgacagccctgctgaagggcaccaacctgagcgccagcgagcagctgaacctggccatggcctgggacagagtggacatcgccaagaagcacatcctgatctatgagcagcactggaagccagatgccctggagcaggccatgtctgatgccctggtgatggacagagtggactttgtgaagctgctgattgaatatggagtgaacctgcaccgcttcctgaccatcccccggctggaggagctgtacaacaccaagcagggccccaccaacaccctgctgcaccacctggtgcaggatgtgaagcagcacaccctgctgagcggctaccgcatcaccctgattgatattggcctggtggtggagtacctgattggccgggcctaccgcagcaactacaccaggaagcacttccgggccctgtacaacaacctgtacaggaagtacaagcaccagaggcacagcagcggcaacagaaatgaatctgctgagagcaccctgcacagccagttcatcagaacagcccagccctacaagttcaaggagaagagcatcgtgctgcacaagagcaggaagaagagcaaggagcagaatgtgtctgatgatcctgagagcacaggcttcctgtacccctacaatgacctgctggtgtgggccgtgctgatgaagaggcagaagatggccatgttcttctggcagcacggggaggaggccaccgtgaaggccgtcatcgcctgcatcctgtaccgggccatggcccacgaggccaaggagagccacatggtggatgatgccagcgaggagctgaagaactacagcaagcagtttggccagctggccctggacctgctggagaaggccttcaagcagaatgaaagaatggccatgaccctgctgacctatgagctgaggaactggagcaacagcacctgcctgaagctggccgtgtctgggggcctgcggccctttgtgagccacacctgcacccagatgctgctgacagacatgtggatgggccgcctgaagatgaggaagaacagctggctgaagatcatcatcagcatcatcctgccccccaccatcctgaccctggagttcaagagcaaggccgagatgagccacgtgccccagagccaggacttccagttcatgtggtactacagcgaccagaatgccagcagcagcaaggagagcgcctctgtgaaggagtatgacctggagcggggccatgatgagaagctggatgagaaccagcacttcggcctggagagcggccaccagcacctgccctggaccaggaaggtgtatgagttctacagcgcccccatcgtgaagttctggttctacaccatggcctacctggccttcctgatgctgttcacctacacagtgctggtggagatgcagccccagcccagcgtgcaggagtggctggtgtccatctacatcttcaccaatgccatcgaggtggtgcgggagatctgcatcagcgagcccgggaagttcacccagaaggtgaaggtgtggatcagcgagtactggaacctgacagaaacagtggccatcggcctcttctctgctggctttgtgctgcgctggggagacccccccttccacacagctggccgcctcatctactgcatcgacatcatcttctggttcagccggctgctggacttctttgctgtgaaccagcacgccggcccctacgtgaccatgattgccaagatgacagccaacatgttctacatcgtcatcatcatggccatcgtgctgctgagctttggagtggccaggaaggccatcctgagccccaaggagccccccagctggagcctggcccgggacatcgtgtttgagccctactggatgatctacggggaggtgtatgctggggagattgatgtgtgcagcagccagcccagctgccccccaggcagcttcctgacccccttcctgcaggccgtgtacctgtttgtgcagtacatcatcatggtgaacctgctgattgccttcttcaacaacgtgtacctggacatggagagcatcagcaacaacctgtggaagtacaaccgctaccgctacatcatgacctaccacgagaagccctggctgcccccacccctcatcctgctgagccacgtgggcctgctgctgcggcggctgtgctgccaccgggcccctcatgaccaggaggagggagatgtgggcctgaagctgtacctgagcaaagaagacctgaagaagctgcatgactttgaggagcagtgtgtggagaagtacttccacgagaagatggaggatgtgaactgcagctgtgaggagcgcatccgggtgaccagcgagcgggtgacagagatgtacttccagctgaaggagatgaatgagaaggtgtccttcatcaaggacagcctgctgagcctggacagccaggtgggccacctgcaggacctgagcgccctgactgtggacaccctgaaggtgctgtctgctgtggacaccctgcaggaggatgaggccctgctggccaagaggaagcacagcacctgcaagaagctgccccacagctggagcaatgtcatctgtgccgaggtgctgggctccatggagattgctggggagaagaagtaccagtactacagcatgcccagcagcctgctgcggagcctggccggcggccgccaccccccccgggtgcagagaggagccctgctggagatcaccaacagcaagcgggaggccaccaacgtgagaaatgaccaggagcggcaggagacccagagcagcatcgtggtgtctggagtgagccccaaccggcaggcccacagcaaatatggccagttcctgctggtgcccagcaacctgaagagggtgcccttctctgctgagaccgtgctgcccctgagccggcccagcgtgcctgatgtgctggccacagagcaggacatccagacagaggtgctggtgcacctgaccggccagacccctgtggtgtctgactgggcctctgtggatgagcccaaggagaagcatgagcccatcgcccacctgctggatggccaggacaaggccgagcaggtgctgcccaccctgagctgcaccccagagcccatgaccatgagcagccccctgagccaggccaagatcatgcagacaggaggcggctacgtgaactgggccttctctgaaggagatgaaacaggagtcttcagcatcaagaagaagtggcagacctgcctgcccagcacctgtgacagcgacagcagccgctctgagcagcaccagaagcaggcccaggacagcagcctgagtgacaacagcaccaggtctgcccagagcagtgaatgttctgaggtgggcccctggctgcagcccaacaccagcttctggatcaaccccctgcggcgctaccggccctttgcccggagccacagcttccgcttccacaaggaggagaagctgatgaagatctgcaagatcaagaacctgagcggcagcagcgagatcggccagggcgcctgggtgaaggccaagatgctgaccaaggaccggcggctgagcaagaagaagaagaacacccagggcctgcaggtgcccatcatcaccgtgaatgcctgcagccagagcgaccagctgaaccctgagcccggggagaacagcatcagcgaggaggagtacagcaagaactggttcaccgtgtccaagttcagccacactggagtggagccctacatccaccagaagatgaagaccaaggagatcggccagtgtgccatccagatcagtgactacctgaagcagagccaggaggacctgagcaagaacagcctgtggaacagccgcagcaccaacctgaacagaaacagcctgcacgtgatcaagatgcccatcagcagcctcatcagcgagatcagcgccagcctgaagagcccccaggagccccaccaccactacagcgccattgaaagaaacaacctgatgaggctgagccagaccatccccttcacccctgtgcagctgtttgctggggaggagatcaccgtgtaccgcctggaggagagcagccccctgaacctggacaagtccatgagctcctggagccagaggggccgggccgccatgatccaggtgctgagccgggaggagatggatggcggcctgaggaaggccatgagggtggtgtccacctggagcgaagatgacatcctgaagccaggccaggtgttcatcgtgaagagcttcctgcctgaggtggtgaggacctggcacaagatcttccaggagagcacagtgctgcacctgtgcctgcgggagatccagcagcagagagctgcccagaagctgatctacaccttcaaccaggtgaagccccagaccatcccctacaccccccgcttcctggaggtgttcctgatctactgccacagcgccaaccagtggctgaccatcgagaagtacatgaccggggagttcaggaagtacaacaacaacaatggagatgagatcacccccaccaacaccctggaggagctgatgctggccttcagccactggacctatgagtacaccagaggagagctgctggtgctggacctgcaggccctgtggttctgggacagcatgctgaaggcccggctgggcggctggaggatgtag

SEQ ID NO: 194337 - DNA, 6081 bp, Artificial Sequence
  derived and/or modified sequence
atgaaggagcagcctgtgctggagcggctgcagagccagaagtcctggatcaagggcgtgtttgacaagagagaatgttccaccatcatccccagcagcaagaacccccaccgctgcacccctgtgtgccaggtgtgccagaacctgatccgctgctactgcggccgcctcatcggggaccacgccggcatcgactacagctggaccatctctgctgccaagggcaaggagagcgagcagtggagcgtggagaagcacaccaccaagagccccacagacaccttcggcaccatcaacttccaggatggagagcacacccaccacgccaagtacatccgcaccagctatgacaccaagctggaccacctgctgcacctgatgctgaaggagtggaagatggagctgcccaagctggtgatctctgtgcatggaggcatccagaacttcaccatgcccagcaagttcaaggagatcttcagccagggcctggtgaaggctgctgagaccaccggggcctggatcatcacagagggcatcaacacaggagtgtccaagcacgtgggagatgccctgaagagccacagcagccacagcctgaggaagatctggacagtgggcatccccccctggggcgtgattgagaaccagagggacctgattggcaaggatgtggtgtgcctgtaccagaccctggacaaccccctgagcaagctgaccaccctgaacagcatgcacagccacttcatcctgagtgatgatggcaccgtgggcaagtatggaaatgagatgaagctgcggaggaacctggagaagtacctgagcctgcagaagatccactgccgcagccggcagggcgtgcctgtggtgggcctggtggtggagggcggccccaacgtcatcctgtctgtgtgggagaccgtgaaggacaaggaccctgtggtggtgtgtgagggcaccggccgggctgctgacctgctggccttcacccacaagcacctggctgatgagggcatgctgcggccccaggtgaaggaggagatcatctgcatgatccagaacaccttcaacttcagcctgaagcagagcaagcacctgttccagatcctgatggagtgcatggtgcaccgggactgcatcaccatctttgatgctgacagcgaggagcagcaggacctggacctggccatcctgacagccctgctgaagggcaccaacctgagcgccagcgagcagctgaacctggccatggcctgggacagagtggacatcgccaagaagcacatcctgatctatgagcagcactggaagccagatgccctggagcaggccatgtctgatgccctggtgatggacagagtggactttgtgaagctgctgattgaatatggagtgaacctgcaccgcttcctgaccatcccccggctggaggagctgtacaacaccaagcagggccccaccaacaccctgctgcaccacctggtgcaggatgtgaagcagcacaccctgctgagcggctaccgcatcaccctgattgatattggcctggtggtggagtacctgattggccgggcctaccgcagcaactacaccaggaagcacttccgggccctgtacaacaacctgtacaggaagtacaagcaccagaggcacagcagcggcaacagaaatgaatctgctgagagcaccctgcacagccagttcatcagaacagcccagccctacaagttcaaggagaagagcatcgtgctgcacaagagcaggaagaagagcaaggagcagaatgtgtctgatgatcctgagagcacaggcttcctgtacccctacaatgacctgctggtgtgggccgtgctgatgaagaggcagaagatggccatgttcttctggcagcacggggaggaggccaccgtgaaggccgtcatcgcctgcatcctgtaccgggccatggcccacgaggccaaggagagccacatggtggatgatgccagcgaggagctgaagaactacagcaagcagtttggccagctggccctggacctgctggagaaggccttcaagcagaatgaaagaatggccatgaccctgctgacctatgagctgaggaactggagcaacagcacctgcctgaagctggccgtgtctgggggcctgcggccctttgtgagccacacctgcacccagatgctgctgacagacatgtggatgggccgcctgaagatgaggaagaacagctggctgaagatcatcatcagcatcatcctgccccccaccatcctgaccctggagttcaagagcaaggccgagatgagccacgtgccccagagccaggacttccagttcatgtggtactacagcgaccagaatgccagcagcagcaaggagagcgcctctgtgaaggagtatgacctggagcggggccatgatgagaagctggatgagaaccagcacttcggcctggagagcggccaccagcacctgccctggaccaggaaggtgtatgagttctacagcgcccccatcgtgaagttctggttctacaccatggcctacctggccttcctgatgctgttcacctacacagtgctggtggagatgcagccccagcccagcgtgcaggagtggctggtgtccatctacatcttcaccaatgccatcgaggtggtgcgggagatctgcatcagcgagcccgggaagttcacccagaaggtgaaggtgtggatcagcgagtactggaacctgacagaaacagtggccatcggcctcttctctgctggctttgtgctgcgctggggagacccccccttccacacagctggccgcctcatctactgcatcgacatcatcttctggttcagccggctgctggacttctttgctgtgaaccagcacgccggcccctacgtgaccatgattgccaagatgacagccaacatgttctacatcgtcatcatcatggccatcgtgctgctgagctttggagtggccaggaaggccatcctgagccccaaggagccccccagctggagcctggcccgggacatcgtgtttgagccctactggatgatctacggggaggtgtatgctggggagattgatgtgtgcagcagccagcccagctgccccccaggcagcttcctgacccccttcctgcaggccgtgtacctgtttgtgcagtacatcatcatggtgaacctgctgattgccttcttcaacaacgtgtacctggacatggagagcatcagcaacaacctgtggaagtacaaccgctaccgctacatcatgacctaccacgagaagccctggctgcccccacccctcatcctgctgagccacgtgggcctgctgctgcggcggctgtgctgccaccgggcccctcatgaccaggaggagggagatgtgggcctgaagctgtacctgagcaaagaagacctgaagaagctgcatgactttgaggagcagtgtgtggagaagtacttccacgagaagatggaggatgtgaactgcagctgtgaggagcgcatccgggtgaccagcgagcgggtgacagagatgtacttccagctgaaggagatgaatgagaaggtgtccttcatcaaggacagcctgctgagcctggacagccaggtgggccacctgcaggacctgagcgccctgactgtggacaccctgaaggtgctgtctgctgtggacaccctgcaggaggatgaggccctgctggccaagaggaagcacagcacctgcaagaagctgccccacagctggagcaatgtcatctgtgccgaggtgctgggctccatggagattgctggggagaagaagtaccagtactacagcatgcccagcagcctgctgcggagcctggccggcggccgccaccccccccgggtgcagagaggagccctgctggagatcaccaacagcaagcgggaggccaccaacgtgagaaatgaccaggagcggcaggagacccagagcagcatcgtggtgtctggagtgagccccaaccggcaggcccacagcaaatatggccagttcctgctggtgcccagcaacctgaagagggtgcccttctctgctgagaccgtgctgcccctgagccggcccagcgtgcctgatgtgctggccacagagcaggacatccagacagaggtgctggtgcacctgaccggccagacccctgtggtgtctgactgggcctctgtggatgagcccaaggagaagcatgagcccatcgcccacctgctggatggccaggacaaggccgagcaggtgctgcccaccctgagctgcaccccagagcccatgaccatgagcagccccctgagccaggccaagatcatgcagacaggaggcggctacgtgaactgggccttctctgaaggagatgaaacaggagtcttcagcatcaagaagaagtggcagacctgcctgcccagcacctgtgacagcgacagcagccgctctgagcagcaccagaagcaggcccaggacagcagcctgagtgacaacagcaccaggtctgcccagagcagtgaatgttctgaggtgggcccctggctgcagcccaacaccagcttctggatcaaccccctgcggcgctaccggccctttgcccggagccacagcttccgcttccacaaggaggagaagctgatgaagatctgcaagatcaagaacctgagcggcagcagcgagatcggccagggcgcctgggtgaaggccaagatgctgaccaaggaccggcggctgagcaagaagaagaagaacacccagggcctgcaggtgcccatcatcaccgtgaatgcctgcagccagagcgaccagctgaaccctgagcccggggagaacagcatcagcgaggaggagtacagcaagaactggttcaccgtgtccaagttcagccacactggagtggagccctacatccaccagaagatgaagaccaaggagatcggccagtgtgccatccagatcagtgactacctgaagcagagccaggaggacctgagcaagaacagcctgtggaacagccgcagcaccaacctgaacagaaacagcctgcacgtgatcaagatgcccatcagcagcctcatcagcgagatcagcgccagcctgaagagcccccaggagccccaccaccactacagcgccattgaaagaaacaacctgatgaggctgagccagaccatccccttcacccctgtgcagctgtttgctggggaggagatcaccgtgtaccgcctggaggagagcagccccctgaacctggacaagtccatgagctcctggagccagaggggccgggccgccatgatccaggtgctgagccgggaggagatggatggcggcctgaggaaggccatgagggtggtgtccacctggagcgaagatgacatcctgaagccaggccaggtgttcatcgtgaagagcttcctgcctgaggtggtgaggacctggcacaagatcttccaggagagcacagtgctgcacctgtgcctgcgggagatccagcagcagagagctgcccagaagctgatctacaccttcaaccaggtgaagccccagaccatcccctacaccccccgcttcctggaggtgttcctgatctactgccacagcgccaaccagtggctgaccatcgagaagtacatgaccggggagttcaggaagtacaacaacaacaatggagatgagatcacccccaccaacaccctggaggagctgatgctggccttcagccactggacctatgagtacaccagaggagagctgctggtgctggacctgcagggcgtgggggagaacctgacagaccccagcgtcatcaagccagaggtgaagcagagccggggcatggtgtttggacctgccaacctgggggaggatgccatccggaacttcatcgccaagcaccactgcaacagctgctgcaggaagctgaagctgcctgacctgaagagaaatgactacagccctgagcgcatcaacagcaccttcggcctggagatcaagattgagagcgctgaggagcccccagcccgggagactggaagaaacagcccagaagatgacatgcagctgtag

SEQ ID NO: 194338 - DNA, 6069 bp, Artificial Sequence
  derived and/or modified sequence
atgaaggagcagcccgtgctggagcggctgcagagccagaagagctggatcaagggggtctttgacaaacgtgagtgctccacaattatcccgtcatccaaaaatcctcatcgatgcacacctgtgtgccaagtgtgtcaaaatcttattcgctgttattgtgggcgcttaatcggtgaccacgcaggaatagactacagctggaccatctctgccgcaaaaggcaaggagtccgagcagtggtcagtggaaaaacatactaccaagagcccaacagacaccttcggtaccatcaactttcaggatggagagcacacacaccacgccaaatatatccggacctcctatgacacaaagctggatcacttgcttcacctcatgttaaaagaatggaaaatggagctacccaagctggttatttctgtgcacggaggtattcagaactttacaatgccctcaaagttcaaagagattttcagccagggactggttaaggccgccgaaactacaggagcgtggattatcactgagggaatcaatactggcgtctctaaacatgttggcgacgccttaaagagccacagttcccacagtttgcggaagatttggaccgttggtatccccccatggggggtaattgagaaccagagagatctgatcggcaaagacgtggtatgtctctatcagaccctcgacaaccccctgtccaagttgacaacattgaatagcatgcattcgcacttcatcctgtccgacgacggcaccgtgggtaagtacggtaacgagatgaaactgaggcgcaacctagagaagtatctgtcccttcagaaaattcactgcagatccagacagggggtgccagtcgtcggacttgtggtcgaaggaggtccaaatgtcatcctatcagtttgggagactgtgaaggataaagaccctgtagtcgtgtgcgaagggaccggacgggccgcagacctgttggcatttacacataagcatcttgcggacgaaggcatgctcaggcctcaagtgaaagaggagattatctgcatgatacaaaacacatttaatttctccctgaaacagagcaaacatctgtttcaaattctgatggagtgtatggtgcatcgggattgcatcaccatttttgacgctgactctgaggaacaacaggacctcgaccttgcgatcttgaccgccctactgaagggcacaaacctttcagcctcagagcagctgaatctcgccatggcctgggaccgggtagacatcgcgaagaaacatatccttatttacgagcaacactggaagccggatgccctcgaacaggctatgtcagacgcgctggtgatggatcgggttgacttcgtaaaactgctgattgagtatggcgttaatctgcaccggttcctgaccatcccacggctggaagagctctacaacaccaaacagggtccgactaacacccttcttcatcaccttgtccaggacgtcaaacaacacacactgttgagtggttatcggattacgctcatcgatatcgggcttgttgtggaatacttaatagggagggcctatagatccaattatactcgtaaacactttagagcattgtataataatctgtatagaaagtataagcatcagcggcattcgtcgggcaacagaaatgagagcgcagagagtaccctgcactctcagttcatcaggacggcacaaccttataagtttaaagaaaaaagtatcgtgctccacaagtctcggaagaagtcaaaggagcagaacgtctctgatgatcctgagagcaccgggttcttgtatccctacaacgacctcttggtgtgggcggtactgatgaagcgccagaagatggctatgttcttctggcagcacggggaagaggccaccgtgaaggccgtcattgcctgcatcctgtaccgagctatggctcacgaagccaaggagagtcacatggtggacgacgccagcgaagaactcaagaattactcgaaacagttcggccagcttgcactagatctgctggagaaggcctttaagcagaacgagcgcatggccatgaccctgcttacttatgaacttagaaattggtctaactcaacctgtctcaaactggccgtgtctgggggccttagaccgtttgtgagccacacatgcacccagatgctattaaccgacatgtggatgggcagacttaagatgagaaagaattcatggctgaagattatcatctccataatcctccctcctacaatactgacactcgagttcaagtccaaagccgagatgagccacgtgccgcaatcacaggactttcagttcatgtggtattacagtgatcagaacgcttcatctagcaaagagagtgcctccgtgaaggagtatgatctggaacgcggccacgacgaaaagctagacgagaatcagcacttcgggttagagagcggacaccagcatttaccatggacccgaaaggtgtatgaattttacagcgccccgattgtgaagttttggttctacacaatggcttaccttgcctttctcatgttgtttacatataccgtactggtggagatgcagcctcagccatccgtgcaggagtggttggtatccatttacatatttacaaacgccatcgaagttgtgagggaaatttgtatctctgaacctggaaagtttacacaaaaggtgaaagtgtggatcagtgaatattggaacctaactgaaaccgtggctatcgggctgtttagtgctggatttgtactgagatggggggacccaccgtttcacacagcggggcgcttgatctactgtattgacataatcttttggtttagcagattgctggattttttcgctgtgaaccaacacgccggcccctatgtgacaatgatcgcaaagatgaccgccaatatgttttatattgtcattattatggccatcgtactgctgtccttcggtgtggcacgaaaggccattcttagcccaaaagaaccaccttcgtggtcactggcacgcgacatagtgtttgagccctactggatgatctacggcgaggtgtatgccggtgaaatcgatgtgtgctccagccagcccagctgccctcctggatccttcctgacaccttttctgcaggctgtgtatctcttcgtgcaatacatcatcatggttaaccttctgatcgctttctttaataacgtttatctagacatggagtcaatatccaataacctttggaaatacaatcgatatcgttacatcatgacataccatgaaaaaccctggctgccacccccactgatcctgctcagtcatgtggggctgctgctccgtaggttgtgctgtcatcgtgccccacacgaccaggaagaaggggacgtcggtctgaagctgtatctctctaaagaggaccttaagaaactacatgatttcgaggagcagtgtgtcgagaaatacttccacgaaaaaatggaggatgtcaactgctcctgcgaggagcgaattcgggtaacatcagagcgcgtgaccgagatgtactttcagcttaaagaaatgaacgagaaagtttccttcatcaaggattccctgttgtcactggattcacaagttggacacctccaagatctgtctgccctgaccgtggacaccctaaaggtgctgagcgccgtggacacccttcaagaagatgaagctctgctggccaagaggaagcatagtacgtgtaagaagctccctcattcttggtcaaatgtcatatgtgctgaagtcctgggcagcatggagatcgccggagaaaagaagtaccagtactatagtatgccttctagtcttttgcgtagcttagccggtggacgacaccctccgcgcgtccagagaggtgcgttgcttgaaattaccaactcgaagcgcgaggcaactaatgtgcggaacgatcaagaaaggcaagaaacccagagtagcatcgtagtgtctggcgtctccccaaatagacaggcccatagcaagtacgggcagttcctgctcgtgccgtccaaccttaagcgagtgcccttcagcgcagaaacagtgttgcctctcagcaggcccagcgtgccagacgttctggccaccgagcaggatatccagacagaggtgctcgtgcaccttacaggccaaaccccggtcgtatccgattgggcctcagtagatgagcctaaagagaagcatgagccgatagcccaccttcttgatggtcaagacaaagccgaacaagtcctgcccaccttatcctgtaccccagagccgatgacaatgtcgtcacctctttctcaagctaagatcatgcagaccggtgggggttacgtgaattgggcgttctcggagggggatgagaccggagtcttctcaataaagaagaaatggcagacgtgcctgcctagtacctgtgattcagatagcagtcgtagtgagcagcaccagaagcaggcacaggacagctccttgagcgacaactccacgcggtctgcccaaagctctgaatgctcagaagtcggcccctggctgcagccaaatactagcttctggattaatccactcaggagataccgacctttcgcacgctctcactccttccgctttcataaagaagaaaaactgatgaagatttgcaaaattaaaaacttatccggctcttccgagatcggtcaaggagcgtgggtcaaggccaagatgttgaccaaagatcgacgactttccaaaaagaagaaaaatactcagggactgcaggtacccatcataactgtgaacgcttgttctcagagcgatcagctcaatccagagcctggcgaaaattctatctctgaagaggagtactcaaagaactggttcacagtctccaagtttagccataccggagtggagccgtacatccaccagaagatgaaaactaaagagatagggcagtgcgccattcaaattagtgactacttaaaacaaagccaggaggatctttccaagaactccctgtggaatagcaggtcaacaaatctgaaccggaactccctgctgaagtcatctattggagtggacaagattagtgccagcctgaagtccccacaggaaccccaccaccactactcggcaattgaaaggaacaacctcatgaggctctcacagactatcccttttactccagtgcagctctttgcgggcgaggagatcacagtttaccgactggaagagtcgagcccactgaacctcgataaatctatgtcatcatggtctcagagaggaagagccgccatgatccaggtgctctctcgggaagaaatggacggcggtcttcgcaaggcaatgcgggtggtgagtacatggtccgaagacgacattttgaaaccaggtcaggtcttcatcgtcaaaagcttcttaccagaggttgtcagaacgtggcataaaatctttcaagaaagcaccgtacttcacctgtgtctgcgcgagattcagcagcagcgcgcggcacagaaattgatctacacatttaaccaagtaaaaccccagaccatcccttacactccgcggttcctcgaagtgttcctcatatactgccattccgccaatcaatggttaacaattgagaagtacatgacaggagagttccgaaaatacaataataacaatggggatgaaatcacacccacaaataccctggaagaactgatgctcgcttttagtcattggacatacgaatatactaggggcgaactgctggtgctcgatctgcagggcgtgggcgagaaccttaccgatccctccgtgattaagccagaggtaaagcagagtaggggcatggtgtttgggccagcaaacctaggagaggatgctattcgaaattttattgcaaagcaccactgcaactcatgctgccggaaattgaagcttcctgacctgaagcggaacgattactcccctgaaagaattaacagtacttttgggctggagatcaagatcgagtctgctgaagagccaccagctagggaaaccgggagaaattcaccagaagatgatatgcagctgtag

SEQ ID NO: 194339 - DNA, 5844 bp, Artificial Sequence
  derived and/or modified sequence
atgaaggagcagcccgtgctggagcggctgcagagccagaagagctggatcaagggggtcttcgataaaagggaatgctcgacgattataccctcttcaaagaatccacaccgatgtactccagtttgtcaggtgtgtcagaacctgatcaggtgttactgtggtcgcctgatcggcgaccacgcggggattgactattcctggacgatatcagcagccaagggaaaggaatccgaacaatggtccgtcgagaagcatactacaaagagccccaccgacaccttcggtacaattaactttcaggacggtgagcacactcaccacgctaaatacatccgaacgtcctacgacaccaaacttgaccacctcttacacttaatgcttaaagaatggaagatggaacttccaaaattggttatttccgtgcatggtgggatacagaatttcaccatgccatccaaatttaaggagattttctcacaggggctggttaaggctgccgaaactacaggcgcatggataattactgagggcatcaacactggagtcagtaagcacgtgggcgacgccttaaaatcccatagcagccactccctcagaaaaatttggactgtcggaatccccccctggggagtcattgaaaatcaaagagatctgattggcaaagacgttgtctgtttgtaccagaccctggacaaccccctaagtaagttgactaccctcaatagcatgcactcgcatttcattttgagcgatgacggcacggtcgggaagtatggaaacgaaatgaaactccgccgcaatctggagaagtatctgtctctgcaaaagatccactgccgctcacggcagggcgtgcccgtggttggccttgtcgtggagggtggcccaaatgtaattctttccgtttgggagaccgtgaaagacaaggaccccgtcgtggtgtgtgaaggtaccggtagagcagccgacctgctagcgttcactcataagcaccttgccgatgaagggatgttacggccacaggtaaaggaggagatcatatgcatgattcagaataccttcaattttagcctgaagcaatcaaaacatctgtttcaaattttaatggagtgtatggtgcatcgtgattgtataactatctttgacgctgattctgaggagcagcaagatctcgatctagccattttaaccgccctgttaaagggcacaaacctgtccgcctcagaacagctaaacctggctatggcatgggacagggtggatatagcaaaaaagcatattctgatatacgagcagcactggaagcccgacgccctggaacaggctatgtccgatgccctcgtaatggacagggtcgattttgttaagctcctgattgagtacggtgtcaacctgcataggttcctgacgattccccgactcgaggagctgtataatactaagcaaggtccaacaaacaccctcctgcaccacctggtgcaggacgttaaacagcatactctactcagcggctacaggatcaccctgattgacataggtctggtggtggaatatctgattggccgagcatatcgcagcaactacaccagaaaacattttagagccctgtataacaatctgtaccggaaatacaagcaccaacgccattctagcgggaacagaaacgagtctgccgagtcaactctgcacagccagttcatccgaaccgcccagccctacaagttcaaggagaaatctattgtgctgcataagtcgagaaaaaaatccaaagagcaaaacgtcagcgacgatccggaatctacaggttttctctatccttacaatgatctgttggtctgggcggtgttgatgaaaagacagaaaatggcaatgttcttctggcaacatggcgaggaagccactgtgaaggccgtcattgcatgtatcctgtatcgcgcaatggctcacgaggctaaagaatcccacatggtggacgacgccagcgaggaactgaagaactattccaagcagttcggtcagttggcactggatctgttagagaaggcgtttaagcagaatgaacggatggcaatgactcttttaacctatgaattgcggaattggtcaaactcaacttgcctgaagcttgctgtgagtggtggactgcgtccctttgtgtcacatacgtgcacccagatgcttctgacagacatgtggatgggacgtctaaagatgagaaaaaactcctggctgaaaataattataagcatcatcctgccgcccaccatcctgacccttgaatttaaatccaaagccgaaatgtctcatgtccctcagtcccaggactttcagttcatgtggtactactctgaccagaacgcctcgtcctctaaagaaagtgcctctgtcaaagagtatgatctggagcgcggacacgacgaaaagctggacgaaaatcagcattttgggttggaatctggccaccaacacctgccatggacccgcaaggtgtacgagttctactctgcccccatagtaaagttttggttttataccatggcttatctagctttcctgatgttgttcacatatacggtccttgtcgagatgcagccacagccctcagtgcaggagtggttggtatctatctacatatttacaaatgccattgaagtcgtgcgtgagatctgcattagtgaaccaggtaagtttacacagaaagtaaaagtctggattagcgagtactggaatctaactgaaaccgtggccatcggtctcttttcagccggtttcgtcttacgctggggcgatccccccttccacacagccggaagactgatttactgtatcgatataatcttctggttttcacggctgctggacttcttcgccgtgaaccagcatgctgggccatacgtaaccatgattgccaagatgaccgcgaatatgttttacatcgtaatcattatggcgattgtactattgagctttggggtggcgcggaaagctattctctcccccaaagagccaccttcctggtcactcgcacgcgatattgtgtttgaaccctattggatgatctacggagaggtctacgccggagaaatcgacgtgtgctcctcccagccctcttgcccaccgggttccttcttaacaccctttctccaggcagtttacctctttgtccagtatattattatggttaacctgttgatagccttcttcaataacgtgtatctcgacatggaaagcatcagcaacaacctgtggaaatacaatcgttatcgctatattatgacttaccacgagaagccttggctgcccccccccctcattctgctaagccacgtagggttgctcctcaggcgcctgtgttgccacagggccccgcacgaccaggaagagggtgacgtgggcctgaaactttacttaagcaaggaagacctgaagaaactgcatgacttcgaagaacagtgcgttgaaaagtacttccatgagaagatggaagacgtcaactgttcttgtgaagagcgcattcgggtgaccagcgagcgagttacagaaatgtactttcagctgaaggagatgaacgagaaagtgagctttatcaaggatagtctgctgtcgctggatagtcaagtgggccacttgcaggacctcagtgctcttaccgtggataccctgaaggtgttgagcgccgtcgacacactacaggaagacgaagccctgctcgctaaacgcaagcattcaacttgtaaaaagcttccgcattcctggagcaacgtgatttgcgcagaagtgttggggtctatggagatcgccggggagaaaaagtatcagtattatagtatgcccagcagtctgcttcgctctttagcgggcgggcgccacccaccacgagtgcagaggggtgccctgctggagattaccaattctaagcgggaagcgaccaacgtcaggaacgaccaggagcgacaggaaacccagagctccatagtggtttctggggtaagcccaaaccggcaggctcactccaagtacgggcagtttctgctggtgcccagcaatctgaagagagtgcctttttcggcagagactgtgcttccattaagtaggccgagcgtgccagatgtgctcgccacagagcaggatatccaaacagaggtgctcgttcatctaactgggcagaccccagtggtttccgattgggcaagcgttgatgagcctaaggagaagcacgagcccattgcccacctgctggacggccaggacaaagctgagcaggtgctacctactctgtcttgcactccagagccaatgactatgtcttcccccctaagtcaggcaaagatcatgcagactggagggggctatgtgaactgggctttttccgagggcgacgagaccggagtgttcagcataaagaagaaatggcaaacctgtctgccctctacttgcgactcagactcctctcggagtgagcagcaccagaagcaggcccaggattccagcctgtccgacaattccactaggagtgcccagagttccgaatgctccgaggttggaccatggcttcagccgaacacaagtttctggattaatcctctccggaggtatcgcccctttgcccgatctcactccttccgattccataaggaggagaaactcatgaagatatgcaaaataaaaaatctgagcgggtcctctgagattggacaaggcgcctgggtgaaagctaagatgctgacaaaagatcggaggctgagcaagaagaaaaagaatactcagggactgcaggtaccaattattaccgtgaacgcatgctcgcagtcagaccagcttaatccggaaccaggggagaactcaatctctgaggaggaatactctaaaaattggtttacagtctccaaattttcacatactggggttgagccctacatccatcagaaaatgaagaccaaagaaatcggccagtgtgcgattcagatcagcgactacttaaaacagagccaggaggatttaagcaagaattctctgtggaactcccgatccacaaacctgaaccgcaatagcttacatgtcattaagatgcccatctcctctctgatttccgaaatctccgcttcactaaagagccctcaagaaccacaccaccactattccgctatcgagagaaacaatctcatgagactgtcgcagaccataccgttcaccccagtgcagctgttcgccggagaggagattaccgtttatcgactcgaggagtcatcccccctcaatcttgacaaatcaatgagcagttggtcacaacgcggacgtgctgccatgatccaggtcttatctcgcgaggaaatggacggaggcctgaggaaggcaatgagagtcgttagcacttggtccgaagacgatatactgaaaccaggtcaagtcttcatcgtgaagtcttttcttcccgaagtagttcgaacgtggcacaagatttttcaagagtcaacagttctacatctgtgtctcagagagatccagcagcagcgagcggcccaaaaacttatttacaccttcaaccaggtgaaaccacagactattccgtatacaccaaggttcctggaagtttttcttatatattgccacagcgccaatcagtggcttacaatcgagaagtacatgacaggtgagttcaggaagtataacaacaacaacggggacgaaattaccccaacaaacacactggaagagctgatgctggcgttctctcattggacttacgagtatacacgcggtgaattgttagtgctggacttgcaggccctgtggttttgggactccatgctgaaagcgcgtctgggtggttggcgaatgtag

SEQ ID NO: 194340 - DNA, 6081 bp, Artificial Sequence
  derived and/or modified sequence
atgaaggagcagcccgtgctggagcggctgcagagccagaagagctggatcaagggtgtgttcgacaagagggaatgttcgaccattatcccttcatctaaaaaccctcacaggtgcactccagtgtgtcaggtatgccaaaatttgattcggtgctactgcggaagactcatcggggaccacgcaggcatcgactacagctggaccatcagtgccgcaaaaggcaaagagagtgagcagtggagcgtggagaagcacactactaagtctccaaccgacaccttcgggaccatcaattttcaggacggggaacatacccaccacgccaaatatatccgcacttcgtacgacacaaaactcgatcacctactccacctaatgctgaaggaatggaagatggagttgcccaaactggtgatctccgtgcacggagggatccagaatttcacgatgccgagcaagtttaaggaaatcttcagtcaaggcctagtgaaagcggccgaaacaacgggagcatggattatcacagaaggaatcaacaccggggtctctaaacacgtaggcgatgccctgaaatcccacagctcacacagtctccgcaaaatttggacggtgggtatcccaccctggggcgtgattgaaaaccagcgggacctgattggcaaggacgttgtgtgtctgtaccagacactggataaccccctctctaagcttacaaccttaaactctatgcactcccactttatcctgtcagatgacggcaccgttggtaagtatggcaacgaaatgaagttacgacggaacctggagaagtatttgagtctccagaaaatccattgccgctcccgccagggggtgcccgtggtcggattggtggtcgaaggtggtcccaacgtgattttatctgtctgggagaccgtcaaggacaaagatcctgttgtcgtgtgtgagggaacagggagagctgccgacctgcttgcttttacgcataaacacctagcagacgaaggtatgctgaggcctcaagtgaaagaggagattatctgtatgatccaaaatacctttaacttctccctcaagcagtccaagcacctgttccagatcttgatggaatgcatggtccaccgcgattgtatcactatattcgacgccgactctgaagaacagcaagatttagatcttgcaatcttgacggctctgctgaagggaacgaatctcagcgcctctgaacaactgaatcttgccatggcttgggatcgcgtggacattgccaagaaacacatccttatctatgaacagcattggaaacctgacgctctagagcaggctatgtccgacgctctcgtaatggatagagtggactttgtgaaactgctaatagagtacggagtcaacctgcaccgattcttaaccatccccaggctggaggaactgtataacactaaacagggacccacgaacacgctgctccatcacctcgttcaagatgtgaaacaacatacgctcctctctgggtaccgaatcactctgatagacatcgggctcgtggtggagtatttgattggcagagcctatcgcagtaattacaccagaaagcattttagggcgctgtataacaacctctatcggaaatacaagcatcagcgtcattccagtggcaacaggaatgaatcagccgagtccacacttcactctcagttcattaggacggcccagccttataagttcaaggagaaaagtatagtgttgcacaagagtagaaagaaatcaaaagagcaaaatgtgagcgatgaccctgagtcaaccggatttctgtacccttacaacgatctcctggtgtgggccgtcctcatgaagcgtcagaaaatggcaatgttcttttggcagcacggagaggaagcaaccgtcaaggcggttatagcctgcatcctgtatagggcaatggctcatgaggccaaggagagtcacatggtcgatgatgcctccgaggagcttaagaactactccaagcagttcggacaattagcgctggacttactcgagaaggccttcaagcagaacgagcgcatggcaatgactctcctaacatacgaacttcggaattggagcaactcaacttgcctgaaactggccgtgtctggaggcttgcggccatttgtaagccatacttgcacccagatgttgctgacagatatgtggatggggagactcaagatgcggaagaacagctggctgaaaattatcatatccatcattctccccccaaccatcctgaccctcgagttcaaatctaaggccgagatgagccacgtgcctcagtcccaggactttcagttcatgtggtactactccgatcagaatgcatccagctcgaaagagtctgcctctgtgaaagaatacgacctggagagaggtcacgacgaaaagcttgacgaaaatcagcacttcggcctcgagagcgggcaccagcatttgccctggacacggaaagtttatgaattctactccgctcctatcgtcaagttctggttctatacgatggcctatctggcattcctaatgctcttcacttatacagttctggtagaaatgcaacctcagccttccgtccaggaatggcttgtgagcatttatatcttcaccaatgcgattgaggtggtgagggaaatatgtatctcagaacccgggaagttcactcagaaggtgaaagtttggattagtgaatattggaatctaacagaaaccgttgccattggcctattctccgcaggatttgtgcttcgctggggtgatccacccttccacacagcaggacgtctgatctactgcatcgacataattttctggttctcaaggttactggacttcttcgcggtgaatcagcacgctggcccctacgttacaatgatcgccaagatgaccgccaatatgttctatatcgtgatcataatggctatagttttgttatctttcggggtagcaagaaaagctattttgtcacctaaagaacctccatcttggagcttggctagggacatcgtgtttgagccttactggatgatctatggagaggtgtatgccggagagatagatgtctgcagctcgcagccctcgtgtcctcctggatcttttctgacaccattccttcaggcagtatatctctttgtccaatacattattatggtcaacctcctcatagcctttttcaacaatgtttacctggacatggagagcatcagcaataacctttggaaatataatcgttatcgatatataatgacctatcatgaaaagccttggctgcccccacctttgattttgttgagtcacgttggcctcctcctacgcagactgtgttgtcatcgggccccacatgaccaggaagaaggtgacgtgggtcttaagctctacctttccaaggaagaccttaagaagctgcacgactttgaggaacagtgtgtagagaaatactttcatgaaaagatggaagatgtcaactgctcatgtgaggaacggatcagggtgacctcagagagagtaactgagatgtactttcagctgaaggagatgaacgaaaaggtcagcttcatcaaggacagtcttctctcactggactcccaggtgggtcatctgcaagacctgagtgcattgactgtggacaccctaaaagtgctctcggccgtcgacacactccaggaggatgaggcactgcttgcgaaacgcaagcacagcacctgcaaaaaactaccacatagctggtctaacgttatttgtgctgaagtgttaggcagcatggagatcgccggagagaagaaataccagtattatagtatgccatcctcgcttttgaggagtctggcaggtggacggcatccccctcgggtgcagaggggcgctctgctcgaaattacaaattctaaacgtgaggctacgaacgtgagaaacgatcaagaacgccaggagacgcagagttccatagtagtatccggggtgtcccccaatcggcaagcacactcgaaatacggccagttcctgctcgtgcctagtaacctcaagagggtcccttttagtgctgagacagtgctgcccctgtcgcgtccaagcgtgcccgacgtgctcgctaccgagcaggacatccagaccgaggttttggtgcacttaaccggccagactccagttgtctcagactgggccagcgtggacgagcctaaggagaagcacgagccaattgcacatctgctcgatggtcaggacaaagcagaacaagtactgccaacattgagttgcactccagagcctatgactatgtcgagtccactgagtcaagcaaaaatcatgcagacaggcggcggctacgtgaattgggccttctcagaaggggatgagacgggggtcttttctattaagaagaagtggcagacatgtcttccctcgacatgtgactccgactcgtctagatctgagcaacaccagaaacaagctcaagactcttcccttagcgacaactccacccggtcagctcagtcttccgaatgtagtgaagtgggcccttggctgcagcccaataccagcttttggatcaaccccttacgtaggtaccgccccttcgccaggtcccacagctttcggttccataaggaggaaaagctgatgaaaatctgtaaaattaaaaacctcagtggttcttcggagatcggccagggcgcatgggtcaaagctaaaatgctcaccaaggaccggaggctgagcaagaagaagaaaaacactcagggcctccaggttcccatcatcaccgtaaatgcttgctctcagtcagatcagctcaatccagaaccaggagagaactctatttctgaggaagagtacagcaagaactggttcactgtgagcaagttcagtcacacaggtgtggagccctatatccaccagaaaatgaaaacaaaggagattgggcagtgtgctatacagatttcagactacctcaagcagtctcaggaagacctgtctaaaaactctctctggaactcccggtcaactaacttgaataggaacagcttgcacgtgattaagatgccaatcagctccttaatctctgagatatccgcctctttgaaaagcccccaggagccccaccaccactatagcgccattgagaggaacaatctgatgagactcagtcagacgattccattcactcccgtgcagctgttcgctggcgaggaaattacggtctaccgactagaggaatctagtccgctgaacctggacaaatccatgtctagctggagtcagcgcggccgggctgccatgatccaggtgctgtcacgtgaggagatggatggcggactgcgcaaggccatgagagtggtgtccacttggagcgaagacgatatcctgaaacccggtcaggtattcattgttaagtcttttcttccagaagtcgtgaggacctggcataagatctttcaggagagcacggtacttcacctgtgtctcagggagatccagcagcagagagccgcccaaaaattaatctatacattcaaccaagtaaagcctcagacgatcccttacaccccccgcttcctggaagtgttcctcatctactgccactcagcaaaccagtggcttaccatagagaaatatatgaccggggagtttcggaaatataataacaacaacggagacgaaatcacccctaccaacaccctggaggaacttatgctggccttctctcattggacttatgaatacaccagaggtgaattactcgtccttgatctgcagggggtgggagaaaatcttactgaccctagcgtcataaagcccgaagtcaagcagtcccggggcatggtgttcggccctgccaatctgggcgaagacgccattcgcaattttatcgcaaagcaccactgtaatagttgctgccggaagttaaaactgcccgatctaaagaggaatgattatagcccggagcgcatcaactcaacatttggtctagagattaagatcgagtctgctgaggagccacctgctagggagactgggcgtaatagccctgaggacgacatgcagctctag

SEQ ID NO: 194341 - DNA, 6068 bp, Artificial Sequence
  derived and/or modified sequence
atgaaggaacagccggtgcttgaacggcttcaaagccagaagagttggataaaaggggttttcgataaacgcgaatgttccaccataatcccaagctcaaaaaatccgcacaggtgtactccagtctgccaggtgtgccaaaacttgatccggtgctactgcggaaggctgataggagaccatgcagggatcgactattcatggactatctcggccgctaaaggcaaggagtctgagcaatggtcagtggaaaagcacacaaccaaatcacctaccgataccttcggtaccattaatttccaggatggcgagcacacacaccatgccaaatacattcgcactagctacgacaccaaactggatcatcttttacacttgatgctgaaagagtggaagatggagttgccaaaactcgtcataagcgttcacggtggcatacagaattttaccatgccctctaagtttaaggagatcttctcccagggtttggtgaaagctgccgagaccactggcgcatggattatcactgaagggatcaatacaggcgtgtctaagcacgtgggcgatgctctcaagagccatagctcccattctctgcgcaaaatctggacagtgggtattcctccatggggcgtgatagagaaccagagagacttgatcggaaaagacgttgtgtgcctgtaccagactctggacaaccccctcagcaaactgaccaccttaaactcaatgcactctcatttcatactatctgacgacggcactgtggggaagtacgggaacgagatgaagttgcgccgtaacctagagaagtacctttccctccaaaagatccactgcaggagcaggcagggagtgcccgtcgtcgggttggtcgttgagggtgggcctaacgtgatcctgtccgtgtgggagactgtgaaggacaaggacccagtggtggtctgcgaaggtaccggccgagcagcggacctgctggctttcactcataaacaccttgctgatgaggggatgttgcgcccacaggtgaaggaggagatcatctgcatgattcagaacactttcaacttcagtctaaagcagtccaaacacctttttcaaatcttaatggagtgtatggtgcaccgggattgtatcactattttcgatgctgattccgaggagcagcaggacctggacctggcaatcctgactgccctgctgaagggcaccaacctgtccgcctctgagcagctgaatttggctatggcctgggacagagtggacatagccaagaagcacatcctgatctatgagcaacactggaaaccagacgctctggaacaagccatgtcggacgcactagtgatggatcgggtggattttgtcaagcttctgatcgagtatggcgtgaacctgcatcgattccttaccatcccaagactggaggagctgtacaacaccaagcagggcccaacgaatacgctgctgcaccatctagtacaagacgtgaaacagcacaccctcttgagtggatatagaattaccttgattgacatcggtttagtggtggagtatctcattgggagggcttacagaagtaattacacgcgaaagcatttcagagccctgtacaataacctatacagaaagtacaaacaccaaaggcacagctctggaaacaggaatgagtccgcagaatctaccctgcactcacagtttatccggaccgcccagccctataagtttaaagaaaagtccatagtactgcataagagcaggaaaaagtctaaagaacagaacgtgtcagatgaccccgagagcacaggctttctctatccctataacgaccttctcgtgtgggccgtgctaatgaagagacagaaaatggccatgttcttttggcagcatggcgaggaagcgaccgtgaaggccgtgatcgcctgtattctgtatagagcgatggcacatgaggcaaaagaaagtcatatggtggacgacgcatcagaggagctgaagaactattccaagcagtttggacaactagctttggaccttcttgagaaggccttcaaacagaatgaaagaatggcaatgaccctgcttacttatgagttgcgcaattggagcaattcaacgtgccttaagctggccgtctcaggcggactgagacctttcgtcagtcatacttgcacccagatgctgttgacagacatgtggatgggtcgccttaagatgcgaaaaaattcctggttgaagatcatcataagcattattctcccacctacaatcctgactctagaattcaagagtaaagcagaaatgtcccatgtgccccagtcccaggacttccaattcatgtggtattactctgatcaaaatgccagttcgagtaaagagtccgcaagcgtcaaggagtacgacctcgaaaggggccacgatgagaagctggatgagaatcagcatttcggattagagagtggacaccagcatctcccttggacacggaaggtttatgagttttatagcgctccaatcgtgaaattttggttttatactatggcgtatctggccttcttaatgctctttacctacaccgtactggtagagatgcagcctcagccgagcgtccaggaatggctagtgtccatttatatttttactaacgcgatcgaggtggtccgcgaaatttgcatttccgagcccggaaagttcacccaaaaggtcaaggtgtggattagcgagtattggaacctcaccgagactgttgccattgggctcttttctgctggcttcgtactccgatggggggatcctccctttcacaccgcgggaaggctcatctactgtattgacattatattttggttcagtagactgctggacttttttgccgtgaatcaacacgccggaccttatgtgactatgattgcaaaaatgacagcgaacatgttttacatcgtgatcattatggctattgtgttgctgagctttggagtggccagaaaggctattctcagcccaaaggagcctcctagctggtcgctcgccagagacatagtgttcgagccttactggatgatctacggagaggtgtatgcaggcgagattgatgtttgctcatcacagccaagttgtccaccgggtagttttctaacaccctttctgcaggcagtgtatttatttgtgcaatatattattatggtgaacctgctgatcgcgtttttcaacaatgtgtatctggatatggaaagcatctccaataacctgtggaaatacaaccgctaccgatacatcatgacatatcacgagaaaccttggctcccacctccacttatcctgctttcccatgtgggtctccttctccggcgtctttgctgccatcgggctccacacgatcaggaagagggcgatgtcgggctcaagctttatttatctaaggaagaccttaaaaaactgcacgattttgaggagcaatgcgtggaaaaatatttccatgaaaagatggaagatgtcaattgttcttgcgaggagcgtattagggtgacatctgaacgagtaaccgagatgtactttcagctgaaagagatgaacgagaaggtgtcgttcatcaaagattccttgctgagtctggattcacaggtcggtcatctgcaggacctgagcgccctgaccgtggacacgctgaaggttcttagcgcagtggatacccttcaagaagatgaggcactgctggccaagcgtaagcacagcacgtgcaaaaaactgccccattcctggtccaacgtcatctgtgccgaagtcctgggatcaatggagatcgccggagagaagaaatatcaatattacagcatgccgtcgtccctgctcagatcactggctgggggaaggcaccctcccagggtgcagaggggggcattgctagagatcactaatagcaagagggaggccacgaatgtcagaaatgaccaggaacggcaggagacacagagctcaattgtggtaagcggagtctctcctaatcgccaggcccacagcaagtatggacagtttctcctggtgccatcgaacctgaagcgagttcccttctcggccgagactgtgttgcccctctcacgaccctccgtgcctgatgtgctggccaccgagcaagatattcagaccgaggtacttgtgcaccttacaggacagacccctgtcgtctcggactgggctagcgtagacgagccaaaggaaaagcacgaacccatagctcaccttctcgacggtcaggataaggcggagcaggtgctgcccacactgtcttgtactcctgagccaatgaccatgagttcaccgcttagccaggcgaagatcatgcagacaggaggtggctatgtgaattgggctttctcggaaggcgatgagaccggcgtattctcaatcaagaagaaatggcagacctgcctgccatccacttgcgatagcgattcatctaggtcagaacagcaccagaagcaggcacaggacagctctttaagcgacaatagtacgagatctgctcagtcatccgaatgctctgaggtgggcccttggttgcagcctaacacatctttttggataaatccgctgaggcgatacaggccctttgctcggtcacactctttccgcttccacaaagaggagaagctcatgaaaatttgcaaaatcaagaacctctccggcagcagcgagatcggccaaggagcatgggtgaaagcgaaaatgctcaccaaggatcgcaggctctccaagaaaaagaagaatacacaaggtttgcaggtgccaattattaccgtgaacgcatgctcccagagcgaccagctgaaccccgagccaggagagaattctattagtgaggaagagtatagcaagaactggtttaccgtgtcaaaattctctcataccggagtcgagccctatatccatcagaagatgaagaccaaagaaattgggcaatgtgccatacagatctcggattacttgaagcagtcacaggaagacctgtccaagaacagcctctggaattcaagatcaacaaacttgaaccgcaactcactcctgaaatcttccataggggtcgataagatcagcgcatcccttaagtcaccccaggaaccccatcatcactactcagcgatcgaacggaataatttgatgcgcctctcccagaccatcccttttaccccagttcaattgtttgccggtgaagaaatcaccgtataccgtttggaggaaagtagtccactgaacctggacaaaagcatgtcttcatggagccaacggggacgagctgcgatgattcaagtactgtctcgcgaagagatggacgggggtctcagaaaggctatgagggttgtgtctacatggagcgaggacgacattctgaagcccggacaggtgtttatcgtgaagtcattcctgccagaagtggttcgcacgtggcataagatttttcaggaatcaaccgtcctccatttgtgcctgagagagatccaacagcagcgagctgcgcaaaagctcatttacactttcaatcaggtgaaaccccagacaatcccgtacactccacggttcctggaagtgtttttaatttactgtcacagcgcgaaccagtggttaaccatagaaaagtacatgacgggggagttcagaaagtacaataacaataacggagacgagattacccccactaatacccttgaggagcttatgcttgctttttcgcactggacttatgaatacacacggggagaactgctggtgctggatctgcaaggagttggggagaacctgacagacccaagcgtgatcaaaccagaagttaaacagagtagggggatggtgtttggccctgccaaccttggagaagatgccattagaaattttatcgccaaacatcactgcaatagctgttgcaggaagttaaaacttccagatctgaagcggaatgattattcaccagaaaggatcaactccactttcggactggagatcaaaattgagtctgccgaggagcctccggctagggaaaccggcaggaattcgcccgaagacgacatgcagcttta

SEQ ID NO: 194342 - DNA, 5843 bp, Artificial Sequence
  derived and/or modified sequence
atgaaggaacagcctgtgctcgaacgactccagtcacaaaaaagctggattaaaggggtatttgacaaacgcgaatgtagcacaataataccctcctctaaaaaccctcataggtgcacccctgtctgtcaggtgtgccagaacctgattcggtgttactgcggtcgactgataggcgaccatgcgggtatcgactactcttggacaatatctgcagctaaaggcaaagagtcagagcagtggtcggtcgaaaagcatactactaagtctccaacggatacttttggaaccatcaacttccaggacggcgaacatacgcatcacgctaagtacattcgcactagctatgacacaaagttggaccacttgcttcacctgatgttaaaggagtggaaaatggagctcccaaagctggttatttccgtccacggcggaattcagaacttcacgatgcccagtaagttcaaggaaattttctcacaggggctcgtgaaagccgctgagactacaggcgcttggataatcaccgagggcatcaataccggagtgtccaagcacgttggcgacgctctaaagagccattccagtcattctcttcgcaaaatttggactgtcggaatccccccttggggggtgatcgaaaatcagagagacttaatcggcaaggatgtggtctgcttgtaccaaacattggacaaccctctgagcaagcttacaaccctgaactctatgcatagccactttatcctcagtgatgatgggacggtcggaaaatacggtaacgaaatgaagctcagaagaaacctggagaagtaccttagccttcaaaaaatccactgcagatcacggcaaggcgtccccgtagtgggcctagtggtggagggtggccctaatgtgatcctcagcgtgtgggagactgtgaaagacaaggatccagtcgtggtgtgcgagggtacagggagagccgcagatcttttggccttcacccataagcacctggcagacgaaggaatgttgaggcctcaggttaaggaagaaataatctgtatgattcaaaatacttttaactttagccttaaacaatctaagcatctgttccaaatactgatggaatgcatggttcatagggactgcatcacaatcttcgacgccgactcagaagagcaacaggatttggacttggccatacttaccgcactgcttaagggcacgaatctgagtgccagcgaacagctaaatctagcaatggcgtgggatcgggtggatatcgcaaagaaacacattctgatctatgagcagcactggaaacccgacgccttggagcaagccatgtcagatgcacttgttatggacagagtggatttcgtaaaactcctaatcgaatacggtgtgaacttacacagattccttactatacctaggctggaggaactgtataacacaaaacaaggcccaactaacaccctccttcaccatctggttcaggacgtcaaacagcacactctgttgagtggctaccgtattacattgatcgatattggtttggtggtagagtacctgatcggcagggcataccgctcgaattacacacggaagcactttagagccctctataacaatctctatcgaaaatacaagcatcagcgtcactcgtccggtaatcgcaatgagagcgcagagagcaccctgcatagccagtttattagaacagctcagccttataaattcaaagagaagtcgatagttttgcataagagccgcaagaagtcaaaagagcagaatgtgagcgatgacccagagagcaccggattcttatatccttacaatgacctcctggtgtgggcagtgctgatgaaacgccagaaaatggcgatgttcttttggcaacacggcgaggaggccacggtgaaagccgtgatcgcttgcattctttaccgagctatggctcatgaggcgaaggagagccatatggtggacgacgcctctgaggagctgaagaattattcaaagcagttcggtcagcttgcactggatttactagaaaaggccttcaagcagaacgaaagaatggccatgactctcctcacgtacgaattacgaaattggtcaaacagcacctgcctcaagcttgctgtttcggggggtctgaggccttttgtgtcacatacatgcacccaaatgctcctcactgacatgtggatgggacgcctcaagatgcggaagaactcctggctgaaaattattatttccatcatcctcccacccacgatcctgaccctggaattcaaatcaaaggccgaaatgagccacgtgccacaaagtcaggacttccagttcatgtggtactactccgatcagaacgcctcctcatctaaagagagtgcctccgtgaaggagtatgacctcgagcggggtcacgatgagaagttggatgagaatcagcactttggcctcgagagcggacatcagcacttgccttggacgcgcaaggtatacgagttttactcggccccaatcgtgaagttttggttttataccatggcctatctcgcctttcttatgctctttacatatactgttctcgtggagatgcagccacaaccaagcgtccaggagtggttagtgtccatatatatctttacgaacgccatagaggtcgtgagagagatctgtattagcgaacccggaaagttcacccagaaggtgaaggtctggatctctgaatactggaatctgaccgagacggtggctattggacttttcagtgccggtttcgtcctgaggtggggagatccccctttccacaccgcaggaagattaatctattgcatagacatcattttctggttttccagacttctcgatttttttgccgtcaatcaacatgccggtccctatgtgactatgatcgctaagatgactgctaacatgttttatatcgtgattatcatggccattgttctgctatcctttggcgtcgctaggaaggccattctgtccccaaaagagcctccctcctggtcactggcaagggacattgtgttcgagccctactggatgatatacggtgaggtgtatgccggtgagatagacgtctgcagctcgcaaccctcatgcccacctgggagctttctgacaccctttctgcaagccgtgtatttatttgtgcaatacattattatggtaaacctcctgattgcatttttcaataatgtgtatctggatatggagtctatttccaacaatttatggaaatacaatcgttatcgatacattatgacttatcatgagaaaccatggctgccgccacctctgatactgctcagtcacgttgggcttctgttgcggaggctttgttgtcacagggcccctcacgatcaggaggagggagacgtggggctgaagctttacctcagtaaggaagaccttaagaagttgcacgacttcgaagaacagtgcgtcgagaaatatttccacgaaaaaatggaggacgtgaactgttcttgtgaggaacgaattagagttacctcagagcgcgtcacggaaatgtattttcagcttaaggagatgaacgaaaaagtctcatttatcaaggactccctgctgagcttggactcccaggtgggccacctccaggatttaagtgcactcacagtggacaccctgaaagtgcttagcgcagttgacacattgcaagaggacgaagctttgctggctaagaggaagcacagtacatgtaagaaattgccacactcttggtccaacgtgatctgtgccgaagtcttgggctccatggagatcgctggggagaagaaataccagtactacagcatgccctccagtttgctccggagtctggccggtggacgtcatccaccccgagtgcagaggggggctctcctggaaataacaaattctaagcgcgaagctaccaatgtgcggaacgatcaggagagacaggagacccaatcttccatcgttgtctctggcgtttctcctaaccgacaggcccatagtaagtacggccagttcctcctagtccccagcaatctgaagcgtgtgccattttcagccgagacggttctcccacttagtcggccttcagtgcccgacgtgctggccaccgaacaagacatccaaacagaagtgttagtgcatctaactgggcagactccagtagtgagcgactgggcttccgtggatgaaccaaaggaaaagcacgaaccaatcgcacacctactggatggacaggacaaggcagagcaggtattgcccaccctgtcatgcacccctgagcctatgactatgtcctcccctctgtcccaggccaaaatcatgcaaactggcggaggctatgtgaactgggccttctccgaaggtgacgagactggcgtattctctatcaagaaaaagtggcagacttgcttgccaagcacgtgcgatagcgattcctcccgaagtgaacaacaccaaaaacaggcccaggactcgagtctgtcagataatagcacccggtcagcccagagttcagaatgttctgaggtgggaccttggttacagccgaacacatcattctggattaatcctttgcgccgttaccggcctttcgcaagatctcactcttttagattccataaggaagagaagctcatgaaaatttgtaagatcaagaacctgtctggaagctcagagattggccaaggcgcatgggtgaaggcaaaaatgctaactaaagacaggagactaagcaaaaagaaaaagaatacccagggcctacaggtccctattatcacagttaatgcttgttctcagagcgaccaattaaaccctgagccaggtgagaattcaattagcgaggaagaatactcaaaaaattggttcactgtctcaaaattcagccataccggggtggaaccttatatccaccagaaaatgaagacgaaagagatcggacaatgtgctatccagatatctgattatctcaaacagagtcaagaagatctctccaaaaatagcttatggaatagtcgctccaccaacctcaaccgcaacagcctgcacgtcataaagatgccaatatccagcctcatctctgagatttcagcgagtttaaaaagcccccaggaacctcaccatcactactctgcgatcgagcggaacaacctgatgcgcctgagtcaaacgatcccctttacccctgtccagctgttcgcgggtgaagaaatcaccgtataccgcctcgaggaatcttctcccctcaacctggacaaatctatgtcttcatggtcgcagcggggacgagccgctatgatccaagtgctctctagagaggaaatggatggtggcctgcggaaggcgatgagagtggtctctacctggagtgaggacgatatactcaagccaggccaggtgttcatcgttaaatccttcctccccgaggtcgtgcgaacatggcacaagatattccaggaaagcactgttctccacctctgccttagagaaatacagcagcagcgcgcagctcaaaaactgatctataccttcaatcaggtaaagcctcagaccattccctacacaccacgttttctggaggtattcttgatctactgtcacagcgcaaaccagtggctcaccatcgaaaagtatatgaccggcgagttccgcaagtacaataataataatggggacgagataacccctactaatacattggaggagctgatgctagccttctctcactggacatacgagtataccagaggggagctcctggtgcttgacttgcaggctctgtggttctgggactccatgcttaaagccagattgggaggctggagaatgta

SEQ ID NO: 194343 - DNA, 6080 bp, Artificial Sequence
  derived and/or modified sequence
atgaaggaacagcctgtcctcgaacggttacaatcacaaaaaagctggatcaagggagtgtttgacaagagggaatgttctacaatcattcccagttctaagaaccctcacagatgtacgcccgtgtgtcaggtgtgccagaacttgattcgatgttactgtggcaggttaattggcgatcatgctggcatcgattactcctggacaatctctgccgcaaaaggaaaggagtccgaacaatggtccgtggaaaaacataccaccaaatctccaactgatacctttggaaccatcaacttccaggacggcgagcacacacatcatgccaaatatatcagaacttcctatgacacaaagctggaccatctgctccacctcatgcttaaagagtggaaaatggagctccctaaattagtgatctcagtgcacggaggtattcagaatttcactatgccctctaagtttaaagagattttttctcaaggactggtgaaggccgctgagaccacaggagcatggattataactgagggaattaatacgggagttagcaaacatgtaggtgatgcacttaaatcccactctagccactcactgaggaagatttggactgtggggatccccccatggggcgtgatcgagaaccagcgggatctcatcggtaaggacgtggtgtgtctctatcagacattggacaacccactatccaaactcaccacgttaaattcaatgcacagccacttcattctgtccgatgatgggaccgtgggcaaatacggcaatgaaatgaagctcagacgcaatctcgagaaatacctttctcttcaaaaaatccattgtcgcagccgccagggggtccccgtcgtgggcctcgttgtggaagggggtcccaatgttatactctcggtttgggagacagtgaaggacaaggatcctgtcgtggtttgcgaggggacaggtagggccgcagacctgctcgcctttacgcataagcacttggcagacgagggtatgctccgaccccaggtcaaagaagagataatctgtatgatacagaatacgtttaacttttctttaaagcaatctaagcacctgttccagatacttatggagtgtatggtgcaccgcgactgcataacgatttttgacgctgacagcgaagagcagcaggatctagatcttgctattctgacagctctcctgaaggggacaaatttatctgctagcgaacagctcaacttggccatggcttgggaccgggttgacatcgcaaagaaacatattttgatatatgaacagcactggaaaccggatgctctggagcaggccatgtcagatgcccttgttatggatcgggtggattttgtgaaactgttgattgagtacggagtgaacttgcatcgatttttaacaattcctagacttgaagagttgtataatactaagcagggccctactaacactctgctgcaccatctagttcaggacgtcaaacagcacaccctcctgagtggctacaggataaccctgattgatatagggttagtggtggagtatctgatcgggagggcatacagatccaattacactagaaaacacttcagagccctatacaataacctgtaccgcaagtacaaacaccagcgacatagctctggaaataggaatgagtcagcggaatctaccctacattcgcagttcattcgcactgcccagccctacaagtttaaggaaaagtctatagtgctgcataagtccaggaagaagtccaaggaacagaacgttagtgacgaccccgaaagtacgggctttctttacccttacaatgatctgcttgtgtgggccgtgctcatgaagcggcagaagatggccatgttcttctggcagcacggagaggaagccacagtcaaagctgtgattgcctgtatcctctaccgtgcaatggcccacgaggccaaggaatcacacatggtggatgacgcgtctgaggagcttaagaattacagtaaacaattcggccagcttgctctggaccttctggaaaaggcgttcaaacaaaatgaacgcatggccatgactctgttgacatacgagcttcgtaactggagtaattcaacatgcctgaagctagccgtgtcaggaggcctgaggcccttcgtgtcacacacgtgtacgcaaatgctgctcaccgatatgtggatggggagattgaaaatgagaaagaacagttggcttaaaatcataatatcaattatccttccacctaccattcttactctcgagtttaaaagcaaggcagaaatgtcacacgtgccccaaagccaggatttccagttcatgtggtactattcagatcagaatgccagttcctccaaggaaagtgcttctgtgaaggagtacgacctggagaggggacatgatgagaagcttgatgaaaaccagcattttggcctcgaaagcgggcatcaacaccttccctggacgaggaaagtttacgagttttattcagcacccatcgtcaaattttggttttacaccatggcatacctagcattccttatgctgttcacttataccgtgctggtcgaaatgcagccccagccgagcgtgcaggagtggctggtatccatctatatctttactaacgccattgaagtggtgcgggaaatctgtatatcggagcctgggaaattcacccagaaagtaaaggtgtggataagcgagtactggaaccttaccgagactgtggccatcgggctctttagcgcgggatttgttctgaggtggggtgatcccccattccatacggccggacgtctgatctactgcatagacatcatcttttggttcagtcggctcttagacttcttcgcagttaaccagcacgctggcccttatgtgactatgattgccaagatgactgctaatatgttctacatcgtcatcattatggcaattgtgttgctctcttttggagtggcgaggaaagcaatcctctcgccaaaagaacccccttcctggagcctagcacgtgacatcgtgttcgagccatattggatgatttacggtgaggtgtatgcaggcgagattgacgtatgctcttcacagcctagttgtcctcccggatcattccttacccccttccttcaggccgtttatctgttcgtgcagtacattattatggtcaacctgttaatcgctttctttaacaatgtgtacttggacatggaaagcatttctaacaatctgtggaaatacaaccggtaccgctatattatgacatatcacgaaaagccctggctgcctccgccattgatcctgttgtcacacgtgggcctgctgctgagacgtctctgctgccaccgggctccccatgaccaggaggagggtgacgtcggcttaaaactttatctgagtaaggaagaccttaaaaaacttcatgattttgaggagcaatgcgtagaaaagtattttcatgaaaagatggaagacgtgaactgctcttgtgaagaacgaattcgtgtaaccagcgaacgtgtaaccgaaatgtattttcagctgaaggaaatgaacgaaaaggttagcttcatcaaggattccctcttatctcttgacagccaagttgggcatctccaagatctatccgctctcaccgttgatacgctgaaggtgctgagcgccgttgatacactccaggaggacgaggccttactggcgaaacgaaagcattccacttgcaaaaagctcccccactcttggtcaaatgttatatgcgccgaagtactaggctcaatggaaattgctggcgagaagaaataccagtactattcgatgccttcatctctattgagaagcttggccggtggcaggcacccacccagggtccagaggggggctctgctggagattactaattcaaagagagaagctacaaacgtgcgcaacgaccaggaaagacaggagacacagagttccattgtcgtctctggtgtctctcccaaccggcaggctcattccaaatacggacagtttcttttggtcccttccaatttgaagagagttccattcagcgcagaaactgttctgccattgtcccgccctagtgtgcccgatgtcctggccactgaacaggacatccagaccgaggttttggtgcatttgaccgggcaaactcctgtcgtgagtgactgggcaagcgttgatgaacccaaggagaaacacgaaccaattgcccatcttctggacggccaggacaaagccgaacaagttcttccaaccctgtcctgcacacctgaacctatgacaatgagcagtccactatcacaggccaagatcatgcagaccggtggtggatacgtcaattgggcatttagcgagggagacgagactggagtgttctcaatcaagaaaaagtggcagacgtgcctgcctagtacgtgcgattctgacagctccagatccgaacagcaccagaagcaggcccaggattcgtccttgtccgacaactccacaagaagcgcccagtcaagtgagtgcagcgaagtcggcccatggcttcagcctaatacaagtttctggataaacccactgcgtcggtacaggccttttgctcggtcccacagcttcagatttcataaggaggaaaagcttatgaagatctgcaaaatcaagaacctgagcggaagctccgaaatcggccagggggcttgggtgaaggctaaaatgcttaccaaggaccggagactgagcaaaaagaagaaaaatacacaagggcttcaggtccctattattacggtgaacgcttgcagccaatccgatcaactcaatcctgagccgggtgagaattctatttctgaggaggaatattccaaaaattggtttaccgtgtccaagttttctcataccggtgtggagccatatatccaccaaaaaatgaagaccaaggagataggacaatgtgccattcagatttccgattacctgaagcagtcgcaggaggatctgtctaaaaactccttgtggaactcaaggtccacaaacctcaaccggaattctttacacgttattaagatgcctatttccagccttatcagcgagattagcgcgtccctgaagtccccacaggagccccatcatcattacagcgctattgaaaggaacaacctgatgcggttatcccagacaatccccttcacgccagtacagctgttcgccggagaggagatcactgtgtacagactcgaggagtctagtccccttaatctagataaatccatgagctcatggtcccagagaggtcgcgctgccatgattcaggtgttatccagagaggagatggacggtggactgcggaaagccatgagggtagtgtcaacgtggagcgaggacgacatcttaaaacctgggcaagttttcatcgttaagtcattcctgccagaggttgttcgtacctggcacaaaattttccaggagagcacagtcttacacctctgtcttagagaaatccagcagcaaagagcagctcagaagctgatctacactttcaaccaggtgaaaccccagaccattccctacactcctcgatttctggaggtatttcttatctactgccactcggctaaccaatggcttactattgaaaagtacatgactggcgagttccgcaaatataataacaacaatggtgacgagattactcctaccaataccctggaggagctgatgttggcatttagccactggacatatgaatatacccggggagaactgctggtcctggatctccagggagtgggcgagaatttgacagatccctctgtcatcaagcctgaggtcaaacaaagccgcggaatggtattcggccctgccaatcttggcgaagatgcgattagaaactttatcgcaaagcaccattgcaacagctgttgccggaaactgaagcttccagacttgaaacgtaatgattatagccccgaacgcattaattctacgttcggtctggaaataaaaatcgagagcgccgaggaacccccagcacgagagacgggccgaaactctcccgaagatgatatgcagctata

SEQ ID NO: 194344 - DNA, 8425 bp, Artificial Sequence
  derived and/or modified sequence
actacaaaggatgtctgtgatgacagtggccatcccatttgatcctcgttattcttcttttatcgaaggaaactgagagtcaccttcttttctaggcagttaggtaactgaagccgaaaggtattgtgacagatccactgggctgtaaaaggcagcgtgtggaggtggagcccagagtttctgcctccacagttaaaagctcagacagggctttgggagcagggcctgcaaatcaaagatgaaagaacaacctgtcttggagcgcttgcagtcccagaaatcctggattaaaggagtatttgacaagagagaatgtagcacaatcatacccagctcaaaaaatcctcacagatgtactccagtatgccaagtctgccagaatttaatcaggtgttactgtggccgactgattggagaccatgctgggatagattattcctggaccatctcagctgccaagggtaaagaaagtgaacaatggtctgttgaaaagcacacaacgaaaagcccaacagatacttttggcacgattaatttccaagatggagagcacacccatcatgccaagtatattagaacttcttatgatacaaaactggatcatctgttacatttaatgttgaaagagtggaaaatggaactgcccaagcttgtgatctcagtccatgggggcatccagaactttactatgccctctaaatttaaagagattttcagccaaggtttggttaaagctgcagagacaacaggagcgtggataataactgaaggcatcaatacaggagtgtccaagcatgttggggatgccttgaaatcccattcctctcattccttgagaaaaatctggacagttggaatccctccttggggtgtcattgagaaccagagagaccttattggaaaagatgtggtgtgcctgtaccagactctggataaccccctcagcaagctcacaacactcaacagcatgcactcgcacttcatcctgtctgatgatgggaccgtgggcaagtatggaaatgaaatgaagctcagaaggaacctggagaagtacctctctctgcagaaaatacactgccgctcaagacaaggcgtgccggtcgtggggctggtggtggaaggcggtcccaacgtcatcctgtcagtgtgggagactgtcaaggacaaggacccagtggtggtgtgtgagggcacaggtagggcggctgacctcctggccttcacacacaaacacctggcagatgaagggatgctgcgacctcaggtgaaagaggagatcatctgcatgattcagaacactttcaactttagtcttaaacagtccaagcaccttttccaaattctaatggagtgtatggttcacagggattgtattaccatatttgatgctgactctgaagagcagcaagacctggacttagcaatcctaacagctttgctgaagggcacaaatttatcagcgtcagagcaattaaatctggcaatggcttgggacagggtggacattgccaagaaacatatcctaatttatgaacaacactggaagcctgatgccctggaacaagcaatgtcagatgctttagtgatggatcgggtggattttgtgaagctcttaatagaatatggagtgaacctccatcgctttcttaccatccctcgactggaagagctctacaatacaaaacaaggacctactaatacactcttgcatcatctcgtccaagatgtgaaacagcatacccttctttcaggctaccgaataaccttgattgacattggattagtagtagaatacctcattggtagagcatatcgcagcaactacactagaaaacatttcagagccctctacaacaacctctacagaaaatacaagcaccagagacactcctcaggaaatagaaatgagtctgcagaaagtacgctgcactcccagttcattagaactgcacagccatacaaattcaaggaaaagtctatagtccttcataaatcaaggaagaagtcaaaagaacaaaatgtatcagatgaccctgagtctactggctttctttacccttacaatgacctgctggtttgggctgtgctgatgaaaaggcagaagatggctatgttcttctggcagcatggagaggaggccacggttaaagccgtgattgcgtgtatcctctaccgggcaatggcccatgaagctaaggagagtcacatggtggatgatgcctcagaagagttgaagaattactcaaaacagtttggccagctggctctggacttgttggagaaggcattcaagcagaatgagcgcatggccatgacgctgttgacgtatgaactcaggaactggagcaattcgacctgccttaaactggccgtgtcgggaggattacgaccctttgtttcacatacttgtacccagatgctactgacagacatgtggatggggaggctgaaaatgaggaaaaactcttggttaaagattattataagcattattttaccacccaccattttgacactggaatttaaaagcaaagctgagatgtcacatgttccccagtcccaggacttccaatttatgtggtattacagtgaccagaacgccagcagttccaaagaaagtgcttctgtgaaagagtatgatttggaaaggggccatgatgagaaactggatgaaaatcagcattttggtttggaaagtgggcaccaacaccttccgtggaccaggaaagtctatgagttctacagtgctccaattgtcaagttttggttttatacgatggcgtatttggcattcctcatgctgttcacttacaccgtgttggtggagatgcagccccagcccagcgtgcaggagtggcttgttagcatttacatcttcaccaatgctattgaggtggtcagggagatctgtatttcagaacctgggaagtttacccaaaaggtgaaggtatggattagtgagtactggaacttaacagaaactgtggccattggcctgttttcagctggcttcgtccttcgatggggtgaccctccttttcacacagcgggaagactgatctactgcatagacatcatattctggttctcacggctcctggacttctttgctgtgaatcaacatgcaggtccatatgtgaccatgattgcaaaaatgacagcaaacatgttctatattgtgatcatcatggccatagtcctgctgagctttggagtggcacgcaaggccatcctttcgccaaaagagccaccatcttggagtctagctcgagatattgtatttgagccatactggatgatatacggagaagtctatgctggagaaatagatgtttgttcaagccagccatcctgccctcctggttcttttcttactccattcttgcaagctgtctacctcttcgtgcaatatatcatcatggtgaacctgttgattgctttcttcaacaacgtttacttagatatggaatccatttcaaataacctgtggaaatacaaccgctatcgctacatcatgacctaccacgagaagccctggctgcccccacctctcatcctgctgagccacgtgggccttctcctccgccgcctgtgctgtcatcgagctcctcacgaccaagaagagggtgacgttggattaaaactctacctcagtaaggaggatctgaaaaaacttcatgattttgaggagcagtgcgtggaaaaatacttccatgagaagatggaagatgtgaattgtagttgtgaggaacgaatccgagtgacatcagaaagggttacagagatgtacttccagctgaaagaaatgaatgaaaaggtgtcttttataaaggactccttactgtctttggacagccaggtgggacacctgcaggatctctctgccctgactgtggataccctgaaagtcctttctgctgttgacactttgcaagaggatgaggctctcctggccaagagaaagcattctacttgcaaaaaacttccccacagctggagcaatgtcatctgtgcagaggttctaggcagcatggagatcgctggagagaagaaataccagtattatagcatgccctcttctttgctgaggagcctggctggaggccggcatcccccaagagtgcagaggggggcacttcttgagattacaaacagtaaaagagaggctacaaatgtaagaaatgaccaggaaaggcaagaaacacaaagtagtatagtggtttctggggtgtctcctaacaggcaagcacactcaaagtatggccagtttcttctggtcccctctaatctaaagcgagttcctttttcagcagaaactgtcttgcctctgtccagaccctctgtgccagatgtgctggcaactgaacaggacatccagactgaggttcttgttcatctgactgggcagaccccagttgtctctgactgggcatcagtggatgaacccaaggaaaagcacgagcctattgctcacttactggatggacaagacaaggcagagcaagtgctacccactttgagttgcacacctgaacccatgacaatgagctcccctctttcccaagccaagatcatgcaaactggaggtggatatgtaaactgggcattttcagaaggtgatgaaactggtgtgtttagcatcaagaaaaagtggcaaacctgcttgccctccacttgtgacagtgattcctctcggagtgaacagcaccagaagcaggcccaggacagctccctatctgataactcaacaagatcggcccagagtagtgaatgctcagaggtgggaccatggcttcagccaaacacatccttttggatcaatcctctccgcagatacaggcccttcgctaggagtcatagttttagattccataaggaggagaaattgatgaagatctgtaagattaaaaatctttcaggctcttcagaaatagggcagggagcatgggtcaaagcgaaaatgctaaccaaagacaggagactgtcaaagaaaaagaagaatactcaaggactccaggtgccaatcataacagtcaatgcctgctctcagagtgaccagttgaatccagagccaggagaaaacagcatctctgaagaggagtacagcaagaactggttcacagtgtccaaatttagtcacacaggtgtagaaccttacatacatcagaaaatgaaaactaaagaaattggacaatgtgctatacaaatcagtgattacctaaagcagtctcaagaggatctcagcaaaaactctttgtggaattccaggagcaccaacctcaataggaactccctgctgaaaagttcaattggagttgacaagatctcagcctccttaaaaagccctcaagagcctcaccatcattattcagccattgaaaggaataatttaatgaggctttctcagaccataccatttacaccagtccaactgtttgcaggagaagaaataactgtctacaggttggaggagagttcccctttaaaccttgataaaagcatgtcctcttggtctcagcgtgggagagcggcaatgatccaggtattgtcccgagaggagatggatgggggcctccgtaaagctatgagagtcgtcagcacttggtctgaggatgacattctcaagccgggacaagttttcattgtcaagtcctttcttcctgaggttgtgcggacatggcataaaatcttccaggagagcactgtgcttcatctttgcctcagggaaattcaacaacaaagagctgctcaaaaattgatctataccttcaaccaagtgaaaccacaaaccataccctacacaccaaggttcctggaagttttcttaatctactgccattcagccaaccagtggttgaccattgagaagtatatgacaggggagttccggaagtataacaacaacaatggtgatgaaatcacccccaccaacaccctggaggagctgatgttggctttctctcactggacctatgagtacactcggggagagctgctggttttagatttgcaaggtgttggagaaaatttgacagatccatctgttataaaacctgaagtcaaacaatcaagaggaatggtgtttggaccggccaatttgggggaagatgcaattagaaacttcattgcaaaacatcattgtaactcctgctgccggaagctcaaactcccggatttaaaaagaaatgactattcccctgaaaggataaattccacctttggacttgagataaaaatagaatcagctgaggagcctccagcaagggagacgggtagaaattccccagaagatgatatgcaactataaaaagggaggagcaagaagatcccagtgcttgccctgcctgccaggaactctgtgataacatagattgatcaacgtgatgttgattacatcagcgtctccttgggacacgccttctgagcctcacatctccttctgttcaaaggcctcattggtatatgatcaatgggttctcctagacactgacctctgtccagggcactttgcagctccatcctcaagttccacacgaagatgcttggatgagtcagctgggaatattgttcttgtgtacctcattgctttagctggtcacttggaactttggagcagaatcctgcacattaaaggatggggttgggggggatacatttattttattttctcactatgtatgcagactggaccccctactactatttgtcacctcacccacagattgtatttatgtctatatatatgttcataaaaagttatgtgatttcctcctctgtcttttccacaacataggactttgaatagcaatgataggaaaaacaatggaacaagggtgggtttgcacagattggagcacattcctgcacaaactaccaagtatactggtgaaatctcgatgggtttcagatattgtcagtgaatcatatgatgcctggatatttcaggtttctgtaaaagaaagggaaacctaaaacaaatacccttccatatataatatatatggaatatgtatattatatatatttttatatatataatatatatggaatatatatattatatatataaaatacatatggaatatatatattttatatatatatatatatatttttatttttgagatggagtttcactctttttacccaggctggagtgcaatgatgcgatctcactgcaacctctgcctcccgggcttgagcgattcttgtgtctcagtcttccgggtagctgggactacaggtgtgcaccactatgcctggctaattttgtatttttagtagagatggggtttcaccatgttggccaggctggtctcaaactcctgacctcagatgatccacctgccttggcttcccaaagtgctgggattacaggcgtgagccactgcgcctggcctttttttttttttttttaaacgagaacaagaatatgaagaactggaaatcattaagaaagggtttcccttccttaaagctcaggggtactattagttaggagttgactaactcaacctgtaaaacaccactcctccttccaaagttgtatatataatattgcaggttaaattactttatgtcaggtcctatgaagaaagatacggtttcagactgaaaacatgtttcacaggtgtttgcttccttccagagcagagttccctattcccctggcataaagaatgtatatatattttgaaatatggctgagaacatgtcattggtttgtgaggcctaaggtgaagcactcctggcagccacactgtgtagtgtatttgagggatcagtcatccctcttgtatgctgggcctggttgccctacctcgaacaagcaccagcttttcacacaaggagagatgtggggctgggagtcctctccccatcctattgcatctcctttcttattataagctgttccagttcacaggcagcaaacctcctgggtttgaaaaattccaacttatttttatctttaatcctgacattagctgacttgctagtgagcttgctttaaaaatctacactcttgcattcttaggcatacaggggaaatgttgaaaaggaaggtggaaaaccaagaatttagtttgccaatgattgcctctgattcttgtaagtttgagttccacaagggctaatttattccccttttacttgggttttggggtggtggaaagcgggaaatttgggtgatttgttgattggcaatgaggataaaatgttaatacttttttggggacttaacaactttatcctattctacaagtcagtaaaggaacaattggtactcacctcagtgctgcactcaactatggaaagaggcagagtttgcttgcccaattgccaaactaaagacatcagttcattggtcaaatatttgttacctggaatggaacttgaaagcaaatacatttggatttcaaatttc

SEQ ID NO: 194345 - DNA, 6082 bp, Artificial Sequence
  derived and/or modified sequence
actacaaaggatgtctgtgatgacagtggccatcccatttgatcctcgttattcttcttttatcgaaggaaactgagagtcaccttcttttctaggcagttaggtaactgaagccgaaaggtattgtgacagatccactgggctgtaaaaggcagcgtgtggaggtggagcccagagtttctgcctccacagttaaaagctcagacagggctttgggagcagggcctgcaaatcaaagatgaaagaacaacctgtcttggagcgcttgcagtcccagaaatcctggattaaaggagtatttgacaagagagaatgtagcacaatcatacccagctcaaaaaatcctcacagatgtactccagtatgccaagtctgccagaatttaatcaggtgttactgtggccgactgattggagaccatgctgggatagattattcctggaccatctcagctgccaagggtaaagaaagtgaacaatggtctgttgaaaagcacacaacgaaaagcccaacagatacttttggcacgattaatttccaagatggagagcacacccatcatgccaagtatattagaacttcttatgatacaaaactggatcatctgttacatttaatgttgaaagagtggaaaatggaactgcccaagcttgtgatctcagtccatgggggcatccagaactttactatgccctctaaatttaaagagattttcagccaaggtttggttaaagctgcagagacaacaggagcgtggataataactgaaggcatcaatacaggagtgtccaagcatgttggggatgccttgaaatcccattcctctcattccttgagaaaaatctggacagttggaatccctccttggggtgtcattgagaaccagagagaccttattggaaaagatgtggtgtgcctgtaccagactctggataaccccctcagcaagctcacaacactcaacagcatgcactcgcacttcatcctgtctgatgatgggaccgtgggcaagtatggaaatgaaatgaagctcagaaggaacctggagaagtacctctctctgcagaaaatacactgccgctcaagacaaggcgtgccggtcgtggggctggtggtggaaggcggtcccaacgtcatcctgtcagtgtgggagactgtcaaggacaaggacccagtggtggtgtgtgagggcacaggtagggcggctgacctcctggccttcacacacaaacacctggcagatgaagggatgctgcgacctcaggtgaaagaggagatcatctgcatgattcagaacactttcaactttagtcttaaacagtccaagcaccttttccaaattctaatggagtgtatggttcacagggattgtattaccatatttgatgctgactctgaagagcagcaagacctggacttagcaatcctaacagctttgctgaagggcacaaatttatcagcgtcagagcaattaaatctggcaatggcttgggacagggtggacattgccaagaaacatatcctaatttatgaacaacactggaagcctgatgccctggaacaagcaatgtcagatgctttagtgatggatcgggtggattttgtgaagctcttaatagaatatggagtgaacctccatcgctttcttaccatccctcgactggaagagctctacaatacaaaacaaggacctactaatacactcttgcatcatctcgtccaagatgtgaaacagcatacccttctttcaggctaccgaataaccttgattgacattggattagtagtagaatacctcattggtagagcatatcgcagcaactacactagaaaacatttcagagccctctacaacaacctctacagaaaatacaagcaccagagacactcctcaggaaatagaaatgagtctgcagaaagtacgctgcactcccagttcattagaactgcacagccatacaaattcaaggaaaagtctatagtccttcataaatcaaggaagaagtcaaaagaacaaaatgtatcagatgaccctgagtctactggctttctttacccttacaatgacctgctggtttgggctgtgctgatgaaaaggcagaagatggctatgttcttctggcagcatggagaggaggccacggttaaagccgtgattgcgtgtatcctctaccgggcaatggcccatgaagctaaggagagtcacatggtggatgatgcctcagaagagttgaagaattactcaaaacagtttggccagctggctctggacttgttggagaaggcattcaagcagaatgagcgcatggccatgacgctgttgacgtatgaactcaggaactggagcaattcgacctgccttaaactggccgtgtcgggaggattacgaccctttgtttcacatacttgtacccagatgctactgacagacatgtggatggggaggctgaaaatgaggaaaaactcttggttaaagattattataagcattattttaccacccaccattttgacactggaatttaaaagcaaagctgagatgtcacatgttccccagtcccaggacttccaatttatgtggtattacagtgaccagaacgccagcagttccaaagaaagtgcttctgtgaaagagtatgatttggaaaggggccatgatgagaaactggatgaaaatcagcattttggtttggaaagtgggcaccaacaccttccgtggaccaggaaagtctatgagttctacagtgctccaattgtcaagttttggttttatacgatggcgtatttggcattcctcatgctgttcacttacaccgtgttggtggagatgcagccccagcccagcgtgcaggagtggcttgttagcatttacatcttcaccaatgctattgaggtggtcagggagatctgtatttcagaacctgggaagtttacccaaaaggtgaaggtatggattagtgagtactggaacttaacagaaactgtggccattggcctgttttcagctggcttcgtccttcgatggggtgaccctccttttcacacagcgggaagactgatctactgcatagacatcatattctggttctcacggctcctggacttctttgctgtgaatcaacatgcaggtccatatgtgaccatgattgcaaaaatgacagcaaacatgttctatattgtgatcatcatggccatagtcctgctgagctttggagtggcacgcaaggccatcctttcgccaaaagagccaccatcttggagtctagctcgagatattgtatttgagccatactggatgatatacggagaagtctatgctggagaaatagatgtttgttcaagccagccatcctgccctcctggttcttttcttactccattcttgcaagctgtctacctcttcgtgcaatatatcatcatggtgaacctgttgattgctttcttcaacaacgtttacttagatatggaatccatttcaaataacctgtggaaatacaaccgctatcgctacatcatgacctaccacgagaagccctggctgcccccacctctcatcctgctgagccacgtgggccttctcctccgccgcctgtgctgtcatcgagctcctcacgaccaagaagagggtgacgttggattaaaactctacctcagtaaggaggatctgaaaaaacttcatgattttgaggagcagtgcgtggaaaaatacttccatgagaagatggaagatgtgaattgtagttgtgaggaacgaatccgagtgacatcagaaagggttacagagatgtacttccagctgaaagaaatgaatgaaaaggtgtcttttataaaggactccttactgtctttggacagccaggtgggacacctgcaggatctctctgccctgactgtggataccctgaaagtcctttctgctgttgacactttgcaagaggatgaggctctcctggccaagagaaagcattctacttgcaaaaaacttccccacagctggagcaatgtcatctgtgcagaggttctaggcagcatggagatcgctggagagaagaaataccagtattatagcatgccctcttctttgctgaggagcctggctggaggccggcatcccccaagagtgcagaggggggcacttcttgagattacaaacagtaaaagagaggctacaaatgtaagaaatgaccaggaaaggcaagaaacacaaagtagtatagtggtttctggggtgtctcctaacaggcaagcacactcaaagtatggccagtttcttctggtcccctctaatctaaagcgagttcctttttcagcagaaactgtcttgcctctgtccagaccctctgtgccagatgtgctggcaactgaacaggacatccagactgaggttcttgttcatctgactgggcagaccccagttgtctctgactgggcatcagtggatgaacccaaggaaaagcacgagcctattgctcacttactggatggacaagacaaggcagagcaagtgctacccactttgagttgcacacctgaacccatgacaatgagctcccctctttcccaagccaagatcatgcaaactggaggtggatatgtaaactgggcattttcagaaggtgatgaaactggtgtgtttagcatcaagaaaaagtggcaaacctgcttgccctccacttgtgacagtgattcctctcggagtgaacagcaccagaagcaggcccaggacagctccctatctgataactcaacaagatcggcccagagtagtgaatgctcagaggtgggaccatggcttcagccaaacacatccttttggatcaatcctctccgcagatacaggcccttcgctaggagtcatagttttagattccataaggaggagaaattgatgaagatctgtaagattaaaaatctttcaggctcttcagaaatagggcagggagcatgggtcaaagcgaaaatgctaaccaaagacaggagactgtcaaagaaaaagaagaatactcaaggactccaggtgccaatcataacagtcaatgcctgctctcagagtgaccagttgaatccagagccaggagaaaacagcatctctgaagaggagtacagcaagaactggttcacagtgtccaaatttagtcacacaggtgtagaaccttacatacatcagaaaatgaaaactaaagaaattggacaatgtgctatacaaatcagtgattacctaaagcagtctcaagaggatctcagcaaaaactctttgtggaattccaggagcaccaacctcaataggaactccctccatgtaattaaaatgccaatctcctctctaatttcagagatctcagcctccttaaaaagccctcaagagcctcaccatcattattcagccattgaaaggaataatttaatgaggctttctcagaccataccatttacaccagtccaactgtttgcaggagaagaaataactgtctacaggttggaggagagttcccctttaaaccttgataaaagcatgtcctcttggtctcagcgtgggagagcggcaatgatccaggtattgtcccgagaggagatggatgggggcctccgtaaagctatgagagtcgtcagcacttggtctgaggatgacattctcaagccgggacaagttttcattgtcaagtcctttcttcctgaggttgtgcggacatggcataaaatcttccaggagagcactgtgcttcatctttgcctcagggaaattcaacaacaaagagctgctcaaaaattgatctataccttcaaccaagtgaaaccacaaaccataccctacacaccaaggttcctggaagttttcttaatctactgccattcagccaaccagtggttgaccattgagaagtatatgacaggggagttccggaagtataacaacaacaatggtgatgaaatcacccccaccaacaccctggaggagctgatgttggctttctctcactggacctatgagtacactcggggagagctgctggttttagatttgcaagctctctggttctgggattctatgctgaaagccaggcttggaggttggagaatgtag

SEQ ID NO: 194346 - DNA, 8437 bp, Artificial Sequence
  derived and/or modified sequence
actacaaaggatgtctgtgatgacagtggccatcccatttgatcctcgttattcttcttttatcgaaggaaactgagagtcaccttcttttctaggcagttaggtaactgaagccgaaaggtattgtgacagatccactgggctgtaaaaggcagcgtgtggaggtggagcccagagtttctgcctccacagttaaaagctcagacagggctttgggagcagggcctgcaaatcaaagatgaaagaacaacctgtcttggagcgcttgcagtcccagaaatcctggattaaaggagtatttgacaagagagaatgtagcacaatcatacccagctcaaaaaatcctcacagatgtactccagtatgccaagtctgccagaatttaatcaggtgttactgtggccgactgattggagaccatgctgggatagattattcctggaccatctcagctgccaagggtaaagaaagtgaacaatggtctgttgaaaagcacacaacgaaaagcccaacagatacttttggcacgattaatttccaagatggagagcacacccatcatgccaagtatattagaacttcttatgatacaaaactggatcatctgttacatttaatgttgaaagagtggaaaatggaactgcccaagcttgtgatctcagtccatgggggcatccagaactttactatgccctctaaatttaaagagattttcagccaaggtttggttaaagctgcagagacaacaggagcgtggataataactgaaggcatcaatacaggagtgtccaagcatgttggggatgccttgaaatcccattcctctcattccttgagaaaaatctggacagttggaatccctccttggggtgtcattgagaaccagagagaccttattggaaaagatgtggtgtgcctgtaccagactctggataaccccctcagcaagctcacaacactcaacagcatgcactcgcacttcatcctgtctgatgatgggaccgtgggcaagtatggaaatgaaatgaagctcagaaggaacctggagaagtacctctctctgcagaaaatacactgccgctcaagacaaggcgtgccggtcgtggggctggtggtggaaggcggtcccaacgtcatcctgtcagtgtgggagactgtcaaggacaaggacccagtggtggtgtgtgagggcacaggtagggcggctgacctcctggccttcacacacaaacacctggcagatgaagggatgctgcgacctcaggtgaaagaggagatcatctgcatgattcagaacactttcaactttagtcttaaacagtccaagcaccttttccaaattctaatggagtgtatggttcacagggattgtattaccatatttgatgctgactctgaagagcagcaagacctggacttagcaatcctaacagctttgctgaagggcacaaatttatcagcgtcagagcaattaaatctggcaatggcttgggacagggtggacattgccaagaaacatatcctaatttatgaacaacactggaagcctgatgccctggaacaagcaatgtcagatgctttagtgatggatcgggtggattttgtgaagctcttaatagaatatggagtgaacctccatcgctttcttaccatccctcgactggaagagctctacaatacaaaacaaggacctactaatacactcttgcatcatctcgtccaagatgtgaaacagcatacccttctttcaggctaccgaataaccttgattgacattggattagtagtagaatacctcattggtagagcatatcgcagcaactacactagaaaacatttcagagccctctacaacaacctctacagaaaatacaagcaccagagacactcctcaggaaatagaaatgagtctgcagaaagtacgctgcactcccagttcattagaactgcacagccatacaaattcaaggaaaagtctatagtccttcataaatcaaggaagaagtcaaaagaacaaaatgtatcagatgaccctgagtctactggctttctttacccttacaatgacctgctggtttgggctgtgctgatgaaaaggcagaagatggctatgttcttctggcagcatggagaggaggccacggttaaagccgtgattgcgtgtatcctctaccgggcaatggcccatgaagctaaggagagtcacatggtggatgatgcctcagaagagttgaagaattactcaaaacagtttggccagctggctctggacttgttggagaaggcattcaagcagaatgagcgcatggccatgacgctgttgacgtatgaactcaggaactggagcaattcgacctgccttaaactggccgtgtcgggaggattacgaccctttgtttcacatacttgtacccagatgctactgacagacatgtggatggggaggctgaaaatgaggaaaaactcttggttaaagattattataagcattattttaccacccaccattttgacactggaatttaaaagcaaagctgagatgtcacatgttccccagtcccaggacttccaatttatgtggtattacagtgaccagaacgccagcagttccaaagaaagtgcttctgtgaaagagtatgatttggaaaggggccatgatgagaaactggatgaaaatcagcattttggtttggaaagtgggcaccaacaccttccgtggaccaggaaagtctatgagttctacagtgctccaattgtcaagttttggttttatacgatggcgtatttggcattcctcatgctgttcacttacaccgtgttggtggagatgcagccccagcccagcgtgcaggagtggcttgttagcatttacatcttcaccaatgctattgaggtggtcagggagatctgtatttcagaacctgggaagtttacccaaaaggtgaaggtatggattagtgagtactggaacttaacagaaactgtggccattggcctgttttcagctggcttcgtccttcgatggggtgaccctccttttcacacagcgggaagactgatctactgcatagacatcatattctggttctcacggctcctggacttctttgctgtgaatcaacatgcaggtccatatgtgaccatgattgcaaaaatgacagcaaacatgttctatattgtgatcatcatggccatagtcctgctgagctttggagtggcacgcaaggccatcctttcgccaaaagagccaccatcttggagtctagctcgagatattgtatttgagccatactggatgatatacggagaagtctatgctggagaaatagatgtttgttcaagccagccatcctgccctcctggttcttttcttactccattcttgcaagctgtctacctcttcgtgcaatatatcatcatggtgaacctgttgattgctttcttcaacaacgtttacttagatatggaatccatttcaaataacctgtggaaatacaaccgctatcgctacatcatgacctaccacgagaagccctggctgcccccacctctcatcctgctgagccacgtgggccttctcctccgccgcctgtgctgtcatcgagctcctcacgaccaagaagagggtgacgttggattaaaactctacctcagtaaggaggatctgaaaaaacttcatgattttgaggagcagtgcgtggaaaaatacttccatgagaagatggaagatgtgaattgtagttgtgaggaacgaatccgagtgacatcagaaagggttacagagatgtacttccagctgaaagaaatgaatgaaaaggtgtcttttataaaggactccttactgtctttggacagccaggtgggacacctgcaggatctctctgccctgactgtggataccctgaaagtcctttctgctgttgacactttgcaagaggatgaggctctcctggccaagagaaagcattctacttgcaaaaaacttccccacagctggagcaatgtcatctgtgcagaggttctaggcagcatggagatcgctggagagaagaaataccagtattatagcatgccctcttctttgctgaggagcctggctggaggccggcatcccccaagagtgcagaggggggcacttcttgagattacaaacagtaaaagagaggctacaaatgtaagaaatgaccaggaaaggcaagaaacacaaagtagtatagtggtttctggggtgtctcctaacaggcaagcacactcaaagtatggccagtttcttctggtcccctctaatctaaagcgagttcctttttcagcagaaactgtcttgcctctgtccagaccctctgtgccagatgtgctggcaactgaacaggacatccagactgaggttcttgttcatctgactgggcagaccccagttgtctctgactgggcatcagtggatgaacccaaggaaaagcacgagcctattgctcacttactggatggacaagacaaggcagagcaagtgctacccactttgagttgcacacctgaacccatgacaatgagctcccctctttcccaagccaagatcatgcaaactggaggtggatatgtaaactgggcattttcagaaggtgatgaaactggtgtgtttagcatcaagaaaaagtggcaaacctgcttgccctccacttgtgacagtgattcctctcggagtgaacagcaccagaagcaggcccaggacagctccctatctgataactcaacaagatcggcccagagtagtgaatgctcagaggtgggaccatggcttcagccaaacacatccttttggatcaatcctctccgcagatacaggcccttcgctaggagtcatagttttagattccataaggaggagaaattgatgaagatctgtaagattaaaaatctttcaggctcttcagaaatagggcagggagcatgggtcaaagcgaaaatgctaaccaaagacaggagactgtcaaagaaaaagaagaatactcaaggactccaggtgccaatcataacagtcaatgcctgctctcagagtgaccagttgaatccagagccaggagaaaacagcatctctgaagaggagtacagcaagaactggttcacagtgtccaaatttagtcacacaggtgtagaaccttacatacatcagaaaatgaaaactaaagaaattggacaatgtgctatacaaatcagtgattacctaaagcagtctcaagaggatctcagcaaaaactctttgtggaattccaggagcaccaacctcaataggaactccctccatgtaattaaaatgccaatctcctctctaatttcagagatctcagcctccttaaaaagccctcaagagcctcaccatcattattcagccattgaaaggaataatttaatgaggctttctcagaccataccatttacaccagtccaactgtttgcaggagaagaaataactgtctacaggttggaggagagttcccctttaaaccttgataaaagcatgtcctcttggtctcagcgtgggagagcggcaatgatccaggtattgtcccgagaggagatggatgggggcctccgtaaagctatgagagtcgtcagcacttggtctgaggatgacattctcaagccgggacaagttttcattgtcaagtcctttcttcctgaggttgtgcggacatggcataaaatcttccaggagagcactgtgcttcatctttgcctcagggaaattcaacaacaaagagctgctcaaaaattgatctataccttcaaccaagtgaaaccacaaaccataccctacacaccaaggttcctggaagttttcttaatctactgccattcagccaaccagtggttgaccattgagaagtatatgacaggggagttccggaagtataacaacaacaatggtgatgaaatcacccccaccaacaccctggaggagctgatgttggctttctctcactggacctatgagtacactcggggagagctgctggttttagatttgcaaggtgttggagaaaatttgacagatccatctgttataaaacctgaagtcaaacaatcaagaggaatggtgtttggaccggccaatttgggggaagatgcaattagaaacttcattgcaaaacatcattgtaactcctgctgccggaagctcaaactcccggatttaaaaagaaatgactattcccctgaaaggataaattccacctttggacttgagataaaaatagaatcagctgaggagcctccagcaagggagacgggtagaaattccccagaagatgatatgcaactataaaaagggaggagcaagaagatcccagtgcttgccctgcctgccaggaactctgtgataacatagattgatcaacgtgatgttgattacatcagcgtctccttgggacacgccttctgagcctcacatctccttctgttcaaaggcctcattggtatatgatcaatgggttctcctagacactgacctctgtccagggcactttgcagctccatcctcaagttccacacgaagatgcttggatgagtcagctgggaatattgttcttgtgtacctcattgctttagctggtcacttggaactttggagcagaatcctgcacattaaaggatggggttgggggggatacatttattttattttctcactatgtatgcagactggaccccctactactatttgtcacctcacccacagattgtatttatgtctatatatatgttcataaaaagttatgtgatttcctcctctgtcttttccacaacataggactttgaatagcaatgataggaaaaacaatggaacaagggtgggtttgcacagattggagcacattcctgcacaaactaccaagtatactggtgaaatctcgatgggtttcagatattgtcagtgaatcatatgatgcctggatatttcaggtttctgtaaaagaaagggaaacctaaaacaaatacccttccatatataatatatatggaatatgtatattatatatatttttatatatataatatatatggaatatatatattatatatataaaatacatatggaatatatatattttatatatatatatatatatttttatttttgagatggagtttcactctttttacccaggctggagtgcaatgatgcgatctcactgcaacctctgcctcccgggcttgagcgattcttgtgtctcagtcttccgggtagctgggactacaggtgtgcaccactatgcctggctaattttgtatttttagtagagatggggtttcaccatgttggccaggctggtctcaaactcctgacctcagatgatccacctgccttggcttcccaaagtgctgggattacaggcgtgagccactgcgcctggcctttttttttttttttttaaacgagaacaagaatatgaagaactggaaatcattaagaaagggtttcccttccttaaagctcaggggtactattagttaggagttgactaactcaacctgtaaaacaccactcctccttccaaagttgtatatataatattgcaggttaaattactttatgtcaggtcctatgaagaaagatacggtttcagactgaaaacatgtttcacaggtgtttgcttccttccagagcagagttccctattcccctggcataaagaatgtatatatattttgaaatatggctgagaacatgtcattggtttgtgaggcctaaggtgaagcactcctggcagccacactgtgtagtgtatttgagggatcagtcatccctcttgtatgctgggcctggttgccctacctcgaacaagcaccagcttttcacacaaggagagatgtggggctgggagtcctctccccatcctattgcatctcctttcttattataagctgttccagttcacaggcagcaaacctcctgggtttgaaaaattccaacttatttttatctttaatcctgacattagctgacttgctagtgagcttgctttaaaaatctacactcttgcattcttaggcatacaggggaaatgttgaaaaggaaggtggaaaaccaagaatttagtttgccaatgattgcctctgattcttgtaagtttgagttccacaagggctaatttattccccttttacttgggttttggggtggtggaaagcgggaaatttgggtgatttgttgattggcaatgaggataaaatgttaatacttttttggggacttaacaactttatcctattctacaagtcagtaaaggaacaattggtactcacctcagtgctgcactcaactatggaaagaggcagagtttgcttgcccaattgccaaactaaagacatcagttcattggtcaaatatttgttacctggaatggaacttgaaagcaaatacatttggatttcaaatttc

SEQ ID NO: 194347 - protein, 420 aa, Artificial Sequence
  derived and/or modified sequence
MSAAGAGAGVEAGFSSEELLSLRFPLHRACRDGDLATLCSLLQQTPHAHLASEDSFYGWTPVHWAAHFGKLECLVQLVRAGATLNVSTTRYAQTPAHIAAFGGHPQCLVWLIQAGANINKPDCEGETPIHKAARSGSLECISALVANGAHVDLRNASGLTAADIAQTQGFQECAQFLLNLQNCHLNHFYNNGILNGGHQNVFPNHISVGTNRKRCLEDSEDFGVKKARTEAQSLDSAVPLTNGDTEDDADKMHVDREFAVVTDMKNSSSVSNTLTNGCVINGHLDFPSTTPLSGMESRNGQCLTGTNGISSGLAPGQPFPSSQGSLCISGTEEPEKTLRANPELCGSLHLNGSPSSCIASRPSWVEDIGDNLYYGHYHGFGDTAESIPELNSVVEHSKSVKVQERYDSAVLGTMHLHHGS

SEQ ID NO: 194348 - DNA, 1263 bp, Artificial Sequence
  derived and/or modified sequence
atgagcgccgccggcgccggcgccggcgtggaggccggcttcagcagcgaggagctgctgagcctgagattccccctgcacagagcctgcagagacggcgacctggccaccctgtgcagcctgctgcagcagaccccccacgcccacctggccagcgaggacagcttctacggctggacccccgtgcactgggccgcccacttcggcaagctggagtgcctggtgcagctggtgagagccggcgccaccctgaacgtgagcaccaccagatacgcccagacccccgcccacatcgccgccttcggcggccacccccagtgcctggtgtggctgatccaggccggcgccaacatcaacaagcccgactgcgagggcgagacccccatccacaaggccgccagaagcggcagcctggagtgcatcagcgccctggtggccaacggcgcccacgtggacctgagaaacgccagcggcctgaccgccgccgacatcgcccagacccagggcttccaggagtgcgcccagttcctgctgaacctgcagaactgccacctgaaccacttctacaacaacggcatcctgaacggcggccaccagaacgtgttccccaaccacatcagcgtgggcaccaacagaaagagatgcctggaggacagcgaggacttcggcgtgaagaaggccagaaccgaggcccagagcctggacagcgccgtgcccctgaccaacggcgacaccgaggacgacgccgacaagatgcacgtggacagagagttcgccgtggtgaccgacatgaagaacagcagcagcgtgagcaacaccctgaccaacggctgcgtgatcaacggccacctggacttccccagcaccacccccctgagcggcatggagagcagaaacggccagtgcctgaccggcaccaacggcatcagcagcggcctggcccccggccagcccttccccagcagccagggcagcctgtgcatcagcggcaccgaggagcccgagaagaccctgagagccaaccccgagctgtgcggcagcctgcacctgaacggcagccccagcagctgcatcgccagcagacccagctgggtggaggacatcggcgacaacctgtactacggccactaccacggcttcggcgacaccgccgagagcatccccgagctgaacagcgtggtggagcacagcaagagcgtgaaggtgcaggagagatacgacagcgccgtgctgggcaccatgcacctgcaccacggcagctag

SEQ ID NO: 194349 - DNA, 1263 bp, Artificial Sequence
  derived and/or modified sequence
atgagtgcagcgggcgctggggccggggttgaggccggtttttcgtcagaggagctcctgtctctgagatttccactgcaccgcgcttgccgcgacggcgatctcgcgacactctgttctctgctccagcagactccgcacgctcacttggcgtcagaggactcgttctatgggtggactcccgtgcattgggctgcacactttggcaaactggagtgcttggtacagctggtacgggcgggcgcaactctcaatgtttctactacacgatatgctcaaacccctgctcatatcgccgcgttcgggggccaccctcagtgcttggtgtggttgatccaggcaggagccaatatcaacaaaccagattgtgagggcgaaacaccaatccacaaggccgctcgcagcgggtccctcgagtgcataagcgcactggtggctaacggtgctcacgtagatctgaggaacgcctcggggctgaccgccgcagacattgcacagactcaggggtttcaggagtgcgcacagtttctcctgaatctccagaattgtcatttaaaccatttctataacaacgggatcctgaacgggggccatcagaatgtttttccaaaccatataagtgtcggaacaaacaggaagcgatgcttagaagactctgaggattttggagtcaagaaggcaaggacagaagcacagtcgctcgacagcgcagtcccactcactaatggagataccgaggatgacgcagacaaaatgcacgtcgacagagagttcgccgtggtaacagacatgaaaaacagtagctctgtatctaacactctgaccaacggctgcgtcattaatgggcacttggatttcccatccacaacacccctgtctggcatggaaagccgcaacggacagtgcctgaccgggactaacggtatctccagtggcttggcacctggccaaccgttcccatcatcacagggctcactgtgtatcagcggtacggaagagcctgaaaagacactgcgggcgaaccctgagctctgcggttccctgcacctgaacggatctcccagctcttgtattgcttctcgaccctcatgggtcgaggacataggagataacctgtactatggccattaccacggctttggggacacggcagaaagcattcccgagctcaacagcgtcgttgaacatagcaagtcagtgaaggtacaggaaagatacgacagtgctgtcctcggaaccatgcacctgcaccacggctcttag

SEQ ID NO: 194350 - DNA, 1263 bp, Artificial Sequence
  derived and/or modified sequence
atgtctgctgctggggccggggccggcgtggaggccggcttcagcagcgaggagctgctgagcctgcgcttccccctgcaccgggcctgcagagatggagacctggccaccctgtgcagcctgctgcagcagacccctcatgcccacctggcctctgaagattccttctacggctggacccctgtgcactgggccgcccactttgggaagctggagtgcctggtgcagctggtgcgggccggggccaccctgaatgtgtccaccaccaggtatgcccagaccccagcccacatcgccgcctttggaggccacccccagtgcctggtgtggctgatccaggccggggccaacatcaacaagccagactgtgagggggagacccccatccacaaggccgcccggagcggcagcctggagtgcatcagcgccctggtggccaatggagcccacgtggacctgagaaatgccagcggcctgacagctgctgacatcgcccagacccagggcttccaggagtgtgcccagttcctgctgaacctgcagaactgccacctgaaccacttctacaacaacggcatcctgaatggaggccaccagaatgtgttccccaaccacatctctgtgggcaccaacaggaagcgctgcctggaggacagcgaggactttggagtgaagaaggccaggacagaggcccagagcctggacagcgctgtgcccctgaccaacggggacacagaagatgatgctgacaagatgcacgtggaccgggagtttgctgtggtgacagacatgaagaacagcagctctgtgagcaacaccctgaccaacggctgcgtcatcaatggccacctggacttccccagcaccacccccctgagcggcatggagagcagaaatggccagtgcctgaccggcaccaacggcatcagcagcggcctggcccctggccagcccttccccagcagccagggcagcctgtgcatctctggaacagaggagcctgagaagaccctgcgggccaaccctgagctgtgtggcagcctgcacctgaatggcagccccagcagctgcatcgccagccggcccagctgggtggaggacatcggggacaacctgtactacggccactaccacggctttggagacacagctgagagcatccctgagctgaacagcgtggtggagcacagcaagtctgtgaaggtgcaggagagatatgacagcgctgtgctgggcaccatgcacctgcaccacggcagctag

SEQ ID NO: 194351 - DNA, 2495 bp, Artificial Sequence
  derived and/or modified sequence
gcgcgctccgctcggcagcctgtgggacgcgaccgcggcgctagtctcgttcctttgtgctgcggcggcggcttctcgagtcctccccgacgcgtcctctaggccagcgagccccgcgctctccggtgacggaccatgtcggcggcgggagcgggcgcgggcgtagaggcgggcttctccagcgaggagctgctctcgctccgtttcccgctgcaccgcgcctgccgcgacggggacctggccacgctctgctcgctgctgcagcagacaccccacgcccacctggcctctgaggactccttctatggctggacgcccgtgcactgggccgcgcatttcggcaagttggagtgcttagtgcagttggtgagagcgggagccacactcaacgtctccaccacacggtacgcgcagacgccagcccacattgcagcctttgggggacatcctcagtgcctggtctggctgattcaagcaggagccaacattaacaaaccggattgtgagggtgaaactcccattcacaaggcagctcgctctgggagcctagaatgcatcagtgcccttgtggcgaatggggctcacgtcgacctgagaaatgccagtggcctgacagcagcagacattgcacaaacccagggtttccaagagtgtgcccagtttctcttgaacctccagaattgtcatctgaaccatttctataacaatggcatcttaaatgggggtcatcagaatgtatttcctaatcatattagtgtgggaacaaatcgaaagagatgcttggaagactcagaagactttggagtaaagaaagctagaactgaagctcaaagcttggattctgccgtgccactcacgaatggcgacacagaagacgatgctgacaaaatgcacgttgatagggagtttgctgttgtaacagatatgaaaaacagtagctccgtatcgaatacattgacaaatggatgtgtcatcaatggacatttggacttcccctccacgaccccgctcagtgggatggaaagcaggaatggccagtgcttgacaggaactaacggaattagcagtggattagccccaggacagccgtttccgagtagccagggttctctctgcattagtgggactgaggagccagagaagaccctgagagctaaccctgagttgtgcggttctctgcacctgaacgggagtccaagtagctgcatagccagtaggccttcctgggtggaagacattggggataacctgtactatggacactaccacgggtttggggacactgctgaaagcatcccagaactgaacagtgtggtcgagcattccaagtccgtgaaggtgcaggagcggtacgacagtgccgtgctgggcaccatgcacctgcaccacggctcctagagacgctgacctggctctcggaaacgcaggagtccttcctggtagccagctcagaatacccatgtagcagcaacttgaacgaatgtcacaacttgtacgttttttatatacttcaactttctgaaaaagtaaacttcgacaagttcccagcaactgcttgtttgtgcatgagtagggcttactaagtgcatagatgtttctacagtgaggtgtcctttttataaggtgcacttttggagtttttctgatgccaatctcaacattgtctttttaatactgtcaccagatattgccatttttctttttgttaaaagattatatgatcaagataaattggggtggtaaatcaggtgcctggtaatttatctctttgcacatgggcatcattttaaaaagcttgcttccactcttttctgtagaatttgacggaacacagctatttccctatgcaaggtacagccttacaaagatttctgcagtgatttgtgtgaagaagagaacgtttgtctttttcaatgaagctttgcagatcaccatgtggttgaaggttttagttgtggacacagtggtccctccttaatgatgaagatcactgccttgggcttcatggaaaacaggcccagcctggggctgcgtttggatttattgtttttattccacacttcctacttggtctctggaagttttaccacatgtaacagattcctttatatgtagtggaaatcactatttgtagaaactgtcaggtcaaaatatttaactgactgttgacatgtattttcttttttccttgtttttgttttttggggttttctgctttaagatatataccactatgtatatccagttaactgagagaattttgactctcttaataaaactgcattaagtttttgattttgtagaaattagcttttgtctaggcaactagtggttatactctgcaaatattgtaatgaatttttacttttttgatttttgtaataaaaattggtgcagataaaatgtcaaatgaacaaaccagtgttctaagagtgttactaacattttgttctaaaactgtccttcacaaattgaataaaaaactctcacactca

SEQ ID NO: 194352 - DNA, 2588 bp, Artificial Sequence
  derived and/or modified sequence
gcgcgctccgctcggcagcctgtgggacgcgaccgcggcgctagtctcgttcctttgtgctgcggcggcggcttctcgagtcctccccgacgcgtcctctaggccagcgagccccgcgctctccggtgacggaccatgtcggcggcgggagcgggcgcgggcgtagaggcgggcttctccagcgaggagctgctctcgctccgtttcccgctgcaccgcgcctgccgcgacggggacctggccacgctctgctcgctgctgcagcagacaccccacgcccacctggcctctgaggactccttctatggctggacgcccgtgcactgggccgcgcatttcggcaagttggagtgcttagtgcagttggtgagagcgggagccacactcaacgtctccaccacacggtacgcgcagacgccagcccacattgcagcctttgggggacatcctcagtgcctggtctggctgattcaagcaggagccaacattaacaaaccggattgtgagggtgaaactcccattcacaaggcagctcgctctgggagcctagaatgcatcagtgcccttgtggcgaatggggctcacgtcgagtttatttcacagagcagtgtacattcttgtcttccaggggaacttcaacatggagttacttttgatccctcagttttaattcagtgtctaaagcctgagaaatgccagtggcctgacagcagcagacattgcacaaacccagggtttccaagagtgtgcccagtttctcttgaacctccagaattgtcatctgaaccatttctataacaatggcatcttaaatgggggtcatcagaatgtatttcctaatcatattagtgtgggaacaaatcgaaagagatgcttggaagactcagaagactttggagtaaagaaagctagaactgaagctcaaagcttggattctgccgtgccactcacgaatggcgacacagaagacgatgctgacaaaatgcacgttgatagggagtttgctgttgtaacagatatgaaaaacagtagctccgtatcgaatacattgacaaatggatgtgtcatcaatggacatttggacttcccctccacgaccccgctcagtgggatggaaagcaggaatggccagtgcttgacaggaactaacggaattagcagtggattagccccaggacagccgtttccgagtagccagggttctctctgcattagtgggactgaggagccagagaagaccctgagagctaaccctgagttgtgcggttctctgcacctgaacgggagtccaagtagctgcatagccagtaggccttcctgggtggaagacattggggataacctgtactatggacactaccacgggtttggggacactgctgaaagcatcccagaactgaacagtgtggtcgagcattccaagtccgtgaaggtgcaggagcggtacgacagtgccgtgctgggcaccatgcacctgcaccacggctcctagagacgctgacctggctctcggaaacgcaggagtccttcctggtagccagctcagaatacccatgtagcagcaacttgaacgaatgtcacaacttgtacgttttttatatacttcaactttctgaaaaagtaaacttcgacaagttcccagcaactgcttgtttgtgcatgagtagggcttactaagtgcatagatgtttctacagtgaggtgtcctttttataaggtgcacttttggagtttttctgatgccaatctcaacattgtctttttaatactgtcaccagatattgccatttttctttttgttaaaagattatatgatcaagataaattggggtggtaaatcaggtgcctggtaatttatctctttgcacatgggcatcattttaaaaagcttgcttccactcttttctgtagaatttgacggaacacagctatttccctatgcaaggtacagccttacaaagatttctgcagtgatttgtgtgaagaagagaacgtttgtctttttcaatgaagctttgcagatcaccatgtggttgaaggttttagttgtggacacagtggtccctccttaatgatgaagatcactgccttgggcttcatggaaaacaggcccagcctggggctgcgtttggatttattgtttttattccacacttcctacttggtctctggaagttttaccacatgtaacagattcctttatatgtagtggaaatcactatttgtagaaactgtcaggtcaaaatatttaactgactgttgacatgtattttcttttttccttgtttttgttttttggggttttctgctttaagatatataccactatgtatatccagttaactgagagaattttgactctcttaataaaactgcattaagtttttgattttgtagaaattagcttttgtctaggcaactagtggttatactctgcaaatattgtaatgaatttttacttttttgatttttgtaataaaaattggtgcagataaaatgtcaaatgaacaaaccagtgttctaagagtgttactaacattttgttctaaaactgtccttcacaaattgaataaaaaactctcacactc

SEQ ID NO: 194353 - DNA, 1263 bp, Artificial Sequence
  derived and/or modified sequence
atgagcgccgccggcgccggcgccggcgtggaggccggcttcagctcagaagaacttctgtccctgcgctttccactgcaccgtgcatgccgtgacggggaccttgccaccctctgctctctcctgcaacagacgccccatgcccatctggcatccgaagactccttctacgggtggacccctgtgcactgggccgcacacttcgggaagttggagtgcctggtgcaactggtccgggctggtgctacattgaatgtcagtacgacgcgatacgcccagactccagctcatattgcagcgttcggtggccatccacaatgtctcgtgtggctgatccaggctggggctaacatcaacaaaccagattgtgaaggagaaactcctattcacaaggccgcccgatccggaagtctcgagtgtatctcagcccttgtggccaacggagcccatgttgacctcagaaatgcctccgggctcacagccgccgatatcgcccagacccagggatttcaggaatgtgcccaattcctgctgaacctgcagaattgtcacctgaaccatttttataacaatggaatactgaatgggggccatcagaatgtattccctaaccacattagcgttggcaccaatcgtaagaggtgtctagaagactctgaggattttggagttaagaaggcccggaccgaggctcagtctctggacagtgctgtcccgctcactaatggggatactgaagatgacgccgataagatgcacgtagatagagagtttgcggtggtgactgacatgaagaatagcagctctgtttccaatactctaaccaacgggtgcgtgattaatggtcaccttgatttcccttctacaacccccctctctggcatggaatctcggaatggccaatgcctaacagggacaaacggcatctccagcggtctggccccaggacagcccttcccttcttctcaggggtctctgtgcatctccggcacagaagaaccggaaaagactctgcgagcaaacccggagctgtgtggttcactgcatcttaacggctcgccctcttcatgtatcgccagcaggccgtcatgggttgaggacattggcgataacctctactacggccactaccatggatttggtgatactgccgaaagcattcctgaattgaatagcgtggtggaacactcaaagtcagtcaaggttcaggaacgctatgacagtgcagttttaggaaccatgcacctgcatcacggttcctag

SEQ ID NO: 194354 - DNA, 1263 bp, Artificial Sequence
  derived and/or modified sequence
atgtccgctgctggggcaggggctggcgtcgaggcgggatttagttccgaggagctgttgagcctgagatttcctctgcaccgcgcatgccgcgacggtgatctagcaacactgtgcagtctgcttcagcaaaccccccacgctcatcttgcctcggaggacagcttctacggatggactccagtgcactgggccgcacacttcggaaagttagaatgcttggtgcagctggtgcgtgccggagccaccctgaatgtgtctacaacccgctatgcacaaacccccgcacacattgccgcattcggcggacatccccagtgtctcgtgtggctgatacaagccggagccaatatcaacaaaccagattgtgaaggtgagaccccgatccataaggccgcacggtcaggctcccttgaatgcatttctgccttagtagcaaacggggcacatgttgatctgcggaacgcgagcgggctgactgccgctgacattgcccagacacagggattccaggagtgcgcacaatttcttcttaacttacagaattgtcatctcaatcacttctataacaatgggatcctgaatgggggtcatcagaacgtgtttccaaatcacatatccgtcggaaccaaccgtaaacgctgtctggaagatagtgaagatttcggcgtgaagaaggctcgcaccgaagctcagtccctggacagcgctgtccccctgacgaatggcgacaccgaggacgatgccgacaaaatgcacgttgatcgcgaatttgctgtggtgaccgacatgaaaaacagctcctctgtctcaaacacgctgacaaacggatgcgtcattaacggccatctggacttcccgagcaccaccccactctctggaatggagtcaaggaatgggcagtgcctgaccgggactaatgggataagctccgggttggctccaggtcaaccctttccctcctcacagggaagtctatgcatatctgggaccgaggaacccgaaaaaactctgcgcgcaaacccggaactgtgcggcagtcttcacttgaatggctcgccttcctcctgcatcgcctcccggccatcatgggtcgaggacatcggcgacaacctgtactacggacactaccatggttttggagataccgcagagtctataccagaactgaattcggtggttgagcattcaaagagcgtgaaggttcaggagcggtacgactccgccgtgttaggcaccatgcacctgcatcatgggtcatag

SEQ ID NO: 194355 - protein, 335 aa, Artificial Sequence
  derived and/or modified sequence
MEDSGKTFSSEEEEANYWKDLAMTYKQRAENTQEELREFQEGSREYEAELETQLQQIETRNRDLLSENNRLRMELETIKEKFEVQHSEGYRQISALEDDLAQTKAIKDQLQKYIRELEQANDDLERAKRATIMSLEDFEQRLNQAIERNAFLESELDEKENLLESVQRLKDEARDLRQELAVQQKQEKPRTPMPSSVEAERTDTAVQATGSVPSTPIAHRGPSSSLNTPGSFRRGLDDSTGGTPLTPAARISALNIVGDLLRKVGALESKLASCRNLVYDQSPNRTGGPASGRSSKNRDGGERRPSSTSVPLGDKGLDTSCRWLSKSTTRSSSSC

SEQ ID NO: 194356 - DNA, 1008 bp, Artificial Sequence
  derived and/or modified sequence
atggaagacagcggcaagacatttagctctgaggaagaagaagcaaactattggaaagacctagctatgacatataagcagcgtgccgagaacacgcaggaggaattgcgcgaattccaagaaggatctagggagtatgaagctgaactggagactcagttgcaacagattgagaccagaaatcgtgatctcctgagtgagaataatcggttgaggatggaactggagactatcaaggagaaattcgaggtccagcacagcgagggataccgccaaatatccgcactggaggacgatctggcacagactaaagctatcaaggatcagctgcagaaatatatcagggaactggagcaggccaacgatgaccttgaaagagcaaagcgcgccaccataatgagcctggaagattttgaacagcgacttaaccaagcaattgagcggaacgctttcctggagagcgaactggacgagaaagaaaacctgctggaaagtgtccagcgcctgaaggatgaagctcgcgacctgagacaggaactggccgtccaacagaaacaggaaaaaccgcggactccaatgccttccagtgtggaggcagagcgcactgatactgccgtgcaggctacaggctcagtgccatcgaccccaattgcccatcggggaccgtcctccagccttaatacacctggctcctttcgccgggggttagatgactctacaggaggcacccccctgaccccggctgctcgtatttcagcactaaatatcgtgggagatctgcttcggaaagtgggggcgctggagtccaaattagcatcatgccgcaatttggtgtatgaccagagcccaaataggacgggcgggcccgcatctgggcgttccagcaagaacagagatgggggagaaaggcgaccaagctcgactagtgtgcccttgggagataaaggcctggacacatcatgtagatggctatccaagagtactacaagaagctctagctcctgctag

SEQ ID NO: 194357 - DNA, 1008 bp, Artificial Sequence
  derived and/or modified sequence
atggaagattcaggaaaaactttctccagtgaagaagaagaggctaattactggaaggatttggcaatgacgtacaagcagagagctgagaacacacaggaggaacttcgcgagtttcaggaggggagccgggagtatgaagctgaactcgagactcaactgcaacaaattgaaactcgtaaccgggatctgctgtcagaaaacaaccgactccgaatggaactcgagacgattaaagagaagttcgaagtccagcatagcgagggctaccggcaaatatccgctctggaggacgatttggctcagaccaaagccattaaggaccagctgcagaagtacattcgcgagctggaacaggccaatgacgatttggagagggccaagagagcaacaatcatgagcctcgaggactttgagcaaagattgaaccaggcgatcgaacgcaacgcctttttggagtccgaactagacgaaaaggagaatcttctggaatccgtccagcgcctcaaggacgaggctcgcgacctccgacaggagctggccgtgcagcagaaacaggagaagcctaggacccccatgccttcctcagtagaagcagagcggaccgatactgccgtccaggccactggctccgtcccatccaccccaatcgctcaccgcggaccgtcaagcagtctcaatacacccgggtcttttcgaagggggcttgacgactctacaggaggcacccctttgactcctgctgcgcgaataagtgcccttaacattgtgggcgacctgctcagaaaagtcggcgcgctcgagtccaagctggcatcttgcagaaacctggtctatgaccaatctccgaacaggacagggggtccggcctctggccgttccagtaaaaaccgagatggtggggagaggagacctagtagcactagcgtacccttgggggacaagggcttggacactagctgtaggtggttgagcaaatctacgacacggtcatcttcctcgtgctag

SEQ ID NO: 194358 - DNA, 1008 bp, Artificial Sequence
  derived and/or modified sequence
atggaggacagcggtaaaactttcagtagcgaggaagaagaggcaaactactggaaggacctcgctatgacatacaagcagcgggccgagaacacacaggaggagctaagagagtttcaggagggaagtcgggagtatgaggcggagctggagacccaattgcagcagatagaaacacgcaaccgtgatctgctgtccgagaataatagactccgaatggagctggagaccattaaggaaaagtttgaagtgcagcactccgaaggttatcgccagatttctgcgctggaagacgaccttgcgcaaactaaggccatcaaggatcagctccagaaatacatccgggagctggagcaggcgaacgatgatctcgaacgcgccaagcgggcgaccatcatgagcttggaagactttgagcagcgtctgaatcaggctatagaacgaaacgcatttctagagtctgaactagacgaaaaggagaatctgctggagtccgttcaacggttaaaggacgaggcccgtgacctgagacaggagttggctgtccagcagaagcaagagaagccgcgaactcctatgccttcaagtgtggaagctgagcggactgatacagcagtccaggccaccggcagtgtccctagcactcctattgctcaccggggcccctcatcatccttaaataccccgggaagtttccgacgaggattggacgattcaaccgggggaacaccactcacacctgcagctcggatcagcgctctaaatatagtcggtgacttgttgaggaaagtgggggccctcgagtccaagctagccagctgtagaaatctggtgtatgaccagagtccaaatagaaccggagggcctgctagcgggcgtagcagcaaaaaccgggatgggggggagagaagaccgagctctacctcagtccccctgggagacaaaggtctggatacttcctgtcggtggctgtccaagagtactactcgctcaagctccagttgctag

SEQ ID NO: 194359 - DNA, 1008 bp, Artificial Sequence
  derived and/or modified sequence
atggaggacagcggcaagaccttcagcagcgaggaggaggaggccaactactggaaggacctggccatgacctacaagcagagagctgagaacacccaggaggagctgcgggagttccaggagggcagccgggagtatgaggccgagctggagacccagctgcagcagatcgagaccaggaacagagacctgctgtctgagaacaaccggctgaggatggagctggagaccatcaaggagaagtttgaggtgcagcacagcgagggctaccggcagatcagcgccctggaggatgacctggcccagaccaaggccatcaaggaccagctgcagaagtacatccgggagctggagcaggccaatgatgacctggagcgggccaagagggccaccatcatgagcctggaggactttgagcagaggctgaaccaggccatcgagagaaatgccttcctggagagcgagctggatgagaaggagaacctgctggagagcgtgcagaggctgaaggatgaggcccgggacctgcggcaggagctggccgtgcagcagaagcaggagaagcccaggacccccatgcccagctctgtggaggccgagaggacagacacagctgtgcaggccactggatctgtgcccagcacccccatcgcccaccggggccccagcagcagcctgaacaccccaggcagcttcagaagaggcctggatgacagcactggaggcacccccctgaccccagctgcccgcatcagcgccctgaacatcgtgggggacctgctgaggaaggtgggcgccctggagagcaagctggccagctgcaggaacctggtgtatgaccagagccccaacagaactggaggccctgccagcggccgcagcagcaagaacagagatggaggagagcggcggcccagcagcacctctgtgcccctgggggacaagggcctggacaccagctgccgctggctgagcaagagcaccaccaggagcagcagcagctgctag

SEQ ID NO: 194360 - DNA, 1008 bp, Artificial Sequence
  derived and/or modified sequence
atggaggacagcggcaagaccttcagcagcgaggaggaggaggccaattactggaaggaccttgccatgacctataagcagagagccgagaatacccaagaagagttgcgtgaatttcaggaggggtcccgtgaatacgaagcggagctcgaaacgcagttacagcagatcgagacaaggaatagagacctcctgtcagagaacaatcggctccggatggaattggagacgatcaaggaaaagttcgaagtgcaacattccgaggggtatcgccaaatctccgccctcgaggacgatctcgcgcagaccaaagccatcaaggaccagctccagaaatacattcgtgaactggagcaggccaacgatgacctcgaaagagcaaaacgcgcaaccatcatgtcactggaagattttgaacagaggcttaaccaggctatagagaggaacgcatttctggaatctgaactagacgagaaagagaacctgctggagtccgttcagagactcaaggatgaggctagagacttacgacaagaactggcggtccagcagaaacaagaaaagccacgtactcccatgccttcctctgttgaagctgaaaggacagacactgctgtgcaggcaacagggtcagtgccatctacccctatagcacacaggggcccttccagtagcctaaatacccccggcagcttcaggcgaggcttggatgacagtaccggggggacccctctcacccccgctgcccgcatcagtgctctaaacatcgtgggcgatcttctccgcaaggtgggtgcactggaatcaaagctggctagctgtcgaaatctggtgtatgaccagtctccaaacagaacaggcgggccggcatccgggcgctcctcgaaaaatcgggacggaggcgagcgccgcccctctagtacgtcggtcccgctgggagataaagggctggacacatcttgcagatggcttagcaagtcaaccacacggagctcctcgtcttgttag

SEQ ID NO: 194361 - DNA, 1008 bp, Artificial Sequence
  derived and/or modified sequence
atggaggacagcggcaagaccttcagcagcgaggaggaggaggccaactattggaaagacctcgctatgacctataaacagagagctgagaatacgcaagaagaactgcgcgaatttcaagaaggcagccgagaatacgaagcggagctggagacacagttgcagcagatcgagactagaaatagggatctgctctccgaaaacaaccgtctgagaatggagctcgaaacaataaaagaaaagttcgaagtgcaacactccgaggggtaccgacagatttccgccctggaagacgatttagctcaaacaaaagctataaaggaccaactgcaaaagtacattcgtgagctcgaacaagcaaatgacgacctggagcgggccaaaagggccaccatcatgtctctcgaagacttcgagcagagactgaatcaggccattgaacgcaatgcattcctggagtctgaactcgacgagaaagaaaatctgctggagtctgtgcaacggctgaaagatgaagcgagagacctcagacaagagctagccgtccaacagaaacaggagaagcctcggactcctatgccttccagcgtggaggctgaacgtacagacacggctgtccaggccaccgggtcagtgccctccacacctattgctcatcggggcccatctagcagcttaaacacaccagggagcttccggagaggactcgacgactcaaccggggggactccactcacaccagctgctcggattagcgccctgaacatcgtgggagacctgctcagaaaggttggggcactggaatccaaactggccagttgcaggaatctggtgtacgaccagtcccccaaccgaaccggtggcccggcgagtggccgaagctccaaaaaccgtgacggcggcgagcgtcgccccagctcgacctccgttcccctcggagacaagggactagatacatcatgtcgctggctgagcaagagcaccaccaggagctcctctagttgctag

SEQ ID NO: 194362 - DNA, 1008 bp, Artificial Sequence
  derived and/or modified sequence
atggaggacagcggcaagaccttcagcagcgaggaggaggaggccaactattggaaggatttggccatgacgtacaagcagagagccgagaacactcaagaggagttgagggagtttcaggaaggcagccgggaatacgaagcggaattagagacccagctccagcagatcgagacaaggaaccgcgatttgctgtccgaaaataaccgtctgcggatggagttagaaacgattaaagaaaaatttgaagttcaacactctgaaggctacaggcaaatttctgccctggaggatgatctcgctcagaccaaagctattaaggaccagctgcagaagtacatacgcgagctcgaacaagcaaacgatgacctcgagagagctaaacgggccaccattatgtcactggaagacttcgaacaacgtctgaaccaagccatagaacggaacgctttcctagaatctgaactggatgaaaaagagaacctcctggagtccgtacagcgcctcaaagacgaagccagggatcttaggcaggagttggcagtccagcaaaagcaagaaaagccgagaaccccgatgccttcctcagtggaagccgagcgaacagacacagccgttcaggcaacaggcagcgtcccttccacccctatcgctcacagaggcccaagcagctccctgaacactcctggctcttttcgccgaggtctggacgacagtaccggaggcacacctcttaccccggccgccagaatttccgctctgaacatcgtaggggaccttcttcggaaggtgggggccctcgaatcaaagcttgccagctgccggaacctcgtgtacgaccagtcccccaacaggaccgggggaccggcttctggaaggagtagcaaaaaccgggacggcggtgagaggcgcccaagttctacttcggtgcctctgggggataagggtctggacacttcatgtcgctggttaagcaagagtactactcggagtagttccagttgttag

SEQ ID NO: 194363 - DNA, 3221 bp, Artificial Sequence
  derived and/or modified sequence
ggggccgcaccgcccttcgcagccgcctctgccgccgccgccgcgttggcctcgccgcccctgctcggacaccatgccacaaggagagtgatctcttcccctgttttcacaatggaggactccggaaagactttcagctccgaggaggaagaagctaactattggaaagatctggcgatgacctacaaacagagggcagaaaatacgcaagaggaactccgagaattccaggagggaagccgagaatatgaagctgaattggagacgcagctgcaacaaattgaaaccaggaacagagacctcctgtccgaaaataaccgccttcgcatggagctggaaaccatcaaggagaagtttgaagtgcagcactctgaaggctaccggcagatctcagccttggaggatgacctcgcgcagaccaaagccattaaagaccaattgcagaaatacatcagagagctggagcaagcaaatgacgacctggaaagagccaagcgcgccacgatcatgtctctcgaagactttgagcagcgcttgaatcaggccatcgaaagaaatgccttcctggaaagtgaacttgatgaaaaagagaatctcctggaatctgttcagagactgaaggatgaagccagagatttgcggcaggaactggccgtgcagcagaagcaggagaaacccaggacccccatgcccagctcagtggaagctgagaggacagacacagctgtgcaggccacgggctccgtgccgtccacgcccattgctcaccgaggacccagctcaagtttaaacacacctgggagcttcagacgtggcctggacgactccaccggggggacccccctcacacctgcggcccggatatcagccctcaacattgtgggagacctactgcggaaagtcggggcactggagtccaaactcgcttcctgccggaacctcgtgtacgatcagtccccaaaccgaacaggtggcccagcctctgggcggagcagcaagaacagagatggcggggagagacggccaagcagcaccagcgtgcctttgggtgataaggggttggacacgagttgccgctggttgtccaaatcaacaaccaggtcgtccagctcctgctgaagcctgttcttggtcttttccagtttatcataagcggccgccttctcctcgtactgctgggtgaggttctcgatctccttctggaacctcttcttcccctcttccagagcttccacggtgctggcaaagtcctgcagcttcttcttcgagtcggagagctacaaggacagcgtccagggtagggtgagagggggaccatgagtggcccctgtccctggccccacagactctgagaagcgaagaccatgtctcctcgttggagaaacccaatagcaggggaagctggggggtcaagcaccatcgcaccaacactccaccgcgatctgcctgcgggggatctcagcgcagagaagttgagaggacccatgaaggaagcaaggacacggggcaggcacctggatgttgagagtggagatgtggcgctccaggttctgcttggcctccatctcctcgtccagctggtcttgcaggctgttccgctcctcctccagctggcgcagcttcgtagacacgttgagcttctgccgggtttcttcttgaagcagctcctgcaaaagggatgcaaagaggtcccagggacctgccccgaggaaggccaccccccaggtcccctggatgatgtggcaggacactcacctgggtgtcctggagctgggaactgagggacgccacgtccttggccagcttaatggccttcccctcggcctcgttaagcatccctgtgacgctctcaacttcattctaagggtgccaagagactggttagtcaaagcctctagaaggggatcctcgttgaaaggagccctttttactcaaaacacatgggctagtacttgaggtgttcactgattgagaaaatacccgtgaggtatgggactctgataaaaaaaaaaaaaaacacacacacacacaaaaaaaacagaatctgtggcttgaagggaactccgtcacctatgagttgggaccctggccctagactctgtggttctaagaacttatttgagccccaatggtattgactgggacctgatcccactaaatggatcctagatccctgccaaggttggtagagacaaagcagcaggtctgagagtccagacgaggtgctctggctggtccactctctaaggctggagaagggagaccaggatggtacttgaacgtcccagggatgctgtcccatcccttccttcctcactcctactctttgaccctgatggccaaagccagagacgcaggccctaaaggtaaaaacgtcctctctgtattctctggcttttactccctagtgtctctgcataagtccctttgaggctgttagcctacccctccatctcttccattgacaaggaggatatgaatgatcttgacactgcttatatgagggcggcaaaagccctgctctcaactgcatgtgagaaaaaaacatctcacttaattcttccctcgccccttggtccctggctgtggacatgttaaacatttgtgaaaactttggccacgtccccatgagtggcaaggcagggtaaatggctatgccaagtgaaagaagaccaaagacaaaaagaccatgtcattcagcagcttaaaacccctcaacagcttcacattgcccagagtaaggatcaacatacatgtaataggttctcaaaagccctacatcatctgggtacaagctccccctccaaccccactctgtactatctccccctacccccaaccccagctgggcactccagctctactggctgtatgtctctctcctaatttttctacttaccacagggcctttgcacacgctgttccctctgcctggtagacttatccatgctccttagggaagcctttcgtggctcctcctcccccaggttaggccccctggttatttacacttgggcatcatgtgccttccctttgctgcatcatttgacattcatttgtgtgattattcatgtctttcccttcccttcccttccccttactcggctggagtcctactggggcagcgacagtgtctcttcttccttgctgttggatctcaggattaagcacagtgcctggcatacagcaggtgctcaataaatacttatcaaattggaaaa

SEQ ID NO: 194364 - DNA, 1008 bp, Artificial Sequence
  derived and/or modified sequence
atggaggattccgggaagacattctcatctgaggaggaggaggcgaactattggaaagaccttgctatgacctacaagcagcgggcagaaaatacgcaagaggaactgcgcgaattccaggaaggatcacgcgaatacgaagccgagctcgagacacagcttcagcaaatcgaaacaaggaacagggacctgctctcggagaacaaccggttgagaatggagctggaaacaattaaggagaaatttgaagtgcagcattcagagggttaccgacaaatctcagccctggaggatgatctggcgcagactaaggccatcaaggaccaactacagaaatacatcagagagcttgagcaggcaaatgacgacttagaaagggccaagagagcaaccatcatgagcttggaagactttgagcaacgcttgaaccaggccatcgagcgaaatgccttcttagaaagcgagctggatgagaaagagaacctccttgagagcgtgcagcgattgaaggacgaagccagggacctgcgccaggagctggctgttcaacagaaacaggagaaacctcggacacccatgcctagtagcgtggaggccgagcggaccgatactgcggtgcaggccaccggatctgtcccaagtacgcctattgcccataggggtccttcaagctcccttaatacaccaggaagcttccgcagaggactcgatgatagcaccggcggtacacccctgactcccgctgccagaattagcgctttaaatatagtcggagacctcctgcggaaggtgggtgctcttgaaagtaaactcgcttcatgtcgtaatctggtgtatgaccagagccctaaccgaactggcggaccagctagtggcagaagttccaaaaaccgggacggtggagagaggaggccaagtagcacttcagtccctcttggcgacaaggggctggacacaagctgccggtggctaagtaaatcaacaacccgcagtagctcctcctgctag

SEQ ID NO: 194365 - DNA, 1008 bp, Artificial Sequence
  derived and/or modified sequence
atggaagattctggcaagactttcagctcagaagaggaagaggcaaactactggaaggacctggccatgacatacaaacaacgggctgaaaacactcaggaggagttacgtgagtttcaagagggctcccgagaatacgaggcagagctcgagactcagctgcagcagatcgagacgagaaacagagacctgttgtctgaaaataatagactgcgcatggagctggaaactattaaagagaagtttgaggtccagcatagtgaggggtatcggcagatttcagcactggaagacgacctggcccaaacaaaggctattaaggatcagcttcaaaaatacattagagagctggagcaagctaacgatgatctggagagggctaaacgcgcaaccatcatgtcactggaagatttcgaacagcgactgaaccaggccatcgaacggaatgcctttctagagtcagaactagacgagaaagaaaatttactcgagagcgtacaacgcttgaaggatgaagcacgggatctgcgacaagagctggctgttcagcagaaacaggaaaagcccaggactcccatgccaagttcagttgaagccgaaagaacagataccgctgtgcaggcgacaggcagcgtgccgagcactccgattgctcatcgtgggccatcatcatccttaaacacgccaggctcgttcaggcggggactggacgactcgaccgggggaactccgttaactcctgccgcacggattagcgctctcaacatagttggtgatctgctgcgaaaggtaggggctctcgagagcaagctggcctcttgtagaaacctggtctatgatcagtcccccaacagaaccggcggaccagcctccggccgttctagtaaaaaccgcgacggaggcgagcggagaccctcctctaccagcgttccacttggagataaaggactggatacatcatgtaggtggcttagtaaaagcacaactaggagcagctccagctgctag

SEQ ID NO: 194366 - DNA, 1008 bp, Artificial Sequence
  derived and/or modified sequence
atggaggactccggaaagacctttagctccgaagaggaagaggcaaactactggaaagatctcgctatgacctataagcagagggccgagaatacccaagaagagctccgagagttccaggagggatctcgcgaatatgaggccgaactcgaaacgcagcttcagcagatcgaaacccggaacagggacctgctttccgagaacaacaggttacggatggagctcgagaccatcaaggaaaaattcgaagtgcagcacagcgagggttatagacagatatctgctctagaggacgatttggcacaaacaaaggcaatcaaagaccaattacaaaagtatataagggagctcgagcaggccaacgacgatctggagcgggcaaaaagagcaacaatcatgtcattggaagacttcgagcaacgcctcaatcaggccattgagaggaatgcattcctggagtcagagctcgacgagaaggagaatttgctcgaaagcgtacagaggttgaaggatgaagctagagatctgagacaggagctcgctgtccagcagaaacaagaaaagcctcgaacccctatgcccagctctgtggaagcggaacggaccgacactgctgtacaggcaactggctccgttcccagtactccaatcgcccacaggggaccatcgagcagcttaaacacacccggatccttcaggaggggcctcgacgacagcaccggcggaactcctctcacacccgcagccagaatctcagcccttaatattgtgggcgacctcctgagaaaagtgggcgctctggaaagcaaactggcctcctgtaggaacctcgtttacgatcaaagtccgaaccggactggaggtcctgcttctggcaggagctctaagaacagagatggcggagagcgaaggcccagctccaccagtgtcccgttaggcgacaaggggttagacacatcatgtcggtggctttcaaagtcaacaaccagatctagctccagttgttag

SEQ ID NO: 194367 - DNA, 1008 bp, Artificial Sequence
  derived and/or modified sequence
atggaggacagcggcaagaccttcagcagcgaggaggaggaggccaactactggaaggacctggccatgacctacaagcagagagccgagaacacccaggaggagctgagagagttccaggagggcagcagagagtacgaggccgagctggagacccagctgcagcagatcgagaccagaaacagagacctgctgagcgagaacaacagactgagaatggagctggagaccatcaaggagaagttcgaggtgcagcacagcgagggctacagacagatcagcgccctggaggacgacctggcccagaccaaggccatcaaggaccagctgcagaagtacatcagagagctggagcaggccaacgacgacctggagagagccaagagagccaccatcatgagcctggaggacttcgagcagagactgaaccaggccatcgagagaaacgccttcctggagagcgagctggacgagaaggagaacctgctggagagcgtgcagagactgaaggacgaggccagagacctgagacaggagctggccgtgcagcagaagcaggagaagcccagaacccccatgcccagcagcgtggaggccgagagaaccgacaccgccgtgcaggccaccggcagcgtgcccagcacccccatcgcccacagaggccccagcagcagcctgaacacccccggcagcttcagaagaggcctggacgacagcaccggcggcacccccctgacccccgccgccagaatcagcgccctgaacatcgtgggcgacctgctgagaaaggtgggcgccctggagagcaagctggccagctgcagaaacctggtgtacgaccagagccccaacagaaccggcggccccgccagcggcagaagcagcaagaacagagacggcggcgagagaagacccagcagcaccagcgtgcccctgggcgacaagggcctggacaccagctgcagatggctgagcaagagcaccaccagaagcagcagcagctgctag

SEQ ID NO: 194368 - protein, 308 aa, Artificial Sequence
  derived and/or modified sequence
MCGVEGCCQGGATRRGSLPGGRQLATRKRSVVRRCLKMAAEEPQQQKQEPLGSDSEGVNCLAYDEAIMAQQDRIQQEIAVQNPLVSERLELSVLYKEYAEDDNIYQQKIKDLHKKYSYIRKTRPDGNCFYRAFGFSHLEALLDDSKELQRFKAVSAKSKEDLVSQGFTEFTIEDFHNTFMDLIEQVEKQTSVADLLASFNDQSTSDYLVVYLRLLTSGYLQRESKFFEHFIEGGRTVKEFCQQEVEPMCKESDHIHIIALAQALSVSIQVEYMDRGEGGTTNPHIFPEGSEPKVYLLYRPGHYDILYK

SEQ ID NO: 194369 - protein, 271 aa, Artificial Sequence
  derived and/or modified sequence
MAAEEPQQQKQEPLGSDSEGVNCLAYDEAIMAQQDRIQQEIAVQNPLVSERLELSVLYKEYAEDDNIYQQKIKDLHKKYSYIRKTRPDGNCFYRAFGFSHLEALLDDSKELQRFKAVSAKSKEDLVSQGFTEFTIEDFHNTFMDLIEQVEKQTSVADLLASFNDQSTSDYLVVYLRLLTSGYLQRESKFFEHFIEGGRTVKEFCQQEVEPMCKESDHIHIIALAQALSVSIQVEYMDRGEGGTTNPHIFPEGSEPKVYLLYRPGHYDILYK

SEQ ID NO: 194370 - protein, 280 aa, Artificial Sequence
  derived and/or modified sequence
MAAEEPQQQKQEPLGSDSEGVNCLAYDEAIMAQQDRIQQEDMTDPCLLQIAVQNPLVSERLELSVLYKEYAEDDNIYQQKIKDLHKKYSYIRKTRPDGNCFYRAFGFSHLEALLDDSKELQRFKAVSAKSKEDLVSQGFTEFTIEDFHNTFMDLIEQVEKQTSVADLLASFNDQSTSDYLVVYLRLLTSGYLQRESKFFEHFIEGGRTVKEFCQQEVEPMCKESDHIHIIALAQALSVSIQVEYMDRGEGGTTNPHIFPEGSEPKVYLLYRPGHYDILYK

SEQ ID NO: 194371 - DNA, 927 bp, Artificial Sequence
  derived and/or modified sequence
atgtgcggagtagagggctgctgccaaggaggagccacacggaggggctctcttcctggagggcgccagttggccacccgaaagcgatctgtcgttagacgctgtttgaagatggcagctgaggagccccagcagcagaagcaggagcctctcgggtcggacagcgaaggggtgaactgtttggcttatgacgaggctataatggctcagcaagatcggattcaacaggaaatcgcggttcagaaccctctcgtgagcgagaggctggagctaagcgtcctctacaaggaatacgccgaggacgacaatatctaccagcagaagatcaaagatctccacaagaaatacagttacatccgtaagacccgccccgatggaaactgcttttatcgggcctttggcttctcgcacctggaggcccttttggacgactcaaaagagttacagagattcaaggctgtgtcagccaagtcgaaggaggacctggtgagccaaggcttcaccgaattcacgattgaagacttccacaacaccttcatggacctaatcgagcaagtagagaaacagacatctgtggctgacctgttggcttcgttcaatgatcagtccacatctgattatctagttgtgtacctgcggctattaacatctggatatcttcaacgtgagtctaagttttttgaacacttcattgagggggggcgcaccgtcaaggagttttgccagcaggaagtcgagcccatgtgtaaagagtcagaccacattcacatcatcgctctcgcgcaggcattgtctgtatccattcaggtggagtacatggacagaggcgagggtgggaccacaaacccacatatcttcccggagggtagtgaacccaaagtgtatctgctgtaccggccaggtcactacgatatcctttacaaatag

SEQ ID NO: 194372 - DNA, 816 bp, Artificial Sequence
  derived and/or modified sequence
atggccgcggaagagcctcagcaacaaaagcaggaacccctgggcagcgactctgagggcgtgaactgcctcgcttatgacgaggccattatggcccaacaggaccggattcagcaggagatagccgtgcagaaccccctggtatccgaaagactcgaactgagcgtgctctacaaggagtacgccgaagatgacaacatctaccagcagaaaattaaagaccttcataagaagtactcttacatcaggaagacccgcccggacggcaactgcttctaccgagccttcggcttcagtcacctggaagctctgctggacgattctaaggaattgcagcgtttcaaggccgtgtccgccaagtccaaagaggatctcgtgagtcaagggtttaccgagttcaccattgaagacttccacaataccttcatggacttgatcgagcaggttgaaaagcagacctccgtggcagacttacttgctagctttaacgatcagtctacatccgattatcttgttgtctaccttaggctattgaccagtggatatttacagcgtgaaagcaagtttttcgagcatttcattgaaggcgggaggaccgtgaaggagttctgccagcaagaagtggagccaatgtgcaaagaatccgatcacatacacattatcgctcttgcccaggctctgtctgtgtcaattcaggtggaatacatggacagaggtgagggcgggacaacgaatcctcatattttccccgagggcagcgaaccgaaagtgtatctactgtacaggccagggcactatgacattctgtataaatag

SEQ ID NO: 194373 - DNA, 816 bp, Artificial Sequence
  derived and/or modified sequence
atggccgcagaagagcctcagcagcaaaagcaggaacctttgggctcagactctgaaggtgtgaactgtctcgcctacgatgaagcaatcatggcccaacaggaccggattcagcaggaaatcgctgtgcaaaatcctctcgttagtgagcgtctggagttatcagttctgtataaggagtacgccgaggatgataacatttatcagcaaaaaatcaaggaccttcacaaaaagtatagctacataaggaagactcggcctgatggaaattgtttttacagggcattcggcttcagtcacctggaagcactgcttgatgactccaaagagctccagcgctttaaggctgtgtctgccaaatctaaagaggatttggtttcacagggtttcactgaattcacaattgaggatttccataatacattcatggaccttatagaacaggttgaaaaacagacgtcagtcgctgacctcctggctagtttcaatgatcaatcaacatccgattacctggtggtatatttacgactgctcaccagtggctatttgcagcgagagtcaaagttctttgaacacttcattgagggcggtaggacagtcaaggagttttgtcaacaggaagtcgaacccatgtgcaaggaaagtgaccacatccatataattgctttggcccaggctctgagtgtgagcatacaggtcgagtatatggatcggggtgagggaggaaccactaacccccatatatttcctgagggctcagagccgaaagtgtacctgctttatagacccgggcattatgacattctctataagtag

SEQ ID NO: 194374 - DNA, 843 bp, Artificial Sequence
  derived and/or modified sequence
atggctgctgaggagcctcagcaacaaaagcaggagcctctgggtagtgattcagaaggcgtcaactgtctggcgtatgatgaagccatcatggcccagcaggatcgcatccagcaagaagatatgacggatccttgtcttttgcagattgctgtgcagaatccactggtgtccgagaggctcgaattgtccgtgctctataaggagtacgcagaagacgataacatttaccagcagaagattaaagacttgcataagaaatattcatacatacgtaaaacccgccctgatgggaactgcttttacagagcctttggattctctcacttagaagctctgctcgacgacagcaaagagttgcaacggtttaaagctgtgtctgcaaagagcaaggaagacctggtgagtcagggcttcaccgaattcacgatcgaggactttcataacacctttatggacttgatagaacaggtggagaagcagactagtgttgccgatctgctggcctctttcaacgaccaaagtactagcgattacctggttgtgtacttgcggctactgacctccggctacctgcagcgtgagagcaagttttttgagcatttcatcgaaggtggacgcacagtgaaagagttctgccagcaggaggtagaaccaatgtgcaaggagagcgatcacatccacatcattgcattggcccaggccctttcagtaagcatccaggtcgaatacatggaccggggggagggcggaaccactaacccacacatcttcccagagggctccgaacctaaggtctacctcctttatcggccaggtcattatgacattctgtataagtag

SEQ ID NO: 194375 - DNA, 927 bp, Artificial Sequence
  derived and/or modified sequence
atgtgtggggtggagggctgctgccagggcggggccacccggcggggcagcctgcccggcggccggcagctggccaccaggaagaggtctgtggtgcggcgctgcctgaagatggctgctgaggagccccagcagcagaagcaggagcccctgggcagtgacagcgagggcgtgaactgcctggcctatgatgaggccatcatggcccagcaggaccgcatccagcaggagattgctgtgcagaaccccctggtgtctgagcggctggagctgtctgtgctgtacaaggagtatgcagaagatgacaacatctaccagcagaagatcaaggacctgcacaagaagtacagctacatcaggaagaccaggccagatggcaactgcttctaccgggccttcggcttcagccacctggaggccctgctggatgacagcaaggagctgcagcgcttcaaggctgtgtctgccaagagcaaggaggacctggtgtcccagggcttcacagagttcaccatcgaggacttccacaacaccttcatggacctgattgagcaggtggagaagcagacctctgtggccgacctgctggccagcttcaatgaccagagcaccagtgactacctggtggtgtacctgcggctgctgaccagcggctacctgcagcgggagagcaagttctttgagcacttcattgaaggaggccgcacagtgaaggagttctgccagcaggaggtggagcccatgtgcaaggagagtgaccacatccacatcatcgccctggcccaggccctgtctgtgtccatccaggtggagtacatggacagaggagagggcggcaccaccaacccccacatcttccctgagggcagcgagcccaaggtgtacctgctgtaccggcccggccactatgacatcctgtacaagtag

SEQ ID NO: 194376 - DNA, 816 bp, Artificial Sequence
  derived and/or modified sequence
atggctgctgaggagccccagcagcagaagcaggagcccctgggcagtgacagcgagggcgtgaactgcctggcctatgatgaggccatcatggcccagcaggaccgcatccagcaggagattgctgtgcagaaccccctggtgtctgagcggctggagctgtctgtgctgtacaaggagtatgcagaagatgacaacatctaccagcagaagatcaaggacctgcacaagaagtacagctacatcaggaagaccaggccagatggcaactgcttctaccgggccttcggcttcagccacctggaggccctgctggatgacagcaaggagctgcagcgcttcaaggctgtgtctgccaagagcaaagaagacctggtgtcccagggcttcacagagttcaccatcgaggacttccacaacaccttcatggacctgattgagcaggtggagaagcagacctctgtggccgacctgctggccagcttcaatgaccagagcaccagtgactacctggtggtgtacctgcggctgctgaccagcggctacctgcagcgggagagcaagttctttgagcacttcatcgagggcggccgcacagtgaaggagttctgccagcaggaggtggagcccatgtgcaaggagagtgaccacatccacatcatcgccctggcccaggccctgtctgtgtccatccaggtggagtacatggacagaggagagggcggcaccaccaacccccacatcttccctgagggcagcgagcccaaggtgtacctgctgtacagacctggccactatgacatcctgtacaagtag

SEQ ID NO: 194377 - DNA, 843 bp, Artificial Sequence
  derived and/or modified sequence
atggctgctgaggagccccagcagcagaagcaggagcccctgggcagtgacagcgagggcgtgaactgcctggcctatgatgaggccatcatggcccagcaggaccgcatccagcaggaggacatgacagacccctgcctgctgcagattgctgtgcagaaccccctggtgtctgagcggctggagctgtctgtgctgtacaaggagtatgcagaagatgacaacatctaccagcagaagatcaaggacctgcacaagaagtacagctacatcaggaagaccaggccagatggcaactgcttctaccgggccttcggcttcagccacctggaggccctgctggatgacagcaaggagctgcagcgcttcaaggctgtgtctgccaagagcaaggaggacctggtgtcccagggcttcacagagttcaccatcgaggacttccacaacaccttcatggacctgattgagcaggtggagaagcagacctctgtggccgacctgctggccagcttcaatgaccagagcaccagtgactacctggtggtgtacctgcggctgctgaccagcggctacctgcagcgggagagcaagttctttgagcacttcattgaaggaggccgcacagtgaaggagttctgccagcaggaggtggagcccatgtgcaaggagagtgaccacatccacatcatcgccctggcccaggccctgtctgtgtccatccaggtggagtacatggacagaggagagggcggcaccaccaacccccacatcttccctgagggcagcgagcccaaggtgtacctgctgtaccggcccggccactatgacatcctgtacaagtag

SEQ ID NO: 194378 - DNA, 927 bp, Artificial Sequence
  derived and/or modified sequence
atgtgcggcgtggagggctgctgccagggcggcgccacccggcggggttctctcccaggagggcgacagctggctacgcgcaagcgttctgtcgtgcgccgttgtctcaaaatggccgctgaagaaccgcagcaacagaagcaggagccactgggctccgactccgaaggggttaattgccttgcatacgatgaggccatcatggcccagcaggaccggatacagcaggaaatcgctgtccagaacccactggtgagtgagcggctggagctgagcgtgctctacaaggagtatgccgaagacgacaacatctatcaacaaaagataaaagacctgcacaaaaagtactcctatatcaggaagacacgacctgatggaaactgcttttatcgagcctttggattttctcacttagaagccctgctcgatgattcaaaggagttacagcggttcaaggctgtgagcgcgaaaagcaaggaggacctggtgtcacagggatttacagaattcacgatagaggattttcacaacacctttatggacctaattgaacaggtggagaagcagacaagcgtggctgacctgctagcttcattcaacgaccagtcgaccagcgactacctcgtggtctacttgaggttgctgaccagtggctatctgcagagagagtcgaaatttttcgaacactttattgaagggggacgcacagtgaaagagttttgccaacaggaggtcgaaccaatgtgcaaagagagcgaccacattcacatcatcgctctcgcccaggcgctttccgtctctatccaggtagagtacatggatcgcggtgaaggcggaactacaaacccccacatatttcccgaaggttcagagcctaaggtgtatctgctgtacagacccggccactatgacatattgtataagtag

SEQ ID NO: 194379 - DNA, 816 bp, Artificial Sequence
  derived and/or modified sequence
atggccgccgaggagccccagcagcagaagcaggagcccctgggcagcgattctgaaggtgtgaactgcctcgcatacgacgaggctataatggcgcaacaggatagaatccagcaggagattgcagtgcagaacccccttgtatccgagcgccttgaactgagcgtactatacaaagagtacgctgaggacgacaatatctatcagcaaaagatcaaagacctccacaaaaagtattcttatataagaaaaacccggcccgatggaaactgcttctatagagctttcggattctcacacctagaagctctgctcgatgattcgaaagaactgcagcgctttaaggctgtgtcagcaaagagcaaagaggacttggtgagccaaggcttcacagagtttaccatcgaagacttccataacactttcatggacctaattgaacaggttgaaaagcagacctcagtcgccgacctgctggcttcctttaatgaccagagtaccagcgactatctggtcgtctacttgcggcttctcacttccgggtatctgcagcgcgagtctaagttctttgagcattttatcgagggcggccgcaccgtaaaggaattttgtcagcaagaggtcgagcctatgtgcaaagaaagcgaccacattcatattatcgctctcgcacaggctctgagtgtgtccattcaggtggagtatatggatcgcggggagggaggcaccacaaacccacatatcttccccgaggggtccgaacccaaagtgtacctcctgtatagacccggacactacgatatactatataaatag

SEQ ID NO: 194380 - DNA, 816 bp, Artificial Sequence
  derived and/or modified sequence
atggccgccgaggagccccagcagcagaagcaggagcccctgggcagcgacagtgagggagttaactgtctggcttacgacgaggccatcatggcacagcaggacagaattcagcaggagatcgctgtacagaacccactcgtgtcagagcgactggaactgtcagtgctctataaagaatacgccgaggatgacaacatctatcagcagaaaatcaaggatcttcataaaaaatactcttatattcggaaaaccaggccagacggcaactgcttctatcgggcctttgggttttcacatctggaggctttactggacgactctaaagaacttcagcgatttaaagccgtatcggccaagtctaaggaagatctcgtaagtcagggattcaccgaatttacaatagaggacttccacaacacctttatggatcttatcgagcaggtggaaaagcaaactagtgtggctgatttactggcatcgtttaacgatcagagcacgtccgactatctggtggtttatttgcggttgttgacctccgggtatctgcagcgggagagtaaatttttcgaacacttcatcgagggaggccggaccgtcaaggaattttgtcagcaggaagtggagcccatgtgcaaggagtcagatcacatccatatcattgccctggcccaggcactgtcggtaagcattcaggtggagtatatggatcggggggagggcggcactacaaacccccatatctttccagaaggcagtgagccaaaagtttatctgctgtaccgcccaggccactacgatattctgtataagtag

SEQ ID NO: 194381 - DNA, 843 bp, Artificial Sequence
  derived and/or modified sequence
atggccgccgaggagccccagcagcagaagcaggagcccctgggcagcgatagtgagggcgtgaattgtctcgcctatgatgaagccattatggcacagcaggaccgaattcagcaagaagacatgaccgacccctgcctgttacagattgctgtgcagaatcccctggtcagtgagcgcttggaattatccgtcctatacaaggagtatgctgaggatgataacatttaccaacagaagatcaaggacctgcataagaaatatagttacattagaaaaactcgaccagatggcaactgcttctacagagccttcggctttagccatcttgaagcactactggacgattcaaaagagctgcagaggtttaaggccgtctccgctaagtccaaggaagatctagtgagccagggttttacagagtttaccatcgaggacttccataatacatttatggacctgattgagcaagtggagaagcaaactagcgttgctgacttactagctagtttcaatgaccagagcactagtgattatctagtcgtgtacctccggctcttgacgtcaggatatctgcagcgagagagtaaattttttgagcacttcattgaaggcgggcggacggtgaaagagttctgccagcaggaggtcgagccaatgtgcaaggagagtgaccatattcacattatcgctttggcccaggcactctcagtttcaatccaggtggagtacatggataggggtgagggggggactacaaatccacacattttccccgagggctctgagcccaaggtttacctgctgtatcgtccgggccactacgacatcctctataagtag

SEQ ID NO: 194382 - DNA, 1296 bp, Artificial Sequence
  derived and/or modified sequence
gctgctccgcactgcagctatggtcgcatgcagtgcctgccgaagcccgcagcaggaatgctgccttcggtgattttaatttcacttttctacttctctcaataacaaaatccgcgtttcaaactccagggaaaagaaaacggaattggctccaggaggatctgcaatcaccaccgggaactttgggaggctgggaagatggagccaaaccaatgtgtggggtggagggctgttgccaaggcggggcaacgaggaggggctcgcttccgggaggacggcaattggcaacccggaagcggtcggtagtgcggcgctgtttaaagatggcggcggaggaacctcagcagcagaagcaggagccgctgggcagcgactccgaaggtgttaactgtctggcctatgatgaagccatcatggctcagcaggaccgaattcagcaagagattgctgtgcagaaccctctggtgtcagagcggctggagctctcggtcctatacaaggagtatgctgaagatgacaacatctatcaacagaagatcaaggacctccacaaaaagtactcgtacatccgcaagaccaggcctgacggcaactgtttctatcgggctttcggattctcccacttggaggcactgctggatgacagcaaggagttgcagcggttcaaggctgtgtctgccaagagcaaggaagacctggtgtcccagggcttcactgaattcacaattgaggatttccacaacacgttcatggacctgattgagcaggtggagaagcagacctctgtcgccgacctgctggcctccttcaatgaccagagcacctccgactaccttgtggtctacctgcggctgctcacctcgggctacctgcagcgcgagagcaagttcttcgagcacttcatcgagggtggacggactgtcaaggagttctgccagcaggaggtggagcccatgtgcaaggagagcgaccacatccacatcattgcgctggcccaggccctcagcgtgtccatccaggtggagtacatggaccgcggcgagggcggcaccaccaatccgcacatcttccctgagggctccgagcccaaggtctaccttctctaccggcctggacactacgatatcctctacaaatagggctggctccagcccgctgctgccctgctgcccccctctgccaggcgctagacatgtacagaggtttttctgtggttgtaaatggtcctatttcacccccttcttcctgtcacatgacccccccccatgttttattaaagggggtgctggtggtgag

SEQ ID NO: 194383 - DNA, 1729 bp, Artificial Sequence
  derived and/or modified sequence
aattggcaacccggaagcggtcggtagtgcggcgctgtttaaagatggcggcggaggaacctcagcagcagaagcaggagccgctgggcagcgactccgaaggtgttaactgtctggcctatgatgaagccatcatggctcagcaggaccgaattcagcaagagattgctgtgcagaaccctctggtgtcagagcggctggagctctcggtcctatacaaggagtatgctgaagatgacaacatctatcaacagaagatcaaggacctccacaaaaagtactcgtacatccgcaagaccaggcctgacggcaactgtttctatcgggctttcggattctcccacttggaggcactgctggatgacagcaaggagttgcagcggttcaaggctgtgtctgccaagagcaaggaagacctggtgtcccagggcttcactgaattcacaattgaggatttccacaacacgttcatggacctgattgagcaggtggagaagcagacctctgtcgccgacctgctggcctccttcaatgaccagagcacctccgactaccttgtggtctacctgcggctgctcacctcgggctacctgcagcgcgagagcaagttcttcgagcacttcatcgagggtggacggactgtcaaggagttctgccagcaggaggtggagcccatgtgcaaggagagcgaccacatccacatcattgcgctggcccaggccctcagcgtgtccatccaggtggagtacatggaccgcggcgagggcggcaccaccaatccgcacatcttccctgagggctccgagcccaaggtctaccttctctaccggcctggacactacgatatcctctacaaatagggctggctccagcccgctgctgccctgctgcccccctctgccaggcgctagacatgtacagaggtttttctgtggttgtaaatggtcctatttcacccccttcttcctgtcacatgacccccccccatgttttattaaagggggtgctggtggtgagccgtgtgtgcgtgtccctgctctgctgcccgcctggctgctctgtctgctgccccctccccccaggtgggtccccctgcttttcacctatctactcctgagcttccccaacaggagcaggtttgaggggccaggcctcttggaggcccctcctgcttcgttgggttctgcttccttcccttcttagctggctcaggggcttctatgggatcctggaagttccttagggacttgcccagggtcccagggccacccacacttcatctgctccctcataggccccacctccacgtcccggctgggccccagaccccagcttcctgccctccaccgggagtctgcatggttgggagtcctgggtggaggggcctttgtgaggctggacccggctcagggcaggtggaggagctgggcctcccacagggtgcccgggcagtgccatcctggtgggggagggcagccttcaaacgtgtggggtctacagtcctcaggtctaggcagggctgccggttctccacctccccatccgccccaggccccctgcctgtgcctgccttgcaccccctctgcttgggccacggtgtctctgcattgcctgcctttttgccttcacctcttttcttccccgccccctgcacattcggggtctcagcccccaggctgtgagctccttgggggcaggccctcaataaatgtgaactgctgctgccgcc

SEQ ID NO: 194384 - DNA, 1647 bp, Artificial Sequence
  derived and/or modified sequence
gctgtttaaagatggcggcggaggaacctcagcagcagaagcaggagccgctgggcagcgactccgaaggtgttaactgtctggcctatgatgaagccatcatggctcagcaggaccgaattcagcaagaggacatgacagatccctgcctcctccagattgctgtgcagaaccctctggtgtcagagcggctggagctctcggtcctatacaaggagtatgctgaagatgacaacatctatcaacagaagatcaaggacctccacaaaaagtactcgtacatccgcaagaccaggcctgacggcaactgtttctatcgggctttcggattctcccacttggaggcactgctggatgacagcaaggagttgcagcggttcaaggctgtgtctgccaagagcaaggaagacctggtgtcccagggcttcactgaattcacaattgaggatttccacaacacgttcatggacctgattgagcaggtggagaagcagacctctgtcgccgacctgctggcctccttcaatgaccagagcacctccgactaccttgtggtctacctgcggctgctcacctcgggctacctgcagcgcgagagcaagttcttcgagcacttcatcgagggtggacggactgtcaaggagttctgccagcaggaggtggagcccatgtgcaaggagagcgaccacatccacatcattgcgctggcccaggccctcagcgtgtccatccaggtggagtacatggaccgcggcgagggcggcaccaccaatccgcacatcttccctgagggctccgagcccaaggtctaccttctctaccggcctggacactacgatatcctctacaaatagggctggctccagcccgctgctgccctgctgcccccctctgccaggcgctagacatgtacagaggtttttctgtggttgtaaatggtcctatttcacccccttcttcctgtcacatgacccccccccatgttttattaaagggggtgctggtggtgagccgtgtgtgcgtgtccctgctctgctgcccgcctggctgctctgtctgctgccccctccccccaggtgggtccccctgcttttcacctatctactcctgagcttccccaacaggagcaggtttgaggggccaggcctcttggaggcccctcctgcttcgttgggttctgcttccttcccttcttagctggctcaggggcttctatgggatcctggaagttccttagggacttgcccagggtcccagggccacccacacttcatctgctccctcataggccccacctccacgtcccggctgggccccagaccccagcttcctgccctccaccgggagtctgcatggttgggagtcctgggtggaggggcctttgtgaggctggacccggctcagggcaggtggaggagctgggcctcccacagggtgcccgggcagtgccatcctggtgggggagggcagccttcaaacgtgtggggtctacagtcctcaggtctaggcagggctgccggttctccacctccccatccgccccaggccccctgcctgtgcctgccttgcaccccctctgcttgggccacggtgtctctgcattgcctgcctttttgccttcacctcttttcttccccgccccctgca

SEQ ID NO: 194385 - DNA, 927 bp, Artificial Sequence
  derived and/or modified sequence
atgtgtggcgtggaggggtgttgccagggcggagctacccgaaggggaagcctgccagggggacggcaacttgctactcggaagcggagcgtggtgagacgctgcctcaagatggccgcagaagaaccccaacaacaaaaacaggaacctttaggatccgattctgagggcgtcaactgtctggcctatgacgaagcgattatggcacagcaggataggatccagcaggagatagccgtccagaaccccttggtgtcagagcggctggagttgtctgtgctctacaaggagtacgccgaggatgacaacatctaccagcagaaaattaaagacctccacaagaagtactcttatatccgaaagacccggcctgatggaaactgtttctaccgagcctttggtttttcacatctcgaggccctcctggacgattctaaggaactccagagattcaaggcagtcagtgcaaaatcaaaagaggatcttgtgtcccaaggattcaccgagttcactatcgaggactttcacaacactttcatggatctcattgagcaagtcgagaaacagacttctgtggccgaccttctggcatcctttaacgatcaatctacttccgactacctggttgtatacttgaggctcctcacttcagggtacctgcagagggagtcgaaattttttgagcactttatcgaaggagggagaactgtgaaggagttttgccaacaggaggttgaaccaatgtgtaaggagtccgatcatatccacattatcgccctcgctcaggccctctctgtctctattcaggtcgagtacatggaccgcggagaaggagggacaaccaacccccacatcttccccgaggggagtgagcctaaagtgtacttgttgtatcggccaggacactacgatattctgtacaaatag

SEQ ID NO: 194386 - DNA, 816 bp, Artificial Sequence
  derived and/or modified sequence
atggcagcagaagaaccgcagcagcagaagcaggaaccactcggcagcgactcggagggggtgaattgcctggcatacgatgaagccattatggcccaacaggacagaatccagcaggagattgccgtacagaatcccctggtgagcgaacgtctggagctatccgtgctgtataaggaatacgcggaagatgataatatctatcagcagaaaatcaaggatctgcacaagaaatactcctatattcgtaagaccaggcccgatgggaactgcttttaccgggctttcggatttagccacctagaagctctcctggatgattcaaaggagcttcagcgcttcaaggcggtcagtgctaaatcaaaagaagacttggtgtctcagggctttacggaatttacgatagaagatttccacaacacttttatggatctcatagaacaggtggaaaaacagactagtgtagcagatctcctcgcatcattcaacgaccagagtacctcagactatcttgtggtgtatttgcgactgttgacaagcggataccttcagagagagtcaaaatttttcgaacatttcatagaaggcggtaggaccgtcaaagagttttgtcaacaggaggtcgaacctatgtgcaaggagagcgatcatattcatatcattgctctggcccaggccctctctgtgtctattcaggtcgagtatatggatcgcggagaggggggaactactaatcctcatatcttcccggaaggctccgaacccaaagtgtatctgctctaccgccctggacactatgacattctctataaatag

SEQ ID NO: 194387 - DNA, 816 bp, Artificial Sequence
  derived and/or modified sequence
atggctgctgaggaaccgcaacagcagaaacaagagcccctgggcagcgactccgagggagtcaactgcctggcttatgacgaagccatcatggcgcaacaggaccgaattcagcaagagatagccgtgcagaatcccttggtgtccgagcggctggaattgtctgttctgtataaggagtacgccgaggacgacaacatctaccagcagaagatcaaggatctgcacaaaaaatatagttatatccggaaaactcgacctgatgggaattgtttttacagggcttttggattcagccacctcgaggcactgctggatgatagcaaggagctgcagcgttttaaggcagtctcggccaagtctaaagaagaccttgtgagccagggatttacagagttcacgatagaagatttccacaacactttcatggatctgatcgagcaagtggagaagcaaacaagcgtggccgacttgctggcctcctttaacgaccagagcacttcagactacctagtggtttatttgagattacttaccagcggatatctgcagcgggaatccaagttcttcgagcatttcatagaggggggtaggacagtaaaggagttctgtcagcaggaagtagagcctatgtgcaaggaatcagatcatattcatatcatcgcgctcgctcaggcgctgtctgttagcatacaggtagagtacatggatcgcggagagggcggtaccactaacccgcacatcttccccgagggtagtgagcccaaggtttacttgttgtatagacccggacactatgatattctctataaatag

SEQ ID NO: 194388 - DNA, 843 bp, Artificial Sequence
  derived and/or modified sequence
atggcggctgaggagccgcagcagcaaaagcaggaacctctgggctcagattctgaaggggtcaactgccttgcatacgacgaagctatcatggctcaacaggacaggattcagcaggaagacatgaccgatccctgtctgcttcagattgccgttcaaaaccccctagtgtctgaaaggctggaactctctgtgttatacaaagagtatgctgaggatgacaatatttaccaacaaaaaattaaggacttacataaaaagtattcttacataagaaaaacacggccagatggaaattgtttctatcgggcatttggttttagtcatctcgaagcactactggatgatagtaaagaactccaacgttttaaggccgtatccgctaaaagcaaagaggatctcgtctctcaaggctttactgagtttacaatcgaagacttccacaacacattcatggatctgatcgagcaggttgagaaacagacttcagtggcagacctgctggcaagctttaatgaccagtccacttccgactaccttgtggtgtacttacgcctcctcacctctggctacctccagcgggaaagtaagttcttcgaacacttcattgaggggggacgcacagtgaaggaattttgccagcaggaggtggagccgatgtgcaaggaatccgatcatatccacattattgccctggcacaggccctgtcggtaagcattcaggtcgaatacatggatagaggggagggcggtacgaccaacccacatattttccctgagggttccgaacccaaggtgtatctcttgtacaggccaggacactacgatatactgtacaaatag

SEQ ID NO: 194389 - DNA, 927 bp, Artificial Sequence
  derived and/or modified sequence
atgtgcggcgtggagggctgctgccagggcggcgccaccagaagaggcagcctgcccggcggcagacagctggccaccagaaagagaagcgtggtgagaagatgcctgaagatggccgccgaggagccccagcagcagaagcaggagcccctgggcagcgacagcgagggcgtgaactgcctggcctacgacgaggccatcatggcccagcaggacagaatccagcaggagatcgccgtgcagaaccccctggtgagcgagagactggagctgagcgtgctgtacaaggagtacgccgaggacgacaacatctaccagcagaagatcaaggacctgcacaagaagtacagctacatcagaaagaccagacccgacggcaactgcttctacagagccttcggcttcagccacctggaggccctgctggacgacagcaaggagctgcagagattcaaggccgtgagcgccaagagcaaggaggacctggtgagccagggcttcaccgagttcaccatcgaggacttccacaacaccttcatggacctgatcgagcaggtggagaagcagaccagcgtggccgacctgctggccagcttcaacgaccagagcaccagcgactacctggtggtgtacctgagactgctgaccagcggctacctgcagagagagagcaagttcttcgagcacttcatcgagggcggcagaaccgtgaaggagttctgccagcaggaggtggagcccatgtgcaaggagagcgaccacatccacatcatcgccctggcccaggccctgagcgtgagcatccaggtggagtacatggacagaggcgagggcggcaccaccaacccccacatcttccccgagggcagcgagcccaaggtgtacctgctgtacagacccggccactacgacatcctgtacaagtag

SEQ ID NO: 194390 - DNA, 816 bp, Artificial Sequence
  derived and/or modified sequence
atggccgccgaggagccccagcagcagaagcaggagcccctgggcagcgacagcgagggcgtgaactgcctggcctacgacgaggccatcatggcccagcaggacagaatccagcaggagatcgccgtgcagaaccccctggtgagcgagagactggagctgagcgtgctgtacaaggagtacgccgaggacgacaacatctaccagcagaagatcaaggacctgcacaagaagtacagctacatcagaaagaccagacccgacggcaactgcttctacagagccttcggcttcagccacctggaggccctgctggacgacagcaaggagctgcagagattcaaggccgtgagcgccaagagcaaggaggacctggtgagccagggcttcaccgagttcaccatcgaggacttccacaacaccttcatggacctgatcgagcaggtggagaagcagaccagcgtggccgacctgctggccagcttcaacgaccagagcaccagcgactacctggtggtgtacctgagactgctgaccagcggctacctgcagagagagagcaagttcttcgagcacttcatcgagggcggcagaaccgtgaaggagttctgccagcaggaggtggagcccatgtgcaaggagagcgaccacatccacatcatcgccctggcccaggccctgagcgtgagcatccaggtggagtacatggacagaggcgagggcggcaccaccaacccccacatcttccccgagggcagcgagcccaaggtgtacctgctgtacagacccggccactacgacatcctgtacaagtag

SEQ ID NO: 194391 - DNA, 843 bp, Artificial Sequence
  derived and/or modified sequence
atggccgccgaggagccccagcagcagaagcaggagcccctgggcagcgacagcgagggcgtgaactgcctggcctacgacgaggccatcatggcccagcaggacagaatccagcaggaggacatgaccgacccctgcctgctgcagatcgccgtgcagaaccccctggtgagcgagagactggagctgagcgtgctgtacaaggagtacgccgaggacgacaacatctaccagcagaagatcaaggacctgcacaagaagtacagctacatcagaaagaccagacccgacggcaactgcttctacagagccttcggcttcagccacctggaggccctgctggacgacagcaaggagctgcagagattcaaggccgtgagcgccaagagcaaggaggacctggtgagccagggcttcaccgagttcaccatcgaggacttccacaacaccttcatggacctgatcgagcaggtggagaagcagaccagcgtggccgacctgctggccagcttcaacgaccagagcaccagcgactacctggtggtgtacctgagactgctgaccagcggctacctgcagagagagagcaagttcttcgagcacttcatcgagggcggcagaaccgtgaaggagttctgccagcaggaggtggagcccatgtgcaaggagagcgaccacatccacatcatcgccctggcccaggccctgagcgtgagcatccaggtggagtacatggacagaggcgagggcggcaccaccaacccccacatcttccccgagggcagcgagcccaaggtgtacctgctgtacagacccggccactacgacatcctgtacaagtag

SEQ ID NO: 194392 - protein, 677 aa, Artificial Sequence
  derived and/or modified sequence
MLSSTDFTFASWELVVRVDHPNEEQQKDVTLRVSGDLHVGGVMLKLVEQINISQDWSDFALWWEQKHCWLLKTHWTLDKYGVQADAKLLFTPQHKMLRLRLPNLKMVRLRVSFSAVVFKAVSDICKILNIRRSEELSLLKPSGDYFKKKKKKDKNNKEPIIEDILNLESSPTASGSSVSPGLYSKTMTPIYDPINGTPASSTMTWFSDSPLTEQNCSILAFSQPPQSPEALADMYQPRSLVDKAKLNAGWLDSSRSLMEQGIQEDEQLLLRFKYYSFFDLNPKYDAVRINQLYEQARWAILLEEIDCTEEEMLIFAALQYHISKLSLSAETQDFAGESEVDEIEAALSNLEVTLEGGKADSLLEDITDIPKLADNLKLFRPKKLLPKAFKQYWFIFKDTSIAYFKNKELEQGEPLEKLNLRGCEVVPDVNVAGRKFGIKLLIPVADGMNEMYLRCDHENQYAQWMAACMLASKGKTMADSSYQPEVLNILSFLRMKNRNSASQVASSLENMDMNPECFVSPRCAKRHKSKQLAARILEAHQNVAQMPLVEAKLRFIQAWQSLPEFGLTYYLVRFKGSKKDDILGVSYNRLIKIDAATGIPVTTWRFTNIKQWNVNWETRQVVIEFDQNVFTAFTCLSADCKIVHEYIGGYIFLSTRSKDQNETLDEDLFHKLTGGQD

SEQ ID NO: 194393 - protein, 555 aa, Artificial Sequence
  derived and/or modified sequence
MLSSTDFTFASWELVVRVDHPNEEQQKDVTLRVSGDLHVGGVMLKLVEQINISQDWSDFALWWEQKHCWLLKTHWTLDKYGVQADAKLLFTPQHKMLRLRLPNLKMVRLRVSFSAVVFKAVSDICKILNIRRSEELSLLKPSGDYFKKKKKKDKNNKEPIIEDILNLESSPTASGSSVSPGLYSKTMTPIYDPINGTPASSTMTWFSDSPLTEQNCSILAFSQPPQSPEALADMYQPRSLVDKAKLNAGWLDSSRSLMEQGIQEDEQLLLRFKYYSFFDLNPKYDAVRINQLYEQARWAILLEEIDCTEEEMLIFAALQYHISKLSLSAETQDFAGESEVDEIEAALSNLEVTLEGGKADSLLEDITDIPKLADNLKLFRPKKLLPKAFKQYWFIFKDTSIAYFKNKELEQGEPLEKLNLRGCEVVPDVNVAGRKFGIKLLIPVADGMNEMYLRCDHENQYAQWMAACMLASKGKTMADSSYQPEVLNILSFLRMKNRNSASQVASSLENMDMNPECFVSPRCAKRHKSKQLAARILEAHHLQAPFHSYRSLSHL

SEQ ID NO: 194394 - protein, 146 aa, Artificial Sequence
  derived and/or modified sequence
MLSSTDFTFASWELVVRVDHPNEEQQKDVTLRVSGDLHVGGVMLKLVEQINISQDWSDFALWWEQKHCWLLKTHWTLDKYGVQADAKLLFTPQHKMLRLRLPNLKMVRLRVSFSAVVFKAVSDICKILNIRRSEELSLLKPSGDYF

SEQ ID NO: 194395 - protein, 420 aa, Artificial Sequence
  derived and/or modified sequence
MEQGIQEDEQLLLRFKYYSFFDLNPKYDAVRINQLYEQARWAILLEEIDCTEEEMLIFAALQYHISKLSLSAETQDFAGESEVDEIEAALSNLEVTLEGGKADSLLEDITDIPKLADNLKLFRPKKLLPKAFKQYWFIFKDTSIAYFKNKELEQGEPLEKLNLRGCEVVPDVNVAGRKFGIKLLIPVADGMNEMYLRCDHENQYAQWMAACMLASKGKTMADSSYQPEVLNILSFLRMKNRNSASQVASSLENMDMNPECFVSPRCAKRHKSKQLAARILEAHQNVAQMPLVEAKLRFIQAWQSLPEFGLTYYLVRFKGSKKDDILGVSYNRLIKIDAATGIPVTTWRFTNIKQWNVNWETRQVVIEFDQNVFTAFTCLSADCKIVHEYIGGYIFLSTRSKDQNETLDEDLFHKLTGGQD

SEQ ID NO: 194396 - DNA, 1668 bp, Artificial Sequence
  derived and/or modified sequence
atgctgagcagcaccgacttcaccttcgccagctgggagctggtggtgagagtggaccaccccaacgaggagcagcagaaggacgtgaccctgagagtgagcggcgacctgcacgtgggcggcgtgatgctgaagctggtggagcagatcaacatcagccaggactggagcgacttcgccctgtggtgggagcagaagcactgctggctgctgaagacccactggaccctggacaagtacggcgtgcaggccgacgccaagctgctgttcaccccccagcacaagatgctgagactgagactgcccaacctgaagatggtgagactgagagtgagcttcagcgccgtggtgttcaaggccgtgagcgacatctgcaagatcctgaacatcagaagaagcgaggagctgagcctgctgaagcccagcggcgactacttcaagaagaagaagaagaaggacaagaacaacaaggagcccatcatcgaggacatcctgaacctggagagcagccccaccgccagcggcagcagcgtgagccccggcctgtacagcaagaccatgacccccatctacgaccccatcaacggcacccccgccagcagcaccatgacctggttcagcgacagccccctgaccgagcagaactgcagcatcctggccttcagccagcccccccagagccccgaggccctggccgacatgtaccagcccagaagcctggtggacaaggccaagctgaacgccggctggctggacagcagcagaagcctgatggagcagggcatccaggaggacgagcagctgctgctgagattcaagtactacagcttcttcgacctgaaccccaagtacgacgccgtgagaatcaaccagctgtacgagcaggccagatgggccatcctgctggaggagatcgactgcaccgaggaggagatgctgatcttcgccgccctgcagtaccacatcagcaagctgagcctgagcgccgagacccaggacttcgccggcgagagcgaggtggacgagatcgaggccgccctgagcaacctggaggtgaccctggagggcggcaaggccgacagcctgctggaggacatcaccgacatccccaagctggccgacaacctgaagctgttcagacccaagaagctgctgcccaaggccttcaagcagtactggttcatcttcaaggacaccagcatcgcctacttcaagaacaaggagctggagcagggcgagcccctggagaagctgaacctgagaggctgcgaggtggtgcccgacgtgaacgtggccggcagaaagttcggcatcaagctgctgatccccgtggccgacggcatgaacgagatgtacctgagatgcgaccacgagaaccagtacgcccagtggatggccgcctgcatgctggccagcaagggcaagaccatggccgacagcagctaccagcccgaggtgctgaacatcctgagcttcctgagaatgaagaacagaaacagcgccagccaggtggccagcagcctggagaacatggacatgaaccccgagtgcttcgtgagccccagatgcgccaagagacacaagagcaagcagctggccgccagaatcctggaggcccaccacctgcaggcccccttccacagctacagaagcctgagccacctgtag

SEQ ID NO: 194397 - DNA, 441 bp, Artificial Sequence
  derived and/or modified sequence
atgctgagcagcaccgacttcaccttcgccagctgggagctggtggtgagagtggaccaccccaacgaggagcagcagaaggacgtgaccctgagagtgagcggcgacctgcacgtgggcggcgtgatgctgaagctggtggagcagatcaacatcagccaggactggagcgacttcgccctgtggtgggagcagaagcactgctggctgctgaagacccactggaccctggacaagtacggcgtgcaggccgacgccaagctgctgttcaccccccagcacaagatgctgagactgagactgcccaacctgaagatggtgagactgagagtgagcttcagcgccgtggtgttcaaggccgtgagcgacatctgcaagatcctgaacatcagaagaagcgaggagctgagcctgctgaagcccagcggcgactacttctag

SEQ ID NO: 194398 - DNA, 1263 bp, Artificial Sequence
  derived and/or modified sequence
atggagcagggcatccaggaggacgagcagctgctgctgagattcaagtactacagcttcttcgacctgaaccccaagtacgacgccgtgagaatcaaccagctgtacgagcaggccagatgggccatcctgctggaggagatcgactgcaccgaggaggagatgctgatcttcgccgccctgcagtaccacatcagcaagctgagcctgagcgccgagacccaggacttcgccggcgagagcgaggtggacgagatcgaggccgccctgagcaacctggaggtgaccctggagggcggcaaggccgacagcctgctggaggacatcaccgacatccccaagctggccgacaacctgaagctgttcagacccaagaagctgctgcccaaggccttcaagcagtactggttcatcttcaaggacaccagcatcgcctacttcaagaacaaggagctggagcagggcgagcccctggagaagctgaacctgagaggctgcgaggtggtgcccgacgtgaacgtggccggcagaaagttcggcatcaagctgctgatccccgtggccgacggcatgaacgagatgtacctgagatgcgaccacgagaaccagtacgcccagtggatggccgcctgcatgctggccagcaagggcaagaccatggccgacagcagctaccagcccgaggtgctgaacatcctgagcttcctgagaatgaagaacagaaacagcgccagccaggtggccagcagcctggagaacatggacatgaaccccgagtgcttcgtgagccccagatgcgccaagagacacaagagcaagcagctggccgccagaatcctggaggcccaccagaacgtggcccagatgcccctggtggaggccaagctgagattcatccaggcctggcagagcctgcccgagttcggcctgacctactacctggtgagattcaagggcagcaagaaggacgacatcctgggcgtgagctacaacagactgatcaagatcgacgccgccaccggcatccccgtgaccacctggagattcaccaacatcaagcagtggaacgtgaactgggagaccagacaggtggtgatcgagttcgaccagaacgtgttcaccgccttcacctgcctgagcgccgactgcaagatcgtgcacgagtacatcggcggctacatcttcctgagcaccagaagcaaggaccagaacgagaccctggacgaggacctgttccacaagctgaccggcggccaggactag

SEQ ID NO: 194399 - DNA, 5151 bp, Artificial Sequence
  derived and/or modified sequence
ctggagtctcccctggtcgggagcctcagccttctggagactgacaccaccctcttactcagagacgaatcgttttgtcgttgccttcacctccctgaccacaagtgctccggggctctttctgagggaggcagctgttctaggcgggaggctggagtctcctgggcctggacgcaccccggggtgtgagtgatgggtatgcctgaaaggaggggaagtggcgcggctttaatcatctgggctagtccccggcgggcctgggggaacagggaaactggaggcggccttaaagcgtcaggatgagacatcgcaagaggagctgcagatactgagcgtgcgccccgggttctcgccgccttctctccgccgagcagcccttcggccaccctttgcccttaaaaatctgcagactgcgcctcctctccgcgggagcgagacctagcaggcccggggctgggcgtgccctcgcctgccacgctgcgcgctgccctcagccgggccgctggggccgtgcagtgcaccgggcacgccgcgccaggctgggggcaggcaccgagcctccgtgggaggtcccgaggcagcttcgcctgctcgccctggctccagccctcacctgccgcagccttagctgagcagccgccgccactgggcgccccccgctccccacttcgccagcgcccgctcctcggctcggcccggggtagtttgtagggacgcagctctccacgtgcgcgactgcgaggctggacgctacgggctcctggaaaggagacaccagcatttgccacaatgctgtcatccactgactttacatttgcttcctgggagcttgtggtccgcgttgaccatcccaatgaagagcagcagaaagacgtcacactgagagtatctggagaccttcatgttggaggagtgatgctcaagttagtagaacagatcaatatatcccaagactggtcagactttgctctttggtgggaacagaagcattgctggcttctgaaaacccactggaccctggacaaatatggggtccaggcagatgcaaagcttctcttcacccctcagcataaaatgctgcgccttcgtctgccgaatttgaagatggtgaggttgcgagtcagcttctcagctgtggtttttaaagctgtcagtgatatctgcaaaatcctgaatattagaagatcagaagagctttccttgttaaagccgtctggtgactattttaagaagaagaagaaaaaagacaaaaataataaggaacccataattgaagatattctaaacctggagagttctccaacagcttcaggttcatcagtaagtcctggtttatacagtaaaaccatgacccctatatatgaccccatcaatggaacaccagcatcatccaccatgacttggttcagtgacagccctttgacggaacaaaactgcagcatcctcgcattcagccaacccccccagtccccagaagcacttgcggatatgtaccagcctcggtctctggttgataaagccaagctcaatgcaggttggctagactcctcacgctcccttatggaacaaggcatccaagaggatgagcagctgctcttacgatttaaatattattctttcttcgacttgaatcctaaatatgatgctgtccgaataaaccaactctatgagcaagccaggtgggccattctcttagaagaaattgattgcacagaggaagaaatgttgatctttgcagctctacagtaccacattagcaaactgtcgttgtctgctgaaacacaggattttgcaggcgagtccgaggttgatgaaatagaagcggcgctttctaatttggaagtaaccctagaaggtggaaaagcggacagccttttggaggacattactgatatccctaaacttgcagataatctcaaattatttaggcccaagaagttactaccaaaagctttcaaacaatattggtttatctttaaagacacatccatagcatactttaaaaataaggaacttgaacaaggagaaccactagaaaaactaaatcttagaggctgcgaagttgtgcccgatgtaaatgtagcaggaagaaaatttggaatcaagttactaatccctgttgccgatggtatgaatgaaatgtatttgagatgtgaccatgagaatcaatacgcccaatggatggctgcctgcatgttggcatcgaagggcaaaaccatggcagacagctcctaccagccagaggtcctcaacatcctttcatttctgaggatgaaaaacaggaactctgcatctcaggtggcttccagtctcgaaaacatggatatgaacccagaatgttttgtgtcaccacggtgtgcaaaaagacacaaatccaaacagctggccgcccggatcctggaggcgcaccagaacgtggcccagatgcccctggtcgaagccaagctgcggttcatccaggcgtggcagtcactgcctgagtttggcctcacctactaccttgtcagatttaaaggaagcaaaaaagatgacattctgggagtttcatataacaggttgattaaaattgatgcagccaccgggattccagtgacaacatggagattcacaaatatcaaacagtggaatgtaaactgggaaacccggcaggtggtcatcgagtttgaccaaaacgtctttactgctttcacctgcctgagtgcagattgcaagattgtgcacgagtacattggcggctacattttcttgtccacccgctccaaggaccagaatgaaacactcgatgaggacttgttccacaaattgaccggcggtcaggattgaaacaagcacgcgtgctcggctcacaccaacaaggcaagccaaaggcgcccctccccagagggatccctaacgtgcccagcatgtagattctggactaacagacaacatacattcaccgctggtcacccagatcctcattcaaacccactgctggcacatccctttccttactttgccctgtgctaccagccacggaaggagcctctcttgttttttctataaaatgggtaggcaggagaaaagcaggtgccctaagattgctctaaggcccagcatgtggttacagttctctgacttgcagaacctgccaggtgtatggctacaagttatcctcgtgctgatctgtctcattactaagtcaatggagaagacagaaaggtaaaaatcacgtgtagcaagaacaactcttatttcacaaactcaggtatgaaacgaaacgcctgtccttcatggaactgcttttagctcctgtcttttcaaaatggcagagggagttcctacacacactttttccctggaggccaaggtctaggggtagaaaggggaggggtggggctaccaggtagcagttgacaacccaaggtcagaggagtggccctcagtgtcatctgtccacagtgatacctgccaagatgaccactgacccacatctggtcttagtcattggtctcctcagatttctggggccacctgcaagccccattccattcctacagatctctcagccacctgtaagtcctttgtgaagatgtgggtgacacagggggacaggaaaacccatttctcaacccagatccatgtctccactgcttctactctgggttgggattcaggaagacaggcacagtcctctctgttcatagaaacacctgccagtgtcaaggattccagtcaggtgtctatcccaactggtcagggagagaagggcagacccattctcaaagaccaccatgtccaaggtctgacagctccccactggctgcccccacaggggctttaggctggtctgggtcatggggaagcgtccctcttatcgctggtctgtgttctcctggatttggtatctatgttggtacgactcctggccttttatctaaaggactttggcttttgtaaatcacaagccaataatagacttttttctccccctctgttttttgctgtgtcatctctgccttgagactgccttgagacagtgcttgccttgagagagtgagccaattaacagctgcctgaattgtcattttccattttggtttgttagaggtgggaggggtgggttttgagaaggtcaaaagcaataccagaagtaaagggaaatatcagacaatattttattattttttcatagatgttctgccacacaaagaacttggggtgtaaggataaggcaaaagctccaatcccatttttcagttctcctaggatgcacccctcagggagcctggccagagttccgaggcccgtgagcgtcagctgttgctttattttccatcaaagccctctgagaagtgagacctcagcaattccgggagccacatagagacagacttggcaagggaccccctggttctgagccagtagctgccatctggaaattcctcttttagcctctccttagaggtgaatgtgaatgaagcctcccaggcacccgctgaatttctgaggccttgcttaaagctcagaagtggtttaggcatttggaaaatctggttcacatcataaagaacttgatttgaaatgttttctatagaaacaagtgctaagtgtaccgtatatacttgatgttggtcatttctcagtcctatttctcagttctattattttagaacctagtcagttctttaagattataactggtcctacattaaaataatgcttctcgatgtcagattttacctgtttgctgctgagaacatctctgcctaatttaccaaagccagaccttcagttcaacatgcttccttagcttttcatagttgtctgacatttccatgaaaacaaaggaaccaactttgttttaaccaaactttgtttggttacagttttcaggggagcgtttcttccatgacacacagcaacatcccaaagaaataaacaagtgtgacaaaaaaaaaaaaaaacaaacctaaatgctactgttccaaagagcaacttgatggttttttttaatactgagtgcaaaaggtcacccaaattcctatgatgaaattttaaattaatgggcacctttcaacatcatttgcttccttatctacagttgattcagaaatctgcattttttattcttttatatgacttttaagtaaaagatttatatggatttga

SEQ ID NO: 194400 - DNA, 2457 bp, Artificial Sequence
  derived and/or modified sequence
ctggagtctcccctggtcgggagcctcagccttctggagactgacaccaccctcttactcagagacgaatcgttttgtcgttgccttcacctccctgaccacaagtgctccggggctctttctgagggaggcagctgttctaggcgggaggctggagtctcctgggcctggacgcaccccggggtgtgagtgatgggtatgcctgaaaggaggggaagtggcgcggctttaatcatctgggctagtccccggcgggcctgggggaacagggaaactggaggcggccttaaagcgtcaggatgagacatcgcaagaggagctgcagatactgagcgtgcgccccgggttctcgccgccttctctccgccgagcagcccttcggccaccctttgcccttaaaaatctgcagactgcgcctcctctccgcgggagcgagacctagcaggcccggggctgggcgtgccctcgcctgccacgctgcgcgctgccctcagccgggccgctggggccgtgcagtgcaccgggcacgccgcgccaggctgggggcaggcaccgagcctccgtgggaggtcccgaggcagcttcgcctgctcgccctggctccagccctcacctgccgcagccttagctgagcagccgccgccactgggcgccccccgctccccacttcgccagcgcccgctcctcggctcggcccggggtagtttgtagggacgcagctctccacgtgcgcgactgcgaggctggacgctacgggctcctggaaaggagacaccagcatttgccacaatgctgtcatccactgactttacatttgcttcctgggagcttgtggtccgcgttgaccatcccaatgaagagcagcagaaagacgtcacactgagagtatctggagaccttcatgttggaggagtgatgctcaagttagtagaacagatcaatatatcccaagactggtcagactttgctctttggtgggaacagaagcattgctggcttctgaaaacccactggaccctggacaaatatggggtccaggcagatgcaaagcttctcttcacccctcagcataaaatgctgcgccttcgtctgccgaatttgaagatggtgaggttgcgagtcagcttctcagctgtggtttttaaagctgtcagtgatatctgcaaaatcctgaatattagaagatcagaagagctttccttgttaaagccgtctggtgactattttaagaagaagaagaaaaaagacaaaaataataaggaacccataattgaagatattctaaacctggagagttctccaacagcttcaggttcatcagtaagtcctggtttatacagtaaaaccatgacccctatatatgaccccatcaatggaacaccagcatcatccaccatgacttggttcagtgacagccctttgacggaacaaaactgcagcatcctcgcattcagccaacccccccagtccccagaagcacttgcggatatgtaccagcctcggtctctggttgataaagccaagctcaatgcaggttggctagactcctcacgctcccttatggaacaaggcatccaagaggatgagcagctgctcttacgatttaaatattattctttcttcgacttgaatcctaaatatgatgctgtccgaataaaccaactctatgagcaagccaggtgggccattctcttagaagaaattgattgcacagaggaagaaatgttgatctttgcagctctacagtaccacattagcaaactgtcgttgtctgctgaaacacaggattttgcaggcgagtccgaggttgatgaaatagaagcggcgctttctaatttggaagtaaccctagaaggtggaaaagcggacagccttttggaggacattactgatatccctaaacttgcagataatctcaaattatttaggcccaagaagttactaccaaaagctttcaaacaatattggtttatctttaaagacacatccatagcatactttaaaaataaggaacttgaacaaggagaaccactagaaaaactaaatcttagaggctgcgaagttgtgcccgatgtaaatgtagcaggaagaaaatttggaatcaagttactaatccctgttgccgatggtatgaatgaaatgtatttgagatgtgaccatgagaatcaatacgcccaatggatggctgcctgcatgttggcatcgaagggcaaaaccatggcagacagctcctaccagccagaggtcctcaacatcctttcatttctgaggatgaaaaacaggaactctgcatctcaggtggcttccagtctcgaaaacatggatatgaacccagaatgttttgtgtcaccacggtgtgcaaaaagacacaaatccaaacagctggccgcccggatcctggaggcgcaccacctgcaagccccattccattcctacagatctctcagccacctgtaa

SEQ ID NO: 194401 - DNA, 567 bp, Artificial Sequence
  derived and/or modified sequence
ccagttaccccctgaaacatttcagttgtgaacgttctttcctgctagcttctcccatgaggggaaaacgatgggtttgaaattcacatccctatctgtactttgaagaacaccagcatttgccacaatgctgtcatccactgactttacatttgcttcctgggagcttgtggtccgcgttgaccatcccaatgaagagcagcagaaagacgtcacactgagagtatctggagaccttcatgttggaggagtgatgctcaagttagtagaacagatcaatatatcccaagactggtcagactttgctctttggtgggaacagaagcattgctggcttctgaaaacccactggaccctggacaaatatggggtccaggcagatgcaaagcttctcttcacccctcagcataaaatgctgcgccttcgtctgccgaatttgaagatggtgaggttgcgagtcagcttctcagctgtggtttttaaagctgtcagtgatatctgcaaaatcctgaatattagaagatcagaagagctttccttgttaaagccgtctggtgactattttaa

SEQ ID NO: 194402 - DNA, 3229 bp, Artificial Sequence
  derived and/or modified sequence
agtgcaccgggcacgccgcgccaggctgggggcaggcaccgagcctccgtgggaggtcccgaggcagcttcgcctgctcgccctggctccagccctcacctgccgcagccttagctgagcagccgccgccactgggcgccccccgctccccacttcgccagcgcccgctcctcggctcggcccggggtagtttgtagggacgcagctctccacgtgcgcgactgcgaggctggacgctacgggctcctggaaaggagacaccagcatttgccacaatgctgtcatccactgactttacatttgcttcctgggagcttgtggtccgcgttgaccatcccaatgaagagcagcagaaagacgtcacactgagagtatctggagaccttcatgttggaggagtgatgctcaaatatatcccaagactggtcagactttgctctttggtgggaacagaagcattgctggcttctgaaaacccactggaccctggacaaatatggggtccaggcagatgcaaagcttctcttcacccctcagcataaaatgctgcgccttcgtctgccgaatttgaagatggtgaggttgcgagtcagcttctcagctgtggtttttaaagctgtcagtgatatctgcaaaatcctgaatattagaagatcagaagagctttccttgttaaagccgtctggtgactattttaagaagaagaagaaaaaagacaaaaataataaggaacccataattgaagatattctaaacctggagagttctccaacagcttcaggttcatcagttggctagactcctcacgctcccttatggaacaaggcatccaagaggatgagcagctgctcttacgatttaaatattattctttcttcgacttgaatcctaaatatgatgctgtccgaataaaccaactctatgagcaagccaggtgggccattctcttagaagaaattgattgcacagaggaagaaatgttgatctttgcagctctacagtaccacattagcaaactgtcgttgtctgctgaaacacaggattttgcaggcgagtccgaggttgatgaaatagaagcggcgctttctaatttggaagtaaccctagaaggtggaaaagcggacagccttttggaggacattactgatatccctaaacttgcagataatctcaaattatttaggcccaagaagttactaccaaaagctttcaaacaatattggtttatctttaaagacacatccatagcatactttaaaaataaggaacttgaacaaggagaaccactagaaaaactaaatcttagaggctgcgaagttgtgcccgatgtaaatgtagcaggaagaaaatttggaatcaagttactaatccctgttgccgatggtatgaatgaaatgtatttgagatgtgaccatgagaatcaatacgcccaatggatggctgcctgcatgttggcatcgaagggcaaaaccatggcagacagctcctaccagccagaggtcctcaacatcctttcatttctgaggatgaaaaacaggaactctgcatctcaggtggcttccagtctcgaaaacatggatatgaacccagaatgttttgtgtcaccacggtgtgcaaaaagacacaaatccaaacagctggccgcccggatcctggaggcgcaccagaacgtggcccagatgcccctggtcgaagccaagctgcggttcatccaggcgtggcagtcactgcctgagtttggcctcacctactaccttgtcagatttaaaggaagcaaaaaagatgacattctgggagtttcatataacaggttgattaaaattgatgcagccaccgggattccagtgacaacatggagattcacaaatatcaaacagtggaatgtaaactgggaaacccggcaggtggtcatcgagtttgaccaaaacgtctttactgctttcacctgcctgagtgcagattgcaagattgtgcacgagtacattggcggctacattttcttgtccacccgctccaaggaccagaatgaaacactcgatgaggacttgttccacaaattgaccggcggtcaggattgaaacaagcacgcgtgctcggctcacaccaacaaggcaagccaaaggcgcccctccccagagggatccctaacgtgcccagcatgtagattctggactaacagacaacatacattcaccgctggtcacccagatcctcattcaaacccactgctggcacatccctttccttactttgccctgtgctaccagccacggaaggagcctctcttgttttttctataaaatgggtaggcaggagaaaagcaggtgccctaagattgctctaaggcccagcatgtggttacagttctctgacttgcagaacctgccaggtgtatggctacaagttatcctcgtgctgatctgtctcattactaagtcaatggagaagacagaaaggtaaaaatcacgtgtagcaagaacaactcttatttcacaaactcaggtatgaaacgaaacgcctgtccttcatggaactgcttttagctcctgtcttttcaaaatggcagagggagttcctacacacactttttccctggaggccaaggtctaggggtagaaaggggaggggtggggctaccaggtagcagttgacaacccaaggtcagaggagtggccctcagtgtcatctgtccacagtgatacctgccaagatgaccactgacccacatctggtcttagtcattggtctcctcagatttctggggccacctgcaagccccattccattcctacagatctctcagccacctgtaagtcctttgtgaagatgtgggtgacacagggggacaggaaaacccatttctcaacccagatccatgtctccactgcttctactctgggttgggattcaggaagacaggcacagtcctctctgttcatagaaacacctgccagtgtcaaggattccagtcaggtgtctatcccaactggtcagggagagaagggcagacccattctcaaagaccaccatgtccaaggtctgacagctccccactggctgcccccacaggggctttaggctggtctgggtcatggggaagcgtccctcttatcgctggtctgtgttctcctggatttggtatctatgttggtacgactcctggccttttatctaaaggactttggcttttgtaaatcacaagccaataatagacttttttctccccctc

SEQ ID NO: 194403 - DNA, 2034 bp, Artificial Sequence
  derived and/or modified sequence
atgctgagcagcaccgacttcaccttcgccagctgggagctggtggtgagagtggaccaccccaacgaggagcagcagaaggacgtgaccctgagagtgagcggcgacctgcacgtgggcggcgtgatgctgaagctggtggagcagatcaacatcagccaggactggagcgacttcgccctgtggtgggagcagaagcactgctggctgctgaagacccactggaccctggacaagtacggcgtgcaggccgacgccaagctgctgttcaccccccagcacaagatgctgagactgagactgcccaacctgaagatggtgagactgagagtgagcttcagcgccgtggtgttcaaggccgtgagcgacatctgcaagatcctgaacatcagaagaagcgaggagctgagcctgctgaagcccagcggcgactacttcaagaagaagaagaagaaggacaagaacaacaaggagcccatcatcgaggacatcctgaacctggagagcagccccaccgccagcggcagcagcgtgagccccggcctgtacagcaagaccatgacccccatctacgaccccatcaacggcacccccgccagcagcaccatgacctggttcagcgacagccccctgaccgagcagaactgcagcatcctggccttcagccagcccccccagagccccgaggccctggccgacatgtaccagcccagaagcctggtggacaaggccaagctgaacgccggctggctggacagcagcagaagcctgatggagcagggcatccaggaggacgagcagctgctgctgagattcaagtactacagcttcttcgacctgaaccccaagtacgacgccgtgagaatcaaccagctgtacgagcaggccagatgggccatcctgctggaggagatcgactgcaccgaggaggagatgctgatcttcgccgccctgcagtaccacatcagcaagctgagcctgagcgccgagacccaggacttcgccggcgagagcgaggtggacgagatcgaggccgccctgagcaacctggaggtgaccctggagggcggcaaggccgacagcctgctggaggacatcaccgacatccccaagctggccgacaacctgaagctgttcagacccaagaagctgctgcccaaggccttcaagcagtactggttcatcttcaaggacaccagcatcgcctacttcaagaacaaggagctggagcagggcgagcccctggagaagctgaacctgagaggctgcgaggtggtgcccgacgtgaacgtggccggcagaaagttcggcatcaagctgctgatccccgtggccgacggcatgaacgagatgtacctgagatgcgaccacgagaaccagtacgcccagtggatggccgcctgcatgctggccagcaagggcaagaccatggccgacagcagctaccagcccgaggtgctgaacatcctgagcttcctgagaatgaagaacagaaacagcgccagccaggtggccagcagcctggagaacatggacatgaaccccgagtgcttcgtgagccccagatgcgccaagagacacaagagcaagcagctggccgccagaatcctggaggcccaccagaacgtggcccagatgcccctggtggaggccaagctgagattcatccaggcctggcagagcctgcccgagttcggcctgacctactacctggtgagattcaagggcagcaagaaggacgacatcctgggcgtgagctacaacagactgatcaagatcgacgccgccaccggcatccccgtgaccacctggagattcaccaacatcaagcagtggaacgtgaactgggagaccagacaggtggtgatcgagttcgaccagaacgtgttcaccgccttcacctgcctgagcgccgactgcaagatcgtgcacgagtacatcggcggctacatcttcctgagcaccagaagcaaggaccagaacgagaccctggacgaggacctgttccacaagctgaccggcggccaggactag

SEQ ID NO: 194404 - DNA, 1668 bp, Artificial Sequence
  derived and/or modified sequence
atgttgagcagcacagactttacctttgcatcgtgggagctggtggttcgggtggatcaccctaacgaggagcagcaaaaagacgtcacactccgcgtttcaggcgacctgcacgtaggaggagtcatgctcaaattagtcgagcaaattaacataagccaggattggagtgattttgccctttggtgggagcagaaacactgttggctactcaaaacccattggacactcgataaatacggagtgcaggctgacgccaagctgttgttcacgccccagcacaagatgttgaggttgcgactaccaaatctgaagatggtgcgtttacgggtttcatttagcgctgtcgtgttcaaggccgttagcgacatatgcaaaatcttgaacatccgcaggtccgaggagctgtcactgcttaaacccagcggagattattttaaaaagaaaaagaaaaaagacaaaaataataaagaacctatcatagaggacattcttaatttagagtcctcaccaacagcttccggtagctcggtgtctcctggtctttattcaaagaccatgactccaatctatgaccccattaatggcacccctgctagctcgaccatgacttggtttagtgatagcccactcaccgagcagaattgctctatcctggctttctcccaacctccccagagtcctgaggctttagctgacatgtatcagcctaggtccctggtcgataaagccaagctgaacgccggctggctggattctagcaggtcactgatggagcaaggtatccaggaagacgagcagttactgttacgttttaagtactatagtttttttgacctgaacccgaagtatgatgccgtgcggatcaaccaactttacgagcaggctaggtgggctatcttacttgaggagatcgactgtaccgaggaggagatgctgatatttgccgcgctccagtaccatatcagcaagctttcccttagtgcagagacgcaggactttgctggagaatcagaggtggacgaaattgaagcggcattgtctaatctggaggtcactctcgaggggggaaaagctgattcacttttagaagacattaccgatattcccaagttagcagataatttaaagcttttccgccccaaaaagctccttcccaaagcgtttaagcagtattggtttattttcaaggacacaagtatcgcttacttcaagaataaggagttggaacaaggcgagcctttggaaaaactgaaccttagggggtgcgaggtggtgccagatgtaaatgttgccggaagaaagttcggaattaaattattaatcccagttgccgatggaatgaacgaaatgtacctacgatgtgatcatgagaatcagtatgcccagtggatggcggcatgcatgcttgcttctaaagggaaaacgatggctgactccagctaccagccggaggtgttgaacattctgagcttcctccgcatgaagaacaggaacagcgccagccaggtagcctcatcgcttgagaatatggacatgaacccagagtgttttgtgagtccccgctgcgccaaaagacataagagcaaacaactggccgcccgtatactcgaagcccatcaccttcaggctccatttcactcttatcggtcactgtcccacctctag

SEQ ID NO: 194405 - DNA, 441 bp, Artificial Sequence
  derived and/or modified sequence
atgctgagtagtaccgacttcaccttcgcatcttgggaattggtggtccgagtcgaccaccctaacgaggaacaacaaaaagatgtgacactgagggtgtctggggacttgcatgtgggcggcgtcatgctgaaactcgtggagcagattaacattagtcaggattggtcagacttcgccctgtggtgggagcagaaacattgttggctccttaaaacacactggactctggacaagtacggtgtgcaagccgacgccaagcttcttttcactccccaacacaaaatgctgcgcctacgacttccaaatctcaaaatggtgcggctccgagtgagcttcagtgcagtggtcttcaaagctgtgtccgacatctgcaagatcctcaacatcaggagatccgaggaattatctttgctgaaacccagcggagactatttctag

SEQ ID NO: 194406 - DNA, 1263 bp, Artificial Sequence
  derived and/or modified sequence
atggaacagggcattcaagaggacgagcagcttctgcttcgcttcaaatactactctttctttgacctcaatcctaaatatgatgcagtgagaataaatcagctgtatgagcaggcccgatgggcgatcctgctcgaagagatagactgtactgaggaagagatgctaatattcgccgccttgcagtatcacatatctaagctgagcctgagtgcggaaacccaagatttcgctggagagtctgaagttgacgagatcgaggccgctctttctaatctggaagtgacattagaggggggcaaggcggacagcctgctcgaggacattactgatataccaaagttagccgacaatctgaagctcttcagacctaaaaaactgttaccaaaagccttcaagcagtactggttcatttttaaagacaccagtatcgcttattttaaaaataaggaactagaacagggggagccgctggagaagctgaacctgcgcggctgcgaggtggtccctgatgtgaacgtggcaggaagaaaatttggcatcaagctcctgatccctgtcgctgacggcatgaatgagatgtacctccgatgcgatcatgagaaccagtacgcgcaatggatggccgcttgtatgctggctagtaaaggaaagaccatggccgattcaagctatcagcccgaggtgctaaatatcctttcattcctccgcatgaagaaccgcaacagcgcctcccaagtcgccagttcattggagaacatggacatgaaccccgaatgctttgtttcaccccggtgtgctaagcgccacaaatctaaacagctagctgccagaatcctcgaggctcaccagaatgttgctcagatgcccctggtcgaagcaaaactgcgtttcatacaggcctggcagagtctccctgagttcggactgacgtattacctcgtcagattcaaagggtctaagaaagatgatattctgggagtgagctacaatcggttaattaaaattgatgccgctaccggaatcccggtaacgacctggcggtttaccaatatcaaacagtggaatgtaaactgggagactcggcaagtcgtaatagagttcgatcaaaacgtgttcactgcctttacctgcttatctgctgattgcaaaatcgtgcacgagtatattggcggctacatctttcttagtaccaggtccaaagatcaaaatgagacactcgacgaggacctattccataagttgacagggggccaggattag

SEQ ID NO: 194407 - DNA, 2034 bp, Artificial Sequence
  derived and/or modified sequence
atgctgtcaagcaccgactttacctttgcgagctgggagctggttgtgagagtcgaccatcctaacgaagaacagcagaaggacgtgacccttcgcgttagcggggacctacacgtgggaggggtcatgctaaagttggtagagcagattaacatctcccaggattggtcagatttcgctctctggtgggagcagaagcattgttggcttctcaagacacactggacactagataaatacggcgtccaggccgatgcaaagcttctgtttacgccacagcataagatgcttagactgcgactgcccaatcttaagatggtgagacttagagtcagtttttctgcagtcgtcttcaaggctgtgtccgatatctgcaagatactcaacattcgaaggtcggaggagctatccttactgaagccttctggggactattttaagaaaaagaagaagaaggataagaacaacaaagaacctattatcgaggacattctcaatctggagtcatcacctacggccagcgggagctccgtgtctccaggactttactcgaagaccatgacgcccatttacgatcctattaacggaacccctgcgagcagcaccatgacctggtttagtgactcccccctgactgagcaaaactgttctatcctggcattcagtcagccaccacagtctccggaggcccttgctgatatgtatcagcccaggtccctcgtcgataaagcaaagctgaacgcaggctggctggactcttctcgctccctgatggaacaggggatccaggaggatgagcagctcctgctgagattcaaatactattctttctttgacctgaaccccaagtacgatgcggtccgtatcaaccaactgtacgaacaggctcgctgggcgattctgctcgaggaaatcgactgcacagaagaagagatgctgatttttgcagccctgcagtatcacatttcaaagcttagcctgagcgccgagacccaggatttcgccggggagtccgaggtcgatgagatcgaagctgctctaagcaatctggaggtgacactcgaggggggcaaagcggacagtctgctcgaggatatcacggatatcccaaaattagcagataacttgaagctgtttcgccctaagaagcttctgcccaaggcctttaaacagtactggttcatctttaaggacactagcatcgcctatttcaaaaataaagagctggagcagggggagccactggaaaagctgaaccttcgaggatgtgaagtggtacccgacgtgaatgtcgccggacggaagtttgggataaagttgctgattccagtggctgatggcatgaatgagatgtacctgagatgcgatcacgaaaaccaatatgcacaatggatggccgcctgtatgcttgcttctaaggggaaaacaatggcagactctagctaccaaccggaggtgctgaacatccttagcttcctccgtatgaagaacagaaatagcgcctctcaggtggctagcagcctggaaaacatggatatgaatcctgagtgtttcgtgtctcctagatgtgccaaacggcacaagagcaaacagttagcagccagaattcttgaagcccaccaaaatgtggcccagatgcctctcgtggaagctaaactgcggttcatccaagcatggcagtctttgccggaattcggactgacctattaccttgtgagatttaaagggagtaaaaaagacgacatccttggcgtgtcttacaataggttgataaaaatcgacgccgccacaggaattcctgtaactacttggcggtttaccaacattaagcagtggaacgtcaattgggagaccagacaggtcgtgattgagttcgaccagaatgtcttcactgcatttacctgtctctcggctgattgcaaaatcgtccacgaatatatcggaggttatatttttctgtctactcgctctaaggaccagaatgagaccctcgatgaggacttatttcacaagctcaccggcggacaggattag

SEQ ID NO: 194408 - DNA, 1668 bp, Artificial Sequence
  derived and/or modified sequence
atgctgagcagcacagacttcacctttgcctcctgggagctggtggtgcgggtggaccaccccaatgaggagcagcagaaggatgtgaccctgcgggtgtctggggacctgcacgtgggcggcgtgatgctgaagctggtggagcagatcaacatcagccaggactggagcgactttgccctgtggtgggagcagaagcactgctggctgctgaagacccactggaccctggacaagtatggagtgcaggctgatgccaagctgctcttcaccccccagcacaagatgctgcggctgcggctgcccaacctgaagatggtgcggctgcgggtgtccttctctgctgtggtgttcaaggctgtgtctgacatctgcaagatcctgaacatcagaagaagtgaggagctgagcctgctgaagcccagcggggactacttcaagaagaagaagaagaaggacaagaacaacaaggagcccatcatcgaggacatcctgaacctggagagcagccccacagccagcggcagctctgtgtccccaggcctgtacagcaagaccatgacccccatctatgaccccatcaatggcaccccagccagcagcaccatgacctggttcagtgacagccccctgacagagcagaactgcagcatcctggccttcagccagcccccccagagccctgaggccctggccgacatgtaccagcccaggagcctggtggacaaggccaagctgaatgccggctggctggacagcagccgcagcctgatggagcagggcatccaggaggatgagcagctgctgctgcgcttcaagtactacagcttctttgacctgaaccccaagtatgatgctgtgcgcatcaaccagctgtatgagcaggcccgctgggccatcctgctggaggagattgactgcacagaggaggagatgctgatctttgctgccctgcagtaccacatcagcaagctgagcctgtctgctgagacccaggactttgctggggagagcgaggtggatgaaattgaagctgccctgagcaacctggaggtgaccctggagggcggcaaggctgacagcctgctggaggacatcacagacatccccaagctggccgacaacctgaagctgttccggcccaagaagctgctgcccaaggccttcaagcagtactggttcatcttcaaggacaccagcatcgcctacttcaagaacaaggagctggagcagggcgagcccctggagaagctgaacctgcggggctgtgaggtggtgcctgatgtgaatgtggccggcaggaagtttggcatcaagctgctgatccctgtggctgatggcatgaatgagatgtacctgcgctgtgaccacgagaaccagtatgcccagtggatggccgcctgcatgctggccagcaagggcaagaccatggctgacagcagctaccagcctgaggtgctgaacatcctgtccttcctgaggatgaagaacagaaacagcgccagccaggtggccagcagcctggagaacatggacatgaaccctgagtgctttgtgagcccccgctgtgccaagaggcacaagagcaagcagctggccgcccgcatcctggaggcccaccacctgcaggcccccttccacagctaccgcagcctgagccacctgtag

SEQ ID NO: 194409 - DNA, 441 bp, Artificial Sequence
  derived and/or modified sequence
atgctgagcagcacagacttcacctttgcctcctgggagctggtggtgcgggtggaccaccccaatgaggagcagcagaaggatgtgaccctgcgggtgtctggggacctgcacgtgggcggcgtgatgctgaagctggtggagcagatcaacatcagccaggactggagcgactttgccctgtggtgggagcagaagcactgctggctgctgaagacccactggaccctggacaagtatggagtgcaggctgatgccaagctgctcttcaccccccagcacaagatgctgcggctgcggctgcccaacctgaagatggtgcggctgcgggtgtccttctctgctgtggtgttcaaggctgtgtctgacatctgcaagatcctgaacatcagaagaagtgaggagctgagcctgctgaagcccagcggggactacttctag

SEQ ID NO: 194410 - DNA, 1263 bp, Artificial Sequence
  derived and/or modified sequence
atggagcagggcatccaggaggatgagcagctgctgctgcgcttcaagtactacagcttctttgacctgaaccccaagtatgatgctgtgcgcatcaaccagctgtatgagcaggcccgctgggccatcctgctggaggagattgactgcacagaggaggagatgctgatctttgctgccctgcagtaccacatcagcaagctgagcctgtctgctgagacccaggactttgctggggagagcgaggtggatgaaattgaggccgccctgagcaacctggaggtgaccctggagggcggcaaggctgacagcctgctggaggacatcacagacatccccaagctggccgacaacctgaagctgttccggcccaagaagctgctgcccaaggccttcaagcagtactggttcatcttcaaggacaccagcatcgcctacttcaagaacaaggagctggagcagggcgagcccctggagaagctgaacctgcggggctgtgaggtggtgcctgatgtgaatgtggccggcaggaagtttggcatcaagctgctgatccctgtggctgatggcatgaatgagatgtacctgcgctgtgaccacgagaaccagtatgcccagtggatggccgcctgcatgctggccagcaagggcaagaccatggctgacagcagctaccagcctgaggtgctgaacatcctgtccttcctgaggatgaagaacagaaattctgccagccaggtggccagcagcctggagaacatggacatgaacccagaatgttttgtgagcccccgctgtgccaagaggcacaagagcaagcagctggccgcccgcatcctggaggcccaccagaatgtggcccagatgcccctggtggaggccaagctgcgcttcatccaggcctggcagagcctgcctgagtttggcctgacctactacctggtgcgcttcaagggcagcaagaaggatgacatcctgggcgtgtcctacaacagactcatcaagattgatgctgccaccggcatccctgtgaccacctggaggttcaccaacatcaagcagtggaatgtgaactgggagacccggcaggtggtgattgaatttgaccagaatgtgttcaccgccttcacctgcctgtctgctgactgcaagatcgtgcatgagtacatcggcggctacatcttcctgagcaccaggagcaaggaccagaatgagaccctggatgaagatctcttccacaagctgaccggcggccaggactag

SEQ ID NO: 194411 - DNA, 2034 bp, Artificial Sequence
  derived and/or modified sequence
atgctgagcagcacagacttcacctttgcctcctgggagctggtggtgcgggtggaccaccccaatgaggagcagcagaaggatgtgaccctgcgggtgtctggggacctgcacgtgggcggcgtgatgctgaagctggtggagcagatcaacatcagccaggactggagcgactttgccctgtggtgggagcagaagcactgctggctgctgaagacccactggaccctggacaagtatggagtgcaggctgatgccaagctgctcttcaccccccagcacaagatgctgcggctgcggctgcccaacctgaagatggtgcggctgcgggtgtccttctctgctgtggtgttcaaggctgtgtctgacatctgcaagatcctgaacatcagaagaagtgaggagctgagcctgctgaagcccagcggggactacttcaagaagaagaagaagaaggacaagaacaacaaggagcccatcatcgaggacatcctgaacctggagagcagccccacagccagcggcagctctgtgtccccaggcctgtacagcaagaccatgacccccatctatgaccccatcaatggcaccccagccagcagcaccatgacctggttcagtgacagccccctgacagagcagaactgcagcatcctggccttcagccagcccccccagagccctgaggccctggccgacatgtaccagcccaggagcctggtggacaaggccaagctgaatgccggctggctggacagcagccgcagcctgatggagcagggcatccaggaggatgagcagctgctgctgcgcttcaagtactacagcttctttgacctgaaccccaagtatgatgctgtgcgcatcaaccagctgtatgagcaggcccgctgggccatcctgctggaggagattgactgcacagaggaggagatgctgatctttgctgccctgcagtaccacatcagcaagctgagcctgtctgctgagacccaggactttgctggggagagcgaggtggatgaaattgaagctgccctgagcaacctggaggtgaccctggagggcggcaaggctgacagcctgctggaggacatcacagacatccccaagctggccgacaacctgaagctgttccggcccaagaagctgctgcccaaggccttcaagcagtactggttcatcttcaaggacaccagcatcgcctacttcaagaacaaggagctggagcagggcgagcccctggagaagctgaacctgcggggctgtgaggtggtgcctgatgtgaatgtggccggcaggaagtttggcatcaagctgctgatccctgtggctgatggcatgaatgagatgtacctgcgctgtgaccacgagaaccagtatgcccagtggatggccgcctgcatgctggccagcaagggcaagaccatggctgacagcagctaccagcctgaggtgctgaacatcctgtccttcctgaggatgaagaacagaaacagcgccagccaggtggccagcagcctggagaacatggacatgaaccctgagtgctttgtgagcccccgctgtgccaagaggcacaagagcaagcagctggccgcccgcatcctggaggcccaccagaatgtggcccagatgcccctggtggaggccaagctgcgcttcatccaggcctggcagagcctgcctgagtttggcctgacctactacctggtgcgcttcaagggcagcaagaaggatgacatcctgggcgtgtcctacaacagactcatcaagattgatgctgccaccggcatccctgtgaccacctggaggttcaccaacatcaagcagtggaatgtgaactgggagacccggcaggtggtgattgaatttgaccagaatgtgttcaccgccttcacctgcctgtctgctgactgcaagatcgtgcatgagtacatcggcggctacatcttcctgagcaccaggagcaaggaccagaatgagaccctggatgaggacctcttccacaagctgactggaggccaggactag

SEQ ID NO: 194412 - DNA, 1668 bp, Artificial Sequence
  derived and/or modified sequence
atgctgagcagcaccgacttcaccttcgccagctgggagctggtggtgagggttgaccaccccaacgaagagcaacaaaaagatgtcaccctgagggtgtcgggagatcttcatgtgggcggagtcatgctcaagcttgtggaacagattaacatttcgcaagattggtcggatttcgcactgtggtgggagcagaagcattgttggctgctgaagactcactggactctcgataaatacggggtacaggctgacgctaagctgctgttcacaccccagcataaaatgcttaggctgcggttgccaaatcttaagatggtgaggctgcgcgtttctttttcagctgtggtcttcaaagccgtctctgacatttgtaagattctcaacatcagaagatctgaggagctgtctctcctaaagccgtctggcgactactttaaaaagaaaaagaagaaagataagaacaacaaagagccaatcatcgaggatatcctgaacctggagagcagccctaccgcatccgggagctcagtctcccccggcctgtacagcaaaacgatgacccctatctacgatcccatcaacggcaccccagcatcaagcacgatgacctggttctcagattcgccactgaccgagcagaattgcagcatcctggccttttcacagccccctcagtcgcccgaggctctggccgatatgtaccagccccgatctctcgtggacaaggcgaagttaaatgcaggatggttggatagttcaaggtcccttatggaacaaggtattcaagaggatgagcaactgcttctacgcttcaaatattacagcttcttcgacctgaaccccaagtatgatgccgtgagaatcaaccagttatatgagcaggcccggtgggccatactccttgaagagatcgattgtaccgaagaggagatgctaatcttcgcagcgttacaataccacatcagtaagctgtccttgagcgctgaaacacaggacttcgccggcgagagtgaagtcgatgaaattgaggccgccttgtcaaacttggaagtcaccctggagggaggcaaagccgacagcctgctggaggacataaccgatataccgaagctggcggacaaccttaaactctttcggcccaaaaaactcctgcccaaagcattcaaacagtattggtttatctttaaggatacctcaatcgcgtacttcaaaaataaagagctggaacagggcgagcctctggaaaaacttaatttgcggggctgcgaagtcgtgcctgatgtcaacgtagcaggccgcaaatttgggatcaaactattgattcccgtcgctgatggtatgaacgaaatgtacttgcgctgcgatcacgaaaatcagtacgcccagtggatggcggcatgtatgcttgcctctaaggggaaaactatggccgactcgagttatcagccggaagtgctcaatattctgtcttttctgcggatgaagaacagaaattcagccagccaggttgccagctcgctcgagaacatggacatgaaccccgagtgtttcgtttcgcccagatgcgctaaacggcataaatctaagcagctggcagcaaggatactggaagcacaccacctgcaggctccttttcattcttaccgcagcttgtcccatttatag

SEQ ID NO: 194413 - DNA, 441 bp, Artificial Sequence
  derived and/or modified sequence
atgctgagcagcaccgacttcaccttcgccagctgggagctggtggtgagggtcgatcaccccaatgaggaacaacagaaggatgtgacactaagagtatctggtgacctgcatgttggcggagtaatgctgaagctcgtggagcaaattaacatctcacaagactggagtgattttgccttatggtgggagcaaaagcattgttggttactgaagacccactggacactcgataaatatggagtccaagccgacgccaagctcctgttcacaccgcaacataaaatgctgcgtctgcgtctgcctaatttaaaaatggtcagactacgcgtcagcttttccgccgtagtgtttaaggctgtgtctgatatctgcaagatcctgaacatccgcagaagcgaggaactctcccttttgaaaccctctggggactacttttag

SEQ ID NO: 194414 - DNA, 1263 bp, Artificial Sequence
  derived and/or modified sequence
atggagcagggcatccaggaggacgagcagctgctgctgcggttcaaatattattcattctttgatctcaatccaaagtacgacgccgttagaatcaaccaactctatgagcaggcccggtgggcgattctgctcgaagaaattgattgcacggaggaagagatgctgatcttcgcagcactgcagtatcatatctcaaagctctcgctcagtgcagagacccaggattttgcaggggagagtgaggttgacgagatcgaagctgctttgtcaaacctggaagtaacactagagggtgggaaggcagacagcttactggaggatatcacagatattcccaaactggcagataacctgaaactattccgccccaagaagctcctgcccaaggccttcaagcagtactggtttatcttcaaggacacatccatcgcttattttaaaaacaaggaactcgagcagggcgaacccctggaaaagcttaacctgaggggatgtgaggtcgttcccgacgtgaacgtagcgggccgtaaattcggaatcaagctgctcatccccgtcgccgatggcatgaatgagatgtacttgaggtgtgaccatgaaaatcagtacgcacagtggatggccgcctgtatgctggccagcaaaggcaagacgatggcagacagtagttaccaacccgaggttctgaacatcttgtcgttccttcggatgaagaatcggaacagtgcttcccaggtagctagttctcttgagaacatggacatgaaccccgagtgtttcgtgagtcctagatgcgcaaagcgtcacaagagcaagcagttagccgctcggattctggaggcgcaccaaaacgtagcccagatgcctctggtggaggcgaaactgagattcatccaagcctggcagagcctgccagagttcgggctgacctactatctagtcagatttaagggtagcaagaaggacgacatcttaggcgtttcatataacagacttattaaaatcgacgccgccactggtatcccagtgacaacttggcggtttactaatatcaagcagtggaatgtgaactgggaaacacgccaggtagtgatcgaattcgatcagaacgtgttcactgctttcacatgcctatcggctgactgtaagattgtgcacgagtacattggagggtacatctttctgagcactaggtctaaggaccagaatgagacgcttgatgaggatctctttcacaagctgaccggaggccaggactag

SEQ ID NO: 194415 - DNA, 2034 bp, Artificial Sequence
  derived and/or modified sequence
atgctgagcagcaccgacttcaccttcgccagctgggagctggtggttcgcgtcgatcatccaaacgaagaacagcagaaggacgtgacactaagggtatcaggagacctgcacgttgggggtgtgatgctaaagctggttgaacagattaatatctcccaggactggagtgactttgctctctggtgggaacagaaacattgctggttgctgaaaacccattggactctggacaagtacggtgtgcaggcagacgccaagttactcttcacgccccagcacaaaatgttgcgccttcgcctgccaaatctaaagatggtccggctcagagtgagtttttccgctgtggttttcaaagcggtctcagatatatgcaaaatcttgaacataagaagaagcgaggagctgtctctgctaaagccctccggcgactatttcaaaaagaagaaaaagaaggataaaaataacaaagagcccattatcgaagatatcttgaacctggaatcaagccctactgcgagtgggagttccgtgtctccaggtctttattcgaaaacgatgacgcctatttacgatcctatcaatgggactcctgctagtagcacaatgacatggttctcggatagccccctgacagagcaaaactgttcaatcctggccttcagtcagccaccccagtcgccagaggccctggctgatatgtaccagccccgtagcctcgtagataaagcaaaacttaacgcaggctggctcgactcttccaggagcctcatggagcagggcatccaggaagacgagcagctgttattacggttcaaatattactcttttttcgaccttaatcctaagtacgatgccgtaaggatcaaccaactgtatgagcaagcccggtgggcgatcctgctggaagagatagactgcaccgaagaagagatgctgattttcgctgcacttcaatatcacatttcaaaactgagcctgagcgctgaaacccaggacttcgctggcgagagcgaggtggatgagatagaagctgcactgtccaacctggaagtaactctcgaaggcggcaaggccgattccttgctggaagatatcacagacatacccaaactggcggataatctgaagctgttcaggcccaaaaagctgttgcctaaggccttcaagcagtattggttcatcttcaaggacacctctatcgcctactttaagaacaaggaactagagcagggtgaacctctggagaagttgaatctgcgcggctgtgaggtggtgcctgatgtgaacgttgcgggcaggaagttcggtatcaagctgctcattccagtcgctgacgggatgaacgaaatgtacctgaggtgtgaccacgaaaatcaatacgcgcagtggatggcggcttgtatgttagccagcaagggcaagaccatggccgattcgtcctaccagcctgaggtgctgaacattttaagtttccttcggatgaagaatagaaactctgcctcacaggtcgcatcaagcctggagaatatggacatgaacccggagtgcttcgtgtcaccaaggtgcgccaaacgccataagagcaaacagctggcagctcggatactggaagcccaccagaacgtggcccagatgcccctggtggaggccaagcttcggtttatccaggcgtggcaaagcctgcccgagttcggtctgacgtattacctcgttcggtttaaaggctctaaaaaagacgacattctgggcgtctcctacaaccggctgataaaaattgatgctgccacgggcatccccgtgactacttggcggtttaccaatatcaagcagtggaatgttaattgggagacccgccaggttgtgatagaattcgatcagaacgtgttcactgcctttacgtgcctctccgccgactgcaaaattgtgcatgaatatatcggggggtatatcttcttgagcactagaagcaaagatcaaaacgaaactcttgacgaggatctgtttcacaagcttaccggaggacaggattag

SEQ ID NO: 194416 - DNA, 1668 bp, Artificial Sequence
  derived and/or modified sequence
atgctgtccagcacggatttcacatttgcctcctgggaactggttgttcgagtcgaccaccctaacgaagagcagcagaaggacgtgactttgagggtttcaggcgacctccacgtggggggagttatgctcaagcttgtcgaacagattaacatcagccaggactggtctgacttcgcattatggtgggaacagaagcactgttggctcctcaagacacattggactctggacaaatacggcgttcaggctgacgccaaacttctttttacccctcagcataagatgctacgcctgcgcctgcctaacctcaagatggtccgcctgcgtgtgtctttctccgcagtggtatttaaagccgtctccgacatatgcaagatcctgaatatccgcaggtccgaggaactgagcttgttaaagccctctggtgattattttaagaagaagaagaagaaagacaagaataataaagagccaatcattgaggacatcctcaatctggagagctccccgacggctagcggatccagtgtttcgcccggtttgtattccaaaaccatgaccccgatctacgatccaatcaatggaactccggcaagtagtaccatgacatggttcagcgatagccctctgactgaacaaaattgtagcatcctggccttcagccagcccccacagtcccccgaggcactcgcggatatgtaccagccccgatctctggtagacaaggctaagctcaacgccggttggttggacagcagtcggtccttgatggagcagggtatccaagaggacgaacaactgctgttgcggttcaaatattactcttttttcgatctgaatccaaaatacgatgccgttcgcataaatcagttgtacgagcaggcccgttgggcaatactgctggaggagattgactgcacggaagaggaaatgttaattttcgcggcactccagtaccatattagtaaactctccttgtccgctgaaactcaggattttgcgggagaatcggaggtagatgaaatcgaggccgcactgtctaacttggaggtgacccttgaggggggaaaagctgactccctgctcgaggatatcacggatatccctaaattagcggacaatcttaagctgtttaggcctaagaaactgcttccaaaggcgttcaagcaatactggttcattttcaaggacactagcatcgcatattttaaaaacaaagaattagagcagggcgaacctctggagaaactgaatctccgaggttgcgaggttgttcccgacgtgaacgtggctgggaggaagttcgggataaagctcttaattcctgtcgccgacggcatgaacgagatgtatcttcggtgtgaccacgagaatcaatacgcacaatggatggccgcatgtatgctggcctctaaaggcaagacaatggccgacagctcttatcagccagaggttctgaatattctctccttcctgcggatgaagaataggaactccgcatcccaagtagccagtagcctcgagaatatggacatgaacccagagtgcttcgtctcaccaaggtgcgctaaaagacacaagtctaagcagctggccgcaaggatcctagaagcccaccacctccaagcacccttccattcctacaggtctttaagccatctgtag

SEQ ID NO: 194417 - DNA, 441 bp, Artificial Sequence
  derived and/or modified sequence
atgttaagttccacagactttaccttcgccagctgggaactcgttgtgcgagtggaccaccctaatgaagagcaacaaaaagatgtgacgctacgggtttctggcgacttacacgttggaggtgtgatgttgaagcttgtggagcagataaatatttcccaagattggagcgactttgcgctttggtgggaacaaaagcactgctggctgctcaaaacccattggacgttggataagtacggggtgcaagcggacgccaagctgctattcactccacagcacaaaatgctccggcttaggctgcctaatctcaagatggtgagactaagggtatctttttctgctgtggtttttaaagcggtatctgacatctgtaaaattttaaatattaggcggtccgaggagctgtccttgctgaagccttccggggactacttctag

SEQ ID NO: 194418 - DNA, 1263 bp, Artificial Sequence
  derived and/or modified sequence
atggagcagggcattcaggaagacgagcagctactgctccggttcaagtattattcattttttgatttgaaccccaaatatgacgcagtgcggatcaatcagctttacgaacaggccaggtgggcaatcctcttagaagaaattgattgtaccgaggaggaaatgctgatttttgcagctctgcagtatcatattagcaagttgagcctgtccgccgaaacacaggatttcgcgggagagagcgaagttgatgagatcgaggctgcgttaagcaatctcgaagtaactctggagggtggcaaagcggactcactgctggaagatataactgatatccccaaacttgcagacaaccttaaactctttcggccaaaaaaactcttgccaaaagcttttaaacagtattggttcatcttcaaagatacatctattgcgtatttcaaaaataaagagctggaacagggagagccccttgaaaagctgaatctccgtgggtgtgaggtggtcccagacgttaatgtggcaggacggaaattcgggattaagctgctcattccagtcgccgatggcatgaatgagatgtacctacgctgcgaccatgagaatcaatacgctcaatggatggccgcttgcatgctggcaagcaagggaaaaactatggccgattcgtcataccagccagaagtgctgaatattcttagctttctccggatgaagaatagaaattcagcatcccaggtcgccagctccctcgaaaatatggacatgaaccccgaatgctttgttagtccacggtgtgcgaagaggcataagtccaaacagctggctgctagaatcctcgaagcacaccagaatgtcgctcaaatgccactcgtggaggcaaaactcaggtttatccaggcctggcagtctctgcctgaatttggcctgacgtattatcttgtgagatttaaaggctcaaagaaggatgatatcctcggcgtgagttacaacaggctgattaagatagatgccgcaaccgggatccctgtaacaacctggcggttcaccaacattaagcagtggaacgtgaactgggaaacacggcaggtcgtgatcgagttcgatcagaatgtgtttacagcatttacttgtctatccgccgactgtaagatcgtccatgagtatattgggggatacattttcctctctacacggtctaaggatcagaacgagacacttgacgaagacctcttccacaagttgaccggaggccaggactag

SEQ ID NO: 194419 - DNA, 2034 bp, Artificial Sequence
  derived and/or modified sequence
atgttgagcagtacggatttcacattcgcatcctgggaactggttgtgagagtggaccacccaaatgaggaacagcagaaagatgtgactttgcgcgtatccggcgacctgcatgtgggaggggtaatgttgaagctggtcgagcagatcaatatatcccaggattggagcgatttcgctctttggtgggagcagaagcactgctggttgttgaagacccattggaccctggacaaatatggcgtccaggccgacgcaaagttgctgttcacaccccaacacaaaatgctgaggttacgattgcccaaccttaaaatggtccgtctcagagtgtctttctcagcagttgtgtttaaggccgtgtctgacatttgtaaaattctgaatatcaggcggtcggaggagctatccctgctgaagcctagcggcgattacttcaagaagaagaaaaagaaggataagaataacaaagaacctattattgaggatatcctgaaccttgaatcttcgcctacagcctccgggtcgtccgtctcaccagggttgtactctaagacaatgactcccatctacgacccaataaacggtactcctgcttcgtccactatgacctggttctctgattctccgctgaccgagcagaattgtagcatcttagcctttagtcagccaccccagagcccggaagcccttgccgacatgtaccagcccagaagtctggtggacaaggcaaaactgaacgccggttggttagattccagtcgttcattaatggaacaaggaatccaggaagatgagcagctactactgaggttcaagtattatagttttttcgacttaaaccctaaatatgacgcggtaaggatcaaccaattatacgaacaggctcggtgggcaatactcctcgaagagatcgactgcaccgaggaggagatgctcatattcgccgctctgcagtaccatatctcgaagctcagtttatccgccgaaactcaagacttcgctggtgagagcgaagtggacgagattgaagctgctctgtcaaacctggaggtgacccttgaggggggaaaggctgactctctgctggaggacataactgatatcccgaaactcgccgacaatttgaaattgtttagacccaagaagttgctgcccaaagctttcaagcagtattggtttattttcaaagacacgtccattgcctacttcaaaaataaagaacttgagcagggcgagcctctagaaaagcttaatctgcgcggatgtgaggtcgtgccggatgtaaacgtggccggacggaagttcggcattaagctgctgatccctgttgccgatgggatgaacgagatgtacctcaggtgcgatcacgaaaaccaatacgcacaatggatggcagcttgtatgctggcgagcaaaggaaaaacaatggccgactccagctaccaacctgaggtgctaaacatcctttcctttctgcggatgaagaatagaaattccgccagccaggtagcaagctcactggagaatatggacatgaaccctgagtgttttgtgagccctcgttgtgcaaaaagacacaagagcaaacagctcgcagccagaatacttgaagctcaccagaacgtggcccaaatgccactagtagaggctaaactgaggttcatccaagcgtggcagtccctgccagaattcggtctgacatattacctggtgcgctttaaggggagcaaaaaggacgatattctcggagtgagttataatcggctgattaagattgacgcagctacaggcatcccagtgaccacttggagattcaccaatataaagcagtggaatgtgaattgggagacacgccaggtggtgatcgaatttgaccaaaacgtgttcacagccttcacctgcctatctgctgactgtaaaatcgtccacgagtatatcggcggttacatctttctgagcacaagatcgaaggaccagaacgaaacactggacgaagacctgttccataaacttacaggtgggcaagactag

SEQ ID NO: 194420 - protein, 1865 aa, Artificial Sequence
  derived and/or modified sequence
MSQKSWIESTLTKRECVYIIPSSKDPHRCLPGCQICQQLVRCFCGRLVKQHACFTASLAMKYSDVKLGDHFNQAIEEWSVEKHTEQSPTDAYGVINFQGGSHSYRAKYVRLSYDTKPEVILQLLLKEWQMELPKLVISVHGGMQKFELHPRIKQLLGKGLIKAAVTTGAWILTGGVNTGVAKHVGDALKEHASRSSRKICTIGIAPWGVIENRNDLVGRDVVAPYQTLLNPLSKLNVLNNLHSHFILVDDGTVGKYGAEVRLRRELEKTINQQRIHARIGQGVPVVALIFEGGPNVILTVLEYLQESPPVPVVVCEGTGRAADLLAYIHKQTEEGGNLPDAAEPDIISTIKKTFNFGQNEALHLFQTLMECMKRKELITVFHIGSDEHQDIDVAILTALLKGTNASAFDQLILTLAWDRVDIAKNHVFVYGQQWLVGSLEQAMLDALVMDRVAFVKLLIENGVSMHKFLTIPRLEELYNTKQGPTNPMLFHLVRDVKQGNLPPGYKITLIDIGLVIEYLMGGTYRCTYTRKRFRLIYNSLGGNNRRSGRNTSSSTPQLRKSHESFGNRADKKEKMRHNHFIKTAQPYRPKIDTVMEEGKKKRTKDEIVDIDDPETKRFPYPLNELLIWACLMKRQVMARFLWQHGEESMAKALVACKIYRSMAYEAKQSDLVDDTSEELKQYSNDFGQLAVELLEQSFRQDETMAMKLLTYELKNWSNSTCLKLAVSSRLRPFVAHTCTQMLLSDMWMGRLNMRKNSWYKVILSILVPPAILLLEYKTKAEMSHIPQSQDAHQMTMDDSENNFQNITEEIPMEVFKEVRILDSNEGKNEMEIQMKSKKLPITRKFYAFYHAPIVKFWFNTLAYLGFLMLYTFVVLVQMEQLPSVQEWIVIAYIFTYAIEKVREIFMSEAGKVNQKIKVWFSDYFNISDTIAIISFFIGFGLRFGAKWNFANAYDNHVFVAGRLIYCLNIIFWYVRLLDFLAVNQQAGPYVMMIGKMVANMFYIVVIMALVLLSFGVPRKAILYPHEAPSWTLAKDIVFHPYWMIFGEVYAYEIDVCANDSVIPQICGPGTWLTPFLQAVYLFVQYIIMVNLLIAFFNNVYLQVKAISNIVWKYQRYHFIMAYHEKPVLPPPLIILSHIVSLFCCICKRRKKDKTSDGPKLFLTEEDQKKLHDFEEQCVEMYFNEKDDKFHSGSEERIRVTFERVEQMCIQIKEVGDRVNYIKRSLQSLDSQIGHLQDLSALTVDTLKTLTAQKASEASKVHNEITRELSISKHLAQNLIDDGPVRPSVWKKHGVVNTLSSSLPQGDLESNNPFHCNILMKDDKDPQCNIFGQDLPAVPQRKEFNFPEAGSSSGALFPSAVSPPELRQRLHGVELLKIFNKNQKLGSSSTSIPHLSSPPTKFFVSTPSQPSCKSHLETGTKDQETVCSKATEGDNTEFGAFVGHRDSMDLQRFKETSNKIKILSNNNTSENTLKRVSSLAGFTDCHRTSIPVHSKQAEKISRRPSTEDTHEVDSKAALIPDWLQDRPSNREMPSEEGTLNGLTSPFKPAMDTNYYYSAVERNNLMRLSQSIPFTPVPPRGEPVTVYRLEESSPNILNNSMSSWSQLGLCAKIEFLSKEEMGGGLRRAVKVQCTWSEHDILKSGHLYIIKSFLPEVVNTWSSIYKEDTVLHLCLREIQQQRAAQKLTFAFNQMKPKSIPYSPRFLEVFLLYCHSAGQWFAVEECMTGEFRKYNNNNGDEIIPTNTLEEIMLAFSHWTYEYTRGELLVLDLQGVGENLTDPSVIKAEEKRSCDMVFGPANLGEDAIKNFRAKHHCNSCCRKLKLPDLKRNDYTPDKIIFPQDEPSDLNLQPGNSTKESESTNSVRLML

SEQ ID NO: 194421 - DNA, 5598 bp, Artificial Sequence
  derived and/or modified sequence
atgagccagaagagctggatcgagagcaccctgaccaagagagagtgcgtgtacatcatccccagcagcaaggacccccacagatgcctgcccggctgccagatctgccagcagctggtgagatgcttctgcggcagactggtgaagcagcacgcctgcttcaccgccagcctggccatgaagtacagcgacgtgaagctgggcgaccacttcaaccaggccatcgaggagtggagcgtggagaagcacaccgagcagagccccaccgacgcctacggcgtgatcaacttccagggcggcagccacagctacagagccaagtacgtgagactgagctacgacaccaagcccgaggtgatcctgcagctgctgctgaaggagtggcagatggagctgcccaagctggtgatcagcgtgcacggcggcatgcagaagttcgagctgcaccccagaatcaagcagctgctgggcaagggcctgatcaaggccgccgtgaccaccggcgcctggatcctgaccggcggcgtgaacaccggcgtggccaagcacgtgggcgacgccctgaaggagcacgccagcagaagcagcagaaagatctgcaccatcggcatcgccccctggggcgtgatcgagaacagaaacgacctggtgggcagagacgtggtggccccctaccagaccctgctgaaccccctgagcaagctgaacgtgctgaacaacctgcacagccacttcatcctggtggacgacggcaccgtgggcaagtacggcgccgaggtgagactgagaagagagctggagaagaccatcaaccagcagagaatccacgccagaatcggccagggcgtgcccgtggtggccctgatcttcgagggcggccccaacgtgatcctgaccgtgctggagtacctgcaggagagcccccccgtgcccgtggtggtgtgcgagggcaccggcagagccgccgacctgctggcctacatccacaagcagaccgaggagggcggcaacctgcccgacgccgccgagcccgacatcatcagcaccatcaagaagaccttcaacttcggccagaacgaggccctgcacctgttccagaccctgatggagtgcatgaagagaaaggagctgatcaccgtgttccacatcggcagcgacgagcaccaggacatcgacgtggccatcctgaccgccctgctgaagggcaccaacgccagcgccttcgaccagctgatcctgaccctggcctgggacagagtggacatcgccaagaaccacgtgttcgtgtacggccagcagtggctggtgggcagcctggagcaggccatgctggacgccctggtgatggacagagtggccttcgtgaagctgctgatcgagaacggcgtgagcatgcacaagttcctgaccatccccagactggaggagctgtacaacaccaagcagggccccaccaaccccatgctgttccacctggtgagagacgtgaagcagggcaacctgccccccggctacaagatcaccctgatcgacatcggcctggtgatcgagtacctgatgggcggcacctacagatgcacctacaccagaaagagattcagactgatctacaacagcctgggcggcaacaacagaagaagcggcagaaacaccagcagcagcaccccccagctgagaaagagccacgagagcttcggcaacagagccgacaagaaggagaagatgagacacaaccacttcatcaagaccgcccagccctacagacccaagatcgacaccgtgatggaggagggcaagaagaagagaaccaaggacgagatcgtggacatcgacgaccccgagaccaagagattcccctaccccctgaacgagctgctgatctgggcctgcctgatgaagagacaggtgatggccagattcctgtggcagcacggcgaggagagcatggccaaggccctggtggcctgcaagatctacagaagcatggcctacgaggccaagcagagcgacctggtggacgacaccagcgaggagctgaagcagtacagcaacgacttcggccagctggccgtggagctgctggagcagagcttcagacaggacgagaccatggccatgaagctgctgacctacgagctgaagaactggagcaacagcacctgcctgaagctggccgtgagcagcagactgagacccttcgtggcccacacctgcacccagatgctgctgagcgacatgtggatgggcagactgaacatgagaaagaacagctggtacaaggtgatcctgagcatcctggtgccccccgccatcctgctgctggagtacaagaccaaggccgagatgagccacatcccccagagccaggacgcccaccagatgaccatggacgacagcgagaacaacttccagaacatcaccgaggagatccccatggaggtgttcaaggaggtgagaatcctggacagcaacgagggcaagaacgagatggagatccagatgaagagcaagaagctgcccatcaccagaaagttctacgccttctaccacgcccccatcgtgaagttctggttcaacaccctggcctacctgggcttcctgatgctgtacaccttcgtggtgctggtgcagatggagcagctgcccagcgtgcaggagtggatcgtgatcgcctacatcttcacctacgccatcgagaaggtgagagagatcttcatgagcgaggccggcaaggtgaaccagaagatcaaggtgtggttcagcgactacttcaacatcagcgacaccatcgccatcatcagcttcttcatcggcttcggcctgagattcggcgccaagtggaacttcgccaacgcctacgacaaccacgtgttcgtggccggcagactgatctactgcctgaacatcatcttctggtacgtgagactgctggacttcctggccgtgaaccagcaggccggcccctacgtgatgatgatcggcaagatggtggccaacatgttctacatcgtggtgatcatggccctggtgctgctgagcttcggcgtgcccagaaaggccatcctgtacccccacgaggcccccagctggaccctggccaaggacatcgtgttccacccctactggatgatcttcggcgaggtgtacgcctacgagatcgacgtgtgcgccaacgacagcgtgatcccccagatctgcggccccggcacctggctgacccccttcctgcaggccgtgtacctgttcgtgcagtacatcatcatggtgaacctgctgatcgccttcttcaacaacgtgtacctgcaggtgaaggccatcagcaacatcgtgtggaagtaccagagataccacttcatcatggcctaccacgagaagcccgtgctgcccccccccctgatcatcctgagccacatcgtgagcctgttctgctgcatctgcaagagaagaaagaaggacaagaccagcgacggccccaagctgttcctgaccgaggaggaccagaagaagctgcacgacttcgaggagcagtgcgtggagatgtacttcaacgagaaggacgacaagttccacagcggcagcgaggagagaatcagagtgaccttcgagagagtggagcagatgtgcatccagatcaaggaggtgggcgacagagtgaactacatcaagagaagcctgcagagcctggacagccagatcggccacctgcaggacctgagcgccctgaccgtggacaccctgaagaccctgaccgcccagaaggccagcgaggccagcaaggtgcacaacgagatcaccagagagctgagcatcagcaagcacctggcccagaacctgatcgacgacggccccgtgagacccagcgtgtggaagaagcacggcgtggtgaacaccctgagcagcagcctgccccagggcgacctggagagcaacaaccccttccactgcaacatcctgatgaaggacgacaaggacccccagtgcaacatcttcggccaggacctgcccgccgtgccccagagaaaggagttcaacttccccgaggccggcagcagcagcggcgccctgttccccagcgccgtgagcccccccgagctgagacagagactgcacggcgtggagctgctgaagatcttcaacaagaaccagaagctgggcagcagcagcaccagcatcccccacctgagcagcccccccaccaagttcttcgtgagcacccccagccagcccagctgcaagagccacctggagaccggcaccaaggaccaggagaccgtgtgcagcaaggccaccgagggcgacaacaccgagttcggcgccttcgtgggccacagagacagcatggacctgcagagattcaaggagaccagcaacaagatcaagatcctgagcaacaacaacaccagcgagaacaccctgaagagagtgagcagcctggccggcttcaccgactgccacagaaccagcatccccgtgcacagcaagcaggccgagaagatcagcagaagacccagcaccgaggacacccacgaggtggacagcaaggccgccctgatccccgactggctgcaggacagacccagcaacagagagatgcccagcgaggagggcaccctgaacggcctgaccagccccttcaagcccgccatggacaccaactactactacagcgccgtggagagaaacaacctgatgagactgagccagagcatccccttcacccccgtgccccccagaggcgagcccgtgaccgtgtacagactggaggagagcagccccaacatcctgaacaacagcatgagcagctggagccagctgggcctgtgcgccaagatcgagttcctgagcaaggaggagatgggcggcggcctgagaagagccgtgaaggtgcagtgcacctggagcgagcacgacatcctgaagagcggccacctgtacatcatcaagagcttcctgcccgaggtggtgaacacctggagcagcatctacaaggaggacaccgtgctgcacctgtgcctgagagagatccagcagcagagagccgcccagaagctgaccttcgccttcaaccagatgaagcccaagagcatcccctacagccccagattcctggaggtgttcctgctgtactgccacagcgccggccagtggttcgccgtggaggagtgcatgaccggcgagttcagaaagtacaacaacaacaacggcgacgagatcatccccaccaacaccctggaggagatcatgctggccttcagccactggacctacgagtacaccagaggcgagctgctggtgctggacctgcagggcgtgggcgagaacctgaccgaccccagcgtgatcaaggccgaggagaagagaagctgcgacatggtgttcggccccgccaacctgggcgaggacgccatcaagaacttcagagccaagcaccactgcaacagctgctgcagaaagctgaagctgcccgacctgaagagaaacgactacacccccgacaagatcatcttcccccaggacgagcccagcgacctgaacctgcagcccggcaacagcaccaaggagagcgagagcaccaacagcgtgagactgatgctgtag

SEQ ID NO: 194422 - DNA, 5598 bp, Artificial Sequence
  derived and/or modified sequence
atgtcccagaaaagttggattgagagtaccctgactaaacgcgaatgcgtgtacatcatcccgagctccaaggatccccatcgctgtctgcccggttgccagatttgccagcagctcgttcgctgcttctgtggacgacttgttaaacagcatgcttgctttacagcctccctggcaatgaaatactctgatgttaagcttggcgaccactttaatcaggcaattgaagaatggagcgtcgaaaaacacactgagcagtcgccaaccgacgcatatggtgtgatcaacttccaagggggaagccattcctatcgcgctaagtacgtgcggctctcatacgatactaagcccgaggtgattctgcaactgcttctcaaagaatggcagatggagctgcccaaactggtgatctccgtccatggagggatgcagaaattcgagctgcatcccagaatcaaacagcttttaggcaaagggctcatcaaagccgccgtgacaaccggagcctggattcttaccggtggagtgaatacaggggttgccaaacacgtcggggacgctttaaaggagcacgcttcacgctcttcacgcaagatctgtactataggtatcgccccatggggagttatcgaaaatagaaacgatctggttgggagggatgttgtggccccataccagacgttgctgaaccccctctcaaaactgaacgtgttaaataatttacacagccactttattctggtggatgatggaacagtcggtaagtacggggcagaggttagactgcgccgggagcttgaaaagacaattaaccagcagcggattcatgcaagaatcggacaaggcgtgccagtcgtcgcactaattttcgagggaggcccgaacgtcatcctgactgtcctggagtatctccaagaatctccccccgtgccagtagtggtgtgtgaggggacagggagggccgccgacctgctcgcctatatccacaaacaaaccgaggagggcggaaatctgcctgacgccgccgagccggatataattagcaccattaaaaaaacttttaattttggtcagaacgaagctttgcacctgttccagacactgatggagtgcatgaagagaaaggagcttataacagtctttcatatcggaagcgatgaacatcaagatattgatgtcgccattctcacggcccttttgaaagggacaaacgcttccgcctttgatcagctcatcctgacattagcttgggacagggtggacatcgctaagaaccatgtgttcgtgtacggccagcagtggctcgtgggcagtctcgagcaggctatgcttgacgctctcgtaatggacagggtggctttcgtgaagttgctgatagagaatggagtctcaatgcataagttcctaactatcccccgtctggaggagctgtacaatacaaaacaaggacctacaaacccgatgttatttcatctcgttagggacgtgaagcagggcaacttaccgcccggctacaagatcaccctcatcgatatcgggctcgtgattgagtacctgatggggggcacttatcgttgtacgtacacacgcaaacgctttcgcctgatttacaacagcctggggggcaataaccggagaagcgggcgcaacacctccagcagcactccacaacttagaaagagtcacgagtccttcgggaatagagctgacaaaaaggagaaaatgaggcataaccactttataaagactgctcaaccctatcgccccaaaatcgataccgtgatggaggagggcaagaagaaacgcaccaaggatgaaatcgtggatatagatgaccccgagacgaagaggtttccctacccattaaatgagctcctgatctgggcatgccttatgaaaagacaggtcatggcgcgcttcttatggcagcacggtgaagaatctatggccaaggccctagtggcctgtaagatttacagaagtatggcatatgaagccaaacagagtgacctggtagatgacactagcgaggaactcaaacagtactctaatgacttcggccagctggctgtggaactactagaacagagtttccgccaagatgagaccatggccatgaagctgctgacgtacgagctgaaaaactggtccaatagcacttgccttaaacttgcagtctcttctcgtctgcgaccctttgtggcacacacgtgtacacagatgcttctgagtgacatgtggatggggcgtttgaatatgcgtaagaactcttggtataaagtaattttatccatactagttcctcccgcaattctgttactggaatacaaaactaaagccgagatgagccacatcccacagagccaagacgcccaccagatgaccatggatgacagcgaaaacaattttcaaaacatcacagaagaaattcccatggaagtgttcaaggaggtccgaatccttgacagcaatgaagggaagaatgagatggaaatccagatgaagtccaagaaattacccatcacaagaaagttctatgccttctaccacgctcccattgtaaagttctggttcaacacactggcctacctgggattcctgatgctttacacatttgtcgtgctggtccagatggagcaattgcccagcgtccaggagtggatagtgatcgcctatatttttacctacgcgatcgagaaggtcagagagattttcatgagcgaggccgggaaagtgaaccagaaaatcaaagtttggttctccgattactttaatatttccgacactatcgcaataatcagtttctttataggatttggcctccggttcggagcgaagtggaattttgctaacgcttacgataatcacgtgttcgtggccggccgattgatctactgcctgaatattatattctggtatgtgagactgctggactttttagctgtcaatcagcaggccggaccatacgtaatgatgattggcaaaatggtggcaaacatgttctatatcgtcgtgattatggccctcgtccttttgagtttcggagtccccaggaaagctatcctgtaccctcacgaggccccgagttggaccctcgccaaagacatcgtgttccacccttactggatgatcttcggtgaagtgtacgcgtacgaaatcgatgtgtgtgcaaacgattctgttatccctcagatttgtgggccaggcacatggctgacaccttttctgcaagctgtctacctgttcgtgcagtacatcataatggtgaatctgctgatcgccttttttaacaacgtgtacctgcaagtgaaagctattagcaacatcgtgtggaaatatcagaggtaccatttcattatggcttaccacgaaaaacctgtcctgcccccacccctgatcatcctgtcccatattgtcagtttgttctgttgtatttgcaagcgtcggaagaaagacaagacatctgatgggccaaaactgtttctaacagaggaggaccagaagaagcttcacgactttgaggaacagtgcgtggagatgtatttcaacgagaaggatgacaagtttcacagcggaagtgaggagagaatacgggtaacctttgagcgggtagagcagatgtgtatccagatcaaggaggtgggcgaccgagtgaactacataaagaggagcctccagagtctggactcgcagataggccacctccaggatctctcagctctgactgttgacaccctcaaaaccctgacggcccagaaggcgtccgaggcttcaaaggtgcataatgaaattactagggagctatctataagcaaacacttggctcagaatctgattgacgacgggcctgttcgccctagcgtctggaaaaagcacggagtagtgaataccctatcaagtagcctcccccagggagatttggagtcaaacaaccccttccactgcaacattttgatgaaggacgacaaagatcctcagtgcaatatcttcggccaggaccttcctgcggtcccccagcgaaaggaatttaattttcccgaggcaggctcttcaagcggggctctgtttccatccgcggtgtcccctcccgaactccgtcagagactccacggagtggaactactgaaaatttttaacaaaaatcagaagctggggtcctcaagcacatccattccgcacctgtcctcacctcctaccaagttttttgtgtccacgccatcacagccaagctgtaagagccacctcgaaaccggaacgaaggatcaggaaactgtgtgctcgaaggccacagagggggacaacactgagttcggagccttcgtcgggcacagagactcaatggaccttcaacgtttcaaagaaacaagtaataagatcaaaatcttaagcaacaacaacacatcagaaaacactctcaagagggtgtcatcactggctggatttaccgattgtcatagaacgagtattcctgtgcactctaaacaggccgaaaagatcagccgccggccttctactgaagacactcatgaggttgattctaaagcagccctgatcccagattggctgcaagatcggccatcaaaccgcgagatgccaagcgaggagggcaccctcaatgggcttacgagcccatttaaaccagccatggatactaattattattatagtgctgttgagcggaacaacctgatgcgcctgtctcaaagcatcccattcactccagtgccgccgaggggtgagcccgtcaccgtatataggctcgaggagtcatcaccaaacattctcaacaacagcatgagttcctggagtcagttgggcttgtgcgccaaaatcgagtttctgagcaaagaggagatgggcggcggtctgaggagagctgtgaaggtacagtgtacttggagcgagcatgacattctaaaaagtggccatctatatatcataaagtctttcttaccagaagtggtgaacacctggtcctcaatctacaaagaggacacagtcctgcacctatgtctgagagaaatccagcaacagcgggctgctcaaaaactcacgttcgcatttaaccagatgaagccgaaaagcattccatattccccacgattcctggaggtgtttctgctctactgccactcggccgggcagtggtttgctgttgaggagtgcatgaccggggaattccggaagtataacaacaataatggcgacgaaatcatcccaaccaacacgctcgaagaaatcatgctggccttttctcactggacatacgaatacacgagaggggaactgctggtgctagaccttcagggggtaggagagaatcttaccgatcctagtgtcatcaaagctgaggagaaacgtagctgtgacatggtctttgggcctgctaatctgggcgaagacgcaataaagaacttccgggctaaacaccactgcaacagctgctgccgcaagctgaaactgccggaccttaaaaggaatgattacactcccgataaaatcattttcccccaggatgaacctagcgatctgaacctgcagccgggaaattctaccaaagaatcagaaagcacaaacagcgtgaggctgatgctgtag

SEQ ID NO: 194423 - DNA, 5598 bp, Artificial Sequence
  derived and/or modified sequence
atgagccagaagtcctggattgagagcaccctgaccaagagagaatgtgtgtacatcatccccagcagcaaggacccccaccgctgcctgcccggctgccagatctgccagcagctggtgcgctgcttctgtggccgcctggtgaagcagcacgcctgcttcaccgccagcctggccatgaagtacagtgatgtgaagctgggggaccacttcaaccaggccatcgaggagtggagcgtggagaagcacacagagcagagccccacagatgcctacggcgtcatcaacttccagggcggcagccacagctaccgggccaagtatgtgcggctgtcctatgacaccaagccagaggtgatcctgcagctgctgctgaaggagtggcagatggagctgcccaagctggtgatctctgtgcacggcggcatgcagaagtttgagctgcacccccgcatcaagcagctgctgggcaagggcctcatcaaggctgctgtgaccactggagcctggatcctgactggaggagtgaacacaggagtggccaagcacgtgggagatgccctgaaggagcacgccagccgcagcagcaggaagatctgcaccatcggcatcgccccctggggcgtgattgaaaatagaaatgacctggtgggcagagatgtggtggccccctaccagaccctgctgaaccccctgagcaagctgaatgtgctgaacaacctgcacagccacttcatcctggtggatgatggcaccgtgggcaagtacggggctgaggtgcggctgcggcgggagctggagaagaccatcaaccagcagaggatccacgccagaattggccagggcgtgcctgtggtggccctgatctttgagggcggccccaacgtcatcctgactgtgctggagtacctgcaggagagcccccctgtgcctgtggtggtgtgtgagggcaccggccgggctgctgacctgctggcctacatccacaagcagacagaggagggcggcaacctgcctgatgctgctgagccagacatcatcagcaccatcaagaagaccttcaactttggccagaatgaggccctgcacctgttccagaccctgatggagtgcatgaagaggaaggagctgatcaccgtcttccacatcggcagtgatgagcaccaggacattgatgtggccatcctgacagccctgctgaagggcaccaatgccagcgcctttgaccagctgatcctgaccctggcctgggacagagtggacatcgccaagaaccacgtgtttgtgtatggccagcagtggctggtgggcagcctggagcaggccatgctggatgccctggtgatggacagagtggcctttgtgaagctgctgattgaaaatggagtgtccatgcacaagttcctgaccatcccccggctggaggagctgtacaacaccaagcagggccccaccaaccccatgctgttccacctggtgagagatgtgaagcagggcaacctgcccccaggctacaagatcaccctgattgacatcggcctggtgattgagtacctgatgggcggcacctaccgctgcacctacaccaggaagcgcttccgcctcatctacaacagcctgggcggcaacaacagaagaagtggaagaaacaccagcagcagcaccccccagctgaggaagagccatgagagctttggaaacagagctgacaagaaggagaagatgaggcacaaccacttcatcaagacagcccagccctaccggcccaagattgacacagtgatggaggagggcaagaagaagaggaccaaggatgaaattgtggacattgatgatcctgagaccaagcgcttcccctaccccctgaatgagctgctgatctgggcctgcctgatgaagaggcaggtgatggcccgcttcctgtggcagcacggggaggagagcatggccaaggccctggtggcctgcaagatctaccgctccatggcctatgaggccaagcagagcgacctggtggatgacaccagcgaggagctgaagcagtacagcaatgactttggccagctggccgtggagctgctggagcagagcttccggcaggatgagaccatggccatgaagctgctgacctatgagctgaagaactggagcaacagcacctgcctgaagctggccgtgagcagccggctgcggccctttgtggcccacacctgcacccagatgctgctgagtgacatgtggatgggccgcctgaacatgaggaagaacagctggtacaaggtgatcctgagcatcctggtgcccccagccatcctgctgctggagtacaagaccaaggccgagatgagccacatcccccagagccaggatgcccaccagatgaccatggatgattctgagaacaacttccagaacatcacagaggagatccccatggaggtgttcaaggaggtgcgcatcctggacagcaatgaaggcaagaatgagatggagatccagatgaagagcaagaagctgcccatcaccaggaagttctacgccttctaccacgcccccatcgtgaagttctggttcaacaccctggcctacctgggcttcctgatgctgtacacctttgtggtgctggtgcagatggagcagctgcccagcgtgcaggagtggatcgtcatcgcctacatcttcacctacgccatcgagaaggtgcgggagatcttcatgtctgaggccggcaaggtgaaccagaagatcaaggtgtggttcagtgactacttcaacatcagtgacaccatcgccatcatctccttcttcatcggcttcggcctgcgctttggagccaagtggaactttgccaatgcctatgacaaccacgtgtttgtggccggccgcctcatctactgcctgaacatcatcttctggtacgtgcggctgctggacttcctggccgtgaaccagcaggccggcccctacgtgatgatgattggcaagatggtggccaacatgttctacatcgtggtgatcatggccctggtgctgctgagctttggagtgcccaggaaggccatcctgtacccccatgaggcccccagctggaccctggccaaggacatcgtgttccacccctactggatgatctttggagaggtgtatgcctatgaaattgatgtgtgtgccaatgacagcgtcatcccccagatctgtggccctggcacctggctgacccccttcctgcaggccgtgtacctgtttgtgcagtacatcatcatggtgaacctgctgattgccttcttcaacaacgtgtacctgcaggtgaaggccatcagcaacatcgtgtggaagtaccagcgctaccacttcatcatggcctaccacgagaagcctgtgctgcccccacccctcatcatcctgagccacatcgtgtccctcttctgctgcatctgcaagaggaggaagaaggacaagaccagtgatggccccaagctgttcctgacagaggaggaccagaagaagctgcatgactttgaggagcagtgtgtggagatgtacttcaatgagaaggatgacaagttccacagcggcagcgaggagcgcatccgggtgacctttgagcgggtggagcagatgtgcatccagatcaaggaggtgggggacagagtgaactacatcaagaggagcctgcagagcctggacagccagatcggccacctgcaggacctgagcgccctgactgtggacaccctgaagaccctgacagcccagaaggccagcgaggccagcaaggtgcacaatgagatcacccgggagctgagcatcagcaagcacctggcccagaacctgattgatgatggccctgtgcggcccagcgtgtggaagaagcacggcgtggtgaacaccctgagcagcagcctgccccagggcgacctggagagcaacaaccccttccactgcaacatcctgatgaaggatgacaaggacccccagtgcaacatcttcggccaggacctgcctgctgtgccccagaggaaggagttcaacttccctgaggccggcagcagcagcggggccctcttccccagcgctgtgagccccccagagctgcggcagaggctgcacggcgtggagctgctgaagatcttcaacaagaaccagaagctgggcagcagcagcaccagcatcccccacctgagcagcccccccaccaagttctttgtgtccacccccagccagcccagctgcaagagccacctggagaccggcaccaaggaccaggagaccgtgtgcagcaaggccacagaaggagacaacacagaatttggagcctttgtgggccaccgggacagcatggacctgcagcgcttcaaggagaccagcaacaagatcaagatcctgagcaacaacaacaccagcgagaacaccctgaagagggtgagcagcctggccggcttcacagactgccacaggaccagcatccctgtgcacagcaagcaggccgagaagatcagcagaagacccagcacagaggacacccatgaggtggacagcaaggccgccctgatcccagactggctgcaggaccggcccagcaaccgggagatgcccagcgaggagggcaccctgaatggcctgaccagccccttcaagccagccatggacaccaactactactacagcgctgtggagaggaacaacctgatgaggctgagccagagcatccccttcacccctgtgcccccaagaggagagcctgtgacagtgtaccgcctggaggagagcagccccaacatcctgaacaacagcatgagctcctggagccagctgggcctgtgtgccaagattgagttcctgagcaaggaggagatgggcggcggcctgcggcgggctgtgaaggtgcagtgcacctggagcgagcatgacatcctgaagagcggccacctgtacatcatcaagagcttcctgcctgaggtggtgaacacctggagcagcatctacaaggaggacacagtgctgcacctgtgcctgcgggagatccagcagcagagagctgcccagaagctgacctttgccttcaaccagatgaagcccaagagcatcccctacagcccccgcttcctggaggtgttcctgctgtactgccacagcgctggccagtggtttgctgtggaggagtgcatgaccggggagttcaggaagtacaacaacaacaatggagatgagatcatccccaccaacaccctggaggagatcatgctggccttcagccactggacctatgagtacaccagaggagagctgctggtgctggacctgcagggcgtgggggagaacctgacagaccccagcgtcatcaaggccgaggagaagaggagctgtgacatggtgtttggacctgccaacctgggggaggatgccatcaagaacttccgggccaagcaccactgcaacagctgctgcaggaagctgaagctgcctgacctgaagagaaatgactacaccccagacaagatcatcttcccccaggatgagcccagcgacctgaacctgcagcccggcaacagcaccaaggagagcgagagcaccaacagcgtgcggctgatgctgtag

SEQ ID NO: 194424 - DNA, 5598 bp, Artificial Sequence
  derived and/or modified sequence
atgagccagaagagctggatcgagagcaccctgaccaagcgggagtgtgtgtatattatccctagctcaaaagaccctcatcgctgccttcctggctgtcagatctgccaacaactggtgaggtgcttctgcggccgactggtcaagcagcatgcctgctttacagcaagcctcgccatgaagtattctgatgtaaaactcggcgaccactttaaccaggccatcgaagagtggagtgtggagaaacacacagagcagagccccactgacgcgtacggggtgataaacttccaaggcggatcgcactcttacagagctaaatatgtccgcttatcgtacgacactaagcctgaagtcatcttacagctgttactaaaggaatggcaaatggagctaccaaaactggtcatctcggtacatggaggaatgcagaagttcgaactgcatccaagaatcaaacagctcctcggaaagggattaatcaaggctgcagttaccaccggtgcctggatattgacaggtggtgtaaacaccggggtggcaaagcacgtgggcgatgcgctgaaagaacacgcctctcggagcagtagaaaaatttgcacaattggcatcgcaccatggggtgttatcgagaacaggaatgacttggtgggcagggatgtggttgccccataccagacactgctgaaccccctgtcaaagctcaacgtgctgaataatctgcactcacattttatactcgtggacgacggcacagtcgggaagtatggtgcggaggtgaggctccgtagagaactcgaaaaaacaatcaaccagcagaggatccacgccaggattggccagggcgtcccagttgtggcattaatttttgaagggggaccaaacgtcatcctaaccgtgttggagtacctgcaggaatctccgcctgtccctgttgttgtgtgcgaaggcacaggacgggctgcagatctacttgcttatatccacaagcagacggaggagggtggcaacttaccggatgctgccgagccagacattatcagcactattaagaagacatttaatttcggccaaaatgaggctcttcatttgtttcaaactttgatggagtgtatgaaacgcaaagagcttataaccgtattccacattggctccgatgaacaccaggacatcgatgtggccattctgacagccctccttaaggggacaaatgcgtcagctttcgaccagctgatactcacgttagcttgggaccgggtggatattgctaaaaatcatgtgtttgtatacggtcagcagtggcttgttggttcactagagcaagctatgttggacgcactcgtcatggatagggtggctttcgtgaaactgctgattgagaacggggtgtcgatgcacaaattcctaacaattccaagacttgaagaactttacaacacaaagcaagggccgaccaatcctatgttgttccatctcgtgagagacgttaagcagggcaacctacctccaggctacaaaatcacattaattgatatcgggttagtgatcgagtacctgatgggcgggacttacaggtgtacatacaccagaaagcgtttcaggcttatctacaacagcttgggaggcaacaataggaggagcggtcgtaatacctcttccagtaccccacagctgcgcaagagccatgagagcttcggaaatcgggctgacaagaaggagaagatgagacataatcatttcataaaaacagcacaaccttataggcctaaaattgacaccgtgatggaggaggggaagaaaaagcgcacgaaggatgaaatcgtagatattgacgatcctgaaacgaaaaggttcccttatcccctaaacgaattactgatctgggcgtgcctgatgaagagacaggtaatggccaggttcctatggcaacacggagaagagtctatggctaaggcacttgtggcatgtaagatttatcgttccatggcatatgaggcgaagcaatccgatctagtcgacgatacatcggaagagttaaagcagtattccaacgatttcgggcagctagccgtcgagctgctggagcagagtttcagacaggatgagactatggcgatgaaacttctgacatatgaactcaaaaactggtccaattctacatgtctgaagctcgccgtcagcagtaggctgaggccctttgttgcccacacctgtacccaaatgctactttcagacatgtggatgggccgattgaatatgcgaaaaaatagttggtacaaggtgatccttagcatcctggtaccccccgccattctgctcctggagtataagacaaaggcagagatgagccacatcccacagagccaagacgcccatcagatgacaatggacgattcagaaaacaatttccaaaatattaccgaggaaattcctatggaggtcttcaaggaggtgcgcattctcgacagtaacgaaggaaaaaatgagatggagatccagatgaaatctaagaagctgcctatcacccgcaagttttacgcattttatcacgcgcctatcgtgaaattttggtttaatacactggcttacctgggcttcctgatgctgtatactttcgtcgtgctcgtgcagatggagcaactgccttcagtccaagagtggattgtcatcgcatacattttcacatacgctattgaaaaagtcagggagatctttatgtctgaggccggcaaagtgaaccagaaaattaaagtctggttttcagactactttaatatttctgacactattgcgatcatcagctttttcatcggctttggactgagattcggcgcgaaatggaacttcgccaacgcgtacgacaatcatgtcttcgttgccggaagactaatttattgtctgaacatcattttttggtacgtacgactgctggattttctggctgttaatcagcaagcgggcccttatgtgatgatgattggcaagatggtcgctaacatgttttacattgtcgtgatcatggcactggtactgctttcattcggcgtgccaaggaaggccattctttacccacacgaagcccccagctggacactggctaaagatattgtgtttcatccttactggatgatctttggagaagtatacgcctatgagatagacgtatgtgcgaacgactctgtgatccctcagatctgtggtccagggacatggctgactccattcttgcaggcggtatacctattcgtccagtacataattatggtgaacctgctcatcgctttctttaacaacgtttacctacaggtcaaagccatttctaatatcgtgtggaaataccagcggtaccatttcatcatggcttaccacgagaaacctgtcctcccaccaccgttgatcatcctctctcacattgtaagtctgttctgctgcatctgcaagcgcagaaaaaaggataagacttccgacggccccaaactgtttctaacagaggaagaccagaaaaaactgcatgatttcgaggaacagtgcgtggagatgtacttcaacgagaaggatgacaaattccattccgggagcgaggagcgcatcagagtgaccttcgagcgcgtcgagcagatgtgcatccagattaaagaggtgggagaccgggttaactacattaagcgtagcctccagtccctagatagccaaatagggcacttacaagacctgtccgcactgactgttgatacgctgaaaaccctgactgcacaaaaagcttcggaggccagcaaggtgcacaatgaaatcacccgcgagctgtcaattagtaaacatttggcgcagaatttgattgatgatggaccagtgcgaccctctgtgtggaaaaagcatggagtcgtaaacacactgtctagctcccttccacagggagatctggaaagcaataacccctttcattgcaatatcctgatgaaagatgacaaggacccacaatgcaatatctttgggcaagatttgcccgccgtgccccagcgcaaagagtttaactttccggaggcgggaagttcatcaggcgcactgttcccatccgccgtctcacctcccgagcttcgccagcgtctgcatggcgtggaacttctgaagatttttaacaaaaatcagaaacttggttcgagctcaacaagcatccctcatctttcatcccctccgacgaagttttttgtgtcgaccccctcacagccaagctgtaagagtcacttagaaacggggaccaaagatcaggaaaccgtgtgctcaaaggccacagagggcgacaacacagagttcggagcatttgtgggccaccgggactcaatggatctccagaggttcaaagagacttcgaacaaaatcaaaatcctgtccaataataacacttcagaaaataccttaaagcgggtgagtagcctcgcagggtttaccgactgccacaggaccagcatccccgtgcactcgaagcaggctgaaaaaatatctcgaaggccctctactgaggacacgcatgaagtggactccaaagccgccttgattcccgactggctccaggatagaccttctaatcgggagatgccttctgaggaaggcacattgaatgggctaacttcgcccttcaaacccgctatggatacaaactattactattctgcggtagagcgcaacaatctgatgaggcttagtcagagtataccttttaccccagtgcctccccggggtgagcccgtcactgtgtatcgcttggaagaatctagcccaaatattctgaacaacagcatgagctcttggtcccaactcggactgtgcgcgaagattgaatttttgagcaaagaagagatggggggaggcctgcggagagcagtgaaagtgcagtgcacttggagtgaacatgatatcttgaagtcgggccacctgtatatcattaagtctttcctcccagaagttgtcaacacctggtccagcatttacaaggaagacacagtgctgcatctgtgcctccgcgagatacaacagcagcgggcggcccagaaacttactttcgcttttaaccaaatgaagccgaagtctatcccctattcaccaaggtttctggaggtatttcttctgtattgccatagtgctggacagtggttcgccgttgaagaatgtatgacaggcgagttcaggaaatataacaataacaatggtgatgagatcattcccaccaatacactcgaggaaatcatgctggccttctcccattggacttacgagtacaccaggggcgagttgctggtgctggacttacagggggtgggagagaatctcactgaccctagcgtgattaaagcggaggagaagagaagctgtgacatggtgttcggcccagctaacctgggagaagacgctatcaaaaacttcagagccaagcatcattgcaacagctgttgtcggaagttgaagctccctgatttaaaacgcaacgactacactcccgacaagataatctttccacaggacgaaccctccgacctcaatctgcagccgggcaatagcaccaaagagtccgagtccacaaacagcgtgagattaatgttgtag

SEQ ID NO: 194425 - DNA, 5598 bp, Artificial Sequence
  derived and/or modified sequence
atgtctcagaaatcctggatcgagtcaacacttactaaaagggaatgcgtgtatattattccttcttccaaagatccacaccgctgtctacccggatgccagatctgtcaacagctagtgcggtgtttttgcgggagactggtgaagcagcacgcatgctttacagctagtctggccatgaaatacagcgacgtgaagctcggcgaccatttcaaccaagcaatcgaagaatggagtgtcgagaagcacactgaacagagcccaactgacgcctatggggtaatcaatttccagggcggttctcattcttacagagcaaaatatgtccgcttatcctatgacactaagccagaggtgatattgcagctgctactcaaagaatggcagatggagctgccaaagctggtcatttcagtacacggcggaatgcagaaatttgagctgcatcccagaattaaacagctcttgggaaagggactaattaaagcagctgttacgacaggcgcatggatattgactggaggagtgaacactggtgttgcaaagcatgttggtgatgcactgaaggaacacgctagtcggtccagccgaaaaatctgcaccatagggatcgccccatggggagttattgagaatcgcaatgacctcgtgggtcgggacgtagttgcgccttaccaaaccctactaaatccgctgtccaagcttaacgttctgaacaacttgcacagccacttcatcctagtggacgacggtactgtcggaaaatatggggctgaagtaaggctgcggcgtgaactggaaaagacaataaaccagcaacgcatacacgcgagaataggccagggtgtgccagtggttgccctcatcttcgaagggggaccaaatgtgatcctgaccgtgctggagtacctgcaggagtcaccgccagtcccggtggtcgtgtgtgaaggtaccggaagagccgcagatttgctggcctatatccacaaacagactgaggagggagggaatttaccggatgcagctgagcctgatatcatttccactatcaaaaaaaccttcaatttcggacagaatgaggctctgcacctgtttcagacactcatggaatgtatgaaaaggaaggaattgataactgttttccacataggatctgacgaacaccaggacattgatgtggccattctcactgccctcttaaaaggaacgaacgctagcgcttttgatcagcttattctaacgctggcttgggatagagttgatatcgccaagaatcacgtcttcgtgtatggccagcagtggctcgtgggttccctggaacaggccatgcttgacgccttggtgatggaccgagttgccttcgtgaaactgctgatagaaaatggagtgagcatgcacaaattcttgactatacctcggctcgaagaactatacaatacaaaacagggacctaccaaccctatgctgttccacctcgtaagggatgtgaaacaggggaacctcccacccggatacaaaattacactgatcgacattggactcgtgatcgagtacctcatggggggaacctataggtgtacgtacaccaggaaacgattccggcttatctacaattccctaggcggtaataatagaagatcagggaggaataccagtagttctacaccacagctcagaaagagccacgagtctttcggcaatagggccgacaagaaggagaagatgagacacaatcacttcattaagacagctcaaccgtataggccaaaaatcgatacagtcatggaagaaggtaagaaaaaaaggactaaggacgaaatcgtggacatcgatgacccagagacaaaaaggttcccctaccccctcaatgagttattaatttgggcatgtctaatgaagcgacaagtgatggcccgtttcctttggcagcatggcgaagagagcatggctaaggccttagttgcttgtaagatctatagaagcatggcttacgaggctaaacagtcagacttggtcgacgacacctcagaggagctcaagcagtactcgaacgactttggacagctggctgtggaactgctcgagcagtcatttcgccaggacgagacgatggccatgaagctgctcacttacgagctgaagaattggtccaactctacctgcctgaagctcgcagtcagctcccgattacgtccatttgtggctcacacgtgtactcagatgttattgagcgatatgtggatgggccgtctaaacatgaggaagaatagctggtataaggtcatcctgtccatccttgttcctcccgctattttgttgttggagtacaagacgaaggccgaaatgagtcacatcccacagtcgcaagatgcccaccagatgacgatggacgattctgaaaacaatttccagaatatcactgaagagatacctatggaggtctttaaggaggttagaatcttggactcaaatgaaggaaagaacgaaatggaaatccagatgaagagtaaaaaactgccaattaccaggaaattctacgcgttttatcatgcacctattgttaaattttggtttaataccctcgcgtacctggggttcctgatgctgtacacctttgttgtgctggtgcagatggagcagttgccgtccgtgcaggagtggatcgtcatagcttacattttcacgtacgcaatagagaaggtccgcgaaatctttatgtccgaagctgggaaggtgaaccagaaaattaaggtatggttctctgactactttaatatatctgataccatcgccattatttcctttttcatcggcttcgggcttcggttcggggcaaagtggaacttcgcaaatgcctacgacaatcatgtattcgtagcaggtcgactgatttattgcttgaatattattttctggtacgtcagactcctcgacttcctggctgtgaaccagcaagcaggaccatacgttatgatgattggcaagatggtggcaaatatgttctacattgtggtgattatggccttagtcctactctcatttggcgtgccgaggaaagctattttatacccccacgaagccccaagttggacactcgcaaaagacattgtcttccatccatactggatgatattcggagaagtctatgcctacgagatcgacgtgtgcgccaatgatagcgtaatcccccagatctgcggcccaggaacctggctgacacccttcttgcaggcggtatacctcttcgtccagtatattatcatggtgaacctactgattgcgttctttaacaacgtttatctacaagtgaaggccatctcaaatatagtatggaaataccagaggtaccacttcatcatggcctatcacgaaaagcctgtcctgcctcccccactcattatcttgtcccatatcgtctcactgttctgctgcatctgtaagaggcgaaagaaagacaaaacgtccgacggaccaaaactgttcctgacagaagaggaccagaaaaaactgcacgactttgaggagcagtgcgtcgaaatgtattttaacgagaaggatgacaaatttcactcagggtccgaagaaaggataagagtgaccttcgagcgagttgagcagatgtgtatccaaatcaaggaagtgggcgatagggtgaattatattaaacgttccctccaaagcctggactcccaaataggacatttgcaggacctgtctgccctgacagtggacacactgaaaaccctgacagcccagaaagcctctgaagcttctaaggtgcacaatgagataacccgagagctcagcatctcaaaacacctggctcaaaacctgattgacgatggacctgtaaggccctctgtgtggaaaaagcacggagttgtgaatacgttgagttcttcactgccacagggtgaccttgaaagcaacaacccctttcactgtaatattctgatgaaggatgataaggatcctcagtgcaacatcttcggccaggacctcccggctgtgccacagaggaaagagtttaattttccagaagctggatcaagctccggggctctgtttcctagtgcagtatctcctccggagctgcgccaacgcctgcatggcgtagaactcctaaaaatcttcaacaagaatcagaagctgggttccagcagtactagcattccacacctgtcgtcaccccctacaaagttctttgtgagcacccccagccagccctcatgcaaaagccacctggaaacagggacaaaggaccaagaaaccgtatgttctaaagccactgagggagataataccgagttcggtgcgttcgttggccatagggactcaatggatctccagcgcttcaaagagacgagcaataagatcaagatcctatcaaataataatacctccgagaacaccttaaagcgcgtgtcctctctcgccggattcaccgactgtcacaggacttctattcctgtgcacagtaagcaggcagaaaagattagccgaaggccttccacggaagatacacatgaggtggacagtaaggcagccctgatcccagattggttacaggataggccctctaatcgggagatgccatcggaggagggcaccctgaacggactaaccagcccgttcaagcccgctatggatacgaattactattattctgctgtagagcgcaataacttgatgcggctgagccagagcattccattcaccccagtaccaccacgcggagagcccgtgaccgtttacaggctggaagaaagctcacctaacatcctcaacaattcaatgtctagttggtcccagctggggctttgcgcaaaaatcgaatttctgagcaaggaggagatgggtgggggactgcgtcgggctgtgaaggtgcaatgcacttggtcagagcacgacattctgaaatccggtcacctgtacatcatcaaaagcttcctgccagaagtagtgaacacctggtcatccatctataaggaagatactgtcctacatttgtgcttgagggaaatccagcagcagcgcgctgcacaaaaacttacattcgcgtttaatcaaatgaagcctaagagcatcccgtatagcccacgcttcctggaagtgttccttctgtattgtcattcggccggtcaatggtttgcggtcgaggaatgtatgacaggcgaatttcgcaagtacaataataacaacggcgacgagataatccccactaatacccttgaagaaatcatgctcgcgttcagtcactggacctacgagtatacccggggagaattgctggtgctagacttacagggtgttggggagaatctgacagatccatcagttatcaaggcggaggaaaaaaggagctgtgacatggtgttcggacctgctaatcttggcgaggatgctattaaaaattttcgcgcaaagcaccattgtaactcatgctgccgcaagttaaagctacctgatctcaagcgcaatgattacactccagacaagattattttccctcaggacgaaccatcagatttaaacctgcagccaggcaacagcacgaaagaatccgaaagcaccaattccgtcagattgatgctctag

SEQ ID NO: 194426 - DNA, 7263 bp, Artificial Sequence
  derived and/or modified sequence
gcgccgctcacgtggtccgtccccagccccgtcgccggcggaggcgggcgcgggcgcgtccctgtggccagtcacccggaggagttggtcgcacaattatgaaagactcggcttctgctgctagcgccggagctgagttagttctgagaaggtttccctgggcgttccttgtccggcggcctctgctgccgcctccggagacgcttcccgatagatggctacaggccgcggaggaggaggaggtggagttgctgcccttccggagtccgccccgtgaggagaatgtcccagaaatcctggatagaaagcactttgaccaagagggaatgtgtatatattataccaagttccaaggaccctcacagatgccttccaggatgtcaaatttgtcagcaactcgtcaggtgtttttgtggtcgcttggtcaagcaacatgcttgttttactgcaagtcttgccatgaaatactcagatgtgaaattgggtgaccattttaatcaggcaatagaagaatggtctgtggaaaagcatacagaacagagcccaacggatgcttatggagtcataaattttcaagggggttctcattcctacagagctaagtatgtgaggctatcatatgacaccaaacctgaagtcattctgcaacttctgcttaaagaatggcaaatggagttacccaaacttgttatctctgtacatgggggcatgcagaaatttgagcttcacccacgaatcaagcagttgcttggaaaaggtcttattaaagctgcagttacaactggagcctggattttaactggaggagtaaacacaggtgtggcaaaacatgttggagatgccctcaaagaacatgcttccagatcatctcgaaagatttgcactatcggaatagctccatggggagtgattgaaaacagaaatgatcttgttgggagagatgtggttgctccttatcaaaccttattgaaccccctgagcaaattgaatgttttgaataatctgcattcccatttcatattggtggatgatggcactgttggaaagtatggggcggaagtcagactgagaagagaacttgaaaaaactattaatcagcaaagaattcatgctaggattggccagggtgtccctgtggtggcacttatatttgagggtgggccaaatgttatcctcacagttcttgaataccttcaggaaagcccccctgttccagtagttgtgtgtgaaggaacaggcagagctgcagatctgctagcgtatattcataaacaaacagaagaaggagggaatcttcctgatgcagcagagcccgatattatttccactatcaaaaaaacatttaactttggccagaatgaagcacttcatttatttcaaacactgatggagtgcatgaaaagaaaggagcttatcactgttttccatattgggtcagatgaacatcaagatatagatgtagcaatacttactgcactgctaaaaggtactaatgcatctgcatttgaccagcttatccttacattggcatgggatagagttgacattgccaaaaatcatgtatttgtttatggacagcagtggctggttggatccttggaacaagctatgcttgatgctcttgtaatggatagagttgcatttgtaaaacttcttattgaaaatggagtaagcatgcataaattccttaccattccgagactggaagaactttacaacactaaacaaggtccaactaatccaatgctgtttcatcttgttcgagacgtcaaacagggaaatcttcctccaggatataagatcactctgattgatataggacttgttattgaatatctcatgggaggaacctacagatgcacctatactaggaaacgttttcgattaatatataatagtcttggtggaaataatcggaggtctggccgaaatacctccagcagcactcctcagttgcgaaagagtcatgaatcttttggcaatagggcagataaaaaggaaaaaatgaggcataaccatttcattaagacagcacagccctaccgaccaaagattgatacagttatggaagaaggaaagaagaaaagaaccaaagatgaaattgtagacattgatgatccagaaaccaagcgctttccttatccacttaatgaacttttaatttgggcttgccttatgaagaggcaggtcatggcccgttttttatggcaacatggtgaagaatcaatggctaaagcattagttgcctgtaagatctatcgttcaatggcatatgaagcaaagcagagtgacctggtagatgatacttcagaagaactaaaacagtattccaatgattttggtcagttggccgttgaattattagaacagtccttcagacaagatgaaaccatggctatgaaattgctcacttatgaactgaagaactggagtaattcaacctgccttaagttagcagtttcttcaagacttagaccttttgtagctcacacctgtacacaaatgttgttatctgatatgtggatgggaaggctgaatatgaggaaaaattcctggtacaaggtcatactaagcattttagttccacctgccatattgctgttagagtataaaactaaggctgaaatgtcccatatcccacaatctcaagatgctcatcagatgacaatggatgacagcgaaaacaactttcagaacataacagaagagatccccatggaagtgtttaaagaagtacggattttggatagtaatgaaggaaagaatgagatggagatacaaatgaaatcaaaaaagcttccaattacgcgaaagttttatgccttttatcatgcaccaattgtaaaattctggtttaacacgttggcatatttaggatttctgatgctttatacatttgtggttcttgtacaaatggaacagttaccttcagttcaagaatggattgttattgcttatatttttacttatgccattgagaaagtccgtgagatctttatgtctgaagctgggaaagtaaaccagaagattaaagtatggtttagtgattacttcaacatcagtgatacaattgccataatttctttcttcattggatttggactaagatttggagcaaaatggaactttgcaaatgcatatgataatcatgtttttgtggctggaagattaatttactgtcttaacataatattttggtatgtgcgtttgctagattttctagctgtaaatcaacaggcaggaccttatgtaatgatgattggaaaaatggtggccaatatgttctacattgtagtgattatggctcttgtattacttagttttggtgttcccagaaaggcaatactttatcctcatgaagcaccatcttggactcttgctaaagatatagtttttcacccatactggatgatttttggtgaagtttatgcatacgaaattgatgtgtgtgcaaatgattctgttatccctcaaatctgtggtcctgggacgtggttgactccatttcttcaagcagtctacctctttgtacagtatatcattatggttaatcttcttattgcatttttcaacaatgtgtatttacaagtgaaggcaatttccaatattgtatggaagtaccagcgttatcattttattatggcttatcatgagaaaccagttctgcctcctccacttatcattcttagccatatagtttctctgttttgctgcatatgtaagagaagaaagaaagataagacttccgatggaccaaaacttttcttaacagaagaagatcaaaagaaacttcatgattttgaagagcagtgtgttgaaatgtatttcaatgaaaaagatgacaaatttcattctgggagtgaagagagaattcgtgtcacttttgaaagagtggaacagatgtgcattcagattaaagaagttggagatcgtgtcaactacataaaaagatcattacaatcattagattctcaaattggccatttgcaagatctttcagccctgacggtagatacattaaaaacactcactgcccagaaagcgtcggaagctagcaaagttcataatgaaatcacacgagaactgagcatttccaaacacttggctcaaaaccttattgatgatggtcctgtaagaccttctgtatggaaaaagcatggtgttgtaaatacacttagctcctctcttcctcaaggtgatcttgaaagtaataatccttttcattgtaatattttaatgaaagatgacaaagatccccagtgtaatatatttggtcaagacttacctgcagtaccccagagaaaagaatttaattttccagaggctggttcctcttctggtgccttattcccaagtgctgtttcccctccagaactgcgacagagactacatggggtagaactcttaaaaatatttaataaaaatcaaaaattaggcagttcatctactagcataccacatctgtcatccccaccaaccaaattttttgttagtacaccatctcagccaagttgcaaaagccacttggaaactggaaccaaagatcaagaaactgtttgctctaaagctacagaaggagataatacagaatttggagcatttgtaggacacagagatagcatggatttacagaggtttaaagaaacatcaaacaagataaaaatactatccaataacaatacttctgaaaacactttgaaacgagtgagttctcttgctggatttactgactgtcacagaacttccattcctgttcattcaaaacaagcagaaaaaatcagtagaaggccatctaccgaagacactcatgaagtagattccaaagcagctttaataccggattggttacaagatagaccatcaaacagagaaatgccatctgaagaaggaacattaaatggtctcacttctccatttaagccagctatggatacaaattactattattcagctgtggaaagaaataacttgatgaggttatcacagagcattccatttacacctgtgcctccaagaggggagcctgtcacagtgtatcgtttggaagagagttcacccaacatactaaataacagcatgtcttcttggtcacaactaggcctctgtgccaaaatagagtttttaagcaaagaggagatgggaggaggtttacgaagagctgtcaaagtacagtgtacctggtcagaacatgatatcctcaaatcagggcatctttatattatcaaatcttttcttccagaggtggttaatacatggtcaagtatttacaaagaagatacagttctgcatctctgtctgagagaaattcaacaacagagagcagcacaaaagcttacgtttgcctttaatcaaatgaaacccaaatccataccatattctccaaggttccttgaagttttcctgctgtattgccattcagcaggacagtggtttgctgtggaagaatgtatgactggagaatttagaaaatacaacaataataatggagatgagattattccaactaatactctggaagagatcatgctagcctttagccactggacttacgaatatacaagaggggagttactggtacttgatttgcaaggtgttggtgaaaatttgactgacccatctgtgataaaagcagaagaaaagagatcctgtgatatggtttttggcccagcaaatctaggagaagatgcaattaaaaacttcagagcaaaacatcactgtaattcttgctgtagaaagcttaaacttccagatctgaagaggaatgattatacgcctgataaaattatatttcctcaggatgagccttcagatttgaatcttcagcctggaaattccaccaaagaatcagaatcaactaattctgttcgtctgatgttataatattaatattactgaatcattggttttgcctgcacctcacagaaatgttactgtgtcacttttccctcgggaggaaattgtttggtaatatagaaaggtgtatgcaagttgaatttgctgactccagcacagttaaaaggtcaatattcttttgacctgattaatcagtcagaaagtccctataggatagagctggcagctgagaaattttaaaggtaattgataattagtatttataactttttaaagggctctttgtatagcagaggatctcatttgactttgttttgatgagggtgatgctctctcttatgtggtacaataccattaaccaaaggtaggtgtccatgcagattttattggcagctgttttattgccattcaactagggaaatgaagaaatcacgcagccttttggttaaatggcagtcaaaattttcctcagtgtatttagtgtgttcagtgatgatatcactggttcccaactagatgcttgttggccacgggaagggaaatgacttgttctaattctaggttcacagaggtatgagaagcctgaactgaagaccattttcaagagggacggtatttatgaatcagggttaggctccatatttaaagatagagccagtttttttttttaaatagaacccaaattgtgtaaaaatgttaattgggttttttaaacattgttttatcaagtcactgttaagtagaagaaagccatggtaaactgatacataacctaaattataaaagcagaaacctaactcactcgtcaagggaagttaccttttgaggaaagttaaagtacttttttccctatctgtatctatagcaacaacccagaacttacaaacttctccaaagattttattgattgttatatcaaatcagaatgtaaacatgaactcttgcatatatttaaaattgtgttggaacatttgaacatgaatgctgtttgtggtacttaagaaattaattcagttggattatcattatgtgatactggcagattgcagtgcaaccttatgccaataaaatgtaatttaacagccccagatattgttgaatattcaacaataacaagaaaagcttttcatctaagttttatgctttaattttttttctttttttttctttttcttttgtttccttggtactaattttaatttttatttggaagggagcagtataaagcttatttgtatttagtagtgtatctcatagatacagacaaggcaagagatgataagctgtttaaatagtgtttaatattgattgggggtggggagaaagaaaaagtgtattacttaaagatactatatacgttttgtatatcattaaatctttaaaagaaatgaaataaatttattgtttaca

SEQ ID NO: 194427 - protein, 900 aa, Artificial Sequence
  derived and/or modified sequence
MSSKESCGKKETSQRKDTTTSSPNFGEKDKKERKTPASSTSSSSIRSVSSEKRKLKSDHTDVLYYNIKRRQGLKRLSVEIDTLRRRPKIGSSSQRPIKLKEASYSNDNQIILQSPSSNGTKKDIHKCVDFKPKDIKLTNAGSKLDHGIKSLSSPKIASDVKPKAEGQASENKWSHLLVQREKMKELKKGRNSKFRDNSEKCVLEKWKRNQFSQDYNSNKIIKEPLGSRRQKISFKIPIKSRDTLQKLVEENVFNIDSNNSKTKQEEREYLESSQVSLNVTRQKTEHLLSDFTYKRTVHEWKRKHHYDHQESNDSHSRENLTQSFEAPCCSVSSESIQDADQEMQIVEELHAARVGKSVDLPGELMSMEIDLEDDVHSSSANNTSDRKLLIVIDTNILMNHLKFVRILKTTEVPGFDKLVLIIPWVVMQELDRMKEGKLLKRAQHKAIPAVHFINDSLKNQDRKLWGQSIQLASQKHYGLSDENNDDRVLKCCLQHQELFPCSFVILCTDDRNLRNKGLISGVKSLSKEELSAELLHLSLNTDVCHQPCIPKQQLKAETTPLKESYKEESTNSGLSILLESIVSDLEKSLGTGLSSILETEMKIAFGNLWMEILYLKPPWTLLHLLQCFKKHWLAVFGLVMEKNLLLTIESLYKNLRKANKAVDFTTVKFLLQDSRSLLHAFSTRSNYDGILPQTFAQVNNLLQTFAEVKTKLKPNSSENTVTKKQEGTSLKNSHNQEITVFSSSHLPQPSRHQEIWSILESVWITIYQNSTDVFQRLGSNSALTTSNIASFEEAFICLQKLMAAVRDILEGIQRILAPNSNYQDVETLYNFLIKYEVNKNVKFTAQEIYDCVSQTEYREKLTIGCRQLVEMEYTMQQCNASVYMEAKNRGWCEDMLNYRI

SEQ ID NO: 194428 - protein, 160 aa, Artificial Sequence
  derived and/or modified sequence
MSSKESCGKKETSQRKDTTTSSPNFGEKDKKERKTPASSTSSSSIRSVSSEKRKLKSDHTDVLYYNIKRRQGLKRLSVEIDTLRRRPKIGSSSQRPIKLKEASYSNDNQIILQSPSSNGTKKDIHKCVDFKPKDIKLTNAGSKLDHGIKSLSSPKIASDV

SEQ ID NO: 194429 - DNA, 2703 bp, Artificial Sequence
  derived and/or modified sequence
atgagcagcaaggagagctgcggcaagaaggagaccagccagagaaaggacaccaccaccagcagccccaacttcggcgagaaggacaagaaggagagaaagacccccgccagcagcaccagcagcagcagcatcagaagcgtgagcagcgagaagagaaagctgaagagcgaccacaccgacgtgctgtactacaacatcaagagaagacagggcctgaagagactgagcgtggagatcgacaccctgagaagaagacccaagatcggcagcagcagccagagacccatcaagctgaaggaggccagctacagcaacgacaaccagatcatcctgcagagccccagcagcaacggcaccaagaaggacatccacaagtgcgtggacttcaagcccaaggacatcaagctgaccaacgccggcagcaagctggaccacggcatcaagagcctgagcagccccaagatcgccagcgacgtgaagcccaaggccgagggccaggccagcgagaacaagtggagccacctgctggtgcagagagagaagatgaaggagctgaagaagggcagaaacagcaagttcagagacaacagcgagaagtgcgtgctggagaagtggaagagaaaccagttcagccaggactacaacagcaacaagatcatcaaggagcccctgggcagcagaagacagaagatcagcttcaagatccccatcaagagcagagacaccctgcagaagctggtggaggagaacgtgttcaacatcgacagcaacaacagcaagaccaagcaggaggagagagagtacctggagagcagccaggtgagcctgaacgtgaccagacagaagaccgagcacctgctgagcgacttcacctacaagagaaccgtgcacgagtggaagagaaagcaccactacgaccaccaggagagcaacgacagccacagcagagagaacctgacccagagcttcgaggccccctgctgcagcgtgagcagcgagagcatccaggacgccgaccaggagatgcagatcgtggaggagctgcacgccgccagagtgggcaagagcgtggacctgcccggcgagctgatgagcatggagatcgacctggaggacgacgtgcacagcagcagcgccaacaacaccagcgacagaaagctgctgatcgtgatcgacaccaacatcctgatgaaccacctgaagttcgtgagaatcctgaagaccaccgaggtgcccggcttcgacaagctggtgctgatcatcccctgggtggtgatgcaggagctggacagaatgaaggagggcaagctgctgaagagagcccagcacaaggccatccccgccgtgcacttcatcaacgacagcctgaagaaccaggacagaaagctgtggggccagagcatccagctggccagccagaagcactacggcctgagcgacgagaacaacgacgacagagtgctgaagtgctgcctgcagcaccaggagctgttcccctgcagcttcgtgatcctgtgcaccgacgacagaaacctgagaaacaagggcctgatcagcggcgtgaagagcctgagcaaggaggagctgagcgccgagctgctgcacctgagcctgaacaccgacgtgtgccaccagccctgcatccccaagcagcagctgaaggccgagaccacccccctgaaggagagctacaaggaggagagcaccaacagcggcctgagcatcctgctggagagcatcgtgagcgacctggagaagagcctgggcaccggcctgagcagcatcctggagaccgagatgaagatcgccttcggcaacctgtggatggagatcctgtacctgaagcccccctggaccctgctgcacctgctgcagtgcttcaagaagcactggctggccgtgttcggcctggtgatggagaagaacctgctgctgaccatcgagagcctgtacaagaacctgagaaaggccaacaaggccgtggacttcaccaccgtgaagttcctgctgcaggacagcagaagcctgctgcacgccttcagcaccagaagcaactacgacggcatcctgccccagaccttcgcccaggtgaacaacctgctgcagaccttcgccgaggtgaagaccaagctgaagcccaacagcagcgagaacaccgtgaccaagaagcaggagggcaccagcctgaagaacagccacaaccaggagatcaccgtgttcagcagcagccacctgccccagcccagcagacaccaggagatctggagcatcctggagagcgtgtggatcaccatctaccagaacagcaccgacgtgttccagagactgggcagcaacagcgccctgaccaccagcaacatcgccagcttcgaggaggccttcatctgcctgcagaagctgatggccgccgtgagagacatcctggagggcatccagagaatcctggcccccaacagcaactaccaggacgtggagaccctgtacaacttcctgatcaagtacgaggtgaacaagaacgtgaagttcaccgcccaggagatctacgactgcgtgagccagaccgagtacagagagaagctgaccatcggctgcagacagctggtggagatggagtacaccatgcagcagtgcaacgccagcgtgtacatggaggccaagaacagaggctggtgcgaggacatgctgaactacagaatctag

SEQ ID NO: 194430 - DNA, 483 bp, Artificial Sequence
  derived and/or modified sequence
atgagcagcaaggagagctgcggcaagaaggagaccagccagagaaaggacaccaccaccagcagccccaacttcggcgagaaggacaagaaggagagaaagacccccgccagcagcaccagcagcagcagcatcagaagcgtgagcagcgagaagagaaagctgaagagcgaccacaccgacgtgctgtactacaacatcaagagaagacagggcctgaagagactgagcgtggagatcgacaccctgagaagaagacccaagatcggcagcagcagccagagacccatcaagctgaaggaggccagctacagcaacgacaaccagatcatcctgcagagccccagcagcaacggcaccaagaaggacatccacaagtgcgtggacttcaagcccaaggacatcaagctgaccaacgccggcagcaagctggaccacggcatcaagagcctgagcagccccaagatcgccagcgacgtgtag

SEQ ID NO: 194431 - DNA, 2703 bp, Artificial Sequence
  derived and/or modified sequence
atgtcttccaaagagagctgcggtaagaaggagacaagccagcgcaaagatacaacaacttcttctccgaactttggggaaaaggacaagaaggaaaggaaaacccctgcatccagtacctcttcctcatccattcggtcggtttcatcagaaaaacgaaaactaaagtctgaccacactgacgtgctttattacaatatcaaacgccggcagggcctcaagcgcctttccgttgagatcgataccctgcgtcgccgccccaagattggaagtagcagccagagaccgataaaactgaaagaggcgtcctatagtaacgacaaccagatcatactccagagtcccagttccaatggaaccaagaaggacatccacaaatgcgttgactttaaacccaaggatatcaagttgaccaacgcaggttctaagctggaccacggtattaaatccttgagttcccctaaaattgcatccgacgtgaagcctaaagctgaaggtcaggcctcagagaataagtggagccaccttttggtgcagcgggagaaaatgaaagaacttaaaaagggccggaactctaaattccgggacaatagtgagaaatgtgtgcttgagaagtggaaacgcaaccagttttctcaggattataactcaaacaagataatcaaggaaccactgggttctcgcagacagaaaatttccttcaaaatccccattaagagcagggacaccctgcagaaactggtggaggaaaacgtctttaatattgacagtaataactccaagacaaaacaagaagaacgcgaataccttgagagctctcaagtgagcctgaatgtgacgagacagaaaaccgaacatctgctgtctgactttacctacaaacgcaccgtgcacgagtggaaaagaaagcaccactatgatcatcaagagtctaacgatagtcattcccgtgagaacctgactcaaagttttgaggcaccatgttgcagcgtttcctcagagtccatacaggacgctgatcaggagatgcagatcgtggaggaactgcatgctgccagggttggtaagtctgtggacctcccgggtgagctcatgtctatggaaattgatctcgaggatgatgtccactccagttccgctaacaacaccagtgatagaaagctccttatcgtcattgataccaatattctcatgaatcatctaaagttcgttcgaatcctgaagactacagaggtgcctggctttgacaagctggttctaattattccttgggtggtcatgcaagaattggacaggatgaaagaaggtaagctgctaaagagagcacagcacaaagcgatcccggccgtgcattttattaatgactcacttaaaaaccaagatcggaaactgtgggggcagtccattcagctggcaagtcagaagcactacggcctctccgatgagaataatgacgaccgagtgctgaagtgttgcctgcagcaccaggaattgttcccctgcagctttgtcattctgtgtacagacgacagaaacctgcggaacaagggattgatctctggggttaagtccttgagcaaggaggagcttagcgccgaactacttcatctgagtctcaatacagacgtctgtcaccagccatgcattcccaagcagcagctcaaggccgagacaacccccctgaaagagtcctacaaagaagaatccaccaatagcggcctgtcgatcctccttgagtccatcgtgtctgacctcgaaaagagcctcggcactggcctgtctagcatcctagagaccgagatgaaaatagcttttggcaatttgtggatggaaattctgtatctgaagcccccttggactctcctgcacctgcttcaatgcttcaaaaaacattggctagcggtcttcggtcttgtgatggagaagaatctgctactgacaatcgaatcattatacaagaacctgagaaaagccaacaaggctgtggacttcactaccgttaagttcctgttgcaggattcccggtcgctgctacacgcatttagcacaagatcaaactatgacggtatactgccacagaccttcgcacaggtcaataacctgctgcagacctttgctgaagtgaagaccaaacttaagcctaacagctctgaaaacacagtcaccaagaagcaggaaggaacttccctgaagaacagccacaaccaggagattacagtgttctcctccagccacctgccacaaccatctaggcaccaggagatttggtcaatcctggagtctgtgtggatcacgatttaccagaactcaaccgatgtgtttcaacgccttggctccaattcggcactgacaacatctaacatcgcctcgttcgaggaggcgttcatctgtcttcagaagctgatggccgccgtcagagacatcctggagggcatacagaggatcctggctccgaattcaaattaccaggacgttgaaactctgtataacttcctgattaaatacgaggttaataagaatgtgaagtttactgctcaggagatttacgattgcgtgtctcagactgaatatagagaaaagttaaccattggctgtcgccagctggttgaaatggaatatacaatgcagcagtgcaatgcctccgtatatatggaagccaaaaatcggggatggtgtgaagacatgttgaattatcggatatag

SEQ ID NO: 194432 - DNA, 2703 bp, Artificial Sequence
  derived and/or modified sequence
atgagttctaaagagagctgcggaaaaaaagaaacatcccagcggaaagacactacaactagctccccgaactttggcgaaaaggacaagaaagagagaaagactcccgcatccagcacaagctcctcctccatcaggagcgtcagttcagagaaacgtaagttgaagtcagaccacaccgacgtactttactacaatatcaaaagaaggcaggggttaaaacggctgtctgtggagattgataccctacgacggcgtccaaagatcggatcatcgtctcaacggccaattaagctcaaagaagctagttactcaaacgacaatcagatcattctgcaatcacccagctcaaacggaacaaagaaagacattcataagtgtgttgattttaagccgaaggatattaagctgactaacgcggggagcaaactggatcacggcattaaaagtctgagctcaccgaagattgccagcgacgtaaaaccaaaagccgaaggacaggctagtgagaataagtggtcacacctgctcgtccaaagggagaagatgaaagaactgaaaaagggaaggaactctaagtttagggataacagtgagaagtgcgttctcgagaaatggaaaagaaatcagttttcccaggattacaattcaaacaagatcattaaggaacccttgggcagccgcagacagaagattagtttcaagattccaatcaaatcccgcgacacgcttcagaagctggtggaggaaaacgttttcaatattgatagtaacaattctaagacgaaacaggaggagagagagtatttagagagctcccaggtgagtcttaacgtcaccaggcagaaaactgagcacctgctttcggacttcacctataagagaacagtccatgaatggaaacgaaagcaccattacgatcatcaggagtctaacgacagccacagtcgagaaaaccttacccagtcttttgaagcgccatgctgcagtgtatcatcagaatcaattcaggatgcggaccaggagatgcagattgttgaggagctacatgccgccagagtaggaaaaagcgtggatttacccggcgaactgatgagcatggagatcgacctggaagacgacgtccacagttcttccgccaataatacctccgatagaaagctgttgattgtgatcgatacgaacatcctgatgaatcacctgaagttcgttcgaattctgaaaaccacggaagtgcccgggtttgataagctggtgctgatcataccctgggtggttatgcaggagttagacagaatgaaagagggaaagttgttgaagcgagctcaacataaggcaatccccgctgtccactttattaatgatagtttaaagaatcaagatagaaaattgtgggggcagagcatccaactcgcttcccagaagcattatggtctgtctgatgagaacaatgacgacagagtcctcaagtgctgcctgcaacaccaggagttgtttccctgttccttcgtgatactttgtactgatgataggaacctgagaaacaagggcctgattagtggagtgaagtctctgtccaaggaggaactcagcgcggagctgctccacctgtccctgaatacggatgtctgccatcagccctgtattcccaaacagcagctgaaagcggaaaccacccctctgaaggaaagttacaaggaagagagtaccaattccggcctgtctattttgttagaatctattgtgtcagatctggaaaagagcctcggcactgggctgagtagtattctcgagaccgaaatgaagatagccttcgggaacttgtggatggagattctctacctcaagccaccatggacccttcttcatctcctgcaatgctttaaaaagcactggctggccgtttttggtctcgttatggaaaagaatctcctgctgaccattgagtcactgtacaagaatctgaggaaggccaacaaagccgtcgatttcaccacagtgaaatttctgctgcaggacagtcgatcactactgcacgccttcagtactagaagcaactacgacggcattctgccccagacctttgcccaggttaataacttgctccagacgtttgccgaggttaagaccaaactgaagcctaattcaagcgagaacaccgtgactaagaagcaggagggaacctctctgaaaaacagtcacaaccaggagataaccgttttctcctcttcgcacttgccgcagccttcccggcaccaggagatttggagcatccttgaaagtgtctggatcacgatctatcagaactcaacggacgtgttccagcgactgggcagcaatagtgccctcactacttctaatatcgctagcttcgaggaggcttttatttgccttcaaaagcttatggctgcggtacgggacatcctggagggcatccagaggattctggcacctaatagcaactaccaggatgtggagactctgtacaacttcctgatcaagtatgaagtgaacaagaatgtaaaattcactgcccaggaaatttacgactgcgtgtcacaaactgagtacagggagaagctgactatcggatgtcgccagttggtcgaaatggaatataccatgcagcaatgtaatgctagtgtctatatggaagcgaaaaacagaggatggtgcgaggacatgctgaattaccgtatttag

SEQ ID NO: 194433 - DNA, 483 bp, Artificial Sequence
  derived and/or modified sequence
atgtccagcaaggaatcttgcgggaaaaaggaaacatcccagagaaaggacaccacaacatcctcccctaacttcggggagaaagacaagaaggagagaaaaacacctgccagttctacttcaagcagctccatacgttccgtcagctccgaaaaaaggaaattaaagagcgaccataccgatgtgctgtactacaacatcaagaggcgccaaggtctcaaacggctgtccgtggaaatagacaccctccggcgccggccaaaaatcggtagttcatcgcagcggcctattaagctgaaggaggcctcatacagtaacgacaaccagatcattctgcagtcaccatcgagtaatggcactaagaaagatatccacaaatgtgtggatttcaaacccaaggacataaagcttacaaacgctggctccaagttggaccacggtatcaagtcgctctcttcccctaaaattgcaagcgatgtttag

SEQ ID NO: 194434 - DNA, 2703 bp, Artificial Sequence
  derived and/or modified sequence
atgagcagcaaggagagctgtgggaagaaggagaccagccagaggaaggacaccaccaccagcagccccaactttggagagaaggacaagaaggagaggaagaccccagccagcagcaccagcagcagcagcatccgctctgtgagcagcgagaagaggaagctgaagagtgaccacacagatgtgctgtactacaacatcaagaggcggcagggcctgaagaggctgtctgtggagattgacaccctgcggcggcggcccaagattggcagcagcagccagaggcccatcaagctgaaggaggccagctacagcaatgacaaccagatcatcctgcagagccccagcagcaatggcaccaagaaggacatccacaagtgtgtggacttcaagcccaaggacatcaagctgaccaatgccggcagcaagctggaccacggcatcaagagcctgagcagccccaagatcgccagtgatgtgaagcccaaggccgagggccaggccagcgagaacaagtggagccacctgctggtgcagcgggagaagatgaaggagctgaagaagggcaggaacagcaagttccgggacaacagcgagaagtgtgtgctggagaagtggaagaggaaccagttcagccaggactacaacagcaacaagatcatcaaggagcccctgggcagccggcggcagaagatctccttcaagatccccatcaagagccgggacaccctgcagaagctggtggaggagaatgtgttcaacatcgacagcaacaacagcaagaccaagcaggaggagcgggagtacctggagagcagccaggtgtccctgaatgtgacccggcagaagacagagcacctgctgagtgacttcacctacaagaggacagtgcatgagtggaagaggaagcaccactatgaccaccaggagagcaatgacagccacagccgggagaacctgacccagagctttgaggccccctgctgcagcgtgtcctctgagagcatccaggatgctgaccaggagatgcagatcgtggaggagctgcatgctgcccgggtgggcaagtctgtggacctgcctggagagctgatgtccatggagattgacctggaggatgatgtgcacagcagcagcgccaacaacaccagtgacaggaagctgctgattgtcatcgacaccaacatcctgatgaaccacctgaagtttgtgcgcatcctgaagaccacagaggtgcccggctttgacaagctggtgctgatcatcccctgggtggtgatgcaggagctggacaggatgaaggagggcaagctgctgaagagggcccagcacaaggccatcccagctgtgcacttcatcaatgacagcctgaagaaccaggacaggaagctgtggggccagagcatccagctggccagccagaagcactacggcctgagtgatgagaacaatgatgacagagtgctgaagtgctgcctgcagcaccaggagctgttcccctgcagctttgtgatcctgtgcacagatgacaggaacctgaggaacaagggcctcatcagcggcgtgaagagcctgagcaaggaggagctgtctgctgagctgctgcacctgagcctgaacacagatgtgtgccaccagccctgcatccccaagcagcagctgaaggccgagaccacccccctgaaggagagctacaaggaggagagcaccaacagcggcctgagcatcctgctggagagcatcgtgtctgacctggagaagagcctgggcaccggcctgagcagcatcctggagacagagatgaagatcgcctttggaaacctgtggatggagatcctgtacctgaagccaccctggaccctgctgcacctgctgcagtgcttcaagaagcactggctggccgtgtttggcctggtgatggagaagaacctgctgctgaccatcgagagcctgtacaagaacctgaggaaggccaacaaggctgtggacttcaccaccgtgaagttcctgctgcaggacagccgcagcctgctgcacgccttcagcaccaggagcaactatgatggcatcctgccccagacctttgcccaggtgaacaacctgctgcagacctttgctgaggtgaagaccaagctgaagcccaacagcagcgagaacacagtgaccaagaagcaggagggcaccagcctgaagaacagccacaaccaggagatcaccgtcttcagcagcagccacctgccccagcccagccgccaccaggagatctggagcatcctggagagcgtgtggatcaccatctaccagaacagcacagatgtgttccagaggctgggcagcaacagcgccctgaccaccagcaacatcgccagctttgaggaggccttcatctgcctgcagaagctgatggctgctgtgcgggacatcctggagggcatccagaggatcctggcccccaacagcaactaccaggatgtggagaccctgtacaacttcctgatcaagtatgaggtgaacaagaatgtgaagttcaccgcccaggagatctatgactgtgtgtcccagacagagtaccgggagaagctgaccatcggctgccggcagctggtggagatggagtacaccatgcagcagtgcaatgcctctgtgtacatggaggccaagaacagaggctggtgtgaggacatgctgaactaccgcatctag

SEQ ID NO: 194435 - DNA, 483 bp, Artificial Sequence
  derived and/or modified sequence
atgagcagcaaggagagctgtgggaagaaggagaccagccagaggaaggacaccaccaccagcagccccaactttggagagaaggacaagaaggagaggaagaccccagccagcagcaccagcagcagcagcatccgctctgtgagcagcgagaagaggaagctgaagagtgaccacacagatgtgctgtactacaacatcaagaggcggcagggcctgaagaggctgtctgtggagattgacaccctgcggcggcggcccaagattggcagcagcagccagaggcccatcaagctgaaggaggccagctacagcaatgacaaccagatcatcctgcagagccccagcagcaatggcaccaagaaggacatccacaagtgtgtggacttcaagcccaaggacatcaagctgaccaatgccggcagcaagctggaccacggcatcaagagcctgagcagccccaagatcgccagtgatgtgtag

SEQ ID NO: 194436 - DNA, 2703 bp, Artificial Sequence
  derived and/or modified sequence
atgagcagcaaggagagctgcggcaagaaggagaccagccagcggaaggacacaacaactagttctcctaatttcggtgagaaggataagaaggagaggaagaccccagcctccagcacatcctccagttcaatcaggtctgttagtagtgagaaacgcaaactcaaatctgaccataccgatgtcctttactacaacatcaaacgcagacaggggctgaagaggctgtccgttgagattgacacactgcgccggcgacctaagataggatcttcctcgcagaggcctattaagctcaaggaggccagctactcaaacgacaatcagatcatacttcagtctcctagttctaatggcactaagaaggacattcataagtgcgtcgactttaagcccaaagatattaagctcacaaatgcaggaagcaagctagatcacggaattaagtctttatcaagtccaaagatcgcgagcgacgttaaaccgaaggcagagggacaagcaagcgaaaacaaatggtctcacctgttggtgcagcgagagaagatgaaagaactgaaaaaaggtcgtaatagtaaattccgagacaattctgagaagtgcgtgctggagaaatggaaacgcaatcaattttctcaggattacaactccaacaaaataattaaggagccactcgggtcaagacgccaaaaaatctctttcaaaatccccatcaagtcacgggatacacttcaaaagttggtcgaagagaacgtgtttaatatcgactccaacaacagcaaaaccaagcaggaggagcgcgaatacctagaatccagccaagtctcactgaacgtcactcggcagaagactgagcacctcctgagtgacttcacttacaagcgaaccgtgcatgagtggaagaggaagcaccactacgaccatcaggagtccaacgactctcactctagggagaacttgacccagtcatttgaagcaccctgttgcagcgtgagctccgagtctattcaggatgcggatcaagagatgcagattgtggaggaactgcacgcagcacgggtgggcaagtcagttgatcttcccggcgagctgatgagtatggaaatagatttggaagatgatgtgcactcttcttctgccaataatactagcgatcgaaaactcttaatagttatagataccaatatccttatgaaccatctgaaatttgtccggattctgaagacaaccgaagttcccggctttgataaactggtcttaataataccctgggtggtgatgcaggaactggatagaatgaaggagggtaaactacttaaacgggcccaacacaaggcgatacctgccgtgcacttcatcaacgattcattaaagaatcaggatcgcaaactatggggacagtctattcaacttgcgtctcagaaacattacggcctctccgatgaaaataatgatgatcgagtgttaaagtgctgcttgcagcaccaagagctgttcccatgctctttcgtaattctatgtaccgacgatcggaacctcagaaataaaggtctgattagcggcgttaaaagcttgtcaaaggaagagctgagtgcggagctgttgcacctgagtctgaacaccgatgtctgtcaccagccttgtattcctaagcaacagctgaaggccgaaactactccactcaaagagagttataaggaagaaagtaccaactcaggtctgtctatattactcgagtccatagtgtccgacctggaaaaaagcctcggtaccggattgtcaagtatacttgaaaccgaaatgaaaatcgccttcggaaatctgtggatggagatcctgtacctcaagcccccgtggacactgctgcatctgcttcagtgttttaagaagcattggctggctgtctttggcttagtgatggagaagaacctactgctaactatagagagcctgtacaagaatctgcgcaaagcaaataaggcggtcgacttcacgaccgttaagttccttctgcaggacagtagaagtctccttcatgcgttttctacacgttcaaattatgacgggattctcccacagacctttgctcaggtaaataatttgcttcagaccttcgcagaggttaaaactaaattgaagcccaactcctcggagaacaccgtgaccaagaagcaggaaggaacatctttgaagaattcccataaccaggaaataacagtattctccagctctcatctacctcagccatcgaggcatcaggaaatatggagtatcctggaatcggtgtggatcaccatatatcagaactccacagacgtcttccagaggcttgggtccaattcagctctcactacctcgaacatcgcgtcattcgaagaagcattcatttgtcttcagaagctgatggccgctgtgcgtgatatcttggaaggtattcagcggatacttgccccaaactccaactatcaggatgttgagaccctgtataactttttaatcaagtacgaggttaacaaaaacgtgaagttcacagctcaggaaatctatgattgtgtttctcaaaccgaatatagagagaagctcaccattggctgccggcaactggttgagatggagtatacaatgcagcagtgcaacgcatctgtgtatatggaggcaaaaaacaggggctggtgcgaggatatgcttaattaccgcatctag

SEQ ID NO: 194437 - DNA, 2703 bp, Artificial Sequence
  derived and/or modified sequence
atgagcagcaaggagagctgcggcaagaaggagaccagccagcggaaggacacaacaacctccagtccaaactttggagagaaggacaagaaagagaggaaaactccggcttcctcaaccagttcctcttccattcggagtgtgtcttctgagaagaggaaactcaaaagtgatcacacggacgttctctactataacatcaaaagaaggcaaggcctgaaaagactgagcgtcgagatcgatactctgagacgcaggcctaagatcgggagtagctcccagcgaccaatcaagctcaaagaggccagctattcaaatgacaaccagatcatcctgcagtccccttcatctaacggcacgaagaaggacatccacaaatgcgttgatttcaagccaaaggacataaagcttactaacgccggatctaagctcgatcatggtattaaaagtcttagctctccgaaaattgcaagtgatgtaaagcctaaagcagagggccaggcaagcgaaaacaaatggtcccatctgctggtccagcgcgagaagatgaaggagctcaagaagggcagaaactcaaagtttcgcgacaatagcgagaaatgcgtccttgagaaatggaaacgaaatcaattttctcaggactacaacagtaacaagataatcaaagagccactggggagcagacggcaaaagatctcctttaagattcctattaagtcccgcgatactctccaaaaactagtggaagaaaatgtttttaacatcgatagcaacaatagtaaaactaaacaggaagaacgcgaataccttgagagctcgcaggtcagtctgaacgtcacccgacagaagacagagcacttgctgtccgactttacatataagcggaccgtgcacgaatggaagcgtaagcatcactatgatcaccaagagtccaatgactctcatagccgggaaaacctgacacaaagctttgaagctccttgctgctccgttagtagtgaatctatccaggacgctgatcaggaaatgcagatcgtggaggagctccacgccgctcgggtggggaaatctgtggacctgccaggcgaattgatgagcatggagattgacctggaagatgacgtccacagcagttccgctaataatactagtgatcggaagttgcttatcgtgattgacactaatatcttgatgaatcatctgaaatttgtaaggattctgaagacaaccgaggtcccgggattcgataaactggtgctgataattccctgggtagttatgcaggaactggatcggatgaaagaaggcaaactgctgaagcgagcgcaacacaaagccatccccgccgtccacttcatcaacgactctcttaagaatcaagatcgaaagctctggggtcagtcaatccagctggccagtcagaagcactatggtctgagcgacgaaaataacgacgaccgcgtcctgaaatgttgtcttcagcaccaagagctgttcccatgcagcttcgtcattttgtgcaccgatgatcgcaacctcaggaataagggcctaatcagcggggtgaagagtctgtcaaaagaagagctgtctgctgaactgctgcacctgtctctgaacaccgatgtctgtcaccagccttgtattcccaaacaacagctgaaagcagaaaccacgccgttgaaggaatcttacaaagaggaatctacaaactctgggctgtctatcttgcttgagagtatcgtctctgatctagaaaagagcttgggcacgggactctcatcaattttggagaccgagatgaaaattgcattcggtaatctgtggatggaaatactctacctcaagccgccttggaccctgctgcatttgctgcaatgcttcaagaagcattggctggccgtctttggcctcgtgatggagaaaaacctcttattgaccattgaatcgctatacaagaacctaaggaaagccaataaagctgtggactttaccaccgtcaagtttctgctgcaggatagccggtcacttctgcatgcttttagcactcgaagtaattacgacgggattctgcctcagacatttgcacaagtgaataatctgctgcagactttcgccgaggtgaagaccaagctcaaaccgaactcctcagagaacactgtgactaaaaaacaggaaggcactagtctcaagaatagccacaaccaggaaattaccgtcttctcttctagccacttgccccagccatcccggcatcaggagatctggtccatcctggaatctgtgtggattacaatttaccagaactctacagatgtgtttcagcgcctgggtagtaacagcgcattaactacctctaatattgcaagtttcgaggaagctttcatctgtctgcagaagctcatggctgcggtgagagacatccttgagggcatccaacgcatactcgcacccaattctaactaccaagacgtggagacactgtacaacttcctgattaaatatgaagttaacaagaatgtgaagtttacggctcaggagatatatgactgcgtgagtcagacagaatacagagagaaacttaccataggttgccgccagctggtggagatggagtacacgatgcaacagtgtaatgccagcgtttatatggaggcaaagaacagaggttggtgcgaggacatgctgaactatagaatatag

SEQ ID NO: 194438 - DNA, 483 bp, Artificial Sequence
  derived and/or modified sequence
atgagcagcaaggagagctgcggcaagaaggagaccagccagcggaaggacacaactacaagctcccccaactttggggagaaggataagaaagaaagaaaaacacctgcctcttctacctccagttcaagtatccgctccgtaagcagcgaaaagcgcaagctgaagtccgaccacacggatgtgctctactacaacataaagcggaggcaaggcctgaagcggttatcagtagagatcgataccctacggaggagacctaaaatcgggagttcctcacagcggcctattaagctgaaggaggcttcttattcaaacgataatcagattatcctccagtctccgtcttctaatggtaccaagaaagatatccacaagtgtgtggactttaagccaaaagacattaaattgactaacgcaggcagcaagctcgaccatggcatcaagagtttgtctagtcccaagatcgcttccgacgtgtag

SEQ ID NO: 194439 - DNA, 2703 bp, Artificial Sequence
  derived and/or modified sequence
atgtctagtaaggaaagttgtggcaaaaaggagaccagtcaaagaaaagacactacaacctcaagccctaatttcggggaaaaagacaagaaagagaggaagacacccgcttcgtcaacatccagttcctccatccgctccgttagcagcgagaaaagaaaactgaagtctgaccacaccgacgtactgtactataatatcaagcgtagacagggcttaaaacgactgtccgttgaaatcgacactttgagacgtagaccaaagatcggctctagtagccagagacccatcaagttgaaggaagcctcctatagcaacgacaaccagattatcctccaatctccttcctccaacggaacgaaaaaggacattcacaagtgcgtagactttaagcctaaagacataaaacttacaaacgccggtagtaagctcgatcatggcattaagtccctgtccagcccaaaaattgctagtgacgtgaaacctaaagcggagggccaggccagtgaaaacaaatggtctcacctgcttgtacagcgcgagaagatgaaggagctcaaaaaagggcgtaacagtaagttccgagacaactccgaaaagtgtgttcttgaaaagtggaagcgaaaccagtttagccaagactacaattccaacaagatcattaaggagcctctgggctcaagacggcagaaaatctcctttaaaatccctatcaaatcccgggatactcttcaaaaactggtggaagaaaacgtatttaatatcgattccaataacagcaagaccaagcaggaagaaagagaatacctggagtccagtcaagtgagcctgaacgttactcgtcaaaaaaccgagcacctgttgtctgatttcacctacaaacggaccgtccacgaatggaaacggaaacatcactacgatcatcaggaaagcaacgatagtcatagtagggagaacttaacgcagtcctttgaggccccttgctgctctgtgagttcagagtctatccaagacgctgatcaggaaatgcaaattgtggaagaattgcacgccgcaagggtcggaaagtccgttgaccttcccggagagctcatgtcaatggagattgacctggaagatgacgtgcacagcagtagcgctaacaacactagcgatagaaagctgctgattgttatcgatacaaatattctcatgaatcacctgaagttcgtgaggatcctgaaaacaaccgaggtgcccggttttgacaaacttgtcctgatcattccatgggtagtcatgcaggaactggaccgaatgaaggaaggcaagctgctgaaaagggcccagcataaggccattcccgctgtgcactttatcaatgactccctaaagaatcaggatcgcaaattgtggggtcagtctatccagttggcaagtcagaagcattatggcctctctgatgaaaacaacgatgaccgggtcctcaaatgttgcttgcagcatcaggaactctttccatgctccttcgtgatcctgtgcacggacgacagaaaccttcgcaacaagggtctgatatcaggcgtcaagtccctgtcgaaggaggagttgtcagcagaacttctccacctttctttgaatacagacgtgtgtcaccagccgtgcatcccgaaacagcagctgaaggcagaaactactcccctgaaggaatcttacaaagaagaaagcaccaattccggcctgagcatcctgctggagtctatcgtgagcgatctggagaaatcgttggggacaggcctgtcctccatactggaaaccgagatgaagatcgctttcgggaacctgtggatggagattctttaccttaaacctccttggacactgctccacctactgcagtgttttaaaaagcactggctggcggtatttggattggtgatggagaaaaacttgcttctgaccatcgagtcactttacaaaaacttgaggaaggcaaacaaggccgttgacttcacgaccgtgaaattcttgctccaggactcccggagcctccttcacgccttctcaactcgttctaattacgacgggatactcccccagactttcgctcaagtaaataatttgttgcaaacctttgccgaagtaaagactaaactcaagcctaattcttcagagaataccgtaacaaaaaaacaggagggcacaagcttgaaaaacagtcataatcaagagattacagtattctccagctcacatctgccccagccatcaagacaccaggaaatatggtcgattctggaatcagtgtggatcactatttaccaaaactcgaccgacgttttccaacgcctcggttcaaactccgccctcactacgagtaatatcgcttcttttgaggaagccttcatctgccttcaaaagcttatggctgcagtgagggatatactcgaaggaatacagcggatcctggctcccaactccaattaccaggatgttgaaactctttacaacttcctgattaaatatgaagtcaacaagaatgtgaagttcaccgcgcaggagatatatgattgtgtgagccagaccgagtatcgggagaaactaacaatcggatgtcggcagttggtagagatggagtacactatgcagcagtgcaatgccagtgtgtacatggaggccaagaaccgaggctggtgcgaggatatgctgaactaccggatctag

SEQ ID NO: 194440 - DNA, 2703 bp, Artificial Sequence
  derived and/or modified sequence
atgtcgtcaaaagaaagctgcggcaaaaaggagacttcacagagaaaagacacaaccacaagttcccctaactttggcgaaaaggacaagaaagaaagaaaaacccctgcgagctcaacaagcagcagcagcatccgctccgtcagctccgagaaacgcaagcttaagagcgaccataccgacgtactctattacaatataaaaaggcgacagggattaaaacgccttagcgtcgagattgatacactgcggcgtcggcctaaaattggctctagttcacagagaccaatcaaacttaaggaggcttcctactccaacgacaaccagattatccttcagtctcccagctcaaacggtactaaaaaggacatacacaagtgcgtcgacttcaagcctaaggatataaagttaaccaacgctgggtcaaaactggatcatggcattaagagcttgtcatccccgaagattgcatctgacgtgaaacctaaggcagagggccaagcatccgaaaataagtggtcccatctgcttgtgcagcgcgagaagatgaaagaactaaagaagggcagaaacagtaaatttagagacaactcagaaaagtgcgtacttgaaaagtggaaacgcaaccagttcagtcaggactataactccaacaagattatcaaggagcccctggggtcaagacgccagaagatttcctttaagattccaataaaatcccgcgatacacttcagaagcttgtcgaagaaaacgtattcaacatagactctaataattccaagaccaagcaagaagaacgcgaataccttgagtcatctcaggtgtctctcaatgtgacccgccagaagacagaacatctcctgagcgacttcacatacaaacggacagttcatgagtggaaacgtaaacaccactatgatcaccaggagtcaaatgactcacactccagagagaatctgacccagagtttcgaggccccttgttgctcggtgtcttcagaatcaatccaagacgccgaccaggagatgcaaattgtggaggagctccacgcggctagggtgggtaaatcggtggacctgccaggggagctgatgtcaatggagatcgacctcgaagacgatgtccactcctctagtgcaaataacacaagtgaccgcaagctattgattgtgatcgatactaacattctgatgaatcacttgaagtttgtccggatccttaaaacaactgaagtgccaggatttgataagttggtactgattattccatgggtcgtcatgcaggagctagatcgcatgaaggaaggcaagctcctcaaacgagctcaacacaaggccatccccgcagttcattttattaatgacagtctgaagaatcaggaccggaagctctgggggcaatctatccagctcgcctcccagaagcactatgggctgagcgacgaaaataatgacgaccgcgtgctgaaatgctgtctgcagcaccaggagctttttccttgctcctttgttatcctgtgtacagacgatagaaaccttcgcaacaagggccttatttcaggggtgaagagtctgtcaaaggaggaactttctgctgagcttctgcacctttctttaaacacagatgtgtgccatcagccctgtatccccaaacaacagctcaaagcagagacaactccactgaaggagagctacaaggaagaatccaccaattcagggctttctattctgctggagtccattgtatcagacctggagaagagcctgggcacgggactgtcctctattcttgagacagagatgaagattgccttcggaaatctgtggatggagattctgtaccttaaaccaccttggaccctcctgcatctcctgcagtgtttcaaaaagcactggctcgccgtctttggattggttatggaaaagaaccttttgttgaccatcgagagtctctacaaaaacttgcgcaaagcgaataaagccgtggacttcaccacagtgaaattcctcctccaggatagtcgttcactgctccacgcattctctacccggagtaattatgacggcatactaccccaaacgtttgcacaggtgaataatctcctacagaccttcgccgaagtcaagacgaaactgaaacctaatagctctgagaatacagttaccaagaagcaggaaggaacctctctgaagaactcccacaaccaagaaatcactgtgttttcatcatcacatctaccacagccctcgcgccaccaggaaatatggtccattctggaaagcgtctggattaccatttatcaaaacagcaccgacgtgttccagaggctcggatcgaatagcgctctcaccacctccaacattgcatcttttgaagaggcatttatctgtctccagaaattgatggcggcagtccgtgacatcctggagggaatccagcgtatccttgcgccaaatagcaactaccaggacgtggagacactgtacaacttcttgatcaagtatgaagtgaataaaaacgttaaattcacagcccaggagatttacgactgcgtgagtcaaacggaatatcgggagaaactcaccattgggtgtcggcagctggtggaaatggagtacacaatgcagcaatgcaacgcatctgtgtacatggaagcaaagaaccggggatggtgtgaagatatgctcaattatcggatctag

SEQ ID NO: 194441 - DNA, 483 bp, Artificial Sequence
  derived and/or modified sequence
atgtccagtaaggagtcctgcggaaagaaggaaacatcccagcggaaagacaccacaacttcaagtcccaattttggagaaaaagataaaaaagagcggaagaccccggcttctagcacatcctctagcagcattcggtctgttagtagcgagaagcgcaaactgaagtccgatcacactgatgtactctattacaatatcaagaggcgccagggcctcaaaaggctcagtgtcgagatcgacaccctgaggagaagacccaaaatcggctcttcgtcccagaggccaatcaagttgaaagaggcatcctatagcaatgataatcagatcatcctgcagagtcccagtagcaatggcaccaagaaagacatccacaagtgtgtggatttcaagcctaaggatattaagcttactaatgcgggtagcaagctcgaccacgggattaagagcctaagcagtccaaagattgcctccgacgtctag

SEQ ID NO: 194442 - DNA, 3830 bp, Artificial Sequence
  derived and/or modified sequence
ggggcggtgagtaggtagtgcggatgcgggcgcagaactacgtttcccagcaggcatacagttggtggggcggggtgtgtgtgtgtgttgggaggcgggggtccctctcctttggcttggggctccggagttgccactgccgccggcgctggtaagcttttcaggatgtccagcaaagaatcctgtgggaaaaaagagacatctcagaggaaagacaccaccacctcatcacccaattttggtgaaaaagacaagaaagagagaaaaaccccagcaagttctactagttcatcttctataagatcagtttcatcagaaaagagaaaactgaaatcagatcatacagatgttctgtactataatataaaaagaagacaaggactgaaaagattgagtgtagaaattgacactctcagaaggagaccaaaaatcggttcttcatcccaaagacctattaaactcaaagaagcatcatattcaaatgataatcaaattattttgcagagtccttcttcaaatggaactaaaaaagacatacataaatgtgtagactttaaacctaaagatatcaaattgacaaatgctgggagcaagcttgaccatggaattaaaagccttagtagtcctaagattgccagtgatgtgaaacctaaagccgaaggccaggcaagtgaaaataaatggtctcatttacttgttcagagagagaagatgaaagaactcaagaaaggaagaaacagtaaatttagagacaattctgaaaaatgtgtcttagagaaatggaagagaaatcaattttctcaggattataactccaacaagataattaaggaacccttgggatctagaagacagaagatcagtttcaaaatccctataaaatcccgtgacaccctccagaaacttgtagaagaaaatgtcttcaacatagattctaataattcgaagactaagcaggaagaaagagaatacctggaaagctcccaggtttcattaaatgtgactaggcagaaaactgaacatttactttcagattttacatataagcggactgttcatgagtggaaacgaaaacatcattatgaccatcaagaaagtaatgattcacattctagggaaaacctaacccagagttttgaagcaccatgttgttccgtgtcatctgaaagtatccaggatgcagatcaagagatgcagatagtagaagagcttcatgctgcacgtgtgggaaaaagtgtggatttacctggagagttaatgagtatggaaattgacttagaagatgatgtacattcctcctctgcaaataatacttcagacagaaagcttctaattgttattgacacaaatattctgatgaatcatctcaaatttgttagaattttgaagacaacagaagtaccaggttttgacaaacttgtgttaataattccctgggtcgttatgcaagagctagatcgtatgaaggaaggaaaactactaaaacgtgcccagcacaaagctatacctgcagttcatttcatcaacgacagtctcaaaaatcaagatagaaagctatggggtcagtcaatacaacttgcatcccaaaaacattatggattgagtgatgagaacaatgatgatcgagtactaaaatgctgtctccagcaccaggaattattcccttgttcttttgttattctgtgcacggatgatagaaacttaagaaacaaaggcctaataagtggtgtgaagtcactcagtaaagaagaattgagtgcagagttattacacttatctctgaacacagatgtgtgtcatcagccttgtattcctaagcaacagttgaaagcagaaacaacacccttgaaagagagctataaggaggaatctacaaattctggactgtccattctgcttgagagcattgtatctgatcttgaaaaatctcttggaacaggtttatcttcaatattagaaacagaaatgaaaattgcttttggaaacctttggatggagatcctgtacctgaaaccaccatggactctactacatttactacagtgctttaaaaaacattggttggctgtatttggattagttatggaaaagaacttgcttttaactattgagagcctatacaaaaatctccgtaaagctaataaggcagtggattttacaacagtcaaattcttgcttcaggattctagaagtttgttacatgctttcagtacaaggtcaaattatgatggtattcttccacagacctttgctcaagtaaacaacctccttcagacatttgcagaggtcaagacaaaacttaagccaaattcttcagaaaacacagtgactaaaaagcaggaaggtacttcattgaagaattctcataatcaagaaatcactgttttctcgagttctcatcttccccaacccagcaggcatcaagaaatctggtctatcctagagagtgtttggattacaatatatcagaacagcacggatgtatttcaaagattgggctcaaattcagctctgactacttcaaatatagcatcatttgaagaagcatttatatgtcttcaaaagttaatggcagctgtgagggatattcttgaaggaattcaaaggattttggccccaaacagtaattatcaagatgttgagaccctctataacttcctaatcaagtatgaggtaaataaaaatgtcaaatttactgcccaggaaatttatgattgtgtttctcagactgagtatagggaaaagttaaccattggatgccgccagctggttgagatggaatataccatgcagcagtgcaatgcatctgtttatatggaggccaaaaacaggggatggtgtgaagacatgctcaactataggatataagtactgatttgtaactttaaaggaattgcatttgtccttaagaataacagagtagttttcaatctggtcactcttttgggccaaacccaagagaattttaagaaatgtttcataggtataaaaaggtgatcgcctattactgacagtctcattgtagctctaaaaagcctaatgtatccactgtggaataaactccatagactcaactcttctggagttcacaatgcctccctacctctattcttgatagtgagccagtatctctaaggaaaggagagccgtatttttagtcatcctagggcaggagccactgtggcatctgaggaagacccagggtacagtattagcatttctttcaaccctaagtatgggcatgtgaccagagacactgccaaaccctaagaaatcattagggcatgatcatgctcaccatatttcacaaatgaaatcttaatgtgggctgttttttatgatcaaactgtcatccatgttgacctgatgaaaataacaccctccttcacctccctcagggtaatgaaagtagaaatttgactgaagctcctacttccttatacagcctttccttctgtgggcttgtcacttttcagtacatttctagtggggaagagcagggcgacccctctgctgggtttctccttaaatgtgaagcaaaataaatttatataatggaatttggtggcagtgactgatgtttgtctctagctaaaaccaactgtttagttgactttttagttataggataagttggaagtccttgtttactggaatatattatgcttttgttaacacattagattaaatagaatttggtattctattataaatgtttattttttaaagcaataaataacttatttttggtaagatttggctttttacttccaaattgtttctgatatgtacataaggtatgattataaaagtgactgtctgcaataaaa

SEQ ID NO: 194443 - DNA, 3001 bp, Artificial Sequence
  derived and/or modified sequence
aggatacactgcgcagtctgggggcggggccggagttcaagcctcggaggaagtaaatgcaaatctaagcgagcgctgtggggcgcttttcaggatgtccagcaaagaatcctgtgggaaaaaagagacatctcagaggaaagacaccaccacctcatcacccaattttggtgaaaaagacaagaaagagagaaaaaccccagcaagttctactagttcatcttctataagatcagtttcatcagaaaagagaaaactgaaatcagatcatacagatgttctgtactataatataaaaagaagacaaggactgaaaagattgagtgtagaaattgacactctcagaaggagaccaaaaatcggttcttcatcccaaagacctattaaactcaaagaagcatcatattcaaatgataatcaaattattttgcagagtccttcttcaaatggaactaaaaaagacatacataaatgtgtagactttaaacctaaagatatcaaattgacaaatgctgggagcaagcttgaccatggaattaaaagccttagtagtcctaagattgccagtgatgtgaaacctaaagccgaaggccaggcaagtgaaaataaatggtctcatttacttgttcagagagagaagatgaaagaactcaagaaaggaagaaacagtaaatttagagacaattctgaaaaatgtgtcttagagaaatggaagagaaatcaattttctcaggattataactccaacaagataattaaggaacccttgggatctagaagacagaagatcagtttcaaaatccctataaaatcccgtgacaccctccagaaacttgtagaagaaaatgtcttcaacatagattctaataattcgaagactaagcaggaagaaagagaatacctggaaagctcccaggtttcattaaatgtgactaggcagaaaactgaacatttactttcagattttacatataagcggactgttcatgagtggaaacgaaaacatcattatgaccatcaagaaagtaatgattcacattctagggaaaacctaacccagagttttgaagcaccatgttgttccgtgtcatctgaaagtatccaggatgcagatcaagagatgcagatagtagaagagcttcatgctgcacgtgtgggaaaaagtgtggatttacctggagagttaatgagtatggaaattgacttagaagatgatgtacattcctcctctgcaaataatacttcagacagaaagcttctaattgttattgacacaaatattctgatgaatcatctcaaatttgttagaattttgaagacaacagaagtaccaggttttgacaaacttgtgttaataattccctgggtcgttatgcaagagctagatcgtatgaaggaaggaaaactactaaaacgtgcccagcacaaagctatacctgcagttcatttcatcaacgacagtctcaaaaatcaagatagaaagctatggggtcagtcaatacaacttgcatcccaaaaacattatggattgagtgatgagaacaatgatgatcgagtactaaaatgctgtctccagcaccaggaattattcccttgttcttttgttattctgtgcacggatgatagaaacttaagaaacaaaggcctaataagtggtgtgaagtcactcagtaaagaagaattgagtgcagagttattacacttatctctgaacacagatgtgtgtcatcagccttgtattcctaagcaacagttgaaagcagaaacaacacccttgaaagagagctataaggaggaatctacaaattctggactgtccattctgcttgagagcattgtatctgatcttgaaaaatctcttggaacaggtttatcttcaatattagaaacagaaatgaaaattgcttttggaaacctttggatggagatcctgtacctgaaaccaccatggactctactacatttactacagtgctttaaaaaacattggttggctgtatttggattagttatggaaaagaacttgcttttaactattgagagcctatacaaaaatctccgtaaagctaataaggcagtggattttacaacagtcaaattcttgcttcaggattctagaagtttgttacatgctttcagtacaaggtcaaattatgatggtattcttccacagacctttgctcaagtaaacaacctccttcagacatttgcagaggtcaagacaaaacttaagccaaattcttcagaaaacacagtgactaaaaagcaggaaggtacttcattgaagaattctcataatcaagaaatcactgttttctcgagttctcatcttccccaacccagcaggcatcaagaaatctggtctatcctagagagtgtttggattacaatatatcagaacagcacggatgtatttcaaagattgggctcaaattcagctctgactacttcaaatatagcatcatttgaagaagcatttatatgtcttcaaaagttaatggcagctgtgagggatattcttgaaggaattcaaaggattttggccccaaacagtaattatcaagatgttgagaccctctataacttcctaatcaagtatgaggtaaataaaaatgtcaaatttactgcccaggaaatttatgattgtgtttctcagactgagtatagggaaaagttaaccattggatgccgccagctggttgagatggaatataccatgcagcagtgcaatgcatctgtttatatggaggccaaaaacaggggatggtgtgaagacatgctcaactataggatataagtactgatttgtaactttaaaggaattgcatttgtccttaagaataacagagtagttttcaatctggtcactcttttgggccaaacccaagagaattttaagaaatgtttcataggtataaaaaggtgatcgcctattactgacagtctcattgtagctctaaaaagcctaatgtatccactgtggaataaactccatagactc

SEQ ID NO: 194444 - DNA, 633 bp, Artificial Sequence
  derived and/or modified sequence
gggtgtggttctggcccggcttgcctccggggctgccccttgcccggtgttggggtctggtcggttcgtgcggagcccgcgggcccgcggcggtttactagcagctgacgagcttgcctgtccatccagctgacttggaattaggcttttcaggatgtccagcaaagaatcctgtgggaaaaaagagacatctcagaggaaagacaccaccacctcatcacccaattttggtgaaaaagacaagaaagagagaaaaaccccagcaagttctactagttcatcttctataagatcagtttcatcagaaaagagaaaactgaaatcagatcatacagatgttctgtactataatataaaaagaagacaaggactgaaaagattgagtgtagaaattgacactctcagaaggagaccaaaaatcggttcttcatcccaaagacctattaaactcaaagaagcatcatattcaaatgataatcaaattattttgcagagtccttcttcaaatggaactaaaaaagacatacataaatgtgtagactttaaacctaaagatatcaaattgacaaatgctgggagcaagcttgaccatggaattaaaagccttagtagtcctaagattgccagtgatgt

SEQ ID NO: 194445 - protein, 522 aa, Artificial Sequence
  derived and/or modified sequence
MVRSGKNGDLHLKQIAYYKRTGEYHSTTLPSERSGIRRAAKKFVFKEKKLFYVGKDRKQNRLVIVSEEEKKKVLRECHENDSGAHHGISRTLTLVESNYYWTSVTNDVKQWVYACQHCQVAKNTVIVAPKQHLLKVENPWSLVTVDLMGPFHTSNRSHVYAIIMTDLFTKWIVILPLCDVSASEVSKAIINIFFLYGPPQKIIMDQRDEFIQQINIELYRLFGIKQIVISHTSGTVNPTESTPNTIKAFLSKHCADHPNNWDDHLSAVSFAFNVTHLEPTKNTPYFQMFSRNPYMPETSDSLHEVDGDNTSMFAKILDAIKEADKIMENKTTSLGQMENNNLDELNKSKIIVKKKPKQLNPFHLKVGHEVLRQRKNWWKDGRFQSEWVGPCVIDYITESGCAVLRDNTGVRLKRPIKMSHLKPYIRESSEQESLYLLQGSVVADHDYIGLPEIPIGAYQANILVEDATIGIVDNELLTSSKDRELLEYRNTKISPLIDDHSSLEKQTFSLLDSSNQVLEYLS

SEQ ID NO: 194446 - protein, 222 aa, Artificial Sequence
  derived and/or modified sequence
MVRSGKNGDLHLKQIAYYKRTGEYHSTTLPSERSGIRRAAKKFVFKEKKLFYVGKDRKQNRLVIVSEEEKKKVLRECHENDSGAHHGISRTLTLVESNYYWTSVTNDVKQWVYACQHCQVAKNTVIVAPKQHLLKVENPWSLVTVDLMGPFHTSNRSHVYAIIMTDLFTKWIVILPLCDVSASEVSKAIINIFFLYGPPQKIIMDQRDEFIQQKVFISCKVQ

SEQ ID NO: 194447 - DNA, 1569 bp, Artificial Sequence
  derived and/or modified sequence
atggtgagaagcggcaagaacggcgacctgcacctgaagcagatcgcctactacaagagaaccggcgagtaccacagcaccaccctgcccagcgagagaagcggcatcagaagagccgccaagaagttcgtgttcaaggagaagaagctgttctacgtgggcaaggacagaaagcagaacagactggtgatcgtgagcgaggaggagaagaagaaggtgctgagagagtgccacgagaacgacagcggcgcccaccacggcatcagcagaaccctgaccctggtggagagcaactactactggaccagcgtgaccaacgacgtgaagcagtgggtgtacgcctgccagcactgccaggtggccaagaacaccgtgatcgtggcccccaagcagcacctgctgaaggtggagaacccctggagcctggtgaccgtggacctgatgggccccttccacaccagcaacagaagccacgtgtacgccatcatcatgaccgacctgttcaccaagtggatcgtgatcctgcccctgtgcgacgtgagcgccagcgaggtgagcaaggccatcatcaacatcttcttcctgtacggccccccccagaagatcatcatggaccagagagacgagttcatccagcagatcaacatcgagctgtacagactgttcggcatcaagcagatcgtgatcagccacaccagcggcaccgtgaaccccaccgagagcacccccaacaccatcaaggccttcctgagcaagcactgcgccgaccaccccaacaactgggacgaccacctgagcgccgtgagcttcgccttcaacgtgacccacctggagcccaccaagaacaccccctacttccagatgttcagcagaaacccctacatgcccgagaccagcgacagcctgcacgaggtggacggcgacaacaccagcatgttcgccaagatcctggacgccatcaaggaggccgacaagatcatggagaacaagaccaccagcctgggccagatggagaacaacaacctggacgagctgaacaagagcaagatcatcgtgaagaagaagcccaagcagctgaaccccttccacctgaaggtgggccacgaggtgctgagacagagaaagaactggtggaaggacggcagattccagagcgagtgggtgggcccctgcgtgatcgactacatcaccgagagcggctgcgccgtgctgagagacaacaccggcgtgagactgaagagacccatcaagatgagccacctgaagccctacatcagagagagcagcgagcaggagagcctgtacctgctgcagggcagcgtggtggccgaccacgactacatcggcctgcccgagatccccatcggcgcctaccaggccaacatcctggtggaggacgccaccatcggcatcgtggacaacgagctgctgaccagcagcaaggacagagagctgctggagtacagaaacaccaagatcagccccctgatcgacgaccacagcagcctggagaagcagaccttcagcctgctggacagcagcaaccaggtgctggagtacctgagctag

SEQ ID NO: 194448 - DNA, 669 bp, Artificial Sequence
  derived and/or modified sequence
atggtgagaagcggcaagaacggcgacctgcacctgaagcagatcgcctactacaagagaaccggcgagtaccacagcaccaccctgcccagcgagagaagcggcatcagaagagccgccaagaagttcgtgttcaaggagaagaagctgttctacgtgggcaaggacagaaagcagaacagactggtgatcgtgagcgaggaggagaagaagaaggtgctgagagagtgccacgagaacgacagcggcgcccaccacggcatcagcagaaccctgaccctggtggagagcaactactactggaccagcgtgaccaacgacgtgaagcagtgggtgtacgcctgccagcactgccaggtggccaagaacaccgtgatcgtggcccccaagcagcacctgctgaaggtggagaacccctggagcctggtgaccgtggacctgatgggccccttccacaccagcaacagaagccacgtgtacgccatcatcatgaccgacctgttcaccaagtggatcgtgatcctgcccctgtgcgacgtgagcgccagcgaggtgagcaaggccatcatcaacatcttcttcctgtacggccccccccagaagatcatcatggaccagagagacgagttcatccagcagaaggtgttcatcagctgcaaggtgcagtag

SEQ ID NO: 194449 - DNA, 1569 bp, Artificial Sequence
  derived and/or modified sequence
atggtgcggagcggtaagaatggagacctgcaccttaagcagattgcttattataagagaacaggggaatatcatagtaccactttgccctcggagagaagcggcattagaagggctgccaaaaaatttgtattcaaagaaaaaaagttgttctacgtaggaaaagaccgcaagcagaaccgcctggtaattgtttccgaagaggagaaaaagaaggtgctaagggagtgtcacgagaatgatagcggggcccatcatggtatttcacggacactgaccttggttgaaagcaactattattggacgagcgttaccaacgacgttaaacagtgggtatatgcgtgccagcattgtcaggttgcaaagaacaccgtgatcgttgcaccgaagcagcatctcttgaaagtggagaatccctggtcactcgtgaccgtcgacttgatgggaccgttccatacctccaatagatcccatgtttatgccatcatcatgactgacctgtttacgaaatggatcgtcattctgccattgtgcgacgtaagcgcctccgaggtatccaaggccatcattaatatcttcttcctctacggccctccacaaaagatcatcatggaccaaagagacgagttcatacagcagatcaacattgaactctataggctcttcgggatcaaacaaatagtaatcagtcacacgagcggcacagtgaatccgactgaaagcacacccaacacaatcaaggcctttctgagcaagcactgcgctgaccatccaaataattgggacgaccacttatctgcagttagcttcgccttcaatgtgacgcacctcgagcccacaaaaaacaccccttatttccagatgttcagtcggaacccttacatgcccgagacgtcagatagcctgcatgaggttgacggagataacacatccatgttcgcaaaaattctcgatgccatcaaggaggccgacaaaattatggaaaacaaaactacaagtctagggcaaatggaaaacaacaatttggatgagctcaacaagtcaaagatcatcgtgaagaaaaagccgaaacaactcaatccctttcacttgaaggtggggcacgaggtgttgagacagagaaaaaattggtggaaagacggtcggttccagagcgaatgggtcggtccctgtgtcattgactacataaccgaatcaggctgtgccgtgctgcgcgacaacacaggcgtccgcctcaaacggcctatcaagatgtctcacctaaagccttatatacgggagtctagcgagcaggaatccttatatctcctgcagggtagtgtcgtggccgatcatgattacattggtctgccggagatccctattggtgcctaccaggcgaatattctcgtggaggacgccactattggaattgtggacaatgagctcctcactagtagtaaagacagggaactgctggagtatcggaacacaaagattagcccactcattgacgatcactccagcttggagaaacagaccttttctcttcttgattcttccaatcaggtattagagtacctgagctag

SEQ ID NO: 194450 - DNA, 669 bp, Artificial Sequence
  derived and/or modified sequence
atggtgcgaagcgggaagaatggtgatcttcacttaaagcagattgcctactataaaaggactggtgaataccatagtactactctgccatccgaaaggtctgggattcgacgggcagctaagaaatttgtgtttaaagagaagaagctgttctatgtcgggaaagaccggaaacagaacagattggtcatcgtgagcgaggaggagaaaaaaaaggttctgcgggaatgtcacgagaacgattcaggcgctcaccacgggattagtagaactctcacactggtggagagcaactactattggaccagtgttacaaatgatgtgaagcagtgggtttatgcctgtcaacattgtcaggtcgccaagaatactgtgattgttgcacctaagcagcatctgctgaaagtggagaacccctggagtctggtgacagtggacttaatgggaccttttcatacatctaatagaagccatgtgtacgcaattattatgacggatctgtttacaaaatggatcgtgatactgccactgtgtgacgtatcagcttcggaagtgagcaaagctatcataaatatcttttttctgtacgggcctccccagaaaattattatggatcagagagatgaattcatccaacagaaggtctttatcagctgcaaggtccagtag

SEQ ID NO: 194451 - DNA, 1569 bp, Artificial Sequence
  derived and/or modified sequence
atggtgcgcagcggcaagaatggagacctgcacctgaagcagatcgcctactacaagaggactggagagtaccacagcaccaccctgcccagcgagaggagcggcatcagaagagctgccaagaagtttgtgttcaaggagaagaagctgttctacgtgggcaaggacaggaagcagaaccggctggtgattgtgtctgaggaggagaagaagaaggtgctgcgggagtgccatgaaaatgacagcggggcccaccacggcatcagcaggaccctgaccctggtggagagcaactactactggacctctgtgaccaatgatgtgaagcagtgggtgtatgcctgccagcactgccaggtggccaagaacacagtcatcgtggcccccaagcagcacctgctgaaggtggagaacccctggagcctggtgacagtggacctgatgggccccttccacaccagcaacagaagccacgtgtatgccatcatcatgacagacctcttcaccaagtggatcgtcatcctgcccctgtgtgatgtgtctgccagcgaggtgtccaaggccatcatcaacatcttcttcctgtatggccccccccagaagatcatcatggaccagagagatgagttcatccagcagatcaacatcgagctgtaccgcctgtttggcatcaagcagatcgtcatcagccacaccagcggcaccgtgaaccccacagagagcacccccaacaccatcaaggccttcctgagcaagcactgtgccgaccaccccaacaactgggatgaccacctgtctgctgtgtcctttgccttcaacgtgacccacctggagcccaccaagaacaccccctacttccagatgttcagcaggaacccctacatgcctgagaccagtgacagcctgcacgaggtggatggagacaacacctccatgtttgccaagatcctggatgccatcaaggaggccgacaagatcatggagaacaagaccaccagcctgggccagatggagaacaacaacctggatgagctgaacaagagcaagatcatcgtgaagaagaagcccaagcagctgaaccccttccacctgaaggtgggccacgaggtgctgcggcagaggaagaactggtggaaggatggccgcttccagagcgagtgggtgggcccctgtgtgattgactacatcacagaaagtggctgtgctgtgctgcgggacaacacaggagtgcggctgaagaggcccatcaagatgagccacctgaagccctacatccgggagagcagcgagcaggagagcctgtacctgctgcagggctctgtggtggccgaccatgactacatcggcctgcctgagatccccatcggggcctaccaggccaacatcctggtggaggatgccaccatcggcatcgtggacaatgagctgctgaccagcagcaaggaccgggagctgctggagtacagaaacaccaagatcagccccctgattgatgaccacagcagcctggagaagcagaccttcagcctgctggacagcagcaaccaggtgctggagtacctgtcctag

SEQ ID NO: 194452 - DNA, 669 bp, Artificial Sequence
  derived and/or modified sequence
atggtgcgcagcggcaagaatggagacctgcacctgaagcagatcgcctactacaagaggactggagagtaccacagcaccaccctgcccagcgagaggagcggcatcagaagagctgccaagaagtttgtgttcaaggagaagaagctgttctacgtgggcaaggacaggaagcagaaccggctggtgattgtgtctgaggaggagaagaagaaggtgctgcgggagtgccatgaaaatgacagcggggcccaccacggcatcagcaggaccctgaccctggtggagagcaactactactggacctctgtgaccaatgatgtgaagcagtgggtgtatgcctgccagcactgccaggtggccaagaacacagtcatcgtggcccccaagcagcacctgctgaaggtggagaacccctggagcctggtgacagtggacctgatgggccccttccacaccagcaacagaagccacgtgtatgccatcatcatgacagacctcttcaccaagtggatcgtcatcctgcccctgtgtgatgtgtctgccagcgaggtgtccaaggccatcatcaacatcttcttcctgtatggccccccccagaagatcatcatggaccagagagatgagttcatccagcagaaggtgttcatcagctgcaaggtgcagtag

SEQ ID NO: 194453 - DNA, 3229 bp, Artificial Sequence
  derived and/or modified sequence
aaaggacccgggtagttccgcttccggcagcgcgagataaatcacgagaggaagcttaaatctgtcgtttgaatttaggaccacctcggttcacaatggtccgtagtggaaaaaatggtgaccttcatcttaaacagattgcatattacaaacgaactggtgaatatcattcaactacactgccaagtgagagaagtggcataagaagagcagcaaaaaaatttgtcttcaaagaaaaaaagctgttttatgttggaaaagacagaaaacaaaatcgtttggtaattgtttcagaagaggaaaaaaagaaagtcttaagagaatgccatgaaaatgacagtggagctcatcatggtatatccaggaccctcactctggtagaatccaattattattggacatctgtgaccaatgatgtcaaacagtgggtatatgcttgtcagcattgccaagtggcaaaaaatacagttattgtagcaccgaaacagcaccttctcaaggtggaaaatccatggagtttagttactgttgatctgatggggccttttcatacaagcaacagaagtcatgtatatgctataatcatgacagatttgttcaccaaatggattgtgattttgcctctatgtgatgtttcagcatcagaagtttctaaagctattatcaatatatttttcttatatggacctcctcagaaaataataatggaccaaagagatgaattcattcaacagatcaatattgaactgtacagattgtttggcataaagcaaattgtaatttctcacacctctggaactgttaacccaacggaaagtacacctaacacaatcaaagcatttctctccaaacactgtgctgaccacccaaacaattgggatgatcacctatcagctgtttcatttgccttcaatgtaactcacttggaacctactaaaaatacaccatattttcaaatgtttagtcgaaatccttatatgcctgagacttcagatagtcttcatgaagtggatggtgataatacaagtatgtttgccaaaattctagatgcaattaaagaagctgataaaataatggagaataagacaacttcactgggccagatggagaacaacaatttggatgaactaaataaaagcaagatcattgttaaaaagaaacccaaacaattaaatccatttcatttaaaagtgggtcatgaagttttaagacaaaggaaaaattggtggaaggatggtcgttttcagtctgaatgggttggtccttgtgtcatagactatattacagaaagtggatgtgctgtcctgagagacaacactggggttagactgaaaagacctatcaaaatgtcccaccttaagccctacataagagaatccagtgaacaagaaagtctttatctcttgcaaggttcagtagtggcagatcatgactacattggattgcctgaaattccgattggagcatatcaagcaaatattctggtggaagatgcaactattggtatagtcgataatgaattactgacatcaagcaaggatcgtgaactattagaatatagaaatacgaaaatctctccattgatagacgatcatagttctcttgaaaagcagactttcagtctgttggactcttcaaaccaggttcttgaatacttaagttagtaaataccaaaatttatttaaattgtttgtttagaatataaattcttaatgatatcttattcattaaaaacgttgtatagaagaagtatcttgacacattcttaatgactatattctgaaggtttattttatagttcttatctaaaattatgccacatttgaatatcagtatacgtacatatgaaggcaaaggaagcatgtaatatatagaattcactttttcttctaaaaagagaacaggcaaagcacccctacttcttgggaaataaattccagcccaaatctctcaaacctttgtatggttttggcaccgtttctaagttttaaattttctgaaattctctaccatttaaacagtaagtttgaactaccttgaatggaattgataaatactgaatcaactgtaacaatgaatgaaatgaagcttctttctgtttcattagaacttctaaaaacaagattgtatgaaaaaatatagggttatttaataggctttcacagaatattggtaatttcaaattatctaattggttagatagggtcaggattagggtctgaaactatgtattggttgggaaacaatttgtttattttcatactatatattaaagataaaaccatcgaccaggcatggtggcccacacctgtaatcccagcgctttgggaagccaaggcaggatgatcacttgaccccaggagttcgagaccagcctgggcaacacagggagaccctatctctacagaaaaatgtttaaaaattagccaggtgtggtggcacatgcctgcggtcccagctactcaggaggctgaagtaggagcattgcttgaccccaggaggtcgaggctgcagtgagccgcgctcatgccacagctctccagcctgggcgacagggcaagacctgtctcaacaacaacaacaaaagtatccgttaagaattttttctgcaatcataaaatcataaaataaccagtatcaaagattttaaactgtaatttctatgatattcataaatataaaataaatattgttcaataaatatttattctaaagcactatgaaaagaactgtgggaaaagtaaaagatgagtcaaacgtgtacctcattcttataaaggacttactgtctggtaggtaataaactatgtaagccatgtacagcacaagttaaggcatgctaaattgcagaagacaggtgtagataatgtacttagggaggcaaaaagagagaagttgtttttacataggaaatttgtgtttatccttatggaagaaggatcatttaagcttgaccttgaagaatgtataggatttggtaaatggatacaaaagaattaggggagaagtaatacacagaaatggaaaagtattgtaatgattcataaaaaggcagggcttcttgttgtctacactgcctcgggtataaagtgaagaagcaagataatgagggataaagctgaaaaggtaagtaggaaaccttatggagagctttgaatactattaaggattgatatgtgcccctcccaaaatttgtgttgaagtcttaacccccaccacctcaaaatgt

SEQ ID NO: 194454 - DNA, 1040 bp, Artificial Sequence
  derived and/or modified sequence
cttaaatctgtcgtttgaatttaggaccacctcggttcacaatggtccgtagtggaaaaaatggtgaccttcatcttaaacagattgcatattacaaacgaactggtgaatatcattcaactacactgccaagtgagagaagtggcataagaagagcagcaaaaaaatttgtcttcaaagaaaaaaagctgttttatgttggaaaagacagaaaacaaaatcgtttggtaattgtttcagaagaggaaaaaaagaaagtcttaagagaatgccatgaaaatgacagtggagctcatcatggtatatccaggaccctcactctggtagaatccaattattattggacatctgtgaccaatgatgtcaaacagtgggtatatgcttgtcagcattgccaagtggcaaaaaatacagttattgtagcaccgaaacagcaccttctcaaggtggaaaatccatggagtttagttactgttgatctgatggggccttttcatacaagcaacagaagtcatgtatatgctataatcatgacagatttgttcaccaaatggattgtgattttgcctctatgtgatgtttcagcatcagaagtttctaaagctattatcaatatatttttcttatatggacctcctcagaaaataataatggaccaaagagatgaattcattcaacagaaagtctttatctcttgcaaggttcagtagtggcagatcatgactacattggattgcctgaaattccgattggagcatatcaagcaaatattctggtggaagatgcaactattggtatagtcgataatgaattactgacatcaagcaaggatcgtgaactattagaatatagaaatacgaaaatctctccattgatagacgatcatagttctcttgaaaagcagactttcagtctgttggactcttcaaaccaggttcttgaatacttaagttagtaaataccaaaatttatttaaattgtttgtttagaatataaattcttaatgatatcttattcattaaaaacgttgtatagaagaa

SEQ ID NO: 194455 - DNA, 1569 bp, Artificial Sequence
  derived and/or modified sequence
atggtgcggagcggcaagaacggcgacctgcacctgaagcagatcgcttattacaagagaaccggcgaataccactccacaactttgccgagcgaaaggagcggaatccgacgagccgccaaaaagtttgttttcaaggagaagaagcttttttatgtcggtaaagacagaaagcaaaaccggctggtcatcgtatccgaggaagaaaaaaagaaggtgctccgcgaatgtcatgaaaatgatagtggagctcatcacggtatcagtagaactctaaccctcgttgagtccaactattattggacgtccgttacaaacgatgttaaacagtgggtatacgcttgtcaacactgccaagtcgcaaaaaacacggtgatagtggcaccaaagcagcacctgcttaaggtcgaaaacccctggtccctggtcaccgtggacctcatgggacccttccatacttccaaccgaagccacgtgtacgctataataatgactgacctgtttaccaagtggatcgtgatcctgcccttgtgcgacgtctccgccagtgaggtgagcaaagcgatcattaacatattcttcctctacggacccccacagaaaattataatggatcagcgggatgagttcatacagcaaatcaacatcgagctatataggttgttcggcatcaagcagatcgtgataagccatacaagtggtaccgtgaaccccactgagagcacccccaacaccatcaaggctttcctctccaaacattgcgcggatcaccccaacaactgggacgaccacctcagcgcagtgtctttcgcttttaatgtgacacacttagaaccaacaaagaatactccctacttccagatgttttctcggaacccgtacatgcctgagacgagcgatagcttgcacgaagtagacggtgacaacacgtccatgtttgccaaaattctggacgcaattaaggaagctgacaagattatggagaacaaaactacatctcttgggcagatggaaaataacaacttggacgagctgaataagtcaaagatcattgtcaagaaaaagcccaaacagctgaatccttttcacctcaaggtggggcatgaggtgcttcgccagagaaaaaactggtggaaagatggcaggtttcagtccgagtgggttggcccctgcgtaattgattacattaccgagagtggatgtgcagtgcttagagataacaccggtgttcgcctgaagcggcccattaaaatgtcccatctcaaaccctatatacgggagtcaagtgaacaagagagtctttatttgctgcaaggcagcgtggtggccgatcatgattatattgggttacccgagatccctattggcgcttatcaggccaacatcctggtggaggatgccaccattggaatagtcgataacgagcttctcacctcctccaaagacagggagctgctcgaatacagaaacactaaaatctcaccactgattgacgatcattcctcactcgagaaacagacgttttcactccttgactctagcaatcaagtcctggagtatctctcttag

SEQ ID NO: 194456 - DNA, 669 bp, Artificial Sequence
  derived and/or modified sequence
atggtgcggagcggcaagaacggcgacctgcacctgaagcagatcgcctattacaaacgaaccggtgaataccacagtacgaccctaccatcagaacggtcaggaatccgccgagccgctaaaaagtttgtattcaaggaaaaaaagctgttttacgttggtaaggacagaaagcaaaataggctggtgatcgtttcagaagaggagaagaagaaagtgctgcgggaatgccacgagaacgattcaggagcccaccacgggatttcccggacattaactctcgttgagtctaactattactggacttccgtcaccaatgatgtaaaacagtgggtctacgcatgccagcattgtcaggtggccaaaaacacggtcattgtcgcacccaaacagcacctgttgaaagtcgagaatccctggtctctggtgaccgtagatctgatgggaccctttcacacctccaatcgttcccatgtttacgctatcattatgactgatctattcaccaagtggattgtaatattgccgctctgcgacgtaagcgcatccgaggtgtctaaggcaattataaacattttcttcctctatgggcctccccagaaaattatcatggatcagcgagacgagttcattcaacaaaaggtgttcattagctgcaaagtgcagtag

SEQ ID NO: 194457 - DNA, 1569 bp, Artificial Sequence
  derived and/or modified sequence
atggtaagatctgggaagaacggtgaccttcacctgaaacagatcgcctattacaagcgtacaggtgagtaccactccacaaccctgccatcagaaagatcggggatcagacgtgctgccaaaaaattcgtgtttaaggaaaagaagctgttttatgtcggaaaggacaggaagcagaaccggctggtcatcgtatctgaagaggagaaaaagaaagtgttgcgggagtgtcacgagaacgactccggagcccatcacggcatctcaagaacgctgaccctcgttgaatccaactactattggacatccgttaccaacgacgtcaagcaatgggtgtatgcgtgccagcactgccaagtggctaagaacacggttattgtagctcccaaacaacacctattgaaggtggagaatccttggagtcttgtgaccgtagatctgatgggcccttttcatacgtcaaatcgctcccatgtgtacgctatcattatgacagacctttttacgaagtggatcgttatcctgccgttgtgtgatgtatctgccagtgaagtctcaaaagcaattattaatatattcttcctctatgggccaccacagaagataatcatggatcaacgggacgagttcattcagcagatcaacatagagctgtataggctgtttgggatcaagcaaatcgttataagtcataccagcgggacagtgaaccctactgaatccacccccaatactataaaggcatttctgagcaagcactgcgccgaccatccaaataactgggatgatcacttaagtgctgttagttttgccttcaacgttacacaccttgaaccaacaaagaatacaccatacttccagatgttcagtcggaacccatacatgcctgaaacttccgattccctgcatgaggtggatggggataatacgtccatgtttgccaaaatattggacgcaataaaggaggccgataaaataatggaaaataagacaacatcccttgggcagatggagaataacaacctggatgagctgaataagagcaagatcatcgtcaagaaaaaaccaaagcagctgaatcctttccacctgaaggttggacatgaagtgctccggcagcgcaagaattggtggaaagatgggagattccagtcagagtgggtgggcccatgtgtcatagattacattacagagtccggttgtgcggtgctgagagataacaccggcgtccggctcaaaagacctataaaaatgtctcacctcaagccgtacatacgagagagctcagagcaggaatccctgtatttgctgcaaggatcagtggtggctgatcacgactatatcgggttgccggagatcccaatcggggcttaccaggctaatattctggtggaagatgcaactatcggcattgttgacaatgagcttctgacttcatcaaaggacagagagttgctggagtatcgcaacactaagatcagtcctcttatcgatgaccattccagcttagaaaaacaaaccttctctcttctggactcatccaatcaggtgctggagtatctttcatag

SEQ ID NO: 194458 - DNA, 669 bp, Artificial Sequence
  derived and/or modified sequence
atggtccgatccgggaagaatggcgacctccacctgaagcagatagcctattacaaaagaactggcgaatatcattccacaaccctgcctagcgaaagaagtgggattagaagggcagctaagaagttcgtgttcaaggagaagaaacttttttacgtgggtaaggaccgaaaacagaacaggctggtgatcgtgtctgaagaagagaaaaaaaaagtcctgagggagtgccatgagaacgacagcggggcacaccacgggattagtcggaccctcaccctcgtggagtctaactattattggactagtgtgacgaacgatgtcaagcagtgggtttatgcatgccagcattgccaggtggctaaaaacacagttatcgtagcccctaagcaacacctcctgaaggttgaaaacccatggtcattagtcacagtggacctgatgggtcctttccacacttctaaccgaagtcacgtgtacgccattattatgaccgatctgttcactaagtggatcgtaattttacctctctgcgacgtctcagcctccgaggtctcgaaggctatcattaatattttcttcttgtatgggcctccccaaaagatcatcatggatcagagggacgagtttattcagcagaaagttttcataagttgtaaagttcagtag

SEQ ID NO: 194459 - protein, 590 aa, Artificial Sequence
  derived and/or modified sequence
LDLLVPKVENVKLVDRYVSKKPANGILYLTATHLIYVEASGAARKETWIALHHIATVEKLPITSLGCPLTLRCKNFRVAHFVLDSDLVCHEVYISLLKLSQPALPEDLYAFSYNPKSSKEMRESGWKLIDPISDFGRMGIPNRNWTITDANIRFRFMGIENIHVMRSSLQKLLEVCELKTPTMSEFLSGLESSGWLRHIKAIMDAGIFITKAVKVEKASVLVHCSDGWDRTAQVCSVASILLDPFYRTFKGLMILIEKEWISMGHKFSQRCGHLDGDSKEVSPIFTQFLDCIWQLMEQFPCAFEFNENFLLEIHDHVFSCQFGNFLGNCQKDREDLRVYEKTHSVWPFLVQRKPDFRNPLYKGFTMYGVLNPSTVPYNIQFWCGMYNRFDKGLQPKQSMLESLLEIKKQRAMLETDVHELEKKLKVRDEPPEEICTCSQLGNILSQHLGSPLTNPLGFMGINGDLNTLMENGTLSREGGLRAQMDQVKSQGADLHHNCCEIVGSLRAINISGDVGISEAMGISGDMCTFEATGFSKDLGICGAMDISEATGISGNLGISEARGFSGDMGILGDTGISKASTKEADYSKHQ

SEQ ID NO: 194460 - protein, 704 aa, Artificial Sequence
  derived and/or modified sequence
MDHITVPKVENVKLVDRYVSKKPANGILYLTATHLIYVEASGAARKETWIALHHIATVEKLPITSLGCPLTLRCKNFRVAHFVLDSDLVCHEVYISLLKLSQPALPEDLYAFSYNPKSSKEMRESGWKLIDPISDFGRMGIPNRNWTITDANRNYEICSTYPPEIVVPKSVTLGTVVGSSKFRSKERVPVLSYLYKENNAAICRCSQPLSGFYTRCVDDELLLEAISQTNPGSQFMYVVDTRPKLNAMANRAAGKGYENEDNYANIRFRFMGIENIHVMRSSLQKLLEVCELKTPTMSEFLSGLESSGWLRHIKAIMDAGIFITKAVKVEKASVLVHCSDGWDRTAQVCSVASILLDPFYRTFKGLMILIEKEWISMGHKFSQRCGHLDGDSKEVSPIFTQFLDCIWQLMEQFPCAFEFNENFLLEIHDHVFSCQFGNFLGNCQKDREDLRVYEKTHSVWPFLVQRKPDFRNPLYKGFTMYGVLNPSTVPYNIQFWCGMYNRFDKGLQPKQSMLESLLEIKKQRAMLETDVHELEKKLKVRDEPPEEICTCSQLGNILSQHLGSPLTNPLGFMGINGDLNTLMENGTLSREGGLRAQMDQVKSQGADLHHNCCEIVGSLRAINISGDVGISEAMGISGDMCTFEATGFSKDLGICGAMDISEATGISGNLGISEARGFSGDMGILGDTGISKASTKEADYSKHQ

SEQ ID NO: 194461 - protein, 508 aa, Artificial Sequence
  derived and/or modified sequence
  misc_feature (1)..(1): Xaa can be any naturally occurring amino acid
XDSDLVCHEVYISLLKLSQPALPEDLYAFSYNPKSSKEMRESGWKLIDPISDFGRMGIPNRNWTITDANIRFRFMGIENIHVMRSSLQKLLEVCELKTPTMSEFLSGLESSGWLRHIKAIMDAGIFITKAVKVEKASVLVHCSDGWDRTAQVCSVASILLDPFYRTFKGLMILIEKEWISMGHKFSQRCGHLDGDSKEVSPIFTQFLDCIWQLMEQFPCAFEFNENFLLEIHDHVFSCQFGNFLGNCQKDREDLRVYEKTHSVWPFLVQRKPDFRNPLYKGFTMYGVLNPSTVPYNIQFWCGMYNRFDKGLQPKQSMLESLLEIKKQRAMLETDVHELEKKLKVRDEPPEEICTCSQLGNILSQHLGSPLTNPLGFMGINGDLNTLMENGTLSREGGLRAQMDQVKSQGADLHHNCCEIVGSLRAINISGDVGISEAMGISGDMCTFEATGFSKDLGICGAMDISEATGISGNLGISEARGFSGDMGILGDTGISKASTKEADYSKHQ

SEQ ID NO: 194462 - protein, 693 aa, Artificial Sequence
  derived and/or modified sequence
MDHITVPKVENVKLVDRYVSKKPANGILYLTATHLIYVEASGAARKETWIALHHIATVEKLPITSLGCPLTLRCKNFRVAHFVLDSDLVCHEVYISLLKLSQPALPEDLYAFSYNPKSSKEMRESGWKLIDPISDFGRMGIPNRNWTITDANRNYEICSTYPPEIVVPKSVTLGTVVGSSKFRSKERVPVLSYLYKENNAAICRCSQPLSGFYTRCVDDELLLEAISQTNPGSQFMYVVDTRPKLNAMANRAAGKGYENEDNYANIRFRFMGIENIHVMRSSLQKLLEVCELKTPTMSEFLSGLESSGWLRHIKAIMDAGIFITKAVKVEKASVLVHCSDGWDRTAQVCSVASILLDPFYRTFKGLMIWHFLVLIMRIVLQLAKMNLMDITKIFSLLQPDKEEEDTDTEEKQALNQAVYDNDSYTLDQLLRQERYKRFINSRSGWGVPGTPLRLAASYGHLSCLQVLLAHGADVDSLDVKAQTPLFTAVSHGHLDCVRVLLEAGASPGGSIYNNCSPVLTAARDGAVAILQELLDHGAEANVKAKLPVWASNIASCSGPLYLAAVYGHLDCFRLLLLHGADPDYNCTDQGLLARVPRPRTLLEICLHHNCEPEYIQLLIDFGANIYLPSLSLDLTSQDDKGIALLLQARATPRSLLSQVRLVVRRALCQAGQPQAINQLDIPPMLISYLKHQL

SEQ ID NO: 194463 - DNA, 1773 bp, Artificial Sequence
  derived and/or modified sequence
ctcgatttactcgtgcctaaggtggagaatgtgaagctggtggatcggtatgtgtcgaagaaaccagccaacggcattttgtatcttactgccacccatttgatttacgtggaggctagcggagcagcccgcaaagagacatggatagctctccaccacatcgctaccgtggagaaattgccaatcacttcgctcggatgccctctcacactccggtgcaagaattttcgggtggcacactttgttctagacagcgatctggtgtgtcatgaagtttacatatcgctattaaagctctcccagccagccctgcccgaggatctgtatgccttcagctataatcctaagtcctcaaaggagatgagagaaagcggatggaaattgattgatcctattagtgactttggccgcatgggtattcctaacagaaattggaccattaccgacgctaacataaggtttcgatttatggggattgaaaatattcacgtaatgcggtcctctctccagaaactgttggaggtttgcgagctgaaaaccccgacgatgagcgaatttctgtccgggctggagagctctggctggctccgccacataaaggcaatcatggacgcaggtattttcatcaccaaggctgtgaaggtggagaaagccagcgtactggtccactgctcggatggctgggacaggactgcccaggtctgttcagtggcctcaatactgctggaccctttctatcggacattcaagggattgatgatactgattgaaaaggagtggatctccatgggacataaattcagccagagatgtggacatcttgatggagattccaaagaggtctctcccatatttactcagttccttgactgcatctggcagctgatggagcaattcccttgtgcattcgagtttaacgaaaacttcttgctggagatccacgatcacgttttcagttgccagttcggcaactttttgggcaattgtcaaaaggatcgggaggaccttcgagtgtatgaaaaaacccactctgtatggcccttcttggtccagcgcaagcctgactttagaaatcctttgtataaggggttcaccatgtacggggtattgaacccctcgaccgtaccctacaatatccagttttggtgcggtatgtataacaggttcgacaagggcctgcagcctaagcagtcaatgttagagagcctgctggagatcaaaaaacagcgtgctatgttggagaccgacgtacacgaactcgaaaagaaattgaaagtgcgggacgagcctcccgaggagatttgcacttgctcccaactgggtaacattttgtcccagcacctcggaagccctctaaccaaccctctgggcttcatggggatcaatggcgatctgaacacactaatggagaatggcacactctcaagagaaggagggctgcgtgcacaaatggaccaggtgaagtctcagggtgccgacctacatcataactgttgtgaaatagtagggagtcttcgggcaatcaacatctctggagacgtgggcatttcggaggccatgggcatcagcggagacatgtgcacatttgaggcaaccggctttagcaaggacctgggtatctgtggagcgatggatatcagtgaggccaccggtatatcgggtaacctggggatctccgaagcccgaggattttccggcgatatgggtatcctgggtgatactggaattagtaaggcctccactaaagaagccgactactctaagcatcaatag

SEQ ID NO: 194464 - DNA, 2115 bp, Artificial Sequence
  derived and/or modified sequence
atggaccacattaccgtaccgaaggtggagaacgtcaagctagtcgataggtacgtctctaaaaagccagccaatggaatcctgtatctcacagccacccacctgatctatgttgaggcttcaggggcagccaggaaagagacctggattgcactccatcacattgcaaccgtggagaagttgccaattaccagtcttggttgtcccctgacgctgcggtgtaagaacttcagggtagcccactttgttctggattcagatttggtatgccatgaggtctatatatctctgttgaagctgtctcagccagccctgcccgaggatctatacgctttcagctataatcccaagtcttccaaggagatgagagagtcgggctggaaactgatcgacccaatctcggattttgggcgcatgggcatacctaataggaactggaccatcacagatgccaaccgcaactacgaaatatgttccacctatccacccgagattgtcgttccaaagtcagtcaccctcggcactgtggtgggttccagcaagttccggagcaaagagcgggtcccagtgctgtcatatttatacaaagagaataacgccgctatttgtcgttgcagtcagcctcttagcggattctatacccggtgcgttgacgacgagttgttgctcgaagctatctcccagacaaaccccgggagccagttcatgtatgtagtggataccagacccaagctgaatgctatggctaatcgcgccgcgggcaaaggctacgaaaacgaggacaattacgccaacatcagattcagattcatggggatcgaaaatatccacgttatgcgctccagcctgcaaaagttattggaagtctgtgagctcaaaactcccaccatgtccgaatttctttctggactcgagagctctggctggctccgccatatcaaagccataatggacgctggcatcttcattacgaaagccgttaaggtggaaaaagcatccgtcttggtacactgtagcgacggatgggatcggaccgctcaggtatgttccgtggccagtatactgctcgaccccttctatcgtacttttaaaggactgatgatacttatcgaaaaggagtggatttccatgggccataaattctctcagaggtgcggacatctggatggggatagtaaggaagtgtccccaattttcacacagtttctcgactgtatttggcaactcatggaacaatttccatgcgcctttgagtttaatgagaacttcctactcgaaattcatgatcacgtgttcagttgtcagttcgggaactttctgggcaactgccagaaagatcgcgaagatctgagggtgtacgaaaagactcattcggtgtggccgtttttggtacagcgaaagccagactttcgcaaccctctgtataagggcttcaccatgtatggcgtgctgaacccctcaaccgtcccctataatatccagttttggtgcggcatgtacaataggtttgacaaggggctccagcccaaacagagcatgttggaatcgctgctagagatcaagaaacagagggccatgttggagaccgatgtccacgagcttgagaagaaactgaaagtccgggacgaacccccggaggagatttgcacctgctctcagctgggcaatattttgagtcagcaccttggatctcccctgacaaaccctctgggattcatgggcatcaatggcgacctcaacaccctgatggaaaatggtaccctttcaagagagggcgggttgcgcgcacagatggaccaggtcaagtctcagggagcggatctgcatcacaactgctgcgaaattgtggggagtctgcgggccatcaacattagcggtgacgttggcatctccgaagctatgggtataagcggcgatatgtgtacgttcgaagctacaggattcagcaaagatcttggcatatgcggggccatggatatctccgaagccaccgggatttctgggaacttaggcatttccgaagctcgcggttttagtggagacatggggatcctgggcgacactggtattagcaaggcaagcacaaaagaggccgactacagcaagcaccagtag

SEQ ID NO: 194465 - DNA, 1527 bp, Artificial Sequence
  derived and/or modified sequence
tgagattcagatttggtgtgccatgaggtgtacatttctctccttaaactgtcacaacctgctctaccagaggacctttacgccttctcatacaatcccaagtccagtaaggaaatgagggaaagcggatggaaattaatcgatccaatttccgacttcggtcgtatgggcatcccaaaccggaactggaccatcaccgatgccaatattcgctttcggttcatgggaatcgagaacatccatgtgatgcgcagctccctccaaaagctactggaggtctgcgagctcaaaacccctactatgagcgagtttctatcagggctggagtcttcaggatggctcaggcacattaaagcaatcatggatgcaggaatttttattaccaaggcagtgaaggtggaaaaggcctccgtgctggttcactgcagcgatggatgggaccggaccgcccaggtgtgtagcgttgcttcaattctcctcgacccattttatcgtaccttcaagggcctgatgatcctgatcgagaaggaatggatttccatgggacacaagttttctcagcgctgcggccacctggacggggatagcaaagaggtgagcccaatttttacacagttcttggactgtatctggcaactgatggagcagttcccttgtgcattcgagtttaatgagaactttctgctggagattcatgatcacgttttctcctgccaatttggtaactttttgggaaactgccagaaggatcgcgaggacttacgcgtctacgagaagactcactctgtgtggccattcctggttcagcgaaagccggatttccgcaatcccctatacaagggattcactatgtacggagtgcttaatccctcaacagtgccttacaatattcagttctggtgcggaatgtataatcggtttgataagggactgcagcccaaacaaagcatgctggaaagcttgctggaaattaaaaaacagcgggctatgcttgagacagacgtgcatgaactggagaaaaaattaaaggtcagagatgagccaccagaggaaatatgtacttgtagccaactaggcaacatattgagtcagcacttaggtagccccttaaccaacccgctgggtttcatgggaattaatggggatttaaacacgctgatggagaacggaaccctgtcacgagaaggtggtctcagggcccagatggaccaggtgaaatcgcagggcgccgatctgcaccataattgttgcgagattgtggggagtcttcgtgctattaacatctcaggagatgttgggatcagcgaagctatgggcatcagcggcgatatgtgtactttcgaggccaccggattttctaaggacttaggaatctgtggcgccatggacataagcgaggcgactggcatttctgggaatcttggtatatccgaagctagaggcttctccggagatatgggcatcctcggagataccggcatctctaaggcctccacaaaggaagcagactactcaaagcatcagtag

SEQ ID NO: 194466 - DNA, 2082 bp, Artificial Sequence
  derived and/or modified sequence
atggatcacataaccgtcccaaaagtggagaatgtgaagcttgtggatcggtacgtgtccaagaagccagcgaacgggattctctacttgaccgctactcatctcatttatgtcgaggcctctggcgccgctaggaaagagacatggatagccctccaccatattgcaacggttgagaaattgcccattacatcactggggtgcccactgaccttgaggtgcaaaaacttcagggtggctcacttcgtgctggattcagaccttgtctgccacgaagtttacattagcttgctgaagctctctcagccagcccttcccgaagatctgtacgcctttagttataaccctaaaagcagcaaggaaatgagagaaagcgggtggaaactgattgatcctattagcgacttcggaagaatgggtattccaaatcgtaattggaccattaccgacgccaatcgaaattacgagatctgttccacctatccacctgagattgttgttccgaagagtgtgaccttgggcacagtggtgggaagctcaaagtttagatcaaaggagagagtcccagttctgtcatatttatataaggagaataacgcagccatatgtcggtgcagtcagcccttgtcaggcttctatacacggtgcgtcgatgatgagctgttgctggaagccatatcccaaaccaatcctggcagccagttcatgtatgtggttgacactagacccaagctcaacgccatggcaaaccgggctgccgggaaggggtacgaaaatgaggacaattacgcaaacatccggttcaggtttatgggcatagaaaatatccacgtgatgagatcctcgctacagaagctgttagaagtgtgcgagctgaaaacaccaacaatgagtgagttcctttcaggccttgagtccagtggctggctgcggcacatcaaagctatcatggacgctggaattttcattacaaaggccgtaaaggtggagaaggcctccgtgctggttcactgttccgacggatgggaccgaacggcacaggtttgttccgtggcatctatacttttggacccattttacagaacctttaaagggctaatgatttggcactttttagtgctgatcatgcgcatagtgctgcagctggccaaaatgaatctgatggacattacaaagatattttccctattgcagccagacaaagaggaagaggacactgacacggaagagaaacaggctcttaatcaggcagtctatgataacgactcctacacactcgaccagctgctgcggcaggagcgctacaagcggtttatcaattctagatccgggtggggagtgcccgggacccctctgagactcgctgcttcttatggacacctttcgtgtcttcaagtgctccttgcccatggggccgatgttgatagtctggatgtgaaggcacaaaccccactgtttaccgccgtttcgcacggtcacctggactgcgtgcgcgtcttgctggaggctggggcatcccctggaggcagcatctataacaattgttcgccggtgttaaccgcagcacgcgatggcgctgtagcaatccttcaggagctgctagatcacggagcagaagccaacgtcaaggcaaagttaccagtctgggcctcaaatatagcctcctgcagtggacccctgtatctggctgccgtttatggtcacctcgattgctttcggctgttactgctccatggagcagaccccgattacaattgcactgaccagggtcttctggccagggtcccgagaccaaggaccctgctcgagatctgccttcaccacaactgtgaaccggagtatattcaattgttaattgatttcggtgcgaatatctacctcccgtccttgagtctggatttaaccagtcaagatgataaggggattgcactgttactccaggcccgggctacgccaagatcattgctgtcccaggtccgactggtcgtgcggcgcgccctctgccaagcgggccaacctcaggcaattaaccaactagacatacccccgatgctcataagttaccttaaacaccagctgtag

SEQ ID NO: 194467 - DNA, 1773 bp, Artificial Sequence
  derived and/or modified sequence
ctggacctgctggtgcccaaggtggagaatgtgaagctggtggacagatatgtgtccaagaagccagccaacggcatcctgtacctgacagccacccacctgatctacgtggaggccagcggggccgccaggaaggagacctggatcgccctgcaccacatcgccaccgtggagaagctgcccatcaccagcctgggctgccccctgaccctgcgctgcaagaacttccgggtggcccactttgtgctggacagcgacctggtgtgccacgaggtgtacatcagcctgctgaagctgagccagcctgccctgcctgaggacctgtatgccttctcctacaaccccaagagcagcaaggagatgagggagagcggctggaagctgattgaccccatcagtgactttggaaggatgggcatccccaacagaaactggaccatcacagatgccaacatccgcttccgcttcatgggcatcgagaacatccacgtgatgaggagcagcctgcagaagctgctggaggtgtgtgagctgaagacccccaccatgtctgagttcctgagcggcctggagagcagcggctggctgcggcacatcaaggccatcatggatgctggcatcttcatcaccaaggctgtgaaggtggagaaggcctctgtgctggtgcactgcagtgatggctgggacagaacagcccaggtgtgcagcgtggccagcatcctgctggaccccttctaccgcaccttcaagggcctgatgatcctgattgagaaggagtggatctccatgggccacaagttcagccagagatgtggccacctggatggagacagcaaggaggtgagccccatcttcacccagttcctggactgcatctggcagctgatggagcagttcccctgtgcctttgagttcaatgaaaacttcctgctggagatccatgaccacgtgttcagctgccagtttggaaacttcctgggcaactgccagaaggaccgggaggacctgcgggtgtatgagaagacccacagcgtgtggcccttcctggtgcagaggaagccagacttcaggaaccccctgtacaagggcttcaccatgtatggagtgctgaaccccagcacagtgccctacaacatccagttctggtgtggcatgtacaacagatttgataaaggcctgcagcccaagcagagcatgctggagagcctgctggagatcaagaagcagagggccatgctggagacagatgtgcatgagctggagaagaagctgaaggtgagagatgagcccccagaggagatctgcacctgcagccagctgggcaacatcctgagccagcacctgggcagccccctgaccaaccccctgggcttcatgggcatcaacggggacctgaacaccctgatggagaatggcaccctgagccgggagggcggcctgcgggcccagatggaccaggtgaagagccagggcgctgacctgcaccacaactgctgtgaaattgtgggcagcctgcgggccatcaacatctctggagatgtgggcatcagcgaggccatgggcatcagcggggacatgtgcacctttgaggccaccggcttcagcaaggacctgggcatctgtggggccatggacatcagcgaggccaccggcatcagcggcaacctgggcatcagcgaggcccggggcttcagcggggacatgggcatcctgggggacaccggcatcagcaaggccagcaccaaggaggccgactacagcaagcaccagtag

SEQ ID NO: 194468 - DNA, 2115 bp, Artificial Sequence
  derived and/or modified sequence
atggaccacatcaccgtgcccaaggtggagaatgtgaagctggtggaccgctacgtgtccaagaagccagccaacggcatcctgtacctgacagccacccacctgatctacgtggaggccagcggggccgccaggaaggagacctggatcgccctgcaccacatcgccaccgtggagaagctgcccatcaccagcctgggctgccccctgaccctgcgctgcaagaacttccgggtggcccactttgtgctggacagcgacctggtgtgccacgaggtgtacatcagcctgctgaagctgagccagcctgccctgcctgaggacctgtatgccttctcctacaaccccaagagcagcaaggagatgagggagagcggctggaagctgattgaccccatcagtgactttggccgcatgggcatccccaacagaaactggaccatcacagatgccaacagaaattatgagatctgcagcacctacccacctgagatcgtggtgcccaagtctgtgaccctgggcaccgtggtgggcagcagcaagttccgcagcaaggagcgggtgcctgtgctgagctacctgtacaaggaaaataatgctgccatctgccgctgcagccagcccctgagcggcttctacacccgctgtgtggatgatgagctgctgctggaggccatcagccagaccaaccctggcagccagttcatgtatgtggtggacacccggcccaagctgaatgccatggccaacagagctgctgggaagggctatgaaaatgaagacaactatgccaacatccgcttccgcttcatgggcatcgagaacatccacgtgatgaggagcagcctgcagaagctgctggaggtgtgtgagctgaagacccccaccatgtctgagttcctgagcggcctggagagcagcggctggctgcggcacatcaaggccatcatggatgctggcatcttcatcaccaaggctgtgaaggtggagaaggcctctgtgctggtgcactgcagtgatggctgggacagaacagcccaggtgtgcagcgtggccagcatcctgctggaccccttctaccgcaccttcaagggcctgatgatcctgattgagaaggagtggatctccatgggccacaagttcagccagagatgtggccacctggatggagacagcaaggaggtgagccccatcttcacccagttcctggactgcatctggcagctgatggagcagttcccctgtgcctttgagttcaatgaaaacttcctgctggagatccatgaccacgtgttcagctgccagtttggaaacttcctgggcaactgccagaaggaccgggaggacctgcgggtgtatgagaagacccacagcgtgtggcccttcctggtgcagaggaagccagacttcaggaaccccctgtacaagggcttcaccatgtatggagtgctgaaccccagcacagtgccctacaacatccagttctggtgtggcatgtacaacagatttgataaaggcctgcagcccaagcagagcatgctggagagcctgctggagatcaagaagcagagggccatgctggagacagatgtgcatgagctggagaagaagctgaaggtgagagatgagcccccagaggagatctgcacctgcagccagctgggcaacatcctgagccagcacctgggcagccccctgaccaaccccctgggcttcatgggcatcaacggggacctgaacaccctgatggagaatggcaccctgagccgggagggcggcctgcgggcccagatggaccaggtgaagagccagggcgctgacctgcaccacaactgctgtgaaattgtgggcagcctgcgggccatcaacatctctggagatgtgggcatcagcgaggccatgggcatcagcggggacatgtgcacctttgaggccaccggcttcagcaaggacctgggcatctgtggggccatggacatcagcgaggccaccggcatcagcggcaacctgggcatcagcgaggcccggggcttcagcggggacatgggcatcctgggggacaccggcatcagcaaggccagcaccaaggaggccgactacagcaagcaccagtag

SEQ ID NO: 194469 - DNA, 1527 bp, Artificial Sequence
  derived and/or modified sequence
tgagattctgacctggtgtgccacgaggtgtacatcagcctgctgaagctgagccagcctgccctgcctgaggacctgtatgccttctcctacaaccccaagagcagcaaggagatgagggagagcggctggaagctgattgaccccatcagtgactttggaaggatgggcatccccaacagaaactggaccatcacagatgccaacatccgcttccgcttcatgggcatcgagaacatccacgtgatgaggagcagcctgcagaagctgctggaggtgtgtgagctgaagacccccaccatgtctgagttcctgagcggcctggagagcagcggctggctgcggcacatcaaggccatcatggatgctggcatcttcatcaccaaggctgtgaaggtggagaaggcctctgtgctggtgcactgcagtgatggctgggacagaacagcccaggtgtgcagcgtggccagcatcctgctggaccccttctaccgcaccttcaagggcctgatgatcctgattgagaaggagtggatctccatgggccacaagttcagccagagatgtggccacctggatggagacagcaaggaggtgagccccatcttcacccagttcctggactgcatctggcagctgatggagcagttcccctgtgcctttgagttcaatgaaaacttcctgctggagatccatgaccacgtgttcagctgccagtttggaaacttcctgggcaactgccagaaggaccgggaggacctgcgggtgtatgagaagacccacagcgtgtggcccttcctggtgcagaggaagccagacttcaggaaccccctgtacaagggcttcaccatgtatggagtgctgaaccccagcacagtgccctacaacatccagttctggtgtggcatgtacaacagatttgataaaggcctgcagcccaagcagagcatgctggagagcctgctggagatcaagaagcagagggccatgctggagacagatgtgcatgagctggagaagaagctgaaggtgagagatgagcccccagaggagatctgcacctgcagccagctgggcaacatcctgagccagcacctgggcagccccctgaccaaccccctgggcttcatgggcatcaacggggacctgaacaccctgatggagaatggcaccctgagccgggagggcggcctgcgggcccagatggaccaggtgaagagccagggcgctgacctgcaccacaactgctgtgaaattgtgggcagcctgcgggccatcaacatctctggagatgtgggcatcagcgaggccatgggcatcagcggggacatgtgcacctttgaggccaccggcttcagcaaggacctgggcatctgtggggccatggacatcagcgaggccaccggcatcagcggcaacctgggcatcagcgaggcccggggcttcagcggggacatgggcatcctgggggacaccggcatcagcaaggccagcaccaaggaggccgactacagcaagcaccagtag

SEQ ID NO: 194470 - DNA, 2082 bp, Artificial Sequence
  derived and/or modified sequence
atggaccacatcaccgtgcccaaggtggagaatgtgaagctggtggaccgctacgtgtccaagaagccagccaacggcatcctgtacctgacagccacccacctgatctacgtggaggccagcggggccgccaggaaggagacctggatcgccctgcaccacatcgccaccgtggagaagctgcccatcaccagcctgggctgccccctgaccctgcgctgcaagaacttccgggtggcccactttgtgctggacagcgacctggtgtgccacgaggtgtacatcagcctgctgaagctgagccagcctgccctgcctgaggacctgtatgccttctcctacaaccccaagagcagcaaggagatgagggagagcggctggaagctgattgaccccatcagtgactttggccgcatgggcatccccaacagaaactggaccatcacagatgccaacagaaattatgagatctgcagcacctacccacctgagatcgtggtgcccaagtctgtgaccctgggcaccgtggtgggcagcagcaagttccgcagcaaggagcgggtgcctgtgctgagctacctgtacaaggaaaataatgctgccatctgccgctgcagccagcccctgagcggcttctacacccgctgtgtggatgatgagctgctgctggaggccatcagccagaccaaccctggcagccagttcatgtatgtggtggacacccggcccaagctgaatgccatggccaacagagctgctgggaagggctatgaaaatgaagacaactatgccaacatccgcttccgcttcatgggcatcgagaacatccacgtgatgaggagcagcctgcagaagctgctggaggtgtgtgagctgaagacccccaccatgtctgagttcctgagcggcctggagagcagcggctggctgcggcacatcaaggccatcatggatgctggcatcttcatcaccaaggctgtgaaggtggagaaggcctctgtgctggtgcactgcagtgatggctgggacagaacagcccaggtgtgcagcgtggccagcatcctgctggaccccttctaccgcaccttcaagggcctgatgatctggcacttcctggtgctgatcatgagaattgtgctgcagctggccaagatgaacctgatggacatcaccaagatcttcagcctgctgcagcctgacaaggaggaggaggacacagacacagaggagaagcaggccctgaaccaggccgtgtatgacaatgacagctacaccctggaccagctgctgcggcaggagcgctacaagcgcttcatcaacagccgcagcggctggggcgtgcccggcacccccctgcggctggccgccagctatggccacctgagctgcctgcaggtgctgctggcccacggggctgatgtggacagcctggatgtgaaggcccagacccccctcttcaccgctgtgagccacggccacctggactgtgtgcgggtgctgctggaggccggggccagccctgggggcagcatctacaacaactgcagccctgtgctgacagctgccagagatggagctgtggccatcctgcaggagctgctggaccacggggctgaggccaacgtgaaggccaagctgcctgtgtgggccagcaacatcgccagctgcagcggccccctgtacctggccgctgtgtatggccacctggactgcttccggctgctgctgctgcacggggctgaccctgactacaactgcacagaccagggcctgctggcccgggtgccccggcccaggaccctgctggagatctgcctgcaccacaactgtgagcctgagtacatccagctgctgattgactttggagccaacatctacctgcccagcctgagcctggacctgaccagccaggatgacaagggcatcgccctgctgctgcaggcccgggccacccccaggagcctgctgagccaggtgcggctggtggtgcggcgggccctgtgccaggccggccagccccaggccatcaaccagctggacatcccccccatgctgatctcctacctgaagcaccagctgtag

SEQ ID NO: 194471 - DNA, 2228 bp, Artificial Sequence
  derived and/or modified sequence
cttgacctattagttcctaaggtagaaaacgtgaaattggtggatcgttatgtgagtaagaaaccagctaatgggattctttatcttactgcaacccacctgatctatgtggaggcttcaggtgcagcccggaaagaaacatggattgcactccatcacattgccactgtggagaagttacccatcactagcctgggttgtcccctgaccctccgctgcaagaatttccgggtggcccactttgttttagattctgaccttgtgtgccatgaggtttatatttcactgctcaagctttctcagccagcattacctgaagatctttatgctttttcttataatcccaaatcctcaaaagagatgagggaaagtggatggaaactgattgacccaatatcagactttgggcgtatgggaatacccaacagaaactggaccataacagatgccaacattcgcttcagattcatgggcattgagaacatccatgtaatgcggagcagtctgcagaaactcttggaagtttgtgaattgaaaactccaacaatgagtgaatttcttagcggcctggagagctcagggtggttaagacacattaaagctattatggatgctggaattttcattacaaaggcagtgaaggtagaaaaggccagtgtcttagtccattgttctgatggatgggaccgcacagcacaagtctgctcagtggctagcatcctcctagatccattttataggacattcaaaggactcatgatcttgatagagaaggaatggatatccatgggccacaagttttcccaaaggtgtggccacctcgatggggactctaaagaagtgtcccctatcttcacccagttcctagactgtatctggcaattaatggaacagtttccctgtgcctttgagtttaatgaaaacttcctgctggagattcatgaccatgttttctcctgccagtttggaaacttccttggtaactgccagaaggatcgggaagatctaagagtctatgagaaaacacattctgtgtggcctttcttggttcagaggaaaccagacttcaggaaccctctctataaaggcttcactatgtatggggtactcaatcctagtactgtgccctacaacattcagttctggtgtgggatgtataaccgctttgacaaagggctgcagcccaagcagagtatgctagagagcctcctggaaattaagaaacagagagcaatgctggagacagatgtgcatgaactagaaaagaaactaaaagtccgtgatgagccaccagaagagatctgtacctgctctcaattaggaaacatattatcccagcatctgggaagtcctttgaccaatcctcttggctttatgggtatcaatggagacctgaataccctgatggagaatggcaccctatccagggaaggaggcctccgagctcagatggatcaagtaaaaagccagggtgcagacctccaccataactgttgtgagattgtgggcagccttagggccataaatatctctggggatgtgggcatctctgaggccatgggcatctctggagacatgtgcacctttgaggctacgggcttctccaaagacttaggaatctgtggggccatggacatctctgaggccactggcatctctggaaacttgggtatttctgaggccaggggtttctctggggacatgggcatcttgggggacacaggcatctccaaggccagcaccaaggaggcagactactccaagcatcagtgagttagttactcatcttccatgctaggtatacctacagcagctacaatgattcttgtcccagagagggctatgctgcttttccaattggtttaagtgggtgaagccagggcacccctctccccacttaagtctggaagggaattactttactgattaagtgaccaatatgttcatattaagcagtacagagtgtaggcaagagaaagaatatgttattgttctaaaatgggatttaactatagaaatgttgcctctcagctgagacacatattaagctggttctactgtctgttttccttaatgatcgacctgccctattttctatcctcactgcagtaatgtgaaagtgaagtggaaatattgtcacaatggtcaataatgacccttttgagggtatggagagatggtatacagcaggtaactgtgaattgcagaataaattgaaagaaaatttt

SEQ ID NO: 194472 - DNA, 2639 bp, Artificial Sequence
  derived and/or modified sequence
ggcggctagaccggtggcggcggcatctggagtagcactgagatcttccggtggcgggaactgcagtcatggatcatattacggtacccaaggtagaaaacgtgaaattggtggatcgttatgtgagtaagaaaccagctaatgggattctttatcttactgcaacccacctgatctatgtggaggcttcaggtgcagcccggaaagaaacatggattgcactccatcacattgccactgtggagaagttacccatcactagcctgggttgtcccctgaccctccgctgcaagaatttccgggtggcccactttgttttagattctgaccttgtgtgccatgaggtttatatttcactgctcaagctttctcagccagcattacctgaagatctttatgctttttcttataatcccaaatcctcaaaagagatgagggaaagtggatggaaactgattgacccaatatcagactttgggcgtatgggaatacccaacagaaactggaccataacagatgccaacagaaactatgagatatgcagcacctaccctcctgaaatagtggttcctaaatctgttaccttgggaacggtggttggaagttcaaagttcagaagtaaagaacgtgtccctgtgctctcctacctctacaaagagaacaatgctgccatttgccgctgtagccagcctctctctggattttacactcgctgtgtagatgatgagctcttgttggaggccattagccaaacaaacccagggagccagtttatgtatgttgtagacacaagaccaaagttgaatgccatggccaaccgagcagctgggaaggggtatgaaaatgaagacaactatgccaacattcgcttcagattcatgggcattgagaacatccatgtaatgcggagcagtctgcagaaactcttggaagtttgtgaattgaaaactccaacaatgagtgaatttcttagcggcctggagagctcagggtggttaagacacattaaagctattatggatgctggaattttcattacaaaggcagtgaaggtagaaaaggccagtgtcttagtccattgttctgatggatgggaccgcacagcacaagtctgctcagtggctagcatcctcctagatccattttataggacattcaaaggactcatgatcttgatagagaaggaatggatatccatgggccacaagttttcccaaaggtgtggccacctcgatggggactctaaagaagtgtcccctatcttcacccagttcctagactgtatctggcaattaatggaacagtttccctgtgcctttgagtttaatgaaaacttcctgctggagattcatgaccatgttttctcctgccagtttggaaacttccttggtaactgccagaaggatcgggaagatctaagagtctatgagaaaacacattctgtgtggcctttcttggttcagaggaaaccagacttcaggaaccctctctataaaggcttcactatgtatggggtactcaatcctagtactgtgccctacaacattcagttctggtgtgggatgtataaccgctttgacaaagggctgcagcccaagcagagtatgctagagagcctcctggaaattaagaaacagagagcaatgctggagacagatgtgcatgaactagaaaagaaactaaaagtccgtgatgagccaccagaagagatctgtacctgctctcaattaggaaacatattatcccagcatctgggaagtcctttgaccaatcctcttggctttatgggtatcaatggagacctgaataccctgatggagaatggcaccctatccagggaaggaggcctccgagctcagatggatcaagtaaaaagccagggtgcagacctccaccataactgttgtgagattgtgggcagccttagggccataaatatctctggggatgtgggcatctctgaggccatgggcatctctggagacatgtgcacctttgaggctacgggcttctccaaagacttaggaatctgtggggccatggacatctctgaggccactggcatctctggaaacttgggtatttctgaggccaggggtttctctggggacatgggcatcttgggggacacaggcatctccaaggccagcaccaaggaggcagactactccaagcatcagtgagttagttactcatcttccatgctaggtatacctacagcagctacaatgattcttgtcccagagagggctatgctgcttttccaattggtttaagtgggtgaagccagggcacccctctccccacttaagtctggaagggaattactttactgattaagtgaccaatatgttcatattaagcagtacagagtgtaggcaagagaaagaatatgttattgttctaaaatgggatttaactatagaaatgttgcctctcagctgagacacatattaagctggttctactgtctgttttccttaatgatcgacctgccctattttctatcctcactgcagtaatgtgaaagtgaagtggaaatattgtcacaatggtcaataatgacccttttgagggtatggagagatggtatacagcaggtaactgtgaattgcagaataaattgaaagaaaatttta

SEQ ID NO: 194473 - DNA, 1981 bp, Artificial Sequence
  derived and/or modified sequence
agattctgaccttgtgtgccatgaggtttatatttcactgctcaagctttctcagccagcattacctgaagatctttatgctttttcttataatcccaaatcctcaaaagagatgagggaaagtggatggaaactgattgacccaatatcagactttgggcgtatgggaatacccaacagaaactggaccataacagatgccaacattcgcttcagattcatgggcattgagaacatccatgtaatgcggagcagtctgcagaaactcttggaagtttgtgaattgaaaactccaacaatgagtgaatttcttagcggcctggagagctcagggtggttaagacacattaaagctattatggatgctggaattttcattacaaaggcagtgaaggtagaaaaggccagtgtcttagtccattgttctgatggatgggaccgcacagcacaagtctgctcagtggctagcatcctcctagatccattttataggacattcaaaggactcatgatcttgatagagaaggaatggatatccatgggccacaagttttcccaaaggtgtggccacctcgatggggactctaaagaagtgtcccctatcttcacccagttcctagactgtatctggcaattaatggaacagtttccctgtgcctttgagtttaatgaaaacttcctgctggagattcatgaccatgttttctcctgccagtttggaaacttccttggtaactgccagaaggatcgggaagatctaagagtctatgagaaaacacattctgtgtggcctttcttggttcagaggaaaccagacttcaggaaccctctctataaaggcttcactatgtatggggtactcaatcctagtactgtgccctacaacattcagttctggtgtgggatgtataaccgctttgacaaagggctgcagcccaagcagagtatgctagagagcctcctggaaattaagaaacagagagcaatgctggagacagatgtgcatgaactagaaaagaaactaaaagtccgtgatgagccaccagaagagatctgtacctgctctcaattaggaaacatattatcccagcatctgggaagtcctttgaccaatcctcttggctttatgggtatcaatggagacctgaataccctgatggagaatggcaccctatccagggaaggaggcctccgagctcagatggatcaagtaaaaagccagggtgcagacctccaccataactgttgtgagattgtgggcagccttagggccataaatatctctggggatgtgggcatctctgaggccatgggcatctctggagacatgtgcacctttgaggctacgggcttctccaaagacttaggaatctgtggggccatggacatctctgaggccactggcatctctggaaacttgggtatttctgaggccaggggtttctctggggacatgggcatcttgggggacacaggcatctccaaggccagcaccaaggaggcagactactccaagcatcagtgagttagttactcatcttccatgctaggtatacctacagcagctacaatgattcttgtcccagagagggctatgctgcttttccaattggtttaagtgggtgaagccagggcacccctctccccacttaagtctggaagggaattactttactgattaagtgaccaatatgttcatattaagcagtacagagtgtaggcaagagaaagaatatgttattgttctaaaatgggatttaactatagaaatgttgcctctcagctgagacacatattaagctggttctactgtctgttttccttaatgatcgacctgccctattttctatcctcactgcagtaatgtgaaagtgaagtggaaatattgtcacaatggtcaataatgacccttttgagggtatggagagatggtatacagcaggtaactgtgaattgcagaataaattgaaagaaaatttta

SEQ ID NO: 194474 - DNA, 2200 bp, Artificial Sequence
  derived and/or modified sequence
agaaacccgggttgaggcaggaggcggctagaccggtggcggcggcatctggagtagcactgagatcttccggtggcgggaactgcagtcatggatcatattacggtacccaaggtagaaaacgtgaaattggtggatcgttatgtgagtaagaaaccagctaatgggattctttatcttactgcaacccacctgatctatgtggaggcttcaggtgcagcccggaaagaaacatggattgcactccatcacattgccactgtggagaagttacccatcactagcctgggttgtcccctgaccctccgctgcaagaatttccgggtggcccactttgttttagattctgaccttgtgtgccatgaggtttatatttcactgctcaagctttctcagccagcattacctgaagatctttatgctttttcttataatcccaaatcctcaaaagagatgagggaaagtggatggaaactgattgacccaatatcagactttgggcgtatgggaatacccaacagaaactggaccataacagatgccaacagaaactatgagatatgcagcacctaccctcctgaaatagtggttcctaaatctgttaccttgggaacggtggttggaagttcaaagttcagaagtaaagaacgtgtccctgtgctctcctacctctacaaagagaacaatgctgccatttgccgctgtagccagcctctctctggattttacactcgctgtgtagatgatgagctcttgttggaggccattagccaaacaaacccagggagccagtttatgtatgttgtagacacaagaccaaagttgaatgccatggccaaccgagcagctgggaaggggtatgaaaatgaagacaactatgccaacattcgcttcagattcatgggcattgagaacatccatgtaatgcggagcagtctgcagaaactcttggaagtttgtgaattgaaaactccaacaatgagtgaatttcttagcggcctggagagctcagggtggttaagacacattaaagctattatggatgctggaattttcattacaaaggcagtgaaggtagaaaaggccagtgtcttagtccattgttctgatggatgggaccgcacagcacaagtctgctcagtggctagcatcctcctagatccattttataggacattcaaaggactcatgatctggcatttccttgtgctcataatgagaatagttctccaattagccaagatgaacctcatggacatcaccaagatcttctccctcctgcagcccgacaaggaggaggaggacactgacacagaggagaagcaggctctcaatcaagcagtgtatgacaacgactcctatactttggaccagcttttgcgccaggagcgttacaaacgtttcatcaacagcaggagtggctggggtgttcctgggacacccttgcgcttggctgcttcttatggccacttgagctgtttgcaagtcctcttagcccatggtgctgatgttgacagcttggatgtcaaggcacagacgccacttttcactgctgtcagtcatggccatctggactgtgtacgtgtgcttttggaagctggtgcctctcctggtggtagcatctacaacaactgttctcccgtgctcacagctgcccgtgatggtgctgttgctatcctgcaggagctcctagaccatggtgcagaggccaacgtcaaagctaaactaccagtctgggcatcaaacatagcttcatgttctggccccctctatttggccgcagtctacgggcacctggactgtttccgcctgcttttgctccacggggcagaccctgactacaactgcactgaccagggcctattggctcgtgtcccaagaccccgcaccctccttgaaatctgcctccatcataattgtgagccagagtatatccagctgttaatcgattttggtgctaatatctaccttccatctctctcccttgacctgacctcacaagatgataaaggcattgcattgctgctacaggcccgagccactccacggtcacttctatcacaggtccgtttagtcgtccgcagagccttgtgccaggctggccagccacaagccatcaaccagctggatattcctcccatgttgattagctacctaaaacaccaactgtaatcttgcagtctccccaggaacttatgat

SEQ ID NO: 194475 - DNA, 1773 bp, Artificial Sequence
  derived and/or modified sequence
ctggacctgctggtgcccaaggtggagaacgtgaagctggtggacagatacgtgagtaagaagccggccaacggaatcctatatttgaccgccacccaccttatatatgtggaagctagcggcgctgcccgcaaggagacttggattgccctgcatcacatagctactgtggagaagctgcccatcacttctctcggctgcccactaactcttagatgtaagaattttagggtggctcatttcgttctggactcggacttggtgtgtcatgaagtgtatatctccctcctcaagctgagccagcccgccctccccgaggatttgtatgccttttcttacaaccctaaatcttctaaggaaatgcgtgagtctggctggaaactgattgaccccatcagcgactttgggcgcatggggataccaaatagaaactggaccatcacagatgccaacattcggttccggttcatgggcattgaaaatattcatgttatgcgctcgagcctccaaaagctgctcgaagtttgtgaactgaaaactcctactatgagtgaatttctatctgggctggagtcatccggatggctgaggcacattaaggccataatggatgcaggaatctttatcacaaaggctgtgaaagtggagaaagcgtcagtattggtgcactgtagcgacggctgggacagaaccgcacaagtctgctccgtcgccagcatcctgctggatcctttttacaggaccttcaaggggctcatgatcctaattgagaaggaatggatctctatgggacataagtttagccagagatgcgggcacctggacggcgactccaaggaggtttcacccatttttacccaattccttgattgcatttggcaactgatggaacagttcccctgtgcattcgagttcaacgagaattttctactggagatccacgatcatgtcttctcctgtcagtttgggaacttcttggggaattgtcaaaaggacagggaggacttgcgcgtctatgaaaaaacccatagcgtgtggccgttccttgtacagcgcaaacccgatttcagaaaccctctctacaaggggtttactatgtatggcgtcctgaacccctcaactgtcccgtacaatattcagttttggtgtggaatgtacaaccgcttcgataaggggctccagccgaaacagagtatgttggagagcctgctcgagattaaaaagcaacgggccatgctggagacagacgtacacgaactcgaaaaaaaattgaaggttagagacgagcctcccgaggaaatatgtacctgttcacaactgggcaacatcctatcccaacatctcgggtcccctcttactaatccactgggttttatgggcatcaatggggacttgaacacacttatggagaacggcactctgagtcgtgaggggggactgagagcccagatggatcaagtgaaatcccagggagctgaccttcaccacaactgctgtgaaatcgtgggctccctgcgtgccattaacattagcggagatgtggggatttccgaggctatgggtattagcggagatatgtgcacattcgaagctactggtttcagtaaagacctgggcatctgtggtgccatggacataagcgaggctacagggatctctgggaatttgggcatctctgaagcacgaggcttttccggcgacatgggcattctgggagacaccggaattagtaaggcgagcactaaggaggctgattactcgaagcatcagtag

SEQ ID NO: 194476 - DNA, 2115 bp, Artificial Sequence
  derived and/or modified sequence
atggaccacatcaccgtgcccaaggtggagaacgtgaagctggtggatcgctacgttagcaagaaaccagctaacggcattctgtatttaacagccacccacttaatttatgtggaggcaagtggcgcggcgagaaaggaaacatggattgctctgcaccacatcgccactgtggaaaaactgcccatcaccagcctgggctgccctttaacactgcggtgtaagaacttccgggtggcccacttcgtcttagattcggacctcgtatgccacgaggtttatatctcactcttaaagttgtcacagcccgcactccccgaggacctgtacgccttcagctacaacccgaaatcgtcgaaggaaatgcgtgaatccggttggaagctgattgatcccatctctgactttggccgcatgggtattcctaacaggaattggaccataacggatgcgaaccggaactacgaaatctgcagtacataccctcccgaaatagtggttccaaagtctgtcactctgggcacagtggttggctccagcaaattcaggagtaaggagcgagtaccggtcctgtcctacctatataaagaaaataacgccgccatttgcaggtgcagtcaacctctgtctgggttctacacaaggtgcgtcgacgacgaacttctgttagaggccatttcccagactaaccccggctcccagttcatgtatgtcgtagacacaaggcccaaactaaatgctatggccaaccgagcagcaggtaaaggctacgaaaacgaggacaattatgcaaatataagattccggtttatgggcatagagaatatccacgtaatgcgctcttccttgcagaagctgttagaggtctgcgaactcaagaccccaaccatgtccgagttcctcagcggtcttgagagcagtggatggctccgtcatattaaggccataatggacgcaggcatctttataactaaggccgtgaaagtggaaaaggcttctgttttggtccattgtagcgatggatgggatcgcacggcacaggtctgcagcgttgccagcatcttgctcgatcccttctacagaacatttaagggtttaatgattctgattgaaaaggaatggatatccatgggccataaattctcgcagaggtgtggccacttagacggcgactccaaggaagtctcccctatctttacccaatttctggattgtatctggcagttgatggaacagtttccctgtgcattcgaattcaacgagaattttctgcttgaaattcacgaccacgttttcagctgccagttcgggaattttctgggcaactgccaaaaagatagggaagatttaagggtgtacgagaagacccactccgtgtggccctttctggttcagcgcaaaccggatttccgcaatcccttatacaaaggatttaccatgtacggtgtattaaacccttccaccgtcccatataatatccagttctggtgtggcatgtacaacagatttgataaaggcctgcagcctaagcaatccatgctggagtctctgctggaaatcaaaaagcagcgggcaatgctagagactgatgttcacgagctcgagaagaagttgaaggtacgggatgaaccgcccgaggaaatttgtacctgtagccagcttggcaacattctgtctcagcacctcgggagcccccttaccaatccactcggattcatgggcataaacggcgatctgaacaccttgatggagaatgggacgctctccagagaaggtggactgagggcacaaatggatcaagtgaagagtcagggggctgatctgcatcacaactgctgcgagatagtcggctccctccgggccattaatatttcaggtgatgtgggcatctccgaggccatgggcataagcggcgacatgtgtaccttcgaggccaccggctttagcaaggatttgggtatctgcggggccatggatattagcgaggctaccggaatttctggcaaccttggcatcagtgaggctcgaggattttctggcgatatgggcattctgggggatacaggcatctcaaaagcctctacaaaggaagcagactattcaaagcaccagtag

SEQ ID NO: 194477 - DNA, 1527 bp, Artificial Sequence
  derived and/or modified sequence
tgagacagcgacctggtgtgccacgaggtgtacatcagcctgctgaaactctcacagcccgctctaccagaagacctttacgccttttcttacaacccgaagtcttccaaagagatgcgcgaatctggttggaaactgatcgaccccatcagtgactttgggcgcatgggcatcccaaaccgcaactggacaattactgacgctaatattagattcaggtttatggggatcgaaaacatccacgtaatgagatcctcgctgcaaaagctgctcgaagtctgtgaactgaagacaccaacgatgtcagaatttctcagcgggttggaatcgtccggctggctgagacatataaaagctatcatggacgccggaatttttattacaaaggccgtgaaagtggaaaaggccagcgttcttgtgcattgcagcgatggctgggatagaacagcccaggtatgctccgttgccagtatactactcgaccccttttaccggacctttaagggactgatgatactcatcgagaaggaatggattagcatggggcacaagttctcacagagatgtggacatctggatggcgacagcaaagaggtgtctccaatcttcacccagtttctggattgtatctggcagcttatggaacagttcccatgcgccttcgaattcaacgagaacttcctgctggagatacatgatcacgtatttagttgtcagtttggcaatttcctagggaactgccaaaaagaccgcgaagatctccgcgtatacgagaagacccacagcgtctggccttttttagtccagagaaaacccgacttccggaaccccctatacaaaggattcaccatgtatggcgttctgaatcctagtaccgtaccgtacaatatacagttctggtgtggcatgtacaataggttcgataagggtctacagcccaagcagtcaatgttagagtctctgttagagatcaagaagcagagagccatgttagaaactgatgtccacgaacttgaaaagaaactcaaagtgcgggacgaaccgcccgaagaaatatgtacctgttcgcagctgggcaatatactcagccagcacctgggctccccccttacgaacccactcggctttatgggtattaatggcgatcttaatacactgatggaaaatgggaccctgtctcgggagggagggctgcgcgcccagatggaccaggtgaagagccagggagcagacctgcaccacaactgttgtgagatagtggggagtcttcgcgcgattaacatttccggcgacgtagggatcagtgaggcaatggggatctccggcgacatgtgcaccttcgaagccacgggattctctaaagacctcggtatctgcggcgcgatggacatttccgaggccactgggattagcggcaacttaggcatctcagaggccaggggattctcaggtgacatggggattctgggtgacacagggatctccaaggctagcacaaaggaagctgactactcgaagcaccagtag

SEQ ID NO: 194478 - DNA, 2082 bp, Artificial Sequence
  derived and/or modified sequence
atggaccacatcaccgtgcccaaggtggagaacgtgaagctggtggacaggtacgttagcaagaagccggcgaacggcatcctgtatctgacagctacgcatctgatttatgtcgaggcctctggcgccgcgcggaaagagacttggatcgccctccaccatatcgccaccgtggaaaaactgccgatcactagcctggggtgcccactaaccctccgctgcaaaaactttagagtggctcactttgtcctggacagcgatctcgtctgccacgaggtctatattagtctactgaagctgtcccagccagcattgccagaggatctgtacgccttctcttataaccccaagtcctctaaagagatgagggaatccggctggaagttaattgatcccatttctgacttcggcagaatgggcattcctaataggaattggacaatcacagatgctaatcgaaactacgagatttgttctacatatcctcccgagatcgtggtacccaagtctgttacactgggcacagtcgtcggcagtagtaaattccggagcaaggaaagggtccccgtgctttcttatctctacaaggagaacaacgcggccatttgtaggtgctcgcaacctctcagtggcttctatacccgctgtgtggacgatgagctgctccttgaggcaatcagccagactaatcctggtagtcagttcatgtacgtcgtggacacaagacccaaacttaacgctatggccaatcgtgcagcaggcaaaggctatgaaaatgaggacaactacgcgaatatccgttttcggttcatggggattgaaaacatccacgtcatgcgaagctccttgcagaagctgctagaagtctgcgagctgaagaccccaactatgtccgagttcctaagcggcttggagtcaagtgggtggttgcggcatattaaggcaattatggatgcgggaatatttataaccaaggccgtgaaggtcgagaaggcttccgttctggttcactgttcggacggatgggacaggaccgcccaggtttgtagcgtggcttccattctgctggatcccttttatagaacattcaaaggtctgatgatttggcacttcctggtcctgattatgcgaatcgtgctgcagcttgctaagatgaatcttatggacataaccaagatctttagtctgctgcagcccgataaggaagaggaggataccgatacagaagaaaagcaagcgctcaaccaggcagtatatgataatgactcctatactctggatcaactgctgcgacaagaaagatacaagcgttttatcaattcgaggtcaggctggggcgtgcctggtacccctctcaggttggcagcatcttatggacatctgtcgtgtctccaggtcttactggcgcatggagctgatgttgacagccttgatgtcaaggctcagacccctctctttaccgccgtgagccacgggcaccttgattgtgtgcgggttctcctcgaggctggcgcaagccctggtgggtccatctataacaattgcagcccggtgctgaccgctgccagagacggggccgttgctattttacaggaactgctagatcacggggctgaagccaacgtcaaagctaagctgccggtctgggcttctaacattgcatcttgctctgggccactttacttggctgccgtctacggtcatctggattgctttaggctgctgcttctacacggagcagaccccgactacaactgtactgatcagggactactggcgagggtccctcgcccacgcacgctgctggaaatctgcctgcaccataattgtgaacctgaatatatccagctgctgatcgacttcggcgctaacatctatctgccaagcctgagcctcgatcttaccagccaggatgataaaggaattgcactgttgctgcaggcccgcgcgacccctcgaagcctgctatcacaggtccgtctggtggtgagaagggccctgtgtcaggcaggacagccccaggccattaatcaactggatatccctccaatgttgatcagctatctcaaacaccagttgtag

SEQ ID NO: 194479 - DNA, 1773 bp, Artificial Sequence
  derived and/or modified sequence
ctggatcttctggtgccaaaggttgagaacgttaagctagtggatagatacgtgtctaaaaagccagccaacggtattctctatctgaccgctacgcatctcatttatgtcgaagccagcggcgcagccaggaaagaaacctggattgccctgcatcatattgcaacagtcgaaaaactcccgatcactagcctgggctgccctcttacactcaggtgtaaaaattttagagtggctcactttgttcttgactccgatttggtgtgtcacgaagtctatatctcactccttaaactgagccaacctgcactgcctgaagacctgtacgcattcagctataatccaaaaagctcgaaggaaatgagggagagcgggtggaagctaatcgatccaatcagtgatttcggaaggatgggtatccccaatagaaactggactataacagacgccaatataaggtttcgttttatgggcatagagaacatacacgtcatgagaagttccctccagaagttgttggaagtgtgcgagctaaagacccctactatgagtgagtttcttagcgggttagagagctccgggtggctgcgccacatcaaagccatcatggatgcaggaatcttcataaccaaagctgtaaaagtcgagaaggcgagcgtgttggtgcactgttctgatggctgggataggacggcacaagtgtgttccgtagcctcaattcttcttgatcctttttaccgtacctttaagggattgatgatattgatagagaaagaatggatttcgatgggacacaagttcagtcaacggtgcggccacctcgatggcgattcaaaggaagtctcacctatcttcactcagtttttggactgtatctggcagttaatggaacaattcccatgtgctttcgagttcaatgagaacttcctgttagagatccatgaccacgtgttttcatgccagttcgggaattttctcgggaactgtcaaaaggacagggaggatcttcgcgtatacgagaaaacgcactccgtgtggccattcctcgtccaaaggaaacccgattttcgtaaccccctgtacaaaggattcaccatgtacggtgtgctcaatccgtccactgttccctacaacatccagttctggtgtggcatgtacaatcggtttgacaagggcctccaacccaaacagagcatgctggagtccctgctcgaaattaagaagcagcgagctatgttggagacagacgttcatgaacttgaaaagaagctgaaggttagggatgaaccacctgaagaaatatgcacgtgttcccagctgggcaacatcctgagccagcatcttggctctccattgactaatcccctgggatttatggggattaatggtgacctaaacacccttatggagaatggcacgctcagtagagagggtgggctgagagcccagatggatcaggttaagtcccagggggctgacctccatcacaattgctgtgaaattgtgggaagtttgagggccattaatatcagcggtgacgtgggcatctcagaagcaatgggaatcagtggcgacatgtgtacttttgaggcaaccggattctctaaggacctggggatctgtggggctatggatatatctgaagctacgggcatcagcggcaatctgggcatcagcgaggctcgcggtttctctggggatatgggtattctgggcgatacaggaatatccaaagccagtaccaaggaggccgactattccaaacaccagtag

SEQ ID NO: 194480 - DNA, 2115 bp, Artificial Sequence
  derived and/or modified sequence
atggaccatattaccgtacctaaagttgaaaatgttaagctggtggatcgctacgtgagcaagaagcctgcgaacggaatactgtacctgaccgctacacatctgatttatgtggaagcttcgggagctgcgagaaaggagacctggatagcattgcaccatatcgcaactgtggagaagcttcctattacgtccttgggatgcccactgacgctcagatgcaaaaactttcgcgttgcgcattttgtactcgatagcgatctagtgtgtcatgaggtctatatctcactgctgaaactcagccagcccgctctgcctgaggatctgtatgcattttcatataaccctaagagttccaaggaaatgcgggaatctggctggaaactgatcgatcccattagcgactttggcagaatgggcatccctaatagaaactggactataactgatgctaatagaaactacgaaatctgttccacgtatccacccgaaattgtagttccgaagagtgtgaccctgggtactgtggttggttcgagtaaattcaggtctaaggaaagagtccctgtcttatcatacctttataaagaaaacaatgcagccatttgcaggtgctcccagcccctgtcgggtttctatacccgatgtgtagacgatgaactcctgctggaagctatcagccagacaaacccgggaagccaatttatgtatgtagtggacacaaggcctaagttgaacgccatggccaacagggcagccggaaagggttacgagaatgaagataactacgccaacatcagattccgattcatgggaatagagaacattcacgtcatgcggtcatcactgcagaagcttttggaggtgtgcgagctgaaaacccctaccatgtctgaatttttatccggtttggagagttcgggctggctgcggcacattaaggcaatcatggacgccggaatatttatcaccaaagctgtgaaggtggaaaaggcctctgtgctggtgcattgttctgacggctgggacagaaccgcccaggtgtgctctgtcgcatctatcctgctggatcctttctacaggaccttcaaaggtctgatgatcctcattgaaaaagagtggatctccatggggcacaagtttagccagcgatgcgggcacttggacggcgacagcaaggaggtgagcccgattttcactcagtttctggactgcatatggcagctgatggaacaattcccgtgcgcattcgaatttaatgagaacttcctgctggaaatccatgatcatgtgttctcttgtcagtttggcaactttttgggaaactgccagaaggacagggaagatctaagggtttacgaaaagacccatagtgtctggccttttctggtgcaacgcaaacctgatttccgcaatcctctgtataagggcttcacaatgtacggggtgttgaatccatctaccgtgccatataacatccagttttggtgcggcatgtataaccgcttcgacaagggcctgcaaccgaagcaatccatgctcgaaagtctactagaaattaagaaacaacgtgccatgctggaaaccgatgtgcacgaactcgagaagaaactgaaagtgcgtgatgagcctcccgaagaaatctgtacctgttctcagttgggaaatattctgtcgcagcatctgggatccccactgaccaatcccctcggctttatgggcatcaatggcgacctaaatacactcatggagaacggcaccctctcacgggagggcggactgcgcgctcagatggaccaagtgaagagtcagggggcagacctccaccataactgttgcgagatagtggggagcctaagagcaatcaacataagtggcgacgtcggaatctccgaggctatgggtatttccggggacatgtgcacgtttgaggccacaggtttctccaaagacttaggcatctgcggcgctatggacatcagcgaggccacaggaatatctgggaacctgggcatttccgaagctcgcggtttcagtggcgatatgggcatattgggcgacaccggcatttcaaaggcctcgacaaaagaagcagattacagcaagcatcagtag

SEQ ID NO: 194481 - DNA, 1527 bp, Artificial Sequence
  derived and/or modified sequence
tgagattccgatctggtttgccacgaggtttatataagccttcttaaactgtctcagcccgctttacccgaggatctttatgccttctcatacaatcctaaatcatctaaagaaatgcgggagagcggttggaaactcatcgacccaatctcggatttcggcagaatgggcataccgaacagaaattggaccattacagatgctaatataagattccggttcatgggcattgaaaatattcacgtgatgaggtcaagcctgcagaagctgctcgaggtgtgcgagctgaaaactccaactatgagcgagttcctaagcggtctggagagctcaggctggctcagacacatcaaggctattatggatgcaggcatatttattactaaggccgttaaagtagagaaggcctctgttctcgtgcattgctctgatggctgggatcggaccgcccaagtttgctcagtggcaagtattcttcttgaccccttttaccgcaccttcaaagggctgatgatccttatcgagaaagagtggatttctatgggacataagttcagtcagcggtgcggtcacttggatggcgacagcaaggaagtgtccccaatctttacacagtttctggactgtatttggcaactaatggagcaatttccctgtgcctttgaatttaacgaaaattttcttctggagatacatgaccacgtgtttagctgtcagttcggtaatttccttggtaactgccaaaaggaccgggaggacctgcgcgtctacgaaaagacacactcggtgtggccctttctggtccagagaaaaccagactttcgtaatcctctgtacaaaggctttacaatgtacggcgtgttaaatcctagcacagtcccctacaacatccaattttggtgcggcatgtacaaccggttcgacaagggcctgcagcccaaacagtctatgctggagtcacttctcgagatcaaaaaacagcgggcaatgcttgagacagacgtgcatgaactggaaaaaaaactgaaagttagagacgagccccctgaggaaatctgtacatgctcccaacttgggaatatactttcacagcatctcggtagccccctcacgaaccccctcggtttcatgggtatcaacggtgatctgaatactctcatggagaacggaaccctgtcccgagaggggggtctgcgagctcagatggatcaggttaagagccagggcgctgatctgcaccacaattgctgcgagatcgtcggttccctgcgggcaatcaatatcagtggggacgtgggtatcagcgaagctatggggatcagtggggacatgtgtacctttgaagctacaggcttttctaaggatcttggcatctgcggcgcaatggacattagtgaagcaacagggattagcgggaacctagggatttcagaggctagaggattcagcggggatatgggcattctgggcgacaccggaatctctaaggccagcacaaaagaagccgactattcaaaacaccagtag

SEQ ID NO: 194482 - DNA, 2082 bp, Artificial Sequence
  derived and/or modified sequence
atggatcatattaccgtaccgaaagtagagaacgttaagttagtggatcgttatgtctcaaaaaaacccgcaaacgggattctgtacttgactgccacccatctcatatatgtcgaggcttctggcgctgcaaggaaagagacttggattgctctgcatcatatcgcaacagtggagaagctgccaattacttccctgggatgccctttgacacttcgatgcaagaacttccgggtagcccatttcgtgctcgacagtgatctggtttgtcacgaagtatacatcagcctacttaaattgtcccagcccgctcttcccgaggacctttacgcttttagttacaacccaaagagcagcaaggaaatgagagagtccggttggaaattaattgaccctatcagcgattttgggcgtatgggcattcctaaccggaactggaccatcacggatgccaatcgtaattacgaaatatgtagtacctaccccccagagatcgttgtgccaaaaagcgtcactctgggtaccgtcgtcggctctagcaaattccgctcgaaggagagagtgccagtgttatcctatctgtacaaggagaataacgccgcaatctgccgatgtagtcagcccctgtctggtttttatacccgctgtgtggatgatgagctgctcctggaggcaatctcccagacaaaccctggttcgcaattcatgtacgtcgtagacacacggcctaaattgaatgctatggcaaatcgcgcagccggtaaagggtatgaaaacgaggataactacgctaatattaggttcaggttcatgggcatagagaacattcacgtgatgcgttcctcactacagaagcttctggaggtctgtgagctgaaaacacctactatgagcgaatttctcagcggcctagagtcaagcggctggctccggcacatcaaagcgataatggatgctggtatttttatcaccaaagctgttaaggtcgaaaaagcatctgtgctcgtccattgcagcgatggctgggatcggacagcccaggtgtgttcggtcgccagtattctcttagacccattctacaggacttttaagggcctgatgatctggcacttcctggtcttgatcatgagaattgtgctgcagttagctaagatgaatctgatggatatcactaagatcttcagcctgctgcaaccagacaaggaggaggaggataccgacacagaagaaaagcaggccctcaatcaggcggtgtacgataatgatagctacacccttgatcagctgctcagacaggaaaggtataagcggttcatcaacagcagaagcgggtggggggtgcccggaactccccttcggctggctgcctcctatgggcatttgtcttgcttgcaggtgttgctagcccacggcgcagatgtggattccctcgacgtcaaggctcagactcctctgttcaccgccgtttcacacggacaccttgactgcgtgcgtgtactgctggaagccggagcctcacctgggggaagtatctataataattgcagcccggtccttaccgccgctcgcgatggagcagtggcaattttgcaggagttgctcgatcatggggctgaagctaatgtcaaggccaagctgcctgtgtgggcctccaatatagcgtcctgctcagggcctttgtacttggctgctgtgtatggacatcttgactgtttccgactactcctcctgcacggcgctgatcctgattataactgcacagatcagggccttctcgcacgggtcccacgccctcgcaccctgctcgaaatttgccttcatcataactgtgagcccgagtacatccagctgctgattgacttcggcgcaaatatctacctgccttccttgtccttggacttgacttctcaagatgataagggaattgccctcctgctgcaagctagggccacaccaagatctctactctctcaggtgcgtttagttgttcgtcgagccctgtgccaagccggacagccccaggcaatcaatcagctggacatcccacctatgctaatttcatacctcaaacaccaactctag

SEQ ID NO: 194483 - DNA, 1773 bp, Artificial Sequence
  derived and/or modified sequence
ctggacctgctggtgcccaaggtggagaacgtgaagctggtggacagatacgtgagcaagaagcccgccaacggcatcctgtacctgaccgccacccacctgatctacgtggaggccagcggcgccgccagaaaggagacctggatcgccctgcaccacatcgccaccgtggagaagctgcccatcaccagcctgggctgccccctgaccctgagatgcaagaacttcagagtggcccacttcgtgctggacagcgacctggtgtgccacgaggtgtacatcagcctgctgaagctgagccagcccgccctgcccgaggacctgtacgccttcagctacaaccccaagagcagcaaggagatgagagagagcggctggaagctgatcgaccccatcagcgacttcggcagaatgggcatccccaacagaaactggaccatcaccgacgccaacatcagattcagattcatgggcatcgagaacatccacgtgatgagaagcagcctgcagaagctgctggaggtgtgcgagctgaagacccccaccatgagcgagttcctgagcggcctggagagcagcggctggctgagacacatcaaggccatcatggacgccggcatcttcatcaccaaggccgtgaaggtggagaaggccagcgtgctggtgcactgcagcgacggctgggacagaaccgcccaggtgtgcagcgtggccagcatcctgctggaccccttctacagaaccttcaagggcctgatgatcctgatcgagaaggagtggatcagcatgggccacaagttcagccagagatgcggccacctggacggcgacagcaaggaggtgagccccatcttcacccagttcctggactgcatctggcagctgatggagcagttcccctgcgccttcgagttcaacgagaacttcctgctggagatccacgaccacgtgttcagctgccagttcggcaacttcctgggcaactgccagaaggacagagaggacctgagagtgtacgagaagacccacagcgtgtggcccttcctggtgcagagaaagcccgacttcagaaaccccctgtacaagggcttcaccatgtacggcgtgctgaaccccagcaccgtgccctacaacatccagttctggtgcggcatgtacaacagattcgacaagggcctgcagcccaagcagagcatgctggagagcctgctggagatcaagaagcagagagccatgctggagaccgacgtgcacgagctggagaagaagctgaaggtgagagacgagccccccgaggagatctgcacctgcagccagctgggcaacatcctgagccagcacctgggcagccccctgaccaaccccctgggcttcatgggcatcaacggcgacctgaacaccctgatggagaacggcaccctgagcagagagggcggcctgagagcccagatggaccaggtgaagagccagggcgccgacctgcaccacaactgctgcgagatcgtgggcagcctgagagccatcaacatcagcggcgacgtgggcatcagcgaggccatgggcatcagcggcgacatgtgcaccttcgaggccaccggcttcagcaaggacctgggcatctgcggcgccatggacatcagcgaggccaccggcatcagcggcaacctgggcatcagcgaggccagaggcttcagcggcgacatgggcatcctgggcgacaccggcatcagcaaggccagcaccaaggaggccgactacagcaagcaccagtag

SEQ ID NO: 194484 - DNA, 2115 bp, Artificial Sequence
  derived and/or modified sequence
atggaccacatcaccgtgcccaaggtggagaacgtgaagctggtggacagatacgtgagcaagaagcccgccaacggcatcctgtacctgaccgccacccacctgatctacgtggaggccagcggcgccgccagaaaggagacctggatcgccctgcaccacatcgccaccgtggagaagctgcccatcaccagcctgggctgccccctgaccctgagatgcaagaacttcagagtggcccacttcgtgctggacagcgacctggtgtgccacgaggtgtacatcagcctgctgaagctgagccagcccgccctgcccgaggacctgtacgccttcagctacaaccccaagagcagcaaggagatgagagagagcggctggaagctgatcgaccccatcagcgacttcggcagaatgggcatccccaacagaaactggaccatcaccgacgccaacagaaactacgagatctgcagcacctacccccccgagatcgtggtgcccaagagcgtgaccctgggcaccgtggtgggcagcagcaagttcagaagcaaggagagagtgcccgtgctgagctacctgtacaaggagaacaacgccgccatctgcagatgcagccagcccctgagcggcttctacaccagatgcgtggacgacgagctgctgctggaggccatcagccagaccaaccccggcagccagttcatgtacgtggtggacaccagacccaagctgaacgccatggccaacagagccgccggcaagggctacgagaacgaggacaactacgccaacatcagattcagattcatgggcatcgagaacatccacgtgatgagaagcagcctgcagaagctgctggaggtgtgcgagctgaagacccccaccatgagcgagttcctgagcggcctggagagcagcggctggctgagacacatcaaggccatcatggacgccggcatcttcatcaccaaggccgtgaaggtggagaaggccagcgtgctggtgcactgcagcgacggctgggacagaaccgcccaggtgtgcagcgtggccagcatcctgctggaccccttctacagaaccttcaagggcctgatgatcctgatcgagaaggagtggatcagcatgggccacaagttcagccagagatgcggccacctggacggcgacagcaaggaggtgagccccatcttcacccagttcctggactgcatctggcagctgatggagcagttcccctgcgccttcgagttcaacgagaacttcctgctggagatccacgaccacgtgttcagctgccagttcggcaacttcctgggcaactgccagaaggacagagaggacctgagagtgtacgagaagacccacagcgtgtggcccttcctggtgcagagaaagcccgacttcagaaaccccctgtacaagggcttcaccatgtacggcgtgctgaaccccagcaccgtgccctacaacatccagttctggtgcggcatgtacaacagattcgacaagggcctgcagcccaagcagagcatgctggagagcctgctggagatcaagaagcagagagccatgctggagaccgacgtgcacgagctggagaagaagctgaaggtgagagacgagccccccgaggagatctgcacctgcagccagctgggcaacatcctgagccagcacctgggcagccccctgaccaaccccctgggcttcatgggcatcaacggcgacctgaacaccctgatggagaacggcaccctgagcagagagggcggcctgagagcccagatggaccaggtgaagagccagggcgccgacctgcaccacaactgctgcgagatcgtgggcagcctgagagccatcaacatcagcggcgacgtgggcatcagcgaggccatgggcatcagcggcgacatgtgcaccttcgaggccaccggcttcagcaaggacctgggcatctgcggcgccatggacatcagcgaggccaccggcatcagcggcaacctgggcatcagcgaggccagaggcttcagcggcgacatgggcatcctgggcgacaccggcatcagcaaggccagcaccaaggaggccgactacagcaagcaccagtag

SEQ ID NO: 194485 - DNA, 1527 bp, Artificial Sequence
  derived and/or modified sequence
tgagacagcgacctggtgtgccacgaggtgtacatcagcctgctgaagctgagccagcccgccctgcccgaggacctgtacgccttcagctacaaccccaagagcagcaaggagatgagagagagcggctggaagctgatcgaccccatcagcgacttcggcagaatgggcatccccaacagaaactggaccatcaccgacgccaacatcagattcagattcatgggcatcgagaacatccacgtgatgagaagcagcctgcagaagctgctggaggtgtgcgagctgaagacccccaccatgagcgagttcctgagcggcctggagagcagcggctggctgagacacatcaaggccatcatggacgccggcatcttcatcaccaaggccgtgaaggtggagaaggccagcgtgctggtgcactgcagcgacggctgggacagaaccgcccaggtgtgcagcgtggccagcatcctgctggaccccttctacagaaccttcaagggcctgatgatcctgatcgagaaggagtggatcagcatgggccacaagttcagccagagatgcggccacctggacggcgacagcaaggaggtgagccccatcttcacccagttcctggactgcatctggcagctgatggagcagttcccctgcgccttcgagttcaacgagaacttcctgctggagatccacgaccacgtgttcagctgccagttcggcaacttcctgggcaactgccagaaggacagagaggacctgagagtgtacgagaagacccacagcgtgtggcccttcctggtgcagagaaagcccgacttcagaaaccccctgtacaagggcttcaccatgtacggcgtgctgaaccccagcaccgtgccctacaacatccagttctggtgcggcatgtacaacagattcgacaagggcctgcagcccaagcagagcatgctggagagcctgctggagatcaagaagcagagagccatgctggagaccgacgtgcacgagctggagaagaagctgaaggtgagagacgagccccccgaggagatctgcacctgcagccagctgggcaacatcctgagccagcacctgggcagccccctgaccaaccccctgggcttcatgggcatcaacggcgacctgaacaccctgatggagaacggcaccctgagcagagagggcggcctgagagcccagatggaccaggtgaagagccagggcgccgacctgcaccacaactgctgcgagatcgtgggcagcctgagagccatcaacatcagcggcgacgtgggcatcagcgaggccatgggcatcagcggcgacatgtgcaccttcgaggccaccggcttcagcaaggacctgggcatctgcggcgccatggacatcagcgaggccaccggcatcagcggcaacctgggcatcagcgaggccagaggcttcagcggcgacatgggcatcctgggcgacaccggcatcagcaaggccagcaccaaggaggccgactacagcaagcaccagtag

SEQ ID NO: 194486 - DNA, 2082 bp, Artificial Sequence
  derived and/or modified sequence
atggaccacatcaccgtgcccaaggtggagaacgtgaagctggtggacagatacgtgagcaagaagcccgccaacggcatcctgtacctgaccgccacccacctgatctacgtggaggccagcggcgccgccagaaaggagacctggatcgccctgcaccacatcgccaccgtggagaagctgcccatcaccagcctgggctgccccctgaccctgagatgcaagaacttcagagtggcccacttcgtgctggacagcgacctggtgtgccacgaggtgtacatcagcctgctgaagctgagccagcccgccctgcccgaggacctgtacgccttcagctacaaccccaagagcagcaaggagatgagagagagcggctggaagctgatcgaccccatcagcgacttcggcagaatgggcatccccaacagaaactggaccatcaccgacgccaacagaaactacgagatctgcagcacctacccccccgagatcgtggtgcccaagagcgtgaccctgggcaccgtggtgggcagcagcaagttcagaagcaaggagagagtgcccgtgctgagctacctgtacaaggagaacaacgccgccatctgcagatgcagccagcccctgagcggcttctacaccagatgcgtggacgacgagctgctgctggaggccatcagccagaccaaccccggcagccagttcatgtacgtggtggacaccagacccaagctgaacgccatggccaacagagccgccggcaagggctacgagaacgaggacaactacgccaacatcagattcagattcatgggcatcgagaacatccacgtgatgagaagcagcctgcagaagctgctggaggtgtgcgagctgaagacccccaccatgagcgagttcctgagcggcctggagagcagcggctggctgagacacatcaaggccatcatggacgccggcatcttcatcaccaaggccgtgaaggtggagaaggccagcgtgctggtgcactgcagcgacggctgggacagaaccgcccaggtgtgcagcgtggccagcatcctgctggaccccttctacagaaccttcaagggcctgatgatctggcacttcctggtgctgatcatgagaatcgtgctgcagctggccaagatgaacctgatggacatcaccaagatcttcagcctgctgcagcccgacaaggaggaggaggacaccgacaccgaggagaagcaggccctgaaccaggccgtgtacgacaacgacagctacaccctggaccagctgctgagacaggagagatacaagagattcatcaacagcagaagcggctggggcgtgcccggcacccccctgagactggccgccagctacggccacctgagctgcctgcaggtgctgctggcccacggcgccgacgtggacagcctggacgtgaaggcccagacccccctgttcaccgccgtgagccacggccacctggactgcgtgagagtgctgctggaggccggcgccagccccggcggcagcatctacaacaactgcagccccgtgctgaccgccgccagagacggcgccgtggccatcctgcaggagctgctggaccacggcgccgaggccaacgtgaaggccaagctgcccgtgtgggccagcaacatcgccagctgcagcggccccctgtacctggccgccgtgtacggccacctggactgcttcagactgctgctgctgcacggcgccgaccccgactacaactgcaccgaccagggcctgctggccagagtgcccagacccagaaccctgctggagatctgcctgcaccacaactgcgagcccgagtacatccagctgctgatcgacttcggcgccaacatctacctgcccagcctgagcctggacctgaccagccaggacgacaagggcatcgccctgctgctgcaggccagagccacccccagaagcctgctgagccaggtgagactggtggtgagaagagccctgtgccaggccggccagccccaggccatcaaccagctggacatcccccccatgctgatcagctacctgaagcaccagctgtag

SEQ ID NO: 194487 - DNA, 783 bp, Artificial Sequence
  derived and/or modified sequence
atggaaaaatttaacaccatcagcgtgtccaagtgcaataaggagaccgttgccatgaaggagaagtgtaagttcggaatgacatccacaatccctagtggacatgtgtggcggaacacatggaaccctgttagttgcagcctcgctaccgtcaagatgaaggaatgtctgagaggaaaattaatctatctgatgggcgatagcactatcaggcagtggatggaatatttcaaagctagcattaacactctgaaatccgttgatcttcatgagagcgggaaactccagcatcagttggccgtggacctggaccgaaacattaatatccaatggcagaagtattgttatccattgatcggcagcatgacctactcagtcaaggagatggagtatttgacaagagcaatagatagaaccggaggcgaaaaaaataccgtgatagtcatttctctcggacaacactttcgaccattccccatcgatgtatttatccgaagggcgctgaacgttcacaaggccatccagcacctgctgctgcgaagccccgacaccatggtcatcatcaaaacagaaaacatccgtgagatgtataatgacgcggagaggttcagcgacttccacggttatatccagtatttaatcataaaagatatctttcaggaccttagtgtttcaatcatcgacgcttgggacattaccattgcatacggaacaaacaacgttcatcctccgcaacatgtcgtaggtaatcagatcaatatccttttgaattatatctgttag

SEQ ID NO: 194488 - DNA, 783 bp, Artificial Sequence
  derived and/or modified sequence
atggaaaagtttaatacaatctcagtgtccaagtgcaacaaagagaccgtggcaatgaaggaaaaatgcaagtttggtatgacgtccaccatcccctctgggcatgtttggaggaacacctggaatcccgtaagctgcagcctggcgaccgtcaaaatgaaggagtgcttgcgcggcaaactcatttatctgatgggggacagcactatccgtcagtggatggaatacttcaaggcttcaataaacacactgaaatccgtagatctgcatgagagcggaaagttgcagcaccaactggcagtggacctggatcgaaacattaacatacagtggcagaaatactgttatccccttattggaagcatgacttatagcgtgaaagagatggagtatctgaccagagcaattgatcgaacaggaggggaaaagaataccgtcatagtgatcagcctcggccagcactttcgccccttccccatcgacgtgtttataaggcgcgccctgaatgtacataaagcaattcagcacctgctattaagaagtcccgacacgatggttatcatcaagaccgagaatattcgcgaaatgtataacgatgcagaacgcttctccgactttcacggttacatccagtatttgattatcaaagatatcttccaagacctctcagtgtccattatcgatgcatgggatatcaccatcgcgtacggcactaataacgtgcacccaccccaacacgtggtagggaaccaaatcaatatattactgaattacatctgctag

SEQ ID NO: 194489 - DNA, 783 bp, Artificial Sequence
  derived and/or modified sequence
atggagaaatttaacacgatatcagtgagtaagtgcaataaggaaaccgttgcgatgaaggaaaaatgtaaattcggcatgacatctactataccgagcggccatgtctggaggaacacatggaaccctgtctcttgttctttagccacagtgaagatgaaggagtgcctgagaggaaaacttatatatctgatgggagactctactattcgccaatggatggaatactttaaggcctcaattaacaccctgaagtctgtcgatctgcatgagtccgggaaactgcagcatcagttagccgtggacctggatcgaaacattaacatacagtggcagaaatactgttatccccttattggaagcatgacttatagcgtgaaagagatggagtatctgaccagagcaattgatcgaacaggaggggaaaagaataccgtcatagtgatcagcctcggccagcactttcgccccttccccatcgacgtgtttataaggcgcgccctgaatgtacataaagcaattcagcacctgctattaagaagtcccgacacgatggttatcatcaagaccgagaatattcgcgaaatgtataacgatgcagaaagattttcggattttcatggctatatacagtacttaattattaaagacattttccaggatcttagcgtgtccatcattgatgcatgggatattactatcgcttatggaacaaataatgttcatccacctcaacacgtagtcgggaaccaaattaacattttattgaattatatctgctag

SEQ ID NO: 194490 - DNA, 783 bp, Artificial Sequence
  derived and/or modified sequence
atggagaagttcaacaccatcagcgtgagcaagtgcaacaaggagaccgtggccatgaaggagaagtgcaagttcggcatgaccagcaccatccccagcggccacgtgtggagaaacacctggaaccccgtgagctgcagcctggccaccgtgaagatgaaggagtgcctgagaggcaagctgatctacctgatgggcgacagcaccatcagacagtggatggagtacttcaaggccagcatcaacaccctgaagagcgtggacctgcacgagagcggcaagctgcagcaccagctggccgtggacctggacagaaacatcaacatccagtggcagaagtactgctaccccctgatcggcagcatgacctacagcgtgaaggagatggagtacctgaccagagccatcgacagaaccggcggcgagaagaacaccgtgatcgtgatcagcctgggccagcacttcagacccttccccatcgacgtgttcatcagaagagccctgaacgtgcacaaggccatccagcacctgctgctgagaagccccgacaccatggtgatcatcaagaccgagaacatcagagagatgtacaacgacgccgagagattcagcgacttccacggctacatccagtacctgatcatcaaggacatcttccaggacctgagcgtgagcatcatcgacgcctgggacatcaccatcgcctacggcaccaacaacgtgcaccccccccagcacgtggtgggcaaccagatcaacatcctgctgaactacatctgctag

SEQ ID NO: 194491 - DNA, 783 bp, Artificial Sequence
  derived and/or modified sequence
atggagaagtttaataccatctctgtgtccaaatgtaataaagagaccgtagcaatgaaggaaaaatgtaagttcgggatgacctccactatcccaagcggccacgtttggcgcaatacatggaatcctgtgtcatgcagtcttgctactgtgaagatgaaggagtgtttgcggggcaaactaatttaccttatgggagactcgactatcaggcagtggatggagtattttaaggcaagtataaatacgctgaagtcagttgatctccatgagagtggaaagttacagcaccaactcgctgtcgatctcgataggaatattaacattcagtggcagaaatattgctatcccctcattgggagcatgacttattctgtgaaggaaatggagtacctaacaagagctatcgaccgcaccgggggagagaagaataccgtaattgtcatttctctcggacagcactttagaccgttcccaattgatgtgtttatcagacgggccttgaacgtgcataaggctattcaacatttgttgctgcggagtcctgacactatggtgatcattaaaaccgaaaatatccgtgagatgtacaatgatgctgaacgcttctccgacttccatgggtacattcagtacttgataataaaagacatttttcaggacctgtctgtgtcaatcatcgacgcctgggacattactattgcctatgggactaacaacgtgcatcctccgcagcacgtggtaggcaatcagatcaacatcctgctgaactatatttgctag

SEQ ID NO: 194492 - DNA, 783 bp, Artificial Sequence
  derived and/or modified sequence
atggagaagttcaacaccatctctgtgtccaagtgcaacaaggagaccgtggccatgaaggagaagtgcaagtttggcatgaccagcaccatccccagcggccacgtgtggaggaacacctggaaccctgtgtcctgcagcctggccaccgtgaagatgaaggaatgtctgcggggcaagctgatctacctgatgggagacagcaccatccggcagtggatggagtacttcaaggccagcatcaacaccctgaagtctgtggacctgcacgagagcggcaagctgcagcaccagctggccgtggacctggacaggaacatcaacatccagtggcagaagtactgctaccccctgattggctccatgacctacagcgtgaaggagatggagtacctgacccgggccatcgacagaactggaggagagaagaacacagtgattgtcatcagcctgggccagcacttccggcccttccccattgatgtgttcatcagaagagccctgaatgtgcacaaggccatccagcacctgctgctgcggagcccagacaccatggtgatcatcaagacagagaacatccgggagatgtacaatgatgctgagcgcttcagtgacttccacggctacatccagtacctgatcatcaaggacatcttccaggacctgtctgtgtccatcattgatgcctgggacatcaccatcgcctacggcaccaacaacgtgcaccccccccagcacgtggtgggcaaccagatcaacatcctgctgaactacatctgctag

SEQ ID NO: 194493 - DNA, 783 bp, Artificial Sequence
  derived and/or modified sequence
atggagaagttcaacaccatcagcgtgagcaagtgcaacaaggagactgtcgccatgaaagagaagtgtaagttcggcatgacctccactattccaagcggccatgtgtggcgcaacacatggaacccagtgtcttgcagcctggcaacagtgaagatgaaggagtgtctgcgcgggaaactgatttacttgatgggggactccactatccgtcaatggatggaatactttaaggcttccatcaacactctaaaaagtgtagatctgcacgagtccggaaaattacagcaccaactggcggtcgatctggatcggaatatcaacattcagtggcagaaatattgctacccattgattggctctatgacctatagtgtgaaagagatggagtacctgacacgggctatagacaggacgggcggagaaaagaacaccgtaatcgtgatctccctcgggcagcattttagaccctttccaatcgatgtctttattcgtcgtgctctgaacgtgcataaggcgattcagcacttactgctccgctcccctgataccatggtgatcatcaagaccgaaaacattagggaaatgtacaacgacgctgagagattttctgactttcatggctatattcagtacctgataattaaggatatcttccaagatctatctgttagcatcattgacgcatgggatatcacaattgcctacggaacgaacaatgtgcatccgccacagcatgtggtaggcaaccagattaacatcttgcttaattacatctgctag

SEQ ID NO: 194494 - RNA, 783 nt, Artificial Sequence
  derived and/or modified sequence
auggaaaaguuuaauacaaucucaguguccaagugcaacaaagagaccguggcaaugaaggaaaaaugcaaguuugguaugacguccaccauccccucugggcauguuuggaggaacaccuggaaucccguaagcugcagccuggcgaccgucaaaaugaaggagugcuugcgcggcaaacucauuuaucugaugggggacagcacuauccgucaguggauggaauacuucaaggcuucaauaaacacacugaaauccguagaucugcaugagagcggaaaguugcagcaccaacuggcaguggaccuggaucgaaacauuaacauacaguggcagaaauacuguuauccccuuauuggaagcaugacuuauagcgugaaagagauggaguaucugaccagagcaauugaucgaacaggaggggaaaagaauaccgucauagugaucagccucggccagcacuuucgccccuuccccaucgacguguuuauaaggcgcgcccugaauguacauaaagcaauucagcaccugcuauuaagaagucccgacacgaugguuaucaucaagaccgagaauauucgcgaaauguauaacgaugcagaacgcuucuccgacuuucacgguuacauccaguauuugauuaucaaagauaucuuccaagaccucucaguguccauuaucgaugcaugggauaucaccaucgcguacggcacuaauaacgugcacccaccccaacacgugguagggaaccaaaucaauauauuacugaauuacaucugcuag

SEQ ID NO: 194495 - RNA, 783 nt, Artificial Sequence
  derived and/or modified sequence
auggagaaauuuaacacgauaucagugaguaagugcaauaaggaaaccguugcgaugaaggaaaaauguaaauucggcaugacaucuacuauaccgagcggccaugucuggaggaacacauggaacccugucucuuguucuuuagccacagugaagaugaaggagugccugagaggaaaacuuauauaucugaugggagacucuacuauucgccaauggauggaauacuuuaaggccucaauuaacacccugaagucugucgaucugcaugaguccgggaaacugcagcaucaguuagccguggaccuggaucgaaacauuaacauacaguggcagaaauacuguuauccccuuauuggaagcaugacuuauagcgugaaagagauggaguaucugaccagagcaauugaucgaacaggaggggaaaagaauaccgucauagugaucagccucggccagcacuuucgccccuuccccaucgacguguuuauaaggcgcgcccugaauguacauaaagcaauucagcaccugcuauuaagaagucccgacacgaugguuaucaucaagaccgagaauauucgcgaaauguauaacgaugcagaaagauuuucggauuuucauggcuauauacaguacuuaauuauuaaagacauuuuccaggaucuuagcguguccaucauugaugcaugggauauuacuaucgcuuauggaacaaauaauguucauccaccucaacacguagucgggaaccaaauuaacauuuuauugaauuauaucugcuag

SEQ ID NO: 194496 - protein, 913 aa, Artificial Sequence
  derived and/or modified sequence
MNEAMATDSPRRPSRCTGGVVVRPQAVTEQSYMESVVTFLQDVVPQAYSGTPLTEEKEKIVWVRFENADLNDTSRNLEFHEIHSTGNEPPLLIMIGYSDGMQVWSIPISGEAQELFSVRHGPIRAARILPAPQFGAQKCDNFAEKRPLLGVCKSIGSSGTSPPYCCVDLYSLRTGEMVKSIQFKTPIYDLHCNKRILVVVLQEKIAAFDSCTFTKKFFVTSCYPCPGPNMNPIALGSRWLAYAENKLIRCHQSRGGACGDNIQSYTATVISAAKTLKSGLTMVGKVVTQLTGTLPSGVTEDDVAIHSNSRRSPLVPGIITVIDTETVGEGQVLVSEDSDSDGIVAHFPAHEKPVCCMAFNTSGMLLVTTDTLGHDFHVFQILTHPWSSSQCAVHHLYTLHRGETEAKVQDICFSHDCRWVVVSTLRGTSHVFPINPYGGQPCVRTHMSPRVVNRMSRFQKSAGLEEIEQELTSKQGGRCSPVPGLSSSPSGSPLHGKLNSQDSYNNFTNNNPGNPRLSPLPSLMVVMPLAQIKQPMTLGTITKRTGKVKPPPQISPSKSMGGEFCVAAIFGTSRSWFANNAGLKREKDQSKQVVVESLYIISCYGTLVEHMMEPRPLSTAPKISDDTPLEMMTSPRASWTLVRTPQWNELQPPFNANHPLLLAADAVQYYQFLLAGLVPPGSPGPITRHGSYDSLASDHSGQEDEEWLSQVEIVTHTGPHRRLWMGPQFQFKTIHPSGQTTVISSSSSVLQSHGPSDTPQPLLDFDTDDLDLNSLRIQPVRSDPVSMPGSSRPVSDRRGVSTVIDAASGTFDRSVTLLEVCGSWPEGFGLRHMSSMEHTEEGLRERLADAMAESPSRDVVGSGTELQREGSIETLSNSSGSTSGSIPRNFDGYRSPLPTNESQPLSLFPTGFP

SEQ ID NO: 194497 - DNA, 2742 bp, Artificial Sequence
  derived and/or modified sequence
atgaacgaggccatggccaccgacagccccagaagacccagcagatgcaccggcggcgtggtggtgagaccccaggccgtgaccgagcagagctacatggagagcgtggtgaccttcctgcaggacgtggtgccccaggcctacagcggcacccccctgaccgaggagaaggagaagatcgtgtgggtgagattcgagaacgccgacctgaacgacaccagcagaaacctggagttccacgagatccacagcaccggcaacgagccccccctgctgatcatgatcggctacagcgacggcatgcaggtgtggagcatccccatcagcggcgaggcccaggagctgttcagcgtgagacacggccccatcagagccgccagaatcctgcccgccccccagttcggcgcccagaagtgcgacaacttcgccgagaagagacccctgctgggcgtgtgcaagagcatcggcagcagcggcaccagccccccctactgctgcgtggacctgtacagcctgagaaccggcgagatggtgaagagcatccagttcaagacccccatctacgacctgcactgcaacaagagaatcctggtggtggtgctgcaggagaagatcgccgccttcgacagctgcaccttcaccaagaagttcttcgtgaccagctgctacccctgccccggccccaacatgaaccccatcgccctgggcagcagatggctggcctacgccgagaacaagctgatcagatgccaccagagcagaggcggcgcctgcggcgacaacatccagagctacaccgccaccgtgatcagcgccgccaagaccctgaagagcggcctgaccatggtgggcaaggtggtgacccagctgaccggcaccctgcccagcggcgtgaccgaggacgacgtggccatccacagcaacagcagaagaagccccctggtgcccggcatcatcaccgtgatcgacaccgagaccgtgggcgagggccaggtgctggtgagcgaggacagcgacagcgacggcatcgtggcccacttccccgcccacgagaagcccgtgtgctgcatggccttcaacaccagcggcatgctgctggtgaccaccgacaccctgggccacgacttccacgtgttccagatcctgacccacccctggagcagcagccagtgcgccgtgcaccacctgtacaccctgcacagaggcgagaccgaggccaaggtgcaggacatctgcttcagccacgactgcagatgggtggtggtgagcaccctgagaggcaccagccacgtgttccccatcaacccctacggcggccagccctgcgtgagaacccacatgagccccagagtggtgaacagaatgagcagattccagaagagcgccggcctggaggagatcgagcaggagctgaccagcaagcagggcggcagatgcagccccgtgcccggcctgagcagcagccccagcggcagccccctgcacggcaagctgaacagccaggacagctacaacaacttcaccaacaacaaccccggcaaccccagactgagccccctgcccagcctgatggtggtgatgcccctggcccagatcaagcagcccatgaccctgggcaccatcaccaagagaaccggcaaggtgaagccccccccccagatcagccccagcaagagcatgggcggcgagttctgcgtggccgccatcttcggcaccagcagaagctggttcgccaacaacgccggcctgaagagagagaaggaccagagcaagcaggtggtggtggagagcctgtacatcatcagctgctacggcaccctggtggagcacatgatggagcccagacccctgagcaccgcccccaagatcagcgacgacacccccctggagatgatgaccagccccagagccagctggaccctggtgagaaccccccagtggaacgagctgcagccccccttcaacgccaaccaccccctgctgctggccgccgacgccgtgcagtactaccagttcctgctggccggcctggtgccccccggcagccccggccccatcaccagacacggcagctacgacagcctggccagcgaccacagcggccaggaggacgaggagtggctgagccaggtggagatcgtgacccacaccggcccccacagaagactgtggatgggcccccagttccagttcaagaccatccaccccagcggccagaccaccgtgatcagcagcagcagcagcgtgctgcagagccacggccccagcgacaccccccagcccctgctggacttcgacaccgacgacctggacctgaacagcctgagaatccagcccgtgagaagcgaccccgtgagcatgcccggcagcagcagacccgtgagcgacagaagaggcgtgagcaccgtgatcgacgccgccagcggcaccttcgacagaagcgtgaccctgctggaggtgtgcggcagctggcccgagggcttcggcctgagacacatgagcagcatggagcacaccgaggagggcctgagagagagactggccgacgccatggccgagagccccagcagagacgtggtgggcagcggcaccgagctgcagagagagggcagcatcgagaccctgagcaacagcagcggcagcaccagcggcagcatccccagaaacttcgacggctacagaagccccctgcccaccaacgagagccagcccctgagcctgttccccaccggcttcccctag

SEQ ID NO: 194498 - DNA, 2742 bp, Artificial Sequence
  derived and/or modified sequence
atgaacgaagccatggccacagatagcccgcgcagaccgtcaaggtgcacggggggcgtcgtggtgcgtccccaggcagtgacagaacagtcctatatggagtctgtcgtgacctttctgcaagacgtcgtcccccaggcttactcaggaactcctttgactgaagaaaaggagaaaattgtctgggtccgctttgagaacgccgacctcaatgacacatcccggaatctggaattccacgagatccactccaccggaaacgagcccccactcttaatcatgattgggtactccgatggcatgcaggtgtggagcattccaataagtggtgaggcacaggagctctttagcgtgcgccatggtcccatcagggcggctaggattctgccagctccccagttcggcgcccaaaagtgtgataattttgctgaaaagcgcccgctcttgggtgtgtgcaagtccattggatcctcggggacgagtcccccgtattgttgcgttgatttatattctttgagaacgggggaaatggtcaaaagcatccaatttaagactcctatctacgacctccactgtaacaaacggatactcgtagttgtactgcaggagaaaatcgctgcctttgatagctgcacgtttacgaagaaatttttcgtgacaagctgttacccatgcccgggacctaatatgaatcctattgctctcggatctagatggctcgcttatgcagaaaacaaacttattaggtgccaccagagccggggaggtgcttgcggcgacaacatccagagttacaccgccactgtcatctccgcagctaaaacattaaagtccggcttaaccatggtgggtaaggttgtgacccagctgaccggcacactccctagtggggttaccgaagacgatgtcgctatccattcgaatagccgtcggtcgccgctcgttccagggataattacggtgatcgacactgaaacagtcggggaagggcaagtacttgtatccgaggatagtgactccgatggcattgtcgcccactttcccgctcacgagaaaccagtatgctgcatggccttcaatacatctggaatgctgctggtcacaactgatacactcgggcacgacttccacgttttccagatccttacacacccctggagctctagtcaatgtgcagtgcatcacctctatacgttacataggggggagacggaagctaaagtccaagacatatgcttttcccacgactgtcgttgggtggtggtgtcgaccctgaggggtacctcacatgtttttcctatcaatccttacggcggccagccatgcgtgagaacccatatgtcccctcgggtggtgaatcgcatgagcaggtttcagaaatccgcaggcctggaggagatcgagcaagaactgacttctaagcaggggggtaggtgctcccctgtcccgggtttgtcctcatctccttctggttcacccctccacggcaagctcaactctcaggattcctataacaactttaccaacaacaaccctggcaaccctcggctcagtccgcttcctagccttatggtggtgatgccactagcccaaatcaagcaacccatgaccttggggacaataactaagcgaacaggtaaggtgaagccacctccccagataagcccctccaaatctatgggaggcgagttttgcgttgcagctattttcggaacatcaaggtcatggttcgctaataacgcgggactcaagcgagagaaggaccaaagcaaacaagttgtggtcgaaagcttatacattatctcatgctatgggacactggtagaacacatgatggagccacggcccctttcaaccgcccccaaaatctctgacgatactccactcgaaatgatgactagcccaagggcatcttggactctggtgagaacacctcagtggaatgagcttcaaccccctttcaatgcaaatcacccactgctgctcgccgcggatgcggtgcagtattaccagtttttgcttgctgggcttgtcccccctggcagccccggacccattactcgccacggttcctacgacagtcttgcaagtgaccacagcgggcaggaggatgaggagtggctgagccaggttgagatcgtgacccatacaggtcctcatcgcaggctctggatgggcccacagttccaattcaagaccatacaccctagtggccagacgacagtgatcagctcgtcttcgtctgtgctgcaaagccacgggcccagcgacaccccacagcctcttctggacttcgatacagacgaccttgatctgaactcgcttagaatccaacctgttcggagcgatcccgttagtatgcctggatccagccggccagtatccgatcgcagaggcgtctctaccgtaatcgacgccgcctctggaaccttcgacagatctgttactctgctggaggtgtgcggttcatggccagagggcttcggcctgcgccatatgtcatctatggaacacaccgaggaggggcttcgggaacgtctagccgacgctatggccgagtccccatccagggacgtcgttgggtccggaaccgagctgcaaagagaaggctcgattgaaactttatctaactcttctggaagtaccagtggctctatacctcgcaacttcgatggctaccgcagtccccttccaactaacgagagccagccactgagtcttttcccaaccggcttcccgtag

SEQ ID NO: 194499 - DNA, 2742 bp, Artificial Sequence
  derived and/or modified sequence
atgaatgaggccatggccacagacagcccccggcggcccagccgctgcacaggaggagtggtggtgcggccccaggccgtgacagagcagagctacatggagagcgtggtgaccttcctgcaggatgtggtgccccaggcctacagcggcacccccctgacagaggagaaggagaagatcgtgtgggtgcgctttgaaaatgctgacctgaatgacaccagcaggaacctggagttccacgagatccacagcactggaaatgaaccacccctgctgatcatgattggctacagtgatggcatgcaggtgtggagcatccccatctctggagaggcccaggagctgttctctgtgcgccacggccccatccgggccgcccgcatcctgcctgccccccagtttggagcccagaagtgtgacaactttgctgagaagaggcccctgctgggcgtgtgcaagagcatcggcagcagcggcaccagccccccctactgctgcgtggacctgtacagcctgaggactggagagatggtgaagagcatccagttcaagacccccatctatgacctgcactgcaacaagaggatcctggtggtggtgctgcaggagaagattgctgcctttgacagctgcaccttcaccaagaagttctttgtgaccagctgctacccctgccccggccccaacatgaaccccatcgccctgggcagccgctggctggcctatgcagagaacaagctgatccgctgccaccagagcagaggaggagcctgtggggacaacatccagagctacacagccaccgtcatctctgctgccaagaccctgaagagcggcctgaccatggtgggcaaggtggtgacccagctgaccggcaccctgcccagcggcgtgacagaagatgatgtggccatccacagcaacagccgccgcagccccctggtgcccggcatcatcaccgtcatcgacacagagaccgtgggggagggccaggtgctggtgtctgaggacagcgacagtgatggcatcgtggcccacttccctgcccacgagaagcctgtgtgctgcatggccttcaacaccagcggcatgctgctggtgaccacagacaccctgggccatgacttccacgtgttccagatcctgacccacccctggagcagcagccagtgtgctgtgcaccacctgtacaccctgcacagaggagaaacagaggccaaggtgcaggacatctgcttcagccatgactgccgctgggtggtggtgtccaccctgcggggcaccagccacgtgttccccatcaacccctatggaggccagccctgtgtgaggacccacatgagcccccgggtggtgaacaggatgagccgcttccagaagtctgctggcctggaggagattgagcaggagctgaccagcaagcagggcggccgctgcagccctgtgcccggcctgagcagcagccccagcggcagccccctgcacggcaagctgaacagccaggacagctacaacaacttcaccaacaacaaccctggcaacccccggctgagccccctgcccagcctgatggtggtgatgcccctggcccagatcaagcagcccatgaccctgggcaccatcaccaagaggacaggcaaggtgaagcccccaccccagatcagccccagcaagtccatgggcggggagttctgtgtggccgccatcttcggcaccagccgctcctggtttgccaacaatgccggcctgaagcgggagaaggaccagagcaagcaggtggtggtggagagcctgtacatcatcagctgctacggcaccctggtggagcacatgatggagccccggcccctgagcacagcccccaagatcagtgatgacacccccctggagatgatgaccagcccccgggcctcctggaccctggtgaggaccccccagtggaatgagctgcagccccccttcaatgccaaccaccccctgctgctggccgcagatgctgtgcagtactaccagttcctgctggccggcctggtgcccccaggcagccctggccccatcaccaggcatggcagctatgacagcctggccagtgaccacagcggccaggaggatgaggagtggctgagccaggtggagatcgtgacccacacaggcccccaccggcggctgtggatgggcccccagttccagttcaagaccatccaccccagcggccagaccaccgtcatcagcagcagcagctctgtgctgcagagccacggccccagcgacaccccccagcccctgctggactttgacacagatgacctggacctgaacagcctgcgcatccagcctgtgcggagtgaccctgtgtccatgcctggcagcagcaggcctgtgtctgacagaagaggagtgtccacagtgattgatgctgccagcggcacctttgacagatctgtgaccctgctggaggtgtgtggctcctggccagagggcttcggcctgcggcacatgagctccatggagcacacagaggagggcctgcgggagcggctggctgatgccatggccgagagccccagcagagatgtggtgggcagcggcacagagctgcagcgggagggcagcattgagaccctgagcaacagcagcggcagcaccagcggcagcatccccaggaactttgatggctaccgcagccccctgcccaccaatgaaagccagcccctgagcctcttccccaccggcttcccctag

SEQ ID NO: 194500 - DNA, 2742 bp, Artificial Sequence
  derived and/or modified sequence
atgaacgaggccatggccaccgacagcccccggcggcccagccggtgtaccgggggagtcgtggttcgtccgcaagccgtcactgagcaatcctacatggaaagtgtggtgacttttctccaggatgttgtgcctcaggcatatagtggcacaccactcacagaagagaaggaaaagattgtgtgggtcaggtttgagaacgctgatttaaacgacaccagccggaatctggagtttcacgagatccactctactggcaacgaacctccattattaattatgatagggtacagcgacggtatgcaggtgtggagcatcccaattagtggcgaggcccaggagcttttctccgttcggcatgggccaattcgtgctgcccgcatcctgccagcccctcagtttggtgctcagaaatgtgacaattttgcagagaagcgccctctcttaggtgtgtgtaaaagcatcggatcgtcaggcacctccccgccctactgttgcgtggatctctactctttgagaaccggggagatggtcaaaagcatccaattcaagacccctatttacgacctccactgtaataaacgcatcctcgtggtggtgctgcaggaaaagatcgccgccttcgattcgtgtacctttactaaaaagtttttcgtgacatcgtgctatccatgcccaggtcccaacatgaatccgatcgccttaggcagcaggtggttggcgtatgcagagaacaagctgatccgttgccaccaaagcaggggtggcgcttgcggtgataatatccagagctatacagccaccgtgatttcagcggccaagaccctgaagtccggactcacaatggttggcaaggtggtaacacaattaacaggaactcttccctctggagtaaccgaggatgacgtggccatccattcgaactcaagaagatccccgttagttcccgggatcattaccgttattgacactgaaactgtgggcgagggccaggtcctggtgagcgaggattctgatagcgacggaatagtcgcacacttccccgctcacgaaaaacccgtgtgttgtatggcatttaatacaagcggcatgcttttagtgaccaccgatacactgggacatgacttccacgtctttcaaattttaacacacccctggagctcatctcagtgcgctgtccaccacctgtacaccttgcaccgaggggaaacagaagcaaaagttcaggacatctgcttttcccacgattgccgctgggtggtcgtcagtacactgcgcgggacaagtcatgtgttcccgattaatccttatggtggacagccttgtgtgaggacccacatgagcccgcgcgttgtgaacagaatgtccaggtttcaaaagagtgccggattagaggaaatcgagcaggaacttacaagcaaacaaggaggaaggtgttctcctgtaccaggattatctagctcacctagcggtagcccactgcacgggaaattgaactcgcaggactcttataataacttcaccaataacaatcctggcaatccccgtctatcacctctgccctccttgatggtggttatgcccctggcccaaataaaacagcctatgacacttggaactataacaaagcgtactggcaaggtgaagcctcctcctcagatttcaccctctaaatctatggggggggagttttgcgtggcagccatattcggcacctctaggagctggttcgccaataatgccggcctgaaacgggaaaaagaccagtctaagcaggtggtggttgaatcgctgtacatcatctcttgctatggcacactcgttgaacacatgatggaacctaggccgctctctaccgctccaaagatcagtgatgatacccccctggagatgatgacctcacccagagcaagttggactttagttagaacgccgcagtggaacgagctacagcccccgttcaacgccaaccacccactcttgcttgccgccgacgctgttcagtattaccagttcctcctcgccggcttagtgcctccaggaagcccagggccgataacaaggcacggatcatatgatagcctggcctctgatcattcaggccaggaagatgaggagtggctgtcccaggtggagatcgtgacgcatactgggccccatcggcggctatggatgggccctcagttccagttcaaaactattcatccctcaggacagacaactgtcatctcctcctcttcgagcgtgctgcaaagccacggaccatccgacacaccccaacctctcctggatttcgacaccgacgatctggatctcaattctctacgcattcagcccgtccggtctgatcctgtctccatgcccggaagctctagaccagtaagcgaccggcgcggcgttagcactgttatcgatgccgccagcggcactttcgatagatctgtaacacttcttgaggtatgcgggtcctggccagagggattcggtctcaggcacatgtcttcaatggagcacacggaagagggactgagagagcgactggcagacgctatggcagaaagcccatcacgcgatgtcgtgggctccggcacagaacttcagagggaaggaagcattgagaccttgtctaacagcagtgggagcacctctggatccatccctcgcaattttgatgggtatcggtctccgctgcctacgaatgaatctcagcctctttcattatttccaacagggtttccatag

SEQ ID NO: 194501 - DNA, 975 bp, Artificial Sequence
  derived and/or modified sequence
ccgccttgcagtttgatctcagactgctgtgctggcaatcagcgagactccgtgggcgtaggaccctccgagccaggctgctatccatgtccagggccaaacatgaatcctattgctcttgggagccgctggcttgcttatgcagaaaacaagttgattcgatgtcatcagtcccgtggtggagcctgtggagacaacattcagtcttatactgccacagtcattagtgctgctaaaacattgaaaagtggcctgacaatggtagggaaagtggtgactcagctgacaggcacactgccttcaggtgtgacagaagatgatgttgccatccacagtaattcacggcggagtcctttggtcccaggcatcatcacagttattgacaccgaaaccgttggagagggccaggtgcttgtgagtgaggattctgacagtgatggcattgtggcccacttccctgcccatgagaagccagtgtgctgcatggcttttaatacaagtggaatgcttctagtcacaacagacacccttggccatgactttcatgtcttccaaattctgactcatccttggtcctcatcacaatgtgctgtccaccatctgtatactcttcacaggggagaaactgaagccaaagtacaggacatctgcttcagccatgactgtcgctgggttgtggtcagtactctccggggtacttcccacgttttccccatcaacccttatggtggccagccttgtgttcgtacacatatgtcaccacgagtagtgaatcgcatgagccgtttccagaaaagtgctggactggaagagattgaacaagaactgacgtctaagcaaggaggtcgctgtagccctgttccaggtctatcaagcagcccttctgggtcacccttgcatgggaaactgaacagccaagactcctataacaattttaccaacaacaaccctggcaaccctcggctctctcctctt

SEQ ID NO: 194502 - DNA, 3563 bp, Artificial Sequence
  derived and/or modified sequence
ggttccgctgaggcgtggtaggaagtggctgccgtcaatcactcggggagactccaaacagtgagcctagagctggagactagcgttaaccggcggggcggccggttttatgaatgaagctatggctacagattccccaagaagacccagtcgttgtactggtggagttgtggttcgcccccaggctgtcacagagcagtcctacatggaaagtgttgtgacttttctgcaggatgttgtgccacaggcttacagtggaacacctctaacagaagaaaaggagaaaatagtctgggtcagatttgaaaatgcagatttaaatgatacatcaagaaatctggaatttcatgaaatacatagtactgggaatgaaccgcctttgttgattatgattggctacagtgatggaatgcaggtctggagcatccctatcagtggtgaagcacaagagctcttctctgttcgacatggcccaattcgagcggctagaatcttgcctgctccacagtttggtgctcaaaaatgtgataactttgctgaaaaaagacccctccttggtgtttgtaagagcattggatcttctggcacaagcccaccgtactgttgtgtggatctgtattcacttcgtactggggagatggtcaagtccattcaatttaagacacctatttatgatctccattgcaataaacggatccttgtcgtagtcttgcaggagaaaattgctgcctttgatagctgtactttcacgaagaaattctttgttacaagctgctatccatgtccagggccaaacatgaatcctattgctcttgggagccgctggcttgcttatgcagaaaacaagttgattcgatgtcatcagtcccgtggtggagcctgtggagacaacattcagtcttatactgccacagtcattagtgctgctaaaacattgaaaagtggcctgacaatggtagggaaagtggtgactcagctgacaggcacactgccttcaggtgtgacagaagatgatgttgccatccacagtaattcacggcggagtcctttggtcccaggcatcatcacagttattgacaccgaaaccgttggagagggccaggtgcttgtgagtgaggattctgacagtgatggcattgtggcccacttccctgcccatgagaagccagtgtgctgcatggcttttaatacaagtggaatgcttctagtcacaacagacacccttggccatgactttcatgtcttccaaattctgactcatccttggtcctcatcacaatgtgctgtccaccatctgtatactcttcacaggggagaaactgaagccaaagtacaggacatctgcttcagccatgactgtcgctgggttgtggtcagtactctccggggtacttcccacgttttccccatcaacccttatggtggccagccttgtgttcgtacacatatgtcaccacgagtagtgaatcgcatgagccgtttccagaaaagtgctggactggaagagattgaacaagaactgacgtctaagcaaggaggtcgctgtagccctgttccaggtctatcaagcagcccttctgggtcacccttgcatgggaaactgaacagccaagactcctataacaattttaccaacaacaaccctggcaaccctcggctctctcctcttcccagcttgatggtagtgatgcctcttgcacaaatcaagcagccaatgacattggggaccatcaccaaacgaaccggcaaagttaaacctcctccacaaatttcacccagcaaatcgatgggcggagaattttgtgtggctgctatcttcggaacatccaggtcatggtttgcaaataatgcaggtctgaaaagagaaaaagatcagtccaaacaagttgtagttgagtccctgtacattatcagttgctatggcaccttagtggaacacatgatggagccgcgacccctcagcactgcacccaagattagtgacgacacaccactggaaatgatgacatcgcctcgagccagctggactctggttagaacccctcaatggaatgaattgcagccaccgtttaatgcaaaccaccctctgctcctcgctgcagatgcagtacagtattatcagttcctgcttgctggcctggttccccctggaagtcctgggcccattactcgacatgggtcttacgacagtttagcttctgaccatagtggacaggaagatgaagaatggctttcccaggttgaaattgtaacacacactggaccccatagacgtctgtggatgggtccacagttccagttcaaaaccatccatccctcaggccaaaccacagttatctcatccagttcatctgtgttgcagtctcatggtccgagtgacacgccacagcctcttttggattttgatacagatgatcttgatctcaacagtctcaggatccagccagtccgctctgaccccgtcagcatgccagggtcatcccgtccagtctctgatcgaaggggagtttccacagtgattgatgctgcctcaggtacctttgacaggagcgtgaccctgctggaggtgtgcgggagctggcctgagggcttcgggctgcggcacatgtcctccatggagcacacggaggagggcctccgggagcgacttgccgacgccatggccgagtcacctagccgggacgtcgtgggatccggaacagaacttcagcgagagggaagcatcgagactctgagtaacagctcaggctccaccagcggcagcataccaagaaactttgatggctaccgatctccgctgcccaccaatgagagccagcccctcagcctcttcccgactggcttcccgtaggtaccagcaacctgcttctgactggccagccccctcccctgctggaggaggggagaagccccgctctggtcctacccttcagtctctgctcttccttcatcaaccaccttccccaagcttagtgacagcagccgcccatcctacctggatggagaagagacccttctccaagcacctcagcgcacttgccctctgccacacctgtcggtggaggctgtggccaggagagactgtagaagctcggtccctgtgtatgtttgcatatgacatcctgcattggatccgcttttgtattttttaaccatacccacggtggggcgggtggggggagcctggaacagtgaccagatctgggggcctgagtggggacagagttgatcgtccacctggccattttgaccctgagtggacagtcacagcctcagctcatgtctggctgtgacacacactgcccccagcttcccttggtcagccccactccagcacggggtgaacggaggcccagagtactagggaaggaggaagggaggacatgcctcttcttcctcctttctttccccatctgttcatgggaagagtttgtctttcttatctttaagcccctttaccctggtcctgtactgatcagtgaaggaaaccgtggttactgaggccctgttgaaaagtgcacgtcttgtccaataaatcacgctgcagttggtgtccatccctg

SEQ ID NO: 194503 - DNA, 2742 bp, Artificial Sequence
  derived and/or modified sequence
atgaatgaagcgatggccactgacagtcctcggaggcctagtagatgcacgggaggagtggtggtacgaccccaggctgtaacagaacagtcatacatggagtctgtggttacttttctccaggacgtcgtgcctcaagcatattccggcacgcctcttaccgaggaaaaggaaaaaattgtttgggtgcggttcgaaaatgccgacctcaacgatacatcccggaatctggaattccacgaaatacatagcacagggaacgaacctcctctgctgatcatgataggatactccgatgggatgcaggtttggagtattcctattagcggagaagctcaagagttgttcagcgtgcgccacggcccaattcgtgcagccagaatattaccagccccacaatttggcgcacaaaagtgtgacaatttcgctgagaagcgtcccctgctgggggtgtgcaagtctataggaagcagcggcacaagtccaccctattgttgcgtagacctctacagtctgcgtactggtgagatggtgaaatccatccaatttaagacaccaatttatgatctacattgtaacaagaggatcttagtagtggtcctacaagaaaagatagctgccttcgatagctgcacatttactaagaagttctttgtcaccagttgctacccctgcccagggccaaatatgaatcccattgccctcggatctcgttggttagcctatgctgaaaacaagctgatcaggtgccaccagtctagaggaggagcgtgtggagataacatccaaagctatactgcaactgtgatttccgctgcaaagactttaaagtcggggctgacaatggtgggcaaggtcgtaacacagttgacaggcacactcccttcgggagtcaccgaagacgacgtagccatccattcgaactcgagacggtccccattggtcccgggaatcattaccgtgatcgacaccgagaccgtcggcgaagggcaagtcctcgtgagcgaagactccgacagcgacggcattgtggcacactttcccgctcatgaaaagcctgtgtgttgcatggcttttaacacctctggaatgctattggtgaccacagatactctggggcatgacttccacgtgtttcaaattctgacacatccatggtcaagttctcaatgcgctgtgcaccacctttacaccttgcaccgaggcgaaacagaggcgaaggtgcaggacatttgcttcagtcacgactgtcgctgggtggtcgtgagtactcttcggggtaccagccacgtgttccccattaatccatacggcggtcagccgtgcgttcggacacacatgtccccacgagtggtgaaccgtatgagcagattccagaagagtgcgggactagaggagatcgagcaggagctgaccagcaaacaagggggtagatgctcgcccgtccccggactgagttcctccccatcgggtagtccactacatggtaagctgaacagccaggattcttataacaactttaccaacaacaatccaggtaatcctcgtttatccccactgccttctctgatggtagttatgccactcgcccagatcaagcaacctatgacactgggcacaatcaccaaaaggacaggcaaggtgaaaccaccaccgcagatttcccctagtaaaagtatggggggtgagttctgtgtggccgcaatcttcgggacttctcgctcgtggttcgctaataatgccggattaaaaagggagaaggaccagtcaaagcaggtagttgtggagtctttgtatattatcagctgttatggaactctggtggagcacatgatggaaccgagacctctgtcaaccgcaccaaagatctccgatgatacacccttggagatgatgacctctccccgagccagctggaccttagttcgcactccacagtggaatgaactccaaccacccttcaacgcgaatcatccattgctactggctgccgatgcggttcagtactatcagttcctattggcagggcttgttccccctggttctcctggacccattacgaggcacgggtcttacgattccctcgcaagcgatcattccggtcaggaagatgaggagtggttgagtcaggttgaaatcgtcacccatacagggcctcacaggcgcctttggatggggcctcagttccaattcaagaccattcatccatcaggacagactacagtgatcagttcatccagctccgtgctgcagagtcacgggccttctgatactccccagcccctgctggactttgacacagacgatctggacctgaactcactgcgcattcagcctgtcaggtccgacccagtctccatgccaggcagctctcgccctgtcagcgatcgcagaggcgtgagcacagtgattgatgccgctagtggcacctttgatagaagcgtcacactattggaagtctgtgggtcctggccagaaggctttggccttcggcacatgagttcaatggaacacacagaggaaggacttcgcgagcgtctggccgatgcaatggcagaatccccctcaagggatgtggtgggctcaggaactgagctccagagggagggctctatagagacattatcgaatagttcagggagtacgtcgggctcaattccaagaaatttcgacggataccgcagcccgctgccaactaacgagtcccagcctctcagcctgtttccgacagggtttccttag

SEQ ID NO: 194504 - protein, 380 aa, Artificial Sequence
  derived and/or modified sequence
MKEYVLLLFLALCSAKPFFSPSHIALKNMMLKDMEDTDDDDDDDDDDDDDDEDNSLFPTREPRSHFFPFDLFPMCPFGCQCYSRVVHCSDLGLTSVPTNIPFDTRMLDLQNNKIKEIKENDFKGLTSLYGLILNNNKLTKIHPKAFLTTKKLRRLYLSHNQLSEIPLNLPKSLAELRIHENKVKKIQKDTFKGMNALHVLEMSANPLDNNGIEPGAFEGVTVFHIRIAEAKLTSVPKGLPPTLLELHLDYNKISTVELEDFKRYKELQRLGLGNNKITDIENGSLANIPRVREIHLENNKLKKIPSGLPELKYLQIIFLHSNSIARVGVNDFCPTVPKMKKSLYSAISLFNNPVKYWEMQPATFRCVLSRMSVQLGNFGM

SEQ ID NO: 194505 - protein, 80 aa, Artificial Sequence
  derived and/or modified sequence
MMLKDMEDTDDDDDDDDDDDDDDEDNSLFPTREPRSHFFPFDLFPMCPFGCQCYSRVVHCSDLGLTSVPTNIPLILECLI

SEQ ID NO: 194506 - DNA, 1143 bp, Artificial Sequence
  derived and/or modified sequence
atgaaagaatacgtgctcctgctgtttctcgcgctctgctcagccaaaccgttcttcagcccctctcacatagctctaaaaaacatgatgctcaaggacatggaggatactgatgacgacgacgatgatgacgacgatgacgacgatgacgatgaggacaattctctgtttcctactcgggagcctcgcagccatttttttcccttcgatctattccctatgtgtcccttcgggtgccaatgttactcccgcgtcgtgcattgctccgacctggggctgacgtccgtgccaacaaacatcccgtttgacaccaggatgctggacttgcagaacaacaagatcaaggaaatcaaggaaaacgatttcaagggactcacctctctctacggcctcatcttgaataacaacaaactgactaagatccaccccaaggctttcctcacgacaaaaaaactgcggcggctgtaccttagtcataaccagctgtccgagatacctttgaaccttcccaagtctctcgctgagttgcgtattcatgaaaacaaggtgaagaaaatccaaaaagatacctttaaaggaatgaatgctctgcatgtccttgagatgagcgccaatcccctggacaacaacggaatcgagcccggcgcatttgaaggagttaccgttttccatatacggattgcagaggctaagttgaccagtgttccgaagggactgccaccaaccctactcgaactccacctggactacaacaagatttccactgttgagctggaagactttaagcgatacaaggagctgcagaggctcggcctgggaaataacaagatcacagacatcgagaatggctcattggccaatatccctcgcgtgagagagatacatctagaaaataataaattaaagaagattccttccggcctcccagagctgaagtatctacagataatcttcctacactccaattctatcgccagggttggagtgaatgatttctgtcccaccgtccccaagatgaagaaatccctctacagcgccatctcattattcaacaaccccgtaaaatactgggaaatgcagcccgctaccttccggtgtgtgctcagtaggatgtcggtgcagctcgggaattttggtatgtag

SEQ ID NO: 194507 - DNA, 1143 bp, Artificial Sequence
  derived and/or modified sequence
atgaaggagtatgtgctgctgctcttcctggccctgtgcagcgccaagcccttcttcagccccagccacatcgccctgaagaacatgatgctgaaggacatggaggacacagatgatgatgatgatgatgatgatgatgatgatgatgatgatgaggacaacagcctcttccccacccgggagcccaggagccacttcttcccctttgacctcttccccatgtgccccttcggctgccagtgctacagccgggtggtgcactgcagcgacctgggcctgacctctgtgcccaccaacatcccctttgacaccaggatgctggacctgcagaacaacaagatcaaggagatcaaggaaaatgacttcaagggcctgaccagcctgtatggcctcatcctgaacaacaacaagctgaccaagatccaccccaaggccttcctgaccaccaagaagctgcggcggctgtacctgagccacaaccagctgtctgagatccccctgaacctgcccaagagcctggccgagctgcgcatccacgagaacaaggtgaagaagatccagaaggacaccttcaagggcatgaatgccctgcacgtgctggagatgtctgccaaccccctggacaacaacggcatcgagcccggggcctttgaaggagtgacagtgttccacatcagaattgctgaggccaagctgacctctgtgcccaagggcctgccccccaccctgctggagctgcacctggactacaacaagatcagcacagtggagctggaggacttcaagcgctacaaggagctgcagaggctgggcctgggcaacaacaagatcacagacattgaaaatggcagcctggccaacatcccccgggtgcgggagatccacctggagaacaacaagctgaagaagatccccagcggcctgcctgagctgaagtacctgcagatcatcttcctgcacagcaacagcatcgcccgggtgggcgtgaatgacttctgccccaccgtgcccaagatgaagaagagcctgtacagcgccatcagcctcttcaacaaccctgtgaagtactgggagatgcagcctgccaccttccgctgtgtgctgagcaggatgtctgtgcagctgggcaactttggcatgtag

SEQ ID NO: 194508 - DNA, 1143 bp, Artificial Sequence
  derived and/or modified sequence
atgaaggagtacgtgctgctgctgttcctggccctgtgcagcgccaagccatttttctcaccctcgcatatcgcgctgaagaacatgatgctgaaggacatggaggacaccgatgacgatgacgacgacgacgacgatgacgacgacgacgacgaggacaactcactcttccccacaagggagcccaggtcccacttcttccccttcgatctgttccccatgtgcccgtttggctgtcaatgttattcccgggtcgttcactgtagtgatctgggactgacctcagtccccactaacatacctttcgatacccgaatgttggatctgcagaacaacaagatcaaagagatcaaggaaaatgactttaaagggctaacaagcctatatggacttattctaaacaacaacaagttgactaaaatacaccctaaggctttcttgaccaccaagaagttgcgccgactgtacttgagtcacaatcagctcagcgaaataccactaaatctgccgaagtccctagccgaattgcgtatacatgagaacaaggtaaagaaaattcagaaggataccttcaaaggcatgaacgcactgcacgtcctagagatgagcgccaacccgctagacaataacgggatcgagcctggagcttttgagggcgtaaccgtattccatatcaggatcgccgaggctaagctcacctctgtgcccaagggtctccctcctacactgctagaactccatctggattacaacaaaatttcaaccgttgagctagaggatttcaaaaggtacaaagaactgcagagactcggcttgggcaataacaagattacagacattgaaaatggaagcctggcaaatattccccgagtcagagagatacacctggagaacaacaagctgaaaaagattccctccggcttgcccgagttgaagtacctgcagattatcttcttgcatagcaatagcattgcaagagttggagtaaacgacttttgccctacagtccccaagatgaaaaaaagcctgtacagcgccatttctcttttcaacaaccctgtaaagtattgggagatgcagccagccacctttaggtgtgtgctgtctcgtatgtctgttcaacttggcaattttgggatgtag

SEQ ID NO: 194509 - DNA, 1143 bp, Artificial Sequence
  derived and/or modified sequence
atgaaggagtacgttctgttgctgtttctcgcactgtgcagcgccaagccgttcttcagtccctctcacatcgcccttaaaaacatgatgctgaaggatatggaagatacagatgatgatgacgatgacgatgacgatgacgacgatgacgacgaagacaattctttgtttccaacgcgagagccaagatcgcactttttccccttcgatctgttccctatgtgtccgtttggatgccaatgttatagcagggtggttcattgttccgatttaggattgacttctgtacctacgaatattccatttgacactcgaatgctggacctgcagaacaataaaatcaaggaaatcaaggagaacgacttcaaagggctaacttcactgtacggcttgatcctaaataacaataagttgactaaaatacaccctaaagctttcctcaccacaaagaagcttcgcagactttacctgtctcacaaccagctgagcgagatcccactgaacctgcccaagagtttggccgaacttcgcatccacgagaataaggtgaaaaaaatacagaaagataccttcaaaggaatgaacgccctccatgtgctggagatgtccgcgaatcccctagacaacaatggtattgaaccaggggcatttgagggggtgacggtttttcacattcgcatagctgaagccaagcttacttctgtccccaaaggcctgcccccaacccttctggagctccacctcgattataataaaatttccacagttgaactcgaggattttaaaaggtacaaagaactgcagcgcctggggctgggtaataacaaaattactgatatagaaaacggatcgctggccaacattcccagggtgcgagaaatccatttggaaaataacaagctgaaaaaaattccctctgggctacccgaactgaaatacctgcaaattatctttctccactccaactctattgcccgagtaggcgttaacgacttttgccccaccgtgcctaagatgaagaaaagcttatactcagccatcagtcttttcaataaccccgtgaagtactgggagatgcagcctgccaccttccgctgtgtcctaagccgaatgtccgtccagcttggcaactttggcatgtag

SEQ ID NO: 194510 - DNA, 2470 bp, Artificial Sequence
  derived and/or modified sequence
agtactaacatggactaatctgtgggagcagtttattccagtatcacccagggtgcagccacaccaggactgtgttgaagggtgttttttttcttttaaatgtaatacctcctcatcttttcttcttacacagtgtctgagaacatttacattatagataagtagtacatggtggataacttctacttttaggaggactactctcttctgacagtcctagactggtcttctacactaagacaccatgaaggagtatgtgctcctattattcctggctttgtgctctgccaaacccttctttagcccttcacacatcgcactgaagaatatgatgctgaaggatatggaagacacagatgatgatgatgatgatgatgatgatgatgatgatgatgatgaggacaactctctttttccaacaagagagccaagaagccatttttttccatttgatctgtttccaatgtgtccatttggatgtcagtgctattcacgagttgtacattgctcagatttaggtttgacctcagtcccaaccaacattccatttgatactcgaatgcttgatcttcaaaacaataaaattaaggaaatcaaagaaaatgattttaaaggactcacttcactttatggtctgatcctgaacaacaacaagctaacgaagattcacccaaaagcctttctaaccacaaagaagttgcgaaggctgtatctgtcccacaatcaactaagtgaaataccacttaatcttcccaaatcattagcagaactcagaattcatgaaaataaagttaagaaaatacaaaaggacacattcaaaggaatgaatgctttacacgttttggaaatgagtgcaaaccctcttgataataatgggatagagccaggggcatttgaaggggtgacggtgttccatatcagaattgcagaagcaaaactgacctcagttcctaaaggcttaccaccaactttattggagcttcacttagattataataaaatttcaacagtggaacttgaggattttaaacgatacaaagaactacaaaggctgggcctaggaaacaacaaaatcacagatatcgaaaatgggagtcttgctaacataccacgtgtgagagaaatacatttggaaaacaataaactaaaaaaaatcccttcaggattaccagagttgaaatacctccagataatcttccttcattctaattcaattgcaagagtgggagtaaatgacttctgtccaacagtgccaaagatgaagaaatctttatacagtgcaataagtttattcaacaacccggtgaaatactgggaaatgcaacctgcaacatttcgttgtgttttgagcagaatgagcgttcagcttgggaactttggaatgtaataattagtaattggtaatgtccatttaatataagattcaaaaatccctacatttggaatacttgaactctattaataatggtagtattatatatacaagcaaatatctattctcaagtggtaagtccactgacttattttatgacaagaaatttcaacggaattttgccaaactattgatacataagggttgagagaaacaagcatctattgcagtttctttttgcgtacaaatgatcttacataaatctcatgcttgaccattcctttcttcataacaaaaaagtaagatattcggtatttaacactttgttatcaagcatattttaaaaagaactgtactgtaaatggaatgcttgacttagcaaaatttgtgctctttcatttgctgttagaaaaacagaattaacaaagacagtaatgtgaagagtgcattacactattcttattctttagtaacttgggtagtactgtaatatttttaatcatcttaaagtatgatttgatataatcttattgaaattaccttatcatgtcttagagcccgtctttatgtttaaaactaatttcttaaaataaagccttcagtaaatgttcattaccaacttgataaatgctactcataagagctggtttggggctatagcatatgcttttttttttttaattattacctgatttaaaaatctctgtaaaaacgtgtagtgtttcataaaatctgtaactcgcattttaatgatccgctattataagcttttaatagcatgaaaattgttaggctatataacattgccacttcaactctaaggaatatttttgagatatccctttggaagaccttgcttggaagagcctggacactaacaattctacaccaaattgtctcttcaaatacgtatggactggataactctgagaaacacatctagtataactgaataagcagagcatcaaattaaacagacagaaaccgaaagctctatataaatgctcagagttctttatgtatttcttattggcattcaacatatgtaaaatcagaaaacagggaaattttcattaaaaatattggtttgaaataaaa

SEQ ID NO: 194511 - DNA, 1143 bp, Artificial Sequence
  derived and/or modified sequence
atgaaggagtacgtgctgctgctgttcctggccctgtgcagcgccaagcccttcttcagccccagccacatcgccctgaagaacatgatgctgaaggacatggaggacaccgacgacgacgacgacgacgacgacgacgacgacgacgacgacgaggacaacagcctgttccccaccagagagcccagaagccacttcttccccttcgacctgttccccatgtgccccttcggctgccagtgctacagcagagtggtgcactgcagcgacctgggcctgaccagcgtgcccaccaacatccccttcgacaccagaatgctggacctgcagaacaacaagatcaaggagatcaaggagaacgacttcaagggcctgaccagcctgtacggcctgatcctgaacaacaacaagctgaccaagatccaccccaaggccttcctgaccaccaagaagctgagaagactgtacctgagccacaaccagctgagcgagatccccctgaacctgcccaagagcctggccgagctgagaatccacgagaacaaggtgaagaagatccagaaggacaccttcaagggcatgaacgccctgcacgtgctggagatgagcgccaaccccctggacaacaacggcatcgagcccggcgccttcgagggcgtgaccgtgttccacatcagaatcgccgaggccaagctgaccagcgtgcccaagggcctgccccccaccctgctggagctgcacctggactacaacaagatcagcaccgtggagctggaggacttcaagagatacaaggagctgcagagactgggcctgggcaacaacaagatcaccgacatcgagaacggcagcctggccaacatccccagagtgagagagatccacctggagaacaacaagctgaagaagatccccagcggcctgcccgagctgaagtacctgcagatcatcttcctgcacagcaacagcatcgccagagtgggcgtgaacgacttctgccccaccgtgcccaagatgaagaagagcctgtacagcgccatcagcctgttcaacaaccccgtgaagtactgggagatgcagcccgccaccttcagatgcgtgctgagcagaatgagcgtgcagctgggcaacttcggcatgtag

SEQ ID NO: 194512 - protein, 3710 aa, Artificial Sequence
  derived and/or modified sequence
MVLESVVADLLNRFLGDYVENLNKSQLKLGIWGGNVALDNLQIKENALSELDVPFKVKAGQIDKLTLKIPWKNLYGEAVVATLEGLYLLVVPGASIKYDAVKEEKSLQDVKQKELSRIEEALQKAAEKDKPKEAKKDTFVEKLATQVIKNVQVKITDIHIKYEDDVTDPKRPLSFGVTLGELSLLTANEHWTPCILNEADKIIYKLIRLDSLSAYWNVNCSMSYQRSREQILDQLKNEILTSGNIPPNYQYIFQPISASAKLYMNPYAESELKTPKLDCNIEIQNIAIELTKPQYLSMIDLLESVDYMVRNAPYRKYKPYLPLHTNGRRWWKYAIDSVLEVHIRRYTQMWSWSNIKKHRQLLKSYKIAYKNKLTQSKVSEEIQKEIQDLEKTLDVFNIILARQQAQVEVIRSGQKLRKKSADTGEKRGGWFSGLWGKKESKKKDEESLIPETIDDLMTPEEKDKLFTAIGYSESTHNLTLPKQYVAHIMTLKLVSTSVTIRENKNIPEILKIQIIGLGTQVSQRPGAQALKVEAKLEHWYITGLRQQDIVPSLVASIGDTTSSLLKIKFETNPEDSPADQTLIVQSQPVEVIYDAKTVNAVVEFFQSNKGLDLEQITSATLMKLEEIKERTATGLTHIIETRKVLDLRINLKPSYLVVPQTGFHHEKSDLLILDFGTFQLNSKDQGLQKTTNSSLEEIMDKAYDKFDVEIKNVQLLFARAEETWKKCRFQHPSTMHILQPMDIHVELAKAMVEKDIRMARFKVSGGLPLMHVRISDQKMKDVLYLMNSIPLPQKSSAQSPERQVSSIPIISGGTKGLLGTSLLLDTVESESDDEYFDAEDGEPQTCKSMKGSELKKAAEVPNEELINLLLKFEIKEVILEFTKQQKEEDTILVFNVTQLGTEATMRTFDLTVVSYLKKISLDYHEIEGSKRKPLHLISSSDKPGLDLLKVEYIKADKNGPSFQTAFGKTEQTVKVAFSSLNLLLQTQALVASINYLTTIIPSDDQSISVAKEVQISTEKQQKNSTLPKAIVSSRDSDIIDFRLFAKLNAFCVIVCNEKNNIAEIKIQGLDSSLSLQSRKQSLFARLENIIVTDVDPKTVHKKAVSIMGNEVFRFNLDLYPDATEGDLYTDMSKVDGVLSLNVGCIQIVYLHKFLMSLLNFLNNFQTAKESLSAATAQAAERAATSVKDLAQRSFRVSINIDLKAPVIVIPQSSISTNAVVVDLGLIRVHNQFSLVSDEDYLNPPVIDRMDVQLTKLTLYRTVIQPGIYHPDIQLLHPINLEFLVNRNLAASWYHKVPVVEIKGHLDSMNVSLNQEDLNLLFRILTENLCEGTEDLDKVKPRVQETGEIKEPLEISISQDVHDSKNTLTTGVEEIRSVDIINMLLNFEIKEVVVTLMKKSEKKGRPLHELNVLQLGMEAKVKTYDMTAKAYLKKISMQCFDFTDSKGEPLHIINSSNVTDEPLLKMLLTKADSDGPEFKTIHDSTKQRLKVSFASLDLVLHLEALLSFMDFLSSAAPFSEPSSSEKESELKPLVGESRSIAVKAVSSNISQKDVFDLKITAELNAFNVFVCDQKCNIADIKIHGMDASISVKPKQTDVFARLKDIIVMNVDLQSIHKKAVSILGDEVFRFQLTLYPDATEGEAYADMSKVDGKLSFKVGCIQIVYVHKFFMSLLNFLNNFQTAKEALSTATVQAAERAASSMKDLAQKSFRLLMDINLKAPVIIIPQSSVSPNAVIADLGLIRVENKFSLVPMEHYSLPPVIDKMNIELTQLKLSRTILQASLPQNDIEILKPVNMLLSIQRNLAAAWYVQIPGMEIKGKLKPMQVALSEDDLTVLMKILLENLGEASSQPSPTQSVQETVRVRKVDVSSVPDHLKEQEDWTDSKLSMNQIVSLQFDFHFESLSIILYNNDINQESGVAFHNDSFQLGELRLHLMASSGKMFKDGSMNVSVKLKTCTLDDLREGIERATSRMIDRKNDQDNNSSMIDISYKQDKNGSQIDAVLDKLYVCASVEFLMTVADFFIKAVPQSPENVAKETQILPRQTATGKVKIEKDDSVRPNMTLKAMITDPEVVFVASLTKADAPALTASFQCNLSLSTSKLEQMMEASVRDLKVLACPFLREKRGKNITTVLQPCSLFMEKCTWASGKQNINIMVKEFIIKISPIILNTVLTIMAALSPKTKEDGSKDTSKEMENLWGIKSINDYNTWFLGVDTATEITESFKGIEHSLIEENCGVVVESIQVTLECGLGHRTVPLLLAESKFSGNIKNWTSLMAAVADVTLQVHYYNEIHAVWEPLIERVEGKRQWNLRLDVKKNPVQDKSLLPGDDFIPEPQMAIHISSGNTMNITISKSCLNVFNNLAKGFSEGTASTFDYSLKDRAPFTVKNAVGVPIKVKPNCNLRVMGFPEKSDIFDVDAGQNLELEYASMVPSSQGNLSILSRQESSFFTLTIVPHGYTEVANIPVARPGRRLYNVRNPNASHSDSVLVQIDATEGNKVITLRSPLQIKNHFSIAFIIYKFVKNVKLLERIGIARPEEEFHVPLDSYRCQLFIQPAGILEHQYKESTTYISWKEELHRSREVRCMLQCPSVEVSFLPLIVNTVALPDELSYICTHGEDWDVAYIIHLYPSLTLRNLLPYSLRYLLEGTAETHELAEGSTADVLHSRISGEIMELVLVKYQGKNWNGHFRIRDTLPEFFPVCFSSDSTEVTTVDLSVHVRRIGSRMVLSVFSPYWLINKTTRVLQYRSEDIHVKHPADFRDIILFSFKKKNIFTKNKVQLKISTSAWSSSFSLDTVGSYGCVKCPANNMEYLVGVSIKMSSFNLSRIVTLTPFCTIANKSSLELEVGEIASDGSMPTNKWNYIASSECLPFWPESLSGKLCVRVVGCEGSSKPFFYNRQDNGTLLSLEDLNGGILVDVNTAEHSTVITFSDYHEGSAPALIMNHTPWDILTYKQSGSPEEMVLLPRQARLFAWADPTGTRKLTWTYAANVGEHDLLKDGCGQFPYDANIQIHWVSFLDGRQRVLLFTDDVALVSKALQAEEMEQADYEITLSLHSLGLSLVNNESKQEVSYIGITSSGVVWEVKPKQKWKPFSQKQIILLEQSYQKHQISRDHGWIKLDNNFEVNFDKDPMEMRLPIRSPIKRDFLSGIQIEFKQSSHQRSLRARLYWLQVDNQLPGAMFPVVFHPVAPPKSIALDSEPKPFIDVSVITRFNEYSKVLQFKYFMVLIQEMALKIDQGFLGAIIALFTPTTDPEAERRRTKLIQQDIDALNAELMETSMTDMSILSFFEHFHISPVKLHLSLSLGSGGEESDKEKQEMFAVHSVNLLLKSIGATLTDVDDLIFKLAYYEIRYQFYKRDQLIWSVVRHYSEQFLKQMYVLVLGLDVLGNPFGLIRGLSEGVEALFYEPFQGAVQGPEEFAEGLVIGVRSLFGHTVGGAAGVVSRITGSVGKGLAAITMDKEYQQKRREELSRQPRDFGDSLARGGKGFLRGVVGGVTGIITKPVEGAKKEGAAGFFKGIGKGLVGAVARPTGGIVDMASSTFQGIQRAAESTEEVSSLRPPRLIHEDGIIRPYDRQESEGSDLLENHIKKLEGETYRYHCAIPGSKKTILMVTNRRVLCIKEVEILGLMCVDWQCPFEDFVFPPSVSENVLKISVKEQGLFHKKDSANQGCVRKVYLKDTATAERACNAIEDAQSTRQQQKLMKQSSVRLLRPQLPS

SEQ ID NO: 194513 - DNA, 11133 bp, Artificial Sequence
  derived and/or modified sequence
atggtgctggagagcgtggtggccgacctgctgaacagattcctgggcgactacgtggagaacctgaacaagagccagctgaagctgggcatctggggcggcaacgtggccctggacaacctgcagatcaaggagaacgccctgagcgagctggacgtgcccttcaaggtgaaggccggccagatcgacaagctgaccctgaagatcccctggaagaacctgtacggcgaggccgtggtggccaccctggagggcctgtacctgctggtggtgcccggcgccagcatcaagtacgacgccgtgaaggaggagaagagcctgcaggacgtgaagcagaaggagctgagcagaatcgaggaggccctgcagaaggccgccgagaaggacaagcccaaggaggccaagaaggacaccttcgtggagaagctggccacccaggtgatcaagaacgtgcaggtgaagatcaccgacatccacatcaagtacgaggacgacgtgaccgaccccaagagacccctgagcttcggcgtgaccctgggcgagctgagcctgctgaccgccaacgagcactggaccccctgcatcctgaacgaggccgacaagatcatctacaagctgatcagactggacagcctgagcgcctactggaacgtgaactgcagcatgagctaccagagaagcagagagcagatcctggaccagctgaagaacgagatcctgaccagcggcaacatcccccccaactaccagtacatcttccagcccatcagcgccagcgccaagctgtacatgaacccctacgccgagagcgagctgaagacccccaagctggactgcaacatcgagatccagaacatcgccatcgagctgaccaagccccagtacctgagcatgatcgacctgctggagagcgtggactacatggtgagaaacgccccctacagaaagtacaagccctacctgcccctgcacaccaacggcagaagatggtggaagtacgccatcgacagcgtgctggaggtgcacatcagaagatacacccagatgtggagctggagcaacatcaagaagcacagacagctgctgaagagctacaagatcgcctacaagaacaagctgacccagagcaaggtgagcgaggagatccagaaggagatccaggacctggagaagaccctggacgtgttcaacatcatcctggccagacagcaggcccaggtggaggtgatcagaagcggccagaagctgagaaagaagagcgccgacaccggcgagaagagaggcggctggttcagcggcctgtggggcaagaaggagagcaagaagaaggacgaggagagcctgatccccgagaccatcgacgacctgatgacccccgaggagaaggacaagctgttcaccgccatcggctacagcgagagcacccacaacctgaccctgcccaagcagtacgtggcccacatcatgaccctgaagctggtgagcaccagcgtgaccatcagagagaacaagaacatccccgagatcctgaagatccagatcatcggcctgggcacccaggtgagccagagacccggcgcccaggccctgaaggtggaggccaagctggagcactggtacatcaccggcctgagacagcaggacatcgtgcccagcctggtggccagcatcggcgacaccaccagcagcctgctgaagatcaagttcgagaccaaccccgaggacagccccgccgaccagaccctgatcgtgcagagccagcccgtggaggtgatctacgacgccaagaccgtgaacgccgtggtggagttcttccagagcaacaagggcctggacctggagcagatcaccagcgccaccctgatgaagctggaggagatcaaggagagaaccgccaccggcctgacccacatcatcgagaccagaaaggtgctggacctgagaatcaacctgaagcccagctacctggtggtgccccagaccggcttccaccacgagaagagcgacctgctgatcctggacttcggcaccttccagctgaacagcaaggaccagggcctgcagaagaccaccaacagcagcctggaggagatcatggacaaggcctacgacaagttcgacgtggagatcaagaacgtgcagctgctgttcgccagagccgaggagacctggaagaagtgcagattccagcaccccagcaccatgcacatcctgcagcccatggacatccacgtggagctggccaaggccatggtggagaaggacatcagaatggccagattcaaggtgagcggcggcctgcccctgatgcacgtgagaatcagcgaccagaagatgaaggacgtgctgtacctgatgaacagcatccccctgccccagaagagcagcgcccagagccccgagagacaggtgagcagcatccccatcatcagcggcggcaccaagggcctgctgggcaccagcctgctgctggacaccgtggagagcgagagcgacgacgagtacttcgacgccgaggacggcgagccccagacctgcaagagcatgaagggcagcgagctgaagaaggccgccgaggtgcccaacgaggagctgatcaacctgctgctgaagttcgagatcaaggaggtgatcctggagttcaccaagcagcagaaggaggaggacaccatcctggtgttcaacgtgacccagctgggcaccgaggccaccatgagaaccttcgacctgaccgtggtgagctacctgaagaagatcagcctggactaccacgagatcgagggcagcaagagaaagcccctgcacctgatcagcagcagcgacaagcccggcctggacctgctgaaggtggagtacatcaaggccgacaagaacggccccagcttccagaccgccttcggcaagaccgagcagaccgtgaaggtggccttcagcagcctgaacctgctgctgcagacccaggccctggtggccagcatcaactacctgaccaccatcatccccagcgacgaccagagcatcagcgtggccaaggaggtgcagatcagcaccgagaagcagcagaagaacagcaccctgcccaaggccatcgtgagcagcagagacagcgacatcatcgacttcagactgttcgccaagctgaacgccttctgcgtgatcgtgtgcaacgagaagaacaacatcgccgagatcaagatccagggcctggacagcagcctgagcctgcagagcagaaagcagagcctgttcgccagactggagaacatcatcgtgaccgacgtggaccccaagaccgtgcacaagaaggccgtgagcatcatgggcaacgaggtgttcagattcaacctggacctgtaccccgacgccaccgagggcgacctgtacaccgacatgagcaaggtggacggcgtgctgagcctgaacgtgggctgcatccagatcgtgtacctgcacaagttcctgatgagcctgctgaacttcctgaacaacttccagaccgccaaggagagcctgagcgccgccaccgcccaggccgccgagagagccgccaccagcgtgaaggacctggcccagagaagcttcagagtgagcatcaacatcgacctgaaggcccccgtgatcgtgatcccccagagcagcatcagcaccaacgccgtggtggtggacctgggcctgatcagagtgcacaaccagttcagcctggtgagcgacgaggactacctgaacccccccgtgatcgacagaatggacgtgcagctgaccaagctgaccctgtacagaaccgtgatccagcccggcatctaccaccccgacatccagctgctgcaccccatcaacctggagttcctggtgaacagaaacctggccgccagctggtaccacaaggtgcccgtggtggagatcaagggccacctggacagcatgaacgtgagcctgaaccaggaggacctgaacctgctgttcagaatcctgaccgagaacctgtgcgagggcaccgaggacctggacaaggtgaagcccagagtgcaggagaccggcgagatcaaggagcccctggagatcagcatcagccaggacgtgcacgacagcaagaacaccctgaccaccggcgtggaggagatcagaagcgtggacatcatcaacatgctgctgaacttcgagatcaaggaggtggtggtgaccctgatgaagaagagcgagaagaagggcagacccctgcacgagctgaacgtgctgcagctgggcatggaggccaaggtgaagacctacgacatgaccgccaaggcctacctgaagaagatcagcatgcagtgcttcgacttcaccgacagcaagggcgagcccctgcacatcatcaacagcagcaacgtgaccgacgagcccctgctgaagatgctgctgaccaaggccgacagcgacggccccgagttcaagaccatccacgacagcaccaagcagagactgaaggtgagcttcgccagcctggacctggtgctgcacctggaggccctgctgagcttcatggacttcctgagcagcgccgcccccttcagcgagcccagcagcagcgagaaggagagcgagctgaagcccctggtgggcgagagcagaagcatcgccgtgaaggccgtgagcagcaacatcagccagaaggacgtgttcgacctgaagatcaccgccgagctgaacgccttcaacgtgttcgtgtgcgaccagaagtgcaacatcgccgacatcaagatccacggcatggacgccagcatcagcgtgaagcccaagcagaccgacgtgttcgccagactgaaggacatcatcgtgatgaacgtggacctgcagagcatccacaagaaggccgtgagcatcctgggcgacgaggtgttcagattccagctgaccctgtaccccgacgccaccgagggcgaggcctacgccgacatgagcaaggtggacggcaagctgagcttcaaggtgggctgcatccagatcgtgtacgtgcacaagttcttcatgagcctgctgaacttcctgaacaacttccagaccgccaaggaggccctgagcaccgccaccgtgcaggccgccgagagagccgccagcagcatgaaggacctggcccagaagagcttcagactgctgatggacatcaacctgaaggcccccgtgatcatcatcccccagagcagcgtgagccccaacgccgtgatcgccgacctgggcctgatcagagtggagaacaagttcagcctggtgcccatggagcactacagcctgccccccgtgatcgacaagatgaacatcgagctgacccagctgaagctgagcagaaccatcctgcaggccagcctgccccagaacgacatcgagatcctgaagcccgtgaacatgctgctgagcatccagagaaacctggccgccgcctggtacgtgcagatccccggcatggagatcaagggcaagctgaagcccatgcaggtggccctgagcgaggacgacctgaccgtgctgatgaagatcctgctggagaacctgggcgaggccagcagccagcccagccccacccagagcgtgcaggagaccgtgagagtgagaaaggtggacgtgagcagcgtgcccgaccacctgaaggagcaggaggactggaccgacagcaagctgagcatgaaccagatcgtgagcctgcagttcgacttccacttcgagagcctgagcatcatcctgtacaacaacgacatcaaccaggagagcggcgtggccttccacaacgacagcttccagctgggcgagctgagactgcacctgatggccagcagcggcaagatgttcaaggacggcagcatgaacgtgagcgtgaagctgaagacctgcaccctggacgacctgagagagggcatcgagagagccaccagcagaatgatcgacagaaagaacgaccaggacaacaacagcagcatgatcgacatcagctacaagcaggacaagaacggcagccagatcgacgccgtgctggacaagctgtacgtgtgcgccagcgtggagttcctgatgaccgtggccgacttcttcatcaaggccgtgccccagagccccgagaacgtggccaaggagacccagatcctgcccagacagaccgccaccggcaaggtgaagatcgagaaggacgacagcgtgagacccaacatgaccctgaaggccatgatcaccgaccccgaggtggtgttcgtggccagcctgaccaaggccgacgcccccgccctgaccgccagcttccagtgcaacctgagcctgagcaccagcaagctggagcagatgatggaggccagcgtgagagacctgaaggtgctggcctgccccttcctgagagagaagagaggcaagaacatcaccaccgtgctgcagccctgcagcctgttcatggagaagtgcacctgggccagcggcaagcagaacatcaacatcatggtgaaggagttcatcatcaagatcagccccatcatcctgaacaccgtgctgaccatcatggccgccctgagccccaagaccaaggaggacggcagcaaggacaccagcaaggagatggagaacctgtggggcatcaagagcatcaacgactacaacacctggttcctgggcgtggacaccgccaccgagatcaccgagagcttcaagggcatcgagcacagcctgatcgaggagaactgcggcgtggtggtggagagcatccaggtgaccctggagtgcggcctgggccacagaaccgtgcccctgctgctggccgagagcaagttcagcggcaacatcaagaactggaccagcctgatggccgccgtggccgacgtgaccctgcaggtgcactactacaacgagatccacgccgtgtgggagcccctgatcgagagagtggagggcaagagacagtggaacctgagactggacgtgaagaagaaccccgtgcaggacaagagcctgctgcccggcgacgacttcatccccgagccccagatggccatccacatcagcagcggcaacaccatgaacatcaccatcagcaagagctgcctgaacgtgttcaacaacctggccaagggcttcagcgagggcaccgccagcaccttcgactacagcctgaaggacagagcccccttcaccgtgaagaacgccgtgggcgtgcccatcaaggtgaagcccaactgcaacctgagagtgatgggcttccccgagaagagcgacatcttcgacgtggacgccggccagaacctggagctggagtacgccagcatggtgcccagcagccagggcaacctgagcatcctgagcagacaggagagcagcttcttcaccctgaccatcgtgccccacggctacaccgaggtggccaacatccccgtggccagacccggcagaagactgtacaacgtgagaaaccccaacgccagccacagcgacagcgtgctggtgcagatcgacgccaccgagggcaacaaggtgatcaccctgagaagccccctgcagatcaagaaccacttcagcatcgccttcatcatctacaagttcgtgaagaacgtgaagctgctggagagaatcggcatcgccagacccgaggaggagttccacgtgcccctggacagctacagatgccagctgttcatccagcccgccggcatcctggagcaccagtacaaggagagcaccacctacatcagctggaaggaggagctgcacagaagcagagaggtgagatgcatgctgcagtgccccagcgtggaggtgagcttcctgcccctgatcgtgaacaccgtggccctgcccgacgagctgagctacatctgcacccacggcgaggactgggacgtggcctacatcatccacctgtaccccagcctgaccctgagaaacctgctgccctacagcctgagatacctgctggagggcaccgccgagacccacgagctggccgagggcagcaccgccgacgtgctgcacagcagaatcagcggcgagatcatggagctggtgctggtgaagtaccagggcaagaactggaacggccacttcagaatcagagacaccctgcccgagttcttccccgtgtgcttcagcagcgacagcaccgaggtgaccaccgtggacctgagcgtgcacgtgagaagaatcggcagcagaatggtgctgagcgtgttcagcccctactggctgatcaacaagaccaccagagtgctgcagtacagaagcgaggacatccacgtgaagcaccccgccgacttcagagacatcatcctgttcagcttcaagaagaagaacatcttcaccaagaacaaggtgcagctgaagatcagcaccagcgcctggagcagcagcttcagcctggacaccgtgggcagctacggctgcgtgaagtgccccgccaacaacatggagtacctggtgggcgtgagcatcaagatgagcagcttcaacctgagcagaatcgtgaccctgacccccttctgcaccatcgccaacaagagcagcctggagctggaggtgggcgagatcgccagcgacggcagcatgcccaccaacaagtggaactacatcgccagcagcgagtgcctgcccttctggcccgagagcctgagcggcaagctgtgcgtgagagtggtgggctgcgagggcagcagcaagcccttcttctacaacagacaggacaacggcaccctgctgagcctggaggacctgaacggcggcatcctggtggacgtgaacaccgccgagcacagcaccgtgatcaccttcagcgactaccacgagggcagcgcccccgccctgatcatgaaccacaccccctgggacatcctgacctacaagcagagcggcagccccgaggagatggtgctgctgcccagacaggccagactgttcgcctgggccgaccccaccggcaccagaaagctgacctggacctacgccgccaacgtgggcgagcacgacctgctgaaggacggctgcggccagttcccctacgacgccaacatccagatccactgggtgagcttcctggacggcagacagagagtgctgctgttcaccgacgacgtggccctggtgagcaaggccctgcaggccgaggagatggagcaggccgactacgagatcaccctgagcctgcacagcctgggcctgagcctggtgaacaacgagagcaagcaggaggtgagctacatcggcatcaccagcagcggcgtggtgtgggaggtgaagcccaagcagaagtggaagcccttcagccagaagcagatcatcctgctggagcagagctaccagaagcaccagatcagcagagaccacggctggatcaagctggacaacaacttcgaggtgaacttcgacaaggaccccatggagatgagactgcccatcagaagccccatcaagagagacttcctgagcggcatccagatcgagttcaagcagagcagccaccagagaagcctgagagccagactgtactggctgcaggtggacaaccagctgcccggcgccatgttccccgtggtgttccaccccgtggccccccccaagagcatcgccctggacagcgagcccaagcccttcatcgacgtgagcgtgatcaccagattcaacgagtacagcaaggtgctgcagttcaagtacttcatggtgctgatccaggagatggccctgaagatcgaccagggcttcctgggcgccatcatcgccctgttcacccccaccaccgaccccgaggccgagagaagaagaaccaagctgatccagcaggacatcgacgccctgaacgccgagctgatggagaccagcatgaccgacatgagcatcctgagcttcttcgagcacttccacatcagccccgtgaagctgcacctgagcctgagcctgggcagcggcggcgaggagagcgacaaggagaagcaggagatgttcgccgtgcacagcgtgaacctgctgctgaagagcatcggcgccaccctgaccgacgtggacgacctgatcttcaagctggcctactacgagatcagataccagttctacaagagagaccagctgatctggagcgtggtgagacactacagcgagcagttcctgaagcagatgtacgtgctggtgctgggcctggacgtgctgggcaaccccttcggcctgatcagaggcctgagcgagggcgtggaggccctgttctacgagcccttccagggcgccgtgcagggccccgaggagttcgccgagggcctggtgatcggcgtgagaagcctgttcggccacaccgtgggcggcgccgccggcgtggtgagcagaatcaccggcagcgtgggcaagggcctggccgccatcaccatggacaaggagtaccagcagaagagaagagaggagctgagcagacagcccagagacttcggcgacagcctggccagaggcggcaagggcttcctgagaggcgtggtgggcggcgtgaccggcatcatcaccaagcccgtggagggcgccaagaaggagggcgccgccggcttcttcaagggcatcggcaagggcctggtgggcgccgtggccagacccaccggcggcatcgtggacatggccagcagcaccttccagggcatccagagagccgccgagagcaccgaggaggtgagcagcctgagaccccccagactgatccacgaggacggcatcatcagaccctacgacagacaggagagcgagggcagcgacctgctggagaaccacatcaagaagctggagggcgagacctacagataccactgcgccatccccggcagcaagaagaccatcctgatggtgaccaacagaagagtgctgtgcatcaaggaggtggagatcctgggcctgatgtgcgtggactggcagtgccccttcgaggacttcgtgttcccccccagcgtgagcgagaacgtgctgaagatcagcgtgaaggagcagggcctgttccacaagaaggacagcgccaaccagggctgcgtgagaaaggtgtacctgaaggacaccgccaccgccgagagagcctgcaacgccatcgaggacgcccagagcaccagacagcagcagaagctgatgaagcagagcagcgtgagactgctgagaccccagctgcccagctag

SEQ ID NO: 194514 - DNA, 10758 bp, Artificial Sequence
  derived and/or modified sequence
atggtgctggagagcgtggtggccgacctgctgaacagattcctgggcgactacgtggagaacctgaacaagagccagctgaagctgggcatctggggcggcaacgtggccctggacaacctgcagatcaaggagaacgccctgagcgagctggacgtgcccttcaaggtgaaggccggccagatcgacaagctgaccctgaagatcccctggaagaacctgtacggcgaggccgtggtggccaccctggagggcctgtacctgctggtggtgcccggcgccagcatcaagtacgacgccgtgaaggaggagaagagcctgcaggacgtgaagcagaaggagctgagcagaatcgaggaggccctgcagaaggccgccgagaaggacaagcccaaggaggccaagaaggacaccttcgtggagaagctggccacccaggtgatcaagaacgtgcaggtgaagatcaccgacatccacatcaagtacgaggacgacgtgaccgaccccaagagacccctgagcttcggcgtgaccctgggcgagctgagcctgctgaccgccaacgagcactggaccccctgcatcctgaacgaggccgacaagatcatctacaagctgatcagactggacagcctgagcgcctactggaacgtgaactgcagcatgagctaccagagaagcagagagcagatcctggaccagctgaagaacgagatcctgaccagcggcaacatcccccccaactaccagtacatcttccagcccatcagcgccagcgccaagctgtacatgaacccctacgccgagagcgagctgaagacccccaagctggactgcaacatcgagatccagaacatcgccatcgagctgaccaagccccagtacctgagcatgatcgacctgctggagagcgtggactacatggtgagaaacgccccctacagaaagtacaagccctacctgcccctgcacaccaacggcagaagatggtggaagtacgccatcgacagcgtgctggaggtgcacatcagaagatacacccagatgtggagctggagcaacatcaagaagcacagacagctgctgaagagctacaagatcgcctacaagaacaagctgacccagagcaaggtgagcgaggagatccagaaggagatccaggacctggagaagaccctggacgtgttcaacatcatcctggccagacagcaggcccaggtggaggtgatcagaagcggccagaagctgagaaagaagagcgccgacaccggcgagaagagaggcggctggttcagcggcctgtggggcaagaaggagagcaagaagaaggacgaggagagcctgatccccgagaccatcgacgacctgatgacccccgaggagaaggacaagctgttcaccgccatcggctacagcgagagcacccacaacctgaccctgcccaagcagtacgtggcccacatcatgaccctgaagctggtgagcaccagcgtgaccatcagagagaacaagaacatccccgagatcctgaagatccagatcatcggcctgggcacccaggtgagccagagacccggcgcccaggccctgaaggtggaggccaagctggagcactggtacatcaccggcctgagacagcaggacatcgtgcccagcctggtggccagcatcggcgacaccaccagcagcctgctgaagatcaagttcgagaccaaccccgaggacagccccgccgaccagaccctgatcgtgcagagccagcccgtggaggtgatctacgacgccaagaccgtgaacgccgtggtggagttcttccagagcaacaagggcctggacctggagcagatcaccagcgccaccctgatgaagctggaggagatcaaggagagaaccgccaccggcctgacccacatcatcgagaccagaaaggtgctggacctgagaatcaacctgaagcccagctacctggtggtgccccagaccggcttccaccacgagaagagcgacctgctgatcctggacttcggcaccttccagctgaacagcaaggaccagggcctgcagaagaccaccaacagcagcctggaggagatcatggacaaggcctacgacaagttcgacgtggagatcaagaacgtgcagctgctgttcgccagagccgaggagacctggaagaagtgcagattccagcaccccagcaccatgcacatcctgcagcccatggacatccacgtggagctggccaaggccatggtggagaaggacatcagaatggccagattcaaggtgagcggcggcctgcccctgatgcacgtgagaatcagcgaccagaagatgaaggacgtgctgtacctgatgaacagcatccccctgccccagaagagcagcgcccagagccccgagagacaggtgagcagcatccccatcatcagcggcggcaccaagggcctgctgggcaccagcctgctgctggacaccgtggagagcgagagcgacgacgagtacttcgacgccgaggacggcgagccccagacctgcaagagcatgaagggcagcgagctgaagaaggccgccgaggtgcccaacgaggagctgatcaacctgctgctgaagttcgagatcaaggaggtgatcctggagttcaccaagcagcagaaggaggaggacaccatcctggtgttcaacgtgacccagctgggcaccgaggccaccatgagaaccttcgacctgaccgtggtgagctacctgaagaagatcagcctggactaccacgagatcgagggcagcaagagaaagcccctgcacctgatcagcagcagcgacaagcccggcctggacctgctgaaggtggagtacatcaaggccgacaagaacggccccagcttccagaccgccttcggcaagaccgagcagaccgtgaaggtggccttcagcagcctgaacctgctgctgcagacccaggccctggtggccagcatcaactacctgaccaccatcatccccagcgacgaccagagcatcagcgtggccaaggaggtgcagatcagcaccgagaagcagcagaagaacagcaccctgcccaaggccatcgtgagcagcagagacagcgacatcatcgacttcagactgttcgccaagctgaacgccttctgcgtgatcgtgtgcaacgagaagaacaacatcgccgagatcaagatccagggcctggacagcagcctgagcctgcagagcagaaagcagagcctgttcgccagactggagaacatcatcgtgaccgacgtggaccccaagaccgtgcacaagaaggccgtgagcatcatgggcaacgaggtgttcagattcaacctggacctgtaccccgacgccaccgagggcgacctgtacaccgacatgagcaaggtggacggcgtgctgagcctgaacgtgggctgcatccagatcgtgtacctgcacaagttcctgatgagcctgctgaacttcctgaacaacttccagaccgccaaggagagcctgagcgccgccaccgcccaggccgccgagagagccgccaccagcgtgaaggacctggcccagagaagcttcagagtgagcatcaacatcgacctgaaggcccccgtgatcgtgatcccccagagcagcatcagcaccaacgccgtggtggtggacctgggcctgatcagagtgcacaaccagttcagcctggtgagcgacgaggactacctgaacccccccgtgatcgacagaatggacgtgcagctgaccaagctgaccctgtacagaaccgtgatccagcccggcatctaccaccccgacatccagctgctgcaccccatcaacctggagttcctggtgaacagaaacctggccgccagctggtaccacaaggtgcccgtggtggagatcaagggccacctggacagcatgaacgtgagcctgaaccaggaggacctgaacctgctgttcagaatcctgaccgagaacctgtgcgagggcaccgaggacctggacaaggtgaagcccagagtgcaggagaccggcgagatcaaggagcccctggagatcagcatcagccaggacgtgcacgacagcaagaacaccctgaccaccggcgtggaggagatcagaagcgtggacatcatcaacatgctgctgaacttcgagatcaaggaggtggtggtgaccctgatgaagaagagcgagaagaagggcagacccctgcacgagctgaacgtgctgcagctgggcatggaggccaaggtgaagacctacgacatgaccgccaaggcctacctgaagaagatcagcatgcagtgcttcgacttcaccgacagcaagggcgagcccctgcacatcatcaacagcagcaacgtgaccgacgagcccctgctgaagatgctgctgaccaaggccgacagcgacggccccgagttcaagaccatccacgacagcaccaagcagagactgaaggtgagcttcgccagcctggacctggtgctgcacctggaggccctgctgagcttcatggacttcctgagcagcgccgcccccttcagcgagcccagcagcagcgagaaggagagcgagctgaagcccctggtgggcgagagcagaagcatcgccgtgaaggccgtgagcagcaacatcagccagaaggacgtgttcgacctgaagatcaccgccgagctgaacgccttcaacgtgttcgtgtgcgaccagaagtgcaacatcgccgacatcaagatccacggcatggacgccagcatcagcgtgaagcccaagcagaccgacgtgttcgccagactgaaggacatcatcgtgatgaacgtggacctgcagagcatccacaagaaggccgtgagcatcctgggcgacgaggtgttcagattccagctgaccctgtaccccgacgccaccgagggcgaggcctacgccgacatgagcaaggtggacggcaagctgagcttcaaggtgggctgcatccagatcgtgtacgtgcacaagttcttcatgagcctgctgaacttcctgaacaacttccagaccgccaaggaggccctgagcaccgccaccgtgcaggccgccgagagagccgccagcagcatgaaggacctggcccagaagagcttcagactgctgatggacatcaacctgaaggcccccgtgatcatcatcccccagagcagcgtgagccccaacgccgtgatcgccgacctgggcctgatcagagtggagaacaagttcagcctggtgcccatggagcactacagcctgccccccgtgatcgacaagatgaacatcgagctgacccagctgaagctgagcagaaccatcctgcaggccagcctgccccagaacgacatcgagatcctgaagcccgtgaacatgctgctgagcatccagagaaacctggccgccgcctggtacgtgcagatccccggcatggagatcaagggcaagctgaagcccatgcaggtggccctgagcgaggacgacctgaccgtgctgatgaagatcctgctggagaacctgggcgaggccagcagccagcccagccccacccagagcgtgcaggagaccgtgagagtgagaaaggtggacgtgagcagcgtgcccgaccacctgaaggagcaggaggactggaccgacagcaagctgagcatgaaccagatcgtgagcctgcagttcgacttccacttcgagagcctgagcatcatcctgtacaacaacgacatcaaccaggagagcggcgtggccttccacaacgacagcttccagctgggcgagctgagactgcacctgatggccagcagcggcaagatgttcaaggacggcagcatgaacgtgagcgtgaagctgaagacctgcaccctggacgacctgagagagggcatcgagagagccaccagcagaatgatcgacagaaagaacgaccaggacaacaacagcagcatgatcgacatcagctacaagcaggacaagaacggcagccagatcgacgccgtgctggacaagctgtacgtgtgcgccagcgtggagttcctgatgaccgtggccgacttcttcatcaaggccgtgccccagagccccgagaacgtggccaaggagacccagatcctgcccagacagaccgccaccggcaaggtgaagatcgagaaggacgacagcgtgagacccaacatgaccctgaaggccatgatcaccgaccccgaggtggtgttcgtggccagcctgaccaaggccgacgcccccgccctgaccgccagcttccagtgcaacctgagcctgagcaccagcaagctggagcagatgatggaggccagcgtgagagacctgaaggtgctggcctgccccttcctgagagagaagagaggcaagaacatcaccaccgtgctgcagccctgcagcctgttcatggagaagtgcacctgggccagcggcaagcagaacatcaacatcatggtgaaggagttcatcatcaagatcagccccatcatcctgaacaccgtgctgaccatcatggccgccctgagccccaagaccaaggaggacggcagcaaggacaccagcaaggagatggagaacctgtggggcatcaagagcatcaacgactacaacacctggttcctgggcgtggacaccgccaccgagatcaccgagagcttcaagggcatcgagcacagcctgatcgaggagaactgcggcgtggtggtggagagcatccaggtgaccctggagtgcggcctgggccacagaaccgtgcccctgctgctggccgagagcaagttcagcggcaacatcaagaactggaccagcctgatggccgccgtggccgacgtgaccctgcaggtgcactactacaacgagatccacgccgtgtgggagcccctgatcgagagagtggagggcaagagacagtggaacctgagactggacgtgaagaagaaccccgtgcaggacaagagcctgctgcccggcgacgacttcatccccgagccccagatggccatccacatcagcagcggcaacaccatgaacatcaccatcagcaagagctgcctgaacgtgttcaacaacctggccaagggcttcagcgagggcaccgccagcaccttcgactacagcctgaaggacagagcccccttcaccgtgaagaacgccgtgggcgtgcccatcaaggtgaagcccaactgcaacctgagagtgatgggcttccccgagaagagcgacatcttcgacgtggacgccggccagaacctggagctggagtacgccagcatggtgcccagcagccagggcaacctgagcatcctgagcagacaggagagcagcttcttcaccctgaccatcgtgccccacggctacaccgaggtggccaacatccccgtggccagacccggcagaagactgtacaacgtgagaaaccccaacgccagccacagcgacagcgtgctggtgcagatcgacgccaccgagggcaacaaggtgatcaccctgagaagccccctgcagatcaagaaccacttcagcatcgccttcatcatctacaagttcgtgaagaacgtgaagctgctggagagaatcggcatcgccagacccgaggaggagttccacgtgcccctggacagctacagatgccagctgttcatccagcccgccggcatcctggagcaccagtacaaggagagcaccacctacatcagctggaaggaggagctgcacagaagcagagaggtgagatgcatgctgcagtgccccagcgtggaggtgagcttcctgcccctgatcgtgaacaccgtggccctgcccgacgagctgagctacatctgcacccacggcgaggactgggacgtggcctacatcatccacctgtaccccagcctgaccctgagaaacctgctgccctacagcctgagatacctgctggagggcaccgccgagacccacgagctggccgagggcagcaccgccgacgtgctgcacagcagaatcagcggcgagatcatggagctggtgctggtgaagtaccagggcaagaactggaacggccacttcagaatcagagacaccctgcccgagttcttccccgtgtgcttcagcagcgacagcaccgaggtgaccaccgtggacctgagcgtgcacgtgagaagaatcggcagcagaatggtgctgagcgtgttcagcccctactggctgatcaacaagaccaccagagtgctgcagtacagaagcgaggacatccacgtgaagcaccccgccgacttcagagacatcatcctgttcagcttcaagaagaagaacatcttcaccaagaacaaggtgcagctgaagatcagcaccagcgcctggagcagcagcttcagcctggacaccgtgggcagctacggctgcgtgaagtgccccgccaacaacatggagtacctggtgggcgtgagcatcaagatgagcagcttcaacctgagcagaatcgtgaccctgacccccttctgcaccatcgccaacaagagcagcctggagctggaggtgggcgagatcgccagcgacggcagcatgcccaccaacaagtggaactacatcgccagcagcgagtgcctgcccttctggcccgagagcctgagcggcaagctgtgcgtgagagtggtgggctgcgagggcagcagcaagcccttcttctacaacagacaggacaacggcaccctgctgagcctggaggacctgaacggcggcatcctggtggacgtgaacaccgccgagcacagcaccgtgatcaccttcagcgactaccacgagggcagcgcccccgccctgatcatgaaccacaccccctgggacatcctgacctacaagcagagcggcagccccgaggagatggtgctgctgcccagacaggccagactgttcgcctgggccgaccccaccggcaccagaaagctgacctggacctacgccgccaacgtgggcgagcacgacctgctgaaggacggctgcggccagttcccctacgacgccaacatccagatccactgggtgagcttcctggacggcagacagagagtgctgctgttcaccgacgacgtggccctggtgagcaaggccctgcaggccgaggagatggagcaggccgactacgagatcaccctgagcctgcacagcctgggcctgagcctggtgaacaacgagagcaagcaggaggtgagctacatcggcatcaccagcagcggcgtggtgtgggaggtgaagcccaagcagaagtggaagcccttcagccagaagcagatcatcctgctggagcagagctaccagaagcaccagatcagcagagaccacggctggatcaagctggacaacaacttcgaggtgaacttcgacaaggaccccatggagatgagactgcccatcagaagccccatcaagagagacttcctgagcggcatccagatcgagttcaagcagagcagccaccagagaagcctgagagccagactgtactggctgcaggtggacaaccagctgcccggcgccatgttccccgtggtgttccaccccgtggccccccccaagagcatcgccctggacagcgagcccaagcccttcatcgacgtgagcgtgatcaccagattcaacgagtacagcaaggtgctgcagttcaagtacttcatggtgctgatccaggagatggccctgaagatcgaccagggcttcctgggcgccatcatcgccctgttcacccccaccaccgaccccgaggccgagagaagaagaaccaagctgatccagcaggacatcgacgccctgaacgccgagctgatggagaccagcatgaccgacatgagcatcctgagcttcttcgagcacttccacatcagccccgtgaagctgcacctgagcctgagcctgggcagcggcggcgaggagagcgacaaggagaagcaggagatgttcgccgtgcacagcgtgaacctgctgctgaagagcatcggcgccaccctgaccgacgtggacgacctgatcttcaagctggcctactacgagatcagataccagttctacaagagagaccagctgatctggagcgtggtgagacactacagcgagcagttcctgaagcagatgtacgtgctggtgctgggcctggacgtgctgggcaaccccttcggcctgatcagaggcctgagcgagggcgtggaggccctgttctacgagcccttccagggcgccgtgcagggccccgaggagttcgccgagggcctggtgatcggcgtgagaagcctgttcggccacaccgtgggcggcgccgccggcgtggtgagcagaatcaccggcagcgtgggcaagggcctggccgccatcaccatggacaaggagtaccagcagaagagaagagaggagctgagcagacagcccagagacttcggcgacagcctggccagaggcggcaagggcttcctgagaggcgtggtgggcggcgtgaccggcatcatcaccaagcccgtggagggcgccaagaaggagggcgccgccggcttcttcaagggcatcggcaagggcctggtgggcgccgtggccagacccaccggcggcatcgtggacatggccagcagcaccttccagggcatccagagagccgccgagagcaccgaggaggtgagcagcctgagaccccccagactgatccacgaggacggcatcatcagaccctacgacagacaggagagcgagggcagcgacctgctggagcaggagctggagatccaggagtag

SEQ ID NO: 194515 - DNA, 11133 bp, Artificial Sequence
  derived and/or modified sequence
atggtactggaaagcgtcgtggccgatctactcaacagattcctaggcgattatgtggaaaacttaaacaaaagccaactgaagctaggaatctggggcgggaacgtggcactggacaatctccagattaaagagaatgccctgagcgaactggacgtgcccttcaaagtgaaggcaggccagatcgacaaactgaccctcaagatcccgtggaagaacctgtacggggaagctgtggtagccaccctggagggcctgtacctgttggtggtccctggagcttcaattaaatatgacgctgtcaaggaggagaaaagcctgcaggatgtaaaacagaaggaactctcaaggatagaagaggcccttcagaaagcggccgaaaaggataaacccaaggaggccaagaaagatacatttgtggagaagttggccacacaggtgatcaagaacgtgcaagtgaaaatcacggatattcatattaaatatgaagacgacgtgaccgacccaaagcgccccctcagctttggagtaacactgggggaattgtcgctgctgacagctaacgaacactggacaccttgtattctaaacgaggctgataagattatttacaagctgatacggctggatagcctttccgcctactggaatgtgaattgcagcatgagctaccaacgttctcgggagcaaattctggaccagcttaaaaatgagatacttactagtggtaacatcccgccgaattatcaatacattttccagcctatttctgcctcggctaagctgtacatgaatccctacgctgaatctgagctgaagactcctaagctggactgcaatattgagattcaaaacatcgcgatcgagcttactaagcctcagtacctctctatgatagaccttctggaatccgtcgactacatggtccgtaacgcaccctacagaaaatataagccatacctgcccctgcacacaaacggacgtagatggtggaagtacgctatcgattccgtgttagaggtccacattcggagatatacacagatgtggagttggagcaatatcaagaaacacagacagctgctcaaaagctacaaaatcgcttacaaaaataagcttacccaaagcaaggtctctgaggaaattcagaaagagatccaagatttagaaaaaacgctggacgtgttcaacatcatactggctcgacagcaagcccaggtggaggtcatacgttctggacagaagttgcgcaagaagtccgctgacaccggcgagaaacgaggtggctggttctccggactctgggggaaaaaagaaagcaagaaaaaagatgaggagtccttgattcccgagaccatagacgatctgatgacacctgaggagaaagataaactctttacagccattggctattcagaaagcacccataacctgactcttccgaagcagtatgtcgcccatatcatgacgcttaagctcgtgtcaacctcagttaccattcgggaaaataagaatattcccgagatcctgaagatacaaataatcggcctcggcactcaggtgagtcaaaggcccggcgcccaggccctgaaagtcgaggccaagttagagcactggtacattacaggactgagacagcaggacatagtaccaagcctggttgcaagtatcggggatacaacttccagtctgctgaagattaagttcgaaacaaatcccgaagacagccccgcagaccaaaccctcattgttcaatcccagcccgtcgaggtgatctatgatgccaagacagtgaatgcagtggtggagtttttccagagcaacaaggggttggacctcgagcagattacctcagcgacactgatgaagttggaagagattaaggagagaacggccaccggcttgacgcacataatcgagacaaggaaggtcttagaccttcgaatcaatctcaagccatcctacttggtcgtgccccaaaccgggtttcaccacgagaagtccgaccttctgatcttagactttggcactttccaattgaactccaaagaccagggtctgcaaaaaaccaccaactcatctttagaggagataatggataaggcatacgacaaatttgacgtggaaattaaaaacgtgcagttgctcttcgcgcgggccgaggagacctggaaaaaatgtcggtttcaacacccttccactatgcacatactccaacctatggatatccatgttgagctcgccaaggccatggtggagaaggacatacggatggccagatttaaggtttccggcgggctgcccttaatgcatgtgagaatttctgatcagaaaatgaaagatgtgctctacttgatgaattctatccccctgccgcagaaaagctccgcccagtcccccgagcggcaagtcagttcgattcctatcatcagcgggggaactaaagggctgctggggacttcactcttactggacaccgtggagagtgagtccgacgatgaatacttcgatgccgaagatggagagccgcagacttgcaagtcaatgaaggggtctgagctcaagaaagctgccgaggtgcccaacgaggagttaattaatctgttattaaaattcgagattaaagaggtcattctggagtttacgaagcagcagaaggaagaggataccatcttagtctttaatgtcacacagctgggaaccgaggctactatgcgcacgttcgacctaaccgttgttagttacttgaagaagatctctctggactatcatgagatcgaaggaagcaagagaaaaccgcttcatttaatatcaagcagtgacaagcctggcctggatctgctgaaagtagaatatatcaaggccgacaaaaacggtcctagcttccagacggcatttgggaagacggaacagaccgtgaaggtcgcgttctcctcactgaatcttctcctgcagactcaagcgctggtcgcctctataaattatttgaccaccatcatccccagcgatgatcagtcgatcagcgtcgctaaggaggtacagatttcaacagagaaacagcagaaaaatagcaccctgccgaaggctatcgtgagtagcagagacagtgatattatcgactttcggttatttgctaagctcaatgctttttgcgtaatcgtatgcaacgagaaaaataacattgccgagatcaagattcagggtttagattccagtttgtcactccagtctcgcaagcagagtctgttcgcacggctcgaaaacataattgtgaccgacgttgaccctaagacagtgcacaaaaaggctgtgagtattatgggaaatgaagtgttccgttttaatcttgacctctaccccgacgcaacggaaggggacctttataccgatatgagtaaggtcgacggcgtcttgagtctgaacgtcggatgtattcagatagtgtacctgcataagttcctgatgtctttgctgaacttcctgaacaactttcaaacggctaaggagagcctcagcgccgcaactgctcaggcggcggaacgtgcagcaacatcagttaaggacctggcccagaggtccttccgagtgtccatcaatattgacctgaaagcccccgtgattgtgatcccacagagttccatatcaaccaacgccgttgtcgtggatctggggttaattcgagtgcataatcaattttctcttgtgtctgatgaagattatctcaacccacctgtgattgatcgaatggacgttcagctcactaagttgacactgtatcgtacagttattcagcccggaatttatcacccagatattcaactcctgcaccccataaacctcgagtttttggtgaacaggaaccttgccgcttcttggtaccataaggttccagtcgttgagataaagggacacctggacagtatgaacgtgtcactgaatcaggaggatcttaatctcctgtttcggatcctcactgagaatctctgtgagggaaccgaggatttagataaagtaaagcccagggtgcaagaaaccggtgagatcaaagagcctcttgaaattagcattagccaggatgtccacgatagcaagaacaccttgaccaccggggtggaggaaataagatcagtggacatcatcaatatgctgctgaatttcgaaatcaaagaagtcgtggtcacactgatgaagaagagcgaaaaaaagggcaggcctctccacgagctcaacgtcctgcagctgggcatggaggctaaagtcaaaacctacgacatgacggcaaaagcctacctgaagaaaattagcatgcagtgcttcgacttcacagactctaaaggcgagcccctgcatatcattaattcttctaatgtcaccgatgagcccctgctcaaaatgctgcttaccaaagctgattcagatggccctgaatttaagaccatccatgacagtactaaacagagattaaaagttagcttcgccagcctggatctcgtcctgcacctagaggccttgctgagcttcatggactttttgtccagtgcagccccgttctctgagccatccagctcggagaaagaaagtgagttgaagccccttgtgggggaatcccgcagcattgccgtgaaagccgtcagtagcaatattagccagaaagatgtgttcgacttgaagattacagccgagctgaacgcctttaatgtgtttgtgtgcgatcagaagtgtaatatcgcagatatcaagatacatgggatggacgcttccatctccgtgaaaccgaagcagactgatgtctttgcaaggttaaaggacatcattgtgatgaacgtcgatctgcagtcaatacataagaaagccgtgagcatattgggggacgaagtcttccggttccagctcactttatacccagatgccactgaaggcgaagcatacgccgacatgagcaaagttgatggtaaactgtcctttaaagtgggttgtatacagattgtctatgtccacaaatttttcatgagccttctgaatttcctaaataatttccagaccgccaaagaggccctcagtaccgcaacagtgcaggctgctgagagagcggcgtccagtatgaaggatctcgctcagaagagttttcggctgctgatggatatcaacttaaaggctccagtgataattatcccccagtcttcagtgtccccgaatgcggtaattgccgatttgggcctgatccgtgtggagaataagttctccctggtgccaatggaacactattcccttccacccgtgattgacaaaatgaacatcgaattgacccagcttaaactgtctaggactattctacaggcaagtctgccacagaacgacattgaaatcctgaaacctgtcaatatgttgctgagcatccagcggaacctggctgcggcctggtatgtccaaatccccggcatggaaatcaaagggaagcttaagccaatgcaggtggccctgagtgaggacgacctcaccgttctgatgaagatcctgcttgagaatctcggcgaggcttccagccaaccctcccctacacaatcagtccaagagacagtgagagtgagaaaagtggatgtgtctagtgtgccagaccatcttaaagaacaggaggactggaccgacagcaagctgtccatgaaccaaatagtcagcttgcagttcgacttccattttgagagtctgagtatcattctgtataataatgatataaatcaagagtctggcgtggcattccataacgattcctttcagttaggtgagttgaggcttcatcttatggccagctccgggaagatgttcaaggatggatctatgaacgtgtcagtgaagctaaagacctgcaccctggatgatctccgcgagggcatcgagcgcgctacaagcaggatgatcgatcgcaagaatgatcaggataataattcctctatgatagacatctcatacaagcaggataaaaatggatcccagatcgacgctgtgctggataaactgtacgtctgcgcgtctgtcgaattcctcatgaccgtagcagacttctttatcaaggccgtccctcaaagtccagagaatgtggctaaggagacacaaattctgccaagacagacagctactggaaaagttaagattgagaaagacgacagcgtcaggcctaatatgacactgaaagctatgatcactgacccagaagtggtgtttgtcgcttcgctgaccaaggccgatgccccagccctgactgcgtctttccaatgtaacctttccctcagtacctctaagctggagcaaatgatggaagccagcgtcagagatctcaaggtgctggcttgtcctttccttcgtgaaaagcgagggaaaaacattactaccgtgcttcaaccatgctcactgttcatggagaaatgcacctgggccagcggcaagcagaacataaacattatggtgaaggagttcatcattaagatttcacctatcatactgaacactgtgctaacaatcatggccgccctgagtcccaagaccaaagaggatggatccaaagatacttctaaggaaatggaaaacctgtgggggattaaaagtatcaacgactataacacttggtttctgggagttgatactgccactgagataaccgaaagttttaaaggaatcgaacattctctgattgaagagaattgcggagtagtggtggagagtattcaggtaaccctggagtgcggcttgggtcacaggactgtgccactgctgctcgcagagtcaaagttctccggcaacattaaaaattggacctcccttatggccgccgtggctgacgttacactccaggtccattattacaacgagattcacgcagtgtgggaacccctgatcgagagggtggagggaaaaaggcagtggaacctgcgactggatgtgaaaaagaatcctgtccaggacaagagcctcctccctggcgacgattttatccccgagccacagatggcaattcacatttcctccgggaacacgatgaatataacaatctccaagagttgcttaaacgtcttcaacaatctggcgaaaggcttttcagagggaaccgccagcacattcgattacagcctgaaggatagagctcctttcactgtcaagaacgctgtcggtgttcctattaaggtcaaacccaactgcaatctgcgagtgatgggctttcccgagaaaagcgacatttttgacgtagacgccggacaaaatcttgagctcgaatacgcctcaatggtgcccagtagccaaggtaatctaagtatcttgtcccggcaagagtcaagcttttttacactaaccatcgtgccgcacggttacacagaagttgctaacatccctgtggccaggcctggccgacgcttatataacgtccggaacccaaacgctagccactctgacagcgtcctggtgcagatagacgcaactgaggggaacaaggtgatcacccttaggtccccacttcagatcaagaatcacttctctatcgccttcattatttacaagtttgtgaagaatgtgaagctgctggagaggatcggcatcgcaagacccgaagaggaatttcacgtgcccttggatagctaccggtgtcagctgtttattcaacccgccgggattctcgaacatcaatacaaagaatctactacatacatctcctggaaagaagagcttcaccgcagtagagaggtccgctgtatgctgcagtgcccaagtgtggaggtgtccttccttcctttgattgtgaataccgtcgcacttccagatgagttgtcctacatctgcacccacggggaggactgggacgtcgcttatataatacatctataccccagcctgaccctgaggaatcttctgccttattccttgcgctatctgttggaagggaccgccgagacgcatgaattggcagaggggtccaccgctgacgtgctccactcccggattagtggagaaattatggaactggttctggtgaaatatcagggcaagaattggaacggccacttccgcatcagagacacccttccggaatttttccccgtttgttttagtagtgacagcaccgaggttacaaccgtggatttatcagtgcacgtccggagaataggcagccggatggtgcttagcgtgttctccccctactggctcataaataaaacaacaagagtgctgcaatatagaagcgaggacattcatgtaaaacaccctgctgacttcagggacattattttgttctcattcaagaagaaaaacatttttacgaaaaacaaagtgcagttgaaaattagcactagtgcttggtcctcctcgtttagcctcgacaccgtgggatcttacggatgcgtgaagtgtcctgcaaacaatatggagtatctggttggagtttctattaagatgtctagctttaatctcagccgtatcgtcaccctgactccattctgcactatcgccaacaagagcagtctggagctggaggtaggagagatagccagcgatggatcgatgccgaccaacaagtggaattacatagccagcagcgaatgcctaccgttttggccagagtcattatctgggaagttgtgcgtgcgcgtagttggatgcgaaggttcaagtaaaccattcttctataacagacaggataatggaactctgctgtcactagaagatctgaatggaggcatactcgtcgatgtgaatactgccgaacattccacggtaatcacttttagtgattaccatgagggaagcgcgcctgcattaatcatgaaccatactccatgggacatcctaacctacaagcaatctggctccccagaagagatggtgctcctccctcgtcaggctcgactgtttgcatgggctgatcccacaggtaccaggaaattgacctggacctatgccgccaatgtcggagaacatgacctcctcaaggacggctgtggtcaatttccatacgacgccaacattcagatccattgggtgtctttcttagacggacgccagcgggtcctgctgtttacagacgacgtcgccttagtctctaaagctctgcaagcagaggagatggagcaggcagactacgagattaccctctccctacacagtttgggattatccctcgtgaataacgaatcaaaacaggaagtatcgtatattggaattacctcttccggcgtagtttgggaagtaaagccgaaacagaagtggaagcccttctcccaaaaacaaatcatcctgctggaacaaagttatcagaagcaccaaatatcccgcgatcatggctggatcaaattagataacaacttcgaggtcaatttcgataaagaccctatggaaatgcggttgcctatcaggagtcctatcaagcgggactttctgagcggcatacagatcgagttcaagcagagcagccaccagagaagcctgcgtgctcgactgtattggctgcaggtagacaatcagttgcctggggcgatgttcccagtggtgttccatcccgtcgcccctccaaagagtattgccctggattctgaacccaaacctttcatcgacgtgtctgtgataactcggtttaacgagtactccaaagttcttcagttcaaatattttatggttttgattcaggagatggctttgaaaatagaccagggctttctcggagctataatcgcattgttcactcccacaacagacccagaggcggagcgccgacgcacaaagctcatccagcaggacattgatgcactgaatgcggaactgatggagacaagcatgactgatatgagcatattaagctttttcgaacacttccacataagtccagtgaaactccacctatcactgagcctcggcagtggaggcgaggagtcagacaaggagaagcaggagatgtttgccgtacactccgtgaatctattgctgaagtctatcggggcgactctgactgatgtcgacgacctcatcttcaagcttgcgtattacgaaatccgctatcagttctataaaagggaccaattgatatggtcagtagtgcgccattacagtgaacagtttctgaaacagatgtacgtactcgtgctggggttggacgtcctgggcaacccgttcggtctaattcggggactatcagagggtgttgaggctctcttctacgagccatttcagggcgctgtgcaggggccagaggagtttgcggaagggctggttattggcgtgcgctctctctttggccacaccgtcggaggtgccgctggcgtcgtcagccgcataaccggcagcgtgggaaaagggcttgctgcaatcaccatggataaagagtaccagcagaagagaagagaagagctgagtaggcagcctagagatttcggagacagcctggcgaggggggggaaggggtttctgcgcggggtcgtaggcggggtgacaggaattattacgaagcctgtggaaggggcgaagaaagagggcgcagctggcttcttcaagggaattggcaaagggttagttggcgcggtcgcacgtccgactgggggcattgttgacatggccagctctacctttcaggggatccagcgagccgctgaatctactgaggaagtgtcatcactgagacccccccggctgattcacgaggatggaattataagaccctatgacaggcaagagagcgagggatctgacctgctggagaatcatatcaagaaacttgaaggcgaaacctacagatatcactgtgcaatccccggctccaaaaaaacaattcttatggttactaaccgcagggtgctttgtatcaaggaagtggagattttaggtctcatgtgcgttgactggcagtgtccgtttgaggacttcgtgttcccaccttcagtttcagaaaacgtgctcaaaataagcgtgaaagaacaggggctgtttcacaaaaaggactcggcgaaccaggggtgtgtgagaaaagtatacctcaaagatacggccacagccgagcgcgcctgtaacgctattgaagacgcccagagtacgcggcagcaacagaagttgatgaagcagtcgagtgtgcgacttctcagaccgcagctaccatcctag

SEQ ID NO: 194516 - DNA, 10758 bp, Artificial Sequence
  derived and/or modified sequence
atggtcctggaatccgttgttgctgaccttcttaaccggttcctgggagactacgtggagaatctgaataagagccagctgaaactgggaatatgggggggcaatgtggccttagacaaccttcaaataaaggagaatgccctcagcgaactggacgtaccatttaaagtaaaagcgggacagatcgataagttaacactgaagatcccctggaagaatttgtacggggaagccgtggtggccacactcgaaggattatacctgctcgtggtccccggtgcgtccattaaatatgatgccgtcaaggaagagaagagcctacaagatgtgaagcagaaggagctctccaggatcgaggaggccctccagaaggccgccgagaaggataagcctaaagaggccaagaaggacacattcgtggagaagttggcgacccaggtgatcaaaaacgtgcaggtaaagatcacagacattcacattaaatacgaagacgacgtgactgatcctaagcgcccactgagtttcggagtgacactcggggaattatctcttcttacagccaatgaacactggaccccttgcattttgaatgaggcggataagattatttacaagctcatccggctggattccctgtctgcctactggaacgtcaattgcagtatgtcctaccaacggagccgagagcaaattctggaccagctgaaaaacgagatcttaacttctggaaacatccctcccaactatcagtacattttccagcccatctccgcttctgccaagctctatatgaacccttatgctgagagcgagctaaagacgcctaagctggactgtaacattgagatacagaacattgcaattgaactgacaaaaccacagtacctgtcgatgatcgacctcttggagagtgtcgactatatggtcagaaacgcaccatatcgcaaatataagccctatttgcccctccatacaaacggacgccggtggtggaaatacgcaatcgattccgtgctggaggtacacatcagaaggtacactcagatgtggtcatggtccaacattaagaagcacagacagctgctgaagtcttacaaaatagcttataaaaataagctgactcagtcgaaggtttctgaagaaatccaaaaagagattcaagacttggagaagactctcgatgtcttcaacatcattcttgcccgccaacaagcccaagtggaggttattagaagcggacagaaactgcgcaaaaagtcggccgatacgggcgagaaacgaggtggctggttttcagggctatgggggaaaaaagagtcaaaaaagaaggacgaggagtcgctgattccagaaacaattgatgacctgatgactcctgaggagaaagacaagctgtttactgctatcggttactccgagagcactcacaacctgaccttacccaagcaatacgtggcccatataatgacactgaagttggtgagcacatctgtgacaatccgcgaaaataaaaatatcccggagattctcaagatacagatcattggccttgggacccaggttagccagcgcccaggcgcccaggcgctgaaggtcgaagccaaattggaacattggtatattactgggctgcgacagcaggacatcgttcccagtttggtcgcttcaattggtgacacgacgagctccctcctcaaaattaagttcgaaacaaaccccgaggacagtccagccgaccagactttaatcgtacagtcccagccagtggaagtgatctatgacgctaagaccgtgaacgctgtggtcgagtttttccaatcaaacaaaggacttgatctcgaacagatcactagcgccacccttatgaaactggaggaaattaaagaacggacggcaaccgggcttacccatattattgaaacccggaaagtcctagacctgcgaattaacttaaaaccttcctacctagttgttccccagacaggttttcaccatgagaagagcgatctgctgatcctcgattttgggacctttcagctcaactctaaggatcagggactacagaagactacaaactctagtctcgaagagatcatggacaaagcctacgataagttcgatgtagaaatcaaaaatgtacagctgctcttcgctcgcgccgaggaaacctggaagaaatgtaggttccagcatcccagcacgatgcatatactccagcccatggacatacacgttgaactcgccaaggccatggttgaaaaggacatccgcatggcccgctttaaagtttccggcggtctgcccttgatgcatgtgcgcatatctgatcagaaaatgaaagatgtcttatacctgatgaattcaatacctctacctcagaagtcttccgctcagagtcccgaacgccaggtgagtagcattcctattatctccggggggaccaagggactcttggggactagcttactcctggacacggttgagtcggaatcggatgacgaatattttgacgcggaagacggggagccccagacgtgcaaaagtatgaagggcagcgaactgaagaaagcagccgaggtcccaaatgaagagctgatcaacctccttttgaaattcgaaatcaaggaagtaattttggagttcaccaagcagcaaaaagaagaggacactattctcgtgttcaacgtgacccagctcggaactgaagcaacaatgaggacctttgacttgactgttgtgagctatttgaaaaaaatctccctggactaccacgagatcgagggatctaaaaggaagccgctgcatttaatttccagttccgacaagcccggactggatctgctgaaggtggaatacatcaaagccgacaaaaacggaccaagcttccagaccgccttcgggaaaaccgaacagacagtcaaagttgccttctcttccctcaacctgcttctccagactcaggccctggtagcgtccatcaattatctgaccacaattatacctagcgacgatcagagcatcagcgtggccaaagaagtgcaaatttccactgagaagcagcaaaaaaattcaacgttacccaaagccatcgtctcgagccgcgacagtgacataattgacttccgcctgtttgctaaactgaacgcattctgcgtgattgtgtgtaacgaaaagaacaacatcgccgaaataaaaattcaaggtctcgacagcagcctgtctctacagagtcggaaacagtccctcttcgctaggctggagaatatcatagtcactgacgtggaccccaagaccgtgcacaagaaagcagtctctattatgggtaatgaggtctttcggtttaatttggacctgtatcccgacgcaaccgagggcgatctgtatacggatatgtctaaagtggatggagtcctgtcactgaacgtcggatgtatacagatcgtttatctacataagttcctaatgtcccttctgaacttcctgaacaatttccaaacggccaaggagtctctctcagctgccacagcacaggccgccgaaagagcagctacgtcggtcaaagatctcgctcagcgatcctttcgggtcagtattaatatcgacctaaaggccccagtaatcgtcatacctcaatcctccatctcaaccaatgcagtcgtggttgaccttggactaatcagggtacataatcaatttagcctggtaagtgacgaagactacttgaacccccctgtaattgaccggatggatgttcaactgaccaaactgacattataccgaaccgtaattcaacctggaatttaccatcccgacatacaactactccaccctattaatctggagtttctcgtgaaccgcaatctggccgcctcctggtaccataaggtgcctgtagttgagatcaagggtcacctcgatagcatgaacgtaagtcttaaccaagaagatttgaaccttctgtttagaatactgaccgagaatttgtgcgaaggcactgaagatctggacaaagtgaaaccccgggtgcaagaaaccggggaaatcaaggaacctctggagatttctataagtcaagacgtgcacgacagtaagaacacccttactaccggggtggaagagattcgcagcgtcgacataatcaacatgttgcttaacttcgagatcaaagaggtcgttgtcaccttaatgaaaaagtccgagaaaaagggtcgacccctccacgagctcaatgtgctgcagctgggaatggaggcaaaggttaagacctatgacatgaccgctaaggcttatcttaaaaaaatctccatgcagtgctttgactttacagactcaaagggagagcctctgcacatcataaacagttcgaacgtaacagatgagcccctcctcaaaatgttgctgacaaaagccgactcagatgggcccgagttcaaaactatacacgatagcactaaacagcgcttgaaagtgtctttcgctagtctcgaccttgtgttacatcttgaagcacttctcagctttatggattttctgagttctgccgccccattctcggagccttcctcctccgagaaggagtcggagttaaaaccactggtgggggagagcaggagcatcgcagttaaggcggtgtcctctaacatcagccagaaagacgtgtttgaccttaaaatcaccgctgagctgaatgcatttaatgtatttgtgtgtgatcagaagtgcaacattgctgacattaaaatccatgggatggacgcatcaattagcgtgaagcctaagcagactgatgtgtttgcacgtcttaaagacatcattgttatgaacgtggatctgcagtcaatccataaaaaggcggtaagcatactaggggatgaagttttccgctttcagcttaccctctacccagatgccaccgagggagaggcctatgccgatatgagcaaagtggacggcaagttgagctttaaggttggatgcattcagatcgtgtacgtccacaaattcttcatgagtttgctgaactttctgaataacttccagaccgcaaaggaagctctgtccaccgccacggtgcaggctgccgagagggctgctagctctatgaaagatctagctcaaaagagttttagactgctcatggacatcaatctgaaggcccctgtgatcatcatccctcaaagttcagtttccccgaacgccgtgatcgccgatctgggtctgatcagagtggagaataagttttcactcgttccaatggagcattactctctgcccccagtcatagacaagatgaatattgagttgactcagctgaaactctccagaactattttacaggcctcgttgccccaaaatgacatagagattcttaagccagtgaatatgctgttgtccattcagagaaacctggccgcagcgtggtatgtgcaaatacctgggatggagattaaagggaaactcaagcctatgcaagtcgctcttagcgaggacgacctgacagtgcttatgaaaatactcttagagaacctaggagaggcctcatctcaacccagcccaacacaaagcgtgcaggagactgtccgggttagaaaggtggatgtgagttctgtaccagatcacctgaaggagcaggaagactggacagactccaaactgagtatgaatcaaatagtgtctttgcaattcgacttccatttcgaaagcctctccattatcttgtacaataatgacatcaaccaggaaagcggcgtggcattccacaacgactcgtttcaactcggggagttacggctgcacctcatggcgtcctcgggcaagatgttcaaagatggttcaatgaatgtaagcgtgaagcttaaaacctgtacactggatgaccttcgtgaaggaatcgagagagctactagccggatgatcgatcgcaagaatgatcaggacaataatagtagtatgatcgacatatcctacaagcaggataagaatggctctcaaatcgacgcagtgctcgacaagctgtatgtctgcgctagcgtggaattcctgatgacagtcgcggattttttcataaaggcagtaccacagagtcctgagaacgtagctaaggagacccaaatcctgcctcgccagactgcaaccggcaaagttaagatcgaaaaagacgacagcgtgcgtccgaacatgacactcaaagcgatgatcacagaccccgaggttgttttcgtcgcctctctgacaaaggctgacgcccccgcattgaccgcatcatttcaatgtaacctctccctgtcaacgtcgaagctggagcaaatgatggaagccagtgtcagggacctgaaggttctggcatgcccctttctgcgggagaagcgcggtaagaatatcacaactgtgctccagccctgctctctctttatggaaaaatgcacctgggcctctggaaaacagaacatcaacattatggtaaaggaattcattatcaaaatttccccaataattctcaataccgtgcttactattatggctgccttgagcccaaagacaaaggaggacggttctaaagatacatctaaagagatggaaaatttgtggggaattaagagtatcaatgactacaacacgtggttcttaggcgtggacactgccacagagataacagaatccttcaagggaatcgagcactccctgatcgaggaaaactgtggggttgtagtggaaagcatccaagttacactggagtgcggtctaggtcataggaccgtgcctctgctgctggccgagagtaagttcagcggtaacattaaaaattggacctcactgatggctgcagtcgcagacgtgaccctccaggttcattattacaacgagatccacgccgtgtgggaacccctcatcgaacgagtggagggcaagagacagtggaatctcaggttagatgttaagaagaacccagttcaggacaaaagcttgcttcccggtgatgatttcatcccagagccgcagatggccatccacatctcatccggtaacaccatgaacatcaccatctccaaatcttgcttaaacgtcttcaataacctcgcgaaagggttctccgagggaaccgcctcaacctttgattacagcttaaaagatagggcccctttcacagtgaagaatgccgtaggggtgcccatcaaggtcaagccgaactgcaaccttcgggtgatgggattccctgaaaaaagcgacatctttgacgtggacgcagggcaaaatctcgagttggagtatgcaagtatggtgcctagcagccagggtaacttgagtatactctccaggcaggaaagttccttttttactctcacaattgtgccccacggctacaccgaggttgcaaatatccctgtagccaggccaggacgcaggctgtacaatgtcaggaaccctaatgcctcccactctgatagtgtcctcgtccaaatagacgccacagagggtaacaaagtgataacactccgctcgcctcttcaaatcaaaaatcatttcagcatcgcctttatcatttacaaattcgtgaagaacgttaaactgctcgagcggatcggtattgcacgtccggaagaggaatttcacgtacccttggactcctataggtgtcagctctttatccagcccgccggaatcctggagcaccaatacaaggagtccactacttacatctcctggaaggaggaacttcaccggagcagagaagtccgctgcatgctgcaatgcccttctgtggaggtcagctttttgccattgatcgtgaatacagtggccttgccagacgaactgtcctacatatgcacacacggtgaagattgggacgtggcgtatattattcatctgtatcctagcctgacactgcggaacctccttccatacagtctccggtacctgctggaaggaaccgcggaaacccacgagctggcggaaggctctaccgcagacgttcttcatagcaggattagtggcgagattatggagctggtactcgtgaagtatcaaggaaaaaactggaacggccatttccgtataagagacaccttgccggagttctttcccgtttgttttagcagtgattctaccgaagttacaacggtcgacctaagcgtgcacgtccggcgaataggcagccggatggtcctctccgttttttccccttattggcttattaataagaccacaagagtgttacagtacagaagcgaagatatccacgtaaaacacccggccgattttagagacattattctcttcagtttcaaaaagaagaatattttcacaaaaaataaagttcaactgaaaatctcaacatccgcctggagttccagcttcagtctggacacggtgggctcctacggctgcgtgaagtgtcctgccaataacatggagtacttggtcggggtaagcattaaaatgtcttccttcaatttatcccgcatcgtgaccttgacaccattttgtaccattgctaacaaatcttcattggaactcgaggtcggcgaaatcgccagcgatggcagcatgcctaccaacaaatggaattacatcgcttcttctgagtgtctcccattctggcccgagtccctgtccggcaaactatgcgtccgcgttgtcgggtgcgaaggcagtagcaagcccttcttttacaaccgccaggataatggaactcttctctcactcgaggatctgaatgggggaattctcgtcgacgtcaataccgccgagcacagcacagtgatcacattctccgactaccacgaggggtctgccccggctctgatcatgaaccacacgccctgggatattctgacatacaaacaatccggaagcccggaagaaatggtactgctgcctagacaagcccggctcttcgcatgggccgaccccacaggcacccggaagcttacatggacttatgccgcaaatgttggggaacacgacctactgaaggatgggtgcggccaatttccgtacgatgcaaacattcagattcattgggttagctttctcgatggccgccaaagggtgctcctgtttactgatgacgtcgccctggtgtctaaggctctgcaggcggaagagatggaacaggcagactacgagatcaccttgtcacttcacagcttgggtctcagcctggtcaataatgagagtaagcaggaagtatcttatataggtatcactagttcaggggtggtatgggaggtaaaaccgaaacagaagtggaagcctttttcccagaagcagattatcctcctagagcagagctaccaaaagcatcagataagtcgagatcacggatggatcaagctggacaacaactttgaggtcaattttgataaggaccctatggaaatgaggctgcccattcgctcacccataaagcgcgactttctatcggggatccagattgaattcaagcaatcttcacaccaaagatcactccgcgctaggctgtactggcttcaggttgacaatcagctgccaggcgccatgttcccagtggtgtttcatccggtagcaccacccaaatccattgcacttgactcagagccaaaaccattcattgatgtcagcgtgatcaccaggttcaacgaatactcgaaagtgcttcagtttaagtacttcatggtgctgattcaggaaatggcactgaaaatcgatcaaggctttttgggggccattatcgcactttttacacctactacggatcctgaagcagaaagaaggaggaccaagctaatccagcaagacattgacgctctgaatgcggagttgatggaaacttcaatgacagacatgagcatcctcagcttttttgaacactttcacatcagccccgtcaaactgcatctttcacttagccttggctctggcggcgaggagtcggacaaagagaagcaggagatgtttgcagtacacagcgtaaacctgctcttgaaatctatcggagcaaccctcaccgatgtcgacgatctgattttcaaactcgcctattatgagattcggtatcagttctataaaagagatcagttaatctggtcagtcgtccgccactattctgagcagtttctcaagcagatgtatgtgctagtgttggggctcgatgtgctggggaatcctttcggcctgattcggggactgtctgagggagtggaggccctgttctacgaaccttttcagggtgcggttcagggacctgaagagttcgccgaaggcttagttatcggagtgcgcagcctgtttggccacacagtcggaggagcagccggagttgtgtctcggataacaggctccgtgggcaaaggactggccgccattactatggataaggagtatcagcagaaaaggagggaagagctgagtaggcagccgcgtgacttcggcgatagtctggcacggggagggaagggttttctgaggggggtggttggaggagtgaccggcatcatcaccaaacccgtggagggtgctaaaaaggagggggccgctggattctttaaagggattggcaaaggtctggtgggcgcagtagctcgccccacaggaggcatcgttgacatggcttcctcgaccttccaaggaatacagcgcgcagcagagtcaaccgaggaggtctcctccttaagacctcctcgtctcatacacgaggacggcatcatcaggccatacgacagacaagaatccgagggctccgatcttctggaacaggaactcgaaatccaggaatag

SEQ ID NO: 194517 - DNA, 11133 bp, Artificial Sequence
  derived and/or modified sequence
atggtgctggagagcgtggtggccgacctgctgaaccgcttcctgggggactatgtggagaacctgaacaagagccagctgaagctgggcatctggggcggcaatgtggccctggacaacctgcagatcaaggaaaatgccctgtctgagctggatgtgcccttcaaggtgaaggccggccagattgacaagctgaccctgaagatcccctggaagaacctgtatggagaggccgtggtggccaccctggagggcctgtacctgctggtggtgcctggggccagcatcaagtatgatgctgtgaaggaggagaagagcctgcaggatgtgaagcagaaggagctgagccgcatcgaggaggccctgcagaaggctgctgagaaggacaagcccaaggaggccaagaaggacacctttgtggagaagctggccacccaggtgatcaagaatgtgcaggtgaagatcacagacatccacatcaagtatgaagatgatgtgacagaccccaagaggcccctgagctttggagtgaccctgggggagctgagcctgctgacagccaatgagcactggaccccctgcatcctgaatgaagctgacaagatcatctacaagctgatccggctggacagcctgagcgcctactggaatgtgaactgcagcatgagctaccagaggagccgggagcagatcctggaccagctgaagaatgagatcctgaccagcggcaacatcccccccaactaccagtacatcttccagcccatcagcgccagcgccaagctgtacatgaacccctatgcagagagcgagctgaagacccccaagctggactgcaacatcgagatccagaacatcgccatcgagctgaccaagccccagtacctgtccatgattgacctgctggagagcgtggactacatggtgagaaatgccccctacaggaagtacaagccctacctgcccctgcacaccaacggccgccgctggtggaagtatgccattgattctgtgctggaggtgcacatccgccgctacacccagatgtggagctggagcaacatcaagaagcaccggcagctgctgaagagctacaagatcgcctacaagaacaagctgacccagagcaaggtgtctgaggagatccagaaggagatccaggacctggagaagaccctggatgtgttcaacatcatcctggcccggcagcaggcccaggtggaggtgatccgcagcggccagaagctgaggaagaagtctgctgacacaggagagaagaggggcggctggttcagcggcctgtggggcaagaaggagagcaagaagaaggatgaggagagcctcatccctgagaccattgatgacctgatgaccccagaggagaaggacaagctgttcaccgccatcggctacagcgagagcacccacaacctgaccctgcccaagcagtatgtggcccacatcatgaccctgaagctggtgtccacctctgtgaccatccgggagaacaagaacatccctgagatcctgaagatccagatcatcggcctgggcacccaggtgtcccagaggcctggggcccaggccctgaaggtggaggccaagctggagcactggtacatcaccggcctgcggcagcaggacatcgtgcccagcctggtggccagcattggagacaccaccagcagcctgctgaagatcaagtttgagaccaaccctgaggacagccctgctgaccagaccctgattgtgcagagccagcctgtggaggtgatctatgatgccaagacagtgaatgctgtggtggagttcttccagagcaacaagggcctggacctggagcagatcaccagcgccaccctgatgaagctggaggagatcaaggagaggacagccaccggcctgacccacatcatcgagaccaggaaggtgctggacctgcgcatcaacctgaagcccagctacctggtggtgccccagacaggcttccaccacgagaagagtgacctgctgatcctggactttggcaccttccagctgaacagcaaggaccagggcctgcagaagaccaccaacagcagcctggaggagatcatggacaaggcctatgacaagtttgatgtggagatcaagaatgtgcagctgctgtttgcccgggcagaggagacctggaagaagtgccgcttccagcaccccagcaccatgcacatcctgcagcccatggacatccacgtggagctggccaaggccatggtggagaaggacatccgcatggcccgcttcaaggtgtctgggggcctgcccctgatgcacgtgcgcatcagtgaccagaagatgaaggatgtgctgtacctgatgaacagcatccccctgccccagaagagcagcgcccagagccctgagcggcaggtgagcagcatccccatcatcagcggcggcaccaagggcctgctgggcaccagcctgctgctggacacagtggagagcgagagtgatgatgagtactttgatgctgaagatggagagccccagacctgcaagtccatgaagggcagcgagctgaagaaggctgctgaggtgcccaatgaggagctgatcaacctgctgctgaagtttgagatcaaggaggtgatcctggagttcaccaagcagcagaaggaggaggacaccatcctggtgttcaacgtgacccagctgggcacagaggccaccatgaggacctttgacctgactgtggtgtcctacctgaagaagatcagcctggactaccacgagattgagggcagcaagaggaagcccctgcacctgatcagcagcagtgacaagccaggcctggacctgctgaaggtggagtacatcaaggctgacaagaatggccccagcttccagacagccttcggcaagacagagcagacagtgaaggtggccttcagcagcctgaacctgctgctgcagacccaggccctggtggccagcatcaactacctgaccaccatcatccccagtgatgaccagagcatctctgtggccaaggaggtgcagatcagcacagagaagcagcagaagaacagcaccctgcccaaggccatcgtgagcagccgggacagcgacatcatcgacttccggctgtttgccaagctgaatgccttctgtgtgattgtgtgcaatgagaagaacaacattgctgagatcaagatccagggcctggacagcagcctgagcctgcagagcaggaagcagagcctgtttgcccggctggagaacatcatcgtgacagatgtggaccccaagacagtgcacaagaaggctgtgtccatcatgggaaatgaggtgttccgcttcaacctggacctgtacccagatgccacagaaggagacctgtacacagacatgagcaaggtggatggagtgctgagcctgaatgtgggctgcatccagatcgtgtacctgcacaagttcctgatgagcctgctgaacttcctgaacaacttccagacagccaaggagagcctgtctgctgccacagcccaggccgctgagcgggccgccacctctgtgaaggacctggcccagaggagcttccgggtgtccatcaacatcgacctgaaggcccctgtgattgtcatcccccagagcagcatcagcaccaatgctgtggtggtggacctgggcctcatccgggtgcacaaccagttcagcctggtgtctgatgaggactacctgaacccccctgtgattgacaggatggatgtgcagctgaccaagctgaccctgtacagaactgtcatccagcccggcatctaccacccagacatccagctgctgcaccccatcaacctggagttcctggtgaacagaaacctggccgcctcctggtaccacaaggtgcctgtggtggagatcaagggccacctggacagcatgaatgtgtccctgaaccaggaggacctgaacctgctcttccgcatcctgacagagaacctgtgtgagggcacagaggacctggacaaggtgaagccccgggtgcaggagactggagagatcaaggagcccctggagatcagcatcagccaggatgtgcatgacagcaagaacaccctgaccactggagtggaggagatccgctctgtggacatcatcaacatgctgctgaactttgagatcaaggaggtggtggtgaccctgatgaagaagtctgagaagaagggccggcccctgcacgagctgaatgtgctgcagctgggcatggaggccaaggtgaagacctatgacatgacagccaaggcctacctgaagaagatctccatgcagtgctttgacttcacagacagcaaaggagagcccctgcacatcatcaacagcagcaatgtgacagatgagcccctgctgaagatgctgctgaccaaggctgacagtgatggccctgagttcaagaccatccatgacagcaccaagcagaggctgaaggtgtcctttgccagcctggacctggtgctgcacctggaggccctgctgtccttcatggacttcctgagcagcgctgcccccttcagcgagcccagcagcagcgagaaggagagcgagctgaagcccctggtgggggagagccgcagcattgctgtgaaggctgtgagcagcaacatcagccagaaggatgtgtttgacctgaagatcacagctgagctgaatgccttcaacgtgtttgtgtgtgaccagaagtgcaacattgctgacatcaagatccacggcatggatgccagcatctctgtgaagcccaagcagacagatgtgtttgcccggctgaaggacatcatcgtgatgaatgtggacctgcagagcatccacaagaaggctgtgtccatcctgggagatgaggtgttccgcttccagctgaccctgtacccagatgccacagaaggagaggcctatgctgacatgagcaaggtggatggcaagctgtccttcaaggtgggctgcatccagatcgtgtatgtgcacaagttcttcatgagcctgctgaacttcctgaacaacttccagacagccaaggaggccctgagcacagccaccgtgcaggccgctgagagagctgccagctccatgaaggacctggcccagaagagcttccggctgctgatggacatcaacctgaaggcccctgtgatcatcatcccccagagctctgtgagccccaatgctgtgattgctgacctgggcctcatccgggtggagaacaagttcagcctggtgcccatggagcactacagcctgccccctgtgattgacaagatgaacatcgagctgacccagctgaagctgagcaggaccatcctgcaggccagcctgccccagaatgacatcgagatcctgaagcctgtgaacatgctgctgagcatccagaggaacctggccgccgcctggtacgtgcagatccctggcatggagatcaagggcaagctgaagcccatgcaggtggccctgtctgaagatgacctgactgtgctgatgaagatcctgctggagaacctgggggaggccagcagccagcccagccccacccagagcgtgcaggagaccgtgcgggtgaggaaggtggatgtgtcctctgtgcctgaccacctgaaggagcaggaggactggacagacagcaagctgtccatgaaccagatcgtgtccctgcagtttgacttccactttgagagcctgagcatcatcctgtacaacaatgacatcaaccaggagagcggcgtggccttccacaatgacagcttccagctgggggagctgcggctgcacctgatggccagcagcggcaagatgttcaaggatggctccatgaatgtgtctgtgaagctgaagacctgcaccctggatgacctgcgggagggcatcgagcgggccaccagcaggatgattgacaggaagaatgaccaggacaacaacagctccatgattgacatctcctacaagcaggacaagaatggcagccagattgatgctgtgctggacaagctgtatgtgtgtgcctctgtggagttcctgatgacagtggccgacttcttcatcaaggctgtgccccagagcccagaaaatgtggccaaggagacccagatcctgccccggcagacagccaccgggaaggtgaagattgagaaggatgattctgtgcggcccaacatgaccctgaaggccatgatcacagatcctgaggtggtgtttgtggccagcctgaccaaggcagatgccccagccctgacagccagcttccagtgcaacctgagcctgagcaccagcaagctggagcagatgatggaggcctctgtgcgggacctgaaggtgctggcctgccccttcctgcgggagaagaggggcaagaacatcaccaccgtgctgcagccctgcagcctcttcatggagaagtgcacctgggccagcggcaagcagaacatcaacatcatggtgaaggagttcatcatcaagatcagccccatcatcctgaacacagtgctgaccatcatggccgccctgagccccaagaccaaggaggatggcagcaaggacaccagcaaggagatggagaacctgtggggcatcaagagcatcaatgactacaacacctggttcctgggcgtggacacagccacagagatcacagagagcttcaagggcatcgagcacagcctgattgaggagaactgtggggtggtggtggagagcatccaggtgaccctggagtgtggcctgggccacaggacagtgcccctgctgctggccgagagcaagttcagcggcaacatcaagaactggaccagcctgatggctgctgtggctgatgtgaccctgcaggtgcactactacaatgagatccatgctgtgtgggagcccctgattgagcgggtggagggcaagaggcagtggaacctgcggctggatgtgaagaagaaccctgtgcaggacaagagcctgctgcctggagatgacttcatccctgagccccagatggccatccacatcagcagcggcaacaccatgaacatcaccatcagcaagagctgcctgaatgtgttcaacaacctggccaagggcttcagcgagggcacagccagcacctttgactacagcctgaaggaccgggcccccttcaccgtgaagaatgctgtgggcgtgcccatcaaggtgaagcccaactgcaacctgcgggtgatgggcttccctgagaagagtgacatctttgatgtggatgctggccagaacctggagctggagtatgcctccatggtgcccagcagccagggcaacctgagcatcctgagccggcaggagagcagcttcttcaccctgaccatcgtgccccacggctacacagaggtggccaacatccctgtggcccggcctggaagaagactctacaacgtgaggaaccccaatgccagccacagcgacagcgtgctggtgcagattgatgccacagagggcaacaaggtgatcaccctgcggagccccctgcagatcaagaaccacttcagcatcgccttcatcatctacaagtttgtgaagaatgtgaagctgctggagagaattggaattgcccggcctgaggaggagttccacgtgcccctggacagctaccgctgccagctgttcatccagcctgctggcatcctggagcaccagtacaaggagagcaccacctacatctcctggaaggaggagctgcacaggagccgggaggtgcgctgcatgctgcagtgccccagcgtggaggtgtccttcctgcccctgattgtgaacacagtggccctgcctgatgagctgagctacatctgcacccatggagaggactgggatgtggcctacatcatccacctgtaccccagcctgaccctgaggaacctgctgccctacagcctgcgctacctgctggagggcacagctgagacccatgagctggccgagggcagcacagcagatgtgctgcacagccgcatcagcggggagatcatggagctggtgctggtgaagtaccagggcaagaactggaatggccacttccgcatccgggacaccctgcctgagttcttccctgtgtgcttcagcagtgacagcacagaggtgaccaccgtggacctgtctgtgcacgtgagaagaattggcagcaggatggtgctgagcgtcttcagcccctactggctgatcaacaagaccaccagggtgctgcagtacagaagtgaggacatccacgtgaagcaccctgctgacttccgggacatcatcctcttctccttcaagaagaagaacatcttcaccaagaacaaggtgcagctgaagatcagcaccagcgcctggagcagcagcttcagcctggacacagtgggcagctatggctgtgtgaagtgcccagccaacaacatggagtacctggtgggcgtgtccatcaagatgagcagcttcaacctgagccgcatcgtgaccctgacccccttctgcaccatcgccaacaagagcagcctggagctggaggtgggggagatcgccagtgatggctccatgcccaccaacaagtggaactacatcgccagcagcgagtgcctgcccttctggccagagagcctgagcggcaagctgtgtgtgcgggtggtgggctgtgagggcagcagcaagcccttcttctacaaccggcaggacaatggcaccctgctgagcctggaggacctgaatggaggcatcctggtggatgtgaacacagctgagcacagcaccgtcatcaccttcagtgactaccacgagggcagcgccccagccctgatcatgaaccacaccccctgggacatcctgacctacaagcagagcggcagccctgaggagatggtgctgctgccccggcaggcccggctgtttgcctgggccgaccccaccggcaccaggaagctgacctggacctacgccgccaacgtgggggagcatgacctgctgaaggatggctgcggccagttcccctatgatgccaacatccagatccactgggtgtccttcctggatggccggcagagggtgctgctcttcacagatgatgtggccctggtgtccaaggccctgcaggccgaggagatggagcaggccgactatgagatcaccctgagcctgcacagcctgggcctgagcctggtgaacaatgaaagcaagcaggaggtgtcctacatcggcatcaccagcagcggcgtggtgtgggaggtgaagcccaagcagaagtggaagcccttcagccagaagcagatcatcctgctggagcagagctaccagaagcaccagatcagccgggaccacggctggatcaagctggacaacaactttgaggtgaactttgacaaggaccccatggagatgaggctgcccatccgcagccccatcaagagggacttcctgagcggcatccagatcgagttcaagcagagcagccaccagaggagcctgcgggcccggctgtactggctgcaggtggacaaccagctgcccggggccatgtttcctgtggtgttccaccctgtggccccacccaagagcatcgccctggacagcgagcccaagcccttcattgatgtgtctgtcatcacccgcttcaatgagtacagcaaggtgctgcagttcaagtacttcatggtgctgatccaggagatggccctgaagattgaccagggcttcctgggcgccatcatcgccctcttcacccccaccacagatcctgaggccgagaggaggaggaccaagctgatccagcaggacattgatgccctgaatgctgagctgatggagacctccatgacagacatgagcatcctgtccttctttgagcacttccacatcagccctgtgaagctgcacctgagcctgagcctgggcagcggcggggaggagagtgacaaggagaagcaggagatgtttgctgtgcacagcgtgaacctgctgctgaagagcattggagccaccctgacagatgtggatgacctgatcttcaagctggcctactatgagatccgctaccagttctacaagagggaccagctgatctggagcgtggtgcgccactacagcgagcagttcctgaagcagatgtatgtgctggtgctgggcctggatgtgctgggcaaccccttcggcctcatccggggcctgtctgaaggagtggaggccctcttctatgagcccttccagggcgctgtgcagggccctgaggagtttgctgagggcctggtgattggagtgcgcagcctgtttggccacacagtgggcggggccgccggcgtggtgagccgcatcactggatctgtgggcaagggcctggccgccatcaccatggacaaggagtaccagcagaagagaagagaggagctgagccggcagccccgggactttggagacagcctggcccggggcggcaagggcttcctgcggggcgtggtgggcggcgtgacaggcatcatcaccaagcctgtggagggcgccaagaaggagggcgccgccggcttcttcaagggcatcggcaagggcctggtgggcgctgtggcccggcccaccggcggcatcgtggacatggccagcagcaccttccagggcatccagagagctgctgagagcacagaggaggtgagcagcctgcggccccccaggctcatccatgaagatggcatcatccggccctatgaccggcaggagagcgagggcagtgacctgctggagaaccacatcaagaagctggagggggagacctaccgctaccactgtgccatccctggcagcaagaagaccatcctgatggtgaccaacagaagagtgctgtgcatcaaggaggtggagatcctgggcctgatgtgtgtggactggcagtgcccctttgaagattttgtgttcccccccagcgtgtctgaaaatgtgctgaagatctctgtgaaggagcagggcctcttccacaagaaggacagcgccaaccagggctgtgtgaggaaggtgtacctgaaggacacagccacagctgagcgggcctgcaatgccattgaagatgcccagagcacccggcagcagcagaagctgatgaagcagagctctgtgcggctgctgcggccccagctgcccagctag

SEQ ID NO: 194518 - DNA, 10758 bp, Artificial Sequence
  derived and/or modified sequence
atggtgctggagagcgtggtggccgacctgctgaaccgcttcctgggggactatgtggagaacctgaacaagagccagctgaagctgggcatctggggcggcaatgtggccctggacaacctgcagatcaaggaaaatgccctgtctgagctggatgtgcccttcaaggtgaaggccggccagattgacaagctgaccctgaagatcccctggaagaacctgtatggagaggccgtggtggccaccctggagggcctgtacctgctggtggtgcctggggccagcatcaagtatgatgctgtgaaggaggagaagagcctgcaggatgtgaagcagaaggagctgagccgcatcgaggaggccctgcagaaggctgctgagaaggacaagcccaaggaggccaagaaggacacctttgtggagaagctggccacccaggtgatcaagaatgtgcaggtgaagatcacagacatccacatcaagtatgaagatgatgtgacagaccccaagaggcccctgagctttggagtgaccctgggggagctgagcctgctgacagccaatgagcactggaccccctgcatcctgaatgaagctgacaagatcatctacaagctgatccggctggacagcctgagcgcctactggaatgtgaactgcagcatgagctaccagaggagccgggagcagatcctggaccagctgaagaatgagatcctgaccagcggcaacatcccccccaactaccagtacatcttccagcccatcagcgccagcgccaagctgtacatgaacccctatgcagagagcgagctgaagacccccaagctggactgcaacatcgagatccagaacatcgccatcgagctgaccaagccccagtacctgtccatgattgacctgctggagagcgtggactacatggtgagaaatgccccctacaggaagtacaagccctacctgcccctgcacaccaacggccgccgctggtggaagtatgccattgattctgtgctggaggtgcacatccgccgctacacccagatgtggagctggagcaacatcaagaagcaccggcagctgctgaagagctacaagatcgcctacaagaacaagctgacccagagcaaggtgtctgaggagatccagaaggagatccaggacctggagaagaccctggatgtgttcaacatcatcctggcccggcagcaggcccaggtggaggtgatccgcagcggccagaagctgaggaagaagtctgctgacacaggagagaagaggggcggctggttcagcggcctgtggggcaagaaggagagcaagaagaaggatgaggagagcctcatccctgagaccattgatgacctgatgaccccagaggagaaggacaagctgttcaccgccatcggctacagcgagagcacccacaacctgaccctgcccaagcagtatgtggcccacatcatgaccctgaagctggtgtccacctctgtgaccatccgggagaacaagaacatccctgagatcctgaagatccagatcatcggcctgggcacccaggtgtcccagaggcctggggcccaggccctgaaggtggaggccaagctggagcactggtacatcaccggcctgcggcagcaggacatcgtgcccagcctggtggccagcattggagacaccaccagcagcctgctgaagatcaagtttgagaccaaccctgaggacagccctgctgaccagaccctgattgtgcagagccagcctgtggaggtgatctatgatgccaagacagtgaatgctgtggtggagttcttccagagcaacaagggcctggacctggagcagatcaccagcgccaccctgatgaagctggaggagatcaaggagaggacagccaccggcctgacccacatcatcgagaccaggaaggtgctggacctgcgcatcaacctgaagcccagctacctggtggtgccccagacaggcttccaccacgagaagagtgacctgctgatcctggactttggcaccttccagctgaacagcaaggaccagggcctgcagaagaccaccaacagcagcctggaggagatcatggacaaggcctatgacaagtttgatgtggagatcaagaatgtgcagctgctgtttgcccgggcagaggagacctggaagaagtgccgcttccagcaccccagcaccatgcacatcctgcagcccatggacatccacgtggagctggccaaggccatggtggagaaggacatccgcatggcccgcttcaaggtgtctgggggcctgcccctgatgcacgtgcgcatcagtgaccagaagatgaaggatgtgctgtacctgatgaacagcatccccctgccccagaagagcagcgcccagagccctgagcggcaggtgagcagcatccccatcatcagcggcggcaccaagggcctgctgggcaccagcctgctgctggacacagtggagagcgagagtgatgatgagtactttgatgctgaagatggagagccccagacctgcaagtccatgaagggcagcgagctgaagaaggctgctgaggtgcccaatgaggagctgatcaacctgctgctgaagtttgagatcaaggaggtgatcctggagttcaccaagcagcagaaggaggaggacaccatcctggtgttcaacgtgacccagctgggcacagaggccaccatgaggacctttgacctgactgtggtgtcctacctgaagaagatcagcctggactaccacgagattgagggcagcaagaggaagcccctgcacctgatcagcagcagtgacaagccaggcctggacctgctgaaggtggagtacatcaaggctgacaagaatggccccagcttccagacagccttcggcaagacagagcagacagtgaaggtggccttcagcagcctgaacctgctgctgcagacccaggccctggtggccagcatcaactacctgaccaccatcatccccagtgatgaccagagcatctctgtggccaaggaggtgcagatcagcacagagaagcagcagaagaacagcaccctgcccaaggccatcgtgagcagccgggacagcgacatcatcgacttccggctgtttgccaagctgaatgccttctgtgtgattgtgtgcaatgagaagaacaacattgctgagatcaagatccagggcctggacagcagcctgagcctgcagagcaggaagcagagcctgtttgcccggctggagaacatcatcgtgacagatgtggaccccaagacagtgcacaagaaggctgtgtccatcatgggaaatgaggtgttccgcttcaacctggacctgtacccagatgccacagaaggagacctgtacacagacatgagcaaggtggatggagtgctgagcctgaatgtgggctgcatccagatcgtgtacctgcacaagttcctgatgagcctgctgaacttcctgaacaacttccagacagccaaggagagcctgtctgctgccacagcccaggccgctgagcgggccgccacctctgtgaaggacctggcccagaggagcttccgggtgtccatcaacatcgacctgaaggcccctgtgattgtcatcccccagagcagcatcagcaccaatgctgtggtggtggacctgggcctcatccgggtgcacaaccagttcagcctggtgtctgatgaggactacctgaacccccctgtgattgacaggatggatgtgcagctgaccaagctgaccctgtacagaactgtcatccagcccggcatctaccacccagacatccagctgctgcaccccatcaacctggagttcctggtgaacagaaacctggccgcctcctggtaccacaaggtgcctgtggtggagatcaagggccacctggacagcatgaatgtgtccctgaaccaggaggacctgaacctgctcttccgcatcctgacagagaacctgtgtgagggcacagaggacctggacaaggtgaagccccgggtgcaggagactggagagatcaaggagcccctggagatcagcatcagccaggatgtgcatgacagcaagaacaccctgaccactggagtggaggagatccgctctgtggacatcatcaacatgctgctgaactttgagatcaaggaggtggtggtgaccctgatgaagaagtctgagaagaagggccggcccctgcacgagctgaatgtgctgcagctgggcatggaggccaaggtgaagacctatgacatgacagccaaggcctacctgaagaagatctccatgcagtgctttgacttcacagacagcaaaggagagcccctgcacatcatcaacagcagcaatgtgacagatgagcccctgctgaagatgctgctgaccaaggctgacagtgatggccctgagttcaagaccatccatgacagcaccaagcagaggctgaaggtgtcctttgccagcctggacctggtgctgcacctggaggccctgctgtccttcatggacttcctgagcagcgctgcccccttcagcgagcccagcagcagcgagaaggagagcgagctgaagcccctggtgggggagagccgcagcattgctgtgaaggctgtgagcagcaacatcagccagaaggatgtgtttgacctgaagatcacagctgagctgaatgccttcaacgtgtttgtgtgtgaccagaagtgcaacattgctgacatcaagatccacggcatggatgccagcatctctgtgaagcccaagcagacagatgtgtttgcccggctgaaggacatcatcgtgatgaatgtggacctgcagagcatccacaagaaggctgtgtccatcctgggagatgaggtgttccgcttccagctgaccctgtacccagatgccacagaaggagaggcctatgctgacatgagcaaggtggatggcaagctgtccttcaaggtgggctgcatccagatcgtgtatgtgcacaagttcttcatgagcctgctgaacttcctgaacaacttccagacagccaaggaggccctgagcacagccaccgtgcaggccgctgagagagctgccagctccatgaaggacctggcccagaagagcttccggctgctgatggacatcaacctgaaggcccctgtgatcatcatcccccagagctctgtgagccccaatgctgtgattgctgacctgggcctcatccgggtggagaacaagttcagcctggtgcccatggagcactacagcctgccccctgtgattgacaagatgaacatcgagctgacccagctgaagctgagcaggaccatcctgcaggccagcctgccccagaatgacatcgagatcctgaagcctgtgaacatgctgctgagcatccagaggaacctggccgccgcctggtacgtgcagatccctggcatggagatcaagggcaagctgaagcccatgcaggtggccctgtctgaagatgacctgactgtgctgatgaagatcctgctggagaacctgggggaggccagcagccagcccagccccacccagagcgtgcaggagaccgtgcgggtgaggaaggtggatgtgtcctctgtgcctgaccacctgaaggagcaggaggactggacagacagcaagctgtccatgaaccagatcgtgtccctgcagtttgacttccactttgagagcctgagcatcatcctgtacaacaatgacatcaaccaggagagcggcgtggccttccacaatgacagcttccagctgggggagctgcggctgcacctgatggccagcagcggcaagatgttcaaggatggctccatgaatgtgtctgtgaagctgaagacctgcaccctggatgacctgcgggagggcatcgagcgggccaccagcaggatgattgacaggaagaatgaccaggacaacaacagctccatgattgacatctcctacaagcaggacaagaatggcagccagattgatgctgtgctggacaagctgtatgtgtgtgcctctgtggagttcctgatgacagtggccgacttcttcatcaaggctgtgccccagagcccagaaaatgtggccaaggagacccagatcctgccccggcagacagccaccgggaaggtgaagattgagaaggatgattctgtgcggcccaacatgaccctgaaggccatgatcacagatcctgaggtggtgtttgtggccagcctgaccaaggcagatgccccagccctgacagccagcttccagtgcaacctgagcctgagcaccagcaagctggagcagatgatggaggcctctgtgcgggacctgaaggtgctggcctgccccttcctgcgggagaagaggggcaagaacatcaccaccgtgctgcagccctgcagcctcttcatggagaagtgcacctgggccagcggcaagcagaacatcaacatcatggtgaaggagttcatcatcaagatcagccccatcatcctgaacacagtgctgaccatcatggccgccctgagccccaagaccaaggaggatggcagcaaggacaccagcaaggagatggagaacctgtggggcatcaagagcatcaatgactacaacacctggttcctgggcgtggacacagccacagagatcacagagagcttcaagggcatcgagcacagcctgattgaggagaactgtggggtggtggtggagagcatccaggtgaccctggagtgtggcctgggccacaggacagtgcccctgctgctggccgagagcaagttcagcggcaacatcaagaactggaccagcctgatggctgctgtggctgatgtgaccctgcaggtgcactactacaatgagatccatgctgtgtgggagcccctgattgagcgggtggagggcaagaggcagtggaacctgcggctggatgtgaagaagaaccctgtgcaggacaagagcctgctgcctggagatgacttcatccctgagccccagatggccatccacatcagcagcggcaacaccatgaacatcaccatcagcaagagctgcctgaatgtgttcaacaacctggccaagggcttcagcgagggcacagccagcacctttgactacagcctgaaggaccgggcccccttcaccgtgaagaatgctgtgggcgtgcccatcaaggtgaagcccaactgcaacctgcgggtgatgggcttccctgagaagagtgacatctttgatgtggatgctggccagaacctggagctggagtatgcctccatggtgcccagcagccagggcaacctgagcatcctgagccggcaggagagcagcttcttcaccctgaccatcgtgccccacggctacacagaggtggccaacatccctgtggcccggcctggaagaagactctacaacgtgaggaaccccaatgccagccacagcgacagcgtgctggtgcagattgatgccacagagggcaacaaggtgatcaccctgcggagccccctgcagatcaagaaccacttcagcatcgccttcatcatctacaagtttgtgaagaatgtgaagctgctggagagaattggaattgcccggcctgaggaggagttccacgtgcccctggacagctaccgctgccagctgttcatccagcctgctggcatcctggagcaccagtacaaggagagcaccacctacatctcctggaaggaggagctgcacaggagccgggaggtgcgctgcatgctgcagtgccccagcgtggaggtgtccttcctgcccctgattgtgaacacagtggccctgcctgatgagctgagctacatctgcacccatggagaggactgggatgtggcctacatcatccacctgtaccccagcctgaccctgaggaacctgctgccctacagcctgcgctacctgctggagggcacagctgagacccatgagctggccgagggcagcacagcagatgtgctgcacagccgcatcagcggggagatcatggagctggtgctggtgaagtaccagggcaagaactggaatggccacttccgcatccgggacaccctgcctgagttcttccctgtgtgcttcagcagtgacagcacagaggtgaccaccgtggacctgtctgtgcacgtgagaagaattggcagcaggatggtgctgagcgtcttcagcccctactggctgatcaacaagaccaccagggtgctgcagtacagaagtgaggacatccacgtgaagcaccctgctgacttccgggacatcatcctcttctccttcaagaagaagaacatcttcaccaagaacaaggtgcagctgaagatcagcaccagcgcctggagcagcagcttcagcctggacacagtgggcagctatggctgtgtgaagtgcccagccaacaacatggagtacctggtgggcgtgtccatcaagatgagcagcttcaacctgagccgcatcgtgaccctgacccccttctgcaccatcgccaacaagagcagcctggagctggaggtgggggagatcgccagtgatggctccatgcccaccaacaagtggaactacatcgccagcagcgagtgcctgcccttctggccagagagcctgagcggcaagctgtgtgtgcgggtggtgggctgtgagggcagcagcaagcccttcttctacaaccggcaggacaatggcaccctgctgagcctggaggacctgaatggaggcatcctggtggatgtgaacacagctgagcacagcaccgtcatcaccttcagtgactaccacgagggcagcgccccagccctgatcatgaaccacaccccctgggacatcctgacctacaagcagagcggcagccctgaggagatggtgctgctgccccggcaggcccggctgtttgcctgggccgaccccaccggcaccaggaagctgacctggacctacgccgccaacgtgggggagcatgacctgctgaaggatggctgcggccagttcccctatgatgccaacatccagatccactgggtgtccttcctggatggccggcagagggtgctgctcttcacagatgatgtggccctggtgtccaaggccctgcaggccgaggagatggagcaggccgactatgagatcaccctgagcctgcacagcctgggcctgagcctggtgaacaatgaaagcaagcaggaggtgtcctacatcggcatcaccagcagcggcgtggtgtgggaggtgaagcccaagcagaagtggaagcccttcagccagaagcagatcatcctgctggagcagagctaccagaagcaccagatcagccgggaccacggctggatcaagctggacaacaactttgaggtgaactttgacaaggaccccatggagatgaggctgcccatccgcagccccatcaagagggacttcctgagcggcatccagatcgagttcaagcagagcagccaccagaggagcctgcgggcccggctgtactggctgcaggtggacaaccagctgcccggggccatgtttcctgtggtgttccaccctgtggccccacccaagagcatcgccctggacagcgagcccaagcccttcattgatgtgtctgtcatcacccgcttcaatgagtacagcaaggtgctgcagttcaagtacttcatggtgctgatccaggagatggccctgaagattgaccagggcttcctgggcgccatcatcgccctcttcacccccaccacagatcctgaggccgagaggaggaggaccaagctgatccagcaggacattgatgccctgaatgctgagctgatggagacctccatgacagacatgagcatcctgtccttctttgagcacttccacatcagccctgtgaagctgcacctgagcctgagcctgggcagcggcggggaggagagtgacaaggagaagcaggagatgtttgctgtgcacagcgtgaacctgctgctgaagagcattggagccaccctgacagatgtggatgacctgatcttcaagctggcctactatgagatccgctaccagttctacaagagggaccagctgatctggagcgtggtgcgccactacagcgagcagttcctgaagcagatgtatgtgctggtgctgggcctggatgtgctgggcaaccccttcggcctcatccggggcctgtctgaaggagtggaggccctcttctatgagcccttccagggcgctgtgcagggccctgaggagtttgctgagggcctggtgattggagtgcgcagcctgtttggccacacagtgggcggggccgccggcgtggtgagccgcatcactggatctgtgggcaagggcctggccgccatcaccatggacaaggagtaccagcagaagagaagagaggagctgagccggcagccccgggactttggagacagcctggcccggggcggcaagggcttcctgcggggcgtggtgggcggcgtgacaggcatcatcaccaagcctgtggagggcgccaagaaggagggcgccgccggcttcttcaagggcatcggcaagggcctggtgggcgctgtggcccggcccaccggcggcatcgtggacatggccagcagcaccttccagggcatccagagagctgctgagagcacagaggaggtgagcagcctgcggccccccaggctcatccatgaagatggcatcatccggccctatgaccggcaggagagcgagggcagtgacctgctggagcaggagctggagatccaggagtag

SEQ ID NO: 194519 - DNA, 11133 bp, Artificial Sequence
  derived and/or modified sequence
atggtgctggagagcgtggtggccgacctgctgaaccggttcctgggggactatgtggagaatctcaataaatctcaactgaaattggggatatggggtggaaacgtggccctggacaacttgcagattaaagagaacgccttgtctgaactcgacgtgcctttcaaagttaaggcagggcagatagataagctgaccctcaagataccgtggaagaatctgtatggagaagccgtggtggccaccctggagggattgtatctccttgtcgtccccggagcttccatcaagtacgatgccgtcaaagaggagaaaagtttacaagacgtcaaacagaaggagcttagtaggattgaggaagctctccaaaaggcagctgagaaagacaagcccaaggaagccaagaaagatacattcgtcgagaaactagctacacaggtgattaagaacgtgcaggtcaagattacagacattcatatcaaatatgaggacgatgttaccgatccgaagcgcccactcagcttcggcgtaactctgggggagctgtctctcctgacggcgaacgagcactggaccccctgcattctgaatgaggcggacaaaataatttataaattgataagattagattcactctccgcatactggaacgtaaactgttcaatgtcctatcaaaggtcccgcgagcagatcctcgatcagctaaaaaacgaaattttgacaagcggaaacattccccccaattatcagtatatttttcagcccatctccgcttccgccaaactctacatgaacccttatgcagagagcgagctgaagacaccaaagctcgactgtaacattgaaattcagaatatcgccatcgagttgactaagccacagtatttgagtatgattgatttacttgaaagcgtagactacatggtgagaaatgctccctacagaaaatacaagccctacctgcccctgcacaccaacgggaggaggtggtggaaatatgccatcgactcagtgctggaagtccatatcaggcgatatacccagatgtggtcttggagcaatatcaaaaaacacaggcagctgctcaaaagttacaaaatcgcatataaaaacaagctcacccagagtaaggtgtccgaagagatccagaaagagattcaggacctcgaaaaaaccctggatgtctttaacatcattctggccagacagcaggctcaggtggaagttataagaagcgggcagaagctccgcaagaagtctgctgatacaggcgaaaagagaggagggtggttctctggactgtggggaaagaaggaatcaaaaaagaaagatgaggagtccttgattccagagacaatcgacgatcttatgacaccagaagaaaaagacaagttgtttacggctatagggtattccgagagtactcacaatttgacgctgccaaagcagtatgtcgcccatattatgactcttaagcttgtttcgacttctgtgaccattagagaaaacaagaatattccggagatactgaagattcagatcattggactcggcactcaggtgagccagcgtccaggcgcccaggctctgaaggtggaggcaaaactggagcactggtacataacggggctgagacaacaggatattgtgccgtccttggtagcctcaataggcgacaccacatcaagtctactcaagatcaagtttgagaccaatcctgaagattcccccgccgaccagactcttatagtgcagtctcaaccagttgaggttatctacgatgccaagacggttaacgccgtcgtcgagttctttcagtctaataagggcctggaccttgagcagatcacttccgcgaccctgatgaagctcgaagagattaaggagagaactgctaccgggctcacacacattattgaaacaagaaaggtactggacttacgcatcaatctgaaaccttcttaccttgtggttcctcagacaggtttccatcatgaaaagtctgacctgctcatcctcgatttcggcacgttccaactgaactccaaggatcaggggttacagaaaacaaccaacagttctctagaggaaatcatggacaaggcatacgataaattcgatgtcgagataaagaacgtgcagctcttatttgcccgggcagaagaaacctggaaaaagtgtaggttccagcacccttcgacgatgcacattctccagccgatggacatacacgtcgagcttgcaaaggcaatggtggagaaggatatccgcatggctaggttcaaggtctccggggggctgccgcttatgcacgtgcgaattagtgaccagaaaatgaaggatgtgctgtacctaatgaatagcatcccactgccacaaaagagctccgcacagtcccccgaaagacaggtgagctccatccctattatttcgggtggcacgaaaggtctgctggggacttctttgctgttggataccgtcgagtctgagtccgatgacgaatacttcgacgccgaggacggggaacctcagacttgcaaatcaatgaagggctccgagctgaagaaggcggccgaagtacctaacgaagagcttataaatctgctgttgaagtttgagatcaaagaggttatactggaattcaccaaacagcagaaagaggaggacacaattctagtgttcaatgtgacccagctcgggaccgaagcaactatgcgaacatttgatttgacggtagtctcttatctcaagaagataagtctcgactaccatgaaatcgaggggagtaaacggaaacctctacaccttatctcgtcttccgataagccagggcttgatttactaaaggtcgagtacatcaaggctgacaaaaacggaccatcttttcagaccgcatttggaaaaaccgagcaaaccgtgaaggtagctttctcgtcccttaacttattactgcagactcaggccctggttgcttccatcaactatcttactactataatcccaagcgatgatcaaagcatcagcgtagctaaggaggtgcaaataagtacggagaaacagcagaagaatagcaccctgcctaaagcaattgtttctagtcgagactcggacattatcgatttccgcctgtttgcaaagctgaacgctttttgtgtaattgtctgcaatgaaaaaaataacatagctgagataaagattcaaggattagattcttcactgtcactgcagagccgcaaacaaagtctgtttgcgcggttggaaaacatcattgttacagacgttgacccgaaaaccgtgcataagaaagccgtgtctatcatggggaatgaggtgtttaggttcaacttggacctgtacccggatgccacagaaggggatctttataccgatatgtccaaggtggacggagtgctctcgcttaacgtggggtgcatccagattgtgtatctgcataagttcttaatgagtctcctgaactttttgaataacttccagacagctaaagagtcactgagcgccgcgacagcgcaagccgccgagcgagccgctacctctgttaaggatctcgcccagcggagcttccgggtcagtataaatatcgaccttaaggccccagtcattgtgataccccagtccagcatatcgacgaatgcagttgtcgtggatctcggcttgataagagtccataatcagttctcactagtctcagacgaggattacctgaatccacctgtcattgatagaatggacgtccaacttactaagctgaccctctatagaactgtgattcagcccggtatttatcaccccgacatccagctcctccatcccattaacttagaatttctggttaaccggaatctggcagctagttggtaccacaaagttccagtggtggaaatcaagggtcatctggatagcatgaatgtgtccttgaaccaggaggatctcaacctgctcttcagaatcttgacggagaatctctgcgaaggaaccgaggacctcgataaagtgaaaccccgcgttcaggagactggggagatcaaggagcctttagagatcagcatttcccaggacgtccacgatagtaaaaatactctgaccactggagtagaagagatcaggagtgtggatattatcaacatgttactgaactttgaaataaaagaggtggtggtcaccctgatgaagaagagtgagaaaaaggggagaccattgcatgagctgaacgtgttacagttgggcatggaagctaaagtgaaaacctacgacatgactgccaaggcttacctcaaaaaaattagcatgcagtgtttcgattttaccgattcgaaaggtgagccactccacattattaattctagtaacgttacggacgagccactactgaaaatgctcttgaccaaggcggatagcgacgggccagaatttaagactatccacgatagcacaaagcagcgcctcaaggtctcatttgcaagcctcgacctggtgttgcaccttgaagccctgctttcctttatggactttctgagctccgcagctccattctcggagccaagtagttccgagaaagaaagcgagctgaaacctctcgtaggtgaaagtagaagtatcgccgtgaaggctgtttcctccaatatctcacagaaggacgtgtttgacctcaaaattacagcagaacttaatgcgtttaatgtgttcgtttgcgaccaaaaatgtaacatagcagacatcaagattcacggcatggacgcgagtatctctgtgaaaccaaagcagaccgacgtctttgccaggctgaaggacatcattgtgatgaatgtcgatttacaatctatacacaagaaagctgtgagtattctcggggacgaagtgtttcgattccagctcaccctctatccagatgcaacagagggcgaggcctacgcggatatgtctaaagtggatggaaaactcagctttaaggtagggtgtatacagattgtctacgtacataaatttttcatgagcctattgaattttctcaacaacttccaaaccgcgaaggaggctttgtccacagccaccgtgcaggccgcagagagggccgcctcaagcatgaaggacctcgcacaaaagagcttcaggttgctgatggatatcaatcttaaagcccccgttattatcatcccccaatcttccgtatcccccaacgcggtgattgccgacctggggctcataagagtggaaaataagttcagcctggtgccaatggagcactatagtctcccaccagtgatcgataaaatgaacattgaactcacacaactgaaattatcccgcactatcttgcaagcaagtctgccacagaatgacatcgagatactcaagccagtgaatatgctactgtcgatccaaaggaatctggccgcagcctggtacgtccagatccccggcatggaaattaaaggtaagctcaaaccaatgcaggtggctttgagcgaggacgacttaactgtcttgatgaagatcctgcttgaaaatctgggggaggctagttcccagccttcacctactcagagcgtccaggagactgttcgagtgagaaaagttgatgttagctcagtccccgaccatctgaaggaacaggaagactggacagattccaagctcagcatgaatcaaatagtttccctgcagttcgattttcacttcgagtccctctctatcatactgtacaataacgacatcaatcaggagtctggtgtggcctttcataatgactcctttcagttgggggagctcagactccatctgatggcttctagcggcaaaatgttcaaagacggttctatgaacgtttcagtgaaactgaagacatgcacccttgacgatcttcgggaggggattgaaagggctactagccgcatgatagaccgaaaaaatgatcaagacaataatagctctatgatcgacatttcctataaacaggataagaatgggagtcagattgacgccgtacttgataaactgtacgtctgcgcaagtgtcgaatttctcatgaccgtggcggacttcttcattaaggctgtgcctcaatctcctgaaaacgtcgctaaggaaacccagattctgccaagacagacagccacgggtaaggtcaagattgagaaggacgactcagtcagaccaaacatgactctgaaggcaatgattacggatcctgaagttgtgttcgtggccagcctgaccaaggctgacgctcccgcactgaccgcctctttccagtgtaacctgagcctgtctaccagcaaactagagcaaatgatggaggcgtcagtgagagatcttaaggtgctggcttgcccattcctgagagaaaagcggggcaaaaatataactacagttctacaaccctgttctcttttcatggaaaaatgtacatgggctagtggcaagcagaatattaacataatggtgaaagagttcataattaagatcagcccaatcattcttaatacggtgctgacaatcatggccgctctcagccctaagacaaaggaggatggcagcaaggacacgagtaaggaaatggaaaacctgtgggggatcaagagcataaacgactataatacttggttcctgggcgtggacaccgccaccgaaatcaccgagagctttaagggtatcgagcatagcttgatcgaagaaaactgtggcgtggttgtggagtccatacaggtaaccctcgaatgcggccttggccatcggaccgtaccattgttgctggctgagagtaagttctccggcaacataaaaaactggacaagcctgatggcagctgtggcagatgtgacattgcaggtgcactattataatgagatacacgcagtgtgggagccactcattgaacgagtggaagggaaaaggcagtggaacctgagactggatgttaaaaaaaaccctgtgcaggataagtcgcttttgcccggcgacgatttcatccctgagcctcagatggccattcatatttcatcaggaaatacaatgaacatcacaatttcaaagtcatgtcttaatgtgtttaataacctagccaaaggattctccgagggcaccgcctctaccttcgattatagcttaaaggatcgcgctccctttaccgtgaagaatgcagtgggggtgcccatcaaggttaagcccaactgtaacctgagggtcatgggctttccggagaaatccgacattttcgatgttgacgcgggacagaacctcgaactggaatacgctagtatggtgccctcttcccaggggaacctgtccatccttagtcgacaagagtctagttttttcaccctgaccatcgtcccccatggctacaccgaagtggccaacatacccgtcgctagaccggggaggcgtctctacaacgtacgaaatcctaatgcctctcactcagactccgtgctcgtgcagattgatgctacggaaggcaataaagtgataactctcaggtcaccattgcagattaagaaccacttttccattgctttcatcatttacaaatttgtgaagaacgtgaagctgttagaacgtatcggcattgcccgaccagaggaagagttccatgtgcctctggactcttataggtgtcagttgtttatccagccggccgggattctggagcatcagtacaaagaatcaacaacctacatctcttggaaggaggagctgcaccgctctagagaagtacggtgtatgctccagtgcccctcagtcgaggtgtcctttctgcctctgattgtgaacaccgtagcattgcctgacgagctcagctatatctgtacgcatggtgaagattgggacgtggcatacataatccacttgtatccatccctcaccctccgcaacctgctgccatactcactgcgctaccttctggaaggcactgctgaaacgcacgagctcgctgagggcagtaccgccgatgttctccattcaaggattagtggcgagatcatggaactggtactggtgaagtaccagggtaaaaattggaatggccatttccgtatccgtgacaccctgccggaatttttccccgtttgttttagcagtgattccacagaagtgacaactgtggatctgtctgtgcatgttcgtaggatcgggtccagaatggtcctgagcgtattttccccttattggctgataaacaaaactactagagtgctgcagtacaggtctgaggatatccatgtcaagcatccagccgatttccgcgatatcatcctgttctcctttaagaaaaaaaacattttcaccaagaacaaagtgcaactgaagatctcaacatccgcttggtcgagctcattctcactggacacagtgggctcatacggatgcgtgaagtgtcccgctaacaatatggaataccttgtaggagtgagcatcaagatgtcgagctttaacctcagcagaatcgtgacgctgactcctttttgtacaatagcgaacaagtcgagtttagaattagaagttggcgagatcgctagcgatggctctatgccaactaacaaatggaattatatcgcctccagcgaatgccttcctttttggccagaatcgcttagcggaaagctctgtgtgagagtagtcgggtgcgaaggatccagcaaaccattcttttataacagacaagataacggtacactgttatccttggaagacctgaatggcggaatactcgtggacgtgaataccgctgaacacagtactgtcatcactttttcagactatcacgaaggcagcgcgcctgcactaatcatgaatcatactccttgggatattttaacctacaagcagtccggctccccggaggaaatggtccttctcccacgtcaggcccggctattcgcatgggcggaccctactggaacccggaagcttacatggacctacgcagctaatgtgggcgaacacgaccttctcaaagacggctgtggccagttcccgtacgatgctaatatacagatccactgggtctcttttctggacggtagacagcgtgttctcctgtttacagatgatgttgcactcgtgtccaaagctcttcaggctgaggaaatggagcaggcggactacgaaatcactctaagtctccatagtttggggctctcgctggtgaataatgagagtaagcaagaagtgtcctatatcgggattacctcttccggcgtcgtgtgggaggttaaaccaaagcaaaagtggaaaccattctcccaaaaacagattatcttactggagcaaagctaccagaagcaccagatatcaagggatcacggatggataaagctggacaataacttcgaagtgaattttgataaggacccaatggaaatgcgcttgcccatccgtagtcccattaagcgagatttcctcagcggcattcagatcgaatttaaacagtcatcccatcagcgatccctgagggcaaggttgtactggttgcaggtggacaatcagctgcccggcgctatgtttcctgttgtttttcaccctgttgcgcctccaaaatcaattgcgctcgactctgagccaaaaccgtttatcgacgtatctgtgatcacacgctttaatgagtacagcaaggtccttcaatttaaatattttatggtgctaattcaggagatggcactgaaaatcgatcagggctttttaggggcaatcatcgcactgttcacgccaacaacggaccccgaagctgaaagacgaagaactaaactgatccagcaagatattgatgctctaaacgcagaattgatggagacatcgatgaccgatatgagcattttaagtttttttgagcactttcacatttccccagtgaaattgcacctgtccctatctctgggttccgggggtgaagagagcgataaagaaaaacaagagatgttcgcagtgcactctgttaacctactgcttaaaagcataggcgccacactcacagatgtcgacgatcttatctttaagttggcatactacgagatccgataccaattctataagcgcgatcagctgatttggtcagtggttagacattacagcgaacagttcctcaaacagatgtatgtgctggtcctgggtttggatgtgttagggaaccccttcggacttatccggggcctgtccgagggagtggaggcactattctatgagccattccaaggagccgtacaaggacccgaggagttcgctgagggtttggttattggggttcgttccctttttggtcacacggttgggggggccgccggcgttgtaagtcggatcaccggctctgtcggtaagggactggccgcgataacaatggacaaggaataccagcagaagcgccgcgaagaactgtccagacagccccgcgactttggtgatagccttgccagggggggtaaagggtttctgaggggcgtggtggggggagtcacaggcatcattactaagcccgtcgaaggcgccaagaaggaaggggccgcgggcttcttcaagggaatcgggaaagggctcgtgggcgccgtggctagaccaactgggggtatcgtggacatggcctcaagcaccttccagggtattcaacgcgcagctgagtcgaccgaagaagtttcatccttgcggccaccaaggctgatccacgaagatgggattataaggccctatgacaggcaggagtctgaaggtagcgatctgctagagaaccacataaaaaagctggagggcgagacctaccggtaccactgcgccatccccgggtccaaaaaaactatcttgatggttactaaccggagagtcctgtgcatcaaagaagtggaaatccttggcctgatgtgcgtggattggcagtgtccgttcgaagatttcgtgttccccccctccgtgagtgagaatgtgttaaagatttctgtaaaggaacagggactttttcataagaaggactccgctaaccaaggatgtgttcgtaaggtgtacctgaaagatactgccacggcagagagagcgtgcaacgccatcgaggatgctcagtcaactcggcagcaacagaagctgatgaaacagtcctcagtgcggctcctgcgcccccagctgcctagctag

SEQ ID NO: 194520 - DNA, 10758 bp, Artificial Sequence
  derived and/or modified sequence
atggtgctggagagcgtggtggccgacctgctgaaccggttcctgggggactacgtagaaaacctgaacaagtcacagctgaaactcggaatttggggaggaaacgtcgcactagataacctgcagatcaaagagaacgccctgagcgagctcgatgtgcctttcaaagtgaaagccggacagatcgacaaactgaccctgaagatcccatggaaaaacctgtacggagaggccgtggttgcgacacttgaagggttatatctgctggtggtacccggcgctagcatcaagtatgatgctgttaaagaagaaaagtctctgcaggacgttaagcagaaagagttgagccgcattgaagaggccctgcagaaagcagcggaaaaggacaaacctaaggaagccaaaaaggatacattcgtggagaagctggcgacccaggtcattaagaatgtgcaggtcaagataacagacattcatatcaagtacgaagacgacgttacagatccaaaaagaccgctctcttttggcgttacgctaggcgagctttccttgctaacggcaaacgaacactggaccccatgtatccttaatgaggcagacaaaatcatatacaagcttattagactcgactccctgagcgcttattggaatgttaattgtagcatgtcctaccaacggtcccgggagcagatcctcgaccagctcaaaaatgagatccttacttcaggcaatattccgcctaactatcaatacatctttcaacctatttccgccagcgccaaactgtatatgaatccttatgcagaatccgagctgaagacaccaaagttggattgcaatatcgaaatccagaacatcgccattgaactgacaaaaccccagtatttatcgatgatcgatctgcttgagagtgtggactatatggtccggaatgcaccctaccgcaaatacaagccatacttgcccttacatacgaatgggcggcgttggtggaagtacgctatcgacagtgtccttgaggtgcatattagaaggtacacacagatgtggagctggtccaatatcaaaaagcatcgccagctcctgaaatcctataagatcgcttacaaaaacaaattgacgcagagcaaggtgagcgaggaaatacaaaaggagatccaggacctggaaaaaacactcgatgtgttcaatatcattcttgcccggcagcaggctcaggtcgaagtcattcggtccgggcagaaactacgtaagaagagcgcagatacaggggaaaaacgtggtggatggtttagcggtctgtgggggaaaaaggaaagtaaaaaaaaggacgaggaaagcctcataccggagaccatcgacgatttgatgacaccagaagagaaagacaaactgtttacagccattggctactccgagtccacgcacaacctaactctgcccaagcaatacgtggcccatatcatgacactcaagctcgtgtcaacttccgttaccattcgtgagaataagaatatacctgagatcctgaagatccagattatcgggctgggcacccaggtatctcagaggcccggcgctcaggccctcaaggttgaagccaaactcgaacactggtatattaccggactgcgtcaacaagacatagtcccctcactggtcgcatccatcggtgatacgacatcttcgttactcaagatcaagttcgaaaccaaccccgaggactcccccgccgatcaaacccttatagtccagtcccagccagtagaggttatctacgatgcgaaaaccgtgaatgctgttgtggagttctttcagagcaacaaggggctggatctcgagcagattacctcagccaccttaatgaaattagaggaaatcaaggaacggactgcgactggcttgacgcacattatcgagactcgaaaggtgctggatttgaggatcaaccttaagcccagctacctggtggtgcctcagactggcttccatcacgagaaatctgacctcctcatactcgactttggtacttttcagttgaacagtaaggatcaaggcctacaaaagactacaaattcttcgctggaggaaattatggacaaagcgtatgacaagttcgatgttgagatcaaaaatgtccagctgctgtttgcccgagcagaggagacgtggaaaaaatgccgctttcagcatccaagcactatgcacatcctacagccaatggacattcacgtagagttggctaaagctatggttgaaaaagacattagaatggccagatttaaagtgtccggggggttaccattgatgcacgtgagaatatccgatcaaaagatgaaggacgtcttgtacttgatgaattctatcccactaccccaaaagtctagtgcacaatcccctgaaagacaggtgtcgtccatcccaatcatctccggtggcactaaagggctgttggggacttctctcttgctggatacagtagagagtgaaagcgacgatgagtatttcgatgctgaggatggagagccgcagacttgtaagtcaatgaaaggctccgaactcaagaaagcagccgaggtccccaacgaggagttgattaatctgctgctcaaatttgagatcaaggaggtcattcttgagttcaccaaacagcagaaagaggaggacactatcttggtatttaacgtaacccagctcggcaccgaggcaaccatgcgtacatttgatttaacagtggtgtcgtatcttaaaaagatatctttggattatcacgaaatcgaaggctccaaaaggaaacccctgcacctgatcagctcatctgacaagcccgggctggatttgttaaaggtggaatacattaaagcagacaagaacggaccctcgtttcagaccgcgttcggcaaaaccgaacaaactgtcaaggtggcattctcatccctgaatttgctgctgcagactcaagctttggttgcctctatcaactatctgacaactattataccttctgacgatcagtctatcagtgtagccaaagaagtccaaatcagcacagagaaacaacaaaagaattcgaccttgccaaaggccatcgtgagctctcgagactctgatatcattgattttcgactctttgccaaattgaacgccttctgcgttatagtgtgcaatgagaaaaataacatagccgagattaagatacaggggctggactcttctctttctctgcagtctcgcaagcagtccctctttgcccggcttgagaatattatagtgaccgacgtggatcctaagacagtgcacaagaaggccgtgtccattatggggaacgaggtgttcaggtttaatctagatctgtatcctgatgctactgaaggtgacctctacacagacatgagcaaagtcgatggggtgctgagcctcaacgtcggctgcattcagattgtttaccttcataagttcttgatgagcttgctcaacttcctgaataacttccagaccgcgaaggaatcactctctgcagcgacagcccaggctgctgagcgcgccgcaaccagtgtcaaggacctcgctcaacggagcttccgggtgtcaataaacatcgacctaaaggctcccgtcatcgtcatccctcagtcttctatttctaccaatgcggtagtggtggatctggggctaattcgggtacacaaccaatttagcctggtgtcggacgaggattacttaaaccccccagtgatcgaccgaatggatgtgcaactgaccaagctgaccctgtacagaaccgtaattcaacccggtatttaccatccagatatccaactcttgcatcctatcaatctagagtttctggtgaatcggaacctggcagctagctggtaccacaaggtaccagtggtggaaatcaagggccacctagacagcatgaatgtgagtttgaaccaagaagatctgaacttacttttccggatcctcacggaaaatctgtgcgagggaaccgaggacctcgacaaagttaagcctcgagtgcaggaaaccggtgagattaaagaacccctcgaaatctctattagccaggacgtacacgactctaagaataccttgaccacgggagtagaggaaattcgctccgtcgacattattaatatgctccttaacttcgagattaaagaggtggtcgtgacgctgatgaagaagtctgaaaagaagggtcgcccactccacgagcttaatgtgcttcagctagggatggaagcgaaggtgaagacctatgatatgactgccaaggcatacctcaaaaaaattagtatgcagtgcttcgatttcacagattctaaaggcgagccactgcatataattaattccagcaacgtgactgatgaacccctgctgaaaatgttgcttacaaaggctgactctgacgggccagagtttaaaaccatacatgatagtactaaacaaaggttgaaagtgtcattcgcttcgcttgatttggttcttcaccttgaagccctgttgtcttttatggattttctgtcgagtgccgctccattctcagaaccatcgtctagcgagaaggagtccgaactcaaacctctggtgggagaatccaggtctatcgcagttaaagccgtgtccagcaacattagccagaaggatgtgtttgacctgaagatcactgcagagctgaatgcttttaatgtgtttgtgtgtgatcagaaatgcaatattgccgacatcaaaatccacggaatggacgctagcattagtgtgaaaccaaaacagaccgatgtgtttgccagactcaaggatataatcgtaatgaatgtggatctgcagtccatacacaaaaaagctgtcagcatccttggagatgaagtgtttcgctttcagctgactctctatcccgatgctacagagggcgaggcctacgctgacatgagcaaggtcgacggcaagctgagtttcaaagtcggatgtattcagatcgtctacgtgcacaaattctttatgagtctgctgaatttcctgaacaattttcaaaccgccaaggaggcactgagcactgctactgtccaggccgctgagagagcagctagcagtatgaaagacctcgcccagaagagttttagattgctcatggatattaacttgaaggcgccagtcatcatcatcccccagagctccgtctcgcccaatgcggtgatagcagatctagggttaatcagggttgaaaacaaatttagccttgtgcccatggagcactattctctgccaccggtgatcgacaagatgaatattgaattaacccaacttaagctgtctagaactatcttgcaggcttccctgccacagaacgatattgagatcctcaagcccgtgaatatgctgcttagcatccaaaggaatctggctgctgcctggtatgtccagatcccgggtatggaaatcaagggaaaactcaagcccatgcaggtggctctgagcgaggatgacctgacagtgttaatgaagatcctcctggaaaatctgggagaggcaagttctcagccatcccctacccagtctgttcaggagaccgttagagtaaggaaggtcgacgtgagtagtgttcccgaccacctgaaagaacaggaggactggaccgactctaagctgagcatgaaccaaatcgtcagtctccagtttgatttccacttcgaatcattaagcatcattctgtacaacaatgacatcaatcaggaaagtggagtggctttccataacgactcatttcagctgggagagctgcgccttcacctgatggcatcaagcggcaaaatgttcaaagacggaagtatgaacgtctcagttaagctaaaaacatgcacactggatgatcttcgtgaaggcatcgagcgagcaacaagcagaatgatcgacagaaagaatgatcaagataataatagctccatgattgacatcagctacaaacaggacaagaatggttcccaaattgacgccgtgctggacaaactttatgtatgtgcctctgtggagttccttatgaccgtggcggatttcttcatcaaggcagtgccacagtcacctgaaaacgtggccaaggagactcagattctacctaggcaaaccgcgaccggcaaggtaaagatcgaaaaggacgatagcgtccggcctaatatgactctcaaagcaatgatcaccgaccccgaggttgtgttcgttgcttcattgaccaaggcagacgcgccagcattgaccgcatcttttcaatgtaacctctctctctcgactagtaaactcgaacaaatgatggaggctagcgtgagagacctgaaagtactcgcctgccctttcttgcgcgagaagagaggaaaaaatatcaccactgtcctccaaccttgctccctgtttatggagaagtgtacatgggcctcaggcaagcagaacatcaacatcatggttaaggaatttatcatcaagataagccctataatactgaacaccgtgctaaccatcatggcagccctgtcacctaagaccaaggaggatggaagtaaagatacatcaaaggagatggagaatctatggggaattaaatccatcaatgattacaacacatggttcctgggagttgacacagcaaccgagatcacagagagttttaagggaatcgagcattctctgatcgaagagaattgtggtgtggtggtggagtctatccaagttaccctcgaatgtggtcttggccaccgaactgtgcccctgttgctggccgagtccaaattctctggaaatatcaagaactggaccagccttatggcagcagtggctgacgtcactttgcaggtgcattattacaacgaaatccacgcagtatgggagcccctgatcgagcgcgtggaaggaaagaggcagtggaatttaaggctggatgtaaaaaaaaacccagtccaggacaagtctttgcttcccggcgatgactttatccctgagcctcaaatggctatacatatttcgtccgggaacacgatgaatattaccattagtaagagctgtctgaacgttttcaataatctcgctaagggtttctctgaggggaccgcctcaacattcgactactcgttgaaggacagagctccctttaccgtgaagaatgcagttggagtccctataaaggtcaagcccaactgtaacctgcgtgtcatgggttttccagaaaagtcggatatcttcgacgtggatgcaggccaaaacctggaactggaatacgcaagtatggtcccaagcagtcagggaaacttaagtatcctgtcccgtcaggaatccagctttttcaccctcaccattgttccccatggatatacagaagtggccaacattccagtggcccgacccggccgaagactgtacaatgtgagaaatcctaatgctagtcatagcgactccgtgttagtccagatcgatgccaccgaaggcaacaaggtgattactttgagatcacctttgcagattaagaaccacttttcaatcgcctttatcatctacaaattcgtaaagaacgtgaagctgctagagaggatcggaatcgcacgccccgaggaagagttccatgtgccgctggacagttatcggtgccaattgtttattcaaccggcgggaatattagaacaccagtataaggagagtacaacctatataagttggaaagaggaactgcatcggtccagggaggttcggtgtatgctgcagtgtccgagcgttgaggtctcttttctgccactgatagtcaacacagtggcgctgcccgacgaactgtcttacatttgtacacacggcgaagattgggatgtggcctatatcattcacctgtaccccagcctgactctccgtaatctgctgccttacagccttcggtatctcctggagggaacagcagagacccacgagttggcagaaggttctacggcggatgtgctccattcccgcattagcggggaaatcatggagctggtgttggtgaagtaccagggcaagaactggaatggccactttcgaatccgagataccctgccggagttctttcccgtgtgctttagtagtgattctactgaagtgaccaccgtggacctgtctgtccacgttcgcagaatcggctctcgcatggtcctgtctgtttttagcccttactggctcatcaataagactacacgagtactccaataccgctcagaggacatccatgtaaagcacccggctgattttagagacataattctgtttagctttaaaaaaaaaaatatttttaccaaaaataaagttcagttgaagatctctacaagtgcatggtcttctagcttttcgttagatacggtggggtcttatggttgtgtgaaatgtcccgccaacaatatggagtacctggtcggggtgtctatcaaaatgagcagctttaatctctcgagaattgtgaccctcactccgttctgtactatcgcgaacaaatccagcttggaactggaggtgggcgaaattgccagcgacggctctatgcccacaaacaaatggaactacatcgcttcatcagagtgcctgcccttttggccagaatcactgtccggaaagttgtgcgttagggtcgtgggctgcgaaggctcttcaaaaccctttttttataataggcaggacaacgggacattgttgagcctggaggatttaaatgggggcattctcgtggacgtcaacaccgccgagcactctactgtgatcacattcagcgattaccacgaaggctccgccccagccttgattatgaaccatacgccttgggatatactaacttataaacagagcgggagtcccgaggaaatggtgttactcccgcggcaggctcgtttgttcgcgtgggccgatcccaccggtacccggaaactgacctggacatatgccgctaatgtgggcgagcacgacctcctcaaggatgggtgcgggcaattcccctacgatgctaatatccagatccactgggtgtccttcctcgatggccgtcagcgggtcctgctgttcactgatgacgtcgctctcgtctcaaaggctctgcaggccgaagaaatggaacaggctgattacgagattactcttagcctgcattcactgggattgtctctggtgaacaacgaatcaaagcaggaagttagttatatcggcattaccagcagtggggttgtatgggaagtcaaaccaaagcagaagtggaagccgttctcccagaaacagattatcttgctggaacagtcttatcagaagcaccagattagtcgggatcacggatggataaagctggacaacaatttcgaagtgaactttgataaagaccctatggagatgcggttgccgatccgtagcccaatcaaacgcgacttcttgtccggcattcagatcgagtttaagcagagcagccaccagcgatccctgcgcgcccggctgtactggctgcaggtggacaaccagctgccaggggcaatgttcccagttgtgtttcacccagtagcccctcctaaatctattgccctggattctgagcctaagcccttcattgatgtaagcgttattacaaggtttaatgagtacagtaaagttctgcagttcaagtatttcatggtgctgatccaagaaatggctctgaagatcgaccagggctttctcggagccattatcgcccttttcacccctactactgaccctgaagccgagcggaggcggacaaaattgatacaacaagatatcgatgctctgaatgccgagctgatggaaacctcaatgacggatatgagcattcttagcttttttgaacattttcatatctcgccagttaagctgcacctctccctcagcctcggaagcggcggcgaagaatctgacaaagaaaaacaggagatgtttgccgtgcatagcgtgaaccttctcctgaagtccattggtgctactctcactgatgttgacgacctgatatttaagctggcctactatgaaattcgttatcaattttacaaaagagatcaacttatttggtccgttgtacggcattactccgagcaattcttaaagcaaatgtacgttctggtgctgggccttgacgtgctgggaaatccgtttggcctcatccgagggttgtccgagggagtcgaggccctgttctatgaaccatttcagggggccgttcaaggccctgaggagttcgcagaaggactagtgattggtgtccgcagcttattcggccacactgtagggggggcagctggggtagtgtcccggatcacagggagcgtgggcaagggtctcgcagctataacaatggataaggaataccagcagaaacgccgtgaggaactgtctagacaaccccgtgactttggcgactcactggcacgcggcggaaaggggtttctaaggggggtggtgggaggcgtgacaggaatcattaccaagcctgtggagggtgccaaaaaggaaggagctgccgggttcttcaagggaattgggaaaggactcgttggagccgtggccagaccaacaggtgggatcgtggatatggcatcaagtacctttcaaggcatccagagggccgccgaaagtacagaggaggtttcctctctgcgccctccccggctcatccacgaggacggaataataagaccctacgatcgacaagaatccgaaggctcagatttactggaacaggaattggaaattcaagaatag

SEQ ID NO: 194521 - DNA, 11133 bp, Artificial Sequence
  derived and/or modified sequence
atggtgctcgaatcagtcgtggccgatctcctgaatcgcttcctgggtgattatgtggagaatctgaataagtcacaattaaagcttggaatatgggggggtaatgttgcactcgacaacctacagattaaggaaaacgctctctctgagcttgacgtgccattcaaggtaaaagccggacaaattgacaagctgacgttaaagattccctggaaaaatctctacggagaggccgttgtggccaccctggaaggattatatcttctggtcgttccgggagcttccatcaagtatgacgctgtcaaggaggaaaagtccctgcaggacgtgaaacaaaaagagctgtcccgtatcgaggaagcattgcaaaaagccgctgagaaagacaagccgaaggaagccaagaaggacaccttcgtggaaaagctcgctacacaggtgattaagaacgttcaggtgaagataaccgatatacacattaagtatgaggatgatgtcacggaccccaaacggccattgagcttcggcgttacccttggtgaacttagtctgctcacagctaacgagcattggaccccctgcatcctcaacgaggctgacaagattatttataagttaatacgcctcgactctcttagtgcatattggaacgtaaattgctcaatgagttaccagagatcacgggagcagatattggaccagctgaagaatgaaattctaacttcagggaacataccacccaactatcaatatatctttcaacctatttctgcttccgcgaagctgtacatgaatccttatgctgagtcagagttgaaaacaccgaaattggactgtaatattgagatccagaatatcgccatcgagctcacaaagccccagtacctgtcaatgattgatctgcttgaaagcgtggactatatggttcgcaatgcaccatatagaaaatacaaaccctacttgcctcttcacactaacggccgaagatggtggaaatatgctatcgatagtgtgcttgaggtgcatatcagacgatatacacagatgtggtcttggagcaacatcaagaaacatcgacagctgctgaagtcatacaagatcgcttataaaaacaagcttacacaatccaaggttagtgaggagatacaaaaggaaattcaggaccttgagaaaacattggatgtcttcaatattatccttgcgaggcagcaggctcaggtggaggtaattcgatcaggccagaagttacggaaaaaaagtgcagatacaggagagaaacggggaggctggtttagcggactgtggggcaaaaaagagagcaaaaagaaggatgaagagagtcttatcccggaaactattgacgatctgatgacaccagaggaaaaggacaagctctttacggcaatcggctatagcgagagcacccataacctgacactccccaagcagtatgtggcccatatcatgaccctgaagctagtgagcacgtcagttacaattagagagaacaaaaatatacccgagatcttgaaaattcagataatcggactgggcacccaggtctcccaaagaccaggcgctcaggccctcaaggtcgaggccaagttggagcattggtacatcaccggccttcgacagcaagacatcgtgccctcactggttgcctccataggggacacaacttcctctctgctcaaaatcaagtttgagaccaacccagaggactctcctgcggaccagacattgatcgtgcaaagccagccggttgaagtcatctacgatgcaaagacggtgaacgcagtggttgaattcttccagagcaacaagggcctggacctggaacagatcacctcagccacgttgatgaagttagaggagattaaggagaggaccgcgacgggactgacccacatcatcgagacacgaaaagtactggatctgcgtatcaacctgaaaccaagctacctcgtggttccccaaaccggcttccatcacgagaaaagcgacctgcttatactcgactttggcacttttcagttgaacagcaaagaccagggcctgcagaaaacgactaactcgtccctcgaggagatcatggataaagcatacgataaattcgatgtggagattaagaacgtgcagttgctgtttgccagagctgaggaaacttggaagaagtgtagatttcagcatcctagcacgatgcatattctgcaaccaatggacattcatgtggaactggctaaagctatggtggagaaagatatccgaatggccaggttcaaggtaagtggaggcctgcctttaatgcacgtgcgcatcagtgaccagaaaatgaaggatgtgctttatctaatgaacagcattccacttccccagaagagctctgcacagagcccagagcggcaagtgagctctatacccattatatcaggcggaaccaaggggctgctgggcaccagcttgctactagataccgtggaatccgagtcggatgacgagtattttgatgcagaggacggggaaccgcagacgtgcaaaagcatgaaagggagtgagctgaagaaggcagctgaagttcccaatgaagaacttatcaatctgctgctaaaatttgaaataaaagaggtgattttggaattcaccaagcagcagaaagaagaggatacgatactggtgttcaatgtgactcagctcggcacggaagccactatgagaacttttgatctcaccgtggtaagttatctgaaaaaaatctcgcttgattaccacgaaatagaaggcagtaagcggaagcctctacacctgatttctagcagcgataaacccggactcgatctgcttaaggtggagtacatcaaggctgacaagaatggcccatcgttccaaaccgcctttggtaagactgaacaaaccgtcaaggtggccttttccagcctcaacctgctgctccagacccaagctttagtcgcgtcgatcaattatctcaccacgataattccctccgacgatcagagcatctcagtggcaaaggaggtccagatctccactgagaagcagcagaagaatagcactctgcctaaggcgatagtgtcaagtagggatagcgatatcatcgattttcggctattcgccaagctaaatgcgttttgcgtgatcgtgtgtaatgagaagaataatattgcagagatcaagatacagggcctcgactcgagcctttcactgcaaagccgcaagcagagcctatttgctcgtctggagaatatcatagtgacagacgtggaccctaagacagtccataaaaaggctgtgtctatcatggggaatgaggtgtttcggttcaatctggatctctaccccgacgccactgaaggggatctttatactgatatgagcaaggtagacggagttctgagcttgaacgttgggtgcatccaaatcgtgtatctccacaaattcctgatgtctctgctgaactttctgaataatttccagacagctaaagagagcctgtctgccgcaacagctcaagcggcagaacgggctgccacgtcagtcaaggatctggcgcagaggagctttagggtgagtatcaacatcgacttgaaagcaccggtgatcgtgatccctcaaagctctatcagtaccaatgccgtggttgtcgacttaggcctgattcgcgtgcacaaccaattctcccttgtatcagatgaggattacctgaacccacccgtgattgacagaatggatgtacagctgaccaaactcacgctgtaccggaccgtgatccagcccggaatctatcatcccgacatacagttactccatcctatcaatctggagtttttagttaacaggaacttagccgcttcctggtatcataaggtgccagtggtcgaaataaagggccacctcgactctatgaacgtgtccctcaatcaggaggatctaaatttgctgttccgaatcctgacagaaaacctgtgcgagggtacagaagatctggacaaggtgaaaccacgggtgcaggaaacaggggaaattaaagagcccctcgagatttctattagccaggatgttcatgattctaagaataccctcactaccggggtagaagaaattcggtccgtggatattatcaatatgttattgaatttcgagattaaggaggtggtggtgacactcatgaagaaatccgaaaagaagggcaggcccctacacgaactgaatgttctgcagctgggtatggaagctaaagtgaaaacgtacgatatgaccgccaaagcctaccttaagaaaattagtatgcagtgtttcgacttcaccgacagtaaaggagagccattacacattatcaatagcagtaatgtcaccgacgaaccgcttcttaagatgctcctgactaaagcggatagcgacggcccagaatttaagacaattcacgacagcacgaagcagaggctgaaggtgagctttgcttcactcgatctggtcctgcatctggaggcgctcctgtcatttatggacttccttagcagcgccgcaccctttagcgagccttcgagttccgagaaggagtcagagctgaaacctctggtcggcgagtccaggagtattgccgtcaaggcagtatctagcaacatcagccagaaagacgtgttcgatttgaaaatcacagcggaacttaatgcgttcaacgtattcgtctgtgaccagaaatgcaatattgctgacataaaaatacacggcatggacgcctccataagtgtgaagcccaagcaaaccgatgtatttgcacgtctgaaggatattatcgtgatgaatgttgaccttcagagtattcacaaaaaagccgtgagtatcctgggcgatgaggtctttaggttccagttgacgctttatcctgacgccacggagggcgaggcatacgccgatatgtctaaggttgacggtaagctgagcttcaaggtgggatgcatccagatcgtgtacgttcacaaatttttcatgtcactactgaatttccttaataatttccaaacggccaaggaggccctgagtaccgccactgttcaggctgccgaacgggcagcatcctccatgaaagatctggcacagaagtcctttcgccttcttatggacattaatcttaaagcaccagtgatcattatcccgcaatcctctgttagccccaatgctgtcatcgccgacctcggcctcatcagagtggagaataagttcagcctcgtcccaatggaacattacagtctaccacccgtgatcgacaagatgaatatagagcttacacaactgaagctctccaggactatcctgcaagcctctttacctcagaacgatatcgagatcctgaagccagtgaacatgctcctcagtatccagaggaacctggcagccgcatggtacgttcaaataccaggaatggagataaagggtaagctgaagccaatgcaagtggctttgagcgaagatgacttaacagtgttaatgaagatcctccttgaaaatctcggcgaggcctcttcacagcctagtcctacccagagcgtccaggagaccgtacgggtgcggaaggtggacgtcagctccgttcctgaccatctaaaagagcaggaggattggacagacagcaagctgtctatgaatcagatcgtgagcttgcagttcgatttccacttcgaaagcttgagtatcatactgtataataatgatatcaaccaagaaagcggcgtggcattccacaatgactcctttcagctcggggaacttcggctgcatttaatggcctcgagtggtaagatgtttaaagacggcagcatgaacgtttccgtgaagcttaaaacttgtaccctggatgacctgcgagagggcattgagagagctaccagcagaatgattgataggaagaacgaccaggataacaattcctccatgattgacatctcctataagcaggacaaaaatggctcccagatcgacgccgtcttggacaaactctacgtctgcgcgtccgtggagttcttaatgaccgtggccgacttcttcatcaaggcagtcccccagtcgcccgagaatgttgccaaagaaacgcagatcctgccgagacagactgctaccggcaaagtcaaaatcgagaaggacgattccgtcagaccaaatatgactttgaaggcgatgattacagaccctgaggtggtgttcgttgcctccctgactaaagccgacgccccagcactgacagcctcattccagtgtaacctgagtctgagcacgagcaagctcgagcagatgatggaggcttctgtgagagacctcaaggtactggcctgccctttcttgcgggaaaaacgtggtaagaatattaccacggtcctacaaccatgtagtctcttcatggagaagtgtacatgggcctccggaaaacagaacatcaatatcatggtgaaggagtttattattaagatctccccaatcatcctaaatacagtgcttaccattatggcagctctgtccccaaaaacgaaggaagatggatcgaaggacacctcgaaagaaatggagaacctttggggaatcaagtctatcaacgattacaacacctggtttttgggtgtcgacaccgccactgaaatcacagaaagctttaagggaatcgagcactcattaatcgaggaaaactgtggtgtcgtggtggagtcaatccaggtgaccctcgagtgcggcctggggcatagaaccgtgccgctgctgctggccgagagcaagttcagcgggaatatcaagaactggacttcccttatggcggcagtggccgacgtaacccttcaagtacattattataacgagattcacgccgtgtgggagcccctcatagaacgggttgagggaaagagacaatggaatctccgtctggacgtgaagaagaacccagtacaggataagtctttgctgcccggagacgattttattccagagcctcagatggctatccatatcagtagcggcaacaccatgaatataactatatccaaatcttgtttgaatgtgtttaataatctggcgaagggcttcagtgaaggtacagcctcaacattcgactatagcttaaaagaccgagcgcctttcaccgtgaagaacgccgtgggcgtacctatcaaggtcaaacctaactgcaatctgcgagtgatggggttccctgaaaaaagcgatatcttcgatgtcgatgccggtcagaatcttgaactagagtacgccagtatggtgccttcgtctcagggaaacctgagcatactgagccgacaggaatcatctttctttactctgactattgtgcctcacgggtacaccgaggttgctaatattccagtggcccgtcctggaagaagactgtacaacgtgcgcaaccccaacgcttcgcacagtgatagcgtgctcgtgcagatcgacgccacagagggcaacaaggtgatcaccctgcgatcacccctgcagatcaagaatcatttttctatcgcatttattatttataagtttgttaagaatgtcaagctgctcgagcgaataggcatcgctcgtcctgaagaggagttccatgtcccactcgattcctacaggtgtcagttatttatacagcctgccggtattctcgagcatcagtacaaagagtccactacgtacatcagttggaaagaagagctgcaccgctcccgggaggttcgttgtatgttgcaatgtccaagcgtggaagtgtcattcctgcctcttattgtaaacaccgtggcactacctgatgagttatcttacatttgcacccatggggaagactgggatgtggcatacatcatccacctgtacccaagcctgaccttacggaacctgctcccatattcgctgaggtatctgcttgaaggcacggcagaaacacacgagctggccgaaggaagcactgctgatgtactgcattctcgaatcagcggcgagataatggagttggtcctagtcaaatatcagggcaagaattggaacggccattttaggataagggacacccttccagaattcttcccagtatgcttcagcagtgacagtaccgaagtgactacagtggacctatctgttcatgtgagaagaataggctcccggatggtgctgtccgtgttctcaccctactggctgattaataagactacccgtgtgctacagtaccggagcgaggacattcacgtgaagcatcccgcagactttcgggatattattctgttctcgtttaaaaagaagaacattttcacaaagaataaagttcagcttaagatcagtacatccgcatggagctcatctttcagcctggatacggtgggctcctacggctgcgtcaagtgtcctgcaaataacatggaatatctggtgggagtttcaattaagatgtcatcctttaatctttcccgcatcgtcacactgacccctttctgtacaattgcaaacaagtcttccttagaacttgaggtgggggagatcgccagcgacggttcaatgccgaccaacaagtggaattacattgcgtccagtgagtgtctgcccttctggccagagagcttgtccggaaagctttgcgtgcgcgtggttggctgcgagggttccagcaagccattcttctataataggcaagacaacggaactctgctctcactggaggacctgaacggaggaatcctggtggatgtgaatacagccgagcattcaactgtgattaccttttctgactatcacgaggggagtgctcctgccctgattatgaatcacaccccatgggacatcttgacctataaacaaagtggatctcccgaggaaatggttctcctccccaggcaagccagactgttcgcctgggccgatcccaccggcacacgaaagctcacctggacctacgccgctaacgtgggcgaacacgatctcctgaaggacggttgcgggcagtttccatacgacgcaaatatacagatccactgggtgagcttccttgacggacgccagagagttctgctcttcaccgatgatgtggccctggttagcaaggcgctgcaggcagaagagatggagcaggctgattacgagattacactttcactccactcgttggggttaagcctcgtcaacaatgaatccaagcaagaagtttcctatatcggcatcacctcaagcggggtggtgtgggaagtaaagccaaaacagaagtggaaacccttctctcagaaacagattattctgctggaacagagttatcaaaaacaccaaatttctagggaccacgggtggatcaagttagataacaattttgaggtgaatttcgataaggaccccatggagatgcggctgcccattcgttcaccaatcaagcgggacttcttgtccggtattcaaatagagttcaagcagagcagccatcaaagaagtctgagagcgaggttgtactggcttcaggtggataatcagcttccaggcgctatgtttccggtggtgttccaccccgtggctccgcctaagagcattgccttagattccgagcctaaaccgttcattgacgtgtccgtgattactagatttaatgaatactccaaggtcctgcagttcaaatacttcatggttctgatacaggaaatggcactgaagatagatcaggggttcctgggggcaatcattgcattgtttacgcctaccaccgacccggaagcggaaaggagaaggactaagttgatccagcaggacatcgatgcgctcaacgctgaactgatggagacaagcatgactgacatgagtattctctccttcttcgagcactttcacattagccccgttaagctgcatctcagtttgtctctgggctccggcggtgaagagagcgacaaggaaaaacaagaaatgttcgccgtgcatagcgtcaatttgctgctgaagtctatcggagccacactcaccgacgtggacgacctaatcttcaaacttgcctactacgagattcggtatcagttctataaacgcgaccagctgatatggagcgtcgtgcgccactatagtgagcagtttcttaagcagatgtatgtgctcgtgctcggattggatgttctgggtaatcccttcggtctgatccgcggactgagcgaaggcgtggaggctctcttttacgaaccatttcaaggcgctgtgcagggccctgaagagttcgctgaaggactcgttattggcgttcgcagcctgtttggtcacactgtaggaggcgctgcaggggtcgtgagccgtataactgggtcagtcggcaagggcttagccgcaatcacaatggataaagaatatcaacaaaaacgcagggaggagctcagtcgtcaacccagggacttcggggatagcctggctaggggcggtaaaggattcctccgcggagtggtggggggtgtaactggcatcatcacaaagcccgtggagggcgctaagaaggagggggctgctggcttttttaagggtattgggaagggattggttggagcagtggctcggcctacagggggtatcgtcgatatggcgagttcgactttccaagggattcaacgcgctgcagagtctaccgaagaggtaagtagtctgaggccgccaaggctcattcatgaggacggtatcattagaccgtacgatcgccaggaatctgagggctcggatctgcttgaaaatcacattaaaaagcttgaaggcgagacataccgttaccactgcgctataccaggcagcaaaaaaacaatactcatggtgacaaatcgtcgcgtgctgtgcatcaaagaggtcgaaatcctgggcttgatgtgtgtggattggcagtgtccatttgaagatttcgtattccctccaagtgtctccgaaaatgtgcttaagatcagcgtgaaagagcagggcctctttcacaaaaaggatagcgcaaaccagggctgtgtgaggaaggtgtatttaaaggataccgcaacggccgagagagcctgcaacgctatcgaagacgcacagtccacgaggcaacagcagaaactgatgaagcagtcttcggtaagactgctgcgccctcagctcccttcttag

SEQ ID NO: 194522 - DNA, 10758 bp, Artificial Sequence
  derived and/or modified sequence
atggtgcttgaatctgtagtggccgacttgctgaataggtttctgggtgattatgtcgagaacctgaataagtcccaactgaagctgggtatctggggcggaaatgtggcactggataacctgcagatcaaagagaacgccctgtcagagttagacgtcccattcaaagtgaaagctgggcagatcgacaagttgaccctcaagattccatggaagaatctttacggcgaagctgtcgtcgcgaccttggagggcctttacttgctcgtggtccctggagcctcaattaaatacgatgctgtcaaagaagagaagagcttgcaggacgtcaagcagaaggaactttcccgtatcgaggaggctcttcaaaaagccgctgagaaagataagccaaaagaggctaagaaggacactttcgtggagaagctggccacccaggttatcaagaatgtgcaggtcaaaatcaccgatattcacatcaaatatgaggacgacgttactgatcctaaacgcccactgagctttggagtgacgctgggagaactgagcctgctgactgccaatgagcattggacaccctgcattctgaacgaggccgataagatcatatacaagctgatcagattagacagcctttctgcatattggaacgtgaactgctcaatgtcctatcagagaagccgcgagcaaattctggaccagctgaagaacgaaatactaacatccggcaacataccgcctaattaccagtacatttttcagccgatttcagcgagtgctaaactgtacatgaatccttacgccgagtctgaattgaagacccccaaactggattgtaacattgagatacaaaatattgcaatcgagctgaccaagcctcagtatctatccatgattgatctgcttgaaagcgtggattacatggtccgcaacgcgccttataggaaatacaaaccctatctgccattgcacactaacgggagacgctggtggaagtatgctattgattcagtgcttgaggtgcacatacgaagatacacccagatgtggtcctggtcaaacattaaaaagcaccgccaattactcaaatcatataaaatcgcctacaagaataagctgactcagtccaaggtttcagaagagatccagaaggagatccaggacttggagaaaactttggatgtttttaacataatcctagcccgtcagcaagcccaggtggaggttattagatccgggcagaagctcagaaagaaatctgcggacactggagaaaagcgcggagggtggtttagcgggctgtggggaaagaaggaatctaagaagaaggacgaagagagcctgattccagaaactattgacgacctcatgactcctgaggagaaagacaagctgttcacagccatagggtactccgaaagtactcataacctgactctcccaaaacaatatgtagcacacattatgactctcaaactggtcagtacctcagtgactatccgggagaacaagaacatccctgaaatactgaaaattcagatcatagggctgggtacccaggtttcccagagacctggagcccaggccctgaaggtggaagcaaagctggagcactggtacatcaccggacttcgacagcaagacatcgtgccttccctggtcgcttccatcggggacactacatcatccttgctgaagatcaagttcgaaacaaatcccgaggactctccagctgatcagacgctgatagtgcagtctcagccagtggaagtcatctatgacgcgaagacggtaaacgccgttgtggagtttttccagtccaataaaggcctcgatctggagcagatcacgtccgctacactgatgaaattggaggagatcaaagagcgaactgcgacggggttaacccacattatagaaacgaggaaagtcctcgacctcagaataaatctgaagcccagctacctcgtagtgccccagacaggcttccatcacgaaaaaagtgacctattgatccttgactttgggacatttcagctgaatagcaaggaccagggattacagaagacaaccaactcttcactggaggaaatcatggacaaagcctacgacaagttcgatgtggagatcaagaatgtgcagctgctgttcgctcgagctgaggagacttggaagaaatgtcggtttcagcatcccagcacaatgcacattctgcagcctatggacatccacgttgagctcgccaaggccatggtggagaaagatatcaggatggcgagattcaaggtctccggcggtcttccgctaatgcatgttaggattagcgatcagaaaatgaaggatgtgctgtatctgatgaacagtattccactgccccagaagagctccgctcagagccccgagcgccaggtaagctccatccctattatcagcggcggaaccaaaggcctcttggggacaagcttgttgctggataccgtggaaagcgagtccgacgatgagtacttcgatgcagaagatggcgaaccccagacatgtaagtctatgaagggctcagaactcaagaaggcagctgaggtgcctaacgaagagttgatcaaccttcttctcaaattcgaaatcaaggaggttatcctagaattcacaaaacaacagaaagaagaagatactattctggtgtttaatgtgactcaactgggcacagaggctactatgagaacttttgacctcaccgtggtgtcctacctaaaaaaaatctccttggattaccacgagattgaaggaagtaagcggaagcccctccatctgatatcatcaagtgataagccaggccttgacttattgaaagtggagtacattaaggccgataagaatgggccttccttccagactgcatttggtaagaccgagcagaccgtgaaagttgccttctcttcgctgaacctactactgcagactcaagcacttgtggcctccataaactaccttacaacgattattcccagcgatgaccaatcaattagtgtcgccaaggaagtccagatctctaccgaaaaacaacagaagaattccacactgcctaaggctatcgtgtcttcaagagatagcgatataatcgacttccggctatttgctaaactcaacgccttctgcgtaattgtgtgtaacgagaagaataacatcgcagaaatcaaaatccaaggtttggactcatctctgtcgctgcagagtagaaaacaatctctatttgcgaggttagagaacattattgtgaccgatgtagaccccaagaccgtgcataaaaaggcggtcagtatcatgggaaatgaagtctttcgcttcaacttggacctttaccccgatgctacagagggcgatctctataccgatatgtccaaagtggatggagtgctgtcactgaacgtcggctgtatacagattgtttacttacacaagtttctcatgagtctgttgaacttcctgaacaactttcagaccgccaaggagagcctgtcagcagccaccgctcaggctgccgagcgggcagctacatctgttaaagaccttgcacagcgcagctttagggtgtctatcaacattgacctcaaggctcccgtgatcgtcatccctcagtctagcattagcactaacgccgttgtggtggacctaggcttaatccgggtgcacaaccagttttcactggtgtccgacgaggactacctgaacccgcctgtgattgatcggatggacgttcaactgactaagctgaccctttacagaacggtcatccagccagggatttatcacccagacatccagctcttacatcccattaacctcgagttcctcgtcaataggaacttggccgcttcttggtatcacaaggtacctgtcgtagagatcaaagggcatctggactctatgaatgtctctttaaatcaggaggaccttaacctactgtttagaatccttacagagaacttatgcgaaggtaccgaagatctggacaaggtgaagcccagagtgcaagagactggcgaaatcaaggagccactcgagatctcaatctcccaagacgtccatgatagcaagaacaccctgactaccggggtagaggagatccgtagtgtggatattatcaacatgctcttgaactttgaaattaaggaagtagtcgttacacttatgaaaaagtccgaaaaaaaaggaagacccctccacgagctgaatgtactccaactgggcatggaggccaaagtgaagacatatgatatgaccgctaaggcttatttaaaaaaaatatccatgcaatgctttgattttacagattccaagggtgagcccctgcacatcattaattcatctaatgtgaccgacgaaccattgctgaaaatgcttttgaccaaagctgactcagacggcccagagttcaagacaatccacgatagcactaaacagagactcaaggtctcatttgcctccctggacttggttctgcatctcgaggccctgttatcgtttatggatttccttagctccgccgctcctttcagtgagccatctagttcagagaaggaaagtgaacttaaacctctggtcggagaatcccggtccatagcagtcaaggcagtatcttcaaacattagccagaaagatgtctttgacttaaaaattacagctgagctcaatgccttcaacgtgttcgtatgcgatcagaaatgtaacattgcagacatcaaaatccatggaatggatgcctcaataagcgtgaagccgaagcagaccgatgtcttcgccaggcttaaagacatcatcgtcatgaatgtggacttgcagagcatccacaagaaagctgtctcaatcctgggagacgaagtgttcagatttcagctcactctctacccggatgccaccgaaggcgaggcatatgcggatatgtctaaggtggacggtaagctttccttcaaggttggctgcatccaaatcgtctatgttcacaaattcttcatgtcccttctgaacttcctcaacaattttcagaccgctaaggaagcactgtctacggcgaccgtgcaggctgcggagagggctgccagcagtatgaaggacctggctcagaagtccttcaggctgctgatggacataaacctgaaggccccagtgatcatcattccccagagctccgtttctccgaacgccgttatagcagatctgggcctgattcgtgtggagaacaagttcagccttgtgccaatggagcattattcgctgccgccagtcattgacaaaatgaacatagagcttacacagttaaagcttagcagaactattttacaggcctctcttcctcaaaatgacatagaaatcctgaagccagtgaacatgctgctgagcattcagagaaacctggctgctgcctggtacgtacagatccctggcatggagatcaaaggcaagctgaaacccatgcaagttgctctctctgaggacgacttgaccgtgctgatgaagattctgttagagaacctaggggaggctagtagccagccctcaccaacccaatctgtccaagaaacagtgagggtgcggaaggtcgatgtttcatcggttccggatcatttgaaagagcaagaggactggacagattcaaagctctctatgaatcagatcgtgtcacttcaatttgacttccacttcgaaagcctgtcaattatactgtataacaatgatatcaatcaggaatccggagtggccttccacaacgatagtttccagctcggtgagcttcggctgcatctcatggcaagtagcgggaaaatgtttaaggacggaagtatgaacgtgtccgtaaagctgaagacctgtacgctcgatgatttgagggagggaatcgaacgcgcaacaagtcgcatgattgacagaaagaacgaccaggacaataattcatccatgatcgatattagctacaaacaggacaagaatgggagccagatcgacgctgtgctcgataagctctatgtgtgcgccagtgtggagtttctgatgaccgtggcagacttcttcataaaagctgttccgcagtccccagagaacgtggccaaggagacccaaatcctacccagacagacggccacaggaaaagtgaaaattgaaaaggacgacagcgtgcgacccaacatgaccctgaaggcaatgattaccgacccagaggtcgtattcgtggcctctctgacaaaagcagatgccccagccctcacagctagtttccagtgtaacctgtctcttagtaccagtaagctagagcagatgatggaggcctccgtccgggatctgaaggtcctggcctgcccattcttacgagagaaaagaggaaagaatatcacaaccgtgctccaaccatgttctctattcatggagaagtgcacttgggctagtgggaaacagaacattaacatcatggtgaaggaatttatcatcaaaatttcacccatcatcttgaatactgtgctgacgatcatggcggctttgtctccaaagacaaaggaagatggctccaaggataccagcaaggagatggaaaacctgtgggggatcaagtccataaacgactacaacacatggtttctgggagtggatacagccacagaaattaccgagtcctttaaaggcatcgaacactcactgatcgaggaaaattgcggggtcgtcgttgagagcatccaggtgaccctcgagtgtggactggggcacagaaccgtgcccctgttactggcggaaagcaaattttctggtaatatcaagaactggacatctctgatggctgcagttgcggatgttacccttcaggtacactactataacgagatacacgccgtctgggaacccctgatcgagagagtagagggcaagaggcagtggaatttgaggttggacgttaagaagaatcccgtccaggataagagtttgctgcccggagatgactttattcccgaaccacagatggccatccatatctcaagcggaaacactatgaacatcactatcagcaaatcatgtttgaatgtgtttaacaatctggccaaaggatttagtgagggtaccgcaagcactttcgattattccttaaaagaccgagcgcctttcacggtcaagaatgcagtcggggtgccaatcaaggtgaagcctaattgcaacctgagagtcatgggctttcctgaaaagagtgacatctttgatgtggatgccggacaaaatcttgagttagagtacgctagcatggtgccttccagccaaggaaatcttagcatcctcagcagacaggaatcctctttctttacccttactattgtcccacatggctacaccgaggtagctaacattcccgttgcgagacctggtcgcagattgtacaatgtgcgcaatccgaacgcaagccacagcgactctgtgctcgtgcagattgacgccacagagggtaataaagtcatcactctacggtccccgttacaaatcaagaatcacttcagtatcgcctttattatctataaattcgtgaagaacgtgaaattactagagcgcattggcattgctcgaccagaggaagaatttcatgtgccgctggactcttatcgttgtcagctgtttattcagcccgcaggcattcttgagcatcagtataaggaatctactacttatatctcgtggaaagaggaactccatcgttcaagagaagtgagatgcatgctgcagtgtccctccgtcgaggtctcatttttacccctaatcgtgaacaccgtggccctgcctgatgagctgagctatatctgcacgcacggggaggactgggatgtggcctatatcattcatctgtaccccagcttgaccctgagaaatctactaccctattcgctgaggtaccttctcgagggaaccgcagaaactcatgaactggcagaagggtccacagctgacgtgcttcacagcagaattagcggggaaatcatggagctggtcctggtgaaatatcagggaaagaattggaacggccactttaggatacgcgatacactccccgagttcttccctgtctgcttcagttctgatagcaccgaagtgactactgtagatctcagcgtccacgtgcgaaggataggaagccggatggtgctgtccgtgttctcgccttattggttgatcaataagacgaccagagttttgcaatacaggagcgaggatatccacgtgaaacacccagctgactttagagacatcatcctgttctcattcaagaaaaagaatatcttcacaaaaaataaagtccagttgaaaattagtacaagtgcttggtctagcagtttttcacttgataccgtggggagctacggctgcgtgaaatgcccggcaaataatatggaatatctggtcggtgtatccattaagatgtctagctttaatctctcccggattgtgacgctgacaccattctgtaccatagcgaacaagtctagtttagagttggaggttggtgagatagcttctgacggcagtatgcccaccaacaagtggaattatatcgcgagtagcgagtgcctccccttctggcccgaaagcttgagcgggaagctgtgcgttcgagtggttgggtgtgaaggtagctccaagcccttcttctacaaccgccaagataatgggaccctcctgtcattggaggacctgaacggcggaatcttagtagacgtcaacaccgccgaacacagtaccgtcatcacattcagcgactatcatgagggttccgcgccagccttgataatgaatcacacgccctgggacatactgacttataagcagtccgggtctcccgaagaaatggttctgctgccccgtcaggccagactgtttgcctgggccgatcctaccggcacccgaaagctgacatggacgtacgcagctaacgttggagagcacgatctgcttaaggacggttgtgggcagttcccatacgatgccaatattcagattcattgggtgtcattccttgatggaaggcagcgcgtcctcctatttactgatgacgtggcgctcgttagcaaggcgttgcaggctgaggagatggagcaggccgactacgaaattacgctgagcctccattccttgggcctgtcacttgtgaacaatgagagtaagcaggaggtatcttacatcggaatcacaagctcgggcgtggtctgggaagtgaaaccaaagcaaaagtggaaaccgtttagccagaagcagattatccttctcgagcaatcctaccagaaacaccagatttcaagggaccatggttggattaaactggacaataatttcgaagtgaattttgataaagacccaatggagatgagactcccaattcggagccccatcaaacgcgacttcctgtctgggatacagatcgagttcaaacagtcatcccaccagcgtagcctgcgagcgaggctgtactggctgcaggtagacaatcagttgcctggagcgatgtttccagtcgtatttcatccagtcgcaccacctaaaagcatcgccctggactcagaacctaagccgtttattgatgtctctgttataacacggtttaatgagtactcgaaagtcttacagtttaagtacttcatggtcctcatccaggagatggccctgaaaatcgatcaggggtttctcggcgctataatagccttattcacccctaccaccgaccccgaagctgagcgaagaaggacaaaactgatccagcaggatatcgatgcactgaacgccgagcttatggagacctcgatgacggacatgagtattttgtcatttttcgagcatttccacattagtcccgtgaaactccacctgtctctgtccctcggcagtggaggcgaagagagcgacaaggaaaagcaggaaatgttcgctgtccacagtgtgaacctgctgctgaagtcgatcggcgcaactctgactgacgtggacgacctgatttttaagctggcctactatgagatacgctaccagttttacaaaagggaccaattgatctggtcagtggttagacattactcggagcagttcctgaaacaaatgtacgtcctggtattgggactcgatgtgctggggaatccttttggtcttatcaggggcctgtcagagggtgtggaggcactgttctatgaaccattccaaggggcagtgcaggggcctgaagaattcgccgagggccttgtgattggtgtcaggagcctatttggccataccgtggggggagcagcgggagtggtgagcaggatcacgggcagcgtcggcaagggactggccgcaatcaccatggataaagagtatcagcaaaagcgcagagaagagctgtctcggcaacctcgagacttcggggacagccttgccagaggaggcaagggatttctgcggggagtcgtgggtggggtaaccgggattatcaccaagcctgtggaaggggcaaaaaaggaaggggctgctggcttctttaagggcatcggcaaagggttggtaggcgctgtggccaggcccaccggcggtattgttgatatggcctcaagcacattccagggcatacagcgcgcagccgaatccacggaggaggttagcagcctgagaccccctaggctgatccatgaggacgggattatacgcccttacgaccgtcaagaaagtgaggggagcgatttgctcgagcaggaacttgaaatacaggaatag

SEQ ID NO: 194523 - DNA, 13300 bp, Artificial Sequence
  derived and/or modified sequence
ggcctgcgccggaggggctgtcatttgcagcgctggtcgcagccctcagctgcgccgggcggttccggctcctccctctccttgtgcctcagcgccaccatggtgctggagtcggtggtcgcggacttgctgaaccgcttcctgggggactatgtggagaacctgaacaagtcccagctgaagctgggcatctggggcggaaatgtggctttagataatctacagataaaagaaaatgccctgagtgaattggatgttccttttaaagtcaaggctggccaaattgataaattaactttgaagattccttggaagaacctttatggagaagcagttgttgcgaccctggaaggattatacctgcttgttgtccctggagcaagtattaagtatgatgctgtaaaagaagaaaaatccttgcaggatgttaaacagaaagagctatcccgaattgaagaagcccttcaaaaagcagcagaaaaagataagccaaaagaagccaaaaaggatacatttgtggaaaaattggcaactcaagtaataaaaaatgtacaagtaaaaatcacagatattcacattaaatatgaagatgatgtcactgatccaaagcggcctctttcatttggtgtcacactgggagagcttagtctactgactgcaaatgaacactggactccatgcatattaaatgaagcagacaaaattatatacaagcttatacgacttgatagtcttagcgcctactggaatgtaaattgcagcatgtcttaccagagatcaagggaacagattttggatcagctgaaaaatgaaattcttacaagtggaaatatacccccaaattatcaatacattttccagccaatatcagcctctgcaaaactctacatgaatccttatgcagaatcagagctcaaaacgcccaaactggattgcaacatagaaatacaaaatattgccattgaactgaccaaacctcagtacttaagtatgattgaccttttggagtcagtggattatatggttaggaatgcgccttataggaaatacaagccttatttaccacttcataccaatggtcgacgatggtggaaatatgcaattgattctgttcttgaagttcatataagaaggtatacacagatgtggtcatggagtaacataaaaaagcacaggcagttactcaagagttataaaattgcctacaaaaacaagttaacacagtctaaagtctcagaagaaatacagaaagaaattcaggacttggagaagactctagatgtttttaacataattttagcaaggcaacaagcacaagttgaggtgattcggtctgggcaaaaattaaggaaaaagtctgctgacacaggcgagaaacgtggaggctggtttagtgggttgtggggtaagaaagagtctaagaaaaaggacgaagaatcattgattcctgaaactattgatgaccttatgactccagaggaaaaagataaactcttcactgccattggttatagtgagagtacccacaacctaactttacctaagcagtatgttgcccatattatgaccctgaagttagtaagcacctctgttacgataagagaaaacaagaatattccagaaatactaaaaattcagataattggcctgggcactcaagtatctcagcgaccaggagcacaagcacttaaggtagaagcgaaattagaacactggtatataacaggtttgagacagcaggatattgtgccatcacttgtggcttcaattggtgacactacatcatccttgcttaaaattaaatttgaaaccaatccggaggatagtcctgctgaccagactctgattgttcagtcccagcctgtggaggtcatctatgatgctaaaactgtcaatgcagtggttgaattctttcaatcaaataagggattggatcttgagcaaataacatcagcaacattgatgaagctggaagaaattaaggagagaacagctacaggacttacacatattattgaaactcgaaaagtccttgatttaaggataaatctgaagccttcttatctagtagttccacagacgggtttccaccatgaaaagtcagatcttctgattttagattttggtacatttcagctcaacagtaaagatcaaggtttacagaagactactaattcatctctggaagaaataatggataaggcatatgacaagtttgatgttgaaataaaaaatgtacaactactttttgcaagagcagaggaaacctggaaaaagtgtcgatttcagcatccatcaactatgcatatattgcaacccatggatattcatgttgagttggctaaggccatggtagaaaaagacattagaatggccagatttaaagtgtcaggaggacttcctttgatgcatgtgagaatttctgaccagaagatgaaagatgtgctatatttgatgaacagtatacctttgccacagaaatcatcagcccagtctccagagagacaggtatcctcaattcctattatttcaggtggtacaaaaggtctacttggtacttcactattgctagacactgtggaatcagagtctgatgatgagtattttgatgctgaagatggagaaccacagacttgtaaaagtatgaaaggatcagaacttaaaaaagctgcagaggtcccaaatgaggagctcatcaatcttctactcaagtttgaaattaaagaagtgattttggaatttactaaacagcagaaagaagaagatacaattctagtatttaatgttactcagttaggaacagaggccacaatgagaacatttgacttaactgtggtatcttatttaaagaaaatcagcttggattatcatgaaattgaaggatccaaaaggaagccccttcacttgattagctcttctgacaaacctggattagatcttttgaaagtggagtatattaaggctgataagaatggacctagttttcaaactgcttttggaaaaactgaacaaacagttaaggtggccttttcatctttaaatctgttgctgcaaacacaagctcttgtcgcttctattaattacctcacaaccattattccatctgatgatcaaagcataagtgttgctaaggaggtacaaatttcaactgaaaaacaacaaaaaaattcaactctgccaaaagcgattgtatcctccagagatagtgacattattgatttcaggctatttgccaagttgaatgctttctgtgtcattgtttgcaacgaaaagaacaatatcgccgaaatcaagattcaaggactggattcctccctttctctccagtcaagaaagcagtcactttttgcccgactagaaaatattattgtcacagatgttgatccaaagacagttcataagaaagctgtgtcaataatgggaaatgaagttttccgttttaatttggatttgtatccagatgctactgagggggatttgtatactgacatgtccaaagtggatggtgtgctgtctctgaatgttggctgtattcagattgtctatcttcataaattccttatgtcacttctgaacttcctgaataatttccagacagccaaagagtctctgagtgctgccactgcccaggctgcagaaagggctgccacaagtgtgaaagatcttgcccagaggagttttcgtgtttccatcaatattgatttgaaagcaccggttatagtcatcccacagtcttctatttccaccaatgcagtagtggtagatcttgggttaatcagagttcataatcagttcagtctggtgtctgatgaagactacttaaatcctccagtaattgatagaatggatgtgcagctaacaaagcttacactttataggacagtgatccagccaggcatctaccatcctgatattcagctgttgcacccaattaacttggaatttcttgtaaatcggaatctagctgcatcttggtaccacaaggtgcctgttgtggaaattaaaggacatcttgattcaatgaatgttagtctaaatcaagaagatcttaatcttttatttaggatactaacagaaaatctctgtgagggtactgaagacttggataaagtgaaaccaagagtacaagagacaggtgaaattaaagagccccttgaaatctctatatcacaagatgtacatgattcaaaaaatactttaacaactggagtggaagaaattaggtctgtagacatcattaatatgctgctgaattttgaaattaaagaggttgtggttactttgatgaaaaaatcagaaaagaaaggaaggcctttacatgagctaaatgtcctgcaacttggaatggaagctaaagttaaaacctatgacatgactgctaaagcttatctaaaaaaaattagtatgcagtgctttgatttcactgactctaaaggggaacctcttcacattattaactcttctaatgtgactgacgaaccccttctgaaaatgttactgacaaaggcagacagtgatggaccagaatttaaaactattcatgacagtaccaaacagagactgaaggtttcatttgcatccttagacttagtacttcatttggaagctttactttccttcatggattttttatcatctgctgctccattctctgagccttcctcttctgagaaggaatccgagctgaaaccacttgtgggggagtccagaagtatcgctgtcaaagctgtatccagcaacatttcccaaaaggatgtgtttgatttaaagatcacagctgaattaaatgcatttaatgtctttgtctgtgatcagaagtgtaacattgcagatattaaaatacatggaatggatgcctctatttctgtgaagcctaagcagactgatgtgtttgccagacttaaagatattatagttatgaatgtagatttgcagtccattcacaaaaaggctgtctctattttgggagatgaagtctttaggttccaactgactctttatccagatgccacagaaggagaggcctatgctgatatgtccaaagtagacggcaaacttagttttaaagtgggttgtattcagattgtttatgttcataaattcttcatgtctcttttgaacttcctcaacaatttccaaactgctaaagaagctttgagtacagccacagtccaggctgcagaaagagctgcttccagcatgaaagacttggctcaaaagagtttccgccttttgatggatattaatttgaaagcaccagttattattattcctcagtcttcagtatcacctaatgctgttatagcagatctgggtttaatcagagttgaaaacaagtttagcttggttcctatggaacattattctcttcctccagtcattgataaaatgaacatcgaactcactcagttgaagctgtcaagaactattttgcaggctagcttgccacaaaatgacattgaaattttaaaaccagtcaacatgcttttgtccatacagcgaaacttagcagcagcatggtatgtgcaaattccagggatggagataaaaggaaaactaaaacctatgcaggttgctctcagtgaagatgacttgacagttttaatgaaaattttgctagaaaatcttggagaagcttcctcacaaccaagccctacacagtctgtgcaggagactgtaagagtgagaaaagttgatgtttcaagtgtacctgaccatctcaaagaacaagaagattggacagactcaaagctctctatgaaccagattgtcagtctccaatttgactttcactttgaatctctttccattatcctttataacaatgatatcaaccaggaatctggagttgcatttcataatgacagtttccaacttggtgaactcagactacatcttatggcctcctcagggaagatgtttaaggatggctcaatgaatgtcagcgttaaacttaagacatgcacccttgatgatctcagagaaggaattgagagagcaacatcgagaatgattgacagaaagaatgaccaagataacaacagttctatgattgatataagttacaaacaagacaaaaatggaagtcaaattgatgctgttcttgacaagctgtatgtatgtgccagtgtggaatttctgatgactgtggcagatttctttatcaaagctgtgcctcagagtccagaaaatgtggcaaaagaaacacagattttaccaagacagactgccacagggaaggtcaagatagagaaagatgactctgttagaccaaatatgactttaaaggccatgatcacagatccagaagtggtatttgttgccagcctgacaaaggctgatgctcctgctctgacagcctcgtttcagtgcaacctttctctgtcaacatccaaactcgaacagatgatggaagcttctgtgagagatctgaaagtgctcgcttgcccttttctcagagaaaagagagggaaaaacattaccacagtcttgcagccctgttctttatttatggaaaaatgtacgtgggcttcaggaaagcaaaatataaatattatggttaaagaatttataattaagatttcacccataattcttaatactgtgttgacaatcatggctgcattgtctccaaaaacaaaagaagatggatccaaagatacgtctaaggaaatggaaaatctttggggtatcaaatcgattaatgattataacacttggtttcttggtgttgacacggcaacagaaataacggaaagcttcaaaggcattgaacattcactgatagaggaaaattgtggtgttgttgtagaatccattcaagttaccttagaatgtggccttggacatcgaactgtacctttattattggcagagtctaagttttcaggaaatattaaaaattggacttctctaatggctgctgttgctgacgtgacactacaggtgcactattacaatgagatccatgctgtctgggagccactgattgagagagtggaggggaagagacaatggaatttaaggcttgatgtaaagaagaacccagttcaggataaaagtttgctgccaggagatgattttattcctgagccacaaatggcaattcatatttcttcaggaaatacaatgaatataacaatatccaaaagttgtcttaatgttttcaacaatttagcaaaaggtttttcagagggcactgcttctacttttgactactctttaaaggacagagctccttttacggtaaaaaatgctgtaggtgttcccattaaggtgaagcccaattgtaatctcagagtaatgggcttccctgagaaaagtgatatttttgatgttgatgctggccagaatttggaactggagtatgccagcatggtaccttcaagtcaagggaacctatctatattgagccgtcaagaaagctccttcttcactctgaccattgtacctcatggatatacagaagttgcaaatatccctgtggccagacctggacggcgattgtataatgtacggaatcccaatgccagtcattctgactctgtcttggtacaaattgatgcaactgaagggaataaagtaattacccttcgctctcctctacagatcaaaaaccatttctccattgcatttatcatctataaatttgttaagaatgttaagctattggagcgcattgggatagccagacctgaagaggagttccatgttcctttagattcatatagatgtcaattgtttatccagccagctggaatcttagagcatcagtacaaagaatctaccacttatatttcctggaaggaagaacttcataggagcagggaagtcagatgcatgttgcagtgtccatcagtagaagtcagcttcttacctctcatagtgaatacagttgctctgcctgatgaattgagctacatatgtacacatggggaagactgggatgtagcttacattattcatctttatccttctctcactttgcggaatcttctcccatattccctaagatatttacttgagggaacagcagaaactcatgagctggcagaaggcagtactgctgatgttctgcattcgagaatcagtggtgaaataatggaattagtcctggtgaaataccagggcaaaaactggaatggacatttccgcatacgtgatacactaccagaattctttcctgtgtgtttttcttctgactccacagaagtgacgacagtcgacctgtcagtccacgtcaggagaattggcagccggatggtgctgtctgtctttagtccctattggttaatcaacaagactacccgggttctccagtatcgttcagaagatattcatgtgaaacatccagctgatttcagggatattattttattttctttcaagaagaagaacatttttactaaaaataaggtacaattaaaaatttcaaccagtgcctggtccagtagtttctcattggatacagtgggaagttatgggtgtgtgaagtgtcctgccaacaatatggagtacctggttggtgttagcatcaaaatgagcagtttcaacctttcacgaatagttaccctgactcccttttgtaccattgcaaacaagtcatcattagaactagaagttggcgagattgcatctgatggctcaatgccaactaataaatggaactatattgcttcttcagagtgccttccattttggccagaaagtttgtcaggcaaactttgtgtgagagtggtgggctgtgaaggatcttccaaaccattcttttataaccgacaggataatggcactttattgagcttagaagatctgaatgggggtatcttggtggatgtaaacactgccgaacattcaactgtcataactttttctgattaccatgagggatctgcacctgccttgataatgaaccatacaccatgggacatcctcacatacaaacagagtgggtcaccagaagaaatggtcttgctgccaagacaggctcgactttttgcctgggcagatcctactggtaccagaaaacttacatggacatatgcagcaaatgttggggaacatgatctgttaaaggatggatgtggacagtttccatatgatgcaaacatccagatacactgggtatcatttctggatgggcgccagagagttttgcttttcaccgatgatgttgccttggtttccaaagcactgcaggcagaagaaatggaacaggctgattatgaaataaccttgtctctccacagtcttgggctttcactggttaacaatgaaagcaagcaggaagtttcctatattgggataaccagttctggtgttgtttgggaggtgaaaccaaagcagaaatggaagccatttagtcaaaagcagataatcttattggaacaatcctatcagaaacatcaaatatcaagagaccatggctggattaagctagataataattttgaggtcaattttgataaagatccaatggaaatgcgcctccctattcgtagccctattaaacgagactttttatcaggaattcagattgaatttaagcagtcttctcaccagagaagtttaagggccaggttgtactggcttcaggttgataatcagttaccaggtgcaatgttccctgttgtatttcatcctgttgcccctccaaaatctattgctttagattcagagcccaagcctttcattgatgtgagtgtcatcacaagatttaatgagtacagtaaagtcttacagttcaagtattttatggtcctcattcaggaaatggccttaaaaattgatcaagggtttctaggagctattattgcactgtttaccccaacaacagaccctgaagctgaaagaagacggacaaagttaatccaacaagatattgatgctctaaatgcagaattaatggagacttcaatgactgatatgtcaattcttagtttctttgaacatttccatatttctcctgtgaagttgcatttgagtttgtctttgggttccggaggtgaagaatcagacaaagaaaaacaggaaatgtttgcagttcattctgtcaacttgctgttgaaaagcataggtgctactctgactgatgtggatgaccttatattcaaacttgcttattatgaaattcgatatcagttctacaagagagatcagcttatatggagtgttgttaggcattacagtgaacagttcttgaaacagatgtatgtccttgtattggggttagatgtacttggaaacccatttggattaattagaggtctgtctgaaggagttgaagctttattctatgaacccttccagggtgctgttcaaggccctgaagaatttgcagaggggttagtgattggagtgagaagcctctttggacacacagtaggtggtgcagcaggagttgtatctcgaatcaccggttctgttgggaaaggtttggcagcaattacaatggacaaggaatatcagcaaaaaagaagagaagagttgagtcgacagcccagagattttggagacagcctggccagaggaggaaagggctttctgcgaggagttgttggtggagtgactggaataataacaaaacctgtggaaggtgccaaaaaggaaggagctgctggattctttaaaggaattggaaaagggcttgtgggtgctgtggcccgtccaactggtggaatcgtagatatggccagtagtaccttccaaggcattcagagggcagcagaatcaactgaggaagtatctagcctccgtccccctcgcctgatccatgaagatggcatcattcgtccttatgacagacaggaatctgagggctctgacttacttgagaatcatatcaaaaagttggaaggagagacttaccgataccactgtgctattcctggaagcaagaagacaatccttatggttacaaataggcgagtgttgtgtataaaggaagttgaaatcctgggccttatgtgtgtagactggcaatgtccatttgaagattttgtatttcctcctagtgtcagtgaaaatgtgctaaaaatttcagttaaggaacagggtctgttccacaaaaaagacagtgccaatcaaggctgtgttcgaaaagtttacctgaaggacaccgccacagcagagagagcatgtaatgccattgaggatgcacagtcaacgagacagcagcaaaaattgatgaagcagtcatcagtgagacttctcagaccccaattgccatcttaatcacagacctcaggggctccaacagggagaaaaaacaatcactggtcttgtctataagtcactctgctttatcttgctaaagacaatttttcaagcaatcctttagttttagttttctggaatagctagtattgggttttctagttttttcaccttttagtttttactctaattttgtaaccatgtatatgctagcagtccacttctacgccaccacccaaatgggtcagacccttgaagaaacgtcacttcaaactcagaatgaaattttcattaatattaaaattgtgaagcaaaggtcaataggcttatatttaattaaagccttactgaagaataagaaatgagcttagaatgactagtgttctttgaaaggtttttttatttttgtttttttggggttttttttttttttgagaccgagtcttgctctgtcgcccaggctggaatgcagtggtgcgatcttggctcactgcaatctctgcctctcgggttcaagctgttctactgcctcagcctcctgagtagctgggattacaggtgtgtgccaccacgcctgggtaattttttttttttttgtatttttagtagagatgagtttcaccatgttggtcagtctagtctcgaactcctgaccttgtgatccgcatgcctcagcctcccaaagtgctgggattacaggcatgagccaccacggcccgccaaaaggctttaacccatgaacaaatgttggatcctgacattttgtttaagagtgatttgttcaataattgaactgagttaacattcttggtaaaccaggtaattgaatgaagaaaggtcactaaagggagaaatgacatgttttctattttcttttcatgaaaacactgtttttccccctaataaagcatattttactttggtgcttatttttcctccttgcagtctaataaaaaaatctggacaatcaaaccttaaaatagctacactctgccctctgtaatgtagcattcataaaaatttggaagtatttacatcctctttcaagatgagcttatatgacacaattattatttgctgatacatgaaaatactgcactttaagtttctcaagactctgaaatatgtaaaattcaatatttttatattcccagaaattgtttcttacaggttgaaagtcttttaagggcatcacaaattaacatttactcctaatgcacgcctagaatgtattttaaatacttactaagaagaatgaaaattctttggttgttttatatataaataaggcatatataatgacactgtgttctgtgagggagcaggccctgtgagaatcaattcaggacagtatttttttttgtcctttctccatccttgatcagagataaactattaaaactttaaaaaatactcaaaaatatgtaagttttttggttgaacctttagatttgctcataatgtttaacataacaacatttatttcaaatcactgaattcatggagatgtggacacgcttggtttgctctatttttgtttatgtgtgatagtggttctgtcatcatcattcatgttttttaaggcctggtcataaaactttaaattttactagtgttacttaatgtatattctaaaaagagaatgcagtaactaatgccctaaatgtttgatctctgtttgtcattactttttcaaaattatttttttctgtaaagtataatatataaaacttcttgcttaaattgaatttctatattagtggttaattgcagtttattaaagggatcattatcagtaatttcatagcaactgttctagtgttttgtgtttttaaaacagaattaggaatttgagatatctgattatatttttcatatgaatcacagctgttgacaatgtcccatatatttaagaaattatatcatactgatactatttgtaacattttgatttgatttaatctccagggacagaaataattcattggtaaagtgtaataatgcgttttttaaaaatgctttgagaggtaattacttgcatatgagagaaataaaacatttggcacattgtttacaggtgtgaaaa

SEQ ID NO: 194524 - DNA, 11012 bp, Artificial Sequence
  derived and/or modified sequence
tgcagcgctggtcgcagccctcagctgcgccgggcggttccggctcctccctctccttgtgcctcagcgccaccatggtgctggagtcggtggtcgcggacttgctgaaccgcttcctgggggactatgtggagaacctgaacaagtcccagctgaagctgggcatctggggcggaaatgtggctttagataatctacagataaaagaaaatgccctgagtgaattggatgttccttttaaagtcaaggctggccaaattgataaattaactttgaagattccttggaagaacctttatggagaagcagttgttgcgaccctggaaggattatacctgcttgttgtccctggagcaagtattaagtatgatgctgtaaaagaagaaaaatccttgcaggatgttaaacagaaagagctatcccgaattgaagaagcccttcaaaaagcagcagaaaaagataagccaaaagaagccaaaaaggatacatttgtggaaaaattggcaactcaagtaataaaaaatgtacaagtaaaaatcacagatattcacattaaatatgaagatgatgtcactgatccaaagcggcctctttcatttggtgtcacactgggagagcttagtctactgactgcaaatgaacactggactccatgcatattaaatgaagcagacaaaattatatacaagcttatacgacttgatagtcttagcgcctactggaatgtaaattgcagcatgtcttaccagagatcaagggaacagattttggatcagctgaaaaatgaaattcttacaagtggaaatatacccccaaattatcaatacattttccagccaatatcagcctctgcaaaactctacatgaatccttatgcagaatcagagctcaaaacgcccaaactggattgcaacatagaaatacaaaatattgccattgaactgaccaaacctcagtacttaagtatgattgaccttttggagtcagtggattatatggttaggaatgcgccttataggaaatacaagccttatttaccacttcataccaatggtcgacgatggtggaaatatgcaattgattctgttcttgaagttcatataagaaggtatacacagatgtggtcatggagtaacataaaaaagcacaggcagttactcaagagttataaaattgcctacaaaaacaagttaacacagtctaaagtctcagaagaaatacagaaagaaattcaggacttggagaagactctagatgtttttaacataattttagcaaggcaacaagcacaagttgaggtgattcggtctgggcaaaaattaaggaaaaagtctgctgacacaggcgagaaacgtggaggctggtttagtgggttgtggggtaagaaagagtctaagaaaaaggacgaagaatcattgattcctgaaactattgatgaccttatgactccagaggaaaaagataaactcttcactgccattggttatagtgagagtacccacaacctaactttacctaagcagtatgttgcccatattatgaccctgaagttagtaagcacctctgttacgataagagaaaacaagaatattccagaaatactaaaaattcagataattggcctgggcactcaagtatctcagcgaccaggagcacaagcacttaaggtagaagcgaaattagaacactggtatataacaggtttgagacagcaggatattgtgccatcacttgtggcttcaattggtgacactacatcatccttgcttaaaattaaatttgaaaccaatccggaggatagtcctgctgaccagactctgattgttcagtcccagcctgtggaggtcatctatgatgctaaaactgtcaatgcagtggttgaattctttcaatcaaataagggattggatcttgagcaaataacatcagcaacattgatgaagctggaagaaattaaggagagaacagctacaggacttacacatattattgaaactcgaaaagtccttgatttaaggataaatctgaagccttcttatctagtagttccacagacgggtttccaccatgaaaagtcagatcttctgattttagattttggtacatttcagctcaacagtaaagatcaaggtttacagaagactactaattcatctctggaagaaataatggataaggcatatgacaagtttgatgttgaaataaaaaatgtacaactactttttgcaagagcagaggaaacctggaaaaagtgtcgatttcagcatccatcaactatgcatatattgcaacccatggatattcatgttgagttggctaaggccatggtagaaaaagacattagaatggccagatttaaagtgtcaggaggacttcctttgatgcatgtgagaatttctgaccagaagatgaaagatgtgctatatttgatgaacagtatacctttgccacagaaatcatcagcccagtctccagagagacaggtatcctcaattcctattatttcaggtggtacaaaaggtctacttggtacttcactattgctagacactgtggaatcagagtctgatgatgagtattttgatgctgaagatggagaaccacagacttgtaaaagtatgaaaggatcagaacttaaaaaagctgcagaggtcccaaatgaggagctcatcaatcttctactcaagtttgaaattaaagaagtgattttggaatttactaaacagcagaaagaagaagatacaattctagtatttaatgttactcagttaggaacagaggccacaatgagaacatttgacttaactgtggtatcttatttaaagaaaatcagcttggattatcatgaaattgaaggatccaaaaggaagccccttcacttgattagctcttctgacaaacctggattagatcttttgaaagtggagtatattaaggctgataagaatggacctagttttcaaactgcttttggaaaaactgaacaaacagttaaggtggccttttcatctttaaatctgttgctgcaaacacaagctcttgtcgcttctattaattacctcacaaccattattccatctgatgatcaaagcataagtgttgctaaggaggtacaaatttcaactgaaaaacaacaaaaaaattcaactctgccaaaagcgattgtatcctccagagatagtgacattattgatttcaggctatttgccaagttgaatgctttctgtgtcattgtttgcaacgaaaagaacaatatcgccgaaatcaagattcaaggactggattcctccctttctctccagtcaagaaagcagtcactttttgcccgactagaaaatattattgtcacagatgttgatccaaagacagttcataagaaagctgtgtcaataatgggaaatgaagttttccgttttaatttggatttgtatccagatgctactgagggggatttgtatactgacatgtccaaagtggatggtgtgctgtctctgaatgttggctgtattcagattgtctatcttcataaattccttatgtcacttctgaacttcctgaataatttccagacagccaaagagtctctgagtgctgccactgcccaggctgcagaaagggctgccacaagtgtgaaagatcttgcccagaggagttttcgtgtttccatcaatattgatttgaaagcaccggttatagtcatcccacagtcttctatttccaccaatgcagtagtggtagatcttgggttaatcagagttcataatcagttcagtctggtgtctgatgaagactacttaaatcctccagtaattgatagaatggatgtgcagctaacaaagcttacactttataggacagtgatccagccaggcatctaccatcctgatattcagctgttgcacccaattaacttggaatttcttgtaaatcggaatctagctgcatcttggtaccacaaggtgcctgttgtggaaattaaaggacatcttgattcaatgaatgttagtctaaatcaagaagatcttaatcttttatttaggatactaacagaaaatctctgtgagggtactgaagacttggataaagtgaaaccaagagtacaagagacaggtgaaattaaagagccccttgaaatctctatatcacaagatgtacatgattcaaaaaatactttaacaactggagtggaagaaattaggtctgtagacatcattaatatgctgctgaattttgaaattaaagaggttgtggttactttgatgaaaaaatcagaaaagaaaggaaggcctttacatgagctaaatgtcctgcaacttggaatggaagctaaagttaaaacctatgacatgactgctaaagcttatctaaaaaaaattagtatgcagtgctttgatttcactgactctaaaggggaacctcttcacattattaactcttctaatgtgactgacgaaccccttctgaaaatgttactgacaaaggcagacagtgatggaccagaatttaaaactattcatgacagtaccaaacagagactgaaggtttcatttgcatccttagacttagtacttcatttggaagctttactttccttcatggattttttatcatctgctgctccattctctgagccttcctcttctgagaaggaatccgagctgaaaccacttgtgggggagtccagaagtatcgctgtcaaagctgtatccagcaacatttcccaaaaggatgtgtttgatttaaagatcacagctgaattaaatgcatttaatgtctttgtctgtgatcagaagtgtaacattgcagatattaaaatacatggaatggatgcctctatttctgtgaagcctaagcagactgatgtgtttgccagacttaaagatattatagttatgaatgtagatttgcagtccattcacaaaaaggctgtctctattttgggagatgaagtctttaggttccaactgactctttatccagatgccacagaaggagaggcctatgctgatatgtccaaagtagacggcaaacttagttttaaagtgggttgtattcagattgtttatgttcataaattcttcatgtctcttttgaacttcctcaacaatttccaaactgctaaagaagctttgagtacagccacagtccaggctgcagaaagagctgcttccagcatgaaagacttggctcaaaagagtttccgccttttgatggatattaatttgaaagcaccagttattattattcctcagtcttcagtatcacctaatgctgttatagcagatctgggtttaatcagagttgaaaacaagtttagcttggttcctatggaacattattctcttcctccagtcattgataaaatgaacatcgaactcactcagttgaagctgtcaagaactattttgcaggctagcttgccacaaaatgacattgaaattttaaaaccagtcaacatgcttttgtccatacagcgaaacttagcagcagcatggtatgtgcaaattccagggatggagataaaaggaaaactaaaacctatgcaggttgctctcagtgaagatgacttgacagttttaatgaaaattttgctagaaaatcttggagaagcttcctcacaaccaagccctacacagtctgtgcaggagactgtaagagtgagaaaagttgatgtttcaagtgtacctgaccatctcaaagaacaagaagattggacagactcaaagctctctatgaaccagattgtcagtctccaatttgactttcactttgaatctctttccattatcctttataacaatgatatcaaccaggaatctggagttgcatttcataatgacagtttccaacttggtgaactcagactacatcttatggcctcctcagggaagatgtttaaggatggctcaatgaatgtcagcgttaaacttaagacatgcacccttgatgatctcagagaaggaattgagagagcaacatcgagaatgattgacagaaagaatgaccaagataacaacagttctatgattgatataagttacaaacaagacaaaaatggaagtcaaattgatgctgttcttgacaagctgtatgtatgtgccagtgtggaatttctgatgactgtggcagatttctttatcaaagctgtgcctcagagtccagaaaatgtggcaaaagaaacacagattttaccaagacagactgccacagggaaggtcaagatagagaaagatgactctgttagaccaaatatgactttaaaggccatgatcacagatccagaagtggtatttgttgccagcctgacaaaggctgatgctcctgctctgacagcctcgtttcagtgcaacctttctctgtcaacatccaaactcgaacagatgatggaagcttctgtgagagatctgaaagtgctcgcttgcccttttctcagagaaaagagagggaaaaacattaccacagtcttgcagccctgttctttatttatggaaaaatgtacgtgggcttcaggaaagcaaaatataaatattatggttaaagaatttataattaagatttcacccataattcttaatactgtgttgacaatcatggctgcattgtctccaaaaacaaaagaagatggatccaaagatacgtctaaggaaatggaaaatctttggggtatcaaatcgattaatgattataacacttggtttcttggtgttgacacggcaacagaaataacggaaagcttcaaaggcattgaacattcactgatagaggaaaattgtggtgttgttgtagaatccattcaagttaccttagaatgtggccttggacatcgaactgtacctttattattggcagagtctaagttttcaggaaatattaaaaattggacttctctaatggctgctgttgctgacgtgacactacaggtgcactattacaatgagatccatgctgtctgggagccactgattgagagagtggaggggaagagacaatggaatttaaggcttgatgtaaagaagaacccagttcaggataaaagtttgctgccaggagatgattttattcctgagccacaaatggcaattcatatttcttcaggaaatacaatgaatataacaatatccaaaagttgtcttaatgttttcaacaatttagcaaaaggtttttcagagggcactgcttctacttttgactactctttaaaggacagagctccttttacggtaaaaaatgctgtaggtgttcccattaaggtgaagcccaattgtaatctcagagtaatgggcttccctgagaaaagtgatatttttgatgttgatgctggccagaatttggaactggagtatgccagcatggtaccttcaagtcaagggaacctatctatattgagccgtcaagaaagctccttcttcactctgaccattgtacctcatggatatacagaagttgcaaatatccctgtggccagacctggacggcgattgtataatgtacggaatcccaatgccagtcattctgactctgtcttggtacaaattgatgcaactgaagggaataaagtaattacccttcgctctcctctacagatcaaaaaccatttctccattgcatttatcatctataaatttgttaagaatgttaagctattggagcgcattgggatagccagacctgaagaggagttccatgttcctttagattcatatagatgtcaattgtttatccagccagctggaatcttagagcatcagtacaaagaatctaccacttatatttcctggaaggaagaacttcataggagcagggaagtcagatgcatgttgcagtgtccatcagtagaagtcagcttcttacctctcatagtgaatacagttgctctgcctgatgaattgagctacatatgtacacatggggaagactgggatgtagcttacattattcatctttatccttctctcactttgcggaatcttctcccatattccctaagatatttacttgagggaacagcagaaactcatgagctggcagaaggcagtactgctgatgttctgcattcgagaatcagtggtgaaataatggaattagtcctggtgaaataccagggcaaaaactggaatggacatttccgcatacgtgatacactaccagaattctttcctgtgtgtttttcttctgactccacagaagtgacgacagtcgacctgtcagtccacgtcaggagaattggcagccggatggtgctgtctgtctttagtccctattggttaatcaacaagactacccgggttctccagtatcgttcagaagatattcatgtgaaacatccagctgatttcagggatattattttattttctttcaagaagaagaacatttttactaaaaataaggtacaattaaaaatttcaaccagtgcctggtccagtagtttctcattggatacagtgggaagttatgggtgtgtgaagtgtcctgccaacaatatggagtacctggttggtgttagcatcaaaatgagcagtttcaacctttcacgaatagttaccctgactcccttttgtaccattgcaaacaagtcatcattagaactagaagttggcgagattgcatctgatggctcaatgccaactaataaatggaactatattgcttcttcagagtgccttccattttggccagaaagtttgtcaggcaaactttgtgtgagagtggtgggctgtgaaggatcttccaaaccattcttttataaccgacaggataatggcactttattgagcttagaagatctgaatgggggtatcttggtggatgtaaacactgccgaacattcaactgtcataactttttctgattaccatgagggatctgcacctgccttgataatgaaccatacaccatgggacatcctcacatacaaacagagtgggtcaccagaagaaatggtcttgctgccaagacaggctcgactttttgcctgggcagatcctactggtaccagaaaacttacatggacatatgcagcaaatgttggggaacatgatctgttaaaggatggatgtggacagtttccatatgatgcaaacatccagatacactgggtatcatttctggatgggcgccagagagttttgcttttcaccgatgatgttgccttggtttccaaagcactgcaggcagaagaaatggaacaggctgattatgaaataaccttgtctctccacagtcttgggctttcactggttaacaatgaaagcaagcaggaagtttcctatattgggataaccagttctggtgttgtttgggaggtgaaaccaaagcagaaatggaagccatttagtcaaaagcagataatcttattggaacaatcctatcagaaacatcaaatatcaagagaccatggctggattaagctagataataattttgaggtcaattttgataaagatccaatggaaatgcgcctccctattcgtagccctattaaacgagactttttatcaggaattcagattgaatttaagcagtcttctcaccagagaagtttaagggccaggttgtactggcttcaggttgataatcagttaccaggtgcaatgttccctgttgtatttcatcctgttgcccctccaaaatctattgctttagattcagagcccaagcctttcattgatgtgagtgtcatcacaagatttaatgagtacagtaaagtcttacagttcaagtattttatggtcctcattcaggaaatggccttaaaaattgatcaagggtttctaggagctattattgcactgtttaccccaacaacagaccctgaagctgaaagaagacggacaaagttaatccaacaagatattgatgctctaaatgcagaattaatggagacttcaatgactgatatgtcaattcttagtttctttgaacatttccatatttctcctgtgaagttgcatttgagtttgtctttgggttccggaggtgaagaatcagacaaagaaaaacaggaaatgtttgcagttcattctgtcaacttgctgttgaaaagcataggtgctactctgactgatgtggatgaccttatattcaaacttgcttattatgaaattcgatatcagttctacaagagagatcagcttatatggagtgttgttaggcattacagtgaacagttcttgaaacagatgtatgtccttgtattggggttagatgtacttggaaacccatttggattaattagaggtctgtctgaaggagttgaagctttattctatgaacccttccagggtgctgttcaaggccctgaagaatttgcagaggggttagtgattggagtgagaagcctctttggacacacagtaggtggtgcagcaggagttgtatctcgaatcaccggttctgttgggaaaggtttggcagcaattacaatggacaaggaatatcagcaaaaaagaagagaagagttgagtcgacagcccagagattttggagacagcctggccagaggaggaaagggctttctgcgaggagttgttggtggagtgactggaataataacaaaacctgtggaaggtgccaaaaaggaaggagctgctggattctttaaaggaattggaaaagggcttgtgggtgctgtggcccgtccaactggtggaatcgtagatatggccagtagtaccttccaaggcattcagagggcagcagaatcaactgaggaagtatctagcctccgtccccctcgcctgatccatgaagatggcatcattcgtccttatgacagacaggaatctgagggctctgacttacttgagcaagaactggaaatacaggaataaatgtttcctaaactactacttgatttcatccttaaaaatcaaaacaaactgtggtgttaattgactgtgtgtgaattccattgtcaattttaatgaaattttctttaaaactctcacctccatctgaacttttcatagtagtgggattgactacaaataaaaacttgtggtattcctggt

SEQ ID NO: 194525 - protein, 402 aa, Artificial Sequence
  derived and/or modified sequence
MSAEGAEPGPGSGSGPGPGPLCPEHGQALSWFCGSERRPVCAACAGLGGRCRGHRIRRAEERAEELRNKIVDQCERLQLQSAAITKYVADVLPGKNQRAVSMASAARELVIQRLSLVRSLCESEEQRLLEQVHGEEERAHQSILTQRVHWAEALQKLDTIRTGLVGMLTHLDDLQLIQKEQEIFERTEEAEGILDPQESEMLNFNEKCTRSPLLTQLWATAVLGSLSGTEDIRIDERTVSPFLQLSDDRKTLTFSTKKSKACADGPERFDHWPNALAATSFQNGLHAWMVNVQNSCAYKVGVASGHLPRKGSGSDCRLGHNAFSWVFSRYDQEFRFSHNGQHEPLGLLRGPAQLGVVLDLQVQELLFYEPASGTVLCAHHVSFPGPLFPVFAVADQTISIVR

SEQ ID NO: 194526 - DNA, 1209 bp, Artificial Sequence
  derived and/or modified sequence
atgagcgccgagggcgccgagcccggccccggcagcggcagcggccccggccccggccccctgtgccccgagcacggccaggccctgagctggttctgcggcagcgagagaagacccgtgtgcgccgcctgcgccggcctgggcggcagatgcagaggccacagaatcagaagagccgaggagagagccgaggagctgagaaacaagatcgtggaccagtgcgagagactgcagctgcagagcgccgccatcaccaagtacgtggccgacgtgctgcccggcaagaaccagagagccgtgagcatggccagcgccgccagagagctggtgatccagagactgagcctggtgagaagcctgtgcgagagcgaggagcagagactgctggagcaggtgcacggcgaggaggagagagcccaccagagcatcctgacccagagagtgcactgggccgaggccctgcagaagctggacaccatcagaaccggcctggtgggcatgctgacccacctggacgacctgcagctgatccagaaggagcaggagatcttcgagagaaccgaggaggccgagggcatcctggacccccaggagagcgagatgctgaacttcaacgagaagtgcaccagaagccccctgctgacccagctgtgggccaccgccgtgctgggcagcctgagcggcaccgaggacatcagaatcgacgagagaaccgtgagccccttcctgcagctgagcgacgacagaaagaccctgaccttcagcaccaagaagagcaaggcctgcgccgacggccccgagagattcgaccactggcccaacgccctggccgccaccagcttccagaacggcctgcacgcctggatggtgaacgtgcagaacagctgcgcctacaaggtgggcgtggccagcggccacctgcccagaaagggcagcggcagcgactgcagactgggccacaacgccttcagctgggtgttcagcagatacgaccaggagttcagattcagccacaacggccagcacgagcccctgggcctgctgagaggccccgcccagctgggcgtggtgctggacctgcaggtgcaggagctgctgttctacgagcccgccagcggcaccgtgctgtgcgcccaccacgtgagcttccccggccccctgttccccgtgttcgccgtggccgaccagaccatcagcatcgtgagatag

SEQ ID NO: 194527 - DNA, 1209 bp, Artificial Sequence
  derived and/or modified sequence
atgagcgcagagggcgctgagcctggccccggaagcggctccggcccaggacctggaccactatgtcccgagcatgggcaggctctgagttggttctgtgggagcgaaagaaggcctgtgtgtgccgcgtgcgcaggcctcggcggcaggtgccgggggcaccggatccgcagggccgaggagagggctgaggagctgagaaataaaatcgtggaccagtgtgaacgcctgcagctgcaatcggcagccattacaaagtatgtggccgacgtcctgccagggaagaatcagcgcgctgtctctatggcctctgcagcccgagagctggtgatccagaggctctctttagtcagaagcctgtgtgagtcagaggagcagcgcctacttgaacaggtgcacggcgaagaggaaagggcgcaccaatctatactgacccagcgcgtccattgggccgaagctctgcaaaaacttgacaccatccggactggcctcgtgggcatgctgacccatctcgacgacctgcagctaatccagaaggaacaagagattttcgaaagaacagaggaggcagaagggatcctcgacccacaagagagcgaaatgttaaacttcaacgagaagtgcactcggtcgcccctgctgacgcaactctgggctactgcagtgctaggaagtctctctggaacagaagacattcgcatcgacgaaagaactgttagtcccttcctccagttgagtgatgacaggaaaacactcaccttctccaccaagaagtcaaaagcatgcgctgatgggcccgagagattcgaccactggccaaacgcactggcagccacaagcttccagaacggactgcatgcttggatggtgaatgtccaaaacagttgcgcctacaaggtgggcgttgccagcggccatttacctcgcaaagggagtggatctgactgccgcctgggccataatgccttctcctgggtgttcagccgctatgatcaggaattccgttttagccacaatggccagcatgaacctctcgggctgctacgggggcctgcccagctgggagtcgtcctggatcttcaggtgcaggagctactattctacgagcccgcctccggaactgtgctctgcgcacaccacgtgtcttttcctgggccattgtttcccgtcttcgctgtggctgaccagactatctcaatcgtgcgatag

SEQ ID NO: 194528 - DNA, 2339 bp, Artificial Sequence
  derived and/or modified sequence
acctgcgacaggtggagcgcacggggcgggcgcacggccatgtccgccgagggcgcggagccggggccggggtccgggtccgggcccgggccggggccactctgccccgaacacggccaggctctgagctggttctgcggctccgagcgacggcccgtgtgcgccgcctgcgcggggttgggcggtcgctgccgggggcaccgcatccgccgggcggaggagcgcgccgaggagctgcggaacaagattgtggaccagtgtgagaggctgcagttacagagtgctgccatcaccaagtatgtggcggacgtcctgccggggaagaatcaaagagcagtgagcatggccagtgcagcgagggaactggttatccagcggttgagtctggtgaggagtctttgcgagagcgaggagcagcggttactggaacaggtgcatggcgaagaggagcgggcccaccagagcatcctgacacagcgggtgcactgggccgaggcgctgcagaaacttgacaccatccgcactggcctggtgggcatgcttactcacctggatgacctccagctgattcagaaggagcaagagattttcgagaggaccgaagaagcagagggcattttggatccccaggagtcggaaatgttaaactttaatgagaagtgcactcggagcccactactgacccaactctgggcaacggcggttcttgggtctctctcaggcacagaggacatacggatcgatgagaggacagtcagccccttcctgcaattgtcagatgatcgaaagaccctgaccttcagcaccaagaagtcaaaggcctgtgcagatggcccggagcgcttcgaccactggcccaatgccctggctgccacctccttccagaatgggctccatgcctggatggtgaatgtccagaacagttgtgcctataaggtgggcgtggcttcaggccacctgccccgcaagggttctggcagtgactgccgtctgggccacaatgccttctcctgggtcttctctcgctatgatcaggagtttcgtttctcacacaatgggcagcacgagcccctggggctgctgcggggcccagcccagctgggtgtagtgctggacttgcaggttcaggagctgctcttctatgagccagcctccggcacagtgctctgtgcccatcatgtgtccttcccggggcccctcttcccagtctttgctgtggccgatcagaccatttctatcgtccgctgacctctggccacaggaagccaggtccaccgcccaccaccctttcaggccatgtttctactcagtgtgcttttcccaaatgatgtgtgtggtgtttctaagagaaacagggcccataaccagtgggcagctttaggagggatggggatctgtttcagatctaggcataacctgtaaatcacaggtgtccaaacttttggcttccctgggccacatttgaagaagaattttcttgggccacataaaatacactaacgatagctgatgagctaaaaaaaaaaaaaaagtctgtgtataatttttgtgatatctgccaccacagataagcaaaaaagtccttgcattcaaagggttggagattgctgctttgagtgctgggtacctgtggggaacctactactccctgggccttagtctcccaaatccaccatgcatctgcccctctgagggtgtcttcactttgtctctggcatctagcatggtgcctggtgcatagtgagcatgcaataaatatttggcaggtgagtggatggatagatggataggtgaatgtaggtggacaggtgactgggtggatgttgtggtctctggagaagcactgccattcagcctcctgctccagctgttcacatgcagaaatgctctcttcacaggcagagaagcctgtggctaaagtttccacatcccattaactcagtgcttttgtctttttcatgacatggcacatagagaaaatatttttttctagcacacaagagcaacctgaaaggctgctcctggccagaggactctgtcccgggggaccgtgtcctcccccatgtcctgcctaggccctcagaggaccaggggatcatgtctccaggtaacccgactgtagcccctgctggctgagctccagcctgtgcccactgataatagcagggacggccttttctcttagagcagctgataagtttccctacctgatggccccctctgacataaactgcacacctggggtgatggcttaaagccagaaagagctgagggagttaagagggccaaccttagggcacgtgggcattattaaaggtcttaaaagcattgaagattta

SEQ ID NO: 194529 - DNA, 1209 bp, Artificial Sequence
  derived and/or modified sequence
atgtctgctgagggcgctgagcccggccctggcagcggcagcggccctggccctggccccctgtgcccagagcacggccaggccctgtcctggttctgtggcagcgagaggaggcctgtgtgtgccgcctgtgccggcctgggcggccgctgccggggccaccgcatcagaagagctgaggagagagctgaggagctgaggaacaagatcgtggaccagtgtgagcggctgcagctgcagagcgctgccatcaccaagtatgtggctgatgtgctgcccgggaagaaccagagagctgtgtccatggccagcgctgcccgggagctggtgatccagaggctgagcctggtgcgcagcctgtgtgagagcgaggagcagaggctgctggagcaggtgcatggagaggaggagcgggcccaccagagcatcctgacccagagggtgcactgggccgaggccctgcagaagctggacaccatcagaacaggcctggtgggcatgctgacccacctggatgacctgcagctgatccagaaggagcaggagatctttgagaggacagaggaggccgagggcatcctggacccccaggagagcgagatgctgaacttcaatgagaagtgcaccaggagccccctgctgacccagctgtgggccacagctgtgctgggcagcctgtctggaacagaggacatcagaattgatgagaggacagtgagccccttcctgcagctgagtgatgacaggaagaccctgaccttcagcaccaagaagagcaaggcctgtgctgatggccctgagagatttgaccactggcccaatgccctggccgccaccagcttccagaatggcctgcacgcctggatggtgaatgtgcagaacagctgtgcctacaaggtgggcgtggccagcggccacctgcccaggaagggcagcggcagtgactgccgcctgggccacaatgccttctcctgggtgttcagccgctatgaccaggagttccgcttcagccacaacggccagcacgagcccctgggcctgctgcggggccctgcccagctgggcgtggtgctggacctgcaggtgcaggagctgctcttctatgagcccgccagcggcaccgtgctgtgtgcccaccacgtgtccttccctggccccctcttccctgtgtttgctgtggccgaccagaccatcagcatcgtgaggtag

SEQ ID NO: 194530 - DNA, 1209 bp, Artificial Sequence
  derived and/or modified sequence
atgagcgccgagggcgccgagcccggccccggcagcggcagcggccctggacctggacccctttgccccgagcacggtcaagccctctcctggttctgcggcagtgagcggcgccccgtctgtgccgcctgcgccggcctgggaggccggtgccggggacaccggatcaggagggccgaggaacgcgctgaggaactgagaaataagatcgtcgaccaatgtgagaggctgcagctgcagtccgctgcaataacgaagtacgtagcagacgttctccccgggaagaaccagcgcgccgtttccatggccagcgccgcccgggaactggtgatacaaagactctctctcgtacgctcactgtgtgaaagtgaggaacagcggctgctggagcaggtacacggcgaagaagaacgagcgcaccagagtattctgacccagcgtgtgcattgggccgaggccctccagaaacttgacactattcggaccggacttgtaggaatgctgacccatctggacgacctgcagcttattcagaaggaacaggagatcttcgaaaggaccgaggaagccgagggcatactggacccgcaggagagcgagatgctgaatttcaatgagaaatgtacgcgcagccctctcctgactcagctatgggcgactgccgtgctaggttccctgagtggtactgaggacatccgaattgacgaacggacagtttccccattccttcagctgtcggatgatcggaagacactgactttctccaccaaaaaaagcaaagcatgcgctgacgggcctgagagatttgatcactggcctaacgcacttgccgccacttctttccagaatggcctccacgcttggatggtgaacgtccaaaactcttgcgcttataaggtgggcgtagcctctgggcatctgcctcggaaaggcagcggatctgattgccggttaggtcacaacgctttttcttgggttttcagtaggtacgaccaggagttccggttcagccacaatggccagcatgagcctcttgggctgcttcggggacccgctcagttgggagtggtcctggatctgcaggttcaggagcttctgttttacgagccggctagcggtaccgtgctgtgcgcacatcacgtaagctttcctggaccattgttccccgtctttgccgtagcagaccaaacaatttcgattgtgcggtag

SEQ ID NO: 194531 - DNA, 1209 bp, Artificial Sequence
  derived and/or modified sequence
atgtccgccgaaggagccgagcctggccctggaagtggcagtggcccaggcccaggccctctgtgccccgaacatggccaggctctttcttggttttgcggatcggagcggcgacctgtgtgtgccgcatgcgcaggcctaggcggtaggtgtagagggcatcgcattaggagagccgaggagcgcgcagaagagctgcgaaataagatagtggaccagtgcgaaagactgcaactccagtcggccgctataaccaagtacgtggcggacgtgctgccaggaaaaaatcagcgcgcagtgagtatggcttcggccgcacgcgagttggtgattcaaagactctctctggtccgcagcctgtgtgagtccgaagagcaacgcctgttagagcaggtgcacggggaggaagagagggcccaccaatccattctcactcagcgggtgcattgggcagaagcgctgcagaaactggatactattcggacgggattggtggggatgctaactcatctagatgatctccaactcatccagaaggagcaggaaatcttcgagcggactgaggaggccgaaggtattctcgacccccaggagtcggagatgctgaactttaacgaaaagtgtacgcgatcacccctgttaacccagctgtgggcaacggccgtgttaggatccttgtctggtaccgaggacattcgcatcgatgaaaggactgtgagccctttcctccagctttctgacgacaggaagacattgactttttcgaccaagaagtcaaaggcctgtgctgacggtccagaacgatttgaccattggccgaatgcactggcagcgacatcattccagaacggacttcatgcttggatggtgaatgtccagaacagctgtgcctacaaggtgggtgtggccagcggacacctgccccgtaaaggcagcggaagtgactgtaggctcgggcacaatgctttctcctgggtattcagcagatatgaccaggagttccgctttagccacaatggacagcacgagcctctcggcctactgagaggccctgctcagttaggagtggtactagacctgcaggtgcaggaactgctgttttatgaaccagccagcggcacagtgctttgtgctcaccatgtcagcttccccggacccctctttcctgttttcgcagtggccgaccaaactatcagcatcgtccgatag

SEQ ID NO: 194532 - protein, 686 aa, Artificial Sequence
  derived and/or modified sequence
MIPGKYRSVSGRAANNVNCGLHLVIQTSSLPEKNKVEFKLNKDTSSFPGRLLQHDLERNYSSRQGDHINLVSSSLSSFPILQRSSEEKILYSDRLSLERQKLTVCPIINGEDHLRLLNFQHNFITRIQNISNLQKLISLDLYDNQIEEISGLSTLRCLRVLLLGKNRIKKISNLENLKSLDVLDLHGNQITKIENINHLCELRVLNLARNFLSHVDNLNGLDSLTELNLRHNQITFVRDVDNLPCLQHLFLSFNNISSFDSVSCLADSSSLSDITFDGNPIAQESWYKHTVLQNMMQLRQLDMKRITEEERRMASVLAKKEEEKKRESHKQSLLKEKKRLTINNVARQWDLQQQRVANIATNEDRKDSDSPQDPCQIDGSTLSAFPEETGPLDSGLNNALQGLSVIDTYLVEVDGDTLSLYGSGALESLDRNWSVQTAGMITTVSFTFIEFDEIVQVLPKLKIKFPNSLHLKFKETNLVMLQQFNALAQLRRIDQLTIDPQGNPVVNFTLWKYYVLFRLSHFSMQKINGTEVTQNDMIMAERLFGILAHVASSELPQYRLISILGDARKKQFRYLLESKGKKPGIINEENNDSKRLVGENTNRATLNYTTRDFYNEKLEEIKEKKKFCKTYIEDLVKEATEINMKNEALQKLWPQMFIELVRDAVIEIRNKNSYMKLCLQQITDQK

SEQ ID NO: 194533 - DNA, 2061 bp, Artificial Sequence
  derived and/or modified sequence
atgatccccggaaagtatagatccgtatctggccgcgccgcaaacaatgtcaattgtgggttgcatctcgtgattcagacatcgtccctgcctgagaaaaataaggtagagtttaaattgaacaaggatacttcttctttcccaggaagattgctccagcacgatctcgaacgcaactactcatcacgtcagggggaccacatcaacctggtttcgtcatcactcagctctttcccaatcctccagcgcagtagcgaggaaaaaatcctctattctgaccgcctgagcctcgaacggcagaagctgaccgtgtgtcctattattaacggtgaagaccacctcaggttactcaactttcagcacaactttattaccagaattcagaacatatctaacctccagaagctcatctcactggatctgtacgacaaccagattgaagagatttccggcctgtcaacactgcgatgccttcgggttctgttactagggaaaaacagaatcaaaaagatttctaacctggagaacctgaagtctcttgatgtgcttgaccttcacggcaaccagattacaaagatcgagaatatcaatcacctctgtgaactcagggtgctgaatcttgcacgtaacttcctgtctcatgtggataaccttaacggccttgatagtctgacagagctcaacttacgtcataaccagataacattcgttcgggatgtggacaatctaccttgtctgcagcatttgtttttgtcatttaataacattagcagctttgactccgtgtcctgcttggccgactcctcttccttgagcgatattacgtttgacggcaacccaatcgcgcaggagtcatggtacaaacataccgtacttcagaatatgatgcagttgcgccagctcgatatgaaaagaataaccgaggaggagcgcaggatggcttccgtgcttgccaagaaggaggaggaaaagaagagggaaagccacaaacaaagcctgctcaaggaaaagaagaggctgacaatcaataacgtagcaagacagtgggacttacagcagcagcgtgtggctaatatcgctacgaacgaggacaggaaagactcagattccccgcaggatccttgccagatcgatggctccacactatccgcattccctgaggagaccggaccgctcgacagtggtttaaacaatgccctgcagggtctgtccgtaatcgatacctatctggtggaggtcgacggcgacacactctctctgtatggttctggagctctggagtccttggacagaaattggagcgttcaaacggctggtatgatcactacggtgtcatttacctttatcgagttcgatgagattgtgcaagtcttgcctaagctgaaaatcaagtttcccaactccttgcacctcaagtttaaggaaactaacctggtaatgctgcaacaattcaatgccctagcacagttgcgaaggatcgatcagctcacaattgatccacaggggaacccagtggtgaatttcactttgtggaagtactacgttctgttcaggttaagtcacttttctatgcaaaagatcaacgggaccgaggtgacccagaatgatatgatcatggcagagagactgttcggcatcctagctcatgttgcctcgtcagagcttcctcagtatagactgatctccatcctgggtgatgccaggaagaaacagtttcgttacttgctggagtctaagggcaagaagccgggcatcatcaacgaagagaacaacgacagcaagaggctggtcggcgagaataccaaccgggctaccctgaactacaccacaagggatttttataacgaaaaactggaagaaattaaagagaaaaagaagttctgcaagacgtacattgaagatctggtcaaggaagcaaccgagattaatatgaaaaatgaggccctgcagaaactgtggcctcagatgttcattgaactagtgagggacgcagtgatcgaaatcaggaacaaaaacagttatatgaagctgtgcttgcagcagatcaccgaccagaaatag

SEQ ID NO: 194534 - DNA, 2061 bp, Artificial Sequence
  derived and/or modified sequence
atgatccctgggaagtacagatctgtgtctggccgggccgccaacaacgtgaactgtggcctgcacctggtgatccagaccagcagcctgcctgagaagaacaaggtggagttcaagctgaacaaggacaccagcagcttccctggccgcctgctgcagcacgacctggagaggaactacagcagccggcagggcgaccacatcaacctggtgagcagcagcctgagcagcttccccatcctgcagaggagcagcgaggagaagatcctgtacagcgaccggctgagcctggagcggcagaagctgactgtgtgccccatcatcaatggagaggaccacctgcggctgctgaacttccagcacaacttcatcacccgcatccagaacatcagcaacctgcagaagctgatcagcctggacctgtatgacaaccagatcgaggagatcagcggcctgagcaccctgcgctgcctgcgggtgctgctgctgggcaagaaccgcatcaagaagatcagcaacctggagaacctgaagagcctggatgtgctggacctgcacggcaaccagatcaccaagattgagaacatcaaccacctgtgtgagctgcgggtgctgaacctggccaggaacttcctgagccacgtggacaacctgaatggcctggacagcctgacagagctgaacctgcggcacaaccagatcacctttgtgagagatgtggacaacctgccctgcctgcagcacctgttcctgtccttcaacaacatcagcagctttgattctgtgtcctgcctggccgacagcagcagcctgagtgacatcacctttgatggcaaccccatcgcccaggagagctggtacaagcacacagtgctgcagaacatgatgcagctgcggcagctggacatgaagaggatcacagaggaggagaggaggatggcctctgtgctggccaagaaggaggaggagaagaagcgggagagccacaagcagagcctgctgaaggagaagaagaggctgaccatcaacaacgtggcccggcagtgggacctgcagcagcagagggtggccaacatcgccaccaatgaagacaggaaggacagcgacagcccccaggacccctgccagattgatggcagcaccctgagcgccttccctgaggagaccggccccctggacagcggcctgaacaatgccctgcagggcctgagcgtcatcgacacctacctggtggaggtggatggagacaccctgagcctgtatggcagcggggccctggagagcctggacaggaactggagcgtgcagacagctggcatgatcaccaccgtgtccttcaccttcattgaatttgatgagatcgtgcaggtgctgcccaagctgaagatcaagttccccaacagcctgcacctgaagttcaaggagaccaacctggtgatgctgcagcagttcaatgccctggcccagctgcggagaattgaccagctgaccatcgacccccagggcaaccctgtggtgaacttcaccctgtggaagtactacgtgctcttccggctgagccacttctccatgcagaagatcaatggaacagaggtgacccagaatgacatgatcatggccgagcggctgtttggcatcctggcccacgtggccagcagcgagctgccccagtaccgcctcatcagcatcctgggagatgccaggaagaagcagttccgctacctgctggagagcaagggcaagaagccaggcatcatcaatgaagaaaataatgacagcaagaggctggtgggggagaacaccaacagagccaccctgaactacaccacccgggacttctacaatgagaagctggaggagatcaaggagaagaagaagttctgcaagacctacatcgaggacctggtgaaggaggccacagagatcaacatgaagaatgaggccctgcagaagctgtggccccagatgttcatcgagctggtgagagatgctgtgattgagatccggaacaagaacagctacatgaagctgtgcctgcagcagatcacagaccagaagtag

SEQ ID NO: 194535 - DNA, 2061 bp, Artificial Sequence
  derived and/or modified sequence
atgatccccggcaagtaccggagcgtgagcggccgggccgccaacaatgtcaattgtggcctgcatctggtgatccagactagctcacttccagaaaagaataaggtcgaattcaaacttaacaaggacacctcctcatttcctggccgactcctgcagcacgacctcgagaggaactattcaagccggcaaggtgatcatattaatctcgtgtcgagctctctgagcagcttccccatacttcaaagaagctcagaggaaaaaatcctctactcagacagattaagcttagagcgccagaaattgactgtgtgtccaatcatcaatggtgaagatcacttgcggctcctgaactttcagcacaacttcatcacccgcatccaaaacatatcaaatctgcagaagctgatctccctggatctgtacgacaatcagatagaggaaataagcggcctgagcacactgagatgtttgagagtgctcttgttgggtaagaacagaatcaagaagatcagcaacctcgagaacctaaagagtctggatgtgctggatctccatggcaaccagataacaaagatcgagaacatcaatcatctgtgtgaactgcgcgtgctcaatctggcaagaaactttttgtcacatgtagacaacctgaatggactcgacagcctaacagagctgaacctgcgccacaatcaaatcacctttgtgcgagacgtcgataatctgccatgccttcaacacctctttctgagcttcaacaacatcagctcctttgacagtgttagctgcctggccgactcaagttccctgagcgatattacgtttgacggtaatcctatagcccaagaaagttggtacaaacataccgtgctgcagaatatgatgcagttacggcaactggatatgaagaggatcacagaggaagaaaggcgtatggcttctgtgttggcaaaaaaggaggaagagaagaaacgggaaagccacaaacagtctctgctgaaagagaaaaaaaggctcactataaacaatgtagcccgccagtgggatttacagcagcagcgggttgcgaatattgctactaatgaggaccgcaaggactctgacagtcctcaggacccatgccagattgatgggagcacactgagtgcctttcccgaggaaactggccctctggactcggggctgaataatgccttgcagggcctgagtgttatcgatacataccttgtggaagtggacggagacaccctttccctctacggatctggcgcactggagagtctagacaggaattggtccgtccagaccgccggcatgattaccacggtgtcctttacgtttattgagttcgacgagatcgtccaggttctacccaaactcaaaatcaagttccccaacagtctccacctgaaatttaaagaaaccaacttggtaatgctccagcaatttaatgcactcgcccagctgagaagaatcgaccagttgaccatcgatccccagggcaaccctgtcgtgaatttcactctgtggaagtattacgtgctcttccgactttcacatttcagtatgcaaaaaataaatggcacggaagtgacccaaaacgacatgattatggcggagaggctgttcggcatcctggcacatgtggccagctccgaactgccccagtataggctgatcagcatcctgggagacgccagaaagaaacaatttcgatacttacttgagagtaaaggcaagaagcccgggattatcaatgaagaaaacaatgatagtaaaagactagtgggcgaaaatactaacagggccaccctcaactacacaacccgagacttctataatgaaaaacttgaagaaataaaagagaaaaaaaagttctgcaagacttacatcgaagacttggtcaaagaggcaaccgaaattaacatgaaaaatgaggcgctccagaaactctggccccagatgttcatagaactagtaagggatgctgttattgagattagaaataagaactcctacatgaagttgtgcctccaacagatcacagatcagaaatag

SEQ ID NO: 194536 - DNA, 2061 bp, Artificial Sequence
  derived and/or modified sequence
atgattcctggaaagtatcgcagcgtgagcgggagggccgctaacaatgttaattgcggattacacttggtgatccagacctcctccttgcccgagaaaaacaaggtagaattcaaactgaataaagatacaagcagcttccccggacgactcctgcaacacgatctcgagcgcaactattccagcaggcagggggaccacataaacctggtttcgtcatctctctcttcctttccgatactgcagcgatctagcgaggaaaaaatcctttactccgatcggctcagcctggagcgccaaaagctgacagtttgccctatcattaatggcgaagaccatttgaggcttctgaattttcaacacaactttattacccgaatccagaacatttctaacctccagaaactcatttcacttgatctttatgacaaccagattgaagagataagcggcctgtctaccttgcgatgcttacgagttctcctgttaggcaagaaccggattaaaaaaatctccaacctggagaatctgaaatcattggacgtgctcgatcttcacggcaatcaaatcaccaagatcgagaacatcaatcacctgtgtgagctccgagtgctgaatttagccaggaacttcctgtcgcacgtggataatctgaatggcctggatagtctgaccgagctgaacctgagacacaatcagatcacctttgtccgagatgtcgataacttgccctgtttacagcatctgtttctctcattcaacaatatcagtagtttcgacagtgtcagctgccttgcagattcctcaagcttgagtgatatcaccttcgacgggaacccaatcgcccaggaaagttggtacaagcataccgtcctacagaacatgatgcaattgaggcagctagacatgaaacgaattaccgaggaagagcgcagaatggcatcagtactggctaaaaaagaggaggaaaagaaacgtgaaagccacaagcagtctctactcaaggaaaagaagagacttaccataaataatgtggccaggcagtgggacctgcagcaacagcgggtggcaaacatcgccacaaatgaggataggaaagattctgactctccacaggatccctgtcagatcgacggaagcaccctgtccgcattcccagaggaaaccggccctctggatagtgggctgaataacgctttacaggggctctctgttattgacacctatcttgtggaagttgatggcgataccctgtccttatatggatccggagccctcgagtctctggataggaactggagcgtccagacagccggtatgatcacaactgtgtcgtttacattcatagaattcgatgaaattgtgcaggtgttgccaaaactaaagatcaaattccccaactctcttcacctaaagtttaaggaaactaatctggtgatgctccagcagttcaacgctttagcccaactccgtcgcatcgaccaactaactattgatccacagggcaatcccgtggtgaatttcactctctggaaatactacgtgctgtttcggttatctcatttcagcatgcagaagattaacggtaccgaggtcacccagaatgacatgatcatggccgagcgcctcttcggcattttagcccacgttgcctcaagcgagctgcctcagtacagactaatcagcattctgggcgatgcaagaaaaaaacagttccgatacctccttgagtccaaggggaagaaaccagggattattaacgaggagaacaacgattctaaaagactagttggcgaaaacaccaatcgggctaccctcaattacacaacaagggatttttacaacgagaagttggaagaaatcaaagagaagaaaaagttttgcaagacttatatcgaggacctcgtgaaggaggctaccgaaatcaacatgaaaaacgaggctctacagaagctttggcctcagatgttcatcgagctggtccgcgatgctgtgattgagattaggaacaaaaacagctatatgaagctttgcctccagcaaatcaccgaccagaagtag

SEQ ID NO: 194537 - DNA, 2788 bp, Artificial Sequence
  derived and/or modified sequence
aatactcccgctctgtttttatgaggctgggaaaatagaacgaggaagtggtgacgcactgggctctcacgaatacaactagaagctgcaacgactgtgtggctctatcgattcgggagaggtccagaccggaaatggtcgtttccatggtaaccctgagcaggttgcctgggagatgacctctttcgggtctctttgaatctccgctgtagcgtcacctggaaggcagatctaacagagaacctggactgtctcctatcatgattcccgggaaatatcgctctgtttctggccgggctgcgaacaacgtgaactgcgggcttcatctggttattcaaacatcatcgcttcctgaaaaaaacaaagttgaattcaagctaaataaagacacatcgtcattccccggtagacttttacaacatgaccttgaaagaaactactcaagtaggcaaggtgatcatattaatttggtgagctcatcattgtcatcatttcctattcttcaacgttcttctgaagagaaaattctttactcagacaggttgagcctagaaagacaaaagctgaccgtatgtcctatcatcaatggggaagaccaccttcgtttgttgaactttcaacacaattttataactcggatacaaaatatttctaatctacagaagttaatatcgttggatttatatgataaccagattgaagaaattagtgggctttcgactctgagatgtcttcgtgtccttctgttggggaaaaacagaatcaagaaaatctcaaatctggagaatctaaaaagcttagatgtcttggatcttcatggaaatcagattaccaaaattgaaaatattaatcatttgtgtgagttgagagttttaaatcttgccaggaactttttaagtcatgttgataatcttaatgggctggattcactaactgaacttaacttgcgacacaatcaaatcactttcgtgagagatgtggataatttgccctgcctccaacatctctttctcagctttaacaatatatctagttttgacagtgtttcctgccttgctgactcttcttccctctcggacatcacctttgatggcaatcccatagctcaagagtcatggtacaaacacactgtccttcagaatatgatgcagctgcgccagctagatatgaagagaatcacggaagaagaaaggcgtatggcatctgttttagccaaaaaagaggaagagaagaagcgggaaagtcataaacaatctttgcttaaggagaagaaaaggttaacaattaacaacgtagctcgacagtgggacttgcaacaacaacgagtagccaatattgctacaaatgaagatagaaaagattctgactctcctcaggacccctgtcagattgatggaagcaccctctctgcattcccagaggaaacagggcctctagactcaggactcaacaatgctttacaaggtttatctgtcatagacacataccttgttgaagtggacggggatacactttccctatatggctcaggagcactggaatctctggataggaattggagtgttcaaacagcaggaatgatcacaacagtctccttcactttcatagaatttgatgaaatcgtccaagtgcttcctaaactgaagattaagtttcctaattctctgcaccttaaattcaaggaaacaaatcttgtaatgctgcagcaatttaacgcactagcccaactccgtcgtattgaccagttgacaattgatcctcaaggaaatccagttgtcaattttacactctggaaatactatgtactgtttaggctaagccatttcagtatgcagaaaataaatggaacagaggtgacacagaatgatatgataatggctgaaaggctctttggaatcctagcacatgtagcatcttctgagttaccccagtatcgtctgatttccattctgggtgatgccaggaaaaagcaatttcggtatctactagaatccaaaggaaaaaaacctggtattatcaacgaagaaaataatgacagcaaaagacttgtaggagaaaacacaaatcgtgctacattaaattatactacaagagacttttataatgaaaagctagaggaaataaaggaaaagaagaaattctgtaaaacatatatagaagaccttgtgaaggaagccacagaaatcaacatgaaaaatgaggctttgcagaagctttggccacagatgttcattgagcttgttagggatgcagtcatagaaattcgcaataaaaattcctatatgaagctctgcctacagcagataacagaccaaaaataaaaatggcctttagttacagttgattttggcagttttattttttgaaggttgaaaatatgcaggttatacatgttaaaacaacaacaacactatcctataaactagaaagactagtataaaagcattattgcccactgttctcatagctaaaagttaagaaggaaggaaggaaagcaggagaaaggaaggattaattgcctgtatgtgaggaccaaacaacctttgggaactaaacagttttcagagatggcgtggcactgcatccttggttcttgctttgattggtgccctgctatagcccaaagcacgtagtatttgctgatgattcagcatgagctgcatctacctacttttagctgataattttcagttatttccctttttattttatgtcatgatttcaaagccaaaaatatgttctttttatgagtgaagaataaacttactaacaaattagtcaaaataaa

SEQ ID NO: 194538 - DNA, 2061 bp, Artificial Sequence
  derived and/or modified sequence
atgatccccggcaagtacagaagcgtgagcggcagagccgccaacaacgtgaactgcggcctgcacctggtgatccagaccagcagcctgcccgagaagaacaaggtggagttcaagctgaacaaggacaccagcagcttccccggcagactgctgcagcacgacctggagagaaactacagcagcagacagggcgaccacatcaacctggtgagcagcagcctgagcagcttccccatcctgcagagaagcagcgaggagaagatcctgtacagcgacagactgagcctggagagacagaagctgaccgtgtgccccatcatcaacggcgaggaccacctgagactgctgaacttccagcacaacttcatcaccagaatccagaacatcagcaacctgcagaagctgatcagcctggacctgtacgacaaccagatcgaggagatcagcggcctgagcaccctgagatgcctgagagtgctgctgctgggcaagaacagaatcaagaagatcagcaacctggagaacctgaagagcctggacgtgctggacctgcacggcaaccagatcaccaagatcgagaacatcaaccacctgtgcgagctgagagtgctgaacctggccagaaacttcctgagccacgtggacaacctgaacggcctggacagcctgaccgagctgaacctgagacacaaccagatcaccttcgtgagagacgtggacaacctgccctgcctgcagcacctgttcctgagcttcaacaacatcagcagcttcgacagcgtgagctgcctggccgacagcagcagcctgagcgacatcaccttcgacggcaaccccatcgcccaggagagctggtacaagcacaccgtgctgcagaacatgatgcagctgagacagctggacatgaagagaatcaccgaggaggagagaagaatggccagcgtgctggccaagaaggaggaggagaagaagagagagagccacaagcagagcctgctgaaggagaagaagagactgaccatcaacaacgtggccagacagtgggacctgcagcagcagagagtggccaacatcgccaccaacgaggacagaaaggacagcgacagcccccaggacccctgccagatcgacggcagcaccctgagcgccttccccgaggagaccggccccctggacagcggcctgaacaacgccctgcagggcctgagcgtgatcgacacctacctggtggaggtggacggcgacaccctgagcctgtacggcagcggcgccctggagagcctggacagaaactggagcgtgcagaccgccggcatgatcaccaccgtgagcttcaccttcatcgagttcgacgagatcgtgcaggtgctgcccaagctgaagatcaagttccccaacagcctgcacctgaagttcaaggagaccaacctggtgatgctgcagcagttcaacgccctggcccagctgagaagaatcgaccagctgaccatcgacccccagggcaaccccgtggtgaacttcaccctgtggaagtactacgtgctgttcagactgagccacttcagcatgcagaagatcaacggcaccgaggtgacccagaacgacatgatcatggccgagagactgttcggcatcctggcccacgtggccagcagcgagctgccccagtacagactgatcagcatcctgggcgacgccagaaagaagcagttcagatacctgctggagagcaagggcaagaagcccggcatcatcaacgaggagaacaacgacagcaagagactggtgggcgagaacaccaacagagccaccctgaactacaccaccagagacttctacaacgagaagctggaggagatcaaggagaagaagaagttctgcaagacctacatcgaggacctggtgaaggaggccaccgagatcaacatgaagaacgaggccctgcagaagctgtggccccagatgttcatcgagctggtgagagacgccgtgatcgagatcagaaacaagaacagctacatgaagctgtgcctgcagcagatcaccgaccagaagtag

SEQ ID NO: 194539 - protein, 503 aa, Artificial Sequence
  derived and/or modified sequence
MPNVAETERSNDSGNGEHKSERKSPEENLQGAVKSFCTSASGAPLGPKGDGHYPWSCPVTHTREKIYAICSDYAFLNQATSIYKTPNPSRSPCLPDSTSLSAGNNSSRYIGIPTSTSEIIYNEENSLENLSNSLGKLPLAWEIDKSEFDGVTTNSKHKSGNAKKQVSKRKTSDKKGRYQKECPQHSPLEDIKQRKVLDLRRWYCISRPQYKTSCGISSLISCWNFLYSTMGAGNLPPITQEEALHILGFQPPFEDIRFGPFTGNTTLMRWFRQINDHFHVKGCSYVLYKPHGKNKTAGETASGALSKLTRGLKDESLAYIYHCQNHYFCPIGFEATPVKANKAFSRGPLSPQEVEYWILIGESSRKHPAIHCKKWADIVTDLNTQNPEYLDIRHLERGLQYRKTKKVGGNLHCIIAFQRLNWQRFGLWNFPFGTIRQESQPPTHAQGIAKSESEDNISKKQHGRLGRSFSASFHQDSAWKKMSSIHERRNSGYQGYSDYDGND

SEQ ID NO: 194540 - DNA, 945 bp, Artificial Sequence
  derived and/or modified sequence
atgcccaacgtggccgagaccgagagaagcaacgacagcggcaacggcgagcacaagagcgagagaaagagccccgaggagaacctgcagggcgccgtgaagagcttctgcaccagcgccagcggcgcccccctgggccccaagggcgacggccactacccctggagctgccccgtgacccacaccagagagaagatctacgccatctgcagcgactacgccttcctgaaccaggccaccagcatctacaagacccccaaccccagcagaagcccctgcctgcccgacagcaccagcctgagcgccggcaacaacagcagcagatacatcggcatccccaccagcaccagcgagatcatctacaacgaggagaacagcctggagaacctgagcaacagcctgggcaagctgcccctggcctgggagatcgacaagagcgagttcgacggcgtgaccaccaacagcaagcacaagagcggcaacgccaagaagcaggtgagcaagagaaagaccagcgacaagaagggcagataccagaaggagtgcccccagcacagccccctggaggacatcaagcagagaaaggtgctggacctgagaagatggtactgcatcagcagaccccagtacaagaccagctgcggcatcagcagcctgatcagctgctggaacttcctgtacagcaccatgggcgccggcaacctgccccccatcacccaggaggaggccctgcacatcctgggcttccagccccccttcgaggacatcagattcggccccttcaccggcaacaccaccctgatgagatggttcagacagatcaacgaccacttccacgtgaagggctgcagctacgtgctgtacaagccccacggcaagaacaagaccgccggcgagaccgccggcgacctgagccaccacagaaagctgaacatcggcagctag

SEQ ID NO: 194541 - DNA, 1512 bp, Artificial Sequence
  derived and/or modified sequence
atgccaaacgtggcagagaccgaacggtccaatgatagtggcaacggagaacacaaatccgagaggaagtctccggaggagaatttgcagggcgccgtcaagtcattctgcacctcagctagcggagctcccctgggacccaagggggacggccactatccatggtcctgccccgtgacccacacacgcgaaaaaatttatgctatctgtagcgactatgcatttctcaatcaggcaacgtctatctacaagacacctaatccctctcggtcaccgtgcctgccggattccaccagcctgagtgctggaaataactcaagcaggtacatcggcattccgactagtacctctgaaataatctacaacgaggaaaattctctggaaaacctgtcgaacagcctgggaaaattaccgttggcatgggaaattgataagagtgagtttgatggagtgaccacgaacagcaagcacaagtcggggaacgctaagaaacaggtatccaagagaaaaactagcgacaagaaagggaggtaccagaaagaatgcccgcaacattcccctctcgaggacataaaacagagaaaagtgctagacttgaggaggtggtactgtattagtcgacctcagtacaaaacgagctgcggcatttcttctctgatttcttgctggaacttcttgtattctacaatgggcgcagggaatctccctcccattacccaggaggaggccctgcatatactgggcttccagcccccctttgaagatatcaggttcggcccgttcacagggaatacaacactcatgcgttggttccgccaaatcaacgaccacttccatgtaaagggatgcagctatgtgttgtacaagcctcacggcaaaaataagaccgctggagaaaccgccagtggggctctcagcaaactgacgcgggggttgaaagatgagagccttgcttatatctaccactgccagaatcactatttttgtcctattggttttgaggcaaccccagtgaaggctaacaaagccttcagtagaggacccctttctccacaagaagttgaatattggatcctgataggcgagtcaagccgaaagcatcccgccatccactgtaagaagtgggcggacattgttaccgatctcaacactcagaaccctgagtacctggatatcagacatctcgagcgtgggttgcagtataggaaaaccaagaaggtgggcggcaacctgcactgcatcattgcatttcagagactcaactggcagcgcttcggactttggaacttcccgttcggcaccattagacaggaaagtcagcctcccacccatgcacagggcatagcaaagagcgaatccgaggataacatttccaagaaacagcacgggaggcttggcaggagctttagcgcatcctttcaccaggattctgcgtggaaaaaaatgagcagtattcatgagaggcgaaacagcggctatcagggatacagcgactacgatggtaacgactag

SEQ ID NO: 194542 - DNA, 945 bp, Artificial Sequence
  derived and/or modified sequence
atgccaaacgtagcggagaccgagcggtctaacgatagcggaaatggggaacacaagtctgaacgcaagtcacccgaagagaacctgcaaggagcagtgaaaagcttctgcacgtctgcttcaggagccccccttggtcctaaaggcgacgggcactatccctggtcctgcccggtcacccatactcgggagaaaatctatgccatctgctctgactatgcctttctgaaccaggcaactagtatttacaagaccccaaacccatctagatcgccatgcctgcccgacagcacatctctctcagccggaaacaatagtagccggtacatcggtatcccgacatccacaagcgaaattatttataatgaagaaaattctttggagaaccttagcaactctcttggaaaactgccactggcttgggagatagacaagagcgagttcgacggagtgactacaaattccaagcataaaagcggcaacgctaaaaagcaggtgtcgaagagaaagacctctgataagaagggcaggtaccagaaggagtgcccacagcattcccctctcgaggacatcaagcaaaggaaggtcttggaccttcgcaggtggtattgcattagccgtccccagtataagaccagctgcggcatcagctccctgatctcctgctggaatttcctatattccacaatgggtgcaggtaatctgccaccgattactcaggaagaggcgctgcacatcctcggcttccagcctccgttcgaagacataagattcggcccctttacaggcaacactacgctgatgagatggtttcgtcagattaatgaccactttcatgttaagggatgctcatacgtgctttataagccacacggaaagaataaaacggccggcgaaacagctggggatttaagtcaccacaggaagctgaatatcggctcttag

SEQ ID NO: 194543 - DNA, 1512 bp, Artificial Sequence
  derived and/or modified sequence
atgcccaacgtggccgagacagagaggagcaatgattctggaaatggagagcacaagtctgagaggaagagccctgaggagaacctgcagggcgctgtgaagagcttctgcaccagcgccagcggggcccccctgggccccaagggagatggccactacccctggagctgccctgtgacccacacccgggagaagatctatgccatctgcagcgactatgccttcctgaaccaggccaccagcatctacaagacccccaaccccagccgcagcccctgcctgcctgacagcaccagcctgtctgctggcaacaacagcagccgctacatcggcatccccaccagcaccagcgagatcatctacaatgaggagaacagcctggagaacctgagcaacagcctgggcaagctgcccctggcctgggagattgacaagtcagaatttgatggagtgaccaccaacagcaagcacaagtctggaaatgccaagaagcaggtgtccaagaggaagaccagtgacaagaagggccgctaccagaaggaatgtccccagcacagccccctggaggacatcaagcagaggaaggtgctggacctgcggcgctggtactgcatcagccggccccagtacaagaccagctgtggcatcagcagcctcatcagctgctggaacttcctgtacagcaccatgggcgccggcaacctgccccccatcacccaggaggaggccctgcacatcctgggcttccagcccccatttgaggacatccgcttcggccccttcaccggcaacaccaccctgatgcgctggttccggcagatcaatgaccacttccacgtgaagggctgcagctatgtgctgtacaagccccacggcaagaacaagacagctggggagacagccagcggggccctgagcaagctgacccggggcctgaaggatgagagcctggcctacatctaccactgccagaaccactacttctgccccatcggctttgaggccacccctgtgaaggccaacaaggccttcagccggggccccctgagcccccaggaggtggagtactggatcctgattggagagagcagcaggaagcacccagccatccactgcaagaagtgggccgacatcgtgacagacctgaacacccagaaccctgagtacctggacatccgccacctggagcggggcctgcagtacaggaagaccaagaaggtgggcggcaacctgcactgcatcatcgccttccagaggctgaactggcagagatttggcctgtggaacttccccttcggcaccatccggcaggagagccagccccccacccacgcccagggcatcgccaagtctgagagcgaggacaacatcagcaagaagcagcacggccgcctgggccgctccttcagcgccagcttccaccaggacagcgcctggaagaagatgagcagcatccacgagaggagaaattctggctaccagggctacagcgactatgatggaaatgactag

SEQ ID NO: 194544 - DNA, 945 bp, Artificial Sequence
  derived and/or modified sequence
atgcccaacgtggccgagacagagaggagcaatgattctggaaatggagagcacaagtctgagaggaagagccctgaggagaacctgcagggcgctgtgaagagcttctgcaccagcgccagcggggcccccctgggccccaagggagatggccactacccctggagctgccctgtgacccacacccgggagaagatctatgccatctgcagcgactatgccttcctgaaccaggccaccagcatctacaagacccccaaccccagccgcagcccctgcctgcctgacagcaccagcctgtctgctggcaacaacagcagccgctacatcggcatccccaccagcaccagcgagatcatctacaatgaggagaacagcctggagaacctgagcaacagcctgggcaagctgcccctggcctgggagattgacaagtcagaatttgatggagtgaccaccaacagcaagcacaagtctggaaatgccaagaagcaggtgtccaagaggaagaccagtgacaagaagggccgctaccagaaggaatgtccccagcacagccccctggaggacatcaagcagaggaaggtgctggacctgcggcgctggtactgcatcagccggccccagtacaagaccagctgtggcatcagcagcctcatcagctgctggaacttcctgtacagcaccatgggcgccggcaacctgccccccatcacccaggaggaggccctgcacatcctgggcttccagcccccatttgaggacatccgcttcggccccttcaccggcaacaccaccctgatgcgctggttccggcagatcaatgaccacttccacgtgaagggctgcagctatgtgctgtacaagccccacggcaagaacaagacagctggggagacagctggggacctgagccaccacaggaagctgaacatcggcagctag

SEQ ID NO: 194545 - DNA, 1512 bp, Artificial Sequence
  derived and/or modified sequence
atgcccaacgtggccgagaccgagcggagcaacgacagcggcaacggggagcacaaaagtgaaaggaagtctccggaggaaaatctgcagggggctgtaaaatccttttgtacatccgcatcaggggctccattgggccccaaaggcgatggccactacccatggtcttgccccgtgacacacactagagagaagatctatgcgatctgtagcgattatgcctttctgaaccaggccaccagcatctataagactcctaacccaagtcgatcaccctgcctccctgattcgaccagcttgtcagccggtaataacagctcgcgatacatcggaatccctacaagtacatcagaaatcatctacaacgaggagaactctctggagaacctgagtaacagcctggggaaattgccactggcttgggaaatcgataaatcagaattcgacggcgttaccacaaactccaaacataagagtggtaatgccaaaaagcaggtgagcaagaggaagacttccgataagaaaggaagatatcaaaaggagtgtccacagcactcgccgcttgaagacatcaaacagcgtaaggtgctggaccttaggcgctggtattgcatctcacgtcctcagtataaaacttcctgcggaatttcctcactgatatcctgctggaacttcctgtactcaacaatgggagccgggaacctgcctcctattacccaggaagaagccctgcacattttgggctttcagccaccctttgaagacataagattcggaccgttcactggaaatactaccctgatgcgatggtttcgccaaataaatgatcattttcacgtaaaagggtgctcctacgttctgtacaagcctcatgggaaaaacaaaacagcgggcgagactgcctctggcgccctaagtaaactgaccagagggcttaaggacgaatccttggcctatatttaccactgccagaaccattacttctgccccattggctttgaggccactcccgtgaaggcgaacaaagccttctctcggggcccactgtcgccacaagaagtagagtattggatcctaattggagagtcgtctagaaaacaccctgccatccactgcaaaaagtgggcggacattgtgaccgatctcaacacccagaatccagagtaccttgatatccggcatttggagcgcggactccagtatcggaagaccaaaaaagtggggggcaacttacactgtatcatcgctttccaacgactgaactggcaacggtttggcctttggaactttccctttggcacgatccgccaggagagccagcccccaacacatgcccaaggaattgccaaatctgagagcgaagataacatcagtaaaaagcagcatggcagacttgggaggtcatttagcgcttcctttcatcaggactccgcctggaaaaagatgtcctcaatacatgagcgtcgcaacagtggctatcaaggctactccgactatgatggaaacgactag

SEQ ID NO: 194546 - DNA, 945 bp, Artificial Sequence
  derived and/or modified sequence
atgcccaacgtggccgagaccgagcggagcaacgacagcggcaacggggagcataagagcgaacggaagtctcctgaagagaacctgcagggcgccgtgaagtctttctgcacgtcagcctcaggtgcccctctcggtcccaagggggatggacactacccatggtcctgtcctgtgactcacactcgtgagaagatctatgccatctgctcggactatgcctttctaaatcaggcaacttccatatataagacaccaaacccctctagatcaccctgtctccctgacagtacgtccctgagcgccggaaataatagtagcaggtacatagggatccccacatcaacgtcagagattatctataacgaggagaactccctcgaaaatctgtcgaactcccttggaaagctgccacttgcctgggaaatcgacaaatctgagtttgacggagttacaacgaactctaaacataaaagcggtaatgccaaaaagcaggtcagcaagcgcaaaacttccgacaagaaaggccgctatcagaaggagtgtccccagcattctccacttgaagatattaaacagcggaaagtcctggacctccggagatggtattgtatcagtcgtcctcagtacaagacatcttgtgggattagcagcctcatctcatgctggaactttctgtattccactatgggcgcgggtaacctgccgccgataacccaagaggaggccttgcatattctgggctttcaacctccctttgaggacatccggtttggacctttcactggcaacactactttgatgaggtggtttagacagataaacgatcactttcacgtaaagggctgctcttacgtgctttataagccccacgggaaaaacaaaaccgctggggaaaccgctggtgacctgtctcatcaccggaagcttaacatagggtcatag

SEQ ID NO: 194547 - DNA, 1512 bp, Artificial Sequence
  derived and/or modified sequence
atgcccaacgtcgccgagaccgaaaggagcaacgactccggcaacggagagcacaagagcgaaagaaagtcgcccgaggaaaacttacagggagccgtcaaaagcttttgcaccagcgcttccggcgctcccctcggcccaaagggcgatgggcactacccttggtcgtgtcctgtcacccatactagggaaaaaatctacgccatttgttctgactatgcatttctcaaccaggccacatcgatctataagaccccaaatccttctagatcaccctgtttaccggactcaacgagtctgtcggccggtaataactcatcgcgctatattggaataccaacatctacgtctgagatcatctataatgaggagaacagcctggaaaatttgtccaacagcttgggcaaactgcctttagcctgggaaatagataaaagtgaatttgatggtgtcacaactaatagtaagcacaaaagtggaaatgctaaaaagcaggtgtctaagcgaaagactagtgataaaaaaggtcggtaccagaaggaatgcccgcaacactcaccactcgaagacatcaaacagaggaaggttctggatctaaggcgctggtactgcatctccaggccgcagtacaaaaccagttgcggtatttcaagcctgataagctgctggaactttctttattccacaatgggggctggcaacctgcctcccataacccaggaggaagctctgcacatactcggcttccaacctccttttgaagacatacggttcgggccttttaccggtaacacaacgctgatgcgttggtttcgccagataaacgaccacttccacgtgaagggctgctcttacgtattgtacaagccccacggtaagaacaagacagcaggagaaaccgcctcaggggcacttagcaagctcactcgagggttgaaggacgaaagtctcgcgtatatttatcattgccagaaccactatttttgcccgataggcttcgaggcaactcccgtaaaagctaacaaagccttcagcagaggcccactatctcctcaagaggtggagtactggattttaattggggagtctagtcgcaagcatccagccatccattgtaagaaatgggctgatatcgttaccgacctgaatacacagaatccagagtacctggacatcagacacctcgagagaggcctacagtacaggaaaacaaaaaaggtcgggggtaacctacactgtatcattgcattccagaggctcaattggcagagatttggcttgtggaacttcccctttgggacaatccgtcaggaaagtcaacctcctactcatgcccaggggattgctaagtctgaaagtgaagacaacatctcaaagaagcaacacggccgtcttggcagatccttctctgcgagttttcaccaggactcggcctggaaaaaaatgagctctatccacgagagacgtaactccggttaccagggatatagcgattacgatggcaacgactag

SEQ ID NO: 194548 - DNA, 1765 bp, Artificial Sequence
  derived and/or modified sequence
aaacaccacagatgcccatcaaaggggcgcacgggtctggaggcgcagctcaggtttttgcgttggtcaccctgccctccgcacgtggagagggcaggcataaagcaccttgaaaggaaggtgctgtcaatgctatccgacgacctgtcgccgggcaccgcagcatcctcgctcgctccgatgggacgagggacgccggccccagggtaacaggaggcgcctcgccggccgcgcgctggatgctgtgatccaggtccggagccgggttccgccgcggccgcagcgacccgaccccacccgacaggccagaggagctcattttgcagctctcaagcttttatagcatgctgtaaacaattgtcaaagttgtttatcaagaaacagatagagttgcaacttgtttctagtaatagaaacttttacactgcattcaatgcctaacgttgcagaaacagaaaggtcaaatgattctggaaatggtgagcacaaatctgagagaaagtcacctgaagagaatctacaaggtgctgtaaaatctttctgcacaagtgcctcaggagcacccttgggtcccaaaggagatggtcattatccatggagttgtccagtgactcatacacgggaaaaaatttatgccatctgttcggactatgcctttctcaaccaggcgacctcaatctataaaactccaaatccatcccgctctccttgcctccctgatagtacctctttatctgctggaaataattcatcaagatacattggtatcccgactagtacatcggaaattatctacaatgaagaaaatagcttggaaaacttatccaacagcctgggcaagctacctctcgcatgggaaattgataaatctgaatttgatggggtgaccacaaattcgaaacacaaatcaggcaatgcaaagaaacaagtttccaagagaaaaacttcagataaaaagggaagatatcagaaggaatgtcctcagcattctcctcttgaagatattaaacagcggaaagtattagacctcagacgatggtactgcataagccgaccacagtataagacttcttgtggcatctcttcattaatttcttgttggaatttcttatacagcacaatgggagctggaaaccttccacctattacccaagaagaagctttacatattctgggctttcaacctccatttgaagatattaggtttggtcctttcacggggaatacaacacttatgaggtggtttagacaaattaatgaccacttccatgtaaaaggatgctcttatgttctatataagcctcatgggaagaataaaacagcaggagaaactgcaggggacctctctcaccacaggaagttgaatattggatcttaattggagaatcaagtagaaaacatcctgccattcactgtaaaaaatgggcagatattgttactgatctaaacactcaaaatccagaatacctggatatccggcacttagagaggggactgcagtatagaaaaacaaagaaggttgggggaaatttgcattgcatcatagcattccagagacttaactggcaaagatttggcctttggaactttccatttggaaccattagacaagaatcacaacctccaacacatgcccagggaattgccaaatctgagagtgaagacaatatttccaagaagcagcatgggcgtctgggccggtctttcagtgctagtttccatcaggactcggcatggaaaaagatgtctagtatccatgagagaa

SEQ ID NO: 194549 - DNA, 945 bp, Artificial Sequence
  derived and/or modified sequence
atgcctaatgtcgcggaaaccgaaaggtctaatgattcaggtaatggagaacacaagagtgagcgaaagagcccggaggagaatctgcaaggagcagtgaaatcattctgcacctctgcctccggggcacctctgggtcccaaaggtgatggtcactatccctggtcctgccccgtcactcatactagagaaaagatttacgcaatctgttccgactatgccttcctcaatcaggccaccagtatttataagacgcctaacccgagcaggtctccttgtctgcctgatagcacttccttatccgccggtaataactcatctcgatatattgggatcccaacctctactagcgaaataatctacaacgaggagaactctctggaaaacctatccaacagcctgggcaaactgccattggcctgggagatcgacaagtcagagttcgatggcgtaacgactaactctaagcacaaatctgggaatgcgaaaaaacaggtgtccaaaaggaagacatccgacaagaagggacggtaccagaaggagtgtccacagcactcaccactggaggatataaaacaaaggaaggttctggacctgaggaggtggtactgcatcagtaggcctcaatataagacatcctgtggcatcagcagtctgatcagttgctggaatttcctatatagcaccatgggtgcaggaaatcttccaccaatcacccaggaggaggccctacacattctagggttccaaccccctttcgaggatattaggttcggccctttcaccggaaatacaacgctgatgcggtggttccgccagatcaatgatcacttccatgtgaagggatgctcatatgtgctctacaaaccacatggtaaaaacaaaacagctggcgagacagccggtgatttgtcccaccatcggaaactgaacatcgggagctag

SEQ ID NO: 194550 - DNA, 3857 bp, Artificial Sequence
  derived and/or modified sequence
agtaacgccttctccaagtggatggcggggtggacacgcgtcccggcgccccgggctccctgggatatgtagttcgcgacaggacgagcggaaatactgccaggattttaccacctctcgcccatttatttacttctcggtcaccgctttcgggggacagataaacaccacagatgcccatcaaaggggcgcacgggtctggaggcgcagctcaggtttttgcgttggtcaccctgccctccgcacgtggagagggcaggcataaagcaccttgaaaggaaggtgctgtcaatgctatccgacgacctgtcgccgggcaccgcagcatcctcgctcgctccgatgggacgagggacgccggccccagggtaacaggaggcgcctcgccggccgcgcgctggatgctgtgatccaggtccggagccgggttccgccgcggccgcagcgacccgaccccacccgacaggccagaggaatcagtttagacttgaaattcagtttttcctgaaactgatcagaagttagtgacaccttgattggatccgtttttctgtcaggagctcattttgcagctctcaagcttttatagcatgctgtaaacaattgtcaaagttgtttatcaagaaacagatagagttgcaacttgtttctagtaatagaaacttttacactgcattcaatgcctaacgttgcagaaacagaaaggtcaaatgattctggaaatggtgagcacaaatctgagagaaagtcacctgaagagaatctacaaggtgctgtaaaatctttctgcacaagtgcctcaggagcacccttgggtcccaaaggagatggtcattatccatggagttgtccagtgactcatacacgggaaaaaatttatgccatctgttcggactatgcctttctcaaccaggcgacctcaatctataaaactccaaatccatcccgctctccttgcctccctgatagtacctctttatctgctggaaataattcatcaagatacattggtatcccgactagtacatcggaaattatctacaatgaagaaaatagcttggaaaacttatccaacagcctgggcaagctacctctcgcatgggaaattgataaatctgaatttgatggggtgaccacaaattcgaaacacaaatcaggcaatgcaaagaaacaagtttccaagagaaaaacttcagataaaaagggaagatatcagaaggaatgtcctcagcattctcctcttgaagatattaaacagcggaaagtattagacctcagacgatggtactgcataagccgaccacagtataagacttcttgtggcatctcttcattaatttcttgttggaatttcttatacagcacaatgggagctggaaaccttccacctattacccaagaagaagctttacatattctgggctttcaacctccatttgaagatattaggtttggtcctttcacggggaatacaacacttatgaggtggtttagacaaattaatgaccacttccatgtaaaaggatgctcttatgttctatataagcctcatgggaagaataaaacagcaggagaaactgcttcaggggccctgtcaaagttaacccgtggattgaaagatgaatcgctggcttatatctatcattgccaaaatcattatttttgtccaattggcttcgaagcaacccctgttaaagctaataaagcattcagcaggggacctctctcaccacaggaagttgaatattggatcttaattggagaatcaagtagaaaacatcctgccattcactgtaaaaaatgggcagatattgttactgatctaaacactcaaaatccagaatacctggatatccggcacttagagaggggactgcagtatagaaaaacaaagaaggttgggggaaatttgcattgcatcatagcattccagagacttaactggcaaagatttggcctttggaactttccatttggaaccattagacaagaatcacaacctccaacacatgcccagggaattgccaaatctgagagtgaagacaatatttccaagaagcagcatgggcgtctgggccggtctttcagtgctagtttccatcaggactcggcatggaaaaagatgtctagtatccatgagagaaggaacagtggttaccagggttacagtgattacgatgggaatgattgactatgcttgctactgaacagctggcattatatatgaaactgctatatacaggactgtataaagacagtagaagattttagtaagcctacattaaataggagcagatcttgtggtataaaaaataaccttgtagttctccagatactaagcttgtatatgattatggtgggtgatttcagatatataagcagataagcacagattattgtcctttcaagttaagagtatataatctggacagaaaatttcacaaaattcaataaaattacaactgttgtctaaataagtgaaacacaaattcacttaatagcatcaagatttgaaatacttaagcatgaagtgacttttataatgactcgatccctagacatttgttacagatagttttatgcctaagaccaagatgtaaagtaccatctgcccttaaaaaaaattggggctgtcaatttctagttttcactcatggttaacacgcatttaaaattatttcatgagtctagtagttctttgatttatagcaggatcttgcttgcctcatttgtttcctggttatgttcttaggattctgactaagaggcaaaagagaaaagactcaagaaactgatcctggagatcgagaccatcctggctaacatggtgaaaccccgtctctactaaacatacaaaaaattagccgggtgtagtggtgggcacctgtagtcctagctactcgagaggctgaggcaggagaatggcgtgaacccgggaggtggagcttgcagtgagcggagatcgcgccactgcactccagcctgggcgacagggcaagactctgtctcaaaaaaaaaaaaaaaaaaaaagacggatccttttttttggtgcaaatgggtgacttagtgcattgattcagatttttaaaatttcttgatgtggtttgtaataatcaaatattgacaagaaccttaggtctcgaaagacttttataagtctagatgacgtttgccttaggggtaaagtaaaagaacaattggcaccttaagtttctatacccaaggttatctgtgaaatgagatctcctgatatttgattgctttctcagtatggagtcatatgttgataacagtactgaagatgcataagaaatgcccaagtcactcagaggacaactacccatattccagactctgagctgtttcctttttaaaaatcatatagacaattagctgtttgaagtgagtattaaatatttcagaagtgtgaatttcatgtatttgagctcctctagttgctgttggtttttcttctgctgccaacctgtgactcacaaatgactaggatctcttgttctttaattttagggtcttgttccaggactcaaatcagtaacttggtgattacaaggtgctgaatgtgttggtaaccatatcgcaatacacctcaaggaaaaggttcagatttttatttttaaaatattttcatttttttcttgaattttatatccgtttgttcactcgtacatgcctagcctacagaaggggatatatattatgaaatggtcatttttctgaagagaatattttgcttgaaatgcaaaggactgaaagagatttgtaggttgttgattttgttacttcatactggaacttttaaaaagatttcatcaaataaagttttgttttctactttt

SEQ ID NO: 194551 - DNA, 3198 bp, Artificial Sequence
  derived and/or modified sequence
agtaacgccttctccaagtggatggcggggtggacacgcgtcccggcgccccgggctccctgggatatgtagttcgcgacaggacgagcggaaatactgccaggattttaccacctctcgcccatttatttacttctcggtcaccgctttcgggggacagataaacaccacagatgcccatcaaaggggcgcacgggtctggaggcgcagctcaggtttttgcgttggtcaccctgccctccgcacgtggagagggcaggcataaagcaccttgaaaggaaggtgctgtcaatgctatccgacgacctgtcgccgggcaccgcagcatcctcgctcgctccgatgggacgagggacgccggccccagggtaacaggaggcgcctcgccggccgcgcgctggatgctgtgatccaggtccggagccgggttccgccgcggccgcagcgacccgaccccacccgacaggccagaggcaatgcaaagaaacaagtttccaagagaaaaacttcagataaaaagggaagatatcagaaggaatgtcctcagcattctcctcttgaagatattaaacagcggaaagtattagacctcagacgatggtactgcataagccgaccacagtataagacttcttgtggcatctcttcattaatttcttgttggaatttcttatacagcacaatgggagctggaaaccttccacctattacccaagaagaagctttacatattctgggctttcaacctccatttgaagatattaggtttggtcctttcacggggaatacaacacttatgaggtggtttagacaaattaatgaccacttccatgtaaaaggatgctcttatgttctatataagcctcatgggaagaataaaacagcaggagaaactgcttcaggggccctgtcaaagttaacccgtggattgaaagatgaatcgctggcttatatctatcattgccaaaatcattatttttgtccaattggcttcgaagcaacccctgttaaagctaataaagcattcagcaggggacctctctcaccacaggaagttgaatattggatcttaattggagaatcaagtagaaaacatcctgccattcactgtaaaaaatgggcagatattgttactgatctaaacactcaaaatccagaatacctggatatccggcacttagagaggggactgcagtatagaaaaacaaagaagccaacatttttttcttctcaggttgggggaaatttgcattgcatcatagcattccagagacttaactggcaaagatttggcctttggaactttccatttggaaccattagacaagaatcacaacctccaacacatgcccagggaattgccaaatctgagagtgaagacaatatttccaagaagcagcatgggcgtctgggccggtctttcagtgctagtttccatcaggactcggcatggaaaaagatgtctagtatccatgagagaaggaacagtggttaccagggttacagtgattacgatgggaatgattgactatgcttgctactgaacagctggcattatatatgaaactgctatatacaggactgtataaagacagtagaagattttagtaagcctacattaaataggagcagatcttgtggtataaaaaataaccttgtagttctccagatactaagcttgtatatgattatggtgggtgatttcagatatataagcagataagcacagattattgtcctttcaagttaagagtatataatctggacagaaaatttcacaaaattcaataaaattacaactgttgtctaaataagtgaaacacaaattcacttaatagcatcaagatttgaaatacttaagcatgaagtgacttttataatgactcgatccctagacatttgttacagatagttttatgcctaagaccaagatgtaaagtaccatctgcccttaaaaaaaattggggctgtcaatttctagttttcactcatggttaacacgcatttaaaattatttcatgagtctagtagttctttgatttatagcaggatcttgcttgcctcatttgtttcctggttatgttcttaggattctgactaagaggcaaaagagaaaagactcaagaaactgatcctggagatcgagaccatcctggctaacatggtgaaaccccgtctctactaaacatacaaaaaattagccgggtgtagtggtgggcacctgtagtcctagctactcgagaggctgaggcaggagaatggcgtgaacccgggaggtggagcttgcagtgagcggagatcgcgccactgcactccagcctgggcgacagggcaagactctgtctcaaaaaaaaaaaaaaaaaaaaagacggatccttttttttggtgcaaatgggtgacttagtgcattgattcagatttttaaaatttcttgatgtggtttgtaataatcaaatattgacaagaaccttaggtctcgaaagacttttataagtctagatgacgtttgccttaggggtaaagtaaaagaacaattggcaccttaagtttctatacccaaggttatctgtgaaatgagatctcctgatatttgattgctttctcagtatggagtcatatgttgataacagtactgaagatgcataagaaatgcccaagtcactcagaggacaactacccatattccagactctgagctgtttcctttttaaaaatcatatagacaattagctgtttgaagtgagtattaaatatttcagaagtgtgaatttcatgtatttgagctcctctagttgctgttggtttttcttctgctgccaacctgtgactcacaaatgactaggatctcttgttctttaattttagggtcttgttccaggactcaaatcagtaacttggtgattacaaggtgctgaatgtgttggtaaccatatcgcaatacacctcaaggaaaaggttcagatttttatttttaaaatattttcatttttttcttgaattttatatccgtttgttcactcgtacatgcctagcctacagaaggggatatatattatgaaatggtcatttttctgaagagaatattttgcttgaaatgcaaaggactgaaagagatttgtaggttgttgattttgttacttcatactggaacttttaaaaagatttcatcaaataaagttttgttttctacttttaatt

SEQ ID NO: 194552 - DNA, 1512 bp, Artificial Sequence
  derived and/or modified sequence
atgcccaacgtggccgagaccgagagaagcaacgacagcggcaacggcgagcacaagagcgagagaaagagccccgaggagaacctgcagggcgccgtgaagagcttctgcaccagcgccagcggcgcccccctgggccccaagggcgacggccactacccctggagctgccccgtgacccacaccagagagaagatctacgccatctgcagcgactacgccttcctgaaccaggccaccagcatctacaagacccccaaccccagcagaagcccctgcctgcccgacagcaccagcctgagcgccggcaacaacagcagcagatacatcggcatccccaccagcaccagcgagatcatctacaacgaggagaacagcctggagaacctgagcaacagcctgggcaagctgcccctggcctgggagatcgacaagagcgagttcgacggcgtgaccaccaacagcaagcacaagagcggcaacgccaagaagcaggtgagcaagagaaagaccagcgacaagaagggcagataccagaaggagtgcccccagcacagccccctggaggacatcaagcagagaaaggtgctggacctgagaagatggtactgcatcagcagaccccagtacaagaccagctgcggcatcagcagcctgatcagctgctggaacttcctgtacagcaccatgggcgccggcaacctgccccccatcacccaggaggaggccctgcacatcctgggcttccagccccccttcgaggacatcagattcggccccttcaccggcaacaccaccctgatgagatggttcagacagatcaacgaccacttccacgtgaagggctgcagctacgtgctgtacaagccccacggcaagaacaagaccgccggcgagaccgccagcggcgccctgagcaagctgaccagaggcctgaaggacgagagcctggcctacatctaccactgccagaaccactacttctgccccatcggcttcgaggccacccccgtgaaggccaacaaggccttcagcagaggccccctgagcccccaggaggtggagtactggatcctgatcggcgagagcagcagaaagcaccccgccatccactgcaagaagtgggccgacatcgtgaccgacctgaacacccagaaccccgagtacctggacatcagacacctggagagaggcctgcagtacagaaagaccaagaaggtgggcggcaacctgcactgcatcatcgccttccagagactgaactggcagagattcggcctgtggaacttccccttcggcaccatcagacaggagagccagccccccacccacgcccagggcatcgccaagagcgagagcgaggacaacatcagcaagaagcagcacggcagactgggcagaagcttcagcgccagcttccaccaggacagcgcctggaagaagatgagcagcatccacgagagaagaaacagcggctaccagggctacagcgactacgacggcaacgactag

SEQ ID NO: 194553 - protein, 791 aa, Artificial Sequence
  derived and/or modified sequence
MADDKVAILTDDEEEQKRKYVLADPFNGISREPEPPSNETPSSTETSAIPEEEIDWIEKHCVKINNDLLISKVFYFFFYSAYGSLYPLLPVYYKQLGMSPSQSGLLVGIRYFIEFCSAPFWGVVADRFKKGKIVLLFSLLCWVLFNLGIGFVKPATLRCVPKIRPTTHPTNASHQLTILPTNSSFTSFLTISPKMREKRNLLETRLNVSDTVTLPTAPNMNSEPTLQPQTGEITNRMMDLTLNSSTATPVSPGSVTKETTTVIVTTTKSLPSDQVMLVYDQQEVEAIFLVILVVVIIGEFFSASSVTIVDTVTLQYLGKHRDRYGLQRMWGSLGWGLAMLSVGIGIDYTHIEVLIDGKGCKPPEYRNYQIVFIVFGVLMTMALIVATQFRFRYNHFKNDDSKGKEVEIPQVERNNSTESSEETPTTTSHSQAFNFWDLIKLLCSVQYGSVLFVAWFMGFGYGFVFTFLYWHLEDLNGTTTLFGVCSVLSHVSELTAYFFSHKLIELIGHIRVLYIGLACNTARYIYISYLENAWTVLPMEVLQGVTHAAIWAACISYLSAAVPPELRTSAQGILQGLHLGLGRGCGAMIGGVLVNYFGAAATFRGIGMACLVILLLFALIQWLAVPDEEEDKTMLAERIPVPSSPVPIATIDLVQQQTEDVMPRIEPRLPPKKTKHQEEQEDVNKPAWGVSSSPWVTFVYALYQIKEMMQLTRDNRASEIQPLQGTNENRENSPAGRAQPVPCETHSDPSRNQPSPDAAASQTQTSPAHPSVDPCTEESEEQQAQLAAGGH

SEQ ID NO: 194554 - protein, 253 aa, Artificial Sequence
  derived and/or modified sequence
MEVLQGVTHAAIWAACISYLSAAVPPELRTSAQGILQGLHLGLGRGCGAMIGGVLVNYFGAAATFRGIGMACLVILLLFALIQWLAVPDEEEDKTMLAERIPVPSSPVPIATIDLVQQQTEDVMPRIEPRLPPKKTKHQEEQEDVNKPAWGVSSSPWVTFVYALYQIKEMMQLTRDNRASEIQPLQGTNENRENSPAGRAQPVPCETHSDPSRNQPSPDAAASQTQTSPAHPSVDPCTEESEEQQAQLAAGGH

SEQ ID NO: 194555 - protein, 231 aa, Artificial Sequence
  derived and/or modified sequence
MEVLQGVTHAAIWAACISYLSAAVPPELRTSAQGILQGLHLGLGRGCGAMIGGVLVNYFGAAATFRGIGMACLVILLLFALIQWLAVPDEEEDKTMLAERIPVPSSPVPIATIDLVQQQTEDVNKPAWGVSSSPWVTFVYALYQIKEMMQLTRDNRASEIQPLQGTNENRENSPAGRAQPVPCETHSDPSRNQPSPDAAASQTQTSPAHPSVDPCTEESEEQQAQLAAGGH

SEQ ID NO: 194556 - DNA, 2376 bp, Artificial Sequence
  derived and/or modified sequence
atggctgatgataaagtggctatcctgaccgacgatgaggaggagcaaaaacgaaagtacgtcctggccgatccattcaatggaatctcgagagagccggagccacctagtaatgaaacccccagctccacggagacttcagcaatcccagaggaagaaattgattggatagagaagcattgcgtgaagataaataacgaccttctcatcagcaaggttttctacttcttcttctactccgcatacggatcactgtacccattgctacctgtttactacaagcagttgggaatgtcaccgtctcagtcaggtctgctcgtaggaattcggtacttcattgaattctgcagtgcccctttctggggagtcgtggctgatcggttcaagaaagggaagatagtcttgctgttctccttgctctgctgggtactgtttaacctgggtatcggctttgtgaaaccagccactctccggtgcgtcccaaaaattaggcctactacgcaccctacgaatgcatcccatcagctgaccatccttcccaccaatagcagctttacgtcttttctgactatttctccaaagatgcgtgaaaagaggaacctcttggaaacccgccttaatgtttccgatactgtaacactgcctaccgccccgaatatgaacagtgagccaacgttgcagccccaaacgggcgagatcacaaaccgtatgatggacttgaccctgaactcttcgaccgccactccagtttcgcctggatccgtcacaaaggaaactaccacagtaattgtcactactactaagagtttaccttctgatcaggttatgctcgtgtacgaccaacaggaggtagaagctatctttcttgtgatcctcgttgtagttataattggcgagttcttctccgcaagctccgtgaccatcgtggacactgtgacgctccagtatctgggtaaacatcgtgacagatatgggctccagcgcatgtgggggtccctaggatggggcctggctatgctgagcgtggggattgggatcgattacactcatatcgaagtactaatcgatgggaagggctgtaagcctcctgaataccgaaattatcagatcgtgtttatcgtctttggggtgctgatgaccatggccctgatcgtggctacacagttccggttcagatataaccatttcaaaaatgacgactctaagggaaaggaagtggaaatcccccaggttgagcggaacaactcaacagagagctcagaagaaaccccgaccactacctctcatagtcaggcttttaatttctgggaccttataaagttactgtgtagcgtgcagtatggatcagttctgttcgttgcctggtttatgggctttggttacggcttcgtgtttacatttctgtactggcaccttgaggacttgaacggtacaaccacacttttcggagtatgctctgtgctgagtcacgtaagcgaactgacggcctatttttttagtcacaagcttatcgaactgattggccacattcgggtcctttacatcggacttgcctgcaatactgcacgctacatatacattagttacctcgagaatgcctggactgtattgcccatggaagtcctccaaggtgtgacacacgccgccatatgggcggcctgtatttcatatttaagcgctgctgttcctcccgagctcaggacatccgcgcagggcatactgcaggggcttcacctgggcctcggccgaggctgcggtgccatgatcggcggagtcttggtgaactactttggcgcggcagccaccttccgaggcattggcatggcctgtctggttattctcctcctattcgcccttattcagtggctggccgtgccggacgaggaggaggataaaaccatgctggccgaacgcattcctgtgccgtctagcccagtccccatcgccacgattgacctcgtgcagcagcagacggaagacgttatgccgagaatcgagcctcgcctgccacccaaaaaaacaaagcaccaggaggagcaggaggacgtgaacaagccagcctggggggtgtcatcgagtccctgggtgacattcgtgtatgctctctatcagattaaagaaatgatgcagcttaccagggacaatcgcgcttcagagatacaacctctgcaggggaccaatgaaaatcgggagaatagccctgccgggcgcgcccagccagtgccatgtgagacacattccgatcccagtaggaaccagccctctccagatgccgccgcctcacagacacagacaagccccgcccatccttccgtggacccttgcacggaggagagcgaggagcagcaggctcagctggcggccgggggtcattag

SEQ ID NO: 194557 - DNA, 2376 bp, Artificial Sequence
  derived and/or modified sequence
atggccgacgacaaagtggcaatactaaccgatgacgaggaggagcagaaacggaagtacgtgctggcagacccatttaatgggatttctagggaaccggagcccccttccaacgagacacccagcagcacggaaacgtccgccataccggaggaggagatcgattggatcgagaagcattgcgtcaaaatcaacaacgacctgctcatctcaaaggttttttacttttttttctactccgcctacggcagcctgtatcctttgctgcctgtgtactacaagcagctcgggatgtctcccagtcagagcggcctattggtcggaatccgctactttatcgaattctgttctgctcctttttggggcgtcgtggccgatcggttcaagaaggggaagatcgtgctgctcttctcgcttttgtgttgggttctctttaaccttggcatcggctttgtgaagcctgctacactgcgttgtgtccctaagatacgccccacgacacacccaactaacgccagtcaccaacttacaatcctacccactaatagttcttttacctccttcttgaccatttcccctaaaatgcgggagaagcggaacctcctcgaaacaagactcaatgtgagtgacaccgtcaccctgcctaccgcgcccaatatgaactccgaaccaacccttcagccacagaccggcgaaatcaccaataggatgatggacctgactctaaatagttcaactgccactcccgttagtcctggttccgtcaccaaggagactaccaccgtcattgtgaccaccactaaatccctcccatccgatcaagtgatgctagtttatgatcagcaagaggtagaagccattttcctggtgattttggtggttgtcatcatcggtgagtttttctctgcttcttccgtgactatcgttgatacggtcacactgcagtacctgggcaaacacagagatcgctacgggctgcagcggatgtggggttccctaggctggggcctggccatgttatcagttggcattggaattgactatacacacattgaggtgttgatcgatggaaaaggctgcaagcccccagaatatagaaattaccagattgtgttcattgtgtttggggttctcatgactatggccttgatcgtggccacacagttcaggtttaggtataaccattttaaaaacgacgacagcaaaggtaaagaagtggagattccgcaggttgagaggaacaattcaacagagagttcagaggagaccccaacaacaacttcgcattcacaggcatttaatttttgggatttaataaagctactttgcagcgttcagtacggaagcgtcttgttcgttgcatggttcatgggtttcggatacggattcgtgtttacctttctgtattggcacctggaggacctgaacgggacaaccactctgttcggagtgtgctcagtgctttcccacgtgagtgagctcacggcctactttttctcccacaaacttattgaactcatcggccatataagggtgctttacattggactcgcatgtaatacagctaggtacatctatatctcttatttagagaatgcgtggaccgtgttgccaatggaggtcttgcagggagtgacgcatgcggccatatgggccgcctgcatctcttacttgagcgctgctgtgccgcccgaactgcgcacgtctgcccagggcatcctccagggattgcatctcggacttggccggggctgcggtgccatgataggtggggtgttagtcaattattttggagctgcagccactttcagggggataggtatggcctgcttggtaatcctgttactatttgccttaatccagtggctggcggtcccagacgaagaagaggataaaactatgctcgcagaacgaatccctgtgccatcatcacctgtgccaatcgcaaccatagatctggtacagcaacagaccgaggacgttatgccaaggatcgaacctcgtctcccccctaagaaaactaaacaccaggaggagcaggaagacgtgaataaaccagcctggggcgtcagcagctcaccctgggtaacatttgtgtacgccctttatcagattaaggagatgatgcagctaacacgcgataatcgtgcctcagagatccagcccctgcagggtacaaatgagaatagagaaaattctccagcggggcgagcccagcccgtaccatgtgaaacccactctgatccctccaggaaccagccttctccagacgcggcagcctcacagacccagacttcccctgcccacccgtcagtggacccctgcacagaagagagtgaagagcagcaggcgcagctcgccgcgggcggacactag

SEQ ID NO: 194558 - DNA, 129 bp, Artificial Sequence
  derived and/or modified sequence
atggccgacgacaaagtggctatcctcactgacgacgaggaagaacagaagcggaaatatgtactggccgatccttttaacggaatcagccgcgagcctgaaccccctagcaacgaaaccccgtcttag

SEQ ID NO: 194559 - DNA, 762 bp, Artificial Sequence
  derived and/or modified sequence
atggaagttttacagggtgtgacacacgcagccatctgggctgcttgcatatcctatctatccgccgctgttccacccgaactgaggactagcgcccagggtattctccaaggcctccaccttgggctggggcgcggatgcggcgccatgattggtggagtactggtgaattatttcggcgccgccgctacattccggggaatcggcatggcctgcctggtgatactgctgctgtttgccttgatccaatggctcgcggtacctgacgaagaagaggacaaaaccatgctggctgagcggatcccagtgcctagtagccccgtacctatcgcgactatagatctggtccagcagcagaccgaagacgtcatgccccgaatcgagcctaggctgcctccaaaaaaaaccaaacaccaagaagagcaagaggacgtgaacaaacctgcttggggtgtgtccagctccccatgggtcactttcgtgtatgccctctatcaaatcaaggaaatgatgcagctgacaagggacaaccgcgcatcagaaatacagccactccaggggactaacgaaaatcgggagaactcgcccgccggaagagctcaacccgtaccctgcgaaacacactccgatccaagcagaaatcagccgtccccagatgccgcggcctcccagacacagactagccccgcgcacccatcagtcgacccttgtactgaagagagcgaggaacagcaagcacaactggcagctggtggacattag

SEQ ID NO: 194560 - DNA, 696 bp, Artificial Sequence
  derived and/or modified sequence
atggaagtcttacaaggggttactcatgcagcgatctgggcggcttgcataagctacctctctgctgccgttccccccgagcttcggaccagcgcccaaggcatcctccagggcctgcaccttgggctgggacgcggatgtggcgctatgatagggggggtattggttaactacttcggcgctgcggctactttccggggtatcgggatggcttgcctggtcatcctgctcctgtttgcactgattcagtggttggctgtgcccgatgaagaggaggataagactatgttggccgaacggatccctgtgccaagctctcctgtgccaatcgcaacaatcgatctggtgcagcagcagacggaagacgtcaataagcccgcctggggcgtgagcagctccccatgggttacttttgtgtacgccttgtatcagattaaagagatgatgcagctgacccgtgataatagagcctcggagatacagcccctgcagggaacaaatgaaaatagagagaattcacccgccggcagggcccagccagtcccatgcgagacacattccgatccctctagaaatcagccctcaccagatgccgcagcctcgcagactcaaacctcacccgcccacccatccgtcgacccctgcacggaggaatcggaagagcagcaagcgcagctcgctgccggaggccactag

SEQ ID NO: 194561 - DNA, 2376 bp, Artificial Sequence
  derived and/or modified sequence
atggctgatgacaaggtggccatcctgacagatgatgaggaggagcagaagaggaaatatgtgctggccgaccccttcaacggcatcagccgggagcctgagccccccagcaatgagacccccagcagcacagagaccagcgccatccctgaggaggagattgactggattgagaagcactgtgtgaagatcaacaatgacctgctgatcagcaaggtgttctacttcttcttctacagcgcctacggcagcctgtaccccctgctgcctgtgtactacaagcagctgggcatgagccccagccagagcggcctgctggtgggcatccgctacttcatcgagttctgcagcgcccccttctggggcgtggtggccgaccgcttcaagaagggcaagatcgtgctgctcttcagcctgctgtgctgggtgctcttcaacctgggcattggatttgtgaagccagccaccctgcgctgtgtgcccaagatccggcccaccacccaccccaccaatgccagccaccagctgaccatcctgcccaccaacagcagcttcaccagcttcctgaccatcagccccaagatgagggagaagaggaacctgctggagacccggctgaatgtgtctgacacagtgaccctgcccacagcccccaacatgaacagcgagcccaccctgcagccccagacaggagagatcaccaacaggatgatggacctgaccctgaacagcagcacagccacccctgtgtccccaggctctgtgaccaaggagaccaccaccgtgattgtgaccaccaccaagagcctgcccagcgaccaggtgatgctggtgtatgaccagcaggaggtggaggccatcttcctggtgatcctggtggtggtgatcattggagagttcttcagcgccagctctgtgaccatcgtggacacagtgaccctgcagtacctgggcaagcaccgggacagatatggcctgcagaggatgtggggcagcctgggctggggcctggccatgctgtctgtgggcatcggcatcgactacacccacatcgaggtgctgattgatggcaagggctgcaagcccccagagtacagaaactaccagatcgtgttcatcgtgtttggagtgctgatgaccatggccctgattgtggccacccagttccgcttccgctacaaccacttcaagaatgatgacagcaagggcaaggaggtggagatcccccaggtggagaggaacaacagcacagagagcagcgaggagacccccaccaccaccagccacagccaggccttcaacttctgggacctgatcaagctgctgtgcagcgtgcagtatggctctgtgctgtttgtggcctggttcatgggcttcggctacggctttgtgttcaccttcctgtactggcacctggaggacctgaatggcaccaccaccctgtttggagtgtgcagcgtgctgagccacgtgtctgagctgacagcctacttcttcagccacaagctgattgagctgattggccacatccgggtgctgtacatcggcctggcctgcaacacagcccgctacatctacatctcctacctggagaatgcctggacagtgctgcccatggaggtgctgcagggcgtgacccacgccgccatctgggccgcctgcatctcctacctgtctgctgctgtgcccccagagctgcggaccagcgcccagggcatcctgcagggcctgcacctgggcctgggccggggctgtggggccatgattggaggagtgctggtgaactactttggagctgctgccaccttccggggcatcggcatggcctgcctggtgatcctgctgctgtttgccctgatccagtggctggccgtgcctgatgaggaggaggacaagaccatgctggccgagcgcatccctgtgcccagcagccctgtgcccatcgccaccatcgacctggtgcagcagcagacagaagatgtgatgcccagaattgagccccggctgccccccaagaagaccaagcaccaggaggagcaggaggatgtgaacaagccagcctggggcgtgagcagcagcccctgggtgacctttgtgtatgccctgtaccagatcaaggagatgatgcagctgacccgggacaacagagccagcgagatccagcccctgcagggcaccaatgaaaatcgggagaacagccctgctggccgggcccagcctgtgccctgtgagacccacagcgaccccagcaggaaccagcccagcccagatgctgctgccagccagacccagaccagccctgcccaccccagcgtggacccctgcacagaggagagcgaggagcagcaggcccagctggccgccggcggccactag

SEQ ID NO: 194562 - DNA, 129 bp, Artificial Sequence
  derived and/or modified sequence
atggctgatgacaaggtggccatcctgacagatgatgaggaggagcagaagaggaaatatgtgctggccgaccccttcaacggcatcagccgggagcctgagccccccagcaatgagacccccagctag

SEQ ID NO: 194563 - DNA, 762 bp, Artificial Sequence
  derived and/or modified sequence
atggaggtgctgcagggcgtgacccacgccgccatctgggccgcctgcatctcctacctgtctgctgctgtgcccccagagctgcggaccagcgcccagggcatcctgcagggcctgcacctgggcctgggccggggctgtggggccatgattggaggagtgctggtgaactactttggagctgctgccaccttccggggcatcggcatggcctgcctggtgatcctgctgctgtttgccctgatccagtggctggccgtgcctgatgaggaggaggacaagaccatgctggccgagcgcatccctgtgcccagcagccctgtgcccatcgccaccatcgacctggtgcagcagcagacagaagatgtgatgcccagaattgagccccggctgccccccaagaagaccaagcaccaggaggagcaggaggatgtgaacaagccagcctggggcgtgagcagcagcccctgggtgacctttgtgtatgccctgtaccagatcaaggagatgatgcagctgacccgggacaacagagccagcgagatccagcccctgcagggcaccaatgaaaatcgggagaacagccctgctggccgggcccagcctgtgccctgtgagacccacagcgaccccagcaggaaccagcccagcccagatgctgctgccagccagacccagaccagccctgcccaccccagcgtggacccctgcacagaggagagcgaggagcagcaggcccagctggccgccggcggccactag

SEQ ID NO: 194564 - DNA, 696 bp, Artificial Sequence
  derived and/or modified sequence
atggaggtgctgcagggcgtgacccacgccgccatctgggccgcctgcatctcctacctgtctgctgctgtgcccccagagctgcggaccagcgcccagggcatcctgcagggcctgcacctgggcctgggccggggctgtggggccatgattggaggagtgctggtgaactactttggagctgctgccaccttccggggcatcggcatggcctgcctggtgatcctgctgctgtttgccctgatccagtggctggccgtgcctgatgaggaggaggacaagaccatgctggccgagcgcatccctgtgcccagcagccctgtgcccatcgccaccatcgacctggtgcagcagcagacagaagatgtgaacaagccagcctggggcgtgagcagcagcccctgggtgacctttgtgtatgccctgtaccagatcaaggagatgatgcagctgacccgggacaacagagccagcgagatccagcccctgcagggcaccaatgaaaatcgggagaacagccctgctggccgggcccagcctgtgccctgtgagacccacagcgaccccagcaggaaccagcccagcccagatgctgctgccagccagacccagaccagccctgcccaccccagcgtggacccctgcacagaggagagcgaggagcagcaggcccagctggccgccggcggccactag

SEQ ID NO: 194565 - DNA, 4608 bp, Artificial Sequence
  derived and/or modified sequence
cttaatttcctgcaagatgaagttctgtgtttacatgttatgattttcattactaagccatcttttaaattttactttacagatcaacagtacaaattctgaagtttgtaaacttgctgatggtggtggtaagccatggcagatgataaagttgctatcttaacggatgatgaagaggaacagaagagaaagtatgtgcttgcagatccctttaatggtatttccagggaaccagaaccaccttcgaatgaaacaccttcctccacagaaacatctgctattcctgaggaggaaatagactggatagagaaacattgtgttaagataaacaacgatcttctaatttccaaggtcttttattttttcttttactctgcctatggctctctctatccccttttgcctgtgtattacaaacagctgggaatgtctccaagccagagtggactactagtaggtattcgttacttcattgaattctgcagtgcccccttttggggtgtagttgcagaccgctttaaaaaaggcaaaattgtcctcctcttttctcttttgtgttgggttttattcaacctgggcattggatttgtcaaacctgctaccttgagatgtgtaccaaagattcgcccaacaactcaccccaccaatgcaagtcaccagttaactatcctgccaacaaattcttcctttacctctttcctcaccatatcaccaaaaatgcgtgagaaaagaaaccttttggaaacaaggctcaatgtctcagacaccgttactttgccaacagctccaaacatgaacagtgaacccactctgcagccccagacaggtgaaattactaaccgtatgatggacttgactttgaactcaagcacagcaacccctgtctccccaggaagcgtaaccaaggagacaaccactgttattgttaccaccaccaaatctttaccttctgaccaagtcatgcttgtttatgatcaacaagaagttgaagctatattcttggtgatcttggtagttgtcataataggagaatttttcagtgcctcttctgtcacaatcgtagacacggtcacactccagtatctgggaaaacacagagatcgctatgggttgcagcgcatgtggggctccctgggctggggcctggcgatgctgtctgtgggcatcgggatcgactacacccacatcgaagtgctcatcgatggaaaggggtgtaagccccccgagtacaggaattaccagatcgtcttcatcgtcttcggcgttctcatgaccatggccttgatcgttgccactcagttccggttccgctacaaccatttcaaaaacgatgattctaaagggaaagaggtggagatcccgcaggtggaaaggaacaactctacagagtcctctgaggagacaccaaccaccacaagccactcgcaggccttcaacttttgggacttaatcaagctgctctgcagcgtgcagtatggctcagtgctgtttgtggcttggttcatgggttttggatatggcttcgtgttcacctttctctactggcatttggaagacctcaatggaactacaaccctctttggggtctgttcagtcctgagtcatgtgtctgagctgacagcatatttttttagtcacaagcttattgaattgatcggccacatcagggttctgtacattggcctggcctgcaatacggctcgctatatttatatttcctacctggagaatgcctggactgttctccccatggaagttcttcaaggagtgacacacgcggccatctgggcagcatgcatttcttacctcagtgcagccgttccccctgagctgaggacatctgctcagggcatcctgcagggccttcacctgggtttgggaagaggatgtggtgccatgatcggaggcgtgttagtcaattattttggggctgctgcaaccttccgaggaattggcatggcctgcttggtgatcctactgctctttgccctgatccagtggctggcagtgccagatgaggaagaagacaagacaatgttggcagaaagaattcctgttccctccagtcccgttcctatagcaaccatcgacttggtacagcaacagacagaagatgtcatgccacgcattgagcccagacttccacccaagaaaactaagcaccaggaagaacaggaagatgtgaacaaaccagcctggggagtcagctcttctccctgggtgacctttgtctatgcactctaccaaattaaagagatgatgcaactcacaagagacaaccgtgcttctgagatacagcctttacaggggaccaatgagaatagggaaaattctcctgctggtagagcccagcctgtcccatgtgagactcactctgacccatctagaaaccagccatcccctgacgcagcagcatctcagacgcagaccagccccgctcaccccagtgtggacccgtgcacagaggagagtgaagagcagcaggctcagctggccgcgggaggacactgagggcatcctgctcatctcacaccctgcatggaatcaggctcctcagccaggacacagggtgaggccccccagccaggatatgcctcccctggaggagcacagcactgcatatgcttctaaatatctaaactcattaacatggaaacacacacacaggagctacagtacatattggcaggaaaaggtaaactttcgtaatctcattggaattacaacagggaaatggagttcaatgaggactttcagttctttgcttggttaggttaaggatgatagaatttctctgccagtgcagtaagagttgaaaccggcagttacactaagtaagtggagggaatgaaagtgtttcgaggtgaatgtggatataatttccctcttctgattatttattcttatttggttcctaacacaaactgggaagagatagaattcatctatactttcttttttcttggagagaaccgtttaaaaaattacaagatatatttaaaaagtaaccagataaaagtagcacatgtgcttttgttaaaaataaagttaaaagttaaagttaaaaaatgaagttaaaagtttcatcagaaactttacatatctttagcaaatatatttttatatgtgtatggcatataatggaaataattctttgagcaacagaagctattattaactactgcaagctaagccgagcttaaaaatgccttttgttttaaatgggctttgagaaaaaaaacagaaacaagcgattatttcaaatcaaccaaccaactcagtatcctgtgttttgatagacaagagtttactaaatatattgatactgtaaatagcctctctcgctatttactatcttatagtaattcaggctctaattagctgagggaatgaaacacacaaaaatcactgaattcctaagagttccttaaataagcagtactagttacaaatcacagtataagatttaagtgcctgggggaaggatacaatttttagaaattacatattgggtcagttttgttttgtttttggtgaggaaaaggtggtaaataggaaaccatgaatgggaaggatggcaataagtagcaactatactttccaatgactaaagaaagaaaatctcagtatattcgttctcatgaagacacagtcagacactggacaatgtaatgtatgcaactgcaaacgttacaactgcagccagaacaatggctgggtggatcgcacgtaaagcttgccactaaaaatcaaagcagaggttaacaggaaacctggggggagtgtggaaaagggaaaactgttttagctgaataaaggtgaattatataatttataatagctgtggatgagcacaggagagagaggaaagaaaagaacagtcgaaatgagcaactcaccttaccctctgaccctgattagacaggatcaattgtaaagtgagggcttctccatgacaccatagttctgcccaatactgcatttgggataagaaattctacacttggatgtctcgcttcacaataaaacacagcttaaaaataaaataactgaaagaaatagaattcagcaaatagttattttttgcacttgaactgaaacgtactgtactgtaaattatgactcattttaagtgacctttaaaatcagatgtatttattatgcttgtgtaattatagaaataaagaaatgggtgacaggcttaacctcacctatgaatgtacagtatgtggatttgtgaaactgactgtaggaagtcaaaaacttgtactgtatcttgtgtttacagttctgatttattcctttgaaaagcctgctgttttggaaatgcacagttgacatgttgaaataaaaatgaataccatttttaaatgtttcttaaatgataaagatgtgaccaaacaaaagtcctatactctaatgaatgagaccaaattcaacatgcctttgttatggaacatttactgtgacagcagaatcgataatgcagtcatttccagccttgtgagctgacaccttcatgggtttgtggactttgtgactttttcttcctgtccccaaagtgccatatgctaccttaaaaaatattaaagtgaattcaaattacat

SEQ ID NO: 194566 - DNA, 4797 bp, Artificial Sequence
  derived and/or modified sequence
gtcgcagccccggaggagcgcgcgagcagcccgggatggtgcgcgctgccccgacagccgccgccccggcgccccgagccgccgccccgtgctccggggacagggctccccgcgccccgcgcagctgagcgctgccgccgccgcagcagacaggatctctctcagttacccaggccggagtgcagtggcgtgatcctagctcactgcagccttgaacccctgggctcaagtgattctcctgccttggcctcctgaatagctagaactacagatcaacagtacaaattctgaagtttgtaaacttgctgatggtggtggtaagccatggcagatgataaagttgctatcttaacggatgatgaagaggaacagaagagaaagtatgtgcttgcagatccctttaatggtatttccagggaaccagaaccaccttcgaatgaaacaccttcctccacagaaacatctgctattcctgaggaggaaatagactggatagagaaacattgtgttaagataaacaacgatcttctaatttccaaggtcttttattttttcttttactctgcctatggctctctctatccccttttgcctgtgtattacaaacagctgggaatgtctccaagccagagtggactactagtaggtattcgttacttcattgaattctgcagtgcccccttttggggtgtagttgcagaccgctttaaaaaaggcaaaattgtcctcctcttttctcttttgtgttgggttttattcaacctgggcattggatttgtcaaacctgctaccttgagatgtgtaccaaagattcgcccaacaactcaccccaccaatgcaagtcaccagttaactatcctgccaacaaattcttcctttacctctttcctcaccatatcaccaaaaatgcgtgagaaaagaaaccttttggaaacaaggctcaatgtctcagacaccgttactttgccaacagctccaaacatgaacagtgaacccactctgcagccccagacaggtgaaattactaaccgtatgatggacttgactttgaactcaagcacagcaacccctgtctccccaggaagcgtaaccaaggagacaaccactgttattgttaccaccaccaaatctttaccttctgaccaagtcatgcttgtttatgatcaacaagaagttgaagctatattcttggtgatcttggtagttgtcataataggagaatttttcagtgcctcttctgtcacaatcgtagacacggtcacactccagtatctgggaaaacacagagatcgctatgggttgcagcgcatgtggggctccctgggctggggcctggcgatgctgtctgtgggcatcgggatcgactacacccacatcgaagtgctcatcgatggaaaggggtgtaagccccccgagtacaggaattaccagatcgtcttcatcgtcttcggcgttctcatgaccatggccttgatcgttgccactcagttccggttccgctacaaccatttcaaaaacgatgattctaaagggaaagaggtggagatcccgcaggtggaaaggaacaactctacagagtcctctgaggagacaccaaccaccacaagccactcgcaggccttcaacttttgggacttaatcaagctgctctgcagcgtgcagtatggctcagtgctgtttgtggcttggttcatgggttttggatatggcttcgtgttcacctttctctactggcatttggaagacctcaatggaactacaaccctctttggggtctgttcagtcctgagtcatgtgtctgagctgacagcatatttttttagtcacaagcttattgaattgatcggccacatcagggttctgtacattggcctggcctgcaatacggctcgctatatttatatttcctacctggagaatgcctggactgttctccccatggaagttcttcaaggagtgacacacgcggccatctgggcagcatgcatttcttacctcagtgcagccgttccccctgagctgaggacatctgctcagggcatcctgcagggccttcacctgggtttgggaagaggatgtggtgccatgatcggaggcgtgttagtcaattattttggggctgctgcaaccttccgaggaattggcatggcctgcttggtgatcctactgctctttgccctgatccagtggctggcagtgccagatgaggaagaagacaagacaatgttggcagaaagaattcctgttccctccagtcccgttcctatagcaaccatcgacttggtacagcaacagacagaagatgtcatgccacgcattgagcccagacttccacccaagaaaactaagcaccaggaagaacaggaagatgtgaacaaaccagcctggggagtcagctcttctccctgggtgacctttgtctatgcactctaccaaattaaagagatgatgcaactcacaagagacaaccgtgcttctgagatacagcctttacaggggaccaatgagaatagggaaaattctcctgctggtagagcccagcctgtcccatgtgagactcactctgacccatctagaaaccagccatcccctgacgcagcagcatctcagacgcagaccagccccgctcaccccagtgtggacccgtgcacagaggagagtgaagagcagcaggctcagctggccgcgggaggacactgagggcatcctgctcatctcacaccctgcatggaatcaggctcctcagccaggacacagggtgaggccccccagccaggatatgcctcccctggaggagcacagcactgcatatgcttctaaatatctaaactcattaacatggaaacacacacacaggagctacagtacatattggcaggaaaaggtaaactttcgtaatctcattggaattacaacagggaaatggagttcaatgaggactttcagttctttgcttggttaggttaaggatgatagaatttctctgccagtgcagtaagagttgaaaccggcagttacactaagtaagtggagggaatgaaagtgtttcgaggtgaatgtggatataatttccctcttctgattatttattcttatttggttcctaacacaaactgggaagagatagaattcatctatactttcttttttcttggagagaaccgtttaaaaaattacaagatatatttaaaaagtaaccagataaaagtagcacatgtgcttttgttaaaaataaagttaaaagttaaagttaaaaaatgaagttaaaagtttcatcagaaactttacatatctttagcaaatatatttttatatgtgtatggcatataatggaaataattctttgagcaacagaagctattattaactactgcaagctaagccgagcttaaaaatgccttttgttttaaatgggctttgagaaaaaaaacagaaacaagcgattatttcaaatcaaccaaccaactcagtatcctgtgttttgatagacaagagtttactaaatatattgatactgtaaatagcctctctcgctatttactatcttatagtaattcaggctctaattagctgagggaatgaaacacacaaaaatcactgaattcctaagagttccttaaataagcagtactagttacaaatcacagtataagatttaagtgcctgggggaaggatacaatttttagaaattacatattgggtcagttttgttttgtttttggtgaggaaaaggtggtaaataggaaaccatgaatgggaaggatggcaataagtagcaactatactttccaatgactaaagaaagaaaatctcagtatattcgttctcatgaagacacagtcagacactggacaatgtaatgtatgcaactgcaaacgttacaactgcagccagaacaatggctgggtggatcgcacgtaaagcttgccactaaaaatcaaagcagaggttaacaggaaacctggggggagtgtggaaaagggaaaactgttttagctgaataaaggtgaattatataatttataatagctgtggatgagcacaggagagagaggaaagaaaagaacagtcgaaatgagcaactcaccttaccctctgaccctgattagacaggatcaattgtaaagtgagggcttctccatgacaccatagttctgcccaatactgcatttgggataagaaattctacacttggatgtctcgcttcacaataaaacacagcttaaaaataaaataactgaaagaaatagaattcagcaaatagttattttttgcacttgaactgaaacgtactgtactgtaaattatgactcattttaagtgacctttaaaatcagatgtatttattatgcttgtgtaattatagaaataaagaaatgggtgacaggcttaacctcacctatgaatgtacagtatgtggatttgtgaaactgactgtaggaagtcaaaaacttgtactgtatcttgtgtttacagttctgatttattcctttgaaaagcctgctgttttggaaatgcacagttgacatgttgaaataaaaatgaataccatttttaaatgtttcttaaatgataaagatgtgaccaaacaaaagtcctatactctaatgaatgagaccaaattcaacatgcctttgttatggaacatttactgtgacagcagaatcgataatgcagtcatttccagccttgtgagctgacaccttcatgggtttgtggactttgtgactttttcttcctgtccccaaagtgccatatgctaccttaaaaaatattaaagtgaattcaaattacat

SEQ ID NO: 194567 - DNA, 1431 bp, Artificial Sequence
  derived and/or modified sequence
gaaaaggctgagggcagatatgttagaagccatcttcttattcctaaattcatgcttaaatgtaattgtccttcagttttcccactcctgagtttggagtctgctggatgatgggtggtttggggaaggaaaagggttctgtacattggcctggcctgcaatacggctcgctatatttatatttcctacctggagaatgcctggactgttctccccatggaagttcttcaaggagtgacacacgcggccatctgggcagcatgcatttcttacctcagtgcagccgttccccctgagctgaggacatctgctcagggcatcctgcagggccttcacctgggtttgggaagaggatgtggtgccatgatcggaggcgtgttagtcaattattttggggctgctgcaaccttccgaggaattggcatggcctgcttggtgatcctactgctctttgccctgatccagtggctggcagtgccagatgaggaagaagacaagacaatgttggcagaaagaattcctgttccctccagtcccgttcctatagcaaccatcgacttggtacagcaacagacagaagatgtcatgccacgcattgagcccagacttccacccaagaaaactaagcaccaggaagaacaggaagatgtgaacaaaccagcctggggagtcagctcttctccctgggtgacctttgtctatgcactctaccaaattaaagagatgatgcaactcacaagagacaaccgtgcttctgagatacagcctttacaggggaccaatgagaatagggaaaattctcctgctggtagagcccagcctgtcccatgtgagactcactctgacccatctagaaaccagccatcccctgacgcagcagcatctcagacgcagaccagccccgctcaccccagtgtggacccgtgcacagaggagagtgaagagcagcaggctcagctggccgcgggaggacactgagggcatcctgctcatctcacaccctgcatggaatcaggctcctcagccaggacacagggtgaggccccccagccaggatatgcctcccctggaggagcacagcactgcatatgcttctaaatatctaaactcattaacatggaaacacacacacaggagctacagtacatattggcaggaaaaggtaaactttcgtaatctcattggaattacaacagggaaatggagttcaatgaggactttcagttctttgcttggttaggttaaggatgatagaatttctctgccagtgcagtaagagttgaaaccggcagttacactaagtaagtggagggaatgaaagtgtttcgaggtgaatgtggatataatttccctcttctgattatttattcttatttggttcctaacacaaactgggaagagatagaattcatctatactttcttttttctt

SEQ ID NO: 194568 - DNA, 1388 bp, Artificial Sequence
  derived and/or modified sequence
acttttatattaacaagcattttgaaaaggctgagggcagatatgttagaagccatcttcttattcctaaattcatgcttaaatgtaattgtccttcagttttcccactcctgagtttggagtctgctggatgatgggtggtttggggaaggaaaagggttctgtacattggcctggcctgcaatacggctcgctatatttatatttcctacctggagaatgcctggactgttctccccatggaagttcttcaaggagtgacacacgcggccatctgggcagcatgcatttcttacctcagtgcagccgttccccctgagctgaggacatctgctcagggcatcctgcagggccttcacctgggtttgggaagaggatgtggtgccatgatcggaggcgtgttagtcaattattttggggctgctgcaaccttccgaggaattggcatggcctgcttggtgatcctactgctctttgccctgatccagtggctggcagtgccagatgaggaagaagacaagacaatgttggcagaaagaattcctgttccctccagtcccgttcctatagcaaccatcgacttggtacagcaacagacagaagatgtgaacaaaccagcctggggagtcagctcttctccctgggtgacctttgtctatgcactctaccaaattaaagagatgatgcaactcacaagagacaaccgtgcttctgagatacagcctttacaggggaccaatgagaatagggaaaattctcctgctggtagagcccagcctgtcccatgtgagactcactctgacccatctagaaaccagccatcccctgacgcagcagcatctcagacgcagaccagccccgctcaccccagtgtggacccgtgcacagaggagagtgaagagcagcaggctcagctggccgcgggaggacactgagggcatcctgctcatctcacaccctgcatggaatcaggctcctcagccaggacacagggtgaggccccccagccaggatatgcctcccctggaggagcacagcactgcatatgcttctaaatatctaaactcattaacatggaaacacacacacaggagctacagtacatattggcaggaaaaggtaaactttcgtaatctcattggaattacaacagggaaatggagttcaatgaggactttcagttctttgcttggttaggttaaggatgatagaatttctctgccagtgcagtaagagttgaaaccggcagttacactaagtaagtggagggaatgaaagtgtttcgaggtgaatgtggatataatttccctcttctgattatttattcttatttggttcctaacacaaactgggaagagatagaattcatctatactttcttttttctt

SEQ ID NO: 194569 - DNA, 2376 bp, Artificial Sequence
  derived and/or modified sequence
atggccgacgacaaggtggccatcctgaccgacgacgaggaggagcagaagcgtaaatacgtccttgccgacccgtttaatgggattagcagggaacccgagcctccctcaaatgaaactccttcgagtacagagactagtgcaattcctgaggaagaaattgattggattgagaaacactgcgttaagataaataatgacctgctgatcagcaaggtcttttacttcttcttttatagtgcctacggctccctgtatcctcttctgcccgtgtactataaacaactggggatgagcccctctcaaagcggcctcttggtggggattagatatttcatcgagttctgctcagctccgttctggggtgtcgtcgcagaccgttttaagaagggcaagatcgtcctcctattctcattgctgtgctgggtcctgtttaatctgggcataggattcgttaaacctgccactcttcggtgcgtgcctaagatcaggcccacgacgcatcctacaaatgcttctcaccaactcactatcctgcccactaattctagctttaccagcttcctcacgatttcacccaaaatgcgcgaaaaaagaaacctactcgaaacccgactgaatgtgtcagatacagtcactctccccacggcacccaacatgaattctgaaccaaccctgcagcctcagacaggcgaaatcaccaacagaatgatggacttgacgctgaactcttccacggcaacaccagtgagtccaggatcggtcacgaaagaaaccactactgtcattgtcaccactacaaagtcactgccttccgaccaggttatgctcgtttatgaccagcaggaggtggaggcgatcttccttgtgatcctggttgtggtgattatcggtgaattcttttccgcatcctccgtcacaattgtggatactgtgaccctccagtatctgggtaaacatcgcgaccgatatggtctgcaacggatgtgggggagcctgggttggggactggctatgctctctgtcgggatcggaatagattatactcatattgaggtgttgattgacgggaaaggctgtaaaccacccgaatatcgaaactaccagatcgtgttcatcgtgttcggggtgctaatgactatggcgctgattgttgctacccagtttcgattccgctataatcattttaagaacgacgacagcaaagggaaggaagtcgagattcctcaagtggagaggaataacagcaccgaatcaagcgaagagacacctaccacgacgagccactcacaggcctttaatttctgggatctgatcaagctcctgtgttcagtgcagtatggttcggtgctcttcgtggcctggttcatggggttcggatatggctttgtcttcacctttctgtactggcacctggaggaccttaatggtaccactaccctgtttggagtgtgttctgtcctgtcccacgtaagcgagcttaccgcatacttcttcagtcacaagttgatcgaactcatcggacacattcgagtgctgtacattggactggcttgtaacacagcaaggtacatttatatatcttatcttgaaaacgcatggacggtgttgccaatggaggtgctgcagggcgtgacccatgccgctatttgggccgcttgtatatcatatctctccgccgccgtgcccccagaactgagaacctcggctcagggtattttgcagggattacaccttgggctggggcggggatgtggagctatgatcgggggagtcctcgtcaactactttggggccgctgcaacgtttcgcggaataggcatggcatgcctagtaatcctcttgctgttcgccctgatccaatggctggctgtccccgatgaggaagaagacaaaacgatgcttgccgaacgcatcccagtgcccagttcccccgtaccaatagcaacaattgatctggttcagcaacagactgaggatgtgatgcctaggatcgagccaaggctgccacctaaaaagaccaaacatcaggaggaacaggaagacgtaaacaagcccgcatggggagtttcttctagcccttgggttacattcgtttacgctctttaccagatcaaagaaatgatgcagcttactagagacaaccgagcatcagaaatccaaccactgcagggtaccaacgagaatcgggagaacagtccggctggccgggcacaaccggtaccctgtgagactcactcggatccctcgagaaatcagccttcccctgacgccgctgcaagccagacccagacaagtccagcccacccgagtgtggatccctgtactgaggaatctgaggaacagcaggcccagctggccgcagggggccattag

SEQ ID NO: 194570 - DNA, 2376 bp, Artificial Sequence
  derived and/or modified sequence
atggccgacgacaaggtggccatcctgaccgacgacgaggaggagcaaaaacggaaatacgtgcttgccgaccctttcaatggaatctctcgtgagcccgaaccaccatccaatgagaccccctcttctacggagacctcagcaatccctgaagaggaaattgattggatcgaaaagcattgcgtgaagatcaataacgacctgctgatatccaaggttttttactttttcttttacagtgcctacggctccctctatcctcttttgccggtgtactataaacagctcggtatgtcacccagccagtcgggcttactggtcgggattcgctacttcatcgagttttgctcggcccctttctggggagtcgtggcagacagatttaaaaaagggaaaattgtactcctattttcattgttatgctgggtcctattcaatttgggaattgggttcgtgaaaccagcgacattacgatgcgttcctaagattaggcctacgacccaccccacgaatgcaagtcaccaactgaccattttacccacaaactcaagctttactagttttctgactatttcgcccaagatgagggagaaaaggaatctgcttgagactcggctgaacgtatccgacacagtaactcttccaactgccccaaatatgaattccgagccaactttgcagccccaaaccggggaaatcacaaataggatgatggacctgacgttgaactcatcaacagcaactcccgtatcaccaggatcggtgacgaaagagactacaacagtgattgtgaccaccaccaaatcccttccatctgaccaagtgatgttggtctacgatcaacaggaggtggaggccatttttctcgtgattctagtggtggttataattggagagttctttagtgcaagttcagttacaatcgttgatacagtgacattgcagtatctgggtaagcaccgagatcgttacggccttcagaggatgtggggcagcctgggatggggtttggctatgctgtctgtaggcataggaattgattatactcatatcgaggttctcatcgatggcaagggctgcaaacccccagagtatcgaaactaccagatagttttcattgtcttcggcgtgctgatgaccatggccctgatcgtcgctacccaattccggtttagatataaccattttaagaacgatgactccaagggaaaggaggtggaaatacctcaagtggaacgcaacaactccactgagagctcagaggaaacacctacaacaacttcacacagccaagcctttaatttctgggacctgatcaagctgttatgtagcgtccaatacggtagcgtcctatttgtggcctggttcatgggctttggatatggcttcgtctttacgtttttgtactggcacctcgaggacctgaatgggaccacgacgctgtttggggtttgcagcgtgctgagccacgtttccgagctgaccgcatattttttttcacacaaactgattgaactaattggccacataagagttctctatatcgggctggcctgcaatactgcccgatacatttacatcagctatctggagaatgcctggactgtcctaccaatggaggtcctgcagggagtgacccatgcggcaatctgggcagcctgtatctcctacttatccgccgcagttccacccgaactgaggacatcagcccaaggtattcttcagggtctacatctggggttaggacggggatgcggcgcgatgattggcggagtgctcgtgaactactttggtgcggcagcgacgttcagggggattggaatggcatgcctagtgatacttctactgtttgcactgatccagtggctagccgtgcctgacgaagaggaggataagactatgcttgcggagcgtatccccgtgcctagctctcccgttcctatagctacaatcgatctggtgcaacagcagacggaagatgtgatgccacgcattgaacctaggctcccccctaagaaaaccaaacaccaggaggagcaggaggatgtgaacaaaccagcctggggggttagttcttctccatgggtcaccttcgtgtatgcactgtatcaaatcaaggagatgatgcagctaaccagagataatagggcctcagagattcagccattgcagggaactaacgagaatcgcgagaattcgccagctgggagagcacagcccgttccctgcgaaacccactcagatccatctaggaaccagccaagcccagatgccgccgcaagtcaaactcagacaagtccggctcaccccagcgtcgatccctgtactgaggagtcggaggaacagcaggcacagctggccgcaggcggccactag

SEQ ID NO: 194571 - DNA, 129 bp, Artificial Sequence
  derived and/or modified sequence
atggccgacgacaaggtggccatcctgaccgacgacgaggaggagcagaagcgcaaatacgtcctggccgatccctttaacggcataagccgggaacctgagcctccctcaaatgagacgccaagttag

SEQ ID NO: 194572 - DNA, 762 bp, Artificial Sequence
  derived and/or modified sequence
atggaggtgctgcagggcgtgacccacgccgccatctgggccgcctgcatttcctacctgtcagctgctgtgcccccagagctgcggacgagcgcgcagggcatcctacaggggctgcatctgggacttggaagaggttgtggcgccatgatcggaggcgttctcgtaaattatttcggagctgccgccaccttcagggggattggcatggcctgccttgttatcctgctgctgttcgccttaattcagtggctggcagtgcctgatgaggaggaagacaagaccatgctcgctgagagaattcccgtgccctcctcgccagtgcctatcgccaccatcgatttagtgcagcagcaaaccgaggacgtgatgcctcgcatcgaacctcgcctcccccctaaaaaaaccaaacaccaggaggaacaggaggatgtcaataagcctgcttggggtgtctctagctcaccctgggtgaccttcgtgtacgcgctgtatcagattaaggagatgatgcagctgacgagggacaatcgggctagcgagatccagcccttgcaaggaacgaatgagaacagagagaactcgcccgccggccgcgcccaaccagtcccttgtgaaactcatagcgatccaagccgcaatcagcccagccccgacgccgcggcatctcagacccagacctccccagctcatccttccgtggatccatgcaccgaggaaagcgaggaacagcaggcccaacttgctgcgggtggacactag

SEQ ID NO: 194573 - DNA, 696 bp, Artificial Sequence
  derived and/or modified sequence
atggaggtgctgcagggcgtgacccacgccgccatctgggccgcctgcatttcctatcttagcgctgctgtgccccctgagctacgcacatcagctcaggggattcttcagggtctccatttaggtctgggtcgcggttgcggcgctatgatcggcggagtgctggtgaactacttcggcgcggccgcaacctttagaggcataggcatggcctgtctggtgatactgctactcttcgcccttatacagtggctcgccgttccggatgaggaggaggacaaaacgatgctcgctgaaaggattccggtgccttcttcaccagtccccatcgcgactattgatctcgtgcagcagcaaacggaggatgtgaataagccggcctggggagtgtcatcctctccttgggtcacattcgtgtacgccctttaccagattaaggagatgatgcagctaactagagacaacagggcctctgagatacagccactgcagggtacaaacgaaaacagagagaactcccccgccggaagagctcagccggtcccctgcgaaacccactctgacccgtcccgaaaccagccctcgcccgacgccgcagcgtcccagacgcaaactagtcccgcccacccctcggttgatccctgcacagaggaatccgaggaacagcaggcacagctcgccgccggaggacactag

SEQ ID NO: 194574 - DNA, 2376 bp, Artificial Sequence
  derived and/or modified sequence
atggccgatgataaggtcgccatccttactgacgacgaagaagaacagaaaagaaaatacgtgttagcagatccgtttaatggcattagcagggagcctgaacctcctagcaatgaaacgccaagttctaccgagacttccgccattcccgaggaagagatcgattggatcgaaaagcactgcgtcaagattaataacgatctgctcattagtaaggtcttttacttctttttttattccgcctacggatccctgtatccccttctcccagtatactataagcagctggggatgagcccttcacagtcgggtctcctcgtgggaatccgatatttcatagagttttgttctgcccctttctggggagtggttgctgatcgcttcaagaaagggaaaattgttcttcttttctctctcctgtgttgggtgctgtttaatttgggaatcggattcgtgaagcctgccacgctaaggtgtgtgcccaaaatcaggcccaccacccacccaactaatgcatcgcatcagctgaccattttacctacgaactcttcttttacttccttcctcacaatctcccctaagatgagagagaagagaaatctgctcgagacacggttaaacgtctcagatactgtaacactgccaaccgctccaaacatgaattccgaaccaacacttcaaccgcaaaccggcgaaataacaaacagaatgatggacttgacactgaatagctctaccgctactcccgtatccccaggatcagtcaccaaggaaacaacgacagtcatcgtcaccaccactaagtccctgccatcagaccaagtgatgctcgtatacgaccagcaggaggtggaggcgatcttcttagtaatcctcgtggttgttataattggagagttcttcagcgcaagtagcgttacaatcgtggataccgtgactctgcagtacctgggtaagcaccgtgataggtatggcctccagcgaatgtgggggtctctgggatgggggcttgccatgttgagcgtggggattgggattgactatacgcatattgaggttctcatcgatggtaaggggtgtaagccaccagaatatcggaattaccagatcgtcttcatcgtgttcggcgtgctaatgaccatggcgctgattgtcgctacccagtttcgtttcagatacaatcatttcaagaacgatgactcaaaaggcaaggaggtggagattccccaggttgagagaaataattcaacagagagcagtgaggagactcctaccactactagccatagtcaggcattcaacttctgggaccttatcaaactgctgtgctcagtgcaatatggctcagtgttgtttgtcgcgtggtttatgggctttgggtacgggttcgtcttcaccttcctatattggcaccttgaggatcttaacggaactactaccctgttcggcgtctgcagcgtgctgagccacgtgagtgaactcacagcatactttttcagccacaagctgatagaactaattggccatataagagtgttgtatatcggactggcctgtaataccgcacggtacatatacatttcatacctagagaacgcttggactgttttgcctatggaggtgctccagggcgtgacccacgcggctatttgggcagcttgtatatcctatttatctgctgctgtgccccctgagctgaggacctctgcccagggcatactgcagggtttacacctggggcttggccgagggtgcggcgcaatgatcggtggggtgctggtgaactactttggggctgcggcaaccttccgcggaattggaatggcttgtcttgtcatattgttgcttttcgctttgatccaatggctagccgtcccggacgaagaggaagacaagactatgcttgctgagcggatacctgtgccatctagcccagtgcctattgccaccatcgacctcgttcaacagcagactgaggatgtcatgcccaggatagaacctcgcttaccccctaagaagacaaaacatcaggaagagcaggaagacgtgaacaaacccgcttggggcgtttcaagtagtccttgggttacgttcgtatacgccctttatcaaattaaggagatgatgcagttaacccgcgataatcgggcatccgaaatacagcctcttcagggcacaaatgagaatcgcgagaattcccctgctggacgcgcacagccggtgccctgtgagacacactccgacccctcccgcaatcagccctctcctgacgcggcagctagccaaacacaaaccagtccggctcatcccagcgtggacccatgtaccgaggaatccgaagagcagcaggcacaactcgccgcaggaggacattag

SEQ ID NO: 194575 - DNA, 2376 bp, Artificial Sequence
  derived and/or modified sequence
atggccgatgacaaggttgcaatactgactgacgacgaggaggagcagaaacgtaagtatgttctcgccgacccatttaacggcatttcccgcgaaccagagccaccgtctaacgaaacaccctcaagcaccgagacttctgcaatacccgaggaagaaattgactggattgaaaagcactgtgtgaaaatcaacaatgaccttctgatctccaaggtgttctatttttttttttatagtgcctatggatcgttgtatccactcctgcctgtctattacaaacagctggggatgtccccatcccagtctgggttgctggttggtataaggtactttatagagttctgctccgctccattttggggggtcgtggcagacagattcaagaagggcaaaattgttctgctattcagtttgctttgctgggttctattcaacctcggcattggctttgttaagcccgcaaccctcaggtgtgtgcctaagatacgccctaccacacacccgacaaacgcctcacaccagctcaccattcttcctacaaacagcagctttacctcgtttctaacaatatctcccaagatgcgagaaaaacgcaatcttttggagactcgcttgaacgtcagtgacaccgtgacactgccaacagccccaaatatgaatagcgaaccaactcttcagcctcagaccggggaaatcacaaaccggatgatggatttaaccctcaattcctcaacagccactcccgtaagcccgggttcagtcaccaaggagacaacgacagttatagtaactacaacgaagtcactgccaagcgaccaggtgatgcttgtctatgaccaacaagaggtggaagcaatctttctcgtgattctggtcgtggtgataattggcgagttcttttctgccagctcagtcacaattgttgacaccgtgacgctgcagtatctgggcaagcaccgggataggtacggccttcaacggatgtgggggagtctgggttgggggctcgcaatgttatctgtgggcataggcatagactatacacatatagaggtcctcattgatggcaaaggatgtaaacctcctgagtacagaaattatcaaatagttttcattgtgtttggggtgctcatgacgatggcactgattgtcgctactcagttcaggtttcgctacaatcattttaagaacgacgattcaaagggaaaagaagtggaaattccccaggtagagaggaacaactccacagaaagctcggaggagactccaactaccaccagccattcacaggcattcaatttttgggacctcatcaagctactctgctccgtccagtacggcagcgtgttgttcgttgcttggtttatggggtttggctatggattcgtctttacatttctgtattggcacttggaggacctgaacggaaccaccacactttttggcgtgtgctcagttctatcccacgtgtctgagctcacagcttactttttctctcataaactcattgagctgataggacacatccgcgtcctatatataggtctggcatgcaacaccgccagatacatctacatatcctatcttgagaatgcctggaccgtgctcccaatggaggtcctccagggcgtcactcacgcagccatctgggccgcatgtatcagctatctgtcagctgccgttccacctgaactgcgcacctccgctcagggtatacttcaaggactgcacctggggcttggacgaggatgtggtgcaatgatcggaggcgtgctggttaactactttggagccgcagcgacctttcggggaattgggatggcctgtctcgtgattctattgttgttcgcattgattcagtggctggcggtccctgacgaggaagaagataaaacgatgctggctgagcggatcccggtcccctcttcccccgtgccaatcgccacgatagatttggtccagcagcagacggaagacgtgatgcccagaattgagccgaggttgcccccaaaaaagactaagcatcaggaggaacaggaggacgtgaacaagcccgcatggggcgtgtcttccagcccttgggtgacctttgtttacgctctttatcagatcaaagagatgatgcagctgacacgagataaccgcgcatcagaaatccagccgcttcagggcaccaatgagaaccgggagaatagccccgctggaagagcgcaacctgtgccctgcgagacacactctgatcctagccgaaatcagcctagcccagacgcagctgcatcccagacgcagacctcacccgcacacccgagtgttgacccctgcaccgaggagtccgaagagcagcaggctcaattagcggcaggaggccattag

SEQ ID NO: 194576 - DNA, 129 bp, Artificial Sequence
  derived and/or modified sequence
atggctgacgataaggtggccattctcacagacgatgaggaagagcagaaacggaagtacgtgctagcagacccttttaacggcatatcccgggagcccgaaccccctagcaatgaaaccccttcctag

SEQ ID NO: 194577 - DNA, 762 bp, Artificial Sequence
  derived and/or modified sequence
atggaggtgctgcaaggagtcacacatgcagcgatttgggcagcctgcatctcttacctgtccgcagccgtgccacccgagttaagaacgtcagcccagggcatcctgcagggtttgcatcttggcctgggtcgaggctgtggcgctatgatcggcggtgtcttggtgaactactttggagccgcagccaccttccgaggaatcggaatggcctgtttggttattctgcttttgttcgcccttattcagtggcttgctgtccccgacgaggaagaggataaaaccatgttggccgaaagaatccctgtgcccagcagcccagtccctatcgcaacaatcgacttagtccagcaacagaccgaagacgtgatgccaagaatcgagcccaggttgccccctaagaagaccaagcaccaggaagaacaagaagacgtgaataagcctgcctggggcgtgtcatctagcccttgggtgactttcgtctacgccctctatcagattaaagaaatgatgcagttgactcgggacaatagagcatcagagattcagcctctgcaggggaccaatgaaaaccgagaaaattcacccgcaggacgggctcagccagttccttgtgaaacacacagcgatcctagccgcaaccagcctagccccgacgcagccgctagccagacgcaaacgagtcctgcccatccttccgtggatccatgcaccgaggaatccgaggaacagcaggcgcagctagctgctggcggtcactag

SEQ ID NO: 194578 - DNA, 696 bp, Artificial Sequence
  derived and/or modified sequence
atggaggtactccagggcgtgactcacgccgcaatttgggcagcctgtatttcctacctgagtgcagccgtgcctcctgagttacgaacttcagcccagggcatcttacagggcctccacctgggcctcggtcggggatgtggtgcaatgatcgggggagtcttggtaaattattttggtgccgctgctacctttagaggtattgggatggcctgtctggtaatcctgctgctctttgcacttatccagtggctggccgtccctgacgaagaggaggataaaacgatgctggcggaacgcatcccagtcccaagtagtcctgtgcccatcgctacaatcgacctcgtgcagcagcagactgaggatgtgaacaagccagcatggggtgtctccagcagcccctgggtgacattcgtctacgcactgtaccagattaaagaaatgatgcagttgacgcgtgataatcgagctagcgaaatacaacccctgcagggtactaacgagaaccgagaaaattctcctgctggaagggcacagccggtcccatgcgaaacccattctgatcccagcagaaaccagccttcccccgatgccgctgctagtcagacacagacatcaccagcgcacccctcagtagacccctgcacggaggagtctgaggaacagcaggcacagctggcagctgggggtcattag

SEQ ID NO: 194579 - DNA, 2376 bp, Artificial Sequence
  derived and/or modified sequence
atggccgacgacaaggtggccatcctgaccgacgacgaggaggagcagaagagaaagtacgtgctggccgaccccttcaacggcatcagcagagagcccgagccccccagcaacgagacccccagcagcaccgagaccagcgccatccccgaggaggagatcgactggatcgagaagcactgcgtgaagatcaacaacgacctgctgatcagcaaggtgttctacttcttcttctacagcgcctacggcagcctgtaccccctgctgcccgtgtactacaagcagctgggcatgagccccagccagagcggcctgctggtgggcatcagatacttcatcgagttctgcagcgcccccttctggggcgtggtggccgacagattcaagaagggcaagatcgtgctgctgttcagcctgctgtgctgggtgctgttcaacctgggcatcggcttcgtgaagcccgccaccctgagatgcgtgcccaagatcagacccaccacccaccccaccaacgccagccaccagctgaccatcctgcccaccaacagcagcttcaccagcttcctgaccatcagccccaagatgagagagaagagaaacctgctggagaccagactgaacgtgagcgacaccgtgaccctgcccaccgcccccaacatgaacagcgagcccaccctgcagccccagaccggcgagatcaccaacagaatgatggacctgaccctgaacagcagcaccgccacccccgtgagccccggcagcgtgaccaaggagaccaccaccgtgatcgtgaccaccaccaagagcctgcccagcgaccaggtgatgctggtgtacgaccagcaggaggtggaggccatcttcctggtgatcctggtggtggtgatcatcggcgagttcttcagcgccagcagcgtgaccatcgtggacaccgtgaccctgcagtacctgggcaagcacagagacagatacggcctgcagagaatgtggggcagcctgggctggggcctggccatgctgagcgtgggcatcggcatcgactacacccacatcgaggtgctgatcgacggcaagggctgcaagccccccgagtacagaaactaccagatcgtgttcatcgtgttcggcgtgctgatgaccatggccctgatcgtggccacccagttcagattcagatacaaccacttcaagaacgacgacagcaagggcaaggaggtggagatcccccaggtggagagaaacaacagcaccgagagcagcgaggagacccccaccaccaccagccacagccaggccttcaacttctgggacctgatcaagctgctgtgcagcgtgcagtacggcagcgtgctgttcgtggcctggttcatgggcttcggctacggcttcgtgttcaccttcctgtactggcacctggaggacctgaacggcaccaccaccctgttcggcgtgtgcagcgtgctgagccacgtgagcgagctgaccgcctacttcttcagccacaagctgatcgagctgatcggccacatcagagtgctgtacatcggcctggcctgcaacaccgccagatacatctacatcagctacctggagaacgcctggaccgtgctgcccatggaggtgctgcagggcgtgacccacgccgccatctgggccgcctgcatcagctacctgagcgccgccgtgccccccgagctgagaaccagcgcccagggcatcctgcagggcctgcacctgggcctgggcagaggctgcggcgccatgatcggcggcgtgctggtgaactacttcggcgccgccgccaccttcagaggcatcggcatggcctgcctggtgatcctgctgctgttcgccctgatccagtggctggccgtgcccgacgaggaggaggacaagaccatgctggccgagagaatccccgtgcccagcagccccgtgcccatcgccaccatcgacctggtgcagcagcagaccgaggacgtgatgcccagaatcgagcccagactgccccccaagaagaccaagcaccaggaggagcaggaggacgtgaacaagcccgcctggggcgtgagcagcagcccctgggtgaccttcgtgtacgccctgtaccagatcaaggagatgatgcagctgaccagagacaacagagccagcgagatccagcccctgcagggcaccaacgagaacagagagaacagccccgccggcagagcccagcccgtgccctgcgagacccacagcgaccccagcagaaaccagcccagccccgacgccgccgccagccagacccagaccagccccgcccaccccagcgtggacccctgcaccgaggagagcgaggagcagcaggcccagctggccgccggcggccactag

SEQ ID NO: 194580 - DNA, 129 bp, Artificial Sequence
  derived and/or modified sequence
atggccgacgacaaggtggccatcctgaccgacgacgaggaggagcagaagagaaagtacgtgctggccgaccccttcaacggcatcagcagagagcccgagccccccagcaacgagacccccagctag

SEQ ID NO: 194581 - DNA, 762 bp, Artificial Sequence
  derived and/or modified sequence
atggaggtgctgcagggcgtgacccacgccgccatctgggccgcctgcatcagctacctgagcgccgccgtgccccccgagctgagaaccagcgcccagggcatcctgcagggcctgcacctgggcctgggcagaggctgcggcgccatgatcggcggcgtgctggtgaactacttcggcgccgccgccaccttcagaggcatcggcatggcctgcctggtgatcctgctgctgttcgccctgatccagtggctggccgtgcccgacgaggaggaggacaagaccatgctggccgagagaatccccgtgcccagcagccccgtgcccatcgccaccatcgacctggtgcagcagcagaccgaggacgtgatgcccagaatcgagcccagactgccccccaagaagaccaagcaccaggaggagcaggaggacgtgaacaagcccgcctggggcgtgagcagcagcccctgggtgaccttcgtgtacgccctgtaccagatcaaggagatgatgcagctgaccagagacaacagagccagcgagatccagcccctgcagggcaccaacgagaacagagagaacagccccgccggcagagcccagcccgtgccctgcgagacccacagcgaccccagcagaaaccagcccagccccgacgccgccgccagccagacccagaccagccccgcccaccccagcgtggacccctgcaccgaggagagcgaggagcagcaggcccagctggccgccggcggccactag

SEQ ID NO: 194582 - DNA, 696 bp, Artificial Sequence
  derived and/or modified sequence
atggaggtgctgcagggcgtgacccacgccgccatctgggccgcctgcatcagctacctgagcgccgccgtgccccccgagctgagaaccagcgcccagggcatcctgcagggcctgcacctgggcctgggcagaggctgcggcgccatgatcggcggcgtgctggtgaactacttcggcgccgccgccaccttcagaggcatcggcatggcctgcctggtgatcctgctgctgttcgccctgatccagtggctggccgtgcccgacgaggaggaggacaagaccatgctggccgagagaatccccgtgcccagcagccccgtgcccatcgccaccatcgacctggtgcagcagcagaccgaggacgtgaacaagcccgcctggggcgtgagcagcagcccctgggtgaccttcgtgtacgccctgtaccagatcaaggagatgatgcagctgaccagagacaacagagccagcgagatccagcccctgcagggcaccaacgagaacagagagaacagccccgccggcagagcccagcccgtgccctgcgagacccacagcgaccccagcagaaaccagcccagccccgacgccgccgccagccagacccagaccagccccgcccaccccagcgtggacccctgcaccgaggagagcgaggagcagcaggcccagctggccgccggcggccactag

SEQ ID NO: 194583 - protein, 689 aa, Artificial Sequence
  derived and/or modified sequence
SSGLTVTAVKDSGEWNLEAGALVLADAGLCCIDEFNSLKEHDRTSIHEAMEQQTISVAKAGLVCKLNTRTTILAATNPKGQYDPQESVSVNIALGSPLLSRFDLILVLLDTKNEDWDRIISSFILENKGYPSKSEKLWSMEKMKTYFCLIRNLQPTLSDVGNQVLLRYYQMQRQSDCRNAARTTIRLLESLIRLAEAHARLMFRDTVTLEDAITVVSVMESSMQGGALLGGVNALHTSFPENPGEQYQRQCELILEKLELQSLLSEELRRLERLQNQSVHQSQPRVLEVETTPGSLRNGPGEESNFRTSSQQEINYSTHIFSPGGSPEGSPVLDPPPHLEPNRSTSRKHSAQHKNNRDDSLDWFDFMATHQSEPKNTVVVSPHPKTSGENMASKISNSTSQGKEKSEPGQRSKVDIGLLPSPGETGVPWRADNVESNKKKRLALDSEAAVSADKPDSVLTHHVPRNLQKLCKERAQKLCRNSTRVPAQCTVPSHPQSTPVHSPDRMLDSPKRKRPKSLAQVEEPAIENVKPPGSPVAKLAKFTFKQKSKLIHSFEDHSHVSPGATKIAVHSPKISQRRTRRDAALPVKRPGKLTSTPGNQISSQPQGETKEVSQQPPEKHGPREKVMCAPEKRIIQPELELGNETGCAHLTCEGDKKEEVSGSNKSGKVHACTLARLANFCFTPPSESK

SEQ ID NO: 194584 - protein, 1143 aa, Artificial Sequence
  derived and/or modified sequence
MNSDQVTLVGQVFESYVSEYHKNDILLILKERDEDAHYPVVVNAMTLFETNMEIGEYFNMFPSEVLTIFDSALRRSALTILQSLSQPEAVSMKQNLHARISGLPVCPELVREHIPKTKDVGHFLSVTGTVIRTSLVKVLEFERDYMCNKCKHVFVIKADFEQYYTFCRPSSCPSLESCDSSKFTCLSGLSSSPTRCRDYQEIKIQEQVQRLSVGSIPRSMKVILEDDLVDSCKSGDDLTIYGIVMQRWKPFQQDVRCEVEIVLKANYIQVNNEQSSGIIMDEEVQKEFEDFWEYYKSDPFAGRNVILASLCPQVFGMYLVKLAVAMVLAGGIQRTDATGTRVRGESHLLLVGDPGTGKSQFLKYAAKITPRSVLTTGIGSTSAGLTVTAVKDSGEWNLEAGALVLADAGLCCIDEFNSLKEHDRTSIHEAMEQQTISVAKAGLVCKLNTRTTILAATNPKGQYDPQESVSVNIALGSPLLSRFDLILVLLDTKNEDWDRIISSFILENKGYPSKSEKLWSMEKMKTYFCLIRNLQPTLSDVGNQVLLRYYQMQRQSDCRNAARTTIRLLESLIRLAEAHARLMFRDTVTLEDAITVVSVMESSMQGGALLGGVNALHTSFPENPGEQYQRQCELILEKLELQSLLSEELRRLERLQNQSVHQSQPRVLEVETTPGSLRNGPGEESNFRTSSQQEINYSTHIFSPGGSPEGSPVLDPPPHLEPNRSTSRKHSAQHKNNRDDSLDWFDFMATHQSEPKNTVVVSPHPKTSGENMASKISNSTSQGKEKSEPGQRSKVDIGLLPSPGETGVPWRADNVESNKKKRLALDSEAAVSADKPDSVLTHHVPRNLQKLCKERAQKLCRNSTRVPAQCTVPSHPQSTPVHSPDRMLDSPKRKRPKSLAQVEEPAIENVKPPGSPVAKLAKFTFKQKSKLIHSFEDHSHVSPGATKIAVHSPKISQRRTRRDAALPVKRPGKLTSTPGNQISSQPQGETKEVSQQPPEKHGPREKVMCAPEKRIIQPELELGNETGCAHLTCEGDKKEEVSGSNKSGKVHACTLARLANFCFTPPSESKSKSPPPERKNRGERGPSSPPTTTAPMRVSKRKSFQLRGSTEKLIVSKESLFTLPELGDEAFDCDWDEEMRKKS

SEQ ID NO: 194585 - protein, 156 aa, Artificial Sequence
  derived and/or modified sequence
MNSDQVTLVGQVFESYVSEYHKNDILLILKERDEDAHYPVVVNAMTLFETNMEIGEYFNMFPSEVLTIFDSALRRSALTILQSLSQPEAVSMKQNLHARISGLPVCPELVREHIPKTKDVGHFLSVTGTVIRTSLVKVLEFERDYMCNKCKHVFVI

SEQ ID NO: 194586 - protein, 78 aa, Artificial Sequence
  derived and/or modified sequence
MNSDQVTLVGQVFESYVSEYHKNDILLILKERDEDAHYPVVVNAMTLFETNMEIGEYFNMFPSEVLTIFDSALRRSAL

SEQ ID NO: 194587 - DNA, 2070 bp, Artificial Sequence
  derived and/or modified sequence
agcagcggcctgaccgtgaccgccgtgaaggacagcggcgagtggaacctggaggccggcgccctggtgctggccgacgccggcctgtgctgcatcgacgagttcaacagcctgaaggagcacgacagaaccagcatccacgaggccatggagcagcagaccatcagcgtggccaaggccggcctggtgtgcaagctgaacaccagaaccaccatcctggccgccaccaaccccaagggccagtacgacccccaggagagcgtgagcgtgaacatcgccctgggcagccccctgctgagcagattcgacctgatcctggtgctgctggacaccaagaacgaggactgggacagaatcatcagcagcttcatcctggagaacaagggctaccccagcaagagcgagaagctgtggagcatggagaagatgaagacctacttctgcctgatcagaaacctgcagcccaccctgagcgacgtgggcaaccaggtgctgctgagatactaccagatgcagagacagagcgactgcagaaacgccgccagaaccaccatcagactgctggagagcctgatcagactggccgaggcccacgccagactgatgttcagagacaccgtgaccctggaggacgccatcaccgtggtgagcgtgatggagagcagcatgcagggcggcgccctgctgggcggcgtgaacgccctgcacaccagcttccccgagaaccccggcgagcagtaccagagacagtgcgagctgatcctggagaagctggagctgcagagcctgctgagcgaggagctgagaagactggagagactgcagaaccagagcgtgcaccagagccagcccagagtgctggaggtggagaccacccccggcagcctgagaaacggccccggcgaggagagcaacttcagaaccagcagccagcaggagatcaactacagcacccacatcttcagccccggcggcagccccgagggcagccccgtgctggacccccccccccacctggagcccaacagaagcaccagcagaaagcacagcgcccagcacaagaacaacagagacgacagcctggactggttcgacttcatggccacccaccagagcgagcccaagaacaccgtggtggtgagcccccaccccaagaccagcggcgagaacatggccagcaagatcagcaacagcaccagccagggcaaggagaagagcgagcccggccagagaagcaaggtggacatcggcctgctgcccagccccggcgagaccggcgtgccctggagagccgacaacgtggagagcaacaagaagaagagactggccctggacagcgaggccgccgtgagcgccgacaagcccgacagcgtgctgacccaccacgtgcccagaaacctgcagaagctgtgcaaggagagagcccagaagctgtgcagaaacagcaccagagtgcccgcccagtgcaccgtgcccagccacccccagagcacccccgtgcacagccccgacagaatgctggacagccccaagagaaagagacccaagagcctggcccaggtggaggagcccgccatcgagaacgtgaagccccccggcagccccgtggccaagctggccaagttcaccttcaagcagaagagcaagctgatccacagcttcgaggaccacagccacgtgagccccggcgccaccaagatcgccgtgcacagccccaagatcagccagagaagaaccagaagagacgccgccctgcccgtgaagagacccggcaagctgaccagcacccccggcaaccagatcagcagccagccccagggcgagaccaaggaggtgagccagcagccccccgagaagcacggccccagagagaaggtgatgtgcgcccccgagaagagaatcatccagcccgagctggagctgggcaacgagaccggctgcgcccacctgacctgcgagggcgacaagaaggaggaggtgagcggcagcaacaagagcggcaaggtgcacgcctgcaccctggccagactggccaacttctgcttcaccccccccagcgagagcaagtag

SEQ ID NO: 194588 - DNA, 3432 bp, Artificial Sequence
  derived and/or modified sequence
atgaacagcgaccaggtgaccctggtgggccaggtgttcgagagctacgtgagcgagtaccacaagaacgacatcctgctgatcctgaaggagagagacgaggacgcccactaccccgtggtggtgaacgccatgaccctgttcgagaccaacatggagatcggcgagtacttcaacatgttccccagcgaggtgctgaccatcttcgacagcgccctgagaagaagcgccctgaccatcctgcagagcctgagccagcccgaggccgtgagcatgaagcagaacctgcacgccagaatcagcggcctgcccgtgtgccccgagctggtgagagagcacatccccaagaccaaggacgtgggccacttcctgagcgtgaccggcaccgtgatcagaaccagcctggtgaaggtgctggagttcgagagagactacatgtgcaacaagtgcaagcacgtgttcgtgatcaaggccgacttcgagcagtactacaccttctgcagacccagcagctgccccagcctggagagctgcgacagcagcaagttcacctgcctgagcggcctgagcagcagccccaccagatgcagagactaccaggagatcaagatccaggagcaggtgcagagactgagcgtgggcagcatccccagaagcatgaaggtgatcctggaggacgacctggtggacagctgcaagagcggcgacgacctgaccatctacggcatcgtgatgcagagatggaagcccttccagcaggacgtgagatgcgaggtggagatcgtgctgaaggccaactacatccaggtgaacaacgagcagagcagcggcatcatcatggacgaggaggtgcagaaggagttcgaggacttctgggagtactacaagagcgaccccttcgccggcagaaacgtgatcctggccagcctgtgcccccaggtgttcggcatgtacctggtgaagctggccgtggccatggtgctggccggcggcatccagagaaccgacgccaccggcaccagagtgagaggcgagagccacctgctgctggtgggcgaccccggcaccggcaagagccagttcctgaagtacgccgccaagatcacccccagaagcgtgctgaccaccggcatcggcagcaccagcgccggcctgaccgtgaccgccgtgaaggacagcggcgagtggaacctggaggccggcgccctggtgctggccgacgccggcctgtgctgcatcgacgagttcaacagcctgaaggagcacgacagaaccagcatccacgaggccatggagcagcagaccatcagcgtggccaaggccggcctggtgtgcaagctgaacaccagaaccaccatcctggccgccaccaaccccaagggccagtacgacccccaggagagcgtgagcgtgaacatcgccctgggcagccccctgctgagcagattcgacctgatcctggtgctgctggacaccaagaacgaggactgggacagaatcatcagcagcttcatcctggagaacaagggctaccccagcaagagcgagaagctgtggagcatggagaagatgaagacctacttctgcctgatcagaaacctgcagcccaccctgagcgacgtgggcaaccaggtgctgctgagatactaccagatgcagagacagagcgactgcagaaacgccgccagaaccaccatcagactgctggagagcctgatcagactggccgaggcccacgccagactgatgttcagagacaccgtgaccctggaggacgccatcaccgtggtgagcgtgatggagagcagcatgcagggcggcgccctgctgggcggcgtgaacgccctgcacaccagcttccccgagaaccccggcgagcagtaccagagacagtgcgagctgatcctggagaagctggagctgcagagcctgctgagcgaggagctgagaagactggagagactgcagaaccagagcgtgcaccagagccagcccagagtgctggaggtggagaccacccccggcagcctgagaaacggccccggcgaggagagcaacttcagaaccagcagccagcaggagatcaactacagcacccacatcttcagccccggcggcagccccgagggcagccccgtgctggacccccccccccacctggagcccaacagaagcaccagcagaaagcacagcgcccagcacaagaacaacagagacgacagcctggactggttcgacttcatggccacccaccagagcgagcccaagaacaccgtggtggtgagcccccaccccaagaccagcggcgagaacatggccagcaagatcagcaacagcaccagccagggcaaggagaagagcgagcccggccagagaagcaaggtggacatcggcctgctgcccagccccggcgagaccggcgtgccctggagagccgacaacgtggagagcaacaagaagaagagactggccctggacagcgaggccgccgtgagcgccgacaagcccgacagcgtgctgacccaccacgtgcccagaaacctgcagaagctgtgcaaggagagagcccagaagctgtgcagaaacagcaccagagtgcccgcccagtgcaccgtgcccagccacccccagagcacccccgtgcacagccccgacagaatgctggacagccccaagagaaagagacccaagagcctggcccaggtggaggagcccgccatcgagaacgtgaagccccccggcagccccgtggccaagctggccaagttcaccttcaagcagaagagcaagctgatccacagcttcgaggaccacagccacgtgagccccggcgccaccaagatcgccgtgcacagccccaagatcagccagagaagaaccagaagagacgccgccctgcccgtgaagagacccggcaagctgaccagcacccccggcaaccagatcagcagccagccccagggcgagaccaaggaggtgagccagcagccccccgagaagcacggccccagagagaaggtgatgtgcgcccccgagaagagaatcatccagcccgagctggagctgggcaacgagaccggctgcgcccacctgacctgcgagggcgacaagaaggaggaggtgagcggcagcaacaagagcggcaaggtgcacgcctgcaccctggccagactggccaacttctgcttcaccccccccagcgagagcaagagcaagagccccccccccgagagaaagaacagaggcgagagaggccccagcagcccccccaccaccaccgcccccatgagagtgagcaagagaaagagcttccagctgagaggcagcaccgagaagctgatcgtgagcaaggagagcctgttcaccctgcccgagctgggcgacgaggccttcgactgcgactgggacgaggagatgagaaagaagagctag

SEQ ID NO: 194589 - DNA, 2070 bp, Artificial Sequence
  derived and/or modified sequence
tcctctggtctaacagtgactgctgttaaggatagcggcgaatggaatttagaagctggggcattggtgctggccgacgctggcctgtgctgtattgacgagttcaacagccttaaggagcatgatagaacatcgattcacgaagcgatggagcaacagaccatctccgttgccaaagcggggctcgtttgtaagctgaacaccaggaccaccattctcgccgctaccaacccgaaggggcaatatgacccccaggagagcgtgtcagttaatattgccctgggtagccctctcctttcacgtttcgatctcatcttagtgttgctcgacaccaaaaacgaggattgggataggatcatttctagcttcattttagagaacaaaggataccctagtaagtctgagaaattgtggagtatggaaaagatgaagacatatttttgtctgattcggaatctccagcccacactctcggacgttggtaatcaggttctgctgcgctattaccagatgcagcgccagtcggattgtagaaacgctgcaagaacaactatccggctactggaatctctcataaggctggcggaggcccatgcacgtctcatgtttcgagacaccgttactttggaagacgctattaccgttgtgtcagtcatggagtcatcaatgcaaggcggagctcttttggggggggtcaatgctcttcatacttcgttccccgaaaatcccggtgaacagtatcagaggcagtgtgagcttatcctggagaaactggaactgcagtcgcttctgagcgaagaacttcgcagactggagagactgcaaaatcaatcggtgcaccagagtcagcccagggttctggaggtggagacaacaccgggctctcttcggaacggtcctggagaagagtctaatttccggacttcttcccagcaggaaattaactacagcactcacatctttagtcctggaggaagtcccgagggtagccccgtgctggatccgcccccccaccttgagcccaacaggtctaccagtcggaagcacagcgcacagcataaaaataatcgggatgattccctggattggtttgactttatggccacacaccagtcggagcctaaaaacacagtggtggtttcccctcacccaaaaacttccggcgaaaacatggcctctaagatctccaactccacgagccaaggcaaggagaagagcgagcccggccaacggtccaaagtggatattggcttactccccagtccaggagaaaccggtgtgccctggcgagccgacaacgtggagtcaaataagaagaagcgacttgccctggacagcgaggccgccgtgagcgccgataagcctgattctgttctgacgcaccacgttcctaggaacctgcaaaagttatgcaaggagcgagcccagaagctctgcagaaattcaacgcgggtacccgcacagtgtaccgtcccttcacatccccaatctactcccgttcatagccctgatcggatgttagacagtcccaagcggaagcggccaaaaagtcttgcgcaagtcgaggagcctgctatcgagaatgtgaaaccccctggatcccccgtcgcgaaactcgctaagttcacattcaagcagaagagcaaactgatccatagtttcgaagaccacagtcatgttagcccaggagccaccaaaattgcagtgcatagccctaagattagtcagaggagaactcgcagggatgccgcgctccccgtgaagaggcctggtaagctcaccagcactcctgggaaccagatatcaagccagccgcagggagagaccaaggaggtgagccagcagccacccgagaaacatggtccgcgtgagaaggtaatgtgtgcaccagagaaaaggataatccagccggagctggagctgggcaacgagacgggatgcgcccacctgacgtgtgaaggcgataagaaagaagaggtgagtggatctaacaagtctggaaaagtgcatgcctgcacactggcaagactcgctaacttctgcttcacacctcccagtgaaagtaagtag

SEQ ID NO: 194590 - DNA, 3432 bp, Artificial Sequence
  derived and/or modified sequence
atgaacagcgatcaggtgacccttgtaggacaggtattcgaatcttacgtatcagaatatcacaagaatgacatccttttgatcttaaaagagcgggacgaggatgctcactatcctgtggtggtgaacgccatgacactcttcgaaacaaacatggaaatcggagagtatttcaacatgtttccatccgaggtgctgactatcttcgattctgcacttcgtcggtcagcactgaccatcttgcaatctctcagccagcctgaggccgtgagtatgaagcagaacctacacgcccgcatcagcggcttacccgtgtgtcctgagcttgtacgggagcatattccaaagaccaaggacgtaggccacttcctgagtgtgacaggaacggtgatccgaactagtctggtgaaggttctcgagtttgaaagggattatatgtgcaacaagtgcaagcacgtcttcgtgatcaaagccgattttgaacagtactacaccttctgtcggccttcctcctgcccttcattagagtcttgtgacagcagcaaatttacttgcctgagcgggctctctagttcgccaacacgatgtcgggactatcaagaaattaagattcaggaacaggtgcagcggctgtccgtcgggagcattccacgatctatgaaggtgatcctggaagatgatctggtggattcctgcaaatcgggcgacgacctcactatctacggaatagtgatgcagcgctggaaaccatttcagcaggacgtgcgttgtgaggtcgagattgtgcttaaagcgaactacatccaggtaaacaatgagcagtcatccggaataattatggacgaagaagttcaaaaggagtttgaggacttctgggaatactataaaagcgacccctttgcggggcggaacgtgatccttgcttctttatgcccccaggtgttcggaatgtacctggtgaagctggctgttgctatggtgcttgctggcggaatccagcggaccgatgctaccggcacccgtgtgagaggcgagtctcacctgctgctggtcggcgatcccgggactgggaagagccagttccttaagtacgctgccaaaattacacctcgcagcgttctgactaccgggattgggagtacttctgctggcctcactgtaactgccgttaaggattcaggcgagtggaatttggaggctggcgcgcttgtgcttgccgatgctgggctttgctgtattgatgagtttaactccctcaaagagcatgataggacctcaatccacgaggcaatggagcagcaaactatttctgtagccaaggcgggccttgtgtgcaaactgaacacacgcaccaccatactggctgccaccaaccccaagggacaatacgacccccaagaaagcgttagtgtcaatattgctctcgggagccccctcctatctcgatttgaccttatcctcgtgctgctggataccaagaatgaagactgggacaggatcatctctagcttcatcctggaaaacaagggctatcctagcaagtccgaaaaactatggtcaatggagaagatgaaaacgtatttttgtttaattcggaacctgcaacctacgctcagcgacgtcggcaatcaggtgctgctgagatactaccagatgcaacgacaatctgactgccgtaacgcggcccgaactactattcggctgttggagtccctcattaggctggccgaagcacacgcgaggctgatgttcagagacaccgtgaccctagaagacgccattactgtagtgtcggtgatggagagcagcatgcagggtggcgccctgctgggaggagtaaatgccctccatacgtctttccccgagaatccaggcgaacagtaccagagacagtgtgagctcatcctggagaagctggagcttcagtctctgttatctgaggagttaagacgattggagcgattgcagaaccagagtgtccatcagtcccagccgcgcgtgctggaggtggagacaactccaggctcccttaggaacggcccaggcgaggaaagtaactttagaacatccagtcagcaggagattaactacagcactcatatcttttctccggggggcagcccggaggggtccccggtgttggatccgccaccccaccttgaaccaaaccgaagcacttctaggaagcactctgcgcagcataagaacaacagagacgactcactggactggttcgatttcatggccactcaccagtcagaaccgaagaacacggtggtcgtgtcccctcatcctaaaaccagcggcgagaacatggcgagcaaaatctcaaactcgactagccagggtaaggaaaaaagcgagcctggccagagaagcaaggttgatatcgggctcctgccatcaccaggagaaacaggcgtgccttggcgtgccgacaacgttgagagcaacaaaaaaaaaaggctagcactcgacagcgaagccgctgtaagcgctgataaacctgattccgtcttgacacaccacgtacccaggaacctgcaaaagttgtgcaaagaacgtgctcagaagctgtgcaggaactctacccgcgtgcctgcacagtgcacagtgcctagccatccacaatctacgcccgtgcattctccagataggatgttggacagtcccaagagaaagagacctaagtcacttgcccaggtggaagagccagctattgagaatgtaaagcctcctgggtcaccagtcgctaaactagccaagtttacctttaaacagaagtccaaattgatccatagcttcgaggaccatagccacgtgtcccctggggccaccaaaatcgcggttcatagcccgaagatctctcagcgtcggactaggcgagatgccgcactccctgtcaaacgcccaggtaagctcacttcaacccctggaaaccaaataagcagtcaaccacagggagagacaaaagaggtttcccagcagccccctgagaaacacggccctagagagaaggtgatgtgtgcccctgagaaacggataattcagcctgagttagaacttggcaacgagactgggtgcgcccaccttacctgtgagggcgacaaaaaagaggaagtgtcgggttcaaacaagagcggcaaggtgcacgcctgcacactcgcaagactggctaatttctgctttactcctccctcagagtcaaagtcgaagagccccccgcccgagcggaagaacaggggcgagaggggccccagcagccccccgacaaccacggcccctatgcgtgtgtccaaacgcaaaagctttcaactgcgaggttcgaccgagaaactgattgtctctaaagaatctctgtttactttgccagagcttggtgacgaggccttcgactgcgattgggacgaggaaatgcggaagaagtcctag

SEQ ID NO: 194591 - DNA, 2070 bp, Artificial Sequence
  derived and/or modified sequence
agcagcggcctgactgtgacagctgtgaaggacagcggggagtggaacctggaggccggggccctggtgctggctgatgctggcctgtgctgcattgatgagttcaacagcctgaaggagcatgacaggaccagcatccacgaggccatggagcagcagaccatctctgtggccaaggccggcctggtgtgcaagctgaacaccaggaccaccatcctggccgccaccaaccccaagggccagtatgacccccaggagagcgtgtctgtgaacatcgccctgggcagccccctgctgagcagatttgacctgatcctggtgctgctggacaccaagaatgaagactgggaccgcatcatcagcagcttcatcctggagaacaagggctaccccagcaagtctgagaagctgtggagcatggagaagatgaagacctacttctgcctgatccggaacctgcagcccaccctgagtgatgtgggcaaccaggtgctgctgcgctactaccagatgcagaggcagagcgactgcagaaatgctgcccggaccaccatccggctgctggagagcctcatccggctggccgaggcccacgcccggctgatgttccgggacacagtgaccctggaggatgccatcaccgtggtgtctgtgatggagagctccatgcagggcggggccctgctgggcggcgtgaatgccctgcacaccagcttcccagaaaatcctggagagcagtaccagaggcagtgtgagctgatcctggagaagctggagctgcagagcctgctgtctgaggagctgcggcggctggagcggctgcagaaccagagcgtgcaccagagccagccccgggtgctggaggtggagaccaccccaggcagcctgagaaatggacctggagaggagagcaacttccgcaccagcagccagcaggagatcaactacagcacccacatcttcagccctgggggcagccctgagggcagccctgtgctggaccccccaccccacctggagcccaacagaagcaccagcaggaagcacagcgcccagcacaagaacaacagagatgacagcctggactggtttgacttcatggccacccaccagagcgagcccaagaacacagtggtggtgagcccccaccccaagaccagcggggagaacatggccagcaagatcagcaacagcaccagccagggcaaggagaagtctgagcccggccagaggagcaaggtggacatcggcctgctgcccagccctggagaaacaggagtgccctggagggctgacaacgtggagagcaacaagaagaagaggctggccctggacagcgaggccgctgtgtctgctgacaagccagattctgtgctgacccaccacgtgcccaggaacctgcagaagctgtgcaaggagcgggcccagaagctgtgcaggaacagcaccagggtgcctgcccagtgcaccgtgcccagccacccccagagcacccctgtgcacagcccagacaggatgctggacagccccaagaggaagaggcccaagagcctggcccaggtggaggagcccgccattgaaaatgtgaagcccccaggcagccctgtggccaagctggccaagttcaccttcaagcagaagagcaagctgatccacagctttgaggaccacagccacgtgtcccctggggccaccaagattgctgtgcacagccccaagatcagccagaggaggaccaggagagatgctgccctgcctgtgaagaggcctgggaagctgaccagcaccccaggcaaccagatcagcagccagccccagggcgagaccaaggaggtgtcccagcagcccccagagaagcacggcccccgggagaaggtgatgtgtgcccctgagaagaggatcatccagcctgagctggagctgggcaatgaaacaggctgtgcccacctgacctgtgagggggacaagaaggaggaggtgtctggcagcaacaagagcggcaaggtgcacgcctgcaccctggcccggctggccaacttctgcttcaccccacccagcgagagcaagtag

SEQ ID NO: 194592 - DNA, 3432 bp, Artificial Sequence
  derived and/or modified sequence
atgaacagcgaccaggtgaccctggtgggccaggtgtttgagagctatgtgtctgagtaccacaagaatgacatcctgctgatcctgaaggagagagatgaagatgcccactaccctgtggtggtgaatgccatgaccctgtttgagaccaacatggagatcggggagtacttcaacatgttccccagcgaggtgctgaccatctttgattctgccctgcggcgcagcgccctgaccatcctgcagagcctgagccagcctgaggccgtgtccatgaagcagaacctgcacgcccgcatcagcggcctgcctgtgtgcccagagctggtgcgggagcacatccccaagaccaaggatgtgggccacttcctgtctgtgactggaacagtcatccgcaccagcctggtgaaggtgctggagtttgagcgggactacatgtgcaacaagtgcaagcacgtgtttgtgatcaaggctgactttgagcagtactacaccttctgccggcccagcagctgccccagcctggagagctgtgacagcagcaagttcacctgcctgagcggcctgagcagcagccccacccgctgccgggactaccaggagatcaagatccaggagcaggtgcagaggctgtctgtgggcagcatccccaggtccatgaaggtgatcctggaggatgacctggtggacagctgcaagtctggagatgacctgaccatctatggaattgtgatgcagcgctggaagcccttccagcaggatgtgcgctgtgaggtggagatcgtgctgaaggccaactacatccaggtgaacaatgagcagagcagcggcatcatcatggatgaggaggtgcagaaggagtttgaggacttctgggagtactacaagagtgacccctttgctggaagaaatgtcatcctggccagcctgtgcccccaggtgtttggcatgtacctggtgaagctggccgtggccatggtgctggccggcggcatccagaggacagatgccaccggcaccagggtgcggggggagagccacctgctgctggtgggggaccccggcaccgggaagagccagttcctgaagtatgctgccaagatcacccccaggtctgtgctgaccaccggcatcggcagcaccagcgctggcctgactgtgacagctgtgaaggacagcggggagtggaacctggaggccggggccctggtgctggctgatgctggcctgtgctgcattgatgagttcaacagcctgaaggagcatgacaggaccagcatccacgaggccatggagcagcagaccatctctgtggccaaggccggcctggtgtgcaagctgaacaccaggaccaccatcctggccgccaccaaccccaagggccagtatgacccccaggagagcgtgtctgtgaacatcgccctgggcagccccctgctgagcagatttgacctgatcctggtgctgctggacaccaagaatgaagactgggaccgcatcatcagcagcttcatcctggagaacaagggctaccccagcaagtctgagaagctgtggagcatggagaagatgaagacctacttctgcctgatccggaacctgcagcccaccctgagtgatgtgggcaaccaggtgctgctgcgctactaccagatgcagaggcagagcgactgcagaaatgctgcccggaccaccatccggctgctggagagcctcatccggctggccgaggcccacgcccggctgatgttccgggacacagtgaccctggaggatgccatcaccgtggtgtctgtgatggagagctccatgcagggcggggccctgctgggcggcgtgaatgccctgcacaccagcttccctgagaaccctggagagcagtaccagaggcagtgtgagctgatcctggagaagctggagctgcagagcctgctgtctgaggagctgcggcggctggagcggctgcagaaccagagcgtgcaccagagccagccccgggtgctggaggtggagaccaccccaggcagcctgagaaatggacctggagaggagagcaacttccgcaccagcagccagcaggagatcaactacagcacccacatcttcagccctgggggcagccctgagggcagccctgtgctggaccccccaccccacctggagcccaacagaagcaccagcaggaagcacagcgcccagcacaagaacaacagagatgacagcctggactggtttgacttcatggccacccaccagagcgagcccaagaacacagtggtggtgagcccccaccccaagaccagcggggagaacatggccagcaagatcagcaacagcaccagccagggcaaggagaagtctgagcccggccagaggagcaaggtggacatcggcctgctgcccagccctggagagaccggggtgccctggagggctgacaacgtggagagcaacaagaagaagaggctggccctggacagcgaggccgctgtgtctgctgacaagccagacagcgtgctgacccaccacgtgcccaggaacctgcagaagctgtgcaaggagcgggcccagaagctgtgcaggaacagcaccagggtgcctgcccagtgcaccgtgcccagccacccccagagcacccctgtgcacagcccagacaggatgctggacagccccaagaggaagaggcccaagagcctggcccaggtggaggagcccgccattgaaaatgtgaagcccccaggcagccctgtggccaagctggccaagttcaccttcaagcagaagagcaagctgatccacagctttgaggaccacagccacgtgtcccctggggccaccaagattgctgtgcacagccccaagatcagccagaggaggaccaggagagatgctgccctgcctgtgaagaggcctgggaagctgaccagcaccccaggcaaccagatcagcagccagccccagggcgagaccaaggaggtgtcccagcagcccccagagaagcacggcccccgggagaaggtgatgtgtgcccctgagaagaggatcatccagcctgagctggagctgggcaatgagaccggctgtgcccacctgacctgtgagggggacaagaaggaggaggtgtctggcagcaacaagagcggcaaggtgcacgcctgcaccctggcccggctggccaacttctgcttcaccccaccttctgagagcaagagcaagagccccccacctgagaggaagaacagaggagagcggggccccagcagcccccccaccaccacagcccccatgagggtgtccaagaggaagagcttccagctgcggggcagcacagagaagctgattgtgtccaaggagagcctcttcaccctgcctgagctgggagatgaggcctttgactgtgactgggatgaggagatgaggaagaagagctag

SEQ ID NO: 194593 - DNA, 2070 bp, Artificial Sequence
  derived and/or modified sequence
agcagcggcctgaccgtgaccgccgtgaaggacagcggcgagtggaatttagaggccggagccctcgtcttggctgatgccggcctctgctgcattgacgaattcaattctctgaaggaacatgaccgcacgtcgattcatgaagcaatggagcagcaaaccattagtgtggctaaagctggactcgtgtgtaagttgaatactaggaccactatcctggccgcaacaaacccaaagggacagtacgaccctcaggaaagtgtgtcagtaaatatagccctgggtagcccccttctgagccgattcgatctaatcctggttttacttgatactaaaaacgaggattgggaccgcataatttctagtttcatcctcgaaaacaaggggtatccgtcaaaaagtgagaagctttggagtatggaaaaaatgaagacttatttctgcctcatcagaaatctgcagcccacattgtctgatgtgggaaaccaagtgcttctccggtactatcagatgcaacggcagtcggattgtcgcaacgccgcgaggaccaccattcggttgctcgaaagtctgatcaggcttgccgaggcccatgcaaggttaatgttcagggacaccgtcaccctggaagacgcaattactgtggtcagcgttatggagagttctatgcagggcggcgccctgctgggcggagtcaacgctttacatacgtcttttccggaaaatcccggcgagcagtaccagcggcagtgcgagttgattctggaaaaacttgaactgcagagcttactcagcgaggaactgcggcggctggagcgtctgcagaatcaatccgtgcatcaatcccaaccccgagtgctcgaggtcgaaacgacgcctgggagtctgaggaatgggccaggtgaggagtccaacttccgaacttcatcacaacaggaaatcaactattctactcatatctttagtcctggaggctcaccagaaggctcacccgtgctggacccccccccacatcttgagccgaatagatcgactagcaggaagcacagcgcccagcacaagaacaacagggatgacagtctggactggttcgactttatggctacccatcagtcagagcccaagaataccgtggtggttagtccgcaccccaaaacctcgggcgagaatatggctagcaaaatctcgaactccaccagtcagggcaaggagaaatctgagcctgggcagaggtcaaaggtcgatataggactcctcccgagcccaggggagactggggtaccatggagagcagacaatgtggagagcaacaaaaaaaagcggctggccttagacagcgaggccgccgtctctgccgacaaacctgattcagtgctcactcatcacgtaccaaggaaccttcagaagctgtgcaaagaacgagcccagaaactctgtcgaaacagcacaagggttcccgcacagtgcacggtcccctctcacccccagtctacgcccgtacacagcccggacaggatgctggactcccctaagaggaagcgtcctaagtcactagctcaggttgaggagcctgcaatcgaaaacgtgaaaccccctgggtcacccgtagcaaaactggcaaaatttactttcaagcaaaagtccaagttaattcatagctttgaggaccacagccacgtgtcaccaggagcaacgaaaattgctgttcactcacctaagattagccagcggcgtacaaggcgggatgcagccctcccagtgaagcggcctggaaagcttactagcactccagggaaccagatcagctcgcaaccccaaggcgagacgaaggaggtgtcccagcagccccccgagaagcacggaccacgagagaaggtcatgtgcgcacccgagaaacgtataattcagccggaactggaattggggaacgagaccggctgcgcacacttaacttgtgaaggggataaaaaggaagaggtgtctggcagtaataaatcaggcaaagttcacgcctgtaccctcgccagactggctaacttttgttttacccccccatcagaatctaagtag

SEQ ID NO: 194594 - DNA, 3432 bp, Artificial Sequence
  derived and/or modified sequence
atgaacagcgaccaggtgaccctggtgggccaggtgttcgagagctacgtctccgagtaccacaagaacgatattttgctcatactgaaggaacgggacgaagacgctcattacccagtggtggtcaacgcgatgaccctcttcgagacgaacatggagattggtgagtatttcaacatgttcccaagtgaggtgctgacaatattcgactcagccctcagaaggagtgcgcttactattttgcagagtctcagccagcctgaagcagtgagcatgaagcagaacctacatgcacgcataagcggtctgccagtatgccccgaactggttcgggagcatatccctaaaacaaaggatgtggggcatttcctctctgtgacagggacagtcattcgcactagtctggtgaaggtgctcgaattcgaacgcgattatatgtgcaataagtgcaaacatgtattcgtgattaaggcagacttcgaacagtattacaccttttgcaggcccagttcatgccctagcctcgagtcatgcgatagttcaaaatttacatgcttaagtggattatcctcttcacccacccgatgccgcgactatcaagagatcaagatccaggagcaggtgcagcggctaagtgtgggttccatcccccgcagtatgaaagttatcctcgaggatgacctggtggactcctgcaagagtggggacgatctgacaatctacgggattgtcatgcaacgctggaaacccttccagcaggacgtccgctgtgaagttgagatagtgctgaaagctaattacatccaagttaacaatgaacaaagctcagggatcatcatggacgaagaggtgcagaaggaattcgaagacttttgggaatattataaatctgatccctttgcaggccgtaacgtgatccttgcctccctgtgtcctcaagtttttgggatgtatctggtgaagctcgcagtggcaatggtcctcgccggtggaattcagagaaccgatgcaactggaaccagggtgcgcggggagagtcacctactgctggtaggagatcccggcactggcaaaagtcagttcctgaaatatgccgccaagatcactcctcggtctgtgcttacaactggtatcggatcaacttccgccggcctgaccgttaccgccgtaaaggattctggggaatggaacttagaggcaggtgcgttggtgttagcggacgctgggctgtgctgtatcgacgaatttaattccctgaaggagcacgatcgcacgtccatccacgaagcaatggaacagcagacaatctctgtggccaaagccggtctggtgtgcaagctgaatactaggacgacgatccttgcagccacaaaccccaaaggacagtacgatcctcaggagtccgtgtccgtgaacatcgcactcgggtcgccactactaagccggttcgacctgatcctggtgctgctggacactaagaacgaggattgggaccgaataatttcttccttcattctggaaaacaaagggtacccgagcaagagcgagaagctctggtccatggagaagatgaaaacatacttttgtctaatccgaaatttacaacctactttatctgacgtgggaaaccaggtcttgctccgatattatcagatgcagcgccagtctgattgccgaaatgccgcccgaaccaccatacgcctgctggagagcctcattcgcctggcagaagcccatgctcggctgatgtttcgagataccgttaccctggaggacgccataacagtggtgtccgtgatggagagtagtatgcagggaggcgcccttttgggcggagtgaacgcgctgcatactagcttccctgaaaacccaggggagcagtaccagcgccaatgtgaactgatcctcgagaagcttgaactgcagtcactgctgagcgaagagctgagaagacttgagaggctgcagaaccagagcgtgcatcaaagccaaccccgcgtcttggaggtggaaaccacccccggcagcctcagaaacgggcctggggaggagtccaacttccggacctcatcccagcaagagatcaattacagtactcatatcttctccccgggaggcagtcctgaggggtccccagtgctggatcctccaccacacctggagccaaacagatccacatctaggaagcactcagctcagcataagaacaacagggatgactctctggattggttcgatttcatggccacacatcaatccgagcccaagaacacagtggtggtttctcctcatccaaaaaccagtggggaaaacatggcctcaaagattagcaatagcaccagccagggaaaggagaaatcagagccgggtcagaggtccaaagtcgacatcggcttgctgccaagccccggcgagacaggagtgccctggagagcggataacgttgagtccaacaaaaagaaacgactggcactggactcagaggccgcagtctcagctgacaaacccgactccgtgttaactcaccacgtgccacgcaatctccagaagttgtgtaaggaacgagcccagaagctgtgccgaaatagtacacgcgtgcccgcacagtgcaccgtcccctctcaccctcagtctaccccagttcactcccccgaccgcatgctggattcccctaagcgaaaacgtcctaagagcctcgctcaggttgaggagcctgctattgaaaacgtgaaacctccaggcagccccgtggcaaaactggcgaagtttacgttcaaacagaagagcaaactgattcacagttttgaggaccactcccacgttagccccggggcaacaaaaattgctgtgcacagtcccaaaatttcacagagaaggaccaggcgggacgcagcccttcccgttaagaggcccggtaagctcacctccacccctggcaatcagataagttctcagccccaaggagaaactaaagaggtgtctcagcagccacctgagaagcacggaccacgcgagaaagtgatgtgcgctcccgaaaagagaataatccagccagagttagaactcgggaacgaaactggttgtgcacacctcacatgtgagggggataagaaagaggaggtcagtggtagcaacaagtccggcaaagtgcacgcttgtacgctagctcgactagctaatttttgtttcaccccaccttctgaatcaaaaagcaagagccctccacctgaaaggaagaatcggggcgaacggggtccatctagccctccaaccacgactgcgcccatgcgagtgagtaaaaggaaatcatttcagctgaggggaagcacagagaagctgattgtatctaaagagagcctgtttacactgcctgaactgggcgatgaggcttttgactgcgactgggatgaagaaatgcggaaaaagtcctag

SEQ ID NO: 194595 - DNA, 2444 bp, Artificial Sequence
  derived and/or modified sequence
gttgatatggcttgcttgtttcctcaggtctgacggtaactgctgtaaaagactcaggagaatggaatttggaggctggggcattagttcttgcagatgcgggcctttgctgtattgatgagttcaatagcctcaaagagcatgataggaccagtatccatgaagcaatggagcaacaaaccataagtgttgctaaggctggcctcgtgtgcaagctgaacacaaggaccaccatcctggcagcaacgaaccccaaaggccagtacgacccccaggagtccgtgtctgtgaacattgccctcggcagcccactcttaagtcgatttgacctgatcctggttttgcttgataccaagaatgaagactgggatcgtatcatttcctcctttatcttagaaaataaaggttacccaagcaaatcagagaagctctggagcatggaaaagatgaaaacctatttctgcctcataaggaatctgcagcccacactgtctgatgtgggcaatcaggttcttctccggtactaccagatgcaaaggcagagtgattgccggaacgctgcccggaccaccattcggctgttggaaagcttgatacgattagcagaagctcatgctcgcctgatgtttcgtgatactgtaactctggaagacgctattacggtggtgtcagtcatggagtcctcaatgcagggaggtgcactgctaggaggtgtgaatgccctccacacttcctttcctgaaaaccctggagagcagtaccagagacagtgtgaacttattctggaaaagctagagctgcagagcctcttgagtgaagagcttagaagacttgaaaggttacagaatcagagtgtgcaccaatcccaaccacgggtattggaggtagagactactccaggatccttgagaaatggtccaggggaagaatcaaacttcagaacttcatcacagcaggaaatcaactatagcacacatatcttctctcctggaggcagccccgagggaagcccagttctagatcccccaccgcatctggagcctaatagatcaacaagtaggaaacattcagctcagcacaaaaataacagagatgacagtttagattggtttgatttcatggcaactcatcagagtgaacctaaaaacactgttgttgtgtctcctcatcccaaaacatctggagaaaatatggcttcgaagatctctaacagcacatctcagggtaaggagaagagtgagccaggccaaaggagcaaagtggacattgggttgcttccatcaccaggagagacaggtgttccatggagggcagacaatgtggaaagtaacaagaaaaaaaggctagcactagattctgaagcagcagtctctgctgataaaccagactcagtactgactcatcatgtccccaggaacctgcagaagctgtgcaaagagagggcccagaagttgtgcagaaatagcaccagggtgcctgcacagtgcacagtcccttcccatcctcagtccactcctgtacatagcccagacagaatgctggactcacccaaaagaaagagaccgaaatcccttgcgcaagtggaagagcctgcaattgaaaatgttaagcctccaggttcccctgtggccaaactggcaaaatttactttcaagcagaagtcaaaactgatccactcctttgaagatcacagccatgtgtcacctggtgcaactaaaatagcagttcatagtcctaaaatttcccagcgtagaacaagaagagacgcagccttgccggtgaagcgtccaggaaagttaacatctaccccaggaaaccagatctccagtcagccacagggtgagacaaaggaggtgtcgcagcagccaccagagaaacacggaccaagagagaaggtgatgtgtgcccctgagaagaggattattcagcctgaattagagcttgggaacgagactgggtgtgctcatcttacttgtgagggagacaaaaaggaagaggtttcaggcagtaataaaagcggcaaggttcatgcctgcacattagccagattggcaaacttctgctttactcccccatcggaatccaaatcaaaatcccctcctcctgaaaggaagaaccgaggtgagagaggcccaagctcccctcctacaaccacagctccaatgcgtgtcagtaaaaggaaatcttttcagctccgtgggtccaccgagaaactgattgtttccaaagaatccctcttcactttaccagaactaggtgatgaagcatttgattgtgactgggatgaagagatgagaaaaaagtcatagttgggaaaagctttctggtcaaatctcaccttcttcaactccacagaggaccttcaggatatcaatatggtatttataaatgtatagaacaattggccatattgaggatcactctgaatactggctcccccttaa

SEQ ID NO: 194596 - DNA, 5088 bp, Artificial Sequence
  derived and/or modified sequence
tccatccggaagagccgccggggcagggaagttgaggcggtgcgcggcccggcgtcggtcgagagcgcaggcccggcagagccgcaggcgctaggccgcccgacacagcccgcgcgtccccgcggccggtggcgcctcgagcggccacgtgcacgcgcgcactccgcctcaccagccttcttgcgccggagacgaacccgctgcctggctggagctctctgggcccttcggcctcgggagcaacgcgttcccggcgacttctgacacagccattacctagattcaagatgaatagcgatcaagttacactggttggtcaagtgtttgagtcatatgtttcggaataccataagaatgatattcttctaatcttgaaggaaagggatgaagatgctcattacccagttgtggttaatgccatgactctgtttgagaccaacatggaaatcggggaatatttcaacatgttccccagtgaagtgcttacaatttttgatagtgcactgcgaaggtcagccttgacaattctccagtccctttctcagcctgaggctgtttccatgaaacagaatcttcatgccaggatatcaggtttgcctgtctgtcctgagctggtgagggaacacatacctaaaaccaaggatgtgggacactttttatctgtcactgggacagtgattcgaacaagtctggtgaaggttctggagtttgagcgggattacatgtgtaacaaatgcaagcatgtgtttgtgatcaaggctgactttgagcagtattacaccttttgccggccatcctcgtgtcccagcttggagagctgtgattcctctaaattcacttgcctctcaggcttgtcttcgtctccaaccaggtgtagagattaccaggaaatcaaaattcaggaacaggttcaaaggctatctgttggaagtattccacgatctatgaaggttattctggaagatgacttagtggatagttgcaaatctggtgatgacctcactatttacgggattgtaatgcaacggtggaagccctttcagcaagatgtgcgctgtgaagtggagatagtcctgaaagcaaattacatccaagtaaataatgagcagtcctcagggatcatcatggatgaggaggtccaaaaggaattcgaagatttttgggaatactataagagcgatccctttgcaggaaggaatgtaatattggctagcttgtgccctcaagtgtttggaatgtatctagtaaagcttgctgtggccatggtgctggctggtgggattcaaaggactgatgctacaggaacacgggtcagaggagaatctcatcttttattggttggggatcctggcacagggaaatctcagttcctcaaatatgcagcaaagattacaccaagatctgtgctgaccacaggaattggatctactagtgcaggtctgacggtaactgctgtaaaagactcaggagaatggaatttggaggctggggcattagttcttgcagatgcgggcctttgctgtattgatgagttcaatagcctcaaagagcatgataggaccagtatccatgaagcaatggagcaacaaaccataagtgttgctaaggctggcctcgtgtgcaagctgaacacaaggaccaccatcctggcagcaacgaaccccaaaggccagtacgacccccaggagtccgtgtctgtgaacattgccctcggcagcccactcttaagtcgatttgacctgatcctggttttgcttgataccaagaatgaagactgggatcgtatcatttcctcctttatcttagaaaataaaggttacccaagcaaatcagagaagctctggagcatggaaaagatgaaaacctatttctgcctcataaggaatctgcagcccacactgtctgatgtgggcaatcaggttcttctccggtactaccagatgcaaaggcagagtgattgccggaacgctgcccggaccaccattcggctgttggaaagcttgatacgattagcagaagctcatgctcgcctgatgtttcgtgatactgtaactctggaagacgctattacggtggtgtcagtcatggagtcctcaatgcagggaggtgcactgctaggaggtgtgaatgccctccacacttcctttcctgaaaaccctggagagcagtaccagagacagtgtgaacttattctggaaaagctagagctgcagagcctcttgagtgaagagcttagaagacttgaaaggttacagaatcagagtgtgcaccaatcccaaccacgggtattggaggtagagactactccaggatccttgagaaatggtccaggggaagaatcaaacttcagaacttcatcacagcaggaaatcaactatagcacacatatcttctctcctggaggcagccccgagggaagcccagttctagatcccccaccgcatctggagcctaatagatcaacaagtaggaaacattcagctcagcacaaaaataacagagatgacagtttagattggtttgatttcatggcaactcatcagagtgaacctaaaaacactgttgttgtgtctcctcatcccaaaacatctggagaaaatatggcttcgaagatctctaacagcacatctcagggtaaggagaagagtgagccaggccaaaggagcaaagtggacattgggttgcttccatcaccaggagagacaggtgttccatggagggcagacaatgtggaaagtaacaagaaaaaaaggctagcactagattctgaagcagcagtctctgctgataaaccagactcagtactgactcatcatgtccccaggaacctgcagaagctgtgcaaagagagggcccagaagttgtgcagaaatagcaccagggtgcctgcacagtgcacagtcccttcccatcctcagtccactcctgtacatagcccagacagaatgctggactcacccaaaagaaagagaccgaaatcccttgcgcaagtggaagagcctgcaattgaaaatgttaagcctccaggttcccctgtggccaaactggcaaaatttactttcaagcagaagtcaaaactgatccactcctttgaagatcacagccatgtgtcacctggtgcaactaaaatagcagttcatagtcctaaaatttcccagcgtagaacaagaagagacgcagccttgccggtgaagcgtccaggaaagttaacatctaccccaggaaaccagatctccagtcagccacagggtgagacaaaggaggtgtcgcagcagccaccagagaaacacggaccaagagagaaggtgatgtgtgcccctgagaagaggattattcagcctgaattagagcttgggaacgagactgggtgtgctcatcttacttgtgagggagacaaaaaggaagaggtttcaggcagtaataaaagcggcaaggttcatgcctgcacattagccagattggcaaacttctgctttactcccccatcggaatccaaatcaaaatcccctcctcctgaaaggaagaaccgaggtgagagaggcccaagctcccctcctacaaccacagctccaatgcgtgtcagtaaaaggaaatcttttcagctccgtgggtccaccgagaaactgattgtttccaaagaatccctcttcactttaccagaactaggtgatgaagcatttgattgtgactgggatgaagagatgagaaaaaagtcatagttgggaaaagctttctggtcaaatctcaccttcttcaactccacagaggaccttcaggatatcaatatggtatttataaatgtatagaacaattggccatattgaggatcactctgaatactggctcccccttaaggctttctaatttcaggttaatcttcatgacttaaaaagttgtataatcagttgaggtcagtgtgataccagcagctgagctgaattaattatgttgtgcttaattttacaaatggagtacttgtattcctgttcctgaagctgtttctgttttttgttttgttttgtttttaagggggagaggttcttccctagattaatttcttctttcattcactcaggaacaaatgtcaagaaggtagcactcataaatctaacaaggcagatgaactcttttctactttttttttttttttttgtattttcacctggaatgggctaagtacagtgaatataatcacttggatgatttgccaaaatcagactatttttctagtattatttttgtattgatttgtgtggatcaggttaaatgtgactaatgcttttctttctttgagaggtatccttacaattccatgatgttcttagagatctggccactggtcaaacagtacctttctgaagtactgaccttctgagttgtcctttctttcttgagccaacattttgtacttcagattcttttttctcttgggggcctaccttcaaccaagtaaaatactgtgattagaagaagagagagtatgagccaggcacagtgactcactcctgtagtcctagctactcggggaggctgaggcaggatgattgcttaagcccaggagttcggggttacagtgagctgtggtcacaccactgtattccagcctgggtgacagagtgagatcctgtctctaaaaataaaataaatgaagaagagagactatgtggtagtctcaatcaaacatcatgtctcatctacccagctggttaatatggaaatgtgattcctactaagttgtgattcacttgtctttaaaaccaaggaaattatatactgtttttggtcagaatagataacctcaagctttgtctttctatgtgcttttaaaatcacttattcctttggattctaataagggttattaggattcagtaattatggactttctcttctgaagtgtgaatttgtaaactgattgtttaattgtcagagggacttttggacatagaatactcaaaactatatgtattttgtttaattttcacttcattcaattcacgcattgaaaacaaatttagaaaatccaatttttcttaagcatttaaacgttctaaaattcactaataaaattttctgaaaaaatttaaa

SEQ ID NO: 194597 - DNA, 2070 bp, Artificial Sequence
  derived and/or modified sequence
agcagcggccttaccgtaactgctgtgaaagattctggtgaatggaatctcgaggctggagccctggttctcgctgacgcgggactgtgctgtattgatgaattcaactccctcaaagagcacgaccgaacttcaatccatgaagcaatggagcagcagaccatctcagtcgcaaaggcgggattggtctgtaaactgaatacacgtaccactatcctggctgcaaccaaccctaaggggcaatacgacccccaagagtctgtgtccgttaatatcgccctgggctcaccgctcctctctcgtttcgaccttatactggtactattggacacaaaaaacgaagattgggatcgaatcatttccagtttcatcctggaaaacaaaggctatccctcgaaatctgaaaaactgtggtcaatggaaaaaatgaaaacctacttctgcctgattcgcaacttgcagcctacactctctgacgtgggcaaccaggtcctgctgcggtactaccagatgcaaagacagagtgattgcaggaatgctgcacggacaacaattcgcctcttagagtctctcataaggctggccgaggcacatgcccgactcatgtttcgcgacacagtgacgctggaggatgcgatcacagtggtgtctgtgatggagtcctccatgcaggggggtgcgctcttgggaggcgtaaatgcccttcacactagcttcccggaaaatcccggtgagcaataccagagacaatgcgagctgatactggaaaaattagaactccagtccctgttgtcagaggaactgagacgattagagaggctgcagaatcagtcagtgcaccagagtcagccacgggtactggaggttgagaccaccccgggatctctccggaatggccctggagaggagagcaactttcgtacatcctcccaacaggagataaattactccacccacatcttctccccaggcggaagccccgaaggctcacccgtgctggacccccctcctcatctggaacccaataggtccacgtctcggaaacacagtgctcagcacaagaacaaccgagacgacagcctcgattggtttgattttatggccacccaccagtccgaacccaagaacacagtggtagtgtccccacaccctaagacaagcggcgagaatatggcctctaagatctcaaactcaacgtcacaggggaaagaaaagtcagaaccaggacaaaggagcaaggtcgacatcggactgctcccctcacctggagaaactggcgtcccatggcgagcggataatgtggagagtaacaaaaagaagcggcttgccctggattccgaggctgccgtgagcgctgacaagcccgacagcgtcttaacacaccatgtacccaggaacctacagaagttatgtaaggaacgggcacagaaactgtgtcgaaattctacaagggtgccagcccaatgcacagtgcctagccacccgcagtctactccagttcacagccctgaccgtatgctagattcaccaaagcggaagagaccgaaaagcctcgcgcaggtcgaagagccagccattgagaacgtgaaacctcccggttctccagttgcgaaactggccaaattcacattcaaacagaagagcaagttaatccactcatttgaggatcacagccatgtgtcccctggagctacgaaaatcgctgtgcattcccccaagatttctcagcgcagaacaagacgggatgcagccctgccagttaaacgcccaggaaaactcacctccacccccggaaaccagatttctagtcagccacagggtgagaccaaggaggtgtcccagcagcctcctgagaagcacgggcctcgagagaaagtgatgtgtgccccagaaaagcggatcattcagccggaactggaactggggaatgaaacggggtgcgctcacttaacttgcgaaggcgacaaaaaagaggaggtgtccgggtccaacaaatcgggcaaagtgcacgcctgtacgcttgcgaggctcgcaaatttctgtttcactccaccgagcgagagcaagtag

SEQ ID NO: 194598 - DNA, 3432 bp, Artificial Sequence
  derived and/or modified sequence
atgaatagtgaccaggttactctggtgggccaggtgtttgagtcttacgtcagcgaatatcataagaacgatattcttctgatcctgaaagagcgagacgaagatgcccactatccggttgttgttaacgcaatgacactgttcgaaaccaacatggagattggtgaatacttcaacatgttccccagcgaagtcctgacaatattcgattccgcccttaggcggagcgctctgaccatcctgcaaagtctgtcccagcccgaagctgttagtatgaagcagaaccttcacgctcgtatctctggcctgccagtgtgcccagagctggtaagagaacacataccaaaaaccaaagacgtgggtcatttccttagtgtcaccgggactgtaatcagaacgtccctcgtcaaggttttggagttcgagagggactatatgtgtaataagtgcaagcatgtgttcgtgattaaagccgactttgagcagtactacaccttctgtcggcctagttcatgcccttctttggagagctgcgactcatccaaatttacatgcctgtccgggttaagtagctctccaacacgatgccgcgactatcaggagatcaaaatccaggaacaggtgcagaggttgtctgtgggatccattcccaggtcgatgaaggtaatcctcgaggacgacctagttgattcctgcaaatcaggggatgatcttacaatttatgggatcgtgatgcagcgctggaagccattccagcaggatgtcagatgcgaagtggagatcgtattgaaggcgaattacattcaggttaacaatgagcagtcatcaggcatcattatggacgaggaagttcagaaagagttcgaggatttctgggaatactacaaaagcgaccccttcgccggacgtaatgtgatcctggcatcactgtgtccccaggtctttggcatgtacctcgtcaaactcgcagtcgccatggtacttgctggtggcattcagcggacagatgccaccggaacaagagtcagaggagaaagccacctcctactagtcggcgacccaggaactggaaaaagccagttcctgaaatatgccgctaagattacaccccgttctgttctgacgactgggataggcagcacctctgcgggattaaccgtcactgccgtgaaagatagtggcgagtggaatttggaggcgggtgccctcgtactggccgatgccggactatgctgtatagatgaatttaactcactgaaagaacatgatcgcacatctatccatgaggcaatggagcagcagacaatatccgtggccaaggccggactggtctgtaagctgaataccagaacaacaatccttgcggctaccaacccgaaaggccaatacgacccacaggagtccgtgtccgttaacatagcgcttgggtcccctttactaagcagatttgacttaatcttagtgctcctggacaccaaaaacgaagattgggatagaattatatccagttttattctcgagaataagggctacccatccaagagtgagaagttatggtctatggaaaagatgaagacctacttctgtctgatacgaaacctgcagcccaccctatctgatgtgggcaatcaggtactcctacgctactaccagatgcagcgccaatctgattgccggaacgctgccagaacaactatcaggttgctcgagtctctgattaggctcgccgaggctcatgctagactgatgttcagggatacggtaacattggaagacgctattacggtcgtctcggttatggaatcctccatgcaaggcggagccctgcttggcggagtgaacgccctgcacacatcgtttccagagaacccgggagaacagtatcaacggcagtgtgagctcatcctggagaagttggagctgcagagcctgctgtctgaggaactgaggcgactcgaacgtcttcagaaccagtccgtccatcaaagccagcctcgagttctcgaagtggaaaccacccccggatctctgcgaaacggcccaggggaagagagtaacttcaggacaagttcgcagcaggaaattaactactctacccacatcttctcaccaggcggttcccctgaggggtcgcccgttctggatccccctccgcatctagagcctaataggtccaccagccgtaagcattctgcccagcacaagaataatagagacgatagtctcgactggttcgattttatggcaacccatcagtccgagccaaagaacacggtcgtcgtgtctccacacccaaagacatccggcgagaatatggcttccaagatcagtaattccacgagccagggaaaagaaaaatccgagccaggacagagatccaaggttgacatcgggctcctgccatctccaggagagacgggggtaccgtggcgggctgataatgtcgaatccaataaaaagaaacgccttgccctggactccgaggcggcagttagtgcagacaagcctgattcagtcctgacccatcatgttcctcgtaacctgcagaaactgtgcaaggagagagcacagaagctatgtcgaaattcaactcgagttccagctcagtgcacggtaccttctcatccacaaagcacgccagtgcatagccccgacaggatgctggatagccccaagcggaagcgtccaaaaagtctggcacaggtagaagaacctgcgatagaaaacgttaagccccctgggtcacccgtggccaaactggctaagttcaccttcaagcagaaatccaaactaatccactctttcgaggatcactctcacgtgtcccccggtgcgacaaaaatcgcagtccactctcctaaaatttcccagcgaagaacccgcagagatgccgctctgcctgtgaaaagaccagggaagctaacatccactcctggtaaccagatcagttcgcagccacagggagaaacaaaggaggtgtcccagcagcctccggagaagcacggaccaagggagaaggtgatgtgcgccccagagaaacgcatcatacagccggaactcgagctgggaaatgagacggggtgtgcccaccttacttgtgaaggtgataagaaggaagaggttagtggctctaataaatctggaaaggtgcacgcatgcaccctggcacggctggcaaatttttgcttcacacccccaagtgagtccaagtccaagtcaccccctccagagagaaagaacagaggtgaaaggggccctagttccccacccacaacaacggccccaatgagggtcagcaaacggaagtcatttcaactgagaggctcaactgaaaagcttatcgtgagcaaagagtccctgtttactttgcccgagcttggcgacgaagctttcgattgtgactgggatgaggagatgcggaagaaatcctag

SEQ ID NO: 194599 - protein, 681 aa, Artificial Sequence
  derived and/or modified sequence
MTASPDYLVVLFGITAGATGAKLGSDEKELILLFWKVVDLANKKVGQLHEVLVRPDQLELTEDCKEETKIDVESLSSASQLDQALRQFNQSVSNELNIGVGTSFCLCTDGQLHVRQILHPEASKKNVLLPECFYSFFDLRKEFKKCCPGSPDIDKLDVATMTEYLNFEKSSSVSRYGASQVEDMGNIILAMISEPYNHRFSDPERVNYKFESGTCSKMELIDDNTVVRARGLPWQSSDQDIARFFKGLNIAKGGAALCLNAQGRRNGEALVRFVSEEHRDLALQRHKHHMGTRYIEVYKATGEDFLKIAGGTSNEVAQFLSKENQVIVRMRGLPFTATAEEVVAFFGQHCPITGGKEGILFVTYPDGRPTGDAFVLFACEEYAQNALRKHKDLLGKRYIELFRSTAAEVQQVLNRFSSAPLIPLPTPPIIPVLPQQFVPPTNVRDCIRLRGLPYAATIEDILDFLGEFATDIRTHGVHMVLNHQGRPSGDAFIQMKSADRAFMAAQKCHKKNMKDRYVEVFQCSAEEMNFVLMGGTLNRNGLSPPPCKLPCLSPPSYTFPAPAAVIPTEAAIYQPSVILNPRALQPSTAYYPAGTQLFMNYTAYYPSPPGSPNSLGYFPTAANLSGVPPQPGTVVRMQGLAYNTGVKEILNFFQGYQYATEDGLIHTNDQARTLPKEWVCI

SEQ ID NO: 194600 - DNA, 2046 bp, Artificial Sequence
  derived and/or modified sequence
atgacagcctcccccgactatctggtggtcctatttggcattaccgcgggcgctaccggtgctaaacttggaagcgatgagaaggaacttattctgctcttttggaaggtagttgacttggctaacaaaaaggtagggcagctccacgaggtgcttgtacgccctgaccagctggaactcactgaggattgtaaagaggagactaagatcgacgtcgaaagcctgtcttctgcctctcagctcgaccaggcgttgcggcaatttaatcagagtgtgagcaatgagctaaatataggcgtgggcaccagcttttgtctgtgcacggacggccagctgcatgtgcgccagatcttgcaccctgaggcaagtaagaagaacgtcttgcttccagaatgcttctatagtttttttgacctgaggaaggagtttaagaaatgttgtccaggtagccccgacatcgataagttagacgtggccaccatgacggagtatctcaacttcgagaaatcgtccagtgtgtccaggtacggggcctcccaggtggaagacatggggaatatcattctggccatgatatctgagccttacaaccatagattctcagatcctgagagggtcaattacaaatttgagtccggtacctgtagcaagatggaattaatcgacgacaacacagttgttcgggcccgaggactcccttggcaaagcagcgatcaggatatcgcaagatttttcaagggcctgaatatagcgaaaggcggagctgcattatgtctgaacgcgcaagggcgacgtaatggtgaggcactggtgaggttcgtgtccgaggagcaccgggatctggctctgcagaggcacaagcatcacatgggtacccgctatatcgaagtgtacaaggctactggggaagactttctgaagatcgccggcggaaccagtaatgaggtggctcaattcctgtcaaaggagaatcaggtaatcgttcgtatgcgggggctgccctttactgctacagctgaagaggtggtggcctttttcggacagcactgcccgatcaccggtgggaaggaaggaatcctttttgtgacctatcctgatggcagacctacgggtgatgccttcgtgcttttcgcctgcgaggagtatgcacaaaacgcacttcggaaacataaagatcttcttggcaagcggtacatcgagctcttccgctcaactgctgccgaggtccagcaggtcctgaaccggttctctagcgcccctctgattcccctgcctactccaccaatcatccccgtgctaccccagcaatttgtcccccccaccaatgtgcgtgactgtatccgcctgaggggcctgccttacgccgctacaatcgaggacatcctggacttcttgggggaatttgcgaccgacattcgcacacacggggtgcatatggtactgaatcaccaggggaggccttcaggggacgcttttattcagatgaagagcgctgatcgggcctttatggcggcccagaaatgccacaaaaaaaatatgaaagatagatatgtggaggtgttccagtgttcggctgaagaaatgaacttcgtgctgatgggcggaactctaaaccgcaatgggctgtctcccccaccctgtaagctcccatgcctgtcaccacccagctacacctttccagcccccgctgccgtcattcctactgaggctgcgatatatcagccatcggtcatcctgaatccacgggccttgcagcccagtactgcgtactacccagccggaactcagctctttatgaattacacagcctactatccatccccacctggtagtccaaactctctgggatactttcccactgcagccaatctctcaggtgtgcctccacagccaggcactgttgttcgaatgcaagggctggcctataacaccggggtaaaagaaatcctgaactttttccaaggctaccagtacgccaccgaagacggccttatccataccaatgaccaggccaggactttgccaaaggagtgggtttgcatctag

SEQ ID NO: 194601 - DNA, 2046 bp, Artificial Sequence
  derived and/or modified sequence
atgacagccagcccagactacctggtggtgctgtttggcatcacagctggggccactggagccaagctgggcagtgatgagaaggagctgatcctgctcttctggaaggtggtggacctggccaacaagaaggtgggccagctgcacgaggtgctggtgcggccagaccagctggagctgacagaggactgcaaggaggagaccaagattgatgtggagagcctgagcagcgccagccagctggaccaggccctgcggcagttcaaccagagcgtgtccaatgagctgaacatcggcgtgggcaccagcttctgcctgtgcacagatggccagctgcacgtgcggcagatcctgcaccctgaggccagcaagaagaatgtgctgctgcctgagtgcttctacagcttctttgacctgaggaaggagttcaagaagtgctgccccggcagcccagacatcgacaagctggatgtggccaccatgacagagtacctgaactttgagaagagcagctctgtgagccgctacggggccagccaggtggaggacatgggcaacatcatcctggccatgatcagcgagccctacaaccaccgcttcagtgaccctgagcgggtgaactacaagtttgagagcggcacctgcagcaagatggagctgattgatgacaacacagtggtgcgggcccggggcctgccctggcagagcagtgaccaggacatcgcccgcttcttcaagggcctgaacatcgccaagggcggggccgccctgtgcctgaatgcccagggcagaagaaatggagaggccctggtgcgctttgtgtctgaggagcaccgggacctggccctgcagaggcacaagcaccacatgggcacccgctacatcgaggtgtacaaggccactggagaggacttcctgaagattgctgggggcaccagcaatgaggtggcccagttcctgagcaaagaaaaccaggtgattgtgaggatgaggggcctgcccttcaccgccacagctgaggaggtggtggccttcttcggccagcactgccccatcactggaggcaaggagggcatcctgtttgtgacctacccagatggccggcccactggagatgcctttgtgctgtttgcctgtgaggagtatgcccagaatgccctgaggaagcacaaggacctgctgggcaagcgctacatcgagctgttccgcagcacagctgctgaggtgcagcaggtgctgaaccgcttcagcagcgcccccctcatccccctgcccaccccacccatcatccctgtgctgccccagcagtttgtgccccccaccaacgtgcgggactgcatccggctgcggggcctgccctatgctgccaccatcgaggacatcctggacttcctgggggagtttgccacagacatccgcacccatggagtgcacatggtgctgaaccaccagggccggcccagcggagatgccttcatccagatgaagtctgctgaccgggccttcatggccgcccagaagtgccacaagaagaacatgaaggacagatatgtggaggtgttccagtgcagcgctgaggagatgaactttgtgctgatgggcggcaccctgaacagaaatggcctgagccccccaccctgcaagctgccctgcctgagcccccccagctacaccttccctgccccagctgctgtgatccccacagaggccgccatctaccagcccagcgtcatcctgaacccccgggccctgcagcccagcacagcctactacccagctggcacccagctgttcatgaactacacagcctactaccccagccccccaggcagccccaacagcctgggctacttccccacagctgccaacctgtctggagtgcccccccagcccggcaccgtggtgaggatgcagggcctggcctacaacacaggagtgaaggagatcctgaacttcttccagggctaccagtatgccacagaagatggcctcatccacaccaatgaccaggcccggaccctgcccaaggagtgggtgtgcatctag

SEQ ID NO: 194602 - DNA, 2046 bp, Artificial Sequence
  derived and/or modified sequence
atgaccgccagccccgactacctggtggtgctgttcggcatcaccgccggcgccactggggcaaaacttggatcagacgagaaagaacttattctgctgttttggaaagttgtggatctcgccaataagaaagtagggcaactgcatgaggtcctggtgagacctgatcagttggagctcacggaggactgtaaagaggaaaccaagatagacgtcgaaagcctctcctcggcaagtcagctggatcaggccctccggcagttcaatcagtccgtgtccaacgagctaaatataggcgtcggaacgagcttttgcttgtgtactgatggccagctgcacgtcaggcagatcctccacccagaggctagcaagaaaaacgtgttgctgcccgagtgcttctacagcttctttgacctgcgcaaggagtttaaaaagtgctgtccaggcagccccgatatagataagctggatgtagccaccatgacggaatatctgaactttgagaaaagttctagtgtaagcaggtatggagcatcccaagtcgaagacatgggcaacatcatattggccatgatcagcgaaccatacaaccacagattctcagatcctgagcgtgttaactacaaatttgaaagtggcacctgtagtaaaatggagctcatagatgacaataccgtagtgagagccagagggctgccctggcagtccagtgatcaggacattgctagattctttaaagggttaaatatcgccaagggcggggctgcactgtgtttaaacgcccaggggcggcgcaacggcgaggccctggtgcggtttgtcagcgaggagcatcgcgatctcgctctgcagcgacataagcaccacatgggcacccgttatattgaggtatataaggctactggtgaggacttcttgaaaattgcaggcggtaccagtaatgaagtggctcagttcctttccaaagagaaccaggtaattgtcagaatgcgcggactgccatttaccgccactgcagaggaagtggtggccttttttgggcaacattgtccaattactggcggcaaggaagggattctctttgtgacatatccggacggtcggccaacaggcgacgccttcgtcctgtttgcttgtgaagagtacgcgcaaaatgccctgcgaaagcacaaggacctgctgggcaaacggtatatcgaactctttcggtccaccgctgccgaagtgcagcaggtcttaaatcgcttctctagcgccccactcatacctctcccaaccccccctattattcccgtgttgccacagcaattcgtcccaccgactaatgttcgcgactgcattcgattacgaggactcccatatgcggctaccatagaggatattctcgacttcttaggcgaattcgctacagacattaggacacatggggtgcacatggtgttaaaccaccaaggtcggccatccggagacgccttcatccagatgaaatctgcagatcgagctttcatggctgcacagaagtgccataaaaaaaatatgaaggatagatacgtggaagtctttcagtgtagcgccgaggagatgaatttcgttttaatgggggggacactaaaccgaaatggtctaagcccaccgccatgcaagctgccgtgtctctctcctcctagctataccttccctgctccggccgcggtgatccctactgaagccgcgatctatcagccttccgttatcctgaatccccgagctctacagccgagcacggcatattacccagccgggacacagttattcatgaactacaccgcatactacccaagcccccctggtagtcctaatagcctgggatacttccccactgccgctaacctttccggcgtgccaccacaaccaggcaccgttgtgcgcatgcagggcctcgcctataatacaggtgtcaaggagattcttaatttttttcaggggtaccaatacgcaactgaggacggattaatccatacaaatgaccaagcacgtacgcttccaaaagagtgggtctgtatctag

SEQ ID NO: 194603 - DNA, 2046 bp, Artificial Sequence
  derived and/or modified sequence
atgacggcttcccccgactacctcgtcgtactctttggcataactgcaggagctacaggggctaaactggggagcgacgaaaaggaattgattctcctgttttggaaagtggtcgatctggccaacaaaaaagtggggcagcttcacgaagtgctcgtgcgcccagaccagttggagttaactgaagactgcaaagaggagactaagatagatgtggagtccttaagctctgcttcacaattagaccaggctctgcgccagttcaatcagtctgtgagtaacgagctaaatataggcgtcgggacaagtttttgtctgtgtaccgacgggcagctccatgtacgacagatcctgcatccagaggccagcaagaagaatgtgttgctacccgaatgtttttattcttttttcgacttacgcaaggagtttaagaagtgctgccccggatctccagacatcgacaaactggacgtggccactatgactgagtatctcaacttcgaaaaaagctctagcgtgtctcggtacggagcaagccaggtggaagacatgggtaacataatcttggccatgatttccgagccctataaccatcgcttttccgaccccgagcgggttaactacaaatttgagagtgggacctgttccaaaatggagctgatcgacgacaatacggtagtgcgcgcaaggggtttgccctggcagtcaagtgaccaggacatagccagatttttcaagggcttgaacattgccaagggcggagccgctctctgcctgaatgcacaggggagaagaaatggtgaggccctggttcggtttgtgagtgaggagcacagggaccttgcattgcagcggcacaaacaccacatgggaacacgctatatagaggtctacaaagcaaccggagaggatttcctcaagattgcaggaggcacctctaacgaggtagcacagtttctcagtaaagagaatcaggtcattgtccgaatgcgaggcttgcccttcacagccaccgcagaagaagttgtggccttctttgggcagcactgtcccattacaggtggaaaagaaggcatccttttcgtaacatatccagacgggcgacctaccggagatgcatttgtgctgtttgcttgcgaagaatacgcccagaatgcacttagaaagcacaaggacctgttgggcaaacgctacatagaacttttcaggtcaacggctgccgaagtgcagcaggtgttgaacagattctccagcgccccactgatacccctgcctactccaccaattattcccgtgctgcctcagcagttcgtcccaccaaccaacgtgcgcgattgcatccgcctccgcggactcccatacgccgctactatcgaagacatcttagatttcttgggagaatttgctactgatattcgtactcatggcgtccatatggtcctgaatcaccagggtcgcccttcaggagatgctttcatccagatgaaaagcgccgacagggcttttatggcagcacaaaagtgccataagaagaacatgaaagatcgttatgttgaagtctttcaatgctctgccgaagagatgaacttcgtcctcatgggcggtacactgaacaggaatggtctttccccacctccttgcaagctgccctgtttgtccccaccctcctatacattccctgctccggcagcagtgattcctaccgaggccgctatctatcagcctagcgttatcctcaacccacgagccttgcaaccctcgaccgcctactatcctgctggcactcagctgttcatgaactatacagcgtattaccccagccccccagggagcccaaactctctgggctactttcccaccgcggcaaacctttctggcgttcccccacagccaggcaccgttgtcagaatgcagggcctggcatataacactggggtcaaggagatccttaacttttttcaagggtaccagtatgccaccgaagatggattaattcataccaacgaccaggctaggacgctgcccaaagagtgggtctgcatctag

SEQ ID NO: 194604 - DNA, 2046 bp, Artificial Sequence
  derived and/or modified sequence
atgaccgccagccccgactacctggtggtgctgttcggcatcaccgccggcgccaccggcgccaagctgggcagcgacgagaaggagctgatcctgctgttctggaaggtggtggacctggccaacaagaaggtgggccagctgcacgaggtgctggtgagacccgaccagctggagctgaccgaggactgcaaggaggagaccaagatcgacgtggagagcctgagcagcgccagccagctggaccaggccctgagacagttcaaccagagcgtgagcaacgagctgaacatcggcgtgggcaccagcttctgcctgtgcaccgacggccagctgcacgtgagacagatcctgcaccccgaggccagcaagaagaacgtgctgctgcccgagtgcttctacagcttcttcgacctgagaaaggagttcaagaagtgctgccccggcagccccgacatcgacaagctggacgtggccaccatgaccgagtacctgaacttcgagaagagcagcagcgtgagcagatacggcgccagccaggtggaggacatgggcaacatcatcctggccatgatcagcgagccctacaaccacagattcagcgaccccgagagagtgaactacaagttcgagagcggcacctgcagcaagatggagctgatcgacgacaacaccgtggtgagagccagaggcctgccctggcagagcagcgaccaggacatcgccagattcttcaagggcctgaacatcgccaagggcggcgccgccctgtgcctgaacgcccagggcagaagaaacggcgaggccctggtgagattcgtgagcgaggagcacagagacctggccctgcagagacacaagcaccacatgggcaccagatacatcgaggtgtacaaggccaccggcgaggacttcctgaagatcgccggcggcaccagcaacgaggtggcccagttcctgagcaaggagaaccaggtgatcgtgagaatgagaggcctgcccttcaccgccaccgccgaggaggtggtggccttcttcggccagcactgccccatcaccggcggcaaggagggcatcctgttcgtgacctaccccgacggcagacccaccggcgacgccttcgtgctgttcgcctgcgaggagtacgcccagaacgccctgagaaagcacaaggacctgctgggcaagagatacatcgagctgttcagaagcaccgccgccgaggtgcagcaggtgctgaacagattcagcagcgcccccctgatccccctgcccaccccccccatcatccccgtgctgccccagcagttcgtgccccccaccaacgtgagagactgcatcagactgagaggcctgccctacgccgccaccatcgaggacatcctggacttcctgggcgagttcgccaccgacatcagaacccacggcgtgcacatggtgctgaaccaccagggcagacccagcggcgacgccttcatccagatgaagagcgccgacagagccttcatggccgcccagaagtgccacaagaagaacatgaaggacagatacgtggaggtgttccagtgcagcgccgaggagatgaacttcgtgctgatgggcggcaccctgaacagaaacggcctgagcccccccccctgcaagctgccctgcctgagcccccccagctacaccttccccgcccccgccgccgtgatccccaccgaggccgccatctaccagcccagcgtgatcctgaaccccagagccctgcagcccagcaccgcctactaccccgccggcacccagctgttcatgaactacaccgcctactaccccagcccccccggcagccccaacagcctgggctacttccccaccgccgccaacctgagcggcgtgcccccccagcccggcaccgtggtgagaatgcagggcctggcctacaacaccggcgtgaaggagatcctgaacttcttccagggctaccagtacgccaccgaggacggcctgatccacaccaacgaccaggccagaaccctgcccaaggagtgggtgtgcatctag

SEQ ID NO: 194605 - DNA, 3770 bp, Artificial Sequence
  derived and/or modified sequence
gcgtggagcaccgaccaggtgtgggcttgggtggttggttaccgccttttgcactagcagtagcaaggaaggggggtgggcgctctttctttttctcttagaagagggtttagcacaggttttttcgttctcacttccacaccaccttaccgcctcccgaccccccctctccccctccccacctatcgtcatgacggcctctccggattacttggtggtgctttttgggatcactgctggggccaccggggccaagctaggctcggatgagaaggagttgatcctgctgttctggaaagtcgtggatctggccaacaagaaggtgggacagttgcacgaagtgctagttagaccggatcagttggaactgacggaggactgcaaagaagaaactaaaatagacgtcgaaagcctgtcctcggcgtcgcagctggaccaagccctccgacagtttaaccagtcagtgagcaatgaactgaatattggagtagggacttccttctgtctctgtactgatgggcagcttcatgtcaggcaaatcctgcatcctgaggcttccaagaagaatgtactattacctgaatgcttctattccttttttgatcttcgaaaagaattcaagaaatgttgccctggttcacctgatattgacaaactggacgttgccacaatgacagagtatttaaattttgagaagagtagttcagtctctcgatatggagcctctcaagttgaagatatggggaatataattttagcaatgatttcagagccttataatcacaggttttcagatccagagagagtgaattacaagtttgaaagtggaacttgcagcaagatggaacttattgatgataacaccgtagtcagggcacgaggtttaccatggcagtcttcagatcaagatattgcaagattcttcaaaggactcaatattgccaagggaggtgcagcactttgtctgaatgctcagggtcgaaggaacggagaagctctggttaggtttgtaagtgaggagcaccgagacctagcactacagaggcacaaacatcacatggggacccggtatattgaggtttacaaagcaacaggtgaagatttccttaaaattgctggtggtacttccaatgaggtagcccagtttctctccaaggaaaatcaagtcattgtccgcatgcgggggctccctttcacggccacagctgaagaagtggtggccttctttggacagcattgccctattactgggggaaaggaaggcatcctctttgtcacctacccagatggtaggccaacaggggacgcttttgtcctctttgcctgtgaggaatatgcacagaatgcgttgaggaagcataaagacttgttgggtaaaagatacattgaactcttcaggagcacagcagctgaagttcagcaggtgctgaatcgattctcctcggcccctctcattccacttccaacccctcccattattccagtactacctcagcaatttgtgccccctacaaatgttagagactgtatacgccttcgaggtcttccctatgcagccacaattgaggacatcctggatttcctgggggagttcgccacagatattcgtactcatggggttcacatggttttgaatcaccagggccgcccatcaggagatgcctttatccagatgaagtctgcggacagagcatttatggctgcacagaagtgtcataaaaaaaacatgaaggacagatatgttgaagtctttcagtgttcagctgaggagatgaactttgtgttaatggggggcactttaaatcgaaatggcttatccccaccgccatgtaagttaccatgcctgtctcctccctcctacacatttccagctcctgctgcagttattcctacagaagctgccatttaccagccctctgtgattttgaatccacgagcactgcagccctccacagcgtactacccagcaggcactcagctcttcatgaattacacagcgtactatcccagccccccaggttcgcctaatagtcttggctacttccctacagctgctaatcttagcggtgtccctccacagcctggcacggtggtcagaatgcagggcctggcctacaatactggagttaaggaaattcttaacttcttccaaggttaccagtatgcaaccgaggatggacttatacacacaaatgaccaggccaggactctacccaaagaatgggtttgtatttaagggccccagcagttagaacatcctcagaaaagaagtgtttgaaagatgtatggtgatcttgaaacctccagacacaagaaaacttctagcaaattcaggggaagtttgtctacactcaggctgcagtattttcagcaaacttgattggacaaacgggcctgtgccttatcttttggtggagtgaaaaaatttgagctagtgaagccaaatcgtaacttacagcaagcagcatgcagcatacctggctctttgctgattgcaaataggcatttaaaatgtgaatttggaatcagatgtctccattacttccagttaaagtggcatcataggtgtttcctaagttttaagtcttggataaaaactccaccagtgtctaccatctccaccatgaactctgttaaggaagcttcatttttgtatattcccgctcttttctcttcatttccctgtcttctgcataatcatgccttcttgctaagtaattcaagcataagatcttggaataataaaatcacaatcttaggagaaagaataaaattgttattttcccagtctcttggccatgatgatatcttatgattaaaaacaaattaaattttaaaacacctgaagataaattagaagaaattgtgcaccctccacaaaacatacaaagtttaaaagtttggatctttttctcagcaggtatcagttgtaaataatgaattaggggccaaaatgcaaaacgaaaaatgaagcagctacatgtagttagtaatttctagtttgaactgtaattgaatattgtggcttcatatgtattattttatattgtacttttttcattattgatggtttggactttaataagagaaattccatagtttttaatatcccagaagtgagacaatttgaacagtgtattctagaaaacaatacactaactgaacagaagtgaatgcttatatatattatgatagccttaaacctttttcctctaatgccttaactgtcaaataattataaccttttaaagcataggactatagtcagcatgctagactgagaggtaaacactgatgcaattagaacaggtactgatgctgtcagtgtttaacactatgtttagctgtgtttatgctataaaagtgcaatattagacactagctagtactgctgcctcatgtaactccaaagaaaacaggatttcattaagtgcattgaatgtggatatttctctaagttactcatattgtcctttgcttgaatgcaatgccgtgcagatttatgaggctgctatttttattttctgtgcattactttaacaccttaaagggagaagcaaacatttccttcttcagctgactggcaatggccctttaactgcaataggaagaaaaaaaaaaaggtttgtgtgaaaattggtgataactggcacttaagatcgaaaagaaatttctgtatacttgatgccttaagatgcccaaagctgcccaaagctctgaaagactttaagataggcagtaatgcttactacaatactactgagtttttg

SEQ ID NO: 194606 - protein, 827 aa, Artificial Sequence
  derived and/or modified sequence
MRGCLRLALLCALPWLLLAASPGHPAKSPRQPPAPRRDPFDAARGADFDHVYSGVVNLSTENIYSFNYTSQPDQVTAVRVYVNSSSENLNYPVLVVVRQQKEVLSWQVPLLFQGLYQRSYNYQEVSRTLCPSEATNETGPLQQLIFVDVASMAPLGAQYKLLVTKLKHFQLRTNVAFHFTASPSQPQYFLYKFPKDVDSVIIKVVSEMAYPCSVVSVQNIMCPVYDLDHNVEFNGVYQSMTKKAAITLQKKDFPGEQFFVVFVIKPEDYACGGSFFIQEKENQTWNLQRKKNLEVTIVPSIKESVYVKSSLFSVFIFLSFYLGCLLVGFVHYLRFQRKSIDGSFGSNDGSGNMVASHPIAASTPEGSNYGTIDESSSSPGRQMSSSDGGPPGQSDTDSSVEESDFDTMPDIESDKNIIRTKMFLYLSDLSRKDRRIVSKKYKIYFWNIITIAVFYALPVIQLVITYQTVVNVTGNQDICYYNFLCAHPLGVLSAFNNILSNLGHVLLGFLFLLIVLRRDILHRRALEAKDIFAVEYGIPKHFGLFYAMGIALMMEGVLSACYHVCPNYSNFQFDTSFMYMIAGLCMLKLYQTRHPDINASAYSAYASFAVVIMVTVLGVVFGKNDVWFWVIFSAIHVLASLALSTQIYYMGRFKIDLGIFRRAAMVFYTDCIQQCSRPLYMDRMVLLVVGNLVNWSFALFGLIYRPRDFASYMLGIFICNLLLYLAFYIIMKLRSSEKVLPVPLFCIVATAVMWAAALYFFFQNLSSWEGTPAESREKNRECILLDFFDDHDIWHFLSATALFFSFLVLLTLDDDLDVVRRDQIPVF

SEQ ID NO: 194607 - DNA, 2484 bp, Artificial Sequence
  derived and/or modified sequence
atgagaggctgcctgagactggccctgctgtgcgccctgccctggctgctgctggccgccagccccggccaccccgccaagagccccagacagccccccgcccccagaagagaccccttcgacgccgccagaggcgccgacttcgaccacgtgtacagcggcgtggtgaacctgagcaccgagaacatctacagcttcaactacaccagccagcccgaccaggtgaccgccgtgagagtgtacgtgaacagcagcagcgagaacctgaactaccccgtgctggtggtggtgagacagcagaaggaggtgctgagctggcaggtgcccctgctgttccagggcctgtaccagagaagctacaactaccaggaggtgagcagaaccctgtgccccagcgaggccaccaacgagaccggccccctgcagcagctgatcttcgtggacgtggccagcatggcccccctgggcgcccagtacaagctgctggtgaccaagctgaagcacttccagctgagaaccaacgtggccttccacttcaccgccagccccagccagccccagtacttcctgtacaagttccccaaggacgtggacagcgtgatcatcaaggtggtgagcgagatggcctacccctgcagcgtggtgagcgtgcagaacatcatgtgccccgtgtacgacctggaccacaacgtggagttcaacggcgtgtaccagagcatgaccaagaaggccgccatcaccctgcagaagaaggacttccccggcgagcagttcttcgtggtgttcgtgatcaagcccgaggactacgcctgcggcggcagcttcttcatccaggagaaggagaaccagacctggaacctgcagagaaagaagaacctggaggtgaccatcgtgcccagcatcaaggagagcgtgtacgtgaagagcagcctgttcagcgtgttcatcttcctgagcttctacctgggctgcctgctggtgggcttcgtgcactacctgagattccagagaaagagcatcgacggcagcttcggcagcaacgacggcagcggcaacatggtggccagccaccccatcgccgccagcacccccgagggcagcaactacggcaccatcgacgagagcagcagcagccccggcagacagatgagcagcagcgacggcggcccccccggccagagcgacaccgacagcagcgtggaggagagcgacttcgacaccatgcccgacatcgagagcgacaagaacatcatcagaaccaagatgttcctgtacctgagcgacctgagcagaaaggacagaagaatcgtgagcaagaagtacaagatctacttctggaacatcatcaccatcgccgtgttctacgccctgcccgtgatccagctggtgatcacctaccagaccgtggtgaacgtgaccggcaaccaggacatctgctactacaacttcctgtgcgcccaccccctgggcgtgctgagcgccttcaacaacatcctgagcaacctgggccacgtgctgctgggcttcctgttcctgctgatcgtgctgagaagagacatcctgcacagaagagccctggaggccaaggacatcttcgccgtggagtacggcatccccaagcacttcggcctgttctacgccatgggcatcgccctgatgatggagggcgtgctgagcgcctgctaccacgtgtgccccaactacagcaacttccagttcgacaccagcttcatgtacatgatcgccggcctgtgcatgctgaagctgtaccagaccagacaccccgacatcaacgccagcgcctacagcgcctacgccagcttcgccgtggtgatcatggtgaccgtgctgggcgtggtgttcggcaagaacgacgtgtggttctgggtgatcttcagcgccatccacgtgctggccagcctggccctgagcacccagatctactacatgggcagattcaagatcgacctgggcatcttcagaagagccgccatggtgttctacaccgactgcatccagcagtgcagcagacccctgtacatggacagaatggtgctgctggtggtgggcaacctggtgaactggagcttcgccctgttcggcctgatctacagacccagagacttcgccagctacatgctgggcatcttcatctgcaacctgctgctgtacctggccttctacatcatcatgaagctgagaagcagcgagaaggtgctgcccgtgcccctgttctgcatcgtggccaccgccgtgatgtgggccgccgccctgtacttcttcttccagaacctgagcagctgggagggcacccccgccgagagcagagagaagaacagagagtgcatcctgctggacttcttcgacgaccacgacatctggcacttcctgagcgccaccgccctgttcttcagcttcctggtgctgctgaccctggacgacgacctggacgtggtgagaagagaccagatccccgtgttctag

SEQ ID NO: 194608 - DNA, 2484 bp, Artificial Sequence
  derived and/or modified sequence
atgcgaggttgtttgagattggcattactgtgcgctctgccctggctgctcctggccgctagcccggggcacccagctaaaagcccacgacagcccccagcccctagacgggatccatttgatgcagcgaggggagccgacttcgaccacgtttactccggcgttgtcaacctgtctactgaaaacatctactcattcaactacacttcgcagccagatcaggtgaccgcagtcagggtttacgtaaactcttccagcgaaaatctcaactatcccgtcctcgtggtagtgagacagcagaaggaggttctgtcatggcaagtgcctcttctgtttcaggggctttaccagcgttcgtacaattatcaggaagtgagcagaacattatgcccaagcgaggcgaccaacgagacaggtccactccaacagttaatattcgtggacgtagcctccatggcacctttaggcgcccagtacaagctgcttgtgactaaattaaaacacttccagttgcggaccaacgtggcattccacttcactgctagtccatcgcagccccagtattttctgtataaattccctaaagacgtggattctgtgattatcaaagtcgtcagtgagatggcttatccttgctcggtagtgtcagtccagaatatcatgtgtcctgtgtacgaccttgatcacaacgttgagttcaacggtgtgtaccagagtatgactaagaaagcggcaatcaccctccagaaaaaagattttcctggtgagcagttcttcgtggtatttgtgattaagcctgaggactatgcttgcgggggctcgttcttcatccaggaaaaagaaaatcagacttggaaccttcagcgcaaaaaaaacctggaggtgacaatcgtcccttctatcaaggagtctgtctatgtcaagtccagcctgttctctgtgttcatttttcttagcttttacctgggctgtttactcgtgggttttgtccactatctgaggtttcagaggaagagtatcgacggttcttttggaagcaacgacgggagtgggaatatggtcgcctctcaccccatcgctgctagtacgcccgagggatccaattacggaacaattgacgagagttcctcatcccctggacgtcaaatgtcctcctctgacggagggccgcctggccagagcgacaccgattccagcgtcgaggagtcagatttcgacactatgccagacatagaaagtgacaagaatataataaggacgaagatgtttctctacctgtccgacctgtcccgaaaagaccgcaggatcgtgtccaaaaaatataagatatacttctggaacattataacaatcgcggtgttttacgctcttccagtgattcagcttgtcattacatatcagaccgtggtgaatgtgactgggaatcaagacatctgctactacaacttcttgtgcgcacatcccctgggcgtgctctcagcttttaataacatcctctccaatctgggccacgttctgcttggattcttatttcttcttattgttctccgcagagacattctacacaggcgtgccctggaggccaaagatattttcgctgtggagtacgggatccccaagcacttcggcctattctacgcaatggggattgctctcatgatggaaggagtgttgtcagcttgttaccatgtttgtccaaactactcaaactttcagtttgatacatcatttatgtatatgattgctgggctgtgtatgttgaaactctatcagacacgacaccccgacatcaatgcaagcgcctatagcgcttacgcttccttcgccgtggtgatcatggtcactgtgcttggcgtggtcttcggcaaaaacgatgtgtggttttgggttattttctcagcaatccatgtgctggcctccttggcgctgagcactcagatatattatatgggcaggttcaaaatcgatcttggcatctttcgtcgagccgctatggtgttttataccgattgtattcaacagtgctcccgacccttatacatggacaggatggtactgctggtggtcgggaatctggtcaactggtcttttgctctgttcggcttaatataccgtccccgggatttcgcgagttatatgcttggcattttcatttgtaatctattgctctatctggccttttatattattatgaaattgcgctcatcagagaaagtgctgccagtgccacttttctgtatagtagcgacagccgtgatgtgggccgcagccctgtactttttttttcagaacctatcaagctgggaggggacgcctgcggaatccagagagaaaaacagagaatgtattctccttgattttttcgatgaccacgatatctggcactttctatccgccaccgccttattctttagctttctggtactgctgacactggatgacgacttggacgtcgtcagacgagaccagatccctgtgttttag

SEQ ID NO: 194609 - DNA, 2484 bp, Artificial Sequence
  derived and/or modified sequence
atgaggggctgcctgcggctggccctgctgtgtgccctgccctggctgctgctggccgccagccctggccacccagccaagagcccccggcagcccccagccccccggcgggacccctttgatgctgcccggggagctgactttgaccacgtgtacagcggcgtggtgaacctgagcacagagaacatctacagcttcaactacaccagccagcctgaccaggtgacagctgtgcgggtgtatgtgaacagcagcagcgagaacctgaactaccctgtgctggtggtggtgcggcagcagaaggaggtgctgtcctggcaggtgcccctgctcttccagggcctgtaccagaggagctacaactaccaggaggtgtccaggaccctgtgccccagcgaggccaccaatgagaccggccccctgcagcagctgatctttgtggatgtggcctccatggcccccctgggcgcccagtacaagctgctggtgaccaagctgaagcacttccagctgcggaccaacgtggccttccacttcaccgccagccccagccagccccagtacttcctgtacaagttccccaaggatgtggacagcgtcatcatcaaggtggtgtctgagatggcctacccctgcagcgtggtgtctgtgcagaacatcatgtgccctgtgtatgacctggaccacaacgtggagttcaacggggtgtaccagagcatgaccaagaaggccgccatcaccctgcagaagaaggacttccctggagagcagttctttgtggtgtttgtgatcaagccagaagattatgcctgtggcggcagcttcttcatccaggagaaggagaaccagacctggaacctgcagaggaagaagaacctggaggtgaccatcgtgcccagcatcaaggagagcgtgtatgtgaagagcagcctcttctctgtgttcatcttcctgtccttctacctgggctgcctgctggtgggctttgtgcactacctgcgcttccagaggaagagcattgatggcagctttggcagcaatgatggcagcggcaacatggtggccagccaccccatcgccgccagcaccccagagggcagcaactacggcaccattgatgagagcagcagcagccctggccggcagatgagcagcagtgatggcggccccccaggccagagcgacacagacagctctgtggaggagagtgactttgacaccatgccagacattgaaagtgacaagaacatcatccgcaccaagatgttcctgtacctgagtgacctgagcaggaaggaccggcgcatcgtgtccaagaagtacaagatctacttctggaacatcatcaccatcgctgtgttctacgccctgcccgtcatccagctggtgatcacctaccagacagtggtgaatgtgactggaaaccaggacatctgctactacaacttcctgtgtgcccaccccctgggcgtgctgagcgccttcaacaacatcctgagcaacctgggccacgtgctgctgggcttcctgttcctgctgattgtgctgcggcgggacatcctgcacagaagagccctggaggccaaggacatctttgctgtggagtatggcatccccaagcacttcggcctcttctacgccatgggcatcgccctgatgatggagggcgtgctgagcgcctgctaccacgtgtgccccaactacagcaacttccagtttgacaccagcttcatgtacatgattgctggcctgtgcatgctgaagctgtaccagaccaggcacccagacatcaatgccagcgcctacagcgcctatgccagctttgctgtggtgatcatggtgacagtgctgggcgtggtgtttgggaagaatgatgtgtggttctgggtgatcttcagcgccatccacgtgctggccagcctggccctgagcacccagatctactacatgggccgcttcaagattgacctgggcatcttcagaagagctgccatggtgttctacacagactgcatccagcagtgcagccggcccctgtacatggacaggatggtgctgctggtggtgggcaacctggtgaactggagctttgccctgtttggcctcatctaccggccccgggactttgccagctacatgctgggcatcttcatctgcaacctgctgctgtacctggccttctacatcatcatgaagctgcggagcagcgagaaggtgctgcctgtgcccctcttctgcatcgtggccacagctgtgatgtgggccgccgccctgtacttcttcttccagaacctgagctcctgggagggcaccccagctgagagccgggagaagaaccgggagtgcatcctgctggacttctttgatgaccatgacatctggcacttcctgagcgccacagccctcttcttctccttcctggtgctgctgaccctggatgatgacctggatgtggtgcggcgggaccagatccctgtgttctag

SEQ ID NO: 194610 - DNA, 2484 bp, Artificial Sequence
  derived and/or modified sequence
atgcggggctgcctgcggctggccctgctgtgcgccctgccctggctcctactggcagcaagcccaggccaccctgccaagagccccagacagcctcccgccccacggcgcgacccattcgatgccgcccggggcgctgacttcgaccacgtatacagcggagtggtaaacttgagcacagaaaacatctattcatttaattacactagtcagcccgatcaggtcactgccgtacgcgtgtacgtcaattcctcatctgaaaacctcaactatcctgtgctggtcgtagtgcgtcagcaaaaggaggtcctgtcttggcaggtacctctactctttcagggattatatcagcgttcatataactaccaggaagtgtctcgaactctgtgcccctccgaggcaaccaatgagacaggacctctccagcaattgattttcgtggatgtagcatccatggcgccgctgggggcccagtacaagctcctcgtgactaaactgaaacacttccagctgcggaccaatgtcgcgtttcactttaccgcatcaccaagtcagcctcaatactttttatataagtttcccaaggatgtcgactccgtgatcattaaagtggtgtccgagatggcttacccatgcagtgtggtatcagtacagaatattatgtgtcccgtctatgacttggaccataatgtggagtttaatggcgtataccaatccatgaccaagaaggccgctatcacattacagaaaaaagacttcccaggcgagcaattttttgtggtgtttgttatcaagcctgaagattacgcttgtgggggcagttttttcatccaggagaaggagaatcaaacctggaatttgcagcggaaaaaaaatctggaggtcacgattgtcccgagcatcaaagagtcggtgtacgtcaagagcagcctcttctccgtgtttatctttctctccttttacttgggatgcctgctggtcggcttcgttcactatctgagattccagagaaagtccattgatggctcttttggcagtaacgatggtagcggcaatatggtagcctctcacccaatcgccgcctccaccccagaaggatcgaactacggtaccatcgacgagagttcatcgtcacctgggcggcaaatgagtagctcagacggagggccccccggccaatcagatacagactcttcagtggaagagagcgatttcgataccatgcccgatatcgaaagtgataagaatattattcgcactaaaatgtttctgtacctttctgacctgtctaggaaggaccgtagaattgtttctaagaagtataagatatatttttggaacatcattactatagccgtcttctatgctctgcccgtgatccagttggtcatcacctaccagactgttgtcaacgtgaccggtaatcaggacatctgttactataactttctctgtgcccatcccctgggcgtgctctccgcattcaataacattctgtcaaatcttggacacgttcttctggggtttctgttcctcctgatcgttctcagacgagatatcttgcacaggagggccctggaagcgaaggatattttcgcagtggagtacggtatccccaaacacttcggcctcttctacgcaatggggatagcactaatgatggagggagtgctaagcgcatgttaccatgtctgtcccaattatagcaactttcaattcgatacttctttcatgtatatgatagccggcctgtgcatgctgaaactgtatcaaactagacatccagacattaacgcttcagcctactctgcctacgccagcttcgcagtggtaatcatggtgactgtcctgggagtcgtcttcggcaaaaacgacgtgtggttctgggtgattttttcggctattcatgtgctggcgtcccttgcattaagtacccagatctactacatgggaaggttcaagattgaccttggaatttttcggcgagcggcaatggtgttctatactgactgcatccagcagtgtagccggcccctgtacatggatcggatggtcctcttggtggttggcaacctcgtcaattggtccttcgccctcttcggtttaatttataggccccgggattttgcctcctacatgctggggatctttatctgcaacttactgctttacctcgccttctacattattatgaagctccgatcctccgagaaagttttgccagtgcccttattttgcatcgttgccacagcagtaatgtgggccgctgcactttattttttcttccaaaatctcagctcctgggaagggactccagccgagtccagggagaaaaaccgcgaatgcatcctgctcgactttttcgacgatcacgacatatggcactttctttctgctacagccctgttctttagctttcttgtcctgctgaccctggacgatgatctggatgtggtccggagggatcagattccagtattttag

SEQ ID NO: 194611 - DNA, 2484 bp, Artificial Sequence
  derived and/or modified sequence
atgcgcggatgcctgcgcctggcactgctgtgtgctcttccatggctcctgcttgcggctagccccggacaccccgcaaagtccccaagacagcctcccgcacctagacgcgatcccttcgatgcagcaaggggcgctgacttcgatcatgtttacagtggggtagtgaacctgtctaccgagaacatttactccttcaactacacttcacagcccgatcaggtcacagcagtgagagtgtacgtgaatagtagtagtgaaaatctgaattaccccgtgctggttgttgttcgccagcaaaaagaagtcctgagctggcaggttccgctcctcttccagggactttaccagcgaagttataactatcaagaggtgagccgcacattgtgtccctcagaggctaccaacgagaccggtccattgcagcaactaatcttcgtcgatgtggcttcaatggctccactgggtgcccaatacaagctcctggtaaccaaattgaagcatttccagctgcggactaacgtggcattccattttaccgcaagcccttcccagccacagtattttttatacaagtttccgaaagatgtggacagtgtcatcataaaagtagtatctgaaatggcctatccgtgcagtgtcgtgtctgtccaaaatatcatgtgcccagtttacgatttagaccacaacgtagagtttaatggggtctatcaatcaatgaccaaaaaagctgcaatcaccctgcaaaagaaagatttccccggagagcagttttttgtggttttcgtgatcaagccggaagattatgcttgcggtggcagctttttcatacaggaaaaagaaaaccaaacctggaaccttcagcgcaaaaaaaacctggaagtgacaatagtgccttccatcaaagagagcgtctacgtgaaatccagcctgtttagcgtcttcattttcctctcattctatctgggctgcttgttagtgggctttgtacattacctgaggttccagaggaaaagtatcgatggaagctttggttccaacgatggatccggtaacatggtcgcctcccatccgatcgcggcttcaacacctgaaggaagcaactacggaaccatcgatgagtcctctagctcaccaggacggcaaatgtcctccagtgatgggggaccacctgggcagagcgataccgactcttcagtagaagaatcagacttcgacaccatgccagatatagaaagcgataagaacatcattcgcacaaaaatgtttctatatctgagcgacctgtcccgcaaggaccggcgaatcgtgtccaagaaatacaagatctacttctggaatattatcacaattgcagtcttctatgcactgccggttatccagctggtcattacatatcaaacagtggttaacgtgacgggtaaccaagatatttgctactacaatttcctctgcgcccatccactgggcgtgctgagtgccttcaataacattttgagtaatttggggcatgtcctcctgggattcttatttctcctcatcgtgcttaggagagatatactccaccggagagctcttgaagctaaggatatctttgctgtagaatatgggatccctaagcacttcggcctgttctatgccatgggaatcgccctaatgatggagggcgttctgagtgcatgctaccacgtgtgccccaattacagcaactttcagttcgacacatcctttatgtacatgattgccggtctgtgcatgttgaagttgtatcagacaaggcaccccgacattaacgccagcgcttattcagcatacgcgtcgttcgccgtggtgatcatggtgacggtgctcggtgtggtctttgggaagaatgatgtttggttctgggtgatcttcagtgccatccacgtattggcttctcttgctttgagcacacagatctactacatgggaaggttcaagatcgatctgggcatcttcaggagagctgctatggttttctacacggattgtatccagcagtgctcgaggcctctctatatggatcggatggttttacttgttgtggggaacctcgtgaactggtcttttgctctgttcggactgatttatcggcctagggacttcgccagctacatgctcggcatcttcatttgcaatttactcctgtacctcgccttttacataatcatgaagctcaggtccagtgagaaagtcctacctgtgcctctcttctgtatagttgctacagccgttatgtgggccgcagctttatactttttttttcagaatctaagctcgtgggagggtaccccagctgagtccagggaaaagaatcgagagtgcattctcttggacttcttcgacgatcacgatatctggcactttctgtccgctaccgcgctctttttttccttcctcgtattactgactctggatgacgacttagatgtagtgcggcgtgaccagatccctgtgttctag

SEQ ID NO: 194612 - DNA, 5080 bp, Artificial Sequence
  derived and/or modified sequence
acatatttacatacatacacatatggtgagggagagaacgtgatgacgtgagactctccatggagagtaggaggtaataaagaaataaaacaggtgtctgaggagaggttctattagagaggggagaatagagagtaattatcgttcagacaggcaagagttctctgcaggtagcagcctgggaaagcgaactcgcgcaccctcttgggggacgggctcttttgctttctatttcttctcctgcagccagggtgcacacgtatttgaaacagaccgaatttcctcctcgatgtggcgtcaggttgacttttcgagactagcgggtatttctttttaatgactccaatgcctttttattattgctgttattgaggttgagggagaagagatcggtctaaattctggctgggtaagtggggggattctcggcgatgagaaacgggggacttagaagccggaggaaaatcagcagccccacatctccacttctccagtccgccctactctccacccgtgacctccagtggagaccccaggcggcagcatcagtatttgatcggcccttcgtcagcacgctgccagccctggccggctgggttcgccaggcatcacccgctcggctctgaagcggacgcctggccctgcaccgggctttggaaggaccctctctgcgctcgccccctccccagggtggctccgctttcgagcccgggcgcggtgcccaccatgcgcggctgcctgcggctcgcgctgctctgcgcgctgccctggctcctgctggcggcgtcgcccgggcacccggcgaaatcccccaggcagcccccggcaccgcgccgcgaccccttcgacgctgccaggggcgccgatttcgatcatgtctacagcggggtggtgaacctcagcaccgagaacatctactctttcaactacaccagccagcccgaccaggtgacagccgtgagggtgtatgtgaacagttcctctgagaatctcaactacccggtccttgttgtggttcgccagcagaaagaggtgctgtcctggcaggttcctctgctcttccaaggactataccagaggagctacaactatcaagaagtgagccgcaccttatgtccctcagaagcaaccaatgagacgggacccttgcagcaactgatatttgtagatgtcgcatccatggcacccctgggtgctcagtacaaactgctagttaccaagctgaagcacttccagctccggacaaatgttgcctttcactttactgccagcccctctcaacctcagtattttctatacaagtttcccaaagacgtggactcagttatcattaaagtggtgtctgaaatggcttatccatgttctgttgtctcagtccagaatatcatgtgcccggtgtatgatctcgaccacaatgtggaatttaatggtgtctatcagtccatgaccaagaaagctgccatcacgctacagaagaaggattttccaggcgagcagttcttcgtggtatttgtgataaagcctgaagattatgcctgtggaggatctttcttcatccaggaaaaggaaaaccagacctggaatctacagcgaaaaaagaaccttgaagtgaccattgtcccttccattaaagaatctgtttatgtgaaatccagtcttttcagtgtcttcatcttcctgtccttctacttgggatgccttcttgttgggtttgttcattatctgaggtttcagagaaaatccattgatggaagctttgggtccaatgatggctctggaaatatggtggcatctcatcccattgctgccagcacacccgaagggagcaattatgggacaatagatgagtcaagctccagtcctggaaggcagatgtcctcctccgatggtgggccaccgggccagtcagacacagacagctccgtggaggagagcgacttcgacaccatgccagacattgagagtgataaaaacatcatccggaccaagatgttcctttacctgtcagatttgtccaggaaggaccggagaattgtcagcaaaaaatataaaatttatttttggaacatcatcaccattgctgtgttttacgcgctgcccgtgatccagctggtcattacctatcagacagtggtaaatgtcactggcaaccaggacatctgttactacaacttcctctgtgctcaccccttgggcgtcctgagtgccttcaacaacattctcagcaatctgggccacgtgcttctgggcttcctcttcctgctgatagtcttgcgccgcgacatcctccatcggagagccctggaagccaaggacatctttgctgtggagtacgggattcccaaacactttggtctcttctacgctatgggcattgcattgatgatggaaggggtgctcagtgcttgctaccatgtctgccctaattattccaacttccaattcgacacctccttcatgtacatgatcgctggcctgtgcatgctgaagctctatcagacccgccacccagacatcaatgccagcgcctactctgcctatgcctcctttgctgtggtcatcatggtcaccgtccttggagtggtgtttggaaaaaatgacgtatggttctgggtcatcttctctgcaatccacgttctggcctcgctagccctcagcacccagatatattatatgggtcgtttcaagatagatttgggaattttccggcgggctgccatggtgttctacacagactgtatccagcagtgtagccgacctctatatatggatagaatggtgttgctggttgtggggaatctggttaactggtccttcgccctctttggattgatataccgccccagggactttgcttcctacatgctgggcatcttcatctgtaaccttttgctgtacctggccttttacatcatcatgaagctccgcagctctgaaaaggtcctcccagtcccgctcttctgcatcgtggccaccgctgtgatgtgggctgccgccctatattttttcttccagaatctcagcagctgggagggaactccggccgaatcccgggagaagaaccgcgagtgcattctgctggatttcttcgatgaccatgacatctggcacttcctctctgctactgctctgtttttctcattcttggttttgttaactttggatgatgaccttgatgtggttcggagagaccagatccctgtcttctgaacctccaacattaagagaggggagggagcgatcaatcttggtgctgtttcacaaaaattacagtgaccacagcaaagtaaccactgccagatgctccactcaccctctgtagagccaactctgcattcacacaggaaggagaggggctgcgggagatttaaacctgcaagaaaggaggcagaaggggagccatgttttgaggacagacgcaaacctgaggagctgagaaacacttgctccttccatctgcagctttgggagtgcaacagggataggcactgcatccaagtcaactcaccatcttggggtccctcccaccctcacggagacttgccagcaatggcagaatgctgctgcacacttccctccagttgtcaccctgcccagaaaggccagcagcttggacttcctgcccagaaactgtgttggcccccttcacacctctgcaacacctgctgctccagcaagaggatgtgattctttagaatatggcggggaggtgaccccaggccctgccctactgggatagatgttttaatggcaccagctagtcacctcccagaagaaactctgtatatttcccccaggtttctgatgccatcagaagggctcaggagtggggtttgtcacacattcctcttaacaagtaactgtcactgggaccgagtcctgggtgcttacatattccttcgtgtcttcatctcactgacctgtgtggacctcatcactctgactctgccttcttggaaaggccctgtcactccacagatgtctggccagcttcaaggcagaaggaaaaacaggaaaagctcttttaacagcagcaggaacaagagaaatgactaaccatactaaaagactggtaacagcagcagcagccagacaggcctcaccttaaggacttgggctgccagagcaaattcagcagagcttatttggcctcccattcacacagctcagttctgtgcccacatcacctttggggaagaaatcagcattctaatcagggacactacttcaggagtcctccacagcgagtccgtcatctgtcactttatgtagatcagggttctagacttcttccctgaggttctcagaagcagctctcaggatgaacgtattgtcctcttcccctcttcttgcaaagtgcacagctaatctaatgttgtctctcggttgcacctgacattctctccccagtaaggtgttggcaagctcagcatctgggttccactctcacactgtctggcagctctgtgtctgagaagttctacattgaccaggcccccttgttgcctggagtatgacgtaatcagaaaatagacgtataaatgtgcacatgcgtatgtatttgcttgtgaaattaaagtcacctcttgcctctgctttcctgatcattcgttagagaaatggatcaggcatttttttaaattattattctttctctaaactatttgcattgtgttcaaaaacccattttagaagtttgaacagcaagcttttcctgattttaaaaacacaaagttgctttcaatgaaatattttgtgatttttttaaagtccccaaatgtgtacttagccttctgttattccttattctttaagcagtgttggcttccattgaccatatgaaggccaccaattaaatggttgtgttaatccaacatgtaaaaaactttttggcagggcacagtggctcacgcctgtaatcccaacactttgggaggctgaggcaggaggatcacttgagcccaggagattgacgccgcagtgaactatgattgtgcccctgcactccagcctggatgacagagtgagaccccatctcttaaaaaataaaaaaaaataaaaatttgaacctgtttcacta

SEQ ID NO: 194613 - DNA, 660 bp, Artificial Sequence
  derived and/or modified sequence
atggagcccaaggaggctacaggcaaggagaacatggtcacaaagaagaagaatctggcttttctgcgatcccggttgtacatgttggagcgtcgcaagacagacactgttgttgagagctcagtgtcaggtgatcactccggtacattgagacggagccagtctgatcgcactgaatacaaccagaaattacaggaaaagatgaccccacaaggggagtgctccgtcgcagaaacactgactcctgaggaggaacaccatatgaaacgtatgatggccaagcgggagaaaatcattaaagaactgatccagactgagaaggattacctgaacgacctcgaactgtgcgtgagagaggttgtacagcctttaagaaacaaaaagaccgataggctagacgtggattcacttttctcaaatatcgagagcgtacaccagatctccgcaaagcttttgtctttgctagaggaggctaccactgacgtggagccagctatgcaggtgatcggggaagtgtttctgcagatcaaaggacccctggaggacatctacaagatatattgttatcatcacgatgaagcccactccatacttgagtcttatgaaaaagaagaagagcttaaggagcatctgtcacactgcatccagtcgctgaaatag

SEQ ID NO: 194614 - DNA, 660 bp, Artificial Sequence
  derived and/or modified sequence
atggagcccaaggaggccaccgggaaggagaacatggtgaccaagaagaagaacctggccttcctgcggagccggctgtacatgctggagaggaggaagacagacacagtggtggagagctctgtgtctggggaccacagcggcaccctgcggcgcagccagagcgacagaacagagtacaaccagaagctgcaggagaagatgaccccccagggagaatgttctgtggccgagaccctgaccccagaggaggagcaccacatgaagaggatgatggccaagcgggagaagatcatcaaggagctgatccagacagagaaggactacctgaatgacctggagctgtgtgtgcgggaggtggtgcagcccctgaggaacaagaagacagaccggctggatgtggacagcctcttcagcaacattgaatctgtgcaccagatcagcgccaagctgctgagcctgctggaggaggccaccacagatgtggagcccgccatgcaggtgattggagaggtgttcctgcagatcaagggccccctggaggacatctacaagatctactgctaccaccatgatgaggcccacagcatcctggagagctatgagaaggaggaggagctgaaggagcacctgagccactgcatccagagcctgaagtag

SEQ ID NO: 194615 - DNA, 660 bp, Artificial Sequence
  derived and/or modified sequence
atggagcccaaggaggccaccggcaaggagaacatggtgaccaagaaaaaaaatttggcattcctgagaagcaggctatatatgcttgaacgacgaaagacagataccgttgttgagagctcagtgagcggggatcactccggcacactccgccgaagccagtctgacaggacagagtataatcagaaactccaagagaaaatgactccacagggcgaatgtagcgtggctgagaccttgaccccagaagaggagcatcacatgaaaagaatgatggccaaacgagagaaaatcatcaaggagctgatccagacggagaaggactacctcaacgatctcgaattatgcgtacgcgaggtggtccagccactccggaacaagaagaccgataggttagacgtggatagcctcttctcaaatatcgagtccgttcaccagatcagcgccaagctgctatcactcctggaagaagccaccacagacgttgaacctgctatgcaggttattggagaggtgttcctgcagatcaaagggcccctggaagatatatacaaaatttattgttaccaccacgacgaggctcacagcatcctggagagttacgaaaaagaggaagagctgaaggagcacctcagccactgtatccaatctctgaagtag

SEQ ID NO: 194616 - DNA, 660 bp, Artificial Sequence
  derived and/or modified sequence
atggaacctaaggaagcaacaggcaaagagaatatggtgactaagaagaagaacctagccttcctgcgttcacgactgtatatgcttgaaaggcgcaaaaccgataccgtcgtagaatcatcagtctccggcgatcattccggcaccttgagaaggagtcagagtgatcgcacagagtataatcagaaactacaggaaaaaatgactccacagggagaatgcagtgtggcggagactttaactccggaggaggagcatcacatgaaacgcatgatggccaaacgcgaaaaaataattaaagaactgattcagaccgagaaagactatcttaacgatctggagctctgcgtaagggaggtggtgcaaccactgaggaacaaaaaaactgatcgtcttgacgttgattcattattcagtaatatcgagtcagtgcaccaaatctcagcaaagctgctgtcactgctggaagaagccactacagatgtggagcccgctatgcaggtgatcggtgaggtgttcctgcaaatcaagggtccgcttgaggatatttacaaaatctactgttatcatcacgatgaagctcattcaatccttgagtcttacgagaaagaagaggaactaaaagaacatctatcccactgtatccagagcttgaaatag

SEQ ID NO: 194617 - DNA, 1437 bp, Artificial Sequence
  derived and/or modified sequence
agtcacagccaggtaaccctggagtgaagcggtttagttagaagggagcagataaactcgtcactctagtagctttaaccctcaccctgaggcaccttagcaatcagccattgcctgcaagcctccaaagcttgtctttgcctaatatggagcccaaagaagccactgggaaagaaaacatggtcaccaagaaaaagaatctggccttcttgaggtctagactctatatgctggagagaaggaagactgacactgtggttgagagcagtgtttctggggaccactctggcaccttgaggaggagccaatctgacaggactgaatacaaccagaaattacaagaaaagatgactccacagggtgagtgttctgtagctgagaccttaaccccagaggaagagcatcatatgaagaggatgatggcaaagcgggaaaagatcattaaggagctgatacagacagaaaaggattatctcaatgatctagagctgtgtgttagggaagtggttcagcccctgagaaataaaaagactgataggctggatgtggatagcttgtttagcaacattgagtccgtgcatcagatatcagccaagctgctgtcattgttggaagaggccacaacagacgtggaaccggccatgcaagtaattggagaagtattcttgcagattaaagggccactggaagatatttataaaatctactgctatcaccatgatgaagcacatagtatactggagtcctatgaaaaggaagaagagctgaaggaacatttgagccactgtatccagtccttaaagtaaggccttttcaaatgatgattcccatctcctctcagttgcctagcagggaacattttaaatggatgtagatgaaaggtctcacataaatcctatgttttatgagacttgctgggagctctgctttgcattccctttataaaaagctgacatgccagaagccctgattgactttttttccccctgcgagaatgactaaaaataacatggaagaagatttagagctctgcagcgattgaaaaatgcaatatcaaaatataaaatgtggaagaaaagcctcttcttaaagctattgtaacttgcctggccccacgtagttcaaggattatgtgagataacacgtggccccatgaccactggagcacatgggttaatggagttaggggaatggcctacaactctgcatggccgtcttctttccccaaactcactgtggggagatgggtgaagacaagtcaggccttgttaaagttagtttcagaacaattactcatgccttcctttctcatccctaaaacattggtgggggagctacacaatgtactttttcttttctagaggaagtatctattcactgtgaaaatctgaaaaatataacaaagtatgtgtaagataaaaaccccttgctatttca

SEQ ID NO: 194618 - DNA, 660 bp, Artificial Sequence
  derived and/or modified sequence
atggagcccaaggaggccaccggcaaggagaacatggtgaccaagaagaagaacctggccttcctgagaagcagactgtacatgctggagagaagaaagaccgacaccgtggtggagagcagcgtgagcggcgaccacagcggcaccctgagaagaagccagagcgacagaaccgagtacaaccagaagctgcaggagaagatgaccccccagggcgagtgcagcgtggccgagaccctgacccccgaggaggagcaccacatgaagagaatgatggccaagagagagaagatcatcaaggagctgatccagaccgagaaggactacctgaacgacctggagctgtgcgtgagagaggtggtgcagcccctgagaaacaagaagaccgacagactggacgtggacagcctgttcagcaacatcgagagcgtgcaccagatcagcgccaagctgctgagcctgctggaggaggccaccaccgacgtggagcccgccatgcaggtgatcggcgaggtgttcctgcagatcaagggccccctggaggacatctacaagatctactgctaccaccacgacgaggcccacagcatcctggagagctacgagaaggaggaggagctgaaggagcacctgagccactgcatccagagcctgaagtag

SEQ ID NO: 194619 - protein, 330 aa, Artificial Sequence
  derived and/or modified sequence
MLSLKLPRLFSIDQIPQVFHEQGILFGYRHPQSSATACILSLFQMTNETLNIWTHLLPFWFFAWRFVTALYMTDIKNDSYSWPMLVYMCTSCVYPLVSSCAHTFSSMSKNARHICYFLDYGAVNLFSLGSAIAYSAYTFPDALMCTTFHDYYVALAVLNTILSTGLSCYSRFLEIQKPRLCKVIRVLAFAYPYTWDSLPIFYRLFLFPGESAQNEATSYHQKHMIMTLLASFLYSAHLPERLAPGRFDYIGHSHQLFHVCVILATHMQMEAILLDKTLRKEWLLATSKPFSFSQIAGAILLCIIFSLSNIIYFSAALYRIPKPELHKKET

SEQ ID NO: 194620 - DNA, 993 bp, Artificial Sequence
  derived and/or modified sequence
atgctgagcctgaagctgcccagactgttcagcatcgaccagatcccccaggtgttccacgagcagggcatcctgttcggctacagacacccccagagcagcgccaccgcctgcatcctgagcctgttccagatgaccaacgagaccctgaacatctggacccacctgctgcccttctggttcttcgcctggagattcgtgaccgccctgtacatgaccgacatcaagaacgacagctacagctggcccatgctggtgtacatgtgcaccagctgcgtgtaccccctggtgagcagctgcgcccacaccttcagcagcatgagcaagaacgccagacacatctgctacttcctggactacggcgccgtgaacctgttcagcctgggcagcgccatcgcctacagcgcctacaccttccccgacgccctgatgtgcaccaccttccacgactactacgtggccctggccgtgctgaacaccatcctgagcaccggcctgagctgctacagcagattcctggagatccagaagcccagactgtgcaaggtgatcagagtgctggccttcgcctacccctacacctgggacagcctgcccatcttctacagactgttcctgttccccggcgagagcgcccagaacgaggccaccagctaccaccagaagcacatgatcatgaccctgctggccagcttcctgtacagcgcccacctgcccgagagactggcccccggcagattcgactacatcggccacagccaccagctgttccacgtgtgcgtgatcctggccacccacatgcagatggaggccatcctgctggacaagaccctgagaaaggagtggctgctggccaccagcaagcccttcagcttcagccagatcgccggcgccatcctgctgtgcatcatcttcagcctgagcaacatcatctacttcagcgccgccctgtacagaatccccaagcccgagctgcacaagaaggagacctag

SEQ ID NO: 194621 - DNA, 993 bp, Artificial Sequence
  derived and/or modified sequence
atgctgtctcttaagttgccccggctgttcagcattgaccagatccctcaggtctttcacgaacagggcatcctattcggctataggcatccccaatcttccgctacggcttgcatactgtcactgtttcagatgaccaatgagacgcttaacatctggacacacctccttccgttttggttcttcgcttggcgcttcgttacggcattatacatgaccgacatcaagaacgactcatattcatggcccatgttggtatacatgtgtacgtcctgcgtctaccctctggtgtcatcctgcgctcacaccttttcctctatgtcaaagaatgctagacacatatgttatttccttgattatggagcggtgaatttatttagtttgggtagtgcgattgcctactcagcatataccttcccagatgccttgatgtgcacgacgtttcatgattattacgtcgcgctggcggtcttgaacaccattttatcaaccggtcttagttgttactcgaggttcctggaaatacaaaagcccaggctttgcaaggtcattcgcgtgctggcatttgcgtacccgtacacctgggatagccttccaatcttttataggttgttcctctttcccggggagtcggctcagaacgaggcaacctcctatcatcagaaacacatgattatgacactgctggcatcctttttatattccgctcacctgccagaaagactggcccccggcaggttcgattacattggacattcacaccagttatttcacgtgtgcgtaatactcgccacgcacatgcagatggaagcaattctgctcgacaagacactgaggaaagagtggctgctggccacctcaaaacctttcagcttttcccagatcgctggcgctattctcttgtgcatcatcttcagcctctccaatataatttacttctctgccgctctgtacagaattccaaagcccgagttgcataagaaagagacatag

SEQ ID NO: 194622 - DNA, 993 bp, Artificial Sequence
  derived and/or modified sequence
atgctttccctgaagcttccacgattgttttcaatcgatcagattcctcaggtgtttcatgagcagggaatcctatttggctatagacaccctcagtcatctgcaaccgcctgcatattgagtctgtttcagatgactaacgagactcttaacatctggacacacctgttgcccttctggttcttcgcttggagattcgtcacggccctgtacatgacggatattaagaacgactcgtactcttggcctatgcttgtctacatgtgcacctcttgcgtgtatcccctggtgagttcatgtgcccatacattttcatctatgagcaagaatgctcggcacatttgttatttcttagactatggcgccgttaatctgttttctctaggctctgccatcgcatatagtgcatatacatttcccgatgctctcatgtgcacaaccttccacgactattacgtcgcactcgccgtcctgaacaccatcttatccaccggactgtcatgctattcacggttcctagagattcagaaacctagactctgcaaggtgatcagagtacttgcgtttgcttacccgtacacgtgggactccttgcctatcttttaccgcctgttcctgtttccaggagagagtgcacagaacgaggctacctcctaccaccagaagcatatgatcatgacgctgttggccagtttcctctattccgcccacctaccagaaagattggcgccgggccgatttgattatatcggacactcacatcaactcttccacgtgtgcgtcatcttagccacacacatgcagatggaggccatcctgcttgataaaactctgcgtaaggaatggttgctggccacatctaaacccttttctttttcacagatagcaggcgctattctcctgtgcataatctttagcctgtccaacatcatctactttagcgcggccttgtataggatacctaaaccggagttgcacaaaaaagaaacctag

SEQ ID NO: 194623 - DNA, 993 bp, Artificial Sequence
  derived and/or modified sequence
atgctgtccttaaagctgcctcggctattttctattgatcagatcccccaggtgttccacgagcaaggaattctgtttggataccggcatccccagtctagtgcaacagcctgtattctgtcactgtttcagatgacaaatgagacgctgaatatttggacccatctgttgcctttctggttttttgcctggaggttcgtcacagccctgtacatgaccgacattaaaaatgatagctacagttggcctatgctggtctacatgtgtactagctgcgtctacccgctagtgtcctcctgtgcgcacacgtttagtagtatgagcaagaatgccaggcacatttgctacttcctcgattacggagccgtaaaccttttttctctgggatccgcaatcgcctacagcgcctataccttcccagatgctctgatgtgtacaacgtttcatgattactatgtggccttggccgtgctcaataccatcctatccacgggcctttcctgttacagccgtttcctcgagatacagaaaccgagactgtgtaaggtcataagagtgctggcttttgcttatccatatacatgggactccctccctattttctacagactctttctcttcccaggggagtcagcccaaaacgaggccaccagttaccatcagaaacacatgatcatgacgcttttggcatcctttttatatagcgcgcatctgccagagagactggcacccggcagattcgactacataggccacagccatcagctcttccatgtatgcgtaattcttgctactcatatgcagatggaggctatcttgctcgataagacactgcgcaaggagtggctccttgcgacatctaagccattctccttttcacagatcgctggggcaattctcctttgcattatttttagcctgagcaatattatttacttctcagctgcactctatcggatcccaaagcccgaattacataagaaggagacttag

SEQ ID NO: 194624 - DNA, 993 bp, Artificial Sequence
  derived and/or modified sequence
atgctgagcctgaagctgcccaggctcttcagcattgaccagatcccccaggtgttccacgagcagggcatcctgtttggctaccgccacccccagagcagcgccacagcctgcatcctgagcctcttccagatgaccaatgagaccctgaacatctggacccacctgctgcccttctggttctttgcctggaggtttgtgacagccctgtacatgacagacatcaagaatgacagctacagctggcccatgctggtgtacatgtgcaccagctgtgtgtaccccctggtgagcagctgtgcccacaccttcagctccatgagcaagaatgcccggcacatctgctacttcctggactatggagctgtgaacctcttcagcctgggcagcgccatcgcctacagcgcctacaccttcccagatgccctgatgtgcaccaccttccatgactactacgtggccctggccgtgctgaacaccatcctgagcacaggcctgagctgctacagccgcttcctggagatccagaagccccggctgtgcaaggtgatccgggtgctggcctttgcctacccctacacctgggacagcctgcccatcttctaccgcctcttcctgtttcctggagagagcgcccagaatgaggccaccagctaccaccagaagcacatgatcatgaccctgctggccagcttcctgtacagcgcccacctgcctgagcggctggcccctggccgctttgactacatcggccacagccaccagctgttccacgtgtgtgtgatcctggccacccacatgcagatggaggccatcctgctggacaagaccctgaggaaggagtggctgctggccaccagcaagcccttctccttcagccagattgctggggccatcctgctgtgcatcatcttcagcctgagcaacatcatctacttctctgctgccctgtaccgcatccccaagccagagctgcacaagaaggagacctag

SEQ ID NO: 194625 - DNA, 993 bp, Artificial Sequence
  derived and/or modified sequence
atgctgagcctgaagctgccccggctgttcagcatcgaccagatcccacaggtctttcatgaacaggggatcctgtttggctataggcacccacaatcctccgccactgcctgcattctgtctctgtttcagatgaccaacgagacactgaatatctggacccatctcctcccgttttggttcttcgcatggcggttcgtgacagcactctacatgacagatattaagaacgatagctactcctggcctatgctggtgtacatgtgcacttcatgcgtctatcccctggtgtcgtcctgcgcccacacattctctagcatgtctaagaacgcccgccacatctgttactttctagattatggtgcggtgaaccttttctctcttggcagtgcaattgcatactccgcttacacttttccggacgctctcatgtgcactacgtttcatgattactacgtggccctggccgtgttgaacacaatcctgagcactggcttgtcctgttacagccggttcttagagatccaaaagcctcgcttgtgtaaggtgatcagagtcctcgccttcgcatatccctatacgtgggattcactccccattttctatcgacttttcctttttcccggcgagtctgctcagaacgaagcaacatcataccatcagaaacatatgatcatgacccttctcgcatcattcttatactcagcgcatctgcctgaacgcttggctccagggcgtttcgactatattggacactcccatcaattgttccatgtgtgtgtcattctcgccacccacatgcagatggaggcaatcttgctagataagacactgaggaaggaatggctgctggctacgtcaaagcccttcagtttttctcagatcgctggagctatcctcctgtgcatcatcttcagcttaagtaacattatttatttctcggcagccctgtacaggattcccaagcctgaactgcataaaaaggaaacttag

SEQ ID NO: 194626 - DNA, 993 bp, Artificial Sequence
  derived and/or modified sequence
atgctgagcctgaagctgccccggctgttcagcatcgaccagatcccacaggtgtttcacgaacagggaatcctcttcggttacagacatccgcaatcatctgccactgcctgtattttatcgctcttccagatgacaaacgagacgctgaacatctggacccacctattgcccttctggttcttcgcatggcgattcgtcactgctctgtacatgaccgatatcaagaacgactcttactcgtggccgatgctggtatacatgtgtacgtcctgtgtgtaccctctggtttcctcctgcgcacacacatttagtagcatgagcaaaaacgcgagacatatttgttatttcctagattacggggccgtgaacctgttcagtctgggcagcgccatcgcctacagcgcgtacacattccccgatgccctcatgtgtaccactttccatgactattatgtcgctctggctgtgcttaacacgattctctcaactgggctgtcatgctacagccggttcctggagatacagaagccccgactgtgcaaagtgatcagggtactggcatttgcctacccctatacatgggatagtctccccatcttctatcgcttgttcctcttccctggagagagcgcccagaatgaagccacaagctaccatcaaaaacatatgatcatgacactcctggccagcttcttgtactcggcccaccttcccgagagactggcacccggcagatttgattacatcgggcattctcatcagctgttccacgtgtgtgtgatccttgcgactcacatgcagatggaggcaattttacttgataagaccttgaggaaagaatggctcctggcaacctcaaagcccttcagcttcagccagattgcaggcgccatactgctgtgtatcatatttagtcttagtaatatcatctacttctcagccgccctgtatagaatcccgaaaccagaactgcacaaaaaagaaacatag

SEQ ID NO: 194627 - DNA, 993 bp, Artificial Sequence
  derived and/or modified sequence
atgctgagcctgaagctgccccggctgttcagcatcgaccagatcccacaggtgttccatgagcagggtattctattcggctataggcatccacagagcagtgccactgcctgcatcttgtccctgttccagatgacaaatgaaaccctgaacatctggactcacctgctgcccttttggttctttgcctggcgtttcgtcactgcactgtacatgaccgacattaagaatgatagctacagctggccaatgctcgtctatatgtgtacctcttgtgtctatcctcttgtgtccagctgtgcccacaccttttccagcatgtccaagaatgcccgacacatttgttatttcttggactacggagccgtaaacctgttttcactaggcagcgctattgcctactcagcatacacctttcctgacgcactgatgtgtaccacattccacgactattacgtggccctcgctgttctcaacaccatactttcgacaggcttgtcctgctactcccgctttctggagattcaaaagccccggctgtgtaaagtcatccgggtcctcgccttcgcgtacccgtacacttgggattcactgcctatcttttaccgcctgttcctgttccctggcgagagtgcccagaacgaagctacatcttaccatcagaaacacatgatcatgacgttgttagcgtctttcctgtatagcgcccacctgccggaaagacttgcccccggtcgattcgactacatcggccactcccatcagttatttcatgtgtgtgttatcctggccactcatatgcagatggaggccattctgcttgacaagaccctgaggaaggaatggctcctggctaccagtaaaccgttcagtttctcgcaaatagcaggcgccatccttctctgcattatcttcagcctgtctaacattatttacttttctgcagcactgtatagaatcccaaaacccgaactgcataagaaggaaacttag

SEQ ID NO: 194628 - DNA, 5480 bp, Artificial Sequence
  derived and/or modified sequence
agcttaacaagaccatggcctctggacccgcgatcagctcgctgtgtggtcctgagcagccacccaacatctctgggccttggattcctacctggcctttcttctggatgcatcatttttgcctttaggtatctggaccattcccccccatggatgataaagtctttgcttcacaccctcaggattaccttaaaggcctgaaaagaacagaggaggagtctgaggaggtgaattccagccgtgctcttgcaggctggctgggcagtgtgctggggaggagagggagcctctggctgggcctcctccaccgggcctggtgtgctgggaacaccccgcattgtcccaaggcctcagatttgactttcaaagggaaaacagctctcctgataaaggacaccattggagaaactgggcattttaccaaggatttgactggaatggcatgcttcctttaaagatgaaagttgacttttagagccaattaaagccctttggggaatctggcctcataccttgtccacacagagttcctgtacaaggttcctgacctgtgggaagcggcacagcaccagctaggcagagacgccccaggccatgttagagctttgagtgaggcctggtaacagggaggcgctgtcacctactggccttgccaatccagctccaagatgctgagcctgaagctccccaggctgtttagcatagaccagataccccaggtgttccatgagcaaggcatcctgttcggctaccgccatccacagagttctgccactgcctgcatcctcagccttttccaaatgaccaatgagactctcaacatttggactcacttgctgcccttctggttctttgcatggaggtttgtgactgcactgtatatgacagacatcaagaatgacagctactcctggcccatgcttgtgtacatgtgcaccagctgcgtgtacccacttgtgtccagctgtgcgcacaccttcagctctatgtccaagaatgcccggcacatttgctacttcctggactatggtgccgtcaacctcttcagcctgggctcagccattgcctactctgcatacacgttcccggatgcgctcatgtgcaccactttccatgactactacgtggccctggctgtactgaacaccatcctcagcacaggcctctcctgctactccaggtttcttgaaatccagaagcccagactctgtaaggtgattcgtgtcctcgcctttgcttatccgtacacctgggactccctccccatcttctacaggctattcctgttcccaggggagagtgcacaaaatgaagccacctcgtaccaccagaagcacatgatcatgaccctcctggcctctttcttgtactctgcacatctgccagaacgcctagcccctggacgctttgactacatcggtcacagtcaccagctgtttcacgtgtgtgtgatcctggccacgcacatgcagatggaagccatacttctggacaagactctgaggaaggaatggctcctggccacctccaagcccttctctttctctcagatagctggagccatacttctgtgcatcatcttcagcctcagcaacataatttatttctcagctgctctgtatcggattcccaagccagaattacataaaaaagaaacatgactcagaccataagcttttcatgccagatgtcaacattaagctgcaacatcctaaccaccataagccggaggtggttacagcttatcatggcctaaaatattcataatggttggtgtcttttgaatgaattcatgtcaaaaatgttattcagctggggaaatttctctaaatgtacactgattctgtgtgtgtgattttaaaaggagaatatggttcaagcaagtccttgttaaggcaaactattgatatttcattaattttaaatttacttaaaatgtggttttaaattctatttaaacatttggattaagcatattactctggagctttgtattattctttaaaaatgaatcttgcttcatttgatgaatttcatgtcacaaagcttctctcaagagctctcgtagtggcctgtcaaccactttcggagaatgagccaggtcagtcactgggaggacctgtgaaagaaagttggtcactgagtgccttggggactggcaaaacattccagaatgaagagagctgtctggggagagcccttcttcccttctccacctagtgaagggagaacagaaggggagtcctctcttcccacaagtccattctgccttcaaagtgtaagttctcatgtcattatggatttggagtttgtcagtttttttcttaaaagtccacagcggggtgtcatgtgttctgttatgttctgttttctggttgccagtttgatctgcaaagtatttttcagtgcaggtaaaatgtgttaaaccataagagttgactgagttaatcccaattggttgtgctcatatgccaccttttaaaccaatggaaattgctatatttggggatgtcatacatttgatattgcttcagcatttcaaatatgttgcaaaatttagtatccatatgcataagaagttaatcaccttgccagtggggtggtcacatatagtgttctcaagctttactgtgaatcagaaacatccagtaagcttgtgacaaatgcagactcctagggaaaaccagggggttctgcttcactaggttaaatgtaggttttgtagaggagatctgcactggagcaagtctcccagatgattctaatacaggagggccagaggccaaacttgaagaactgctggtgttacatgttccaaaaggcattagacctatcagctttgtttcgcctgatctcaagttttagcaactcaccaactaaggcgtaacctcattttatgttccagcgttttctactctgaatagttctaaaacactgagcattttctcatttgttgcattactgattaaagttcagtatttcatggtgttttcagggaacacagaaatgcggatgcaaaacaacttttgacagaggcccatcaaacccagatctgcacttggtaatgacttaggggggcttcctcacaatgcaggatcctctttgctgactcaggaatactccatattttagactactgcctctaccattaactagcccagacatttgaatggccttgtaaacagctcactgtctaatactcgaaggacaagtaacaatttatattggatgagagtggtcaagaaatatgatttcgttagttttattatctgtttacttcctctggggaaggcagactgataaaattatatgggctggtaaatttttggtacattaattgcaagctgcatgacaaaatttgtttttctggcaacaatctgacattattagtggaattccacaccaacagggcttgtgagcttccatttcatcttactgtaacttcaattttatggcaaaaaaaggtacaaagtttaaatacccctttctagtaatgccaaagacatacagtgttttacattctctcctttataggtaacaaaataatgtttagctcagtaagtactgaaataatgagtgaccaatttgaaggatttttagattatttaatctttgcttatgttgctttttcacatgcttaatgatggaaatgaaatgttaaatcaacaaaataagatccagtgtttcataacatttttataagtttggtaaactttagtcccattatatacttttggggacagtgttataaatcagaattttacgacagtttgcagaacactgatttgaaagcttcctatgcaaaatgagaaggggttcaaatatattaattatcattaagtattaaataataggcattagatgtctaatgtgagtataatttcatccaagccatctcagaaagtctaaaaggttggcagggggtcagctgaagacctcactggagtgggtcttaatttttaaaaagtgtctcactacatttaagacatgtgacacattcccattggtaacaattgctcaccatggcattgtctcaaaaaagactatggtggggagggtggcacattcctaatgggatgtacctctccccactccccttgcttgagaagcactactcaaaaatttaccagaccttacaactgtgataaaacttgaatgtgtatgatgaataaggccattcagttaactttacctccctttacccattgaaggggttccttttccattgctcagtttttagaaaataattctcatcttttttctaaagaaatgaatttgtggctggtctgaaggtagtgagttagctcaattgattgttcgcagtcagttatagatcaagctccttgttctactcttcccctcttctcactactgcacttgactagtcttaaaacaaagaaagaacgaatgaatgaatgaatctgtggctggatgcagtggctcatgcctgtaatcccagcactttgggaggctgaagtgggaggactgcttgggcccaagaattcaggaccagtctgggcaacagagccagacactgtctctataaaaaaaagttaaaactagctggttgtggtggtgcacacctgtggtcccagctactgtggagggtgatgtgggaggattgcttgaacccaggagttggatgctgcagtgagctatgattgcgccattgcgctccagactgggcaacagggcaagaccctgcctcaaaaaaaaaaaaaaaagaatttgtaattgttggtaggatgttatgggaaatttagaggtcttctgagtataaagtggtttaaatatttggtctgctgaagtctttctggaagtgttgttccccctgctgccccgcccagtagaaacttgctcatatgagaggttctgaggtaggtgcggtgtagtagaatggcattgtcagatatgttcaagaaacccttcatttgacactattttgtaccttatggtaccctttaacattttttaattaaaaaaaatattttttgagacagggtcttgttctgttgcccaggctggagtgtagtgttgcaatcttggctcactgcaacctctgcctgacaggcttcagtgatctttccacctcagcctcctgagtagctgggactacaggtgcatgccaccaagcctggctaactttttgtagagatagggttttgccatgctgcccaggctggcttagaattcctgaattcaagtgatttgtctgcctcaggctcccaaagtgctgggattacaggcatgagccacactgcacccagtccatgctaccctttttatatgaaacacctattaacacggtacaacaacacttcaaaacatattatttgaatttcggcctctgattttctagtcaacaatccattaaggcaaagacctgtttccaaactcagatgttctccaacttacactaatgtctggttttcttgaactatgtgagagaaaaaaataaacagaatttatttattatcata

SEQ ID NO: 194629 - DNA, 5337 bp, Artificial Sequence
  derived and/or modified sequence
gggcccgcgagtccggggtcgccgcagcccgggaggagtgtctggtctccggcctgcctgtgctgtccccgcgccctgtccactggactcccgagacccttggaacccaggacaccattggagaaactgggcattttaccaaggatttgactggaatggcatgcttcctttaaagatgaaagttgacttttagagccaattaaagccctttggggaatctggcctcataccttgtccacacagagttcctgtacaaggttcctgacctgtgggaagcggcacagcaccagctaggcagagacgccccaggccatgttagagctttgagtgaggcctggtaacagggaggcgctgtcacctactggccttgccaatccagctccaagatgctgagcctgaagctccccaggctgtttagcatagaccagataccccaggtgttccatgagcaaggcatcctgttcggctaccgccatccacagagttctgccactgcctgcatcctcagccttttccaaatgaccaatgagactctcaacatttggactcacttgctgcccttctggttctttgcatggaggtttgtgactgcactgtatatgacagacatcaagaatgacagctactcctggcccatgcttgtgtacatgtgcaccagctgcgtgtacccacttgtgtccagctgtgcgcacaccttcagctctatgtccaagaatgcccggcacatttgctacttcctggactatggtgccgtcaacctcttcagcctgggctcagccattgcctactctgcatacacgttcccggatgcgctcatgtgcaccactttccatgactactacgtggccctggctgtactgaacaccatcctcagcacaggcctctcctgctactccaggtttcttgaaatccagaagcccagactctgtaaggtgattcgtgtcctcgcctttgcttatccgtacacctgggactccctccccatcttctacaggctattcctgttcccaggggagagtgcacaaaatgaagccacctcgtaccaccagaagcacatgatcatgaccctcctggcctctttcttgtactctgcacatctgccagaacgcctagcccctggacgctttgactacatcggtcacagtcaccagctgtttcacgtgtgtgtgatcctggccacgcacatgcagatggaagccatacttctggacaagactctgaggaaggaatggctcctggccacctccaagcccttctctttctctcagatagctggagccatacttctgtgcatcatcttcagcctcagcaacataatttatttctcagctgctctgtatcggattcccaagccagaattacataaaaaagaaacatgactcagaccataagcttttcatgccagatgtcaacattaagctgcaacatcctaaccaccataagccggaggtggttacagcttatcatggcctaaaatattcataatggttggtgtcttttgaatgaattcatgtcaaaaatgttattcagctggggaaatttctctaaatgtacactgattctgtgtgtgtgattttaaaaggagaatatggttcaagcaagtccttgttaaggcaaactattgatatttcattaattttaaatttacttaaaatgtggttttaaattctatttaaacatttggattaagcatattactctggagctttgtattattctttaaaaatgaatcttgcttcatttgatgaatttcatgtcacaaagcttctctcaagagctctcgtagtggcctgtcaaccactttcggagaatgagccaggtcagtcactgggaggacctgtgaaagaaagttggtcactgagtgccttggggactggcaaaacattccagaatgaagagagctgtctggggagagcccttcttcccttctccacctagtgaagggagaacagaaggggagtcctctcttcccacaagtccattctgccttcaaagtgtaagttctcatgtcattatggatttggagtttgtcagtttttttcttaaaagtccacagcggggtgtcatgtgttctgttatgttctgttttctggttgccagtttgatctgcaaagtatttttcagtgcaggtaaaatgtgttaaaccataagagttgactgagttaatcccaattggttgtgctcatatgccaccttttaaaccaatggaaattgctatatttggggatgtcatacatttgatattgcttcagcatttcaaatatgttgcaaaatttagtatccatatgcataagaagttaatcaccttgccagtggggtggtcacatatagtgttctcaagctttactgtgaatcagaaacatccagtaagcttgtgacaaatgcagactcctagggaaaaccagggggttctgcttcactaggttaaatgtaggttttgtagaggagatctgcactggagcaagtctcccagatgattctaatacaggagggccagaggccaaacttgaagaactgctggtgttacatgttccaaaaggcattagacctatcagctttgtttcgcctgatctcaagttttagcaactcaccaactaaggcgtaacctcattttatgttccagcgttttctactctgaatagttctaaaacactgagcattttctcatttgttgcattactgattaaagttcagtatttcatggtgttttcagggaacacagaaatgcggatgcaaaacaacttttgacagaggcccatcaaacccagatctgcacttggtaatgacttaggggggcttcctcacaatgcaggatcctctttgctgactcaggaatactccatattttagactactgcctctaccattaactagcccagacatttgaatggccttgtaaacagctcactgtctaatactcgaaggacaagtaacaatttatattggatgagagtggtcaagaaatatgatttcgttagttttattatctgtttacttcctctggggaaggcagactgataaaattatatgggctggtaaatttttggtacattaattgcaagctgcatgacaaaatttgtttttctggcaacaatctgacattattagtggaattccacaccaacagggcttgtgagcttccatttcatcttactgtaacttcaattttatggcaaaaaaaggtacaaagtttaaatacccctttctagtaatgccaaagacatacagtgttttacattctctcctttataggtaacaaaataatgtttagctcagtaagtactgaaataatgagtgaccaatttgaaggatttttagattatttaatctttgcttatgttgctttttcacatgcttaatgatggaaatgaaatgttaaatcaacaaaataagatccagtgtttcataacatttttataagtttggtaaactttagtcccattatatacttttggggacagtgttataaatcagaattttacgacagtttgcagaacactgatttgaaagcttcctatgcaaaatgagaaggggttcaaatatattaattatcattaagtattaaataataggcattagatgtctaatgtgagtataatttcatccaagccatctcagaaagtctaaaaggttggcagggggtcagctgaagacctcactggagtgggtcttaatttttaaaaagtgtctcactacatttaagacatgtgacacattcccattggtaacaattgctcaccatggcattgtctcaaaaaagactatggtggggagggtggcacattcctaatgggatgtacctctccccactccccttgcttgagaagcactactcaaaaatttaccagaccttacaactgtgataaaacttgaatgtgtatgatgaataaggccattcagttaactttacctccctttacccattgaaggggttccttttccattgctcagtttttagaaaataattctcatcttttttctaaagaaatgaatttgtggctggtctgaaggtagtgagttagctcaattgattgttcgcagtcagttatagatcaagctccttgttctactcttcccctcttctcactactgcacttgactagtcttaaaacaaagaaagaacgaatgaatgaatgaatctgtggctggatgcagtggctcatgcctgtaatcccagcactttgggaggctgaagtgggaggactgcttgggcccaagaattcaggaccagtctgggcaacagagccagacactgtctctataaaaaaaagttaaaactagctggttgtggtggtgcacacctgtggtcccagctactgtggagggtgatgtgggaggattgcttgaacccaggagttggatgctgcagtgagctatgattgcgccattgcgctccagactgggcaacagggcaagaccctgcctcaaaaaaaaaaaaaaaagaatttgtaattgttggtaggatgttatgggaaatttagaggtcttctgagtataaagtggtttaaatatttggtctgctgaagtctttctggaagtgttgttccccctgctgccccgcccagtagaaacttgctcatatgagaggttctgaggtaggtgcggtgtagtagaatggcattgtcagatatgttcaagaaacccttcatttgacactattttgtaccttatggtaccctttaacattttttaattaaaaaaaatattttttgagacagggtcttgttctgttgcccaggctggagtgtagtgttgcaatcttggctcactgcaacctctgcctgacaggcttcagtgatctttccacctcagcctcctgagtagctgggactacaggtgcatgccaccaagcctggctaactttttgtagagatagggttttgccatgctgcccaggctggcttagaattcctgaattcaagtgatttgtctgcctcaggctcccaaagtgctgggattacaggcatgagccacactgcacccagtccatgctaccctttttatatgaaacacctattaacacggtacaacaacacttcaaaacatattatttgaatttcggcctctgattttctagtcaacaatccattaaggcaaagacctgtttccaaactcagatgttctccaacttacactaatgtctggttttcttgaactatgtgagagaaaaaaataaacagaatttatttattatcataaagtcatcctgtttgccacttaatttggttatgttttatctaccacactgcaaatatgttaattcaccatgagaaacagatccctgtacacatgtgtatcagtaaatcattcaatgaatagttagtgcttaggatgtat

SEQ ID NO: 194630 - DNA, 2347 bp, Artificial Sequence
  derived and/or modified sequence
agcttaacaagaccatggcctctggacccgcgatcagctcgctgtgtggtcctgagcagccacccaacatctctgggccttggattcctacctggcctttcttctggatgcatcatttttgcctttaggtatctggaccattcccccccatggatgataaagtctttgcttcacaccctcaggattaccttaaaggcctgaaaagaacagaggaggagtctgaggaggtgaattccagccgtgctcttgcaggctggctgggcagtgtgctggggaggagagggagcctctggctgggcctcctccaccgggcctggtgtgctgggaacaccccgcattgtcccaaggcctcagatttgactttcaaagggaaaacagctctcctgataaaggacaccattggagaaactgggcattttaccaaggatttgactggaatggcatgcttcctttaaagatgaaagttgacttttagagccaattaaagccctttggggaatctggcctcataccttgtccacacagagttcctgtacaaggttcctgacctgtggtaaggaagcggcacagcaccagctaggcagagacgccccaggccatgttagagctttgagtgaggcctggtaacagggaggcgctgtcacctactggccttgccaatccagctccaagatgctgagcctgaagctccccaggctgtttagcatagaccagataccccaggtgttccatgagcaaggcatcctgttcggctaccgccatccacagagttctgccactgcctgcatcctcagccttttccaaatgaccaatgagactctcaacatttggactcacttgctgcccttctggttctttgcatggaggtttgtgactgcactgtatatgacagacatcaagaatgacagctactcctggcccatgcttgtgtacatgtgcaccagctgcgtgtacccacttgtgtccagctgtgcgcacaccttcagctctatgtccaagaatgcccggcacatttgctacttcctggactatggtgccgtcaacctcttcagcctgggctcagccattgcctactctgcatacacgttcccggatgcgctcatgtgcaccactttccatgactactacgtggccctggctgtactgaacaccatcctcagcacaggcctctcctgctactccaggtttcttgaaatccagaagcccagactctgtaaggtgattcgtgtcctcgcctttgcttatccgtacacctgggactccctccccatcttctacaggctattcctgttcccaggggagagtgcacaaaatgaagccacctcgtaccaccagaagcacatgatcatgaccctcctggcctctttcttgtactctgcacatctgccagaacgcctagcccctggacgctttgactacatcggtcacagtcaccagctgtttcacgtgtgtgtgatcctggccacgcacatgcagatggaagccatacttctggacaagactctgaggaaggaatggctcctggccacctccaagcccttctctttctctcagatagctggagccatacttctgtgcatcatcttcagcctcagcaacataatttatttctcagctgctctgtatcggattcccaagccagaattacataaaaaagaaacatgactcagaccataagcttttcatgccagatgtcaacattaagctgcaacatcctaaccaccataagccggaggtggttacagcttatcatggcctaaaatattcataatggttggtgtcttttgaatgaattcatgtcaaaaatgttattcagctggggaaatttctctaaatgtacactgattctgtgtgtgtgattttaaaaggagaatatggttcaagcaagtccttgttaaggcaaactattgatatttcattaattttaaatttacttaaaatgtggttttaaattctatttaaacatttggattaagcatattactctggagctttgtattattctttaaaaatgaatcttgcttcatttgatgaatttcatgtcacaaagcttctctcaagagctctcgtagtggcctgtcaaccactttcggagaatgagccaggtcagtcactgggaggacctgtgaaagaaagttggtcactgagtgccttggggactggcaaaacattccagaatgaagagagctgtctggggagagcccttcttcccttctccacctagtgaagggagaacagaaggggagtcctctcttcccacaagtccattctgccttcaaagtgtaagttctcatgtcattatggatttggagtttgtcagtttttttcttaaaagtccacagcgggg

SEQ ID NO: 194631 - DNA, 993 bp, Artificial Sequence
  derived and/or modified sequence
atgttgagtctgaagctgccaaggctattttcaatagaccagattccgcaggtgttccacgaacagggtattctgtttgggtaccgacacccacagtctagtgctaccgcctgcatcttgtccctcttccagatgacaaacgaaacactcaacatttggacacacctgttgcctttctggttttttgcctggcgatttgtgacagccctatacatgaccgacatcaagaatgattcttacagctggccaatgctcgtgtatatgtgcacgtcctgtgtatacccgctggtctcctcatgcgcccatacatttagctccatgagcaagaacgcaaggcatatctgctatttcctggattacggtgcagttaatctgttttcccttggctcggccattgcctacagcgcttacacctttccagatgccttgatgtgtacgacattccacgattattatgtggctttagcggtcctgaatacaattctctctactggcctgtcatgttactctaggttcctcgagatccagaagcctagattgtgtaaagtcataagagtcttggcgtttgcatacccatatacttgggactcactccccatcttttatcgcctatttctgttcccaggagaaagcgcccaaaatgaggctactagctatcatcagaagcatatgatcatgacgctgctcgcttccttcctatattctgcacatttaccagagagactggccccaggacgcttcgattatatagggcactctcatcagctgtttcacgtttgcgtaattttagcgactcatatgcagatggaggctatcttgttggataagaccctgcgaaaggagtggctgcttgccacttctaaaccttttagtttttctcagattgcgggagcaatcttgctgtgtattatattttctctgtctaatatcatatatttctccgccgctttatacagaatccccaaaccagagcttcataaaaaagagacgtag

SEQ ID NO: 194632 - DNA, 993 bp, Artificial Sequence
  derived and/or modified sequence
atgttgtcactgaagctacctaggctgttttccatcgatcagatccctcaagtctttcatgagcagggaatcctctttggctaccgacacccacagtcttccgctacagcatgcatcctgagcctttttcagatgaccaatgaaaccctcaacatttggacccatctcctgccattctggttttttgcctggcgcttcgtgacggccctgtacatgacagatattaaaaatgattcttatagctggcccatgttagtgtatatgtgcactagctgcgtctatccactcgtgtcaagttgcgctcacactttttcctcaatgtccaagaacgctagacatatttgttactttctggactatggagctgtgaaccttttcagtctggggagcgccatcgcgtacagtgcgtatacattccctgatgcactgatgtgcactacattccacgactactatgttgctcttgccgtcttaaacacaattctgtccacaggcctcagttgctactcgcgcttcctggaaattcagaaaccgaggctgtgcaaggtgataagggtgcttgcttttgcgtatccctacacgtgggatagcctccccatattttatcggctgttcctgttcccaggagagtccgcacaaaatgaggctacaagctatcaccaaaaacacatgatcatgacgctcttggctagcttcctttacagtgcccatttgcctgagaggctggctcctggcaggttcgattacattggtcattcacaccagctgtttcacgtctgtgtgattctggcaactcacatgcagatggaggctatcctcttagacaaaactttgcggaaagagtggctgctagccactagcaagcctttctcctttagccagattgctggcgctatactgctttgtatcatcttcagcctctcaaacatcatctatttttcagccgctttgtatcgcatccctaaacctgagctgcacaaaaaagaaacctag

SEQ ID NO: 194633 - DNA, 993 bp, Artificial Sequence
  derived and/or modified sequence
atgctaagcctgaaactccctagactgttctcaattgaccagatccctcaggtgttccacgagcaaggaatcctgttcggatataggcatccacagtcatcagctactgcctgcattcttagcctcttccagatgacaaacgagactttgaacatatggactcacttactgccattttggtttttcgcatggcggttcgtgaccgcactgtacatgaccgacatcaagaacgacagctattcctggccaatgctggtttatatgtgcaccagctgtgtttaccccctcgtgagtagctgcgcccatacgttctctagcatgagtaagaatgcccgacatatatgctacttcttggattacggcgctgtgaacttattttcactggggtctgccatcgcatattcagcctacacgttcccggacgccctaatgtgtactacctttcacgactattacgttgcactggctgtgctcaatacaatcctatctacgggactaagctgctacagcagattccttgagattcaaaaacctcggctgtgcaaggtgatccgcgtgctagcctttgcgtacccatacacctgggatagcctccctatcttctacagactgttcctttttccaggagagagcgcccaaaatgaggctacttcataccaccagaaacacatgattatgactttgttagcatccttcctatatagcgcccaccttcccgagcgcctggcgcctgggagattcgactatataggccacagtcaccagctgttccacgtttgcgtcattttagctactcatatgcaaatggaggcaatcctcctggataagacactgaggaaggaatggctgctggcaactagcaaacccttctcattcagccagatcgcgggagcgattttgttatgcattattttttccctctctaatattatatatttcagtgccgcactgtaccgaatccctaagccagagttgcacaaaaaggagacttag

SEQ ID NO: 194634 - protein, 132 aa, Artificial Sequence
  derived and/or modified sequence
MATTVTLEKCGHNKGYKGLDNCRFCPGSQCCVEDGPESIDSIIDMDAVCKRVTTLGLDVSVTISQDAGRYLCDFTYYTSLYQSHGRSAFVHVPPLGKPYNADQLGRALRAIIEEMLDLLEQSEGKINYCHKH

SEQ ID NO: 194635 - protein, 209 aa, Artificial Sequence
  derived and/or modified sequence
MEQPRKAVVVTGFGPFGEHTVNASWIAVQELEKLGLGDSVDLHVYEIPVEYQTVQRLIPALWEKHSPQLVVHVGVSGMATTVTLEKCGHNKGYKGLDNCRFCPGSQCCVEDGPESIDSIIDMDAVCKRVTTLGLDVSVTISQDAGRYLCDFTYYTSLYQSHGRSAFVHVPPLGKPYNADQLGRALRAIIEEMLDLLEQSEGKINYCHKH

SEQ ID NO: 194636 - DNA, 630 bp, Artificial Sequence
  derived and/or modified sequence
atggagcagccacgaaaggccgtggtagtgacaggcttcggcccctttggtgagcataccgtaaatgcgtcgtggatagccgtgcaggagctcgagaagcttgggttaggcgacagcgtggatctgcacgtttatgaaattcctgttgagtaccaaactgtacagagactgattcctgcactgtgggagaagcactcgcctcagctggtggtacacgtcggggtaagcgggatggcaaccacggtaacgctggagaaatgtggccacaataaggggtataagggactggacaactgtcgcttctgtcccggcagtcagtgctgtgtcgaggacgggcctgagtctattgacagtatcatagatatggacgcagtttgtaagcgggtgactacactcggcctagatgtatctgtgacaatctcacaggacgcgggcagatacctatgtgactttacatactatacctccctttaccagtcccacggcaggtcggcgtttgtccatgtgccacctctcggaaagccatataatgctgatcagttagggcgggccctaagggcaataatagaggagatgctcgacctgctggagcagtcggaagggaagattaattactgtcataaacattag

SEQ ID NO: 194637 - DNA, 630 bp, Artificial Sequence
  derived and/or modified sequence
atggagcagcccaggaaggctgtggtggtgactggatttggcccctttggagagcacacagtgaatgcctcctggattgctgtgcaggagctggagaagctgggcctgggggacagcgtggacctgcacgtgtatgagatccctgtggagtaccagacagtgcagaggctcatcccagccctgtgggagaagcacagcccccagctggtggtgcacgtgggcgtgtctggcatggccaccaccgtgaccctggagaagtgtggccacaacaagggctacaagggcctggacaactgccgcttctgccccggcagccagtgctgcgtggaggatggccctgagagcattgacagcatcatcgacatggatgctgtgtgcaagagggtgaccaccctgggcctggatgtgtctgtgaccatcagccaggatgctggccgctacctgtgtgacttcacctactacaccagcctgtaccagagccacggccgcagcgcctttgtgcacgtgccccccctgggcaagccctacaatgctgaccagctgggccgggccctgcgggccatcatcgaggagatgctggacctgctggagcagagcgagggcaagatcaactactgccacaagcactag

SEQ ID NO: 194638 - DNA, 630 bp, Artificial Sequence
  derived and/or modified sequence
atggagcagccccggaaggccgtggtggtgaccggcttcggcccctttggcgagcatactgtgaatgcctcttggatcgcagttcaggagctcgaaaaactaggactgggggactcagtcgatctccacgtatatgagattccagtggagtaccagacagtccagcggctgataccagctctgtgggaaaaacactccccccagctggttgtccacgtgggggtgtccggaatggcaactacggtgactcttgagaagtgtggtcataacaagggttacaaggggctcgacaactgtagattttgccccggttctcagtgttgcgtggaagatggccccgagagcattgactccataattgacatggatgctgtctgcaagagagtaacaacccttggcctggatgtttctgtgacaattagccaggacgctgggagatacctgtgcgatttcacctattataccagtttgtaccagagccacgggagatccgcattcgtgcatgtgccccctctcggtaagccttacaacgccgatcagctgggccgcgccctaagggctatcattgaggagatgctggatcttttggaacagtctgaaggtaaaattaactattgccacaaacactag

SEQ ID NO: 194639 - DNA, 630 bp, Artificial Sequence
  derived and/or modified sequence
atggagcagccacggaaggcagtcgtggtgactggctttgggccttttggcgagcacacagtgaatgccagttggatcgccgttcaggaactagaaaaactcggactgggagacagcgtcgacctgcacgtttacgagatacctgttgagtaccagaccgtgcagcggctgatccccgctttgtgggagaaacactcgccgcaacttgtagtacatgtaggggtgagcggaatggctaccactgtgaccctcgagaagtgcgggcacaataaaggttataaaggcctcgacaactgtaggttttgtcccggatcgcagtgctgtgtggaggatggccctgagagtatcgacagcattatagacatggacgcggtgtgtaaaagggtcacgaccctcggcctagatgtgtccgttaccatctcccaagatgccggacgttacctgtgtgatttcacttactacacctcactgtaccagagccatgggaggtctgccttcgtgcacgtcccacccctgggcaaaccctataacgccgaccagctcgggagagccctgcgggctatcatagaagaaatgctggacctgttagaacagtcagaaggtaagatcaactactgtcacaagcattag

SEQ ID NO: 194640 - DNA, 1409 bp, Artificial Sequence
  derived and/or modified sequence
gagaggctgcagcggcagcagctgtcgcgccagtcgcaacagaagcaggtccgaggcacagcccgatcccgccatggagcagccgaggaaggcggtggtagtgacgggagctagaaaagctaggccttggcgacagcgtggacctgcatgtgtacgagattccggttgagtaccaaacagtccagagactcatccccgccctgtgggagaagcacagtccacagctggtggtgcatgtgggggtgtcaggcatggcgaccacagtcacactggagaaatgtggacacaacaagggctacaaggggctggacaactgccgcttttgccccggctcccagtgctgcgtggaggacgggcctgaaagcattgactccatcatcgacatggatgctgtgtgcaagcgagtcaccacgttgggcctggatgtgtcggtgaccatctcgcaggatgccggcagatatctctgcgactttacctactacacctctttgtaccagagtcacggtcgatcagccttcgtccacgtgcccccactggggaagccgtacaacgcggaccagctgggcagggcactgagagccatcattgaggagatgttggacctcctggagcagtcagagggcaaaatcaactattgccacaaacactgagggacgctcaggtctcctaagacctcatcctgctggggaccccacgaggggacatccaccctctggggtgtggccaggaaaagacaagctcttcagcttggggatccgatctggaagagagattctgatctgcccacctcctcttcctccttctctacaaaagctccggttgattcgagggaagtggtgaaaatttttttttctcccattttcctccctgcatctggggacacagctgccgtgaccagggaggccagcctgggaggtccagatgcccagggagaatcttggtctggtgaatccatgagctgcgataccacggctggggccatatgttcacctgctttcctgtccgttggtgaaggaatttcagaattcattttatatccaagactggcttttaccaaatttaaaagcctctcaatgcgtcctcgaccttgaactgtgctcaacagcctggccctttctggggccaccctgggatatggctggctggctggctttctttctttctttctttctttctttcttgctttctttctttcttgctttctttcttctctctctctctttttttttttttttaaatagtgctagtttgggcacagagtaatttatattccctttggttaaaatgcaggctttttagccaacaacaaaagtgttttccccccacccccactcgcccaccagggtgatgccacttttgcctcctgccctgaaaattggacttaagatgccatgtcttggccaggcgca

SEQ ID NO: 194641 - DNA, 7084 bp, Artificial Sequence
  derived and/or modified sequence
ctcgcgcggccgagaggctgcagcggcagcagctgtcgcgccagtcgcaacagaagcaggtccgaggcacagcccgatcccgccatggagcagccgaggaaggcggtggtagtgacgggatttggcccttttggggaacacaccgtgaacgccagttggattgcagttcaggagctagaaaagctaggccttggcgacagcgtggacctgcatgtgtacgagattccggttgagtaccaaacagtccagagactcatccccgccctgtgggagaagcacagtccacagctggtggtgcatgtgggggtgtcaggcatggcgaccacagtcacactggagaaatgtggacacaacaagggctacaaggggctggacaactgccgcttttgccccggctcccagtgctgcgtggaggacgggcctgaaagcattgactccatcatcgacatggatgctgtgtgcaagcgagtcaccacgttgggcctggatgtgtcggtgaccatctcgcaggatgccggcagatatctctgcgactttacctactacacctctttgtaccagagtcacggtcgatcagccttcgtccacgtgcccccactggggaagccgtacaacgcggaccagctgggcagggcactgagagccatcattgaggagatgttggacctcctggagcagtcagagggcaaaatcaactattgccacaaacactgagggacgctcaggtctcctaagacctcatcctgctggggaccccacgaggggacatccaccctctggggtgtggccaggaaaagacaagctcttcagcttggggatccgatctggaagagagattctgatctgcccacctcctcttcctccttctctacaaaagctccggttgattcgagggaagtggtgaaaatttttttttctcccattttcctccctgcatctggggacacagctgccgtgaccagggaggccagcctgggaggtccagatgcccagggagaatcttggtctggtgaatccatgagctgcgataccacggctggggccatatgttcacctgctttcctgtccgttggtgaaggaatttcagaattcattttatatccaagactggcttttaccaaatttaaaagcctctcaatgcgtcctcgaccttgaactgtgctcaacagcctggccctttctggggccaccctgggatatggctggctggctggctttctttctttctttctttctttctttcttgctttctttctttcttgctttctttcttctctctctctctttttttttttttttaaatagtgctagtttgggcacagagtaatttatattccctttggttaaaatgcaggctttttagccaacaacaaaagtgttttccccccacccccactcgcccaccagggtgatgccacttttgcctcctgccctgaaaattggacttaagatgccatgtcttggccaggcgcagtggctcatgcctgtaatcccagcactttggaaggccagggtgggcggatcacctgagatcaggagttcaagatcagcctggccaacatggtgaaaccctgcctctactaaaaatacaaaaattagccgggcatggtgatgagtgcctgtagtcccagctactcgggaggctgaggctggagaatcgcttgaacttgggaggcagaggttgcagtgagctgagattgcacagctgcactccagcctgggtgacagagcgagactctgtctcaaaacaattggacttaagatggcatgtctttgttttagggccaaaaatgaggcccccttgcttaaggcatggggtccgtggccaggcaacggggtgggactgctgccccagatgtggccatgggggtcgtggtcctttcaacaccaagctatgagctgtcgccatggagaccagggccacctgtggaaaggcggattttgtctgcttttgacttttcttttttaatatgtaaaactccacatcagcggaaacccccccctacttctggcctggagcttcagggttttggtgctgggacgagtttgttgttctccttagcggggtggcgcggggggctcaaaacgggggcgcgggggctggagttggcagagctctgcatgtcccggcatgtctgagcaggaggaattccgggcggccaaagggttttatgtagattgcttttggacactcgcccaggagtcaggagttgatttttatctcacttcctggtaaccttgaacttaccaggcagggatgagatgacgtaaacttcctcagatgatgtaagttcagccacatcttgctgcccattagggagagaggacgacccccacagtgaaagtaattgagtgaaatgcacgttctggaaatcagtttctattttggcctggaggaatgtggctatactgcttccctgagtgtgacacagttggaatctaatcttgttggtttcccaacatctaggtttttgtttgtttgtttgtttttatgatagggtcttgttctgttgaccaggctggagtacagtagtgtgatcatggatcactgcagcctctacctcctgggctcaagtgatcctcccatctcagcctcctgagtagctgggactacaggcatgcaccaccacacctggctaatttttaaattttttatacagacagggtttcaccatgttgcccaggctggtctcgaactcctggactcaaactgatcctcctttctcggcctcccaaagtgctgggattacaggcatgagccactgcacccagcccagttctttcttaaaacagctgagagttttgttttcttcagcgttcaccttccttgtctccagttccgatgctggcagtggttcctacctctgttgggtttctagatagtttgggaacggggttgatgggtttctgtgaaacacattttccaagtcttgggctttctctggaggggaaggtggatgctggcgggtgacttgcagtgggcgcctggcagtgggtgtggactgtaactgacaggtggaaatgagtagggacactattgttccctccatgccagcttttttttttgctggaaatgccccctccacacccctggtagctctgtgtcctgagaaatccagagtgtgggagacatcactgcatctgtccccccagcttctgtgaagggaagctgtggcctcttttgaatgtggggaacaactgaagactcaggggtcacccagaggtctggtggaaagcaacttcaggtttcatcttgctctattcctcaaaggtctggtctgtgggcctctgaggagaaaacaggtctagccaagacagggacaaaatggggaaggggatgtgccaggcctgaactgagctaagcacctgccccgggctccacacttccatctttcttttgtcttcatttcacctctgtgtttaaagcactgtgtgacatagctccttagagatataacctattgtctgctcattgtcacgtgtgtgtgtgtcatctttgtattcttgcagtggtttcacatttccttacccagtcaagccagtatcccatccttcctcataatgcacaacatttggctcattttatttttctcattgttattttttatttttattttttgagatggattctcacactgttactcgggctagagtgcaatggcgtgatctcggctcactgcaacctccacctcctgggtttacacaattctcctgcctcagcctcccgagtagctgggattacaggcgcccgtcaccacacctggctaatttttgtatttttagtagagatgcagcttcaccatgttggccaggctggtcttgaaatcctgacctcaggtgatctgcctgccttggcctcccaaagtgctgggattacaggtgtgagctactgcgcctggccaagttttttacaaatatttttcttttggtggaactcatctgtgcactctctggtgtgtttttccacctttgttgggtcttggcttaaaatatcctcatgtgggctaggtgtggttactcacacctgtaatcctagcactttgggaggttgaggcaggagaatcccttgagccaggagttcaagaccagcctgggcaacatagcaagagatcccatatctaccaaaacatacaagaattagccagatgtggtggtgcatgcctgtggtcccagatactcaggaggctgaggcaggaggatcacctatgcctgggaggttgaagccccagtgagccatgatcacaccactgtagtccagcccgggtgacacagcaagactctgtctcaaaaaaaaaaaaaaaaaaaatcctcatgcaagaagggaaggaccaagtcccattccctcttgcctcattttcagagcctggggtaggggctacaggtggcataggaagggtctgcaaggtgggtgggacttggcaggtgttgggaagaggaataggggtggcaagtgtcaatggtgaaaagacaggctgaggggtgtggtgggaaggctgggggagaaaggtgagaagtgattgggggggcttccctgatgagtcctcatggagggtgctgaggcagggaacaggggtgcagggacagtgatcagggcacctggtaccctgaccaacttgatgatggcatctcttttaagatgcccaagtctgcgcacttttattcctttattcggcccctagcaccccctccccaccccaaagaaggtcagttgcatgcgtgtggggatgtagctcaaaaaagaaataagatggagtggaaaggaaagaaaggaagaagcaggaattcaaggtgggtgggctgagcttggggccacctagcccacctgctccaatcaagggctggaacaaacctgaggccacttggagaggcagggctgggcagggacagggggtgggggccgaaatcacagcttccccatcagagccagatgtgtgaaggaaatgtcccagatggcagtagtttctcggcaaggaggggaatcctggagatggttcatgtctgtgatcccagtgctttgggaggctgaggtgggaggattgcttgagcccgggagttcgagaccagccctgggcaacatggcgagaccccatctctacagaaattaaaaaaaaaaattagccagttgtggtgtcaagcacctgtagtcccagctacttgggaggctgagttgggaggcttatctgagcccaggaggtgaaggctgcaatgagccatgattacactactgtaccccagcctgggcaacagagcaagaccctgcctcaaaattaagaaaaaaaaaaggggggccaggcgcagtggcttatgcctgttatcccagcactttgggaggccaaggcagactgatcgcttgaggccaggagtttgcgaccagcctggccaacatagcaaaaccccatctctactaaaaatacaaaaattagtcaagagtggatggtgcgtgcctgtaatcccagctacctgggaggctgagacaggagaattgcttgaacctgggaggcagaggttgcagtggtgtgagatcacgccactgcattccagactgggcaacatagcaagactctgtcacaaaaaaaaaaaaaaaaaagaattccctgctctgcttttctgctcgttgctggcatagaaacatctagaacagaaagtatccactctggggcagatgggagagctggaaaagtagattcaagatgccttttagtcttggaagtttcttccaggaagcaagaccagctggtatgtttacacctgcactccagtgccctggggaggtgaccaggtggagggggatggctcatggaaatctgtcccgcacagctggcccccttttggctgccactgtctagactgttggcctttgacctctctgcctcttgtggcgtctgaacctagacgtcccttttggagacagctggacaaagccctattctccgcagccccagcctctatcctgaggcctctgggagctgcgtgacggccagcatggggtgctgatcatggtcaaggaggcaggtctttgccaggttgccccatgcagccacccatcctcagcatcctaacttgagggggcaggagagggctttgtttttataatccggattaaatttcccttccctgggcacaagtgcctcatgagggcccggggctgctggttgggagggaaagcatccccgtttttgcagtgaggaggccggccgagggctggggttccacttagacccttggcagaatggctgttgaggggcaggcgctgcccagtgcccacgtctggaaagctaattcccgggtggacgctgaacatacctgctgagagactctgtcccctggtttccaggacagttgtcacaagctgagtggggggggactcccaggacttgagggacccagtcccaccccaaactgctccccctcccccaaattccctttctcctcctgctctttctccccgctgtgcctcccccagttacccacagaagtgcctgcctctccagcgctcacagaacacacaaaaagggacaggaattggtcactgggtagtggccgtggctcctgacgatccagaccagcgtctggcccaagccattcagaggtggggtctggggcctgggggttttgtgtcgtgacactttgtctcaaggagattccacatagggatttgaattaggctttctgcttgccaaggcctgtggcatctgagcctggctgagggccgggcaagcctcccctgagcctttggaagccgagttcactctctgcctgcccaggggagcaccggcttggttctgggggctcctctaacatctcaggtttttatcttgtcttaaatttctttctaggaaaaaacccttccctgccaaaggtgactgtgttttctgccgccgaaggagggcccggtccctccaggctcagtgtggcttctccctgacccccgccctagaacttttgccagtgccttttctgaaactcctgtgtcccgggccccccaggcggagaaggatatgccggattctgcctggggctgggctctaggagaccccaaatttgacaccacagaaagcaaataaaacacttgaaatacgcatac

SEQ ID NO: 194642 - DNA, 630 bp, Artificial Sequence
  derived and/or modified sequence
atggagcagcccagaaaggccgtggtggtgaccggcttcggccccttcggcgagcacaccgtgaacgccagctggatcgccgtgcaggagctggagaagctgggcctgggcgacagcgtggacctgcacgtgtacgagatccccgtggagtaccagaccgtgcagagactgatccccgccctgtgggagaagcacagcccccagctggtggtgcacgtgggcgtgagcggcatggccaccaccgtgaccctggagaagtgcggccacaacaagggctacaagggcctggacaactgcagattctgccccggcagccagtgctgcgtggaggacggccccgagagcatcgacagcatcatcgacatggacgccgtgtgcaagagagtgaccaccctgggcctggacgtgagcgtgaccatcagccaggacgccggcagatacctgtgcgacttcacctactacaccagcctgtaccagagccacggcagaagcgccttcgtgcacgtgccccccctgggcaagccctacaacgccgaccagctgggcagagccctgagagccatcatcgaggagatgctggacctgctggagcagagcgagggcaagatcaactactgccacaagcactag

SEQ ID NO: 194643 - protein, 420 aa, Artificial Sequence
  derived and/or modified sequence
MTMEKGMSSGEGLPSRSSQVSAGKITAKELETKQSYKEKRGGFVLVHAGAGYHSESKAKEYKHVCKRACQKAIEKLQAGALATDAVTAALVELEDSPFTNAGMGSNLNLLGEIECDASIMDGKSLNFGAVGALSGIKNPVSVANRLLCEGQKGKLSAGRIPPCFLVGEGAYRWAVDHGIPSCPPNIMTTRFSLAAFKRNKRKLELAERVDTDFMQLKKRRQSSEKENDSGTLDTVGAVVVDHEGNVAAAVSSGGLALKHPGRVGQAALYGCGCWAENTGAHNPYSTAVSTSGCGEHLVRTILARECSHALQAEDAHQALLETMQNKFISSPFLASEDGVLGGVIVLRSCRCSAEPDSSQNKQTLLVEFLWSHTTESMCVGYMSAQDGKAKTHISRLPPGAVAGQSVAIEGGVCRLESPVN

SEQ ID NO: 194644 - protein, 145 aa, Artificial Sequence
  derived and/or modified sequence
MTMEKGMSSGEGLPSRSSQVSAGKITAKELETKQSYKEKRGGFVLVHAGAGYHSESKAKEYKHVCKRACQKAIEKLQAGALATDAVTAALVELEDVESILCAPYWLENVHMLYKLRMLTKPCWRLCKTSLSVHLSLPVKMACLAE

SEQ ID NO: 194645 - DNA, 1263 bp, Artificial Sequence
  derived and/or modified sequence
atgaccatggagaagggcatgagcagcggcgagggcctgcccagcagaagcagccaggtgagcgccggcaagatcaccgccaaggagctggagaccaagcagagctacaaggagaagagaggcggcttcgtgctggtgcacgccggcgccggctaccacagcgagagcaaggccaaggagtacaagcacgtgtgcaagagagcctgccagaaggccatcgagaagctgcaggccggcgccctggccaccgacgccgtgaccgccgccctggtggagctggaggacagccccttcaccaacgccggcatgggcagcaacctgaacctgctgggcgagatcgagtgcgacgccagcatcatggacggcaagagcctgaacttcggcgccgtgggcgccctgagcggcatcaagaaccccgtgagcgtggccaacagactgctgtgcgagggccagaagggcaagctgagcgccggcagaatccccccctgcttcctggtgggcgagggcgcctacagatgggccgtggaccacggcatccccagctgcccccccaacatcatgaccaccagattcagcctggccgccttcaagagaaacaagagaaagctggagctggccgagagagtggacaccgacttcatgcagctgaagaagagaagacagagcagcgagaaggagaacgacagcggcaccctggacaccgtgggcgccgtggtggtggaccacgagggcaacgtggccgccgccgtgagcagcggcggcctggccctgaagcaccccggcagagtgggccaggccgccctgtacggctgcggctgctgggccgagaacaccggcgcccacaacccctacagcaccgccgtgagcaccagcggctgcggcgagcacctggtgagaaccatcctggccagagagtgcagccacgccctgcaggccgaggacgcccaccaggccctgctggagaccatgcagaacaagttcatcagcagccccttcctggccagcgaggacggcgtgctgggcggcgtgatcgtgctgagaagctgcagatgcagcgccgagcccgacagcagccagaacaagcagaccctgctggtggagttcctgtggagccacaccaccgagagcatgtgcgtgggctacatgagcgcccaggacggcaaggccaagacccacatcagcagactgccccccggcgccgtggccggccagagcgtggccatcgagggcggcgtgtgcagactggagagccccgtgaactag

SEQ ID NO: 194646 - DNA, 1263 bp, Artificial Sequence
  derived and/or modified sequence
atgaccatggagaagggaatgtcctcaggcgaaggcttgccatcgcgctccagccaagtgtccgccggtaaaattacggccaaggaactggagaccaagcagtcgtataaggaaaaacggggagggtttgtgcttgttcacgctggggccggataccatagcgaatctaaggccaaagaatataaacatgtgtgcaaacgggcctgtcagaaagcaattgagaaactccaggcgggggctttggcaactgatgcagtcaccgcagccctcgtggagcttgaagattccccctttaccaatgccggtatggggtcaaatctgaacctgctgggagaaatcgaatgcgatgcctctatcatggatggtaagagtctgaacttcggcgccgtgggtgcattgtcaggcataaaaaaccccgtttcagtcgccaatagactcttatgtgaaggccaaaaaggaaagctctctgctgggcgtatcccaccctgcttcctagtcggcgaaggcgcctaccggtgggccgtagatcatggcatccccagctgtccaccaaatatcatgacaactcgattctctctggccgcattcaaaagaaataaacgtaagttggagctggccgaaagagtcgataccgattttatgcaactgaaaaagagaagacagagtagcgaaaaagaaaacgactcaggcacccttgatacagttggggcagtagtggtggaccacgaggggaacgttgcagctgcagtgtcgagcggcggtttagctctcaagcatccggggcgagtcggacaggccgcactgtacggatgcggatgctgggctgagaatactggagctcataatccatacagcactgccgtaagcacgtcaggctgtggcgagcatctggtgcgtacaattttggccagagagtgcagccatgctctgcaggctgaggatgctcaccaggctctgctggaaaccatgcagaacaagtttatctccagtccctttctcgcgagtgaagatggcgtgctgggaggggtgatcgtactgcggtcctgtaggtgttccgctgagccagatagctctcagaataagcagactttgctggttgagtttctatggtcgcacactaccgaatctatgtgtgtagggtacatgagtgcccaggacggcaaggcaaagacgcatatttctcggcttccccccggcgctgttgccggacaatccgtggcaattgagggaggcgtgtgccgcctggagtctccagtgaactag

SEQ ID NO: 194647 - DNA, 1263 bp, Artificial Sequence
  derived and/or modified sequence
atgaccatggagaagggcatgagcagtggagagggcctgcccagccgcagcagccaggtgtctgctgggaagatcacagccaaggagctggagaccaagcagagctacaaggagaagagaggaggctttgtgctggtgcacgccggggccggctaccacagcgagagcaaggccaaggagtacaagcacgtgtgcaagagggcctgccagaaggccatcgagaagctgcaggccggggccctggccacagatgctgtgacagctgccctggtggagctggaggacagccccttcaccaatgccggcatgggcagcaacctgaacctgctgggggagattgaatgtgatgccagcatcatggatggcaagagcctgaactttggagctgtgggcgccctgagcggcatcaagaaccctgtgtctgtggccaaccggctgctgtgtgagggccagaagggcaagctgtctgctggccgcatccccccctgcttcctggtgggggagggcgcctaccgctgggccgtggaccacggcatccccagctgcccccccaacatcatgaccacccgcttcagcctggccgccttcaagaggaacaagaggaagctggagctggccgagcgggtggacacagacttcatgcagctgaagaagaggcggcagagcagcgagaaggaaaatgattctggcaccctggacacagtgggcgctgtggtggtggaccacgagggcaatgtggccgctgctgtgagcagcggcggcctggccctgaagcaccctggccgggtgggccaggccgccctgtatggctgcggctgctgggccgagaacacaggagcccacaacccctacagcacagctgtgtccaccagcggctgtggggagcacctggtgaggaccatcctggccagagaatgtagccacgccctgcaggctgaagatgcccaccaggccctgctggagaccatgcagaacaagttcatcagcagccccttcctggcctctgaagatggagtgctgggcggcgtcatcgtgctgcggagctgccgctgcagcgctgagccagacagcagccagaacaagcagaccctgctggtggagttcctgtggagccacaccacagagagcatgtgtgtgggctacatgtctgcccaggacggcaaggccaagacccacatcagccggctgcccccaggagctgtggccggccagagcgtggccatcgagggcggcgtgtgccgcctggagagccctgtgaactag

SEQ ID NO: 194648 - DNA, 1263 bp, Artificial Sequence
  derived and/or modified sequence
atgaccatggagaagggcatgagcagcggcgagggcctgcccagccgctctagccaagttagtgcgggcaagattacagctaaggagctcgagacaaaacaatcttacaaggagaaaaggggcggatttgtgctggtgcacgctggcgctggttatcattccgaatccaaggcaaaagagtacaaacacgtgtgcaaacgggcctgccagaaggcaattgaaaagctgcaggcgggggcacttgccacagacgccgtcactgcggcactcgtagagttggaggactctccctttacaaatgctggcatgggctccaatctgaatctgctcggtgaaattgaatgcgacgcatccatcatggacggtaaatcgctcaattttggggcggtgggcgctctgtctggaattaagaatcctgtgtccgtggccaatcgtctgttatgcgaggggcagaaaggtaaactgtctgccggtcgcatccccccatgtttcctcgtaggagagggcgcctaccggtgggcagtagatcacggaatcccgtcttgtcctccaaacattatgacgacaagattttcactcgcagctttcaaaagaaacaaacgcaagctggagctggctgagagggtggacactgactttatgcaactcaaaaagagaagacagagctcagagaaggagaacgactctggaacactggataccgtgggcgcagttgtggttgatcacgagggcaacgttgccgcagcggtttcctccggggggttagcactaaagcaccccggaagggtcggtcaggccgctctgtatggttgtggatgttgggccgagaacactggtgctcacaacccatattccaccgcagtctcaacatcggggtgtggggagcatctagtgcgaacgattctcgcacgtgaatgtagccacgctctgcaggccgaggacgcacatcaagccctcctggagaccatgcagaataagtttatcagttccccttttctcgcttctgaggatggcgtgctcgggggagtgatagtgctgagatcgtgtcggtgttctgcagaacctgacagttctcagaataagcaaaccctgttggttgagttcttgtggagccacaccaccgagtcgatgtgtgtcggatacatgagtgcccaggacgggaaggcaaagacacacatctcgcgattgcctcctggagctgtggccgggcagagtgtcgccattgaggggggggtgtgccgcttggagtctccggtgaactag

SEQ ID NO: 194649 - DNA, 1263 bp, Artificial Sequence
  derived and/or modified sequence
atgacaatggagaagggaatgagctccggcgaaggcctgccaagccggtcaagccaggttagtgccggaaagatcacggccaaggaactcgagacaaaacagtcctataaggaaaagcgcggaggattcgtccttgtacatgccggtgctggctaccacagtgagtctaaagccaaagagtataagcacgtatgtaagagagcttgccaaaaggcaatcgagaaattgcaggctggagccctcgcaacggacgctgttacagctgccttggtggaactggaggatagcccattcactaacgccggtatgggctccaatctaaatctcctcggcgaaatcgagtgcgacgcctctatcatggatgggaagagcctgaattttggggcagttggggctctgtctggaataaagaaccccgtcagcgttgccaatagacttctgtgcgagggccagaaaggaaaactgtcggctggccgaatcccaccttgcttcctcgtgggggaaggcgcatacaggtgggctgtcgaccacggtatccccagctgccctcccaatatcatgacaacacggttcagcttagcagccttcaagcggaataagagaaagctggagctggccgagagagtggacaccgattttatgcagcttaagaagcggcgtcagtccagcgagaaagagaacgatagcggaacactcgacacggtcggagccgtggtcgtggaccacgagggcaatgtagccgctgcagtgagctctggaggcctcgcactcaagcacccaggcagagtgggccaggccgctctgtatgggtgtggctgctgggcagagaataccggggctcataacccatattccacagctgtatcgacttctgggtgtggcgaacacctcgtgaggactatcctcgcaagagaatgtagccatgcacttcaggctgaggacgcgcatcaggcgctactggaaaccatgcagaataagttcatctcttcccctttcctcgcctctgaagatggggtgctgggcggagtaatcgtgttgaggtcttgtagatgtagcgcagagcctgactcctcccaaaacaagcaaacactactggtagagtttctttggtcccacaccactgagtcaatgtgtgtgggttatatgtctgctcaggacggtaaggcaaagactcatatttcacggttgcctccaggcgctgtagctggccagtcagtggccatagagggtggcgtatgtcggctcgaatcccctgtcaactag

SEQ ID NO: 194650 - DNA, 2352 bp, Artificial Sequence
  derived and/or modified sequence
gggcgggtgactacttccggtgcagtgaaggctcggggctgaagcggggtaattcctctcctgcaattacttttggatggaagtatgcccctttctcagtagaagatggtaatcttggagaatgaccatggagaaggggatgagttctggagaagggctgccttccagatcatctcaggtttcggctggtaaaataacagccaaagagttggaaacaaagcagtcctataaagagaaacgaggaggctttgtgttggtgcatgcaggtgcaggttatcattctgaatccaaagccaaggagtataaacatgtatgcaaacgagcttgtcagaaggcaattgaaaagctgcaggccggtgctcttgcaactgacgcagtcactgcagcactggtggaacttgaggattctccttttacaaatgcaggaatgggatctaatctaaatctgttaggtgaaattgagtgtgatgccagcataatggatggaaaatccttaaattttggagcagttggagcactgagtggaatcaagaacccagtctcggttgccaacagactcttatgtgaagggcagaagggcaagctctcggctggcagaattcctccctgctttttagttggagaaggagcctacagatgggcagtagatcatggaataccctcttgccctcctaacatcatgaccacaagattcagtttagctgcatttaaaagaaacaagaggaaactagagctggcagaaagggtggacacagattttatgcaactaaagaaaagaagacaatcaagtgagaaggaaaatgactcaggcactttggacacggtaggcgctgtggttgtggaccacgaagggaatgttgctgctgctgtctccagtggaggcttggccttgaaacatccggggagagttgggcaggctgctctttatggatgtggctgctgggctgaaaatactggagctcataacccctactccacagctgtgagtacctcaggatgtggagagcatcttgtgcgcaccatactggctagagaatgttcacatgctttacaagctgaggatgctcaccaagccctgttggagactatgcaaaacaagtttatcagttcacctttccttgccagtgaagatggcgtgcttggcggagtgattgtcctccgttcatgcagatgttctgccgagcctgactcctcccaaaataagcagacacttctagtggaatttctgtggagccacacgacggagagcatgtgtgtcggatatatgtcagcccaggatgggaaagccaagactcacatttcaagacttcctcctggtgcggtggcaggacagtctgtggcaatcgaaggtggggtgtgccgcctggagagcccagtgaactgacccttcaggctgagtgtgaagcgtctcagaggcatttcagaacctgagcttttgggggtttttaactgaagttggttgttttatctttcttgttttataattcctattgcaacctcgtgcactgctcgagacacaagtgctgctgtagttagcgcttagtgacacgcgggcctttggtgggtgagcgggactgtgtgtgagtgtgtgcgcgtatgtgcgcacatatgtgtatgtgtggagtatgtgtgtttgcttctccgtggatgaaatagaaactcctcattgtgtgaccaggaatggttaaatcatctttacaaaatgtgtgctttaactgtttacaagtaaaacctaaagttgcaggaaacattttttatttcgtaaagaggtaccaactgtcgctgatgtgatatgtcagaactgaagagtaaatctacttgtttaaatgacttgacagtggtagtgctccatttaataacagtaataagtaataaagtgtttttatttgttaaccagtttaagtggatcctgtggtaacttaaactgttgttctcatcccttatatggggcatttttctttaacaaagaatggtttcagtgaaacaatctagcagagaattaatgtcagaacctttttaaataatagtctgattgatacagtttgtacttatttcatcaagcttttctaagcttaaatattgcatagcttcgagctgtatggactatattatgaaagaatatgtaaagagaacatacagtaatgcacagtccttaatttgtgtataatggaaagttatttacaatataacactgtaaataagaaagcaaagtttatgggaaaattcaatattatctttgtttttgtttaaatatatttttaagataaaggcacaaaaataaaagaagcgtattactgggtatagtatgtgactcctcttctcagactaataaattatcttttgaatccttgg

SEQ ID NO: 194651 - DNA, 2281 bp, Artificial Sequence
  derived and/or modified sequence
gggtgactacttccggtgcagtgaaggctcggggctgaagcggggtaattcctctcctgcaattacttttggatggaagtatgcccctttctcagtagaagatggtaatcttggagaatgaccatggagaaggggatgagttctggagaagggctgccttccagatcatctcaggtttcggctggtaaaataacagccaaagagttggaaacaaagcagtcctataaagagaaacgaggaggctttgtgttggtgcatgcaggtgcaggttatcattctgaatccaaagccaaggagtataaacatgtatgcaaacgagcttgtcagaaggattctccttttacaaatgcaggaatgggatctaatctaaatctgttaggtgaaattgagtgtgatgccagcataatggatggaaaatccttaaattttggagcagttggagcactgagtggaatcaagaacccagtctcggttgccaacagactcttatgtgaagggcagaagggcaagctctcggctggcagaattcctccctgctttttagttggagaaggagcctacagatgggcagtagatcatggaataccctcttgccctcctaacatcatgaccacaagattcagtttagctgcatttaaaagaaacaagaggaaactagagctggcagaaagggtggacacagattttatgcaactaaagaaaagaagacaatcaagtgagaaggaaaatgactcaggcactttggacacggtaggcgctgtggttgtggaccacgaagggaatgttgctgctgctgtctccagtggaggcttggccttgaaacatccggggagagttgggcaggctgctctttatggatgtggctgctgggctgaaaatactggagctcataacccctactccacagctgtgagtacctcaggatgtggagagcatcttgtgcgcaccatactggctagagaatgttcacatgctttacaagctgaggatgctcaccaagccctgttggagactatgcaaaacaagtttatcagttcacctttccttgccagtgaagatggcgtgcttggcggagtgattgtcctccgttcatgcagatgttctgccgagcctgactcctcccaaaataagcagacacttctagtggaatttctgtggagccacacgacggagagcatgtgtgtcggatatatgtcagcccaggatgggaaagccaagactcacatttcaagacttcctcctggtgcggtggcaggacagtctgtggcaatcgaaggtggggtgtgccgcctggagagcccagtgaactgacccttcaggctgagtgtgaagcgtctcagaggcatttcagaacctgagcttttgggggtttttaactgaagttggttgttttatctttcttgttttataattcctattgcaacctcgtgcactgctcgagacacaagtgctgctgtagttagcgcttagtgacacgcgggcctttggtgggtgagcgggactgtgtgtgagtgtgtgcgcgtatgtgcgcacatatgtgtatgtgtggagtatgtgtgtttgcttctccgtggatgaaatagaaactcctcattgtgtgaccaggaatggttaaatcatctttacaaaatgtgtgctttaactgtttacaagtaaaacctaaagttgcaggaaacattttttatttcgtaaagaggtaccaactgtcgctgatgtgatatgtcagaactgaagagtaaatctacttgtttaaatgacttgacagtggtagtgctccatttaataacagtaataagtaataaagtgtttttatttgttaaccagtttaagtggatcctgtggtaacttaaactgttgttctcatcccttatatggggcatttttctttaacaaagaatggtttcagtgaaacaatctagcagagaattaatgtcagaacctttttaaataatagtctgattgatacagtttgtacttatttcatcaagcttttctaagcttaaatattgcatagcttcgagctgtatggactatattatgaaagaatatgtaaagagaacatacagtaatgcacagtccttaatttgtgtataatggaaagttatttacaatataacactgtaaataagaaagcaaagtttatgggaaaattcaatattatctttgtttttgtttaaatatatttttaagataaaggcacaaaaataaaagaagcgtattactgggtatagtatgtgactcctcttctcagactaataaattatcttttgaatccttggtt

SEQ ID NO: 194652 - protein, 267 aa, Artificial Sequence
  derived and/or modified sequence
MMSSKPTSHAEVNETIPNPYPPSSFMAPGFQQPLGSINLENQAQGAQRAQPYGITSPGIFASSQPGQGNIQMINPSVGTAVMNFKEEAKALGVIQIMVGLMHIGFGIVLCLISFSFREVLGFASTAVIGGYPFWGGLSFIISGSLSVSASKELSRCLVKGSLGMNIVSSILAFIGVILLLVDMCINGVAGQDYWAVLSGKGISATLMIFSLLEFFVACATAHFANQANTTTNMSVLVIPNMYESNPVTPASSSAPPRCNNYSANAPK

SEQ ID NO: 194653 - protein, 114 aa, Artificial Sequence
  derived and/or modified sequence
MMSSKPTSHAEVNETIPNPYPPSSFMAPGFQQPLGSINLENQAQGAQRAQPYGITSPGIFASSQPGQGNIQMINPSVGTAVMNFKEEAKALGVIQIMVGLMHIGFGIVLCLISF

SEQ ID NO: 194654 - DNA, 804 bp, Artificial Sequence
  derived and/or modified sequence
atgatgtcgtcaaaaccaaccagccacgccgaggtgaacgagaccataccgaacccttacccaccttcctccttcatggcccccggcttccagcagcctctgggtagcataaatctggaaaaccaggcacagggcgcccagcgagcccagccttatgggattacctctcccggcatattcgccagctcccaacccggccaggggaatatccaaatgatcaacccctccgtgggaaccgcggtcatgaactttaaggaggaagcgaaggcactgggcgtgatccagatcatggttgggctcatgcatattggtttcggtatcgtgttgtgtctgatatctttttccttcagggaggtcttgggatttgcctcaacggcggttatcggcggttacccattctggggaggcctctctttcatcatttccggaagcctgtcggtctcagctagtaaagaattatctcggtgtcttgtgaagggaagtctaggaatgaatatcgtgagtagtatcctcgcctttattggcgtgattctgctcctcgtggatatgtgcattaatggagtcgcaggccaggattactgggccgtcttgtcaggaaagggaatctccgcaacactaatgattttttcattactggagttcttcgttgcctgcgccaccgcccactttgccaatcaggctaataccactactaacatgtccgtactggtaatccctaatatgtatgagagtaaccctgtgacccctgccagcagcagtgctccccctcgttgtaacaactactcggctaatgcccctaaatag

SEQ ID NO: 194655 - DNA, 345 bp, Artificial Sequence
  derived and/or modified sequence
atgatgtcgagtaaacctacctcgcacgccgaagttaatgagacaatccccaatccgtacccacctagcagttttatggccccaggatttcaacagccactgggcagtattaacctggagaaccaggcgcagggggcccaacgggcacaaccttatggcattacaagtcctggaatcttcgctagctcgcaacccggccaggggaatatacagatgatcaatccttccgtggggaccgccgttatgaactttaaagaggaggcgaaggccctgggcgtaattcagataatggtggggctcatgcatattggctttggcattgtgctgtgtctgattagcttttag

SEQ ID NO: 194656 - DNA, 804 bp, Artificial Sequence
  derived and/or modified sequence
atgatgagcagcaagcccaccagccacgccgaggtgaatgagaccatccccaacccctacccacccagcagcttcatggcccctggcttccagcagcccctgggcagcatcaacctggagaaccaggcccagggcgcccagagggcccagccctacggcatcaccagccctggcatctttgccagcagccagcccggccagggcaacatccagatgatcaaccccagcgtgggcacagctgtgatgaacttcaaggaggaggccaaggccctgggcgtcatccagatcatggtgggcctgatgcacatcggctttggaattgtgctgtgcctgatctccttctccttccgggaggtgctgggctttgccagcacagctgtgattggaggctaccccttctggggcggcctgtccttcatcatcagcggcagcctgtctgtgtctgccagcaaggagctgagccgctgcctggtgaagggcagcctgggcatgaacatcgtgagcagcatcctggccttcatcggggtcatcctgctgctggtggacatgtgcatcaacggggtggccggccaggactactgggccgtgctgagcggcaagggcatcagcgccaccctgatgatcttcagcctgctggagttctttgtggcctgtgccacagcccactttgccaaccaggccaacaccaccaccaacatgtctgtgctggtgatccccaacatgtatgagagcaaccctgtgaccccagccagcagcagcgccccaccccgctgcaacaactacagcgccaatgcccccaagtag

SEQ ID NO: 194657 - DNA, 345 bp, Artificial Sequence
  derived and/or modified sequence
atgatgagcagcaagcccaccagccacgccgaggtgaatgagaccatccccaacccctacccacccagcagcttcatggcccctggcttccagcagcccctgggcagcatcaacctggagaaccaggcccagggcgcccagagggcccagccctacggcatcaccagccctggcatctttgccagcagccagcccggccagggcaacatccagatgatcaaccccagcgtgggcacagctgtgatgaacttcaaggaggaggccaaggccctgggcgtcatccagatcatggtgggcctgatgcacatcggctttggaattgtgctgtgcctgatctccttctag

SEQ ID NO: 194658 - DNA, 1167 bp, Artificial Sequence
  derived and/or modified sequence
acacaggttggagcagagaaagaggaaacatagaggtgccaaaggaacaaagacataatgatgtcatccaagccaacaagccatgctgaagtaaatgaaaccatacccaacccttacccaccaagcagctttatggctcctggatttcaacagcctctgggttcaatcaacttagaaaaccaagctcagggtgctcagcgtgctcagccctacggcatcacatctccgggaatctttgctagcagtcaaccgggtcaaggaaatatacaaatgataaatccaagtgtgggaacagcagtaatgaactttaaagaagaagcaaaggcactaggggtgatccagatcatggttggattgatgcacattggttttggaattgttttgtgtttaatatccttctcttttagagaagtattaggttttgcctctactgctgttattggtggatacccattctggggtggcctttcttttattatctctggctctctctctgtgtcagcatccaaggagctttcccgttgtctggtgaaaggcagcctgggaatgaacattgttagttctatcttggccttcattggagtgattctgctgctggtggatatgtgcatcaatggggtagctggccaagactactgggccgtgctttctggaaaaggcatttcagccacgctgatgatcttctccctcttggagttcttcgtagcttgtgccacagcccattttgccaaccaagcaaacaccacaaccaatatgtctgtcctggttattccaaatatgtatgaaagcaaccctgtgacaccagcgtcttcttcagctcctcccagatgcaacaactactcagctaatgcccctaaatagtaaaagaaaaaggggtatcagtctaatctcatggagaaaaactacttgcaaaaacttcttaagaagatgtcttttattgtctacaatgatttctagtctttaaaaactgtgtttgagatttgtttttaggttggtcgctaatgatggctgtatctcccttcactgtctcttcctacattaccactactacatgctggcaaaggtgaaggatcagaggactgaaaaatgattctgcaactctcttaaagttagaaatgtttctgttcatattactttttccttaataaaatgtcattagaaacaaaa

SEQ ID NO: 194659 - DNA, 582 bp, Artificial Sequence
  derived and/or modified sequence
aggaaacatagaggtgccaaaggaacaaagtaagtccattgatacgttcttgcctatctctcctccaaatcaatgggcacaaactgtggctggtctacctgtgtgggttctgttctctagattggagggatgaagacaagttcttgactctatgttgaggccagttgaaaaatgagggagaataaaaccatgaacgaaacaagaaagaaacaaaacagaagaggaatgaaaaagacataatgatgtcatccaagccaacaagccatgctgaagtaaatgaaaccatacccaacccttacccaccaagcagctttatggctcctggatttcaacagcctctgggttcaatcaacttagaaaaccaagctcagggtgctcagcgtgctcagccctacggcatcacatctccgggaatctttgctagcagtcaaccgggtcaaggaaatatacaaatgataaatccaagtgtgggaacagcagtaatgaactttaaagaagaagcaaaggcactaggggtgatccagatcatggttggattgatgcacattggttttggaattgttttgtgtttaatatccttct

SEQ ID NO: 194660 - DNA, 804 bp, Artificial Sequence
  derived and/or modified sequence
atgatgagcagcaagcccaccagccacgccgaggtgaacgagaccattccaaatccctatccccccagttccttcatggcgcccggctttcagcaaccactcggcagcatcaatctcgagaaccaggcgcagggggctcagcgcgctcagccctatggaattacatcacctggcatctttgcctcaagtcaacccggacagggtaatattcagatgattaacccttcggttggtaccgctgttatgaattttaaggaagaagctaaggccctgggcgtgatccaaatcatggtcggactcatgcatatcgggtttgggattgtcctatgcctgatatctttctcatttcgggaggtccttgggtttgcatccactgcagtgattggtggctaccctttttgggggggcctctcatttatcatttctgggagcctgtccgttagtgctagcaaggaactttccaggtgcctggtcaaaggaagccttggcatgaacattgtgagttccatcctcgcctttataggtgtgatcctcctcctggtcgacatgtgtattaacggggttgccggtcaggattactgggccgtattatccggaaagggaatatctgccacactgatgattttctcgttgctcgaattcttcgtcgcatgtgcaacggcacactttgctaaccaggcaaacaccacgaccaatatgagcgtcctggtgataccgaacatgtacgagtctaatccagttactcccgcctcctcatcagcccctccacgatgcaataattacagcgccaatgcgcctaagtag

SEQ ID NO: 194661 - DNA, 345 bp, Artificial Sequence
  derived and/or modified sequence
atgatgagcagcaagcccaccagccacgccgaggtgaacgagaccatacctaacccatacccccccagctcattcatggctcctgggtttcagcagcctttgggatctatcaacctcgaaaaccaagcccaaggtgcccagagagctcagccttacgggatcacttctcccggtatttttgcttcgtcccaacctggccaaggtaacatccaaatgatcaacccgtcagtaggcacagccgtcatgaacttcaaggaagaggcaaaggctctgggtgttattcagatcatggttggactgatgcatatagggtttgggatcgtgttatgcttgatcagcttttag

SEQ ID NO: 194662 - DNA, 804 bp, Artificial Sequence
  derived and/or modified sequence
atgatgtcatctaagcctacgagccacgccgaggtcaatgaaacaatccccaatccttaccctccaagcagctttatggctcctggtttccagcagccactgggcagtatcaaccttgagaaccaggcgcagggggctcaacgggcacaaccttatgggatcacatcacccggaatttttgcctcttcccagccgggacagggcaacatacaaatgatcaacccaagtgtgggcaccgccgtgatgaattttaaggaggaagccaaggccctgggagtcatccagatcatggtgggcctgatgcacattgggttcggcatcgtgctttgcttgattagcttttcttttcgcgaggtactggggtttgcttcaaccgccgtgatcggtggttacccgttttgggggggactgtctttcatcatcagcggaagcctgtccgtatccgcaagtaaagagctcagccggtgcctcgtcaaggggtcactgggcatgaatatagtctccagcatcctggcttttatcggtgtgatattattgctcgtggacatgtgtatcaacggtgtcgccggtcaggactactgggcagtcctgtctggaaaaggcattagcgccactctcatgatctttagcctgctcgagttcttcgttgcatgtgcgactgcccatttcgcaaaccaggctaatactacaaccaacatgtccgtgctggtgatacccaacatgtacgaatcaaaccccgtcacacccgcttcatcctctgctccgccacggtgcaacaactacagcgccaacgcgcctaagtag

SEQ ID NO: 194663 - DNA, 345 bp, Artificial Sequence
  derived and/or modified sequence
atgatgtctagcaaacctacatctcatgccgaagtgaacgagactatccccaatccataccccccatccagcttcatggcccctggattccagcagcccttgggaagcatcaacctcgaaaatcaagcccaaggcgcacagcgggctcagccctacgggattacgtcccctgggatttttgctagctcccagccgggtcagggaaacatccagatgatcaacccatcagttggaacggccgtgatgaattttaaagaagaggctaaagctctgggggtaattcaaatcatggtgggattaatgcacatcgggtttggcatcgttctgtgtctcattagcttttag

SEQ ID NO: 194664 - DNA, 804 bp, Artificial Sequence
  derived and/or modified sequence
atgatgagcagtaagcccaccagtcatgcggaagtcaacgagaccatcccaaatccgtaccctcccagtagtttcatggctcctgggttccaacagcccctcggctctattaacttggagaaccaggcacagggcgcgcaacgcgctcagccatacggaattacctccccaggcatctttgcttccagccaacccggtcagggaaatattcaaatgattaacccctctgtcggaacagccgtgatgaatttcaaggaagaggccaaagcactaggggtcattcaaattatggtgggcctgatgcatattggatttggtatcgtgctatgccttatctctttttcattccgtgaagttctcggatttgcaagcaccgctgttattggcggataccccttctggggcggcttaagctttatcatcagcggttccctgtcagtgtccgcctctaaggaactaagcagatgccttgtgaagggtagtctcggaatgaatatagtatcatctatacttgcattcatcggagtgatcttattgctagtggacatgtgtatcaatggggttgctggccaggattactgggccgtcttgtctgggaagggaatttctgccacactaatgatcttctccttactggagttttttgtcgcctgcgccacggcccattttgcaaaccaggccaacacaacaacaaatatgtctgttctggtgatccctaacatgtatgaatccaaccccgtaactccagcctcaagcagtgcaccgcctagatgtaacaactattcagcgaacgccccaaagtag

SEQ ID NO: 194665 - DNA, 804 bp, Artificial Sequence
  derived and/or modified sequence
atgatgagctctaagcccaccagccacgctgaggtcaacgagacaatccctaacccatatcccccaagctcctttatggccccaggatttcagcaacccctgggatctatcaacttagaaaaccaggctcaaggtgcacagcgcgcacagccctatggtataacttcccccgggatattcgcatcaagtcaacccggacaggggaatatccaaatgatcaatccctccgtaggaaccgccgtcatgaactttaaggaagaagcaaaagctctgggagtaatccagattatggtcggtctgatgcacataggctttggcattgttttatgtcttatttccttttcctttagagaggtgctcggcttcgctagcacggccgtcattggtggctatcccttttggggcgggttgtcttttattatatcaggcagtctgtccgtcagtgccagtaaagaacttagtaggtgtttggtgaaaggtagtcttggaatgaatattgtgagctccatactcgcttttataggcgtaatactgctcctggtcgatatgtgcattaacggcgttgcgggacaagactactgggctgttctgagtggcaagggaatttctgctactttaatgattttttccctcctcgaattcttcgtcgcctgtgccaccgcccacttcgctaatcaggcgaacacgaccaccaatatgtcagttttggtcatacctaatatgtacgagtcaaatccagtcacaccagcttccagtagtgcgccgccacgatgtaacaattattctgccaatgcccccaaatag

SEQ ID NO: 194666 - DNA, 804 bp, Artificial Sequence
  derived and/or modified sequence
atgatgagcagcaagcccaccagccacgccgaggtgaacgagaccatccccaacccctacccccccagcagcttcatggcccccggcttccagcagcccctgggcagcatcaacctggagaaccaggcccagggcgcccagagagcccagccctacggcatcaccagccccggcatcttcgccagcagccagcccggccagggcaacatccagatgatcaaccccagcgtgggcaccgccgtgatgaacttcaaggaggaggccaaggccctgggcgtgatccagatcatggtgggcctgatgcacatcggcttcggcatcgtgctgtgcctgatcagcttcagcttcagagaggtgctgggcttcgccagcaccgccgtgatcggcggctaccccttctggggcggcctgagcttcatcatcagcggcagcctgagcgtgagcgccagcaaggagctgagcagatgcctggtgaagggcagcctgggcatgaacatcgtgagcagcatcctggccttcatcggcgtgatcctgctgctggtggacatgtgcatcaacggcgtggccggccaggactactgggccgtgctgagcggcaagggcatcagcgccaccctgatgatcttcagcctgctggagttcttcgtggcctgcgccaccgcccacttcgccaaccaggccaacaccaccaccaacatgagcgtgctggtgatccccaacatgtacgagagcaaccccgtgacccccgccagcagcagcgccccccccagatgcaacaactacagcgccaacgcccccaagtag

SEQ ID NO: 194667 - DNA, 345 bp, Artificial Sequence
  derived and/or modified sequence
atgatgagcagcaagcccaccagccacgccgaggtgaacgagaccatccccaacccctacccccccagcagcttcatggcccccggcttccagcagcccctgggcagcatcaacctggagaaccaggcccagggcgcccagagagcccagccctacggcatcaccagccccggcatcttcgccagcagccagcccggccagggcaacatccagatgatcaaccccagcgtgggcaccgccgtgatgaacttcaaggaggaggccaaggccctgggcgtgatccagatcatggtgggcctgatgcacatcggcttcggcatcgtgctgtgcctgatcagcttctag

SEQ ID NO: 194668 - protein, 449 aa, Artificial Sequence
  derived and/or modified sequence
MASALRPPRVPKPKGVLPSHYYESFLEKKGPCDRDYKKFWAGLQGLTIYFYNSNRDFQHVEKLNLGAFEKLTDEIPWGSSRDPGTHFSLILRDQEIKFKVETLECREMWKGFILTVVELRVPTDLTLLPGHLYMMSEVLAKEEARRALETPSCFLKVSRLEAQLLLERYPECGNLLLRPSGDGADGVSVTTRQMHNGTHVVRHYKVKREGPKYVIDVEQPFSCTSLDAVVNYFVSHTKKALVPFLLDEDYEKVLGYVEADKENGENVWVAPSAPGPGPAPCTGGPKPLSPASSQDKLPPLPPLPNQEENYVTPIGDGPAVDYENQDVASSSWPVILKPKKLPKPPAKLPKPPVGPKPVEKGFHHVAQAGLELLTSSDPPTSASQSAGITGVSHHTWPHLSSLPEPKVFNGGLGRKLPVSSAQPLFPTAGLADMTAELQKKLEKRRALEH

SEQ ID NO: 194669 - protein, 85 aa, Artificial Sequence
  derived and/or modified sequence
MLLTIETKSHYVAQAGLELLASSDPPTSASQSVGIIDMSHCTWPTLGKFLNPSKPHFSPITKGKDGNIFPTKFLSDALTELRLCT

SEQ ID NO: 194670 - protein, 74 aa, Artificial Sequence
  derived and/or modified sequence
MLLTIETKSHYVAQAGLELLASSDPPTSASQSVGIIDMSHCTWPTLGKFLNPSKPHFSPITKGKDGNIFPTKFL

SEQ ID NO: 194671 - protein, 142 aa, Artificial Sequence
  derived and/or modified sequence
MGLYHVGQAGLELLTSSDPPTSASQNAEITGVSHRAQSKAHNLQRKLRLSHKSSPPCTYTQHAGGVDSHPLTQDMCVIVNVIARPFDKCNCDIYLGLASELFVVSWVQLTVPYHWIQTLGNVILFCLDTAHRGHCDIAGHCT

SEQ ID NO: 194672 - DNA, 1350 bp, Artificial Sequence
  derived and/or modified sequence
atggcttccgccctgcggccacctcgggtgcccaaacctaaaggcgtactgccatcccactactatgaatccttcctggaaaagaaagggccctgtgaccgagattacaaaaagttttgggctggccttcagggtctcactatctacttctacaattcgaacagggatttccagcacgtcgagaagctgaacctgggcgcttttgagaaactaactgatgagattccttggggaagttcacgcgatcctgggactcatttttcactgatacttcgtgaccaagagataaagttcaaagttgagaccctggaatgccgtgagatgtggaaggggttcatcctcaccgttgttgagctgcgcgtgcccaccgatcttacgctgctcccaggccatttgtacatgatgagcgaggtcctggctaaggaggaagcacgccgcgcactcgagaccccatcatgcttcctgaaggtttcacgcctcgaggcacagctgttgctagagaggtaccctgagtgtggaaatttgcttcttcgaccgagtggcgacggcgcggatggggtgtcggtaacaacgaggcaaatgcacaacggtacacatgtggtaaggcactataaggttaagagagagggccccaaatatgtgatcgacgtggagcaacccttcagctgcacctcgctcgacgccgtggttaactacttcgtaagccacactaaaaaggccttggtacctttcctgctcgatgaggactacgagaaagtcctgggttatgtcgaagctgacaaagagaatggagagaatgtatgggttgcccctagcgctcccgggccaggaccagctccttgcaccggtggtccaaagcccctaagtccagcctccagccaggacaagctccctcctctgcccccgctgccgaatcaggaggagaactatgtcacacccataggcgacggaccagccgtggactatgaaaatcaggacgtggcatctagctcttggcctgttatcttaaaacctaaaaaacttcctaaaccacccgcaaagctacctaaaccaccggtaggccccaaacccgttgagaaaggattccaccatgtggctcaagctggccttgaactgctgacatcgtctgatccccctacgagcgcttcgcagtccgccggaatcaccggcgtgagccatcatacttggccgcacctgagctccctgcctgaaccgaaggtgtttaatggaggcctagggcgtaagttgcccgtgtcttctgcgcagcctctctttccaaccgccggccttgctgacatgaccgctgaactgcagaaaaaactggagaagaggcgggcattggaacattag

SEQ ID NO: 194673 - DNA, 1350 bp, Artificial Sequence
  derived and/or modified sequence
atggccagcgccctgcggcccccccgggtgcccaagcccaagggcgtgctgcccagccactactatgagagcttcctggagaagaagggcccctgtgaccgggactacaagaagttctgggccggcctgcagggcctgaccatctacttctacaacagcaacagagacttccagcacgtggagaagctgaacctgggcgcctttgagaagctgacagatgagatcccctggggcagcagccgggaccccggcacccacttcagcctcatcctgcgggaccaggagatcaagttcaaggtggagaccctggagtgccgggagatgtggaagggcttcatcctgactgtggtggagctgcgggtgcccacagacctgaccctgctgcccggccacctgtacatgatgtctgaggtgctggccaaggaggaggcccggcgggccctggagacccccagctgcttcctgaaggtgtcccggctggaggcccagctgctgctggagcgctacccagaatgtggcaacctgctgctgcggcccagcggagatggagcagatggagtgtctgtgaccacccggcagatgcacaacggcacccacgtggtgcgccactacaaggtgaagcgggagggccccaagtatgtgattgatgtggagcagcccttcagctgcaccagcctggatgctgtggtgaactactttgtgagccacaccaagaaggccctggtgcccttcctgctggatgaggactatgagaaggtgctgggctacgtggaggccgacaaggaaaatggagaaaatgtgtgggtggcccccagcgcccctggccctggccctgccccctgcaccggcggccccaagcccctgagccctgccagcagccaggacaagctgccccccctgccccccctgcccaaccaggaggagaactacgtgacccccatcggagatggccctgctgtggactatgagaaccaggatgtggccagcagctcctggcctgtgatcctgaagcccaagaagctgcccaagcccccagccaagctgcccaagccccctgtgggccccaagcctgtggagaagggcttccaccacgtggcccaggccggcctggagctgctgaccagcagtgacccccccaccagcgccagccagagcgctggcatcactggagtgagccaccacacctggccccacctgagcagcctgcctgagcccaaggtgttcaatggaggcctgggcaggaagctgcctgtgagcagcgcccagcccctcttccccacagctggcctggccgacatgacagctgagctgcagaagaagctggagaagaggcgggccctggagcactag

SEQ ID NO: 194674 - DNA, 1350 bp, Artificial Sequence
  derived and/or modified sequence
atggccagcgccctgcggcccccccgggtgcccaagcccaagggcgtactcccctcacactattacgaaagttttctggaaaagaagggtccgtgtgatcgggattacaagaaattttgggccggtctgcagggtctgaccatatacttttacaacagcaaccgggacttccaacatgtcgaaaaactgaacttgggtgctttcgaaaagctgacggacgagattccatggggaagctcccgtgatccaggcacacatttctctctcatcctgcgggaccaagagatcaaatttaaagtggagacacttgagtgccgggagatgtggaaggggttcattctcaccgtcgtggagttgagagtgccaacagacctaacactgctgccgggccacttatatatgatgtcggaggtgctggcaaaggaggaagcgcgccgcgctctggaaacgccctcctgtttcctgaaggtgtcacggcttgaagcccagcttcttctcgagaggtatcctgaatgcggaaatttgctcctgaggccttccggagacggcgccgatggcgtcagtgtaacaacacgacagatgcataacggtacacatgtcgtccggcattacaaggtaaagcgagaaggaccgaagtatgtaatcgacgtggaacagccatttagctgcacttcactggacgctgtggtcaattacttcgtgagtcacacaaagaaggccttggtcccatttcttctggatgaagattacgagaaggtactggggtacgtcgaagctgataaagaaaatggtgaaaacgtctgggttgccccgtccgcaccgggccccgggccagctccctgcaccggaggcccaaagcctctgtctcctgcctcctcacaagataagctacccccattgcccccactcccaaaccaggaagagaactacgtgacccccattggagacggccccgcagttgactacgaaaaccaggacgtggccagctcctcttggccagtaatcctcaaacctaagaagctccctaaacctcccgcaaaactgcccaaaccgccagtcggcccaaaaccagttgaaaagggctttcaccatgtggcacaggcaggcctcgagctattaacaagttctgatcctcctactagcgcttctcaaagtgccggtatcacgggcgtctcccaccacacatggccgcatctgtcctctctccctgaacctaaagtttttaatggtggactggggaggaaacttccggtgtcgtctgcccagcctctctttccaacggccggcctggctgatatgactgccgaattgcagaagaagcttgagaaaaggcgggcgctcgaacactag
